United States Patent Application Publication US 2020/0163878 A1 - sequence listing, part 13

SEQ ID NO: 50455 - RNA, 1410 nt, Artificial Sequence
  derived and/or modified CDS sequence (wt) from neuraminidase__InfluenzaA__ADE20951
augaauccaaaccaaaagauaauaaccauugguucggucuguaugacaauuggaauggcuaacuuaauauuacaaauuggaaacauaaucucaauauggauuagccacucaauucaacuugggaaucaaaaucagauugaaacaugcaaucaaagcgucauuacuuaugaaaacaacacuuggguaaaucagacauauguuaacaucagcaacaccaacuuugcugcuggacagucagugguuuccgugaaauuagcgggcaauuccucucucugcccuguuaguggaugggcuauauacaguaaagacaacaguauaagaaucgguuccaagggggauguguuugucauaagggaaccauucauaucaugcuccccuuuggaaugcagaaccuucuucuugacucaaggggccuugcuaaaugacaaacauuccaauggaaccauuaaagacaggagcccauaucgaacccuaaugagcuguccuauuggugaaguucccucuccauacaacucaagauuugagucagucgcuuggucagcaagugcuugucaugauggcaucaauuggcuaacaauuggaauuucugguccagacaauggggcaguggcuguguuaaaguacaacggcauaauaacagacacuaucaagaguuggagaaacaauauauugagaacacaagagucugaaugugcauguguaaaugguucuugcuuuacuguaaugaccgauggaccaagugauggacaggccucauacaagaucuucagaauagaaaagggaaagauagucaaaucagucgaaaugaaugccccuaauuaucacuaugaggaaugcuccuguuauccugauucuagugaaaucacaugugugugcagggauaacuggcauggcucgaaucgaccgugggugucuuucaaccagaaucuggaauaucagauaggauacauaugcagugggauuuucggagacaauccacgcccuaaugauaagacaggcaguugugguccaguaucgucuaauggagcaaauggaguaaaaggauuuucauucaaauacggcaaugguguuuggauagggagaacuaaaagcauuaguucaagaaacgguuuugagaugauuugggauccgaacggauggacugggacagacaauaacuucucaauaaagcaagaugucguaggaauaaaugaguggucaggauauagcgggaguuuuguucagcauccagaacuaacagggcuggauuguauaagaccuugcuucuggguugaacuaaucagagggcgacccaaagagaacacaaucuggacuagcgggagcagcauauccuuuugugguguaaacagugacacuguggguuggucuuggccagacggugcugaguugccauuuaccauugacaaguaa

SEQ ID NO: 50456 - RNA, 1410 nt, Artificial Sequence
  derived and/or modified CDS sequence (wt) from neuraminidase__InfluenzaA__ADE20961
augaauccaaaccaaaagauaauaaccauugguucggucuguaugacaauuggaauggcuaacuuaauauuacaaauuggaaacauaaucucaauauggauuagccacucaauucaacuugggaaucaaaaucagauugaaacaugcaaucaaagcgucauuacuuaugaaaacaacacuuggguaaaucagacauauguuaacaucagcaacaccaacuuugcugcuggacagucagugguauccgugaaauuagcgggcaauuccucucucugcccuguuaguggaugggcuauauacaguaaagacaacaguauaagaaucgguuccaagggggauguguuugucauaagggaaccauucauaucaugcucccccuuggaaugcagaaccuucuucuugacucaaggggccuugcuaaaugacaaacauuccaauggaaccauuaaagacaggagcccauaucgaacccuaaugagcuguccuauuggugaaguucccucuccauacaacucaagauuugagucagucgcuuggucagcaagugcuugucaugauggcaucaauuggcuaacaauuggaauuucuggcccagacaauggggcaguggcuguguuaaaguacaacgacauaauaacagacacuaucaagaguuggagaaacaauauauugagaacacaagagucugaaugugcauguguaaaugguucuugcuuuacuguaaugaccgauggaccaagugauggacaggccucauacaagaucuucagaauagaaaagggaaagauagucaaaucagucgaaaugaaugccccuaauuaucacuaugaggaaugcuccuguuauccugauucuagugaaaucacaugugugugcagggauaacuggcauggcucgaaucgaccgugggugucuuucaaccagaaucuggaauaucagauaggauacauaugcagugggauuuucggagacaauccacgcccuaaugauaagacaggcaguugugguccaguaucgucuaauggagcaaauggaguaaaaggauuuucauucaaauacggcaaugguguuuggauagggagaacuaaaagcauuaguucaagaaacgguuuugagaugauuugggauccgaacggauggacugggacagacaauaacuucucaauaaagcaagauaucguaggaauaaaugaguggucaggauauagcgggaguuuuguucagcauccagaacuaacagggcuggauuguauaagaccuugcuucuggguugaacuaaucagagggcgacccaaagagaacacaaucuggacuagcgggagcagcauauccuuuugugguguaaacagugacacuguggguuggucuuggccagacggugcugaguugccauuuaccauugacaaguaa

SEQ ID NO: 50457 - RNA, 1410 nt, Artificial Sequence; identical to SEQ ID NO: 50410
  derived and/or modified CDS sequence (wt) from neuraminidase__InfluenzaA__ADE20971

SEQ ID NO: 50458 - RNA, 1410 nt, Artificial Sequence; identical to SEQ ID NO: 50366
  derived and/or modified CDS sequence (wt) from neuraminidase__InfluenzaA__ADE20981

SEQ ID NO: 50459 - RNA, 1410 nt, Artificial Sequence
  derived and/or modified CDS sequence (wt) from neuraminidase__InfluenzaA__ADE20991
augaauccaaaccaaaagauaauaaccauugguucggucuguaugacaauuggaauggcuaacuuaauauuacaaauuggaaacauaaucucaauauggauuagccacucaauucaacuugggaaucaaaaucagauugaaacaugcaaucaaagcgucauuacuuaugaaaacaacacuuggguaaaucagacauauguuaacaucagcaacaccaacuuugcugcuggacagucagugguuuccgugaaauuagcgggcaauuccucucucugcccuguuaguggaugggcuauauacaguaaagacaacaguauaagaaucgguuccaagggggauguguuugucauaagggaaccauucauaucaugcucccccuuggaaugcagaaccuucuucuugacucaaggggccuugcuaaaugacaaacauuccaauggaaccauuaaagacaggagcccauaucgaacccuaaugagcuguccuauuggugaaguucccucuccauacaacucaagauuugagucagucgcuuggucagcaagugcuugucaugauggcaucaauuggcuaacaauuggaauuucuggcccagacaauggggcaguggcuguguuaaaguacaacggcauaauaacagacacuaucaagaguuggagaaacaauauauugagaacacaagagucugaaugugcauguguaaaugguucuugcuuuacuguaaugaccgauggaccaagugauggacaggccucauacaagaucuucagaauagaaaagggaaagauagucaaaucagucgaaaugaaugccccuaauuaucacuaugaggaaugcuccuguuauccugauucuagugaaaucacaugugugugcagggauaacuggcauggcucgaaucgaccgugggugucuuucaaccagaaucuggaauaucagauaggauacauaugcagugggauuuucggagacaauccacgcccuaaugauaagacaggcaguugugguccaguaucgucuaauggagcaaauggaguaaaaggauuuucauucaaauacggcaaugguguuuggauagggagaacuaaaagcauuaguucaagaaacgguuuugagaugauuugggauccgaacggauggacugggacagacaauaacuucucaauaaagcaagauaucguaggaauaaaugaguggucaggauauagcgggaguuuuguccagcauccagaacuaacagggcuggauuguauaagaccuugcuucuggguugaacuaaucagagggcgaccuaaagagaacacaaucuggacuagcgggagcagcauauccuuuugugguguaaacagugacacuguggguuggucuuggccagacggugcugaguugccauuuaccauugacaaguaa

SEQ ID NO: 50460 - RNA, 1410 nt, Artificial Sequence
  derived and/or modified CDS sequence (wt) from neuraminidase__InfluenzaA__ADE21001
augaauccaaaccaaaagauaauaaccauugguucggucuguaugacaauuggaauggcuaacuuaauauuacaaauuggaaacauaaucucaauauggauuagccacacaauucaacuugggaaucaaaaucagauugaaacaugcaaucaaagcgucauuacuuaugaaaacaacacuuggguaaaucagacauauguuaacaucagcaacaccaacuuugcugcuggacagucagugguuuccgugaaauuagcgggcaauuccucucucugcccuguuaguggaugggcuauauacaguaaagacaacaguauaagaaucgguuccaagggggauguguuuaucauaagggaaccauucauaucaugcucccccuuggaaugcagaaccuucuucuugacucagggggccuugcuaaaugacaaacauuccaauggaaccauuaaagacaggagcccauaucgaacccuaaugagcuguccuauuggugaaguucccucuccauacaacucaagauuugagucagucgcuuggucagcaagugccugucaugauggcaucaauuggcuaacaauuggaauuucuggcccagacaauggggcaguggcuguguuaaaguacaacggcauaauaacagacacuaucaagaguuggagaaacaauauauuaagaacacaagagucugaaugugcauguguaaaugguucuugcuuuacuguaaugaccgauggaccaagugauggacaggccucauacaagaucuucagaauagaaaagggaaagauagucaaaucagucgaaaugaaugccccuaauuaucacuaugaggaaugcuccuguuauccugauucuagugaaaucacaugugugugcagggauaacuggcauggcucgaaucgaccgugggugucuuucaaccagaaucuggaauaucagauaggauacauaugcagugggauuuucggagacaauccacgcccuaaugauaagacaggcaguugugguccaguaucgucuaauggagcaaauggaguaaaaggauuuucauucaaauacggcaaugguguuuggauagggagaacuaaaagcauuaguucaagaaacgguuuugagaugauuugggauccgaacggauggacugggacagacaauaacuucucaauaaagcaagauaucguaggaauaaaugaauggucaggauauagcgggaguuuuguucagcauccagaacuaacagggcuggauuguauaagaccuugcuucuggguugaacuaaucagagggcgacccaaagagaacacaaucuggacuagcgggagcagcauauccuuuugugguguaaacagugacacuguggguuggucuuggccagacggugcugaguugccauuuaccauugacaaguaa

SEQ ID NO: 50461 - RNA, 1410 nt, Artificial Sequence
  derived and/or modified CDS sequence (wt) from neuraminidase__InfluenzaA__ADE21011
augaauccaaaccaaaagauaauaaccauugguucggucuguaugacaauuggaauggcuaacuuaauauuacaaauuggaaacauaaucucaauauggauuagccacucaauucaacuugggaaucaaaaucagauugaaacaugcaaucaaagcgucauuacuuaugaaaacaacacuuggguaaaucagacauauguuaacaucagcaacaccaacuuugcugcuggacagucagugguuuccgugaaauuagcgggcaauuccucucucugcccuguuaguggaugggcuauauacaguaaagacaacaguauaagaaucgguuccaagggggauguguuugucauaagggaaccauucauaucaugcucccccuuggaaugcagaaccuucuucuugacucaaggggccuugcuaaaugacaaacauuccaauggaaccauuaaagacaggagcccauaucgaacccuaaugagcuguccuauuggugaaguucccucuccauacaacucaagauuugagucagucgcuuggucagcaagugcuugucaugauggcaucaauuggcugacaauuggaauuucuggcccagacaauggggcaguggcuguguuaaaguacaacggcauaauaacagacacuaucaagaguuggagaaacaauauauugagaacacaagagucugaaugugcauguguaaaugguucuugcuuuacuguaaugaccgauggaccaagugauggacaggccucauacaagaucuucagaauagaaaagggaaagauagucaaaucagucgaaaugaaugccccuaauuaucacuaugaggaaugcuccuguuauccugauucuagugaaaucacaugugugugcagggauaacuggcauggcucgaaucgaccgugggugucuuucaaccagaaucuggaauaucagauaggauacauaugcagugggauuuucggagacaauccacgcccuaaugauaagacaggcaguugugguccaguaucgucuaauggagcaaauggaguaaaaggauuuucauucaaauacggcaaugguguuuggauagggagaacuaaaagcauuaguucaagaaacgguuuugagaugauuugggauccgaacggauggacugggacagacaauaacuucucaauaaagcaagauaucguaggaauaaaugaguggucaggauauagcgggaguuuuguucagcauccagaacuaacagggcuggauuguauaagaccuugcuucuggguugaacuaaucagagggcgacccaaagagaacacaaucuggacuagcgggagcagcauauccuuuugugguguaaacagugacacuguggguuggucuuggccagacggugcugaguugccauuuaccauugacaaguaa

SEQ ID NO: 50462 - RNA, 1410 nt, Artificial Sequence; identical to SEQ ID NO: 48947
  derived and/or modified CDS sequence (wt) from neuraminidase__InfluenzaA__ADE21021

SEQ ID NO: 50463 - RNA, 1410 nt, Artificial Sequence
  derived and/or modified CDS sequence (wt) from neuraminidase__InfluenzaA__ADE21031
augaauccaaaccaaaagauaauaaccauugguucggucuguaugacaauuggaauggcuaacuuaauauuacaaauuggaaacauaaucucaauauggauuagccacucaauucaacuugggaaucaaaaucagauugaaacaugcaaucaaagcgucauuacuuaugaaaacaacacuuggguaaaucagacauauguuaacaucagcaacaccaacuuugcugcuggacagucagugguuuccgugaaauuagcgggcaauuccucucucugcccuguuaguggaugggcuauauacaguaaagacaacaguauaagaaucgguuccaagggggauguguuugucauaagggaaccauucauaucaugcucccccuuggaaugcagaaccuucuucuugacucaaggggccuugcuaaaugacaaacauuccaauggaaccauuaaagacaggagcccauaucgaacccuaaugagcuguccuauuggugaaguucccucuccauacaauucaagauuugagucagucgcuuggucagcaagugcuugucaugauggcaucaauuggcuaacaauuggaauuucuggcccagacaauggggcaguggcuguguuaaaguacaacggcauaauaacagacacugucaagaguuggagaaacaauauauugagaacacaagagucugaaugugcauguguaaaugguucuugcuuuacuguaaugaccgauggaccaagugauggacaggccucauacaagaucuucagaauagaaaagggaaagauagucaaaucagucgaaaugaaugccccuaauuaucacuaugaggaaugcuccuguuauccugauucuagugaaaucacaugugugugcagggauaacuggcauggcucgaaucgaccgugggugucuuucaaccagaaucuggaauaucagauaggauacauaugcagugggauuuucggagacaauccacgcccuaaugauaagacaggcaguugugguccaguaucgucuaauggagcaaauggaguaaaaggauuuucauucaaauacggcaaugguguuuggauagggagaacuaaaagcauuaguucaagaaacgguuuugagaugauuugggauccgaacggauggacugggacagacaauaacuucucaauaaagcaagauauaguaggaauaaaugaguggucaggauauagcgggaguuuuguucagcauccagaacuaacagggcuggauuguauaagaccuugcuucuggguugaacuaaucagagggcgacccaaagagaacacaaucuggacuagcgggagcagcauauccuuuugugguguaaacagugacacuguggguuggucuuggccagacggugcugaguugccauuuaccauugacaaguaa

SEQ ID NO: 50464 - RNA, 1410 nt, Artificial Sequence
  derived and/or modified CDS sequence (wt) from neuraminidase__InfluenzaA__ADE21041
augaauccaaaccaaaagauaauaaccauugguucggucuguaugacaauuggaauggcuaacuuaauauuacaaauuggaaacauaaucucaauauggauuagccacucaauucaacuugggaaucaaaaucagauugaaacaugcaaucaaagcgucauuacuuaugaaaacaacacuuggguaaaucagacauauguuaacaucagcaacaccaacuuugcugcuggacagucagugguuuccgugaaauuagcgggcaauuccucucucugcccuguuaguggaugggcuauauacaguaaagacaacaguauaagaaucgguuccaagggggauguguuugucauaagggaaccauucauaucaugcucccccuuggaaugcagaaccuucuucuugacucaaggggccuugcuaaaugacaaacauuccaauggaaccauuaaagacaggagcccauaucgaacccuaaugagcuguccuauuggugaaguucccucuccauacaacucaagauuugagucagucgcuuggucagcaagugcuugucaugauggcaucaauuggcuaacaauuggaauuucuggcccagacaauggggcaguggcuguguuaaaguacaacggcauaauaacagacacuaucaagaguuggagaaacaauauauugagaacacaagagucugaaugugcauguguaaaugguucuugcuuuacuguaaugaccgauggaccaagugauggacaggccucauacaagaucuucagaauagaaaagggaaagauagucaaaucaaucgaaaugaaugccccuaauuaucacuaugaggaaugcuccuguuauccugauucuagugaaaucacaugugugugcagggauaacuggcauggcucgaaucgaccgugggugucuuucaaccagaaucuggaauaucagauaggauacauaugcagugggauuuucggagacaauccacgcccuaaugauaagacaggcaguugugguccaguaucgucuaauggagcaaauggaguaaaaggauuuucauucaaauacggcaaugguguuuggauagggagaacuaaaagcauuaguucaagaaacgguuuugagaugauuugggauccgaacggauggacugggacagacaauaacuucucaauaaagcaagauaucguaggaauaaaugaguggucaggauauagcgggaguuuuguccagcauccagaacuaacagggcuggauuguauaagaccuugcuucuggguugaacuaaucagagggcgacccaaagagaacacaaucuggacuagcgggagcagcauauccuuuugugguguaaacagugacacuguggguuggucuuggccagacggugcugaguugccauuuaccauugacaaguaa

SEQ ID NO: 50465 - RNA, 1410 nt, Artificial Sequence; identical to SEQ ID NO: 50407
  derived and/or modified CDS sequence (wt) from neuraminidase__InfluenzaA__ADE21051

SEQ ID NO: 50466 - RNA, 1410 nt, Artificial Sequence
  derived and/or modified CDS sequence (wt) from neuraminidase__InfluenzaA__ADE21071
augaauccaaaccaaaagauaauaaccauugguucggucuguaugacaauuggaauggcuaacuuaauauuacaaauuggaaacauaaucucaauauggauuagccacucaauucaacuugggaaucaaaaucagauugaaacaugcaaucaaagcgucauuacuuaugaaaacaacacuuggguaaaucagacauauguuaacaucagcaacaccaacuuugcugcuggacagucagugguuuccgugaaauuagcgggcaauuccucucucugcccuguuaauggaugggcuauauacaguaaagacaacaguauaagaaucgguuccaagggggauguguuugucauaagggaaccauucauaucaugcucccccuuggaaugcagaaccuucuucuugacucaaggggccuugcuaaaugacaaacauuccaauggaaccauuaaagacaggagcccauaucgaacccuaaugagcuguccuauuggugaaguucccucuccauacaacucaagauuugagucagucgcuuggucagcaagugcuugucaugauggcaucaauuggcuaacaauuggaauuucuggcccagacaauggggcaguggcuguguuaaaguacaacggcauaauaacagacacuaucaagaguuggagaaacaauauauugagaacacaagagucugaaugugcauguguaaaugguucuugcuuuacuguaaugaccgauggaccaagugauggacaggccucauacaagaucuucagaauagaaaagggaaaaauagucaaaucagucgaaaugaaugccccuaauuaucacuaugaggaaugcuccuguuauccugauucuagugaaaucacauguguaugcagggauaacuggcauggcucgaaucgaccgugggugucuuucaaccagaaucuggaauaucagauaggauacauaugcagugggauuuucggagacaauccacgcccuaaugauaagacaggcaguugugguccaguaucgucuaauggagcaaauggaguaaaaggauuuucauucaaauacggcaaugguguuuggauagggagaacuaaaagcauuaguucaagaaacgguuuugagaugauuugggauccaaacggauggacugggacagacaauaaauucucaauaaagcaagauaucguaggaauaaaugaguggucaggauauagcgggaguuuuguucagcauccagaacuaacagggcuggauuguauaagaccuugcuucuggguugaacuaaucagagggcgacccaaagagaacacaaucuggacuagcgggagcagcauauccuuuugugguguaaacagugacacuguggguuggucuuggccagacggugcugaguugccauuuaccauugacaaguaa

SEQ ID NO: 50467 - RNA, 1413 nt, Artificial Sequence; identical to SEQ ID NO: 49227
  derived and/or modified CDS sequence (wt) from neuraminidase__InfluenzaA__ADE28752

SEQ ID NO: 50468 - RNA, 1413 nt, Artificial Sequence
  derived and/or modified CDS sequence (wt) from neuraminidase__InfluenzaA__ADE28763
augaauccaaaucaaaagauaauaaccauuggaucaaucaguauagcaaucggaauaauuagucuaauguugcaaauaggaaauauuauuucaauaugggcuagucacucaauccaaacuggaagucaaaacaacacuggaauaugcaaccaaagaaucaucacauaugaaaacagcaccugggugaaucacacauauguuaauauuaacaacacuaauguuguugcuggagaggacaaaacgucagugacauuggccggcaauucaucucuuuguucuaucaguggaugggcuauauacacaaaagacaacagcauaagaauuggcuccaaaggagauguuuuugucauaagagaaccuuucauaucauguucucacuuggaaugcagaaccuuuuuucugacccaaggcgcucuauuaaaugacaaacauucaaaugggaccguaaaggacagaaguccuuauagggccuuaaugagcuguccucuaggugaagcuccguccccauacaauucaaaguucgaaucaguugcauggucagcaagcgcaugccaugauggcaugggcugguuaacaaucggaauuucugguccagacaauggagcuguggcuguacuaaaauacaacggaauaauaacuggaaccauaaaaaguuggaaaaagcaaauauuaagaacacaagagucugaaugugucuguaugaacgggucauguuucaccauaaugaccgauggcccgaguaauaaggccgccucguacaaaauuuucaagaucgaaaaggggaagguuacuaaaucaauagaguugaaugcacccaauuuuuauuaugaggaaugcuccuguuacccagacacuggcauagugauguguguaugcagggacaacuggcaugguucaaaucgaccuugggugucuuuuaaucaaaacuuggauuaucaaauaggauacaucugcaguggaguguuuggugacaauccgcgucccgaagauggagagggcagcugcaauccagugacuguugauggagcaaacggaguaaaaggguuuucauacaaauaugguaaugguguuuggauaggaaggaccaaaaguaacagacuuagaaagggguuugagaugauuugggauccuaauggauggacaaauaccgacagugauuucucagugaaacaggauguuguagcaauaacugauuggucaggguacagcggaaguuucguccaacauccugaguuaacaggauuggacuguauaagaccuugcuucuggguugaguuagucagagggcugccuagagaaaauacaacaaucuggacuagugggagcagcauuucuuuuuguggcguuaauagugauacugcaaacuggucuuggccagacggugcugaguugccguucaccauugacaaguag

SEQ ID NO: 50469 - RNA, 1410 nt, Artificial Sequence; identical to SEQ ID NO: 49973
  derived and/or modified CDS sequence (wt) from neuraminidase__InfluenzaA__ADE28773

SEQ ID NO: 50470 - RNA, 1410 nt, Artificial Sequence; identical to SEQ ID NO: 49973
  derived and/or modified CDS sequence (wt) from neuraminidase__InfluenzaA__ADE28783

SEQ ID NO: 50471 - RNA, 1410 nt, Artificial Sequence
  derived and/or modified CDS sequence (wt) from neuraminidase__InfluenzaA__ADE28803
augaauccaaaccaaaagauaauaaccauugguucggucuguaugacaauuggaauggcuaacuuaauauuacaaauuggaaacauaaucucaauauggauuagccacucaauucaacuugggaaucaaaaucagauugaaacaugcaaucaaagcgucauuacuuaugaaaacaacacuuggguaaaucagacauauguuaacaucagcaacacuaacuuugcugcuggacagucagugguuuccgugaaauuagcgggcaauuccucucucugcccuguuaguggaugggcuauauacaguaaagacaacaguguaagaaucgguuccaagggggauguguuugucauaagggaaccauucauaucaugcucccccuuggaaugcagaaccuucuucuugacucaaggggccuugcuaaaugacaaacauuccaauggaaccauuaaagacaggagcccauaucgaacccuaaugagcuguccuauuggugaaguucccucuccauacaacucaagauuugagucagucgcuuggucagcaagugcuugucaugauggcaucaauuggcuaacaauuggaauuucuggcccagacaauggggcaguggcuguguuaaaguacaacggcguaauaacagacacuaucaagaguuggagaaacaauauauugagaacacaagagucugaaugugcauguguaaaugguucuugcuuuacuguaaugaccgauggaccaaguaauggacaggccucauacaagaucuucagaauagaaaagggaaagauagucaaaucagucgaaaugaaugccccuaauuaucacuaugaggaaugcuccuguuauccugauucuagugaaaucacaugugugugcagggauaacuggcauggcucgaaucgaccgugggugucuuucaaccagaaucuggaauaucagauaggauacauaugcagugggauuuucggagacaauccacgcccuaaugauaagacaggcaguugugguccaguaucgucuaauggagcaaauggaguaaaaggauuuucauucaaauacggcaaugguguuuggauagggagaacuaaaagcauuaguucaagaaacgguuuugagaugauuugggauccgaacggauggacugggacagacaauaacuucucaauaaagcaagauaucguaggaauaaaugaguggucaggauauagcgggaguuuuguucagcauccagaacuaacagggcuggauuguauaagaccuugcuucuggguugaacuaaucagagggcgacccaaagagaacacaaucuggacuagcgggagcagcauauccuuuugugguguaaacagugacacuguggguuggucuuggccagacggugcugaguugccauuuaccauugacaaguaa

SEQ ID NO: 50472 - RNA, 1410 nt, Artificial Sequence; identical to SEQ ID NO: 48750
  derived and/or modified CDS sequence (wt) from neuraminidase__InfluenzaA__ADE28813

SEQ ID NO: 50473 - RNA, 1410 nt, Artificial Sequence; identical to SEQ ID NO: 48750
  derived and/or modified CDS sequence (wt) from neuraminidase__InfluenzaA__ADE28823

SEQ ID NO: 50474 - RNA, 1410 nt, Artificial Sequence
  derived and/or modified CDS sequence (wt) from neuraminidase__InfluenzaA__ADE28843
augaauccaaaccaaaagauaauaaccauugguucggucuguaugacaauuggaauggcuaacuuaauauuacaaauuggaaacauaaucucaauauggauuagccacucaauucaacuugggaaucaaaaucagauugaaacaugcaaucaaagcgucauuacuuaugaaaacaacacuuggguaaaucagacauauguuaacaucagcaacaccaacuuugcugcuggacagucagugguuuccgugaaauuagcgggcaauuccucucucugcccuguuaguggaugggcuauauacaguaaagacaacaguguaagaaucgguuccaagggggauguguuugucauaagggaaccauucauaucaugcucccccuuggaaugcagaaccuucuucuugacucaaggggccuugcuaaaugacaaacauuccaauggaaccauuaaagacaggagcccauaucgaacccuaaugagcuguccuguuggugaaguucccucuccauacaacucaagauuugagucagucgcuuggucagcaagugcuugucaugauggcaucaauuggcuaacaauuggaauuucuggcccagacaauggggcaguggcuguguuaaaguacaacggcauaauaacagacacuaucaagaguuggagaaacaauauauugagaacacaagagucugaaugugcauguguaaaugguucuugcuuuacuguaaugaccgauggaccaaguaauggacaggccucauacaagaucuucagaauagaaaagggaaagauagucaaaucagucgaaaugaaugccccuaauuaucacuaugaggaaugcuccuguuauccugauucuagugaaaucacaugugugugcagggauaauuggcauggcucgaaucgaccgugggugucuuucaaccagaaucuggaauaucagauaggauacauaugcagugggauuuucggagacaauccacgcccuaaugauaagacaggcaguugugguccaguaucgucuaauggagcaaauggaguaaaaggauuuucauucaaauacggcaaugguguuuggauagggagaacuaaaagcauuaguucaagaaacgguuuugagaugauuugggauccgaacggauggacugggacagacaauaacuucucaauaaagcaagauaucguaggaauaaaugaguggucaggauauagcgggaguuuuguucagcauccagaacuaacagggcuggauuguauaagaccuugcuucuggguugaacuaaucagagggcgacccaaagagaacacaaucuggacuagcgggagcagcauauccuuuugugguguaaacagugacacuguggguuggucuuggccagacggugcugaguugccauuuaccauugacaaguaa

SEQ ID NO: 50475 - RNA, 1410 nt, Artificial Sequence
  derived and/or modified CDS sequence (wt) from neuraminidase__InfluenzaA__ADE28853
augaauccaaaccaaaagauaauaaccauuguuucggucuguaugacaauuggaauggcuaacuuaauauuacaaauuggaaacauaaucucaauauggauuagccacucaauucaacuugggaaucaaaaucagauugaaacaugcaaucaaagcgucauuacuuaugaaaacaacacuuggguaaaucagacauauguuaacaucagcaacaccaacuuugcugcuggacagucagugguuuccgugaaauuagcgggcaauuccucucucugcccuguuaguggaugggcuauauacaguaaagacaacaguguaagaaucgguuccaagggggauguguuugucauaagggaaccauucauaucaugcucccccuuggaaugcagaaccuucuucuugacucaaggggccuugcuaaaugacaaacauuccaauggaaccauuaaagacaggagcccauaucgaacccuaaugagcuguccuauuggugaaguucccucuccauacaacucaagauuugagucagucgcuuggucagcaagugcuugucaugauggcaucaauuggcuaacaauuggaauuucuggcccagacaauggggcaguggcuguguuaaaguacaacggcauaauaacagacacuaucaagaguuggagaaacaauauauugagaacacaagagucugaaugugcauguguaaaugguucuugcuuuacuguaaugaccgauggaccaaguaauggacaggccucauacaagaucuucagaauagaaaagggaaagauagucaaaucagucgaaaugaaugccccuaauuaucacuaugaggaaugcuccuguuauccugauucuagugaaaucacaugugugugcagggauaacuggcauggcucgaaucgaccgugggugucuuucaaccagaaucuggaauaucagauaggauacauaugcagugggauuuucggagacaauccacgcccuaaugauaagacaggcaguugugguccaguaucgucuaauggagcaaauggaguaaaaggauuuucauucaaauacggcaaugguguuuggauagggagaacuaaaagcauuaguucaagaaacgguuuugagaugauuugggauccgaacggauggacugggacagacaauaacuucucaauaaagcaagauaucguaggaauaaaugaguggucaggauauagcgggaguuuuguucagcauccagaacuaacagggcuggauuguauaagaccuugcuucuggguugaacuaaucagagggcgacccaaagagaacacaaucuggacuagcgggagcagcauauccuuuugugguguaaacagugacacuguggguuggucuuggccagacggugcugaguugccauuuaccauugacaaguaa

SEQ ID NO: 50476 - RNA, 1410 nt, Artificial Sequence; identical to SEQ ID NO: 50474
  derived and/or modified CDS sequence (wt) from neuraminidase__InfluenzaA__ADE28884

SEQ ID NO: 50477 - RNA, 1410 nt, Artificial Sequence
  derived and/or modified CDS sequence (wt) from neuraminidase__InfluenzaA__ADE28894
augaauccaaaccaaaagauaauaaccauugguucggucuguaugacaauuggaauggcuaacuuaauauuacaaauuggaaacauaaucucaauauggauuagccacucaguucaacuugggaaucaaaaucagauugaaacaugcaaucaaagcgucauuacuuaugaaaacaacacuuggguaaaucagacauauguuaacaucagcaacaccaacuuugcugcuggacagucagugguuuccgugaaauuagcgggcaauuccucucucugcccuguuaguggaugggcuauauacaguaaagacaacaguguaagaaucgguuccaagggggauguguuugucauaagggaaccauucauaucaugcucccccuuggaaugcagaaccuucuucuugacucaaggggccuugcuaaaugacaaacauuccaauggaaccauuaaagacaggagcccauaucgaacccuaaugagcuguccuauuggugaaguucccucuccauacaacucaagauuugagucagucgcuuggucagcaagugcuugucaugauggcaucaauuggcuaacaauuggaauuucuggcccagacaauggggcaguggcuguguuaaaguacaacggcauaauaacagacacuaucaagaguuggagaaacaauauauugagaacacaagagucugaaugugcauguguaaaugguucuugcuuuacuguaaugaccgauggaccaaguaauggacaggccucauacaagaucuucagaauagaaaagggaaagauagucaaaucagucgaaaugaaugccccuaauuaucacuaugaggaaugcuccuguuauccugauucuagugaaaucacaugugugugcagggauaacuggcauggcucgaaucgaccgugggugucuuucaaccagaaucuggaauaucaaauaggauacauaugcagugggauuuucggagacaauccacgcccuaaugauaagacaggcaguugugguccaguaucgucuaauggagcaaauggaguaaaaggauuuucauucaaauacggcaaugguguuuggauagggagaacuaaaagcauuaguucaagaaacgguuuugagaugauuugggauccgaacggauggacugggacagacaauaacuucucaauaaagcaagauaucguaggaauaaaugaguggucaggauauagcgggaguuuuguucagcauccagaacuaacagggcuggauuguauaagaccuugcuucuggguugaacuaaucagagggcgacccaaagagaacacaaucuggacuagcgggagcagcauauccuuuugugguguaaacagugacacuguggguuggucuuggccagacggugcugaguugccauuuaccauugacaaguaa

SEQ ID NO: 50478 - RNA, 1410 nt, Artificial Sequence
  derived and/or modified CDS sequence (wt) from neuraminidase__InfluenzaA__ADE28904
augaauccaaaccaaaagauaauaaccauugguucggucuguaugacaauuggaauggcuaacuuaauauuacaaauuggaaacauaaucucaauauggauuagccacucaauucaacuugggaaucaaaaucagauugaaacaugcaaucaaagcgucauuacuuaugaaaacaacacuuggguaaaucagacauauguuaacaucagcaacaccaacuuugcugcuggacagucagugguuuccgugaaauuagcgggcaauuccucucucugcccuguuaguggaugggcuauauacaguaaagacaacaguauaagaaucgguuccaagggggauguguuugucauaagggaaccauucauaucaugcucccccuuggaaugcagaaccuucuucuugacucaaggggccuugcuaaaugacaaacauuccaauggaaccauuaaagacaggagcccauaucgaacccuaaugagcuguccuauuggugaaguucccucuccauacaacucaagauuugagucagucgcuuggucagcaagugcuugucaugauggcaucaauuggcuaacaauuggaauuucuggcccagacaauggggcaguggcuguguuaaaguacaacggcauaauaacagacacuaucaagaguuggagaaacaauauauugagaacacaagagucugaaugugcauguguaaaugguucuugcuuuacuguaaugaccgauggaccaagugauggacaggccucauacaagaucuucagaauagaaaagggaaagauagucaaaucagucgaaaugaaugccccuaauuaucacuaugaggaaugcuccuguuauccugauucuagugaaaucacaugugugugcagggauaacuggcauggcucgaaucgaccgugggugucuuucaaccagaaucuggaauaucagauaggauacauaugcagugggauuuucggagacaauccacgcccuaaugauaagacaggcaguugugguccaguaucgucuaauggagcaaauggaguaaaaggauuuucauucaaauacggcaaugguguuuggauagggagaacuaaaagcauuaguucaagaaacgguuuugagaugauuugggauccgaacggauggauugggacagacaauaacuucucaauaaagcaagauaucguaggaauaaaugaguggucaggauauagcgggaguuuuguucagcauccagaacuaacagggcuggauuguauaagaccuugcuucuggguugaacuaaucagagggcgacccaaagagaacacaaucuggacuagcgggagcagcauauccuuuugugguguaaacagugacacuguggguuggucuuggccagacggugcugaguugccguuuaccauugacaaguaa

SEQ ID NO: 50479 - RNA, 1410 nt, Artificial Sequence
  derived and/or modified CDS sequence (wt) from neuraminidase__InfluenzaA__ADE28914
augaauccaaaccaaaagauaauaaccauugguucggucuguaugacaauuggaauggcuaacuuaauauuacaaauuggaaacauaaucucaauauggauuagccacucaauucaacuugggaaucaaaaucagauugaaacaugcaaucaaagcgucauuacuuaugaaaacaacacuuggguaaaucagacauauguuaacaucagcaacaccaacuuugcugcuggacagucagugguuuccgugaaauuagcgggcaauuccucucucugcccuguuaguggaugggcuauauacaguaaagacaacaguauaagaaucgguuccaagggggauguguuugucauaagggaaccauucauaucaugcucccccuuggaaugcagaaccuucuucuugacucaaggggccuugcuaaaugacaaacauuccaauggaaccauuaaagacaggagcccauaucgaacccuaaugagcuguccuauuggugaaguucccucuccauacaacucaagauuugagucagucgcuuggucagcaagugcuugucaugauggcaucaauuggcuaacaauuggaauuucuggcccagacaauggggcaguggcuguguuaaaguacaacggcauaauaacagacacuaucaagaguuggagaaacaauauauugagaacacaagagucugaaugugcauguguaaaugguucuugcuuuacuguaaugaccgauggaccaagugauggacaggccucauacaagaucuucagaauagaaaagggaaagauagucaaaucagucgaaaugaaugccccuaauuaucacuaugaggaaugcuccuguuauccugauucuagugaaaucacaugugugugcagggauaacuggcauggcucgaaucgaccgugggugucuuucaaccagaaucuggaauaucagauaggauacauaugcagugggauuuucggagacaauccacgcccuaaugauaagacagggaguugugguccaguaucgucuaauggagcaaauggaguaaaaggauuuucauucaaauacggcaaugguguuuggauagggagaacuaaaagcauuaguucaagaaacgguuuugagaugauuugggauccgaacggauggacugggacagacaauaacuucucaauaaagcaagauaucguaggaauaaaugaguggucaggauauagcgggaguuuuguucagcauccagaacuaacagggcuggauuguauaagaccuugcuucuggguugaacuaaucagagggcgacccaaagagaacacaaucuggacuagcgggagcagcauauccuuuugugguguaaacagugacacuguggguuggucuuggccagacggugcugaguugccauuuaccauugacaaguaa

SEQ ID NO: 50480 - RNA, 1410 nt, Artificial Sequence; identical to SEQ ID NO: 49794
  derived and/or modified CDS sequence (wt) from neuraminidase__InfluenzaA__ADE28924

SEQ ID NO: 50481 - RNA, 1410 nt, Artificial Sequence
  derived and/or modified CDS sequence (wt) from neuraminidase__InfluenzaA__ADE28934
augaauccaaaccaaaagauaauaaccauugguucggucuguaugacaauuggaauggcuaacuuaauauuacaaauuggaaacauaaucucaauauggauuagccacucaauucaacuugggaaucaaaaucagauugaaacaugcaaucaaagcgucauuacuuaugaaaacaacacuuggguaaaucagacauauguuaacaucagcaacaccaacuuugcugcuggacagucagugguuuccgugaaauuagcgggcaauuccucucucugcccuguuaguggaugggcuauauacaguaaagacaacaguauaagaaucgguuccaagggggauguguuugucauaagggaaccauucauaucaugcucccccuuggaaugcagaaccuucuucuugacucaaggggccuugcuaaaugacaaacauuccaauggaaccauuaaagacaggagcccauaucgaacccuaaugagcuguccuauuggugaaguucccucuccauacaacucaagauuugagucagucgcuuggucagcaagugcuugucaugauggcaucaauuggcuaacaauuggaauuucuggcccagacaauggggcaguggcuguguuaaaguacaacggcauaauaacagacacuaucaagaguuggagaaacaauauauugagaacacaagagucugaaugugcauguauaaaugguucuugcuuuacuguaaugaccgauggaccaagugauggacaggccucauacaagaucuucagaauagaaaagggaaagauagucaaaucagucgaaaugaaugccccuaauuaucacuaugaggaaugcuccuguuauccugauucuagugaaaucacaugugugugcagggauaacuggcauggcucgaaucgaccgugggugucuuucaaccagaaucuggaauaucagauaggauacauaugcagugggauuuucggagacaauccacgcccuaaugauaagacaggcaguugugguccaguaucgucuaauggagcaaauggaguaaaaggauuuucauucaaauacggcaaugguguuuggauagggagaacuaaaagcauuaguucaagaaacgguuuugagaugauuugggauccgaacggauggacugggacagacaauaacuucucaauaaagcaagauaucguaggaauaaaugaauggucaggauauagcgggaguuuuguucagcauccagaacuaacagggcuggauuguauaagaccuugcuucuggguugaacuaaucagagggcgacccaaagagaacacaaucuggacuagcgggagcagcauauccuuuugugguguaaacagugacacuguggguuggucuuggccagacggugcugaguugccauuuaccauugacaaguaa

SEQ ID NO: 50482 - RNA, 1410 nt, Artificial Sequence
  derived and/or modified CDS sequence (wt) from neuraminidase__InfluenzaA__ADE28954
augaauccaaaccaaaagauaauaaccauugguucggucuguaugacaauuggaauggcuaacuuaauauuacaaauuggaaacauaaucucaauauggauuagccacucaauucaacuugggaaucaaaaucagauugaaacaugcaaucaaagcgucauuacuuaugaaaacaacacuuggguaaaucagacauauguuaacaucagcaacaccaacuuugcugcuggacagucagugguuuccgugaaauuagcgggcaauuccucucucugcccuguuaguggaugggcuauauacaguaaagacaacaguauaagaaucgguuccaagggggauguguuugucauaagggaaccauucauaucaugcucccccuuggaaugcagaaccuucuucuugacucaaggggccuugcuaaaugacaaacauuccaauggaaccauuaaagacaggagcccauaucgaacccuaaugagcuguccuauuggugaaguucccucuccauacaacucaagauuugagucagucgcuuggucagcaagugcuugucaugauggcaucaauuggcuaacaauuggaauuucuggcccagacaauggggcaguggcuguguuaaaguacaacggcauaauaacagacacuaucaagaguuggagaaacaauauauugagaacacaagagucugaaugugcauguguaaaugguucuugcuuuacuguaaugaccgauggaccaagugauggacaggccucauacaagaucuucagaauagaaaagggaaagauagucaaaucagucgaaaugaaugccccuaauuaucacuaugaggaaugcuccuguuauccugauucuagugaaaucacaugcguaugcagagauaauuggcauggcucgaaucgaccgugggugucuuucaaccagaaucuggaauaucagauaggauacauaugcaguggaauuuucggagacaauccacgcccuaaugauaagacaggcaguugugguccaguaucgucuaauggagcaaauggaguaaaaggauuuucauucaaauacggcaaugguguuuggauagggagaacuaaaagcauuaguucaagaaacgguuuugagaugauuugggauccgaacggauggacugggacagacaauaacuucucaauaaagcaagauaucguaggaauaaaugaguggucaggauauagcgggaguuuuguucagcauccagaacuaacagggcuggauuguauaagaccuugcuucuggguugaacuaaucagagggcgacccaaagagaacacaaucuggacuagcgggagcagcauauccuuuugugguguaaacagugacacuguggguuggucuuggccagacggugcugaguugccauuuaccauugacaaguaa

SEQ ID NO: 50483 - RNA, 1410 nt, Artificial Sequence
  derived and/or modified CDS sequence (wt) from neuraminidase__InfluenzaA__ADE28964
augaauccaaaccaaaagauaauaaccauugguucggucuguaugacaauuggaauggcuaacuuaauauuacaaauuggaaacauaaucucaauauggauuagccacucaauucaacuugggaaucaaaaucagauugaaacaugcaaucaaagcgucauuacuuaugaaaacaacacuuggguaaaucagacauauguuaacaucagcaacaucaacuuugcugcuggacagucagugguuuccgugaaauuagcgggcaauuccucucucugcccuguuaguggaugggcuauauacaguaaagacaacaguauaagaaucgguuccaagggggauguguuugucauaagggaaccauucauaucaugcucccccuuggaaugcagaaccuucuucuugacucaaggggccuugcuaaaugacaaacauuccaauggaaccauuaaagacaggagcccauaucgaacccuaaugagcuguccuauuggugaaguucccucuccauacaacucaagauuugagucagucgcuuggucagcaagugcuugucaugauggcaucaauuggcuaacaauuggaauuucuggcccagacaauggggcaguggcuguguuaaaguacaacggcauaauaacagacacuaucaagaguuggagaaacaauauauugagaacacaagagucugaaugugcauguguaaaugguucuugcuuuacuguaaugaccgauggaccaagugauggacaggccucauacaagaucuucagaauagaaaagggaaagauagucaaaucagucgaaaugaaugccccuaauuaucacuaugaggaaugcuccuguuauccugauucuagugaaaucacaugugugugcagggauaacuggcauggcucgaaucgaccgugggugucuuucaaccagaaucuggaauaucagauaggauacauaugcagugggauuuucggagacaauccacgcccuaaugauaagacaggcaguugugguccaguaucgucuaauggagcaaauggaguaaaaggauuuucauucaaauacggcaaugguguuuggauagggagaacuaaaagcauuaguucaagaaacgguuuugagaugauuugggauccgaacggauggacugggacagacaauaauuucucaauaaagcaagauaucguaggaauaaaugaguggucaggauauagcgggaguuuuguccagcauccagaacuaacagggcuggauuguauaagaccuugcuucuggguugaacuaaucagagggcgacccaaagagaacacaaucuggacuagcgggagcagcauauccuuuugugguguaaacagugacacuguggguuggucuuggccagacggugcugaguugccauuuaccauugacaaguaa

SEQ ID NO: 50484 - RNA, 1410 nt, Artificial Sequence; identical to SEQ ID NO: 50346
  derived and/or modified CDS sequence (wt) from neuraminidase__InfluenzaA__ADE28974

SEQ ID NO: 50485 - RNA, 1410 nt, Artificial Sequence
  derived and/or modified CDS sequence (wt) from neuraminidase__InfluenzaA__ADE29004
augaauccaaaccaaaagauaauaaccauugguucggucuguaugacaauuggauuggcuaacuuaauauuacaaauuggaaacauaaucucaauauggauuagccacucaauucaacuugggaaucaaaaucagauugaaacaugcaaucaaagcgucauuacuuaugaaaacaacacuuggguaaaucagacauauguuaacaucagcaacaccaacuuugcugcuggacagucagugguuuccgugaaauuagcgggcaauuccucucucugcccuguuaguggaugggcuauauacaguaaagacaacaguguaagaauugguuccaagggggauguguuugucauaagggaaccauucauaucaugcucccccuuggaaugcagaaccuucuucuugacucaaggggccuugcuaaaugacaaacauuccaauggaaccauuaaagacaggagcccauaucgaacccuaaugagcuguccuauuggugaaguucccucuccauacaacucaagauuugagucagucgcuuggucagcaagugcuugucaugauggcaucaauuggcuaacaauuggaauuucuggcccagacaauggggcaguggcuguguuaaaguacaacggcauaauaacagacacuaucaagaguuggagaaacaauauauugagaacacaagagucugaaugugcauguguaaaugguucuugcuuuacuguaaugaccgauggaccaagugauggacaggccucauacaagaucuucagaauagaaaagggaaagauagucaaaucagucgaaaugaaugccccuaauuaucacuaugaggaaugcuccuguuauccugauucuagugaaaucacaugugugugcagggauaacuggcauggcucgaaucgaccgugggugucuuucaaccagaaucuggaauaucggauaggauacauaugcagugggauuuucggagacaauccacgcccuaaugauaagacaggcaguugugguccaguaucgucuaauggagcaaauggaguaaaaggauuuucauucaaauacggcaaugguguuuggauagggagaacuaaaagcauuaguucaagaaacgguuuugagaugauuugggauccgaacggauggacugggacagacaaaaacuucucaauaaagcaagauaucguaggaauaaaugaguggucaggauauagcgggaguuuuguucagcauccagaacuaacagggcuggauuguauaagaccuugcuucuggguugaacuaaucagagggcgacccaaagagaacacaaucuggacuagcgggagcagcauauccuuuugugguguaaacagugacacuguggguuggucuuggccagacggugcugaguugccauuuaccauugacaaguaa

SEQ ID NO: 50486 - RNA, 1410 nt, Artificial Sequence
  derived and/or modified CDS sequence (wt) from neuraminidase__InfluenzaA__ADE29014
augaauccaaaccaaaagauaauaaccauugguucggucuguaugacaauuggaauggcuaacuuaauauuacaaauuggaaacauaaucucaauauggauuagccacucaauucaacuugggaaucaaaaucagauugaaacaugcaaucaaagcgucauuacuuaugaaaacaacacuuggguaaaccagacauauguuaacaucagcaacaccaacuuugcugcuggacagucagugguuuccgugaaauuagcgggcaauuccucucucugcccuguuaguggaugggcuauauacaguaaagacaacaguauaagaaucgguuccaagggggauguguuugucauaagggaaccauucauaucaugcucccccuuggaaugcagaaccuucuucuugacucaaggggccuugcuaaaugacaaacauuccaauggaaccauuaaagacaggagcccauaucgaacccuaaugagcuguccuauuggugaaguucccucuccauacaacucaagauuugagucagucgcuuggucagcaagugcuugucaugauggcaucaauuggcuaacaauuggaauuucuggcccagacaauggggcaguggcuguguuaaaguacaacggcauaauaacagacacuaucaagaguuggagaaacaauauauugagaacacaagagucugaaugugcauguguaaaugguucuugcuuuacuguaaugaccgauggaccaagugauggacaggccucauacaagaucuucagaauagaaaagggaaagauagucaaaucagucgaaaugaaugccccuaauuaucacuaugaggaaugcuccuguuauccugauucuagugaaaucacaugugugugcagggauaacuggcauggcucgaaucgaccgugggugucuuucaaccagaaucuggaauaucagauaggauacauaugcagugggauuuucggagacaauccacgcccuaaugauaagacaggcaguugugguccaguaucgucuaauggagcaaauggaguaaaaggauuuucauucaaauacggcaaugguguuuggauagggagaacuaaaagcauuaguucaagaaacgguuuugagaugauuugggauccgaacggauggacugggacagacaauaacuucucaauaaagcaagauaucguaggaauaaaugaauggucaggauauagcgggaguuuuguucagcauccagaacuaacagggcuggauuguauaagaccuugcuucuggguugaacuaaucagagggcgacccaaagagaacacaaucuggacuagcgggagcagcauauccuuuugugguguaaacagugacacuguggguuggucuuggccagacggugcugaguugccauuuaccauugacaaguaa

SEQ ID NO: 50487 - RNA, 1410 nt, Artificial Sequence
  derived and/or modified CDS sequence (wt) from neuraminidase__InfluenzaA__ADE29024
augaauccaaaccaaaagauaauaaccauugguucggucuguaugacaauuggaauggcuaacuuaauauuacaaauuggaaacauaaucucaauauggauuagccacucaauucaacuugggaaucaaaaucagauugaaacaugcaaucaaagcgucauuacuuaugaaaacaacacuuggguaaaucagacauauguuaacaucagcaacaccaacuuugcugcuggacagucagugguuuccgugaaauuagcgggcaauuccucucucugcccuguuaguggaugggcuauauacaguaaagacaacaguauaagaaucgguuccaagggggauguguuugucauaagggaaccauucauaucaugcucccccuuggaaugcagaaccuucuuccugacucaaggggccuugcuaaaugacaaacauuccaauggaaccauuaaagacaggagcccauaucgaacccuaaugagcuguccuauuggugaaguucccucuccauacaacucaagauuugagucagucgcuuggucagcaagugcuugucaugauggcaucaauuggcuaacaauuggaauuucuggcccagacaauggggcaguggcuguguuaaaguacaacggcauaauaacagacacuaucaagaguuggaaaaacaauauauugagaacacaagagucugaaugugcauguguaaaugguucuugcuuuacuguaaugaccgauggaccaagugauggacaggccucauacaagaucuucagaauagaaaagggaaagauagucaaaucagucgaaaugaaugccccuaauuaucacuaugaggaaugcuccuguuauccugauucuagugaaaucacaugugugugcagggauaacuggcauggcucgaaucgaccgugggugucuuucaaccagaaucuggaauaucagauaggauacauaugcagugggauuuucggagacaauccacgcccuaaugauaagacaggcaguugugguccagugucgucuaauggagcaaauggaguaaaaggauuuucauucaaauacggcaaugguguuuggauagggagaacuaaaagcauuaguucaagaaacgguuuugagaugauuugggauccgaacggauggaaugggacagacaauaacuucucaauaaagcaagauaucguaggaauaaaugaauggucaggauauagcgggaguuuuguucagcauccagaacuaacagggcuggauuguauaagaccuugcuucuggguugaacuaaucagagggcgacccaaagagaacacaaucuggacuagcgggagcagcauauccuuuugugguguaaacagugacacuguggguuggucuuggccagacggugcugaguugccauuuaccauugacaaguaa

SEQ ID NO: 50488 - RNA, 1410 nt, Artificial Sequence
  derived and/or modified CDS sequence (wt) from neuraminidase__InfluenzaA__ADE29034
augaauccaaaccaaaagauaauaaccauugguucggucuguaugacaauuggaauggcuaacuuaauauuacaaauuggaaacauaaucucaauauggauuagccacucaauucaacuugggaaucaaaaucagauugaaacaugcaaucaaagcgucauuacuuaugaaaacaacacuuggguaaaucagacauauguuaacaucagcaacaccaacuuugcugcuggacagucagugguuuccgugaaauuagcgggcaauuccucucucugcccuguuaguggaugggcuauauacaguaaagacaacaguauaagaaucgguuccaagggggauguguuugucauaagggaaccauucauaucaugcucccccuuggaaugcagaaccuucuucuugacucaaggggccuugcuaaaugacaaacauuccaauggaaccauuaaagacaggagcccauaucgaacccuaaugagcuguccuauuggcgaaguucccucuccauacaacucaagauuugagucagucgcuuggucagcaagugcuugucaugauggcaucaauuggcuaacaauuggaauuucuggcccagacaauggggcaguggcuguguuaaaguacaacggcauaauaacagacacuaucaagaguuggagaaacaauauauugagaacacaagagucugaaugugcauguguaaaugguucuugcuuuacuguaaugaccgauggaccaagugauggacaggccucauacaagaucuucagaauagaaaagggaaagauagucaaaucagucgaaaugaaugccccuaauuaucacuaugaggaaugcuccuguuauccugauucuagugaaaucacaugugugugcagggauaacuggcauggcucgaaucgaccgugggugucuuucaaccagaaucuggaauaucagauaggauacauaugcagugggauuuucggagacaauccacgcccuaaugauaagacaggcaguugugguccaguaucgucuaauggagcaaauggaguaaaaggauuuucauucaaauacggcaaugguguuuggauagggagaacuaaaagcauuaguucaagaaacgguuuugagaugauuugggauccgaacggauggacugggacagacaauaacuucucaauaaagcaagauaucguaggaauaaaugaauggucaggauauagcgggaguuuuguucagcauccagaacuaacagggcuggauuguauaagaccuugcuucuggguugaacuaaucagagggcgacccaaagagaacacaaucuggacuagugggagcagcauauccuuuugugguguaaacagugacacuguggguuggucuuggccagacggugcugaguugccauuuaccauugacaaguaa

SEQ ID NO: 50489 - RNA, 1410 nt, Artificial Sequence; identical to SEQ ID NO: 49543
  derived and/or modified CDS sequence (wt) from neuraminidase__InfluenzaA__ADE29044

SEQ ID NO: 50490 - RNA, 1410 nt, Artificial Sequence; identical to SEQ ID NO: 50488
  derived and/or modified CDS sequence (wt) from neuraminidase__InfluenzaA__ADE29054

SEQ ID NO: 50491 - RNA, 1410 nt, Artificial Sequence
  derived and/or modified CDS sequence (wt) from neuraminidase__InfluenzaA__ADE29064
augaauccaaaccaaaagauaauaaccauugguucggucuguaugacaauuggaauggcuaacuuaauauuacaaauuggaaacauaaucucaauauggauuagccacucaauucaacuugggaaucaaaaucagauugaaacaugcaaucaaagcgucauuacuuaugaaaacaacacuuggguaaaucagacauauguuaacaucagcaacaccaacuuugcugcuggacagucagugguuuccgugaaauuagcgggcaauuccucucucugcccuguuaguggaugggcuauauacaguaaagacaacaguauaagaaucgguuccaagggggauguguuugucauaagggaaccauucauaucaugcucccccuuggaaugcagaaccuucuucuugacucaaggggccuugcuaaaugacaaacauuccaauggaaccauuaaagacaggagcccauaucgaacccuaaugagcuguccuauuggugaaguucccucuccauacaacucaagauuugagucagucgcuuggucagcaagugcuugucaugauggcaucaauuggcuaacaauuggaauuucuggcccagacaauggggcaguggcuguguuaaaguacaacggcauaauaacagacacuaucaagaguuggagaaacaauauauugagaacacaagagucugaaugugcauguguaaaugguucuugcuuuacuguaaugaccgauggaccaagugauggacaggccucauacaagaucuucagaauagaaaagggaaagauagucaaaucagucgaaaugaaugccccuaauuaucacuaugaagaaugcuccuguuacccugauucuagugaaaucacaugugugugcagggauaacuggcauggcucgaaucgaccgugggugucuuucaaccagaaucuggaauaucagauaggauacauaugcagugggauuuucggagacaauccacgcccuaaugauaagaaaggcaguugugguccaguaucgucuaauggggcaaauggaguaaaaggauuuucauucaaauacggcaaugguguuuggauagggagaacuaaaagcauuaguucaagaaacgguuuugagaugauuugggauccgaacggauggacugggacagacaauaacuucucaauaaagcaagauaucguaggaauaaaugaauggucaggauauagcgggaguuuuguucagcauccagaacuaacagggcuggauuguauaagaccuugcuucuggguugaacuaaucagagggcgacccaaagagaacacaaucuggacuagcgggagcagcauauccuuuugugguguaaacagugacacuguggguuggucuuggccagacggugcugaguugccauuuaccauugacaaguaa

SEQ ID NO: 50492 - RNA, 1410 nt, Artificial Sequence
  derived and/or modified CDS sequence (wt) from neuraminidase__InfluenzaA__ADE29087
augaauccaaaccaaaagauaauaaccauugguucggucuguaugacaauuggaauggcuaacuuaauauuacaaauuggaaacauaaucucaauauggauuagccacucaauucaacuugggaaucaaaaucagauugaaacaugcaaucaaagcgucauuacuuaugaaaacaacacuuggguaaaucagacauauguuaacaucagcaacaccaacuuugcugcuggacagucagugguuuccgugaaauuagcgggcaauuccucucucugcccuguuaguggaugggcuauauacaguaaagacaacaguguaagaaucgguuccaagggggauguguuugucauaagggaaccauucauaucaugcucccccuuggaaugcaaaaccuucuucuugacucaaggggccuugcuaaaugacaaacauuccaauggaaccauuaaagacaggagcccauaucgaacccuaaugagcuguccuauuggugaaguucccucuccauacaacucaagauuugagucagucgcuuggucagcaagugcuugucaugauggcaucaauuggcuaacaauuggaauuucuggcccagacaauggggcaguggcuguguuaaaguacaacggcauaauaacagacacuaucaagaguuggagaaacaauauauugagaacacaagagucugaaugugcauguguaaaugguucuugcuuuacuguaaugaccgauggaccaaguaauggacaggccucauacaagaucuucagaauagaaaagggaaagauagucaaaucagucgaaaugaaugccccuaauuaucacuaugaggaaugcuccuguuauccugauucuagugaaaucacaugugugugcagggauaacuggcauggcucgaaucgaccgugggugucuuucaaccagaaucuggaauaucagauaggauacauaugcagugggauuuucggagacaauccacgcccuaaugauaagacaggcaguugugguccaguaucgucuaauggagcaaauggaguaaaaggguuuucauucaaauacggcaaugguguuuggauagggagaacuaaaagcauuaguucaagaaacgguuuugagaugauuugggauccgaacggauggacugggacagacaauaacuucucaauaaagcaagauaucguaggaauaaaugaguggucaggauauagcgggaguuuuguucagcauccagaacuaacagggcuggauuguauaagaccuugcuucuggguugaacuaaucagagggcgacccaaagagaacacaaucuggacuagcgggagcagcauauccuuuugugguguaaacagugacacuguggguuggucuuggccagacggugcugaguugccauuuaccauugacaaguaa

SEQ ID NO: 50493 - RNA, 1410 nt, Artificial Sequence; identical to SEQ ID NO: 48740
  derived and/or modified CDS sequence (wt) from neuraminidase__InfluenzaA__ADE29097

SEQ ID NO: 50494 - RNA, 1410 nt, Artificial Sequence; identical to SEQ ID NO: 49617
  derived and/or modified CDS sequence (wt) from neuraminidase__InfluenzaA__ADE34194

SEQ ID NO: 50495 - RNA, 1410 nt, Artificial Sequence; identical to SEQ ID NO: 49595
  derived and/or modified CDS sequence (wt) from neuraminidase__InfluenzaA__ADE34205

SEQ ID NO: 50496 - RNA, 1410 nt, Artificial Sequence
  derived and/or modified CDS sequence (wt) from neuraminidase__InfluenzaA__ADE34216
augaauccaaaucaaaagauaauaacgauuggcucuguuucucucaccauuuccacaauaugcuucuucaugcaaauugccaucuugguaacuacuguaacauugcauuucaagcaauaugaauucaacucccccccaaacaaccaagugaugcugugugaaccaacaauaauagaaaggaacauaacagagauaguguaucugaccaacaccaccauagagaaggaaauaugccccaaacuagcagaauacagaaauuggucaaagccgcaaugugacauuacaggauuugcaccuuuuucuaaggacaauucgauuaggcuuuccgcugguggggacaucuggguaacaagagaaccuuaugugucaugcgauccugacaaguguuaucaauuugcccuuggacagggaacaacacuaaacaacgugcauucaaauaacacaguacgugauaggaccccuuaucggacccuauugaugaaugaguuagguguuccuuuucaucuggggaccaagcaagugugcauagcaugguccagcucaaguugucacgauggaaaagcauggcugcauguuuguauaacgggggaugauaaaaaugcaacugcuagcuucauuuacaaugggaggcuuguagauaguguuguuucaugguccaaagacauccucaggacccaggagucagaaugcguuuguaucaauggaacuuguacaguaguaaugacugaugggagugcuucaggaaaagcugauacuaaaauacuauucauugaggaggggaaaaucguucauacuagcacauugucaggaagugcucagcaugucgaggagugcuccugcuauccucgauauccuggugucagaugugucugcagagacaacuggaaaggcuccaauaggcccaucguagauauaaacauaaaggaucauagcauuguuuccaguuauguguguucaggacuuguuggagacacacccagaaaaaacgacagcuccagcaguagccauuguuuggauccuaacaaugaagaagguggucauggagugaaaggcugggccuuugaugauggaaaugacguguggaugggaagaacgaucagcgagaagucacgcuuaggguaugaaaccuucaaagucauugaaggcugguccaacccuaaguccaaauugcagauaaauaggcaagucauaguugacagagguaauagguccgguuauucugguauuuucucuguugaaggcaaaagcugcaucaaucggugcuuuuauguggaguugauaaggggaagaaaagaggaaacugaagucuuguggaccucaaacaguauuguuguguuuuguggcaccucagguacauauggaacaggcucauggccugauggggcgaacaucaaucucaugccuauauaa

SEQ ID NO: 50497 - RNA, 1410 nt, Artificial Sequence; identical to SEQ ID NO: 49617
  derived and/or modified CDS sequence (wt) from neuraminidase__InfluenzaA__ADE34227

SEQ ID NO: 50498 - RNA, 1410 nt, Artificial Sequence
  derived and/or modified CDS sequence (wt) from neuraminidase__InfluenzaA__ADE34238
augaauccaaaucaaaagauaauaacgauuggcucuguuucucucaccauuuccacaauaugcuucuucaugcaaauugccaucuugauaacuacuguaacauugcauuucaagcaauaugaauucaacucccccccaaacaaccaagugaugcugugugaaccaacaauaauagaaagaaacauaacagagauaguguaucugaccaacaccaccauagagaaggaaauaugccccaaacuagcagaauacagaaauuggucaaagccgcaaugugacauuacaggguuugcaccuuuuucuaaggacaauucgauuaggcuuuccgcugguggggacaucugggugacaagagaaccuuaugugucaugcgauccugacaaguguuaucaauuugcccuuggacagggaacaacacuaaacaacguacauucaaauaacacaguacgugauaggaccccuuaucggacccuauugaugaaugaguuagguguuccuuuucaucuggggaccaagcaagugugcauagcaugguccagcucaaguugucacgauggaaaagcauggcugcauguuuguauaacgggggaugauaaaaaugcaacugcuagcuucauuuacaaugggaggcuuguagauaguguuguuucaugguccaaagaaauccucaggacccaggagucagaaugcguuuguaucaauggaacuuguacaguaguaaugacugaugggagugcuucaggaaaagcugauacuaaaauacuauucauugaggaggggaaaaucguucauacuagcacauugucagggagugcucagcaugucgaggagugcuccugcuauccucgauauccuggugucagaugugucugcagagacaacuggaaaggauccaauaggcccaucguagauauaaacauaaaggaucauagcauugucuccaguuauguguguucaggacuuguuggagacacacccagaaaaaacgacagcuccagcaguagccauuguucggauccuaacaaugaggaagguggucauggggugaaaggcugggccuuugaugauggaaaugacguguggaugggaagaacgaucagcgagaagucacgcuuaggguaugaaaccuucaaagucauugaaggcugguccaacccuaaguccaaauugcagauaaauaggcaagucauaguugacagagguaauagguccgguuauucugguauuuucucuguugaaggcaaaagcugcaucaaucggugcuuuuauguggaguugauaaggggaagaaaagaggaaacugaagucuuguggaccucaaacaguauuguuguguuuuguggcaccucagguacauauggaacaggcucauggccugauggggcggauaucaaucucaugccuauauaa

SEQ ID NO: 50499 - RNA, 1410 nt, Artificial Sequence
  derived and/or modified CDS sequence (wt) from neuraminidase__InfluenzaA__ADE34260
augaauccaaaucaaaagauaauaacgauuggcucuguuucucucaccauuuccacaauaugcuucuucaugcaaauugccaucuugauaacuacuguaacauugcauuucaagcaauaugaauucaacucccccccaaacaaccaagugaugcugugugaaccaacaauaauagaaagaaacauaacagagauaguguaucugaccaacaccaccauagagaaggaaauaugccccaaacuagcagaauacagaaauuggucaaagccgcaaugugacauuacaggguuugcaccuuuuucuaaggacaauucgauuaggcuuuccgcugguggggacaucugggugacaagagaaccuuaugugucaugcgauccugacaaguguuaucaauuugcccuuggacagggaacaacacuaaacaacguacauucaaauaacacaguacgugauaggaccccuuaucggacccuauugaugaaugaguuagguguuccuuuucaucuggggaccaagcaagugugcauagcaugguccagcucaaguugucacgauggaaaagcauggcugcauguuuguauaacgggggaugauaaaaaugcaacugcuagcuucauuuacaaugggaggcuuguagauaguguuguuucaugguccaaagaaauccucaggacccaggagucagaaugcguuuguaucaauggaacuuguacaguaguaaugacugaugggagugcuucaggaaaagcugauacuaaaauauuauucauugaggaggggaaaaucguucauacuagcacauugucaggaagugcucagcaugucgaggagugcuccugcuauccucgauauccuggugucagaugugucugcagagacaacuggaaaggauccaauaggcccaucguagauauaaacauaaaggaucauagcauugucuccaguuauguguguucaggacuuguuggagacacacccagaaaaaacgacagcuccagcaguagccauuguuuggauccuaacaaugaggaagguggucauggggugaaaggcugggccuuugaugauggaaaugacguguggaugggaagaacgaucagcgagaagucacgcuuaggguaugaaaccuucaaagucauugaaggcugguccaacccuaaguccaaauugcagauaaauaggcaagucauaguugacagagguaauagguccgguuauucugguauuuucucuguugaaggcaaaagcugcaucaaucggugcuuuuauguggaguugauaaggggaagaaaagaggaaacugaagucuuguggaccucaaacaguauuguuguguuuuguggcaccucagguacauauggaacaggcucauggccugauggggcggacaucaaucucaugucuauauaa

SEQ ID NO: 50500 - RNA, 1410 nt, Artificial Sequence
  derived and/or modified CDS sequence (wt) from neuraminidase__InfluenzaA__ADE34271
augaauccaaaucagaagauaauaacgauuggcucuguuucucucaccauuuccacaauaugcuucuucaugcaaauugccaucuugauaacuacuguaacauugcauuucaagcaauaugaauucaacucccccccaaacaaccaagugaugcugugugaaccaacaauaauagaaagaaacauaacagagauaguguaucugaccaacaccaccauagagaaggaaauaugccccaaacuagcagaauacagaaauuggucaaagccgcaaugugacauuacaggguuugcaccuuuuucuaaggacaauucgauuaggcuuuccgcugguggggacaucugggugacaagagaaccuuaugugucaugcgauccugacaaguguuaucaauuugcccuuggacagggaacaacacuaaacaacguacauucaaauaacacaguacgugauaggaccccuuaucggacccuauugaugaaugaguuagguguuccuuuucaucuggggaccaagcaagugugcauagcaugguccagcucaaguugucacgauggaaaagcauggcugcauguuuguauaacgggggaugauaaaaaugcaacugcuagcuucauuuacaaugggaggcuuguagauaguguuguuucaugguccaaagaaauccucaggacccaggagucagaaugcguuuguaucaauggaacuuguacaguaguaaugacugaugggagugcuucaggaaaagcugauacuaaaauacuauucauugaggaggggaaaaucguucauacuagcacauugucaggaagugcucagcaugucgaggagugcuccugcuauccucgauauccuggugucagaugugucugcagagacaacuggaaaggauccaauaggcccaucguagauauaaacauaaaggaucauagcauugucuccaguuauguguguucaggacuuguuggagacacacccagaaaaaacgacagcuccagcaguagccauuguucggauccuaacaaugaggaagguggucauggggugaaaggcugggccuuugaugauggaaaugacguguggaugggaagaacgaucagcgagaagucacgcuuaggguaugaaaccuucaaagucauugaaggcugguccaacccuaaguccaaauugcagauaaauaggcaagucauaguugacagagguaauagguccgguuauucugguauuuucucuguugaaggcaaaagcugcaucaaucggugcuuuuauguggaguugauaaggggaagaaaagaggaaacugaaguuuuguggaccucaaacaguauuguuguguuuuguggcaccucagguacauauggaacaggcucauggccugauggggcggauaucaaucucaugccuauauaa

SEQ ID NO: 50501 - RNA, 1410 nt, Artificial Sequence
  derived and/or modified CDS sequence (wt) from neuraminidase__InfluenzaA__ADE45502
augaauccaaaccaaaagauaauaaccauugguucggucuguaugacaauuggaauggcuaacuuaauauuacaaauuggaaacauaaucucaauauggauuagccacucaauucaacuugggaaucaaaaucagauugaaacaugcaaucaaagcgucauuacuuaugaaaacaacacuuggguaaaucagacauauguuaacaucagcaacaccaacuuugcugcuggacagucagugguuuccgugaaauuagcgggcaauuccucucucugcccuguuaguggaugggcuauauacaguaaagacaacaguauaagaaucgguuccaagggggauguguuugucauaagggaaccauucauaucaugcucccccuuggaaugcagaaccuucuucuugacucaaggggccuugcuaaaugacaaacauuccaauggaaccauuaaagacaggagcccauaucgaacccuaaugagcugcccuauuggugaaguucccucuccauacaacucaagauuugagucagucgcuuggucagcaagugcuugucaugauggcaucaauuggcuaacaauuggaauuucuggcccagacaauggggcaguggcuguguuaaaguacaacggcauaauaacagacacuaucaagaguuggagaaacaauauauugagaacacaagagucugaaugugcauguguaaaugguucuugcuuuacuguaaugaccgauggaccaagugauggacaggccucauacaagaucuucagaauagaaaagggaaagauagucaaaucagucgaaaugaaugccccuaauuaucacuaugaggaaugcuccuguuauccugauucuagugaaaucacaugugugugcagggauaacuggcauggcucgaaucgaccgugggugucuuucaaccagaaucuggaauaucagauaggauacauaugcagugggauuuucggagacaauccacgcccuaaugauaagacaggcaguugugguccaguaucgucuaauggagcaaauggaguaaaaggauuuucauucaaauacggcaaugguguuuggauagggagaacuaaaagcauuaguucaagaaacgguuuugagaugauuugggauccgaacggauggacugggacagacaauaacuucucaauaaagcaagauaucguaggaauaaaugaguggucaggauauagcgggaguuuuguucagcauccagaacuaacagggcuggauuguauaagaccuugcuucuggguugaacuaaucagagggcgacccaaagagaacacaaucuggacuagcgggagcagcauaucuuuuugugguguaaacagugacacuguggguuggucuuggccagacggugcugaguugccauuuaccauugacaaguaa

SEQ ID NO: 50502 - RNA, 1410 nt, Artificial Sequence; identical to SEQ ID NO: 48750
  derived and/or modified CDS sequence (wt) from neuraminidase__InfluenzaA__ADE45504

SEQ ID NO: 50503 - RNA, 1410 nt, Artificial Sequence
  derived and/or modified CDS sequence (wt) from neuraminidase__InfluenzaA__ADE45506
augaauccaaaccaaaagauaauaaccauugguucggucuguaugacaauuggaauggcuaacuuaauauuacaaauuggaaacauaaucucaauauggauuagccacucaauucaacuugggaaucaaaaucagauugaaacaugcaaucaaagugucauuacuuaugaaaacaacacuuggguaaaucagacauauguuaacaucagcaacaccaacuuugcugcuggacagucagugguuuccgugaaauuagcgggcaauuccucucucugcccuguuaguggaugggcuauauacaguaaagacaacaguauaagaaucgguuccaagggggauguguuugucauaagggaaccauucauaucaugcucccccuuggaaugcagaaccuucuucuugacucaaggggccuugcuaaaugacaaacauuccaauggaaccauuaaagacaggagcccauaucgaacccuaaugagcuguccuauuggugaaguucccucuccauacaacucaagauuugagucagucgcuuggucagcaagugcuugucaugauggcaucaauuggcuaacaauuggaauuucuggcccagacaauggggcaguggcuguguuaaaguacaacggcauaauaacagacacuaucaagaguuggagaaacaauauauugagaacacaagagucugaaugugcauguguaaaugguucuugcuuuacuguaaugaccgauggaccaagugauggacaggccucauacaagaucuucagaauagaaaagggaaagauagucaaaucagucgaaaugaaugccccuaauuaucacuaugaggaaugcuccuguuauccugauucuagugaaaucacaugugugugcagggauaacuggcauggcucgaaucgaccgugggugucuuucaaccagaaucuggaauaucagauaggauacauaugcagugggauuuucggagacaauccacgcccuaaugauaagacaggcaguugugguccaguaucgucuaauggagcaaauggaguaaaaggauuuucauucaaauacggcaaugguguuuggauagggagaacuaaaagcauuaguucaagaaacgguuuugagaugauuugggauccgaacggauggacugggacagacaauaacuucucaauaaagcaagauaucguaggaauaaaugaguggucaggauauagcgggaguuuuguucagcauccagaacuaacagggcuggauuguauaagaccuugcuucuggguugaacuaaucagagggcgacccaaagagaacacaaucuggacuagcgggagcagcauauccuuuugugguguaaacagugacacuguggguuggucuuggccagacggugcugaguugccauuuaccauugacaaguaa

SEQ ID NO: 50504 - RNA, 1410 nt, Artificial Sequence; identical to SEQ ID NO: 48887
  derived and/or modified CDS sequence (wt) from neuraminidase__InfluenzaA__ADE45508

SEQ ID NO: 50505 - RNA, 1410 nt, Artificial Sequence; identical to SEQ ID NO: 48887
  derived and/or modified CDS sequence (wt) from neuraminidase__InfluenzaA__ADE45510

SEQ ID NO: 50506 - RNA, 1410 nt, Artificial Sequence
  derived and/or modified CDS sequence (wt) from neuraminidase__InfluenzaA__ADE45512
augaauccaaaccaaaagauaauaaccauugguucggucuguaugacaauuggaauggcuaacuuaauauuacaaauuggaaacauaaucucaauauggauuagccacucaauucaacuugggaaucaaaaucagauugaaacaugcaaucaaagcgucauuacuuaugaaaacaacacuuggguaaaucagacauauguuaacaucagcaacaccaacuuugcugcuggacagucagugguuuccgugaaauuagcgggcaauuccucucucugcccuguuaguggaugggcuauauacaguaaagacaacaguauaagaaucgguuccaagggggauguguuugucauaagggaaccauucauaucaugcuccccuuuggaaugcagaaccuucuucuugacucaaggggccuugcuaaaugacaaacauuccaauggaaccauuaaagacaggagcccauaucgaacccuaaugagcuguccuauuggugaaguucccucuccauacaacucaagauuugagucagucgcuuggucagcaagugcuugucaugauggcaucaauuggcuaacaauuggaauuucuggcccagacaauggggcaguggcuguguuaaaguacaacggcauaauaacagacacuaucaagaguuggagaaacaauauauugagaacacaagagucugaaugugcauguguaaaugguucuugcuuuacuguaaugaccgauggaccaagugauggacaggccucauacaagaucuucagaauagaaaagggaaagauagucaaaucagucgaaaugaaugccccuaauuaucacuaugaggaaugcuccuguuauccugauucuagugaaaucacaugugugugcagggauaacuggcauggcucgaaucgaccgugggugucuuucaaccagaaucuggaauaucagauaggguacauaugcagugggauuuucggagacaauccacgcccuaaugauaagacaggcaguugugguccaguaucgucuaauggagcaaauggaguaaaaggauuuucauucaaauacggcaaugguguuuggauagggagaacuaaaagcauuaguucaagaaacgguuuugagaugauuugggauccgaacggauggacugggacagacaauaacuucucaauaaagcaagauaucguaggaauaaaugaguggucaggauauagcgggaguuuuguucagcauccagaacuaacagggcuggauuguauaagaccuugcuucuggguugaacuaaucagagggcgacccaaagagaacacaaucuggacuagcgggagcagcauauccuuuugcgguguaaacagugacacuguggguuggucuuggccagacggugcugaguugccauuuaccauugacaaguaa

SEQ ID NO: 50507 - RNA, 1410 nt, Artificial Sequence
  derived and/or modified CDS sequence (wt) from neuraminidase__InfluenzaA__ADE45514
augaauccaaaccaaaagauaauaaccauugguucggucuguaugacaauuggaauggcuaacuuaauauuacaaauuggaaacauaaucucaauauggauuagccacucaauucaacuugggaaucaaaaucagauugaaacaugcaaucaaagcaucauuacuuaugaaaacaacacuuggguaaaucagacauauguuaacaucagcaacaccaacuuugcugcuggacagucagugguuuccgugaaauuagcgggcaauuccucucucugcccuguuaguggaugggcuauauacaguaaagacaacaguauaagaaucgguuccaagggggauguguuugucauaagggaaccauucauaucaugcucccccuuggaaugcagaaccuucuucuugacucaaggggccuugcuaaaugacaaacauuccaauggaaccauuaaagacaggagcccauaucgaacccuaaugagcuguccuauuggugaaguucccucuccauacaacucaagauuugagucagucgcuuggucagcaagugcuugucaugauggcaucaauuggcuaacaauuggaauuucuggcccagacaauggggcaguggcuguguuaaaguacaacggcauaauaacagacacuaucaagaguuggagaaacaauauauugagaacacaagagucugaaugugcauguguaaaugguucuugcuuuacuguaaugaccgauggaccaagugauggacaggccucauacaagaucuucagaauagaaaagggaaagauagucaaaucagucgaaaugaaugccccuaauuaucacuaugaggaaugcuccuguuauccugauucuagugaaaucacaugugugugcagggauaacuggcauggcucgaaucgaccgugggugucuuucaaccagaaucuggaauaucagauaggguacauaugcagugggauuuucggagacaauccacgcccuaaugauaagacaggcaguugugguccaguaucgucuaauggagcaaauggaguaaaaggauuuucauuccaauacggcaaugguguuuggauagggagaacuaaaagcauuaguucaagaaacgguuuugagaugauuugggauccgaacggauggacugggacagacaauaacuucucaauaaagcaagauaucguaggaauaaaugaguggucaggauauagcgggaguuuuguucagcauccagaacuaacagggcuggauuguauaagaccuugcuucuggguugaacuaaucagagggcgacccaaagagaacacaaucuggacuagcgggagcagcauauccuuuugcgguguaaacagugacacuguggguuggucuuggccagacggugcugaguugccauuuaccauugacaaguaa

SEQ ID NO: 50508 - RNA, 1410 nt, Artificial Sequence
  derived and/or modified CDS sequence (wt) from neuraminidase__InfluenzaA__ADE45516
augaauccaaaccaaaagauaauaaccauugguucggucuguaugacaauuggaauggcuaacuuaauauuacaaauuggaaacauaaucucaauauggauuagccacucaauucaacuugggaaucaaaaucagauugaaacaugcaaucaaagcgucauuacuuaugaaaacaacacuuggguaaaucagacauauguuaacaucagcaacaccaacuuugcugcuggacagucagugguuuccgugaaauuagcgggcaauuccucucucugcccuguuaguggaugggcuauauacaguaaagacaacaguauaagaaucgguuccaagggggauguguuugucauaagggaaccauucauaucaugcucccccuuggaaugcagaaccuucuucuugacucaaggggccuugcuaaaugacaaacauuccaauggaaccauuaaagacaggagcccauaucgaacccuaaugagcuguccuauuggugaaguucccucuccauacaacucaagauuugagucagucgcuuggucagcaagugcuugucaugauggcaucaauuggcuaacaauuggaauuucuggcccagacaauggggcaguggcuguguuaaaguacaacggcauaauaacagacacuaucaagaguuggagaaacaauauauugagaacacaagagucugaaugugcauguguaaaugguucuugcuuuacuguaaugaccgauggaccaagugauggacaggccucauacaagaucuucagaauagaaaagggaaagauagucaaaucagucgaaaugaaugccccuaauuaucacuaugaggaaugcuccuguuauccugauucuagugaaaucacaugugugugcagggauaacuggcauggcucgaaucgaccgugggugucuuucaaccagaaucuggaauaucagauaggauacauaugcagugggauuuucggagacaauccacgcccuaaugauaagacaggcaguugugguccaguaucgucuaauggagcaaauggaguaaaaggauuuucauucaaauacggcaaugguguuuggauagggagaacuaaaagcauuaguuuaagaaacgguuuugagaugauuugggauccgaacggauggacugggacagacaauaacuucucaauaaagcaagauaucguaggaauaaaugaguggucaggauauagcgggaguuuuguucagcauccagaacuaacagggcuggauuguauaagaccuugcuucuggguugaacuaaucagagggcgacccaaagagaacacaaucuggacuagcgggagcagcauauccuuuugugguguaaacagugacacuguggguuggucuuggccagacggugcugaguugccauuuaccauugacaaguaa

SEQ ID NO: 50509 - RNA, 1410 nt, Artificial Sequence
  derived and/or modified CDS sequence (wt) from neuraminidase__InfluenzaA__ADF10069
augaauccaaaccaaaagauaauaaccauugguucggucuguaugacaauuggaauggcuaacuuaauauuacaaauuggaaacauaaucucaauauggauuagccacucaauucaacuugggaaucaaaaucagauugaaacaugcaaucaaagcgucauuacuuaugaaaacaacacuuggguaaaucagacauauguuaacaucagcaacaccaacuuugcugcuggacagucagugguuuccgugaaauuagcgggcaauuccucucucugcccuguuaguggaugggcuauauacaguaaagacaacaguauaagaaucgguuccaagggggauguguuugucauaagggaaccauucauaucaugcucccccuuggaaugcagaaccuucuucuugacucaagggaccuugcuaaaugacaaacauuccaauggaaccauuaaagacaggagcccauaucgaacccuaaugagcuguccuauuggugaaguucccucuccauacaacucaagauuugagucagucgcuuggucagcaagugcuugucaugauggcaucaauuggcuaacaauuggaauuucuggcccagacaauggggcaguggcuguguuaaaguacaacggcauaauaacagacacuaucaagaguuggagaaacaauauauugagaacacaagagucugaaugugcauguguaaaugguucuugcuuuacuguaaugaccgauggaccaagugauggacaggccucauacaagaucuucagaauagaaaagggaaagauagucaaaucagucgaaaugaaugccccuaauuaucacuaugaggaaugcuccuguuauccugauucuagugaaaucacaugugugugcagggauaacuggcauggcucgaaucgaccgugggugucuuucaaccagaaucuggaauaucagauaggauacauaugcagugggauuuucggagacaauccacgcccuaaugauaagacaggcaguugugguccaguaucgucuaauggagcaaauggaguaaaaggauuuucauucaaauacggcaaugguguuuggauagggagaacuaaaagcauuaguucaagaaacgguuuugagaugauuugggauccgaacggauggacugggacagacaauaacuucucaauaaagcaagauaucguaggaauaaaugaguggucaggauauagcgggaguuuuguucagcauccagaacuaacagggcuggauuguauaagaccuugcuucuggguugaacuaaucagagggcgacccaaagagaacacaaucuggacuagcgggagcagcauauccuuuugugguguaaacagugacacuguggguuggucuuggccagacggugcugaguugccauuuaccauugacaaguaa

SEQ ID NO: 50510 - RNA, 1410 nt, Artificial Sequence; identical to SEQ ID NO: 48750
  derived and/or modified CDS sequence (wt) from neuraminidase__InfluenzaA__ADF10079

SEQ ID NO: 50511 - RNA, 1410 nt, Artificial Sequence
  derived and/or modified CDS sequence (wt) from neuraminidase__InfluenzaA__ADF10089
augaauccaaaccaaaagauaauaaccauugguucggucuguaugacaauuggaauggcuaacuuaauauuacaaauuggaaacauaaucucaauauggauuagccacucaauucaacuugggaaucaaaaucagauugaaacaugcaaucaaagcgucauuacuuaugaaaacaacacuuggguaaaucagacauacguuaacaucagcaacaccaacuuugcugcuggacagucaguggucuccgugaaauuagcgggcaauuccucucucugcccuguuaguggaugggcuauauacaguaaagacaacaguauaagaaucgguuccaagggggauguguuugucauaagggaaccauucauaucaugcucccccuuggaaugcagaaccuucuucuugacucaaggggccuugcuaaaugacaaacauuccaauggaaccauuaaagacaggagcccauaucgaacccuaaugagcuguccuauuggugaaguucccucuccauacaacucaagauuugagucagucgcuuggucagcaagugcuugucaugauggcaucaauuggcuaacaauuggaauuucuggcccagacaauggggcaguggcuguguuaaaguacaacggcauaauaacagacacuaucaagaguuggagaaacaauauauugagaacacaagagucugaaugugcauguguaaaugguucuugcuuuacuguaaugaccgauggaccaagugauggacaggccucauacaagaucuucagaauagaaaagggaaagauagucaaaucagucgaaaugaaugccccuaauuaucacuaugaggaaugcuccuguuauccugauucuagugaaaucacaugugugugcagggauaacuggcauggcucgaaucgaccgugggugucuuucaaccagaaucuggaauaucagauaggauacauaugcagugggauuuucggagacaauccacgcccuaaugauaagacaggcaguugugguccaguaucgucuaauggagcaaauggaguaaaaggauuuucauucaaauacggcaaugguguuuggauagggagaacuaaaagcauuaguucaagaaacgguuuugagaugauuugggauccgaacggauggacugggacagacaauaacuucucaauaaagcaagauaucguaggaauaaaugaguggucaggauauagcgggaguuuuguccagcauccagaacuaacagggcuggauuguauaagaccuugcuucuggguugaacuaaucagagggcgacccaaagagaacacaaucuggacuagcgggagcagcauauccuuuugugguguaaacagugacacuguggguuggucuuggccagacggugcugaguugccauuuaccauugacaaguaa

SEQ ID NO: 50512 - RNA, 1410 nt, Artificial Sequence
  derived and/or modified CDS sequence (wt) from neuraminidase__InfluenzaA__ADF10099
augaauccaaaccaaaagauaauaaccauugguucggucuguaugacaauuggaauggcuaacuuaauauuacaaauuggaaacauaaucucaauauggauuagccacucaauucaacuugggaaucaaaaucagauugaaacaugcaaucaaagcgucauuacuuaugaaaacaacacuuggguaaaucagacauauguuaacaucagcaacaccaacuuugcugcuggacagucagugguuuccgugaaauuagcgggcaauuccucucucugcccuguuaguggaugggcuauauacaguaaagacaacaguauaagaaucgguuccaagggggauguguuugucauaagggaaccauucauaucaugcucccccuuggaaugcagaaccuucuucuugacucaaggggccuugcuaaaugacaaacauuccaauggaaccauuaaagacaggagcccauaucgaacccuaaugagcuguccuauuggugaaguucccucuccauacaacucaagauuugagucagucgcuuggucagcaagugcuugucaugauggcaucaauuggcuaacaauuggaauuucuggcccagacaauggggcaguggcuguguuaaaguacaacggcauaauaacagacacuaucaagaguuggagaaacaauauauugagaacacaagagucugaaugugcauguguaaaugguucuugcuuuacuguaaugaccgauggaccaagugauggacaggccucauacaagaucuucagaauagaaaagggaaagauagucaaaucagucgaaaugaaugccccuaauuaucacuaugaggaaugcuccuguuauccugauucuagugaaaucacaugugugugcagggauaacuggcauggcucgaaucgaccgugggugucuuucaaccagaaucuggaauaucagauaggauacauaugcagugggauuuucggagacaauccacgcccuaaugauaagacaggcaguugugguccaguaucgucuaauggagcaaauggaguaaaaggauuuucauucaaauacggcaaugguguuuggauagggagaacuaaaagcauuaguucaagaaacgguuuugagaugauuugggauccgaacggauggacugggacagacaauaacuucucaauaaagcaagauaucguaggaauaaaugaauggucaggauauagcgggaguuuuguucagcauccagaacuaacagggcuggauuguauaagaccuugcuucuggguugaacuaaucagagggcgacccaaagagaacacaaucuggacuagcgggagcaguauauccuuuugugguguaaacagugacacuguggguuggucuuggccagacggugcugaguugccauuuaccauugacaaguaa

SEQ ID NO: 50513 - RNA, 1410 nt, Artificial Sequence
  derived and/or modified CDS sequence (wt) from neuraminidase__InfluenzaA__ADF10109
augaauccaaaccaaaagauaauaaccauugguucggucuguaugacaauuggaauggcuaacuuaauauuacaaauuggaaacauaaucucaauauggauuagccacucaauucaacuugggaaucaaaaucagauugaaacaugcaaucaaagcgucauuacuuaugaaaacaacacuuggguaaaucagacauauguuaacaucagcaacaccaacuuugcugcuggacagucagugguuuccgugaaauuagcgggcaauuccucucucugcccuguuaguggaugggcuauauacaguaaagacaacaguauaagaaucgguuccaagggggauguguuugucauaagggaaccauucauaucaugcucccccuuggaaugcagaaccuucuucuugacucaaggggccuugcuaaaugacaaacauuccaauggaaccauuaaagacaggagcccauaucgaacccuaaugagcuguccuauuggugaaguucccucuccauacaacucaagauuugagucagucgcuuggucagcaagugcuugucaugauggcaucaauuggcuaacaauuggaauuucuggcccagacaauggggcaguggcuguguuaaaguacaacggcauaauaacagacacuaucaagaguuggagaaacaauauauugagaacacaagagucugaaugugcauguguaaaugguucuugcuuuacuguaaugaccgauggaccaagugauggacaggccucauacaagaucuucagaauagaaaagggaaagauagucaaaucagucgaaaugaaugccccuaauuauuacuaugaggaaugcuccuguuauccugauucuagugaaaucacaugugugugcagggauaacuggcauggcucgaaucgaccgugggugucuuucaaccagaaucuggaauaucagauaggauacauaugcagugggauuuucggagacaauccacgcccuaaugauaagacaggcaauugugguccaguaucgucuaauggagcaaauggaguaaaaggauuuucauucaaauacggcaaugguguuuggauagggagaacuaaaagcauuaguucaagaaacgguuuugagaugauuugggauccgaacggauggacugggacagacaauaacuucucaauaaagcaagauaucguaggaauaaaugaauggucaggauauagcgggaguuuuguucagcauccagaacuaacagggcuggauuguauaagaccuugcuucuggguugaacuaaucagagggcgacccaaagagaacacaaucuggacuagcgggagcaguauauccuuuugugguguaaacagugacacuguggguuggucuuggccagacggugcugaguugccauuuaccauugacaaguaa

SEQ ID NO: 50514 - RNA, 1410 nt, Artificial Sequence
  derived and/or modified CDS sequence (wt) from neuraminidase__InfluenzaA__ADF10129
augaauccaaaccaaaagauaauaaccauugguucggucuguaugacaauuggaauggcuaacuuaauauuacaaauuggaaacauaaucucaauauggauuagccacucaauucaacuugggaaucaaaaucagauugaaacaugcaaucaaagcgucauuacuuaugaaaacaacacuuggguaaaucagacauauguuaacaucagcaacaccaacuuugcugcuggacagucagugguuuccgugaaauuagcgggcaauuccucucucugcccuguuaguggaugggcuauauacaguaaagacaacaguauaagaaucgguuccaagggggauguguuugucauaagggaaccauucauaucaugcucccccuuggaaugcagaaccuucuucuugacucaaggggcccugcuaaaugacaaacauuccaauggaaccauuaaagacaggagcccauaucgaacccuaaugagcuguccuauuggugaaguucccucuccauacaacucaagauuugagucagucgcuuggucagcaagugcuugucaugauggcaucaauuggcuaacaauuggaauuucuggcccagacaauggggcaguggcuguguuaaaguacaacggcauaauaacagacacuaucaagaguuggagaaacaauauauugagaacacaagagucugaaugugcauguguaaaugguucuugcuuuacuguaaugaccgauggaccaagugauggacaggccucauacaagaucuucagaauagaaaagggaaagauagucaaaucagucgaaaugaaugccccuaauuaucacuaugaggaaugcuccuguuauccugauucuagugaaaucacauguguaugcagggauaacuggcauggcucgaaucgaccgugggugucuuucaaccagaaucuggaauaucagauaggauacauaugcagugggauuuucggagacaauccacgcccuaaugauaagacaggcaguugugguccaguaucgucuaauggagcaaauggaguaaaaggauuuucauucaaauacggcaaugguguuuggauagggagaacuaaaagcauuaguucaagaaacgguuuugagaugauuugggauccgaacggauggacugggacagacaauaacuucucaauaaagcaagauaucguaggaauaaaugaguggucaggauauagcgggaguuuuguucagcauccagaacuaacagggcuggauuguauaagaccuugcuucuggguugaacuaaucagagggcgacccaaagagaacacaaucuggacuagcgggagcagcauauccuuuugugguguaaacagugacacuguggguuggucuuggccagacggugcugaguugccauuuaccauugacaaguaa

SEQ ID NO: 50515 - RNA, 1410 nt, Artificial Sequence
  derived and/or modified CDS sequence (wt) from neuraminidase__InfluenzaA__ADF10146
augaauccaaaccaaaagauaauaaccauugguucggucuguaugacaauuggaauggcuaacuuaauauuacaaauuggaaacauaaucucaauauggauuagccacucaauucaacuugggaaucaaaaucagauugaaacaugcaaucaaagcgucauuacuuaugaaaacaacacuuggguaaaucagacauauguuaacaucagcaacaccaacuuugcugcuggacagucagugguuuccguaaaauuagcgggcaauuccucucucugcccuguuaguggaugggcuauauacaguaaagacaacaguauaagaaucgguuccaagggggauguguuugucauaagggaaccauucauaucaugcucccccuuggaaugcagaaccuucuucuugacucaaggggccuugcuaaaugacaaacauuccaauggaaccauuaaagacaggagcccauaucgaacccuaaugagcuguccuauuggugaaguucccucuccauacaacucaagauuugagucagucgcuuggucagcaagugcuugucaugauggcaucaauuggcuaacaauuggaauuucuggcccagacaauggggcaguggcuguguuaaaguacaacggcauaauaacagacacuaucaagaguuggagaaacaauauauugagaacacaagagucugaaugugcauguguaaaugguucuugcuuuacuguaaugaccgauggaccaagugauggacaggccucauacaagaucuucagaauagaaaagggaaagauagucaaaucagucgaaaugaaugccccuaauuaucacuaugaggaaugcuccuguuauccugauucuagugaaaucacaugugugugcagggauaacuggcauggcucgaaucgaccgugggugucuuucaaccaggaucuggaauaucagauaggauacauaugcagugggauuuucggagacaauccacgcccuaaugauaagacaggcaguugugguccaguaucgucuaauggagcaaauggaguaaaaggauuuucauucaaauacggcaaugguguuuggauagggagaacuaaaagcauuaguucaagaaacgguuuugagaugauuugggauccgaacggauggacugggacagacaauaacuucucaauaaagcaagauaucguaggaauaaaugaguggucaggauauagcgggaguuuuguucagcauccagaacuaacagggcuggauuguauaagaccuugcuucuggguugaacuaaucagagggcgacccaaagagaacacaaucuggacuagcgggagcagcauauccuuuuguggcguaaacagugacacuguggguuggucuuggccagacggugcugaguugccauuuaccauugacaaguaa

SEQ ID NO: 50516 - RNA, 1410 nt, Artificial Sequence
  derived and/or modified CDS sequence (wt) from neuraminidase__InfluenzaA__ADF10166
augaauccaaaccaaaagauaauaaccauugguucggucuguaugauaauuggaauggcuaacuuaauauuacaaauuggaaacauaaucucaauauggauuagccacucaauucaacuugggaaucaaaaucagauugaaacaugcaaucaaagcgucauuacuuaugaaaacaacacuuggguaaaucagacauauguuaacaucagcaacaccaacuuugcugcuggacagucagugguuuccgugaaauuagcgggcaauuccucucucugcccuguuaguggaugggcuauauacaguaaagacaacaguauaagaaucgguuccaagggggauguguuugucauaagggaaccauucauaucaugcucccccuuggaaugcagaaccuucuucuugacucaaggggccuugcuaaaugacaaacauuccaauggaaccauuaaagacaggagcccauaucgaacccuaaugagcuguccuauuggugaaguucccucuccauacaacucaagauuugagucagucgcuuggucagcaagugcuugucaugauggcaucaauuggcuaacaauuggaauuucuggcccagacaauggggcaguggcuguguuaaaguacaacggcauaauaacagacacuaucaagaguuggagaaacaauauauugagaacacaagagucugaaugugcauguguaaaugguucuugcuuuacuguaaugaccgauggaccaagugauggacaggccucauacaagaucuucagaauagaaaagggaaagauagucaaaucagucgaaaugaaugccccuaauuaucacuaugaggaaugcuccuguuauccugauucuagugaaaucacauguguaugcagggauaacuggcauggcucgaaucgaccgugggugucuuucaaccagaaucuggaauaucagauaggauacauaugcagugggauuuucggagacaauccacgcccuaaugauaagacaggcaguugugguccaguaucgucuaauggagcaaauggaguaaaaggauuuucauucaaauacggcaaugguguuuggauagggagaacuaaaagcauuaguucaagaaaagguuuugagaugauuugggauccgaacggauggacugggacagacaauaacuucucaauaaagcaagauaucguaggaauaaaugaguggucaggauauagcgggaguuuuguucagcauccagaacuaacagggcuggauuguauaagaccuugcuucuggguugaacuaaucagaggacgacccaaagagaacacaaucuggacuagcgggagcagcauauccuuuugugguguaaacagugacacuguggguuggucuuggccagacggugcugaguugccauuuaccauugacaaguaa

SEQ ID NO: 50517 - RNA, 1410 nt, Artificial Sequence; identical to SEQ ID NO: 50516
  derived and/or modified CDS sequence (wt) from neuraminidase__InfluenzaA__ADF10176

SEQ ID NO: 50518 - RNA, 1410 nt, Artificial Sequence; identical to SEQ ID NO: 50516
  derived and/or modified CDS sequence (wt) from neuraminidase__InfluenzaA__ADF10192

SEQ ID NO: 50519 - RNA, 1410 nt, Artificial Sequence; identical to SEQ ID NO: 48814
  derived and/or modified CDS sequence (wt) from neuraminidase__InfluenzaA__ADF10247

SEQ ID NO: 50520 - RNA, 1410 nt, Artificial Sequence; identical to SEQ ID NO: 50516
  derived and/or modified CDS sequence (wt) from neuraminidase__InfluenzaA__ADF10290

SEQ ID NO: 50521 - RNA, 1410 nt, Artificial Sequence
  derived and/or modified CDS sequence (wt) from neuraminidase__InfluenzaA__ADF10304
augaauccaaaccaaaagauaauaaccauugguucggucuguaugacaauuggaauggcuaacuuaauauuacaaauuggaaacauaaucucaauauggauuagccacucaauucaacuugggaaucaaaaucagauugaaacaugcaaucaaagcgucauuacuuaugaaaacaacacuuggguaaaucagacauauguuaacaucagcaacaccaacuuugcugcuggacagucagugguuuccgugaaauuagcgggcaauuccucucucugcccuguuaguggaugggcuauauacaguaaagacaacaguauaagaaucgguuccaagggggauguguuugucauaagggaaccauucauaucaugcucccccuuggaaugcagaaccuucuucuugacucaaggggccuugcuaaaugacaaacauuccaauggaaccauuaaagacaggagcccauaucgaacccuaaugagcuguccuauuggugaaguucccucuccauacaacucaagauuugagucagucgcuuggucagcaagugcuugucaugauggcaucaauuggcuaacaauuggaauuucuggcccagacaauggggcaguggcuguguuaaaguacaacggcauaauaacagacacuaucaagaguuggagaaacaauauauugagaacacaagagucugaaugugcauguguaaaugguucuugcuuuacuguaaugaccgauggaccaagugauggacaggccucauacaagaucuucagaauagaaaagggaaagauagucaaaucagucgaaaugaaugccccuaauuaucacuaugaggaaugcuccuguuauccugauucuagugaaaucacauguguaugcagggauaacuggcauggcucgaaucgaccgugggugucuuucaaccagaaucuggaauaucagauaggguacauaugcagugggauuuucggagacaauccacgcccuaaugauaagacaggcaguugugguccaguaucgucuaauggagcaaauggaguaaaaggauuuucauucaaauacggcaaugguguuuggauagggagaacuaaaagcauuaguucaagaaacgguuuugagaugauuugggauccgaacggauggacugggacagacaauaacuucucaauaaagcaagauaucguaggaauaaaugaguggucaggauauagcgggaguuuuguucagcauccagaacuaacagggcuggauuguauaagaccuugcuucuggguugaacuaaucagagggcgacccaaagagaacacaaucuggacuagcgggagcagcauauccuuuugugguguaaacagugacacuguggguuggucuuggccagacggugcuggguugccauuuaccauugacaaguaa

SEQ ID NO: 50522 - RNA, 1410 nt, Artificial Sequence; identical to SEQ ID NO: 48814
  derived and/or modified CDS sequence (wt) from neuraminidase__InfluenzaA__ADF10340

SEQ ID NO: 50523 - RNA, 1410 nt, Artificial Sequence; identical to SEQ ID NO: 48814
  derived and/or modified CDS sequence (wt) from neuraminidase__InfluenzaA__ADF10361

SEQ ID NO: 50524 - RNA, 1410 nt, Artificial Sequence; identical to SEQ ID NO: 50516
  derived and/or modified CDS sequence (wt) from neuraminidase__InfluenzaA__ADF10371

SEQ ID NO: 50525 - RNA, 1410 nt, Artificial Sequence; identical to SEQ ID NO: 50516
  derived and/or modified CDS sequence (wt) from neuraminidase__InfluenzaA__ADF10407

SEQ ID NO: 50526 - RNA, 1410 nt, Artificial Sequence
  derived and/or modified CDS sequence (wt) from neuraminidase__InfluenzaA__ADF10472
augaauccaaaccaaaagauaauaaccauugguucggucuguaugacaauuggaauggcuaacuuaauauuacaaauuggaaacauaaucucaauauggauuagccacucaauucaacuugggaaucaaaaucagauugaaacaugcaaucaaagcgucauuacuuaugaaaacaacacuuggguaaaucagacauauguuaacaucagcaacaccaacuuugcugcuggacagucagugguuuccgugaaauuagcgggcaauuccucucucugcccuguuaguggaugggcuauauacaguaaagacaacaguauaagaaucgguuccaagggggauguguuugucauaagggaaccauucauaucaugcucccccuuggaaugcagaaccuucuucuugacucaaggggccuugcuaaaugacaaacauuccaauggaaccauuaaagacaggagcccauaucgaacccuaaugagcuguccuauuggugaaguucccucuccauacaacucaagauuugagucagucgcuuggucagcaagugcuugucaugauggcaucaauuggcuaacaauuggaauuucuggcccagacaauggggcaguggcuguguuaaaguacaacggcauaauaacagacacuaucaagaguuggagaaacaauauauugagaacacaagagucugaaugugcauguguaaaugguucuugcuuuacuguaaugaccgauggaccaagugauggacaggccucauacaagaucuucagaauagaaaagggaaagauagucaaaucagucgaaaugaaugccccuaauuaucacuaugaggaaugcuccuguuauccugauucuagugaaaucacauguguaugcagggauaacuggcauggcucgaaucgaccgugggugucuuucaaccagaaucuggaauaucagauaggauacauaugcagugggauuuucggagacaauccacgcccuaacgauaagacaggcaguugugguccaguaucgucuaauggagcaaauggaguaaaaggauuuucauucaaauacggcaaugguguuuggauagggagaacuaaaagcauuaguucaagaaacgguuuugagaugauuugggauccgaacggauggacugggacagacaauaacuucucaauaaagcaagauaucguaggaauaaaugaguggucaggauauagcgggaguuuuguucagcauccagaacuaacagggcuggauuguauaagaccuugcuucuggguugaacuaaucagagggcgacccaaagagaacacaaucuggacuagcgggagcagcauauccuuuugugguguaaacagugacacuguggguuggucuuggccagacggugcugaguugccauuuaccauugacaaguaa

SEQ ID NO: 50527 - RNA, 1410 nt, Artificial Sequence; identical to SEQ ID NO: 50516
  derived and/or modified CDS sequence (wt) from neuraminidase__InfluenzaA__ADF10616

SEQ ID NO: 50528 - RNA, 1410 nt, Artificial Sequence; identical to SEQ ID NO: 50516
  derived and/or modified CDS sequence (wt) from neuraminidase__InfluenzaA__ADF10688

SEQ ID NO: 50529 - RNA, 1410 nt, Artificial Sequence; identical to SEQ ID NO: 50516
  derived and/or modified CDS sequence (wt) from neuraminidase__InfluenzaA__ADF10726

SEQ ID NO: 50530 - RNA, 1410 nt, Artificial Sequence
  derived and/or modified CDS sequence (wt) from neuraminidase__InfluenzaA__ADF10773
augaauccaaaccaaaagauaauaaccauugguucggucuguaugacaauuggaauggcuaacuuaauauuacaaauuggaaacauaaucucaauauggauuagccacucaauucaacuugggaaucaaaaucagauugaaacaugcaaucaaagcgucauuacuuaugaaaacaacacuuggguaaaucagacauauguuaacaucagcaacaccaacuuugcugcuggacagucagugguuuccgugaaauuagcgggcaauuccucucucugcccuguuaguggaugggcuauauacaguaaagacaacaguauaagaaucgguuccaagggggauguguuugucauaagggaaccauucauaucaugcucccccuuggaaugcagaaccuucuucuugacucaaggggccuugcuaaaugacaaacauuccaauggaaccauuaaagacaggagcccauaucgaacccuaaugagcuguccuauuggugaaguucccucuccauacaacucaagauuugagucagucgcuuggucagcaagugcuugucaugauggcaucaauuggcuaacaauuggaauuucuggcccagacaauggggcaguggcuguguuaaaguacaacggcauaauaacagacacuaucaagaguuggagaaacaauauauugagaacacaagagucugaaugugcauguguaaaugguucuugcuuuacuguaaugaccgauggaccaagugauggacaggccucauacaagaucuucagaauagaaaagggaaagauagucaaaucagucgaaaugaaugccccuaauuaucacuaugaggaaugcuccuguuauccugauucuagugaaaucacauguguaugcagggauaacuggcauggcucgaaucgaccgugggugucuuucaaccagaaucuggaauaucagauaggguacauaugcagugggauuuucggagacaauccacgcccuaaugauaagacaggcaguugugguccaguaucgucuaauggagcaaauggaguaaaaggauuuucauucaaauacggcaaugguguuuggauagggagaacuaaaagcauuaguucaagaaacgguuuugagaugauuugggauccgaacggauggacugggacagacaauaacuucucaauaaagcaagauaucguaggaauaaaugaguggucaggauauagcgggaguuuuguucagcauccagaacuaacagggcuggauuguauaagaccuugcuucuggguugaacuaaucagagggcgacccaaagagaacacaaucuggacuagcgggagcagcauauccuuuugugguguaaacagugacacuguggguuggucuuggccagacggugcugaguugccauuuaccauugacaaguaa

SEQ ID NO: 50531 - RNA, 1410 nt, Artificial Sequence
  derived and/or modified CDS sequence (wt) from neuraminidase__InfluenzaA__ADF10837
augaauccaaaccaaaagauaauaaccauugguucggucuguaugacaauuggaauggcuaacuuaauauuacaaauuggaaacauaaucucaauauggauuagccacucaauucaacuugggaaucaaaaucagauugaaacaugcaaucaaagcgucauuacuuaugaaaacaacacuuggguaaaucagacauauguuaacaucagcaacaccaacuuugcugcuggacagucagugguuuccgugaaauuagcgggcaauuccucucucugcccuguuaguggaugggcuauauacaguaaagacaacaguauaagaaucgguuccaagggggauguguuugucauaagggaaccauucauaucaugcucccccuuggaaugcagaaccuucuucuugacucaaggggccuugcuaaaugacaaacauuccaauggaaccauuaaagacaggagcccauaucgaacccuaaugagcuguccuauuggugaaguucccucuccauacaacucaagauuugagucagucgcuuggucagcaagugcuugucaugauggcaucaauuggcuaacaauuggaauuucuggcccagacaauggggcaguggcuguguuaaaguacaacggcauaauaacagacacuaucaagaguuggaaaaacaauauauugagaacacaagagucugaaugugcauguguaaaugguucuugcuuuacuguaaugaccgauggaccaagugauggacaggccucauacaagaucuucagaauagaaaagggaaagauagucaaaucagucgaaaugaaugccccuaauuaucacuaugaggaaugcuccuguuauccugauucuagugaaaucacaugugugugcagggauaacuggcauggcucgaaucgaccgugggugucuuucaaccagaaucuggaauaucagauaggauacauaugcagugggauuuucggagacaauccacgcccuaaugauaagacaggcaguugugguccaguaucgucuaauggagcaaauggaguaaaaggauuuucauucaaauacggcaaugguguuuggauagggagaacuaaaagcauuaguucaagaaacgguuuugagaugauuugggauccgaacggauggacugggacagacaauaacuucucaauaaagcaagauaucguaggaauaaaugaauggucaggguauagcgggaguuuuguucagcauccagaacuaacagggcuggauuguauaagaccuugcuucuggguugaacuaaucagagggcgacccaaagagaacacaaucuggacuagcgggagcagcauauccuuuugugguguaaacagugacacuguggguuggucuuggccagacggugcugaguugccauuuaccauugacaaguaa

SEQ ID NO: 50532 - RNA, 1410 nt, Artificial Sequence; identical to SEQ ID NO: 48750
  derived and/or modified CDS sequence (wt) from neuraminidase__InfluenzaA__ADF10889

SEQ ID NO: 50533 - RNA, 1410 nt, Artificial Sequence
  derived and/or modified CDS sequence (wt) from neuraminidase__InfluenzaA__ADF10947
augaauccaaaccaaaagauaauaaccauugguucggucuguaugacaauuggaauggcuaacuuaauauuacaaauuggaaacauaaucucaauauggauuagccacucaauucaacuugggaaucaaaaucagauugaaacaugcaaucaaagcgucauuacuuaugaaaacaacacuuggguaaaucagacauauguuaacaucagcaacaccaacuuugcugcuggacagucagugguuuccgugaaauuagcgggcaauuccucucucugcccuguuaguggaugggcuauauacaguaaagacaacaguauaagaaucgguuccaagggggauguguuugucauaagggaaccauucauaucaugcucccccuuggaaugcagaaccuucuucuugacucaaggggccuugcuaaaugacaaacauuccaauggaaccauuaaagacaggagcccauaucgaacccuaaugagcuguccuauuggugaaguucccucuccauacaacucaagauuugagucaguugcuuggucagcaagugcuugucaugauggcaucaauuggcuaacaauuggaauuucuggcccagacaauggggcaguggcuguguuaaaguacaacggcauaauaacagacacuaucaagaguuggagaaacaauauauugagaacacaagagucugaaugugcauguguaaaugguucuugcuuuacuguaaugaccgauggaccaagugauggacaggccucauacaagaucuucagaauagaaaagggaaagauagucaaaucagucgaaaugaaugccccuaauuaucacuaugaggaaugcuccuguuauccugauucuagugaaaucacaugugugugcagggauaacuggcauggcucgaaucgaccgugggugucuuucaaccagaaucuggaauaucagauaggauacauaugcagugggauuuucggagacaauccacgcccuaaugauaagacaggcaguugugguccaguaucgucuaauggagcaaauggaguaaaaggauuuucauucaaauacggcaaugguguuuggauagggagaacuaaaagcauuaguucaagaaacgguuuugagaugauuugggauccgaacggauggacugggacagacaauaacuucucaauaaagcaagauaucguaggaauaaaugaguggucaggauauagcgggaguuuuguucagcauccagaacuaacagggcuggauuguauaagaccuugcuucuggguugaacuaaucagagggcgacccaaagagaacacaaucuggacuagcgggagcagcauauccuuuugugguguaaacagugacacuguggguuggucuuggccagacggugcugaguugccauuuaccauugacaaguaa

SEQ ID NO: 50534 - RNA, 1410 nt, Artificial Sequence
  derived and/or modified CDS sequence (wt) from neuraminidase__InfluenzaA__ADF11010
augaauccaaaccaaaagauaauaaccauugguucgguuuguaugacaauuggaauggcuaacuuaauauuacaaauuggaaacauaaucucaauauggauuagccacucaauucaacuugggaaucaaaaucagauugaaacaugcaaucaaagcgucauuacuuaugaaaacaacacuuggguaaaucagacauauguuaacaucagcaacaccaacuuugcugcuggacagucagugguuuccgugaaauuagcgggcaauuccucucucugcccuguuaguggaugggcuauauacaguaaagacaacaguauaagaaucgguuccaagggggauguguuugucauaagggaaccauucauaucaugcucccccuuggaaugcagaaccuucuucuugacucaaggggccuugcuaaaugacaaacauuccaauggaaccauuaaagacaggagcccauaucgaacccuaaugagcuguccuauuggugaaguucccucuccauacaacucaagauuugagucagucgcuuggucagcaagugcuugucaugauggcaucaauuggcuaacaauuggaauuucuggcccagacaauggggcaguggcuguguuaaaguacaacggcauaauaacagacacuaucaagaguuggagaaacaauauauugagaacacaagagucugaaugugcauguguaaaugguucuugcuuuacuguaaugaccgauggaccaagugauggacaggccucauacaagaucuucagaauagaaaagggaaagauagucaaaucagucgaaaugaaugccccuaauuaucacuaugaggaaugcuccuguuauccugauucuagugaaaucacaugugugugcagggauaacuggcauggcucgaaucgaccgugggugucuuucaaccagaaucuggaauaucagauaggauacauaugcagugggauuuucggagacaauccacgcccuaaugauaagacaggcaguugugguccaguaucgucuaauggagcaaauggaguaaaaggauuuucauucaaauacggcaaugguguuuggauagggagaacuaaaagcauuaguucaagaaacgguuuugagaugauuugggauccgaacggauggacugggacagacaauaacuucucaauaaagcaagauaucguaggaauaaaugaguggucaggauauagcgggaguuuuguucagcauccagaacuaacagggcuggauuguauaagaccuugcuucuggguugaacuaaucagagggcgacccaaagagaacacaaucuggacuagcgggagcagcauauccuuuugugguguaaacagugacacuguggguuggucuuggccagacggugcugaguugccauuuaccauugacaaguaa

SEQ ID NO: 50535 - RNA, 1410 nt, Artificial Sequence
  derived and/or modified CDS sequence (wt) from neuraminidase__InfluenzaA__ADF27355
augaauccaaaccaaaagauaauaaccauugguucggucuguaugacaauuggaauggcuaacuuaauauuacaaauuggaaacauaaucucaauauggauuagccacucaauucaacuugggaaucaaaaucagauugaaacaugcaaucaaagcgucauuacuuaugaaaacaacacuuggguaaaucagacauauguuaacaucagcaacaccaacuuugcugcuggacagucagugguuuccgugaaauuagcgggcaauuccucucucugcccuguuaguggaugggcuauauacaguaaagacaacaguauaaggaucgguuccaagggggauguguuugucauaagggaaccauucauaucaugcucccccuuggaaugcagaaccuucuucuugacucaaggggccuugcuaaaugacaaacauuccaauggaaccauuaaagacaggagcccauaucgaacccuaaugagcuguccuauuggugaaguucccucuccauacaacucaagauuugagucagucgcuuggucagcaagugcuugucaugauggcaucaauuggcuaacaauuggaauuucuggcccagacaauggggcaguggcuguguuaaaguacaacggcauaauaacagacacuaucaagaguuggagaaacaauauauugagaacacaagagucugaaugugcauguguaaaugguucuugcuuuacuguaaugaccgauggaccaagugauggacaggccucauacaagaucuucagaauagaaaagggaaagauagucaaaucagucgaaaugaaugccccuaauuaucacuaugaggaaugcuccuguuauccugauucuagugaaaucacaugugugugcagggauaacuggcauggcucgaaucgaccgugggugucuuucaaccagaaucuggaauaucagauaggauacauaugcagugggauuuucggagacaauccacgcccuaaugauaagacaggcaguugugguccaguaucgucuaauggagcaaauggaguaaaaggauuuucauucaaauacggcaaugguguuuggauggggagaacuaaaagcauuaguucaagaaacgguuuugagaugauuugggauccgaacggauggacugggacagacaauaacuucucaauaaagcaagauaucguaggaauaaaugaguggucaggauauagcgggaguuuuguucagcauccagaacuaacagggcuggauuguauaagaccuugcuucuggguugaacuaaucagagggcgacccaaagagaacacaaucuggacuagcgggagcagcauauccuuuugugguguaaacagugauacuguggguuggucuuggccagacggugcugaguugccauuuaccauugacaaguaa

SEQ ID NO: 50536 - RNA, 1410 nt, Artificial Sequence
  derived and/or modified CDS sequence (wt) from neuraminidase__InfluenzaA__ADF27356
augaauccaaaccaaaagauaauaaccauugguucggucuguaugacaauuggaauggcuaacuuaauauuacaaauuggaaacauaaucucaauauggauuagccacucaauucaacuugggaaucaaaaucagauugaaacaugcaaucaaaacgucauuacuuaugaaaacaacacuuggguaaaucagacauauguuaacaucagcaacaccaacuuugcugcuggacagucagugguuuccgugaaauuagcgggcaauuccucucucugcccuguuaguggaugggcuauauacaguaaagacaacaguauaaggaucgguuccaagggggauguguuugucauaagggaaccauucauaucaugcucccccuuggaaugcagaaccuucuucuugacucaaggggccuugcuaaaugacaaacauuccaauggaaccauuaaagacaggagcccauaucgaacccuaaugagcuguccuauuggugaaguucccucuccauacaacucaagauuugagucagucgcuuggucagcaagugcuugucaugauggcaucaauuggcuaacaauuggaauuucuggcccagacaauggggcaguggcuguguuaaaguacaacggcauaauaacagacacuaucaagaguuggagaaacaauauauugagaacacaagagucugaaugugcauguguaaaugguucuugcuuuacuguaaugaccgauggaccaagugauggacaggccucauacaagaucuucagaauagaaaagggaaagauagucaaaucagucgaaaugaaugccccuaauuauuacuaugaggaaugcuccuguuauccugauucuagugaaaucacaugugugugcagggauaacuggcauggcucgaaucgaccgugggugucuuucaaccagaaucuggaauaucagauaggauacauaugcagugggauuuucggagacaauccacgcccuaaugauaagacaggcaguugugguccaguaucgucuaauggagcaaauggaguaaaaggauuuucauucaaauacggcaaugguguuuggauagggagaacuaaaagcauuaguucaagaaacgguuuugagaugauuugggauccgaacggauggacugggacagacaauaacuucucaauaaagcaagauaucguaggaauaaaugaguggucaggauauagcgggaguuuuguucagcauccagaacuaacagggcuggauuguauaagaccuugcuucuggguugaacuaaucagagggcgacccaaagagaacacaaucuggacuagcgggagcagcauauccuuuugugguguaaacagugauacuguggguuggucuuggccagacggugcugaguugccauuuaccauugacaaguaa

SEQ ID NO: 50537 - RNA, 1410 nt, Artificial Sequence; identical to SEQ ID NO: 49104
  derived and/or modified CDS sequence (wt) from neuraminidase__InfluenzaA__ADF27357

SEQ ID NO: 50538 - RNA, 1410 nt, Artificial Sequence
  derived and/or modified CDS sequence (wt) from neuraminidase__InfluenzaA__ADF27358
augaauccaaaccaaaagauaauaaccauugguucggucuguaugacaauuggaauggcuaacuuaauauuacaaauuggaaacauaaucucaauauggauuagccacucaauucaacuugggaaucaaaaucagauugaaacaugcaaucaaagcgucauuacuuaugaaaacaacacuuggguaaaucagacauauguuaacaucagcaacaccaacuuugcugcuggacagucagugguuuccgugaaauuagcgggcaauuccucucucugcccuguuaguggaugggcuauauacaguaaagacaacaguauaagaaucgguuccaagggggauguguuugucauaagggaaccauucauaucaugcucccccuuggaaugcagaaccuucuucuugacucaaggggccuugcuaaaugacaaacauuccaauggaaccauuaaagacaggagcccauaucgaacccuaaugagcuguccuauuggugaaguucccucuccauacaacucaagauuugagucagucgcuuggucagcaagugcuugucaugauggcaucaauuggcuaacaauuggaauuucuggcccagacaauggggcaguggcuguguuaaaguacaacggcauaauaacagacacuaucaagaguuggagaaacaauauauugagaacacaagagucugaaugugcauguguaaaugguucuugcuuuacuguaaugaccgauggaccaagugauggacaggccucauacaagaucuucagaauagaaaagggaaagauagucaaaucagucgaaaugaaugccccuaauuauuacuaugaggaaugcuccuguuauccugauucuagugaaaucacaugugugugcagggauaacuggcauggcucgaaucgaccgugggugucuuucaaccagaaucuggaauaucagauaggauacauaugcagugggauuuucggagacaauccacgcccuaaugauaagacuggcaguugugguccaguaucgucuaauggagcaaauggaguaaaaggauuuucauucaaauacggcaaugguguuuggauagggagaacuaaaagcauuaguucaagaaacgguuuugagaugauuugggauccgaacggauggacugggacagacaauaacuucucaauaaagcaagauaucguaggaauaaaugaguggucaggauauagcgggaguuuuguucagcauccagaacuaacagggcuggauuguauaagaccuugcuucuggguugaacuaaucagagggcgacccaaagagaacacaaucuggacuagcgggagcagcauauccuuuugugguguaaacagugacacuguggguuggucuuggccagacggugcugaguugccauuuaccauugacaaguaa

SEQ ID NO: 50539 - RNA, 1410 nt, Artificial Sequence
  derived and/or modified CDS sequence (wt) from neuraminidase__InfluenzaA__ADF27360
augaauccaaaccaaaagauaauaaccauugguucggucuguaugacaauuggaauggcuaacuuaauauuacaaauuggaaacauaaucucaauauggauuagccacucaauucaacuugggaaucaaaaucagauugaaacaugcaaucaaagcgucauuacuuaugaaaacaacacuuggguaaaucagacauauguuaacaucagcaacaccaacuuugcugcuggacagucagugguuuccgugaaauuagcgggcaauuccucucucugcccuguuaguggaugggcuauauacaguaaagacaacaguauaagaaucgguuccaagggggauguguuugucauaagggaaccauucauaucaugcucccccuuggaaugcagaaccuucuucuugacucaaggggccuugcuaaaugacaaacauuccaauggaaccauuaaagacaggagcccauaucgaacccuaaugagcuguccuauuggugaaguucccucuccauacaacucaagauuugagucagucgcuuggucagcaagugcuugucaugauggcaucaauuggcuaacaauuggaauuucuggcccagacaauggggcaguggcuguguuaaaguacaacggcauaauaacagacacuaucaagaguuggagaaacaauauauugagaacacaagagucugaaugugcauguguaaaugguucuugcuuuacuguaaugaccgauggaccaagugauggacaggccucauacaagaucuucagaauagaaaagggaaagauagucaaaucagucgaaaugaaugccccuaauuauuacuaugaggaaugcuccuguuauccugauucuagugaaaucacaugugugugcagggauaacuggcauggcucgaaucgaccgugggugucuuucaaccagaaucuggaauaucaaauaggauacauaugcagugggauuuucggagacaauccacgcccuaaugauaagacaggcaguugugguccaguaucgucuaauggagcaaauggaguaaaaggauuuucauucaaauacggcaaugguguuuggauagggagaacuaaaagcauuaguucaagaaacgguuuugagaugauuugggauccgaacggauggacugggacggacaauaacuucucaauaaagcaagauaucguaggaauaaaugaguggucaggauauagcgggaguuuuguucagcauccagaacuaacagggcuggauuguauaagaccuugcuucuggguugaacuaaucagagggcgacccaaagagaacacaaucuggacuagcgggagcagcauauccuuuugugguguaaacagugacacuguggguuggucuuggccagacggugcugaguugccauuuaccauugacaaguaa

SEQ ID NO: 50540 - RNA, 1410 nt, Artificial Sequence
  derived and/or modified CDS sequence (wt) from neuraminidase__InfluenzaA__ADF27361
augaauccaaaccaaaagauaauaaccauugguucggucuguaugacaauuggaauggcuaacuuaauauuacaaauuggaaacauaaucucaauauggauuagccacucaauucaacuugggaaucaaaaucagauugaaacaugcaaucaaagcgucauuacuuaugaaaacaacacuuggguaaaucagacauauguuaacaucagcaacaccaacuuugcugcuggacagucagugguuuccgugaaauuagcgggcaauuccucucucugcccuguuaguggaugggcuauauacaguaaagacaacaguauaagaaucgguuccaagggggauguguuugucauaagggaaccauucauaucaugcucccccuuggaaugcagaaccuucuucuugacucaaggggccuugcuaaaugacaaacauuccaauggaaccauuaaagacaggagcccauaucgaacccuaaugagcuguccuauuggugaaguucccucuccauacaacucaagauuugagucagucgcuuggucagcaagugcuugucaugauggcaucaauuggcuaacaauuggaauuucuggcccagacaauggggcaguggcuguguuaaaguacaacggcauaauaacagacacuaucaagaguuggagaaacaauauauugagaacacaagagucugaaugugcauguguaaaugguucuuguuuuacuguaaugacugauggaccaagugauggacaggccucauacaagaucuucagaauagaaaagggaaagauagucaaaucagucgaaaugaaugccccuaauuaucacuaugaggaaugcuccuguuauccugauucuagugaaaucacaugugugugcagggauaacuggcauggcucgaaucgaccgugggugucuuucaaccagaaucuggaauaucagauaggauacauaugcagugggauuuucggagacaauccacgcccuaaugauaagacaggcaguugugguccaguaucgucuaauggagcaaauggaguaaaaggauuuucauucaaauacggcaaugguguuuggauagggagaacuaaaagcauuaguucaagaaacgguuuugagaugauuugggauccgaacggauggacugggacagacaauaacuucucaauaaagcaagauaucguaggaauaaaugaguggucaggauauagcgggaguuuuguucagcauccagaacuaacagggcuggauuguauaagaccuugcuucuggguugaacuaaucagagggcgacccaaagagaacacaaucuggacuagcgggagcagcauauccuuuugugguguaaacagugacacuguggguuggucuuggccagacggugcugaguugccauuuaccauugacaaguaa

SEQ ID NO: 50541 - RNA, 1410 nt, Artificial Sequence; identical to SEQ ID NO: 49827
  derived and/or modified CDS sequence (wt) from neuraminidase__InfluenzaA__ADF27362

SEQ ID NO: 50542 - RNA, 1410 nt, Artificial Sequence
  derived and/or modified CDS sequence (wt) from neuraminidase__InfluenzaA__ADF27363
augaauccaaaccaaaagauaauaaccauugguucggucuguaugacaauuggaauggcuaacuuaauauuacaaauuggaaacauaaucucaauauggauuagccacucaauucaacuugggaaucaaaaucagauugaaacaugcaaucaaagcgucauuacuuaugaaaacaacacuuggguaaaucagacauauguuaacaucagcaacaccaacuuugcugcuggacagucagugguuuccgugaaauuagcgggcaauuccucucucugcccuguuaguggaugggcuauauacaguaaagacaacaguauaagaaucgguuccaagggggauguguuugucauaagggaaccauucauaucauguucccccuuggaaugcagaaccuucuucuugacucaaggggccuugcuaaaugacaaacauuccaauggaaccauuaaagacaggagcccauaucgaacccuaaugagcuguccuauuggugaaguucccucuccauacaacucaagauuugagucagucgcuuggucagcaagugcuugucaugauggcaucaauuggcuaacaauuggaauuucuggcccagacaauggggcaguggcuguguuaaaguacaacggcauaauaacagacacuaucaagaguuggagaaacaauauauugagaacacaagagucugaaugugcauguguaaaugguucuuguuuuacuguaaugaccgauggaccaagugauggacaggccucauacaagaucuucagaauagaaaagggaaagauagucaaaucagucgaaaugaaugccccuaauuaucacuaugaggaaugcuccuguuauccugauucuagugaaaucacaugugugugcagggauaacuggcauggcucgaaucgaccgugggugucuuucaaccagaaucuggaauaucagauaggauacauaugcagugggauuuucggagacaauccacgcccuaaugauaagacaggcaguugugguccaguaucgucuaauggagcaaauggaguaaaaggauuuucauucaaauacggcaaugguguuuggauagggagaacuaaaagcauuaguucaagaaacgguuuugagaugauuugggauccgaacggauggacugggacagacaauaacuucucaauaaagcaagauaucguaggaauaaaugaguggucaggauauagcgggaguuuuguucagcauccagaacuaacagggcuggauuguauaagaccuugcuucuggguugaacuaaucagagggcgacccaaagagaacacaaucuggacuagcgggagcagcauauccuuuugugguguaaacagugacacuguggguuggucuuggccagacggugcugaguugccauuuaccauugacaaguaa

SEQ ID NO: 50543 - RNA, 1410 nt, Artificial Sequence; identical to SEQ ID NO: 49157
  derived and/or modified CDS sequence (wt) from neuraminidase__InfluenzaA__ADF27364

SEQ ID NO: 50544 - RNA, 1410 nt, Artificial Sequence
  derived and/or modified CDS sequence (wt) from neuraminidase__InfluenzaA__ADF27365
augaauccaaaccaaaagauaauaaccauugguucggucuguaugacaauuggaauggcuaacuuaauauuacaaauuggaaacauaaucucaauauggauuagccacucaauucaacuugggaaucaaaaucagauugaaacaugcaaucaaagcgucauuacuuaugaaaacaacacuuggguaaaucagacauauguuaacaucagcaacaccaacuuugcugcuggacagucagugguuuccgugaaauuagcgggcaauuccucucucugcccuguuaguggaugggcuauauacaguaaagacaacaguauaagaaucgguuccaagggggauguguuugucauaagggaaccauucauaucaugcucccccuuggaaugcagaaccuucuucuugacucaaggggccuugcuaaaugacaaacauuccaauggaaccauuaaagacaggagcccauaucgaacccuaaugagcuguccuauuggugaaguucccucuccauacaacucaagauuugagucagucgcuuggucagcaagugcuugucaugauggcaucaauuggcuaacaauuggaauuucuggcccagacaauggggcaguggcuguguuaaaguacaacggcauaauaacagacacuaucaagaguuggagaaacaauauauugagaacacaagagucugaaugugcauguguaaaugguucuugcuuuacuguaaugaccgauggaccaagugauggacaggccucauacaagaucuucagaauagaaaagggaaagauagucaaaucagucgaaaugaaugccccuaauuaucacuaugaggaaugcuccuguuauccugauucuagugaaaucacaugugugugcagggauaacuggcauggcucgaaucgaccgugggugucuuucaaccagaaucuggaauaucaaauaggauacauaugcagugggauuuucggagacaauccacgcccuaaugauaagacaggcaguugugguccaguaucgucuaauggagcaaauggaguaaaaggauuuucauucaaauacggcaaugguguuuggauagggagaacuaaaagcauuaguucaagaaacgguuuugagaugauuugggauccgaacggauggacugggacagacaauaacuucucaauaaagcaagauaucguaggaauaaaugaguggucaggauauagcgggaguuuuguucagcauccagaacuaacagggcuggauuguauaagaccuugcuucuggguugaacuaaucagagggcgacccaaagagaacacaaucuggacuagcgggagcagcauauccuuuugugguguaaacagugacacuguggguuggucuuggccagacggugcugaguugccauuuaccauugacaaguaa

SEQ ID NO: 50545 - RNA, 1410 nt, Artificial Sequence
  derived and/or modified CDS sequence (wt) from neuraminidase__InfluenzaA__ADF27366
augaauccaaaccaaaagauaauaaccauugguucggucuguaugacaauuggaauggcuaacuuaauauuacaaauuggaaacauaaucucaauauggauuagccacucaauucaacuugggaaucaaaaucagauugaaacaugcaaucaaagcgucauuacuuaugaaaacaacacuuggguaaaucagacauauguuaacaucagcaacaccaacuuugcugcuggacagucagugguuuccgugaaauuagcgggcaauuccucucucugcccuguuaguggaugggcuauauacaguaaagacaacaguauaagaaucgguuccaagggggauguguuugucauaagggaaccauucauaucaugcucccccuuggaaugcagaaccuucuucuugacucaaggggccuugcuaaaugacaaacauuccaauggaaccauuaaagacaggagcccauaucgaacccuaaugagcuguccuauuggugaaguucccucuccauacaacucaagauuugagucagucgcuuggucagcaagugcuugucaugauggcaucaauuggcuaacaauuggaauuucuggcccagacaauggggcaguggcuguguuaaaguacaacggcauaauaacagacacuaucaagaguuggagaaacaauauauugagaacacaagagucugaaugugcauguguaaaugguucuugcuuuacuguaaugaccgauggaccaagugauggacaggccucauacaagaucuucagaauagaaaagggaaagauagucaaaucagucgaaaugaaugccccuaauuauuacuaugaggaaugcuccuguuauccugauucuagugaaaucacaugugugugcagggauaacuggcauggcucgaaucgaccgugggugucuuucaaccagaaucuggaauaucaaauaggauacauaugcagugggauuuucggagacaauccacgcccuaaugauaagacaggcaguugugguccaguaucgucuaauggagcaaauggaguaaaaggauuuucauucaaauacggcaaugguguuuggauagggagaacuaaaagcauuaguucaagaaacgguuuugagaugauuugggauccgaacggauggacugggacagacaauaacuucucaauaaagcaagauaucguaggaauaaaugaguggucaggauauagcgggaguuuuguucagcauccagaacuaacagggcuggauuguauaagaccuugcuucuggguugaacuaaucagagggcgacccaaagagaacacaaucuggacuagcgggagcagcauauccuuuugugguguaaacagugacacuguggguuggucuuggccagacggugcugaguugccauuuaccauugacaaguaa

SEQ ID NO: 50546 - RNA, 1410 nt, Artificial Sequence
  derived and/or modified CDS sequence (wt) from neuraminidase__InfluenzaA__ADF27382
augaauccaaaccaaaagauaauaaccauugguucggucuguaugacaauuggaauggcuaacuuaauauuacaaauuggaaacauaaucucaauauggauuagccacucaauucaacuugggaaucaaaaucagauugaaacaugcaaucaaagcgucauuacuuaugaaaacaacacuuggguaaaucagacauauguuaacaucagcaacaccaacuuugcugcuggacagucagugguuuccgugaaauuagcgggcaauuccucucucugcccuguuaguggaugggcuauauacaguaaagacaacaguauaagaaucggguccaagggggauguguuugucauaagggaaccauucauaucaugcucccccuuggaaugcagaaccuucuucuugacucaaggggccuugcuaaaugacaaacauuccaauggaaccauuaaagacaggagcccauaucgaacccuaaugagcuguccuauuggugaaguucccucuccauacaacucaagauuugagucagucgcuuggucagcaagugcuugccaugauggcaucaauuggcuaacaauuggaauuucuggcccagacaauggggcaguggcuguguuaaaguacaacggcauaauaacagacacuaucaagaguuggagaaacaauauauugagaacacaagagucugaaugugcauguguaaaugguucuugcuuuacuguaaugaccgauggaccaagugauggacaggccucauacaagaucuucagaauagaaaagggaaagauagucaaaucagucgaaaugaaugccccuaauuaucacuaugaggaaugcuccuguuauccugauucuagugaaaucacaugugugugcagggauaacuggcauggcucgaaucgaccgugggugucuuucaaccagaaucuggaauaucagauaggauacauaugcagugggauuuucggagacaauccacgcccuaaugauaagacaggcaguugugguccaguaucgucuaauggagcaaauggaguaaaaggauuuucauucaaauacggcaaugguguuuggauagggagaacuaaaagcauuaguucaagaaacgguuuugagaugauuugggauccgaacggauggacugggacagacaauaacuucucaauaaagcaagauaucguaggaauaaaugaauggucaggauauagcgggaguuuuguucagcauccagaacuaacagggcuggauuguauaagaccuugcuucuggguugaacuaaucagagggcgacccaaagagaacacaaucuggacuagcgggagcagcauauccuuuugugguguaaacagugacacuguggguuggucuuggccagacggugcugaguugccauuuaccauugacaaguaa

SEQ ID NO: 50547 - RNA, 1410 nt, Artificial Sequence; identical to SEQ ID NO: 49827
  derived and/or modified CDS sequence (wt) from neuraminidase__InfluenzaA__ADF27392

SEQ ID NO: 50548 - RNA, 1410 nt, Artificial Sequence
  derived and/or modified CDS sequence (wt) from neuraminidase__InfluenzaA__ADF27402
augaauccaaaccaaaagauaauaaccauugguucggucuguaugacaauuggaauggcuaacuuaauauuacaaauuggaaacauaaucucaauauggauuagccacucaauucaacuugggaaucaaaaucagauugaaacaugcaaucaaagcgucauuacuuaugaaaacaacacuuggguaaaucagacauauguuaacauaagcaacaccaacuuugcugcuggacagucagugguuuccgugaaauuagcgggcaauuccucucucugcccuguuaguggaugggcuauauacaguaaagacaacaguauaagaauugguuccaagggggauguguuugucauaagggaaccauucauaucaugcucccccuuggaaugcagaaccuucuucuugacucaaggggccuugcuaaaugacaaacauuccaauggaaccauuaaagacaggagcccauaucgaacccuaaugagcuguccuauuggugaaguucccucuccauacaacucaagauuugagucagucgcuuggucagcaagugcuugucaugauggcaucaauuggcuaacaauuggaauuucuggcccagacaauggagcaguggcuguguuaaaguacaacggcauaauaacagacacuaucaagaguuggagaaacaauauauugagaacacaagagucugaaugugcauguguaaaugguucuugcuuuacuguaaugaccgauggaccaagugauggacaggccucauacaagaucuucagaauagaaaagggaaagauagucaaaucagucgaaaugaaugccccuaauuaucacuaugaggaaugcuccuguuauccugauucuagugaaaucacaugugugugcagggauaacuggcauggcucgaaucgaccgugggugucuuucaaccagaauuuggaauaucagauaggauacauaugcagugggauuuucggagacaauccacgcccuaaugauaagacaggcaguugugguccaguaucgucuaauggagcaaauggaguaaaaggauuuucauucaaauacggcaaugguguuuggauagggagaacuaaaagcauuaguucaagaaacgguuuugagaugauuugggauccgaacggauggacugggacagacaauaacuucucaauaaagcaagauaucguaggaauaaaugaguggucaggauauagcgggaguuuuguucagcauccagaacuaacagggcuggauuguauaagaccuugcuucuggguugaacuaaucagagggcgacccaaagagaauacaaucuggacuagcgggagcagcauauccuuuugugguguaaacagugacacuguggguuggucuuggccagacggugcugaguugccauuuaccauugacaaguaa

SEQ ID NO: 50549 - RNA, 1410 nt, Artificial Sequence
  derived and/or modified CDS sequence (wt) from neuraminidase__InfluenzaA__ADF27422
augaauccaaaccaaaagauaauaaccauugguucggucuguaugacaauuggaauggcuaacuuaauauuacaaauuggaaacauaaucucaauauggauuagccacucaauucaacuugggaaucaaaaucagauugaaacaugcaaucaaagcgucauuacuuaugaaaacaacacuuggguaaaucagacauauguuaacaucagcaacaccaacuuugcugcuggacagucagugguuuccgugaaauuagcgggcaauuccucucucugcccuguuaguggaugggcuauauacaguaaagacaacaguauaagaaucgguuccaagggggauguguuuguaauaagggaaccauucauaucaugcucccccuuggaaugcagaaccuucuucuugacucaaggggccuugcuaaaugacaaacauuccaauggaaccauuaaagacaggagcccauaucgaacccuaaugagcuguccuauuggugaaguucccucuccauacaacucaagauuugagucagucgcuuggucagcaagugcuugucaugauggcaucaauuggcuaacaauuggaauuucuggcccagacaauggggcaguggcuguguuaaaguacaacggcauaauaacagacacuaucaagaguuggaaaaacaauauauugagaacacaagagucugaaugugcauguguaaaugguucuugcuuuacuguaaugaccgauggaccaagugauggacaggccucauacaagaucuucagaauagaaaagggaaagauagucaaaucagucgaaaugaaugccccuaauuaucacuaugaggaaugcuccuguuauccugauucuagugaaaucacaugugugugcagggauaacuggcauggcucgaaucgaccgugggugucuuucaaccagaaucuggaauaucagauaggauacauaugcagugggauuuucggagacaauccacgcccuaaugauaagacaggcaguugugguccaguaucgucuaauggagcaaauggaguaaaaggauuuucauucaaauacggcaaugguguuuggauagggagaacuaaaagcauuaguucaagaaacgguuuugagaugauuugggauccgaacggauggacugggacagacaauaacuucucaauaaagcaagauaucguaggaauaaaugaauggucaggauauagcgggaguuuuguucagcauccagaacuaacagggcuggauuguauaagaccuugcuucuggguugaacuaaucagagggcgacccaaagagaacacaaucuggacuagcgggagcagcauauccuuuugugguguaaacagugacacuguggguuggucuuggccagacggugcugaguugccauuuaccauugacaaguaa

SEQ ID NO: 50550 - RNA, 1410 nt, Artificial Sequence
  derived and/or modified CDS sequence (wt) from neuraminidase__InfluenzaA__ADF27432
augaauccaaaccaaaagauaauaaccauugguucggucugugugacaauuggaauggcuaacuuaauauuacaaauuggaaacauaaucucaauauggauuagccacucaauucaacuugggaaucaaaaucagauugaaacaugcaaucaaagcgucauuacuuaugaaaacaacacuuggguaaaucagacauauguuaacaucagcaacaccaacuuugcugcuggacagucagugguuuccgugaaauuagcgggcaauuccucucucugcccuguuaguggaugggcuauauacaguaaagacaacaguauaagaaucgguuccaagggggauguguuugucauaagggaaccauucauaucaugcucccccuuggaaugcagaaccuucuucuugacucaaggggccuugcuaaaugacaaacauuccaauggaaccauuaaagacaggagcccauaucgaacccuaaugagcuguccuauuggugaaguucccucuccauacaacucaagauuugagucagucgcuuggucagcaagugcuugucaugauggcaucaauuggcuaacaauuggaauuucuggcccagacaauggggcaguggcuguguuaaaguacaacggcauaauaacagacacuaucaagaguuggagaaacaauauauugagaacacaagagucugaaugugcauguguaaaugguucuugcuuuacuguaaugaccgauggaccaagugauggacaggccucauacaagaucuucagaauagaaaagggaaagauagucaaaucagucgaaaugaaugccccuaauuaucacuaugaggaaugcuccuguuauccugauucuagugaaaucacaugugugugcagggauaacuggcauggcucgaaucgaccgugggugucuuucaaccagaaucuggaauaucagauaggauacauaugcagugggauuuucggagacaauccacgcccuaaugauaagacaggcaguugugguccaguaucgucuaauggagcaaauggaguaaaaggauuuucauucaaauacggcaaugguguuuggauagggagaacuaaaagcauuaguucaagaaacgguuuugagaugauuugggauccgaacggauggacugggacagacaauaacuucucaauaaagcaagauaucguaggaauaaaugaauggucaggauauagcgggaguuuuguucagcauccagaacuaacagggcuggauuguauaagaccuugcuucuggguugaacuaaucagagggcgacccaaagagaacacaaucuggacuagcgggagcagcauauccuuuugugguguaaacagugacacuguggguuggucuuggccagacggugcugaguugccauuuaccauugacaaguaa

SEQ ID NO: 50551 - RNA, 1410 nt, Artificial Sequence
  derived and/or modified CDS sequence (wt) from neuraminidase__InfluenzaA__ADF27442
augaauccaaaccaaaagauaauaaccauugguucggucuguaugacaauuggaauggcuaacuuaauauuacaaauuggaaacauaauaucaauauggauuagccacucaauucaacuugagaaucaaaaucagauugaaacaugcaaucaaagcgucauuacuuaugaaaacaacacuuggguaaaucagacauauguuaacaucagcaacaccaacuuugcugcuggacagucagugguuuccgugaaauuagcgggcaauuccucucucugcccuguuaguggaugggcuauauacaguaaagacaacaguauaagaaucgguuccaagggggauguguuugucauaagggaaccauucauaucaugcucccccuuggaaugcagaaccuucuucuugacucaaggggccuugcuaaaugacaaacauuccaauggaaccauuaaagacaggagcccauaucgaacccuaaugagcuguccuauuggugaaguucccucuccauacaacucaagauuugagucagucgcuuggucagcaagugcuugucaugauggcaucaauuggcuaacaauuggaauuucuggcccagacaauggggcaguggcuguguuaaaguacaacggcauaauaacagacacuaucaagaguuggagaaacaauauauugagaacacaagagucugaaugugcauguguaaaugguucuugcuuuacugugaugaccgauggaccaagugauggacaggccucauacaagaucuucagaauagaaaagggaaagauagucaaaucagucgaaaugaaugccccuaauuaucacuaugaggaaugcuccuguuauccugauucuagugaaaucacaugugugugcagggauaacuggcauggcucgaaucgaccgugggugucuuucaaccagaaucuggaauaucagauaggauacauaugcagugggauuuucggagacaauccacgcccuaaugauaagacaggcaguugugguccaguaucgucuaauggagcaaauggaguaaaaggauuuucauucaaauacggcaaugguguuuggauagggagaacuaaaagcauuaguucaagaaacgguuuugagaugauuugggauccgaacggauggacugggacagacaauaacuucucaauaaagcaagauaucguaggaauaaaugaguggucaggauauagcgggaguuuuguucagcauccagaacuaacagggcuggauuguauaagaccuugcuucuggguugaacuaaucagagggcgacccaaagagaacacaaucuggacuagcgggagcagcauauccuuuugugguguaaacagugacacuguggguuggucuuggccagacggugcugaguugccauuuaccauugacaaguaa

SEQ ID NO: 50552 - RNA, 1410 nt, Artificial Sequence
  derived and/or modified CDS sequence (wt) from neuraminidase__InfluenzaA__ADF27462
augaauccaaaccaaaagauaauaaccauugguucggucuguaugacaauuggaauggcuaacuuaauauuacaaauuggaaacauaaucucaauauggauuagccacucaauucaacuugggaaucaaaaucagauugaagcaugcaaucaaagcgucauuacuuaugaaaacaacacuuggguaaaucagacauauguuaacaucagcaacaccaacuuugcugcuggacagucagugguuuccgugaaauuagcgggcaauuccucucucugcccuguuaguggaugggccguauacaguaaagacaacaguauaagaaucgguuccaagggggauguguuugucauaagggaaccauucauaucaugcucccccuuggaaugcagaaccuucuucuugacucaaggggccuugcuaaaugacaaacauuccaauggaaccauuaaagacaggagcccauaucgaacccuaaugagcuguccuauuggugaaguucccucuccauacaacucaagauuugagucagucgcuuggucagcaagugcuugucaugauggcaucaauuggcuaacaauuggaauuucuggcccagacaauggggcaguggcuguguuaaaguacaacggcauaauaacagacacuaucaagaguuggagaaacaauauauugagaacacaagagucugaaugugcauguguaaaugguucuugcuuuacuguaaugaccgauggaccaagugauggacaggccucauacaagaucuucagaauagaaaagggaaagauagucaaaucagucgaaaugaaugccccuaauuaucacuaugaggaaugcuccuguuauccugauucuagugaaaucacaugugugugcagggauaacuggcauggcucgaaucgaccgugggugucuuucaaccagaaucuggaauaucagauaggauacauaugcagugggauuuucggagacaauccacgcccuaaugauaagacaggcaguugugguccaguaucgucuaauggagcaaauggaguaaaaggauuuucauucaaauacggcaaugguguuuggauagggagaacuaaaagcauuaguucaaggaacgguuuugagaugauuugggauccgaacggauggacugggacagacaauaacuucucaauaaagcaagauaucguaggaauaaaugaguggucaggauauagcgggaguuuuguucagcauccagaacuaacagggcuggauuguauaagaccuugcuucuggguugaacuaaucagagggcgacccaaagagaacacaaucuggacuagcgggagcagcauauccuuuugugguguaaacagugacacuguggguuggucuuggccagacggugcugaguugccauuuaccauugacaaguaa

SEQ ID NO: 50553 - RNA, 1410 nt, Artificial Sequence
  derived and/or modified CDS sequence (wt) from neuraminidase__InfluenzaA__ADF27472
augaauccaaaccaaaagauaauaaccauugguucggucuguaugacaauuggaauggcuaacuuaauauuacaaauuggaaacauaaucucaauauggauuagccacucaauucaacuugggaaucaaaaucagauugaaacaugcaaucaaagcgucauuacuuaugaaaacaacacuuggguaaaucagacauauguuaacaucagcaacaccaacuuugcugcuggacagucagugguuuccgugaaauuagcgggcaauuccucucucugcccuguuaguggaugggcuauauacaguaaagacaacaguauaagaaucgguuccaagggggauguguuugucauaagggaaccauucauaucaugcucccccuuggaaugcagaaccuucuucuugacucaaggggccuugcuaaaugacaaacauuccaauggaaccauuaaagacaggagcccauaucgaacccuaaugagcuguccuauuggugaaguucccucuccauacaacucaagauuugagucagucgcuuggucagcaagugcuugucaugauggcaucaauuggcuaacaauuggaauuucuggcccagacaauggggcaguggcuguguuaaaguacaacggcauaauaacagacacuaucaagaguuggagaaacaauauauugagaacacaagagucugaaugugcauguguaaaugguucuugcuuuacuguaaugaccgauggaccaagugauggacaggccucauacaagaucuucagaauagaaaagggaaagauagucaaaucagucgaaaugaaugccccuaauuaucacuaugaggaaugcuccuguuauccugauucuagugaaaucacaugugugugcagggauaacuggcauggcucgaaucgaccgugggugucuuucaaccagaaucuggaauaucagauaggauacauaugcagugggauuuucggagacaauccacgcccuaaugauaagacaggcaguugugguccaguaucgucuaauggagcaaacggaguaaaaggauuuucauucaaauacggcaaugguguuuggauagggagaacuaaaagcauuaguucaagaaacgguuuugagaugauuugggauccgaacggauggacugggacagacaauaacuucucaauaaagcaagauaucguaggaauaaaugaauggucaggauauagcgggaguuuuguucagcauccagaacuaacggggcuggauuguauaagaccuugcuucuggguugaacuaaucagagggcgacccaaagagaacacaaucuggacuagcgggagcagcauauccuuuugugguguaaacagugacacuguggguuggucuuggccagacggugcugaguugccauuuaccauugacaaguaa

SEQ ID NO: 50554 - RNA, 1410 nt, Artificial Sequence
  derived and/or modified CDS sequence (wt) from neuraminidase__InfluenzaA__ADF27482
augaauccaaaccaaaagauaauaaccauugguucggucuguaugacaauuggaauggcuaacuuaauauuacaaauuggaaacauaaucucaauauggauuagccacucaauucaacuugggaaucaaaaucagguugaaacaugcaaucaaagcaucauuacuuaugaaaacaacacuuggguaaaucagacauauguuaacaucagcaacaccaacuuugcugcuggacagucagugguuuccgugaaauuagcgggcaauuccucucucugcccuguuaguggaugggcuauauacaguaaagacaacaguauaagaaucgguuccaagggggauguguuugucauaagggaaccauucauaucaugcucccccuuggaaugcagaaccuucuucuugacucaaggggccuugcuaaaugacaaacauuccaauggaaccauuaaagacaggagcccauaucgaacccuaaugagcuguccuauuggugaaguucccucuccauacaacucaagauuugagucagucgcuuggucagcaagugcuugucaugauggcaucaauuggcuaacaauuggaauuucuggcccagacaauggggcaguggcuguguuaaaguacaacggcauaauaacagacacuaucaagaguuggagaaacaauauauugagaacacaagagucugaaugugcauguguaaaugguucuugcuuuacuguaaugaccgauggaccaagugauggacaggccucauacaagaucuucagaauagaaaagggaaagauagucaaaucagucgaaaugaaugccccuaauuaucacuaugaggaaugcuccuguuauccugauucuagugaaaucacaugugugugcagggauaacuggcauggcucgaaucgaccgugggugucuuucaaccagaaucuggaauaucagauaggauacauaugcagugggauuuucggagacaauccacgcccuaaugauaagacaggcaguugugguccaguaucgucuaauggagcaaauggaguaaaaggauuuucauucaaauacggcaaugguguuuggauagggagaacuaaaagcauuaguucaagaaacgguuuugagaugauuugggauccgaacggauggacugggacagacaauaacuucucaauaaagcaagauaucguaggaauaaaugaauggucaggauauagcgggaguuuuguucagcauccagaacuaacagggcuggauuguauaagaccuugcuucuggguugaacuaaucagagggcgacccaaagagaacacaaucuggacuagcgggagcagcauauccuuuugugguguaaacagugacacuguggguuggucuuggccagacggugcugaguugccauuuaccauugacaaguaa

SEQ ID NO: 50555 - RNA, 1410 nt, Artificial Sequence
  derived and/or modified CDS sequence (wt) from neuraminidase__InfluenzaA__ADF27492
augaauccaaaccaaaagauaauaaccauugguucggucuguaugacaauuggaauggcuaacuuaauauuacaaauuggaaacauaaucucaauauggauuagccacucaauucaacuugggaaucaaaaucagauugaaccaugcaaucaaagcgucauuacuuaugaaaacaacacuuggguaaaucagacauauguuaacaucagcaacaccaacuuugcugcuggacagucagugguuuccgugaaauuagcgggcaauuccucucucugcccuguuaguggaugggcuauauacaguaaagacaacaguauaagaaucgguuccaagggggauguguuugucauaagggaaccauucauaucaugcucccccuuggaaugcagaaccuucuucuugacucaaggggccuugcuaaaugacaaacauuccaauggaaccauuaaagacaggagcccauaucgaacccuaaugagcuguccuauuggugaaguucccucuccauacaacucaagauuugagucagucgcuuggucagcaagugcuugucaugauggcaucaauuggcuaacaauuggaauuucuggcccagacaauggggcaguggcuguguuaaaguacaacggcauaauaacagacacuaucaagaguuggagaaacaauauauugagaacacaagagucugaaugugcauguguaaaugguucuugcuuuacuguaaugaccgauggaccaagugauggacaggccucauacaagaucuucagaauagaaaagggaaagauagucaaaucaaucgaaaugaaugccccuaauuaucacuaugaggaaugcuccuguuauccugauucuagugaaaucacaugugugugcagggauaacuggcauggcucgaaucgaccgugggugucuuucaaccagaaucuggaauaucagauaggauacauaugcagugggauuuucggagacaauccacgcccuaaugauaagacaggcaguugugguccaguaucgucuaauggagcaaauggaguaaaaggauuuucauucaaauacggcaaugguguuuggauagggagaacuaaaagcauuaguucaagaaacgguuuugagaugauuugggauccgaacggauggacugggacagacaauaacuucucaauaaagcaagauaucguaggaauaaaugaguggucaggauauagcgggaguuuuguucagcauccagaacuaacagggcuggauuguauaagaccuugcuucuggguugaacuaaucagagggcgacccaaagagaacacagucuggacuagcgggagcagcauauccuuuugugguguaaacagugacacuguggguuggucuuggccagacggugcugaguugccauuuaccauugacaaguaa

SEQ ID NO: 50556 - RNA, 1410 nt, Artificial Sequence; identical to SEQ ID NO: 49794
  derived and/or modified CDS sequence (wt) from neuraminidase__InfluenzaA__ADF27502

SEQ ID NO: 50557 - RNA, 1410 nt, Artificial Sequence; identical to SEQ ID NO: 48750
  derived and/or modified CDS sequence (wt) from neuraminidase__InfluenzaA__ADF27512

SEQ ID NO: 50558 - RNA, 1410 nt, Artificial Sequence
  derived and/or modified CDS sequence (wt) from neuraminidase__InfluenzaA__ADF27522
augaauccaaaccaaaagauaauaaccauugguucggucuguaugacaauugggauggcuaacuuaauauuacaaauuggaaacauaaucucaauauggauuagccacucaauucaacuugggaaucaaaaucagauugaaacaugcaaucaaagcgucauuacuuaugaaaacaacacuuggguaaaucagacauauguuaacaucagcaacaccaacuuugcugcuggacagucagugguuuccgugaaauuagcgggcaauuccucucucugcccuguuaguggaugggcuauauacaguaaagacaacaguauaagaauugguuccaagggggauguguuugucauaagggaaccauucauaucaugcucccccuuggaaugcagaaccuucuucuugacucaaggggccuugcuaaaugacaaacauuccaauggaaccauuaaagacaggagcccauaucgaacccuaaugagcuguccuauuggugaaguucccucuccauacaacucaagauuugagucagucgcuuggucagcaagugcuugucaugauggcaucaauuggcuaacaauuggaauuucuggcccagacaauggagcaguggcuguguuaaaguacaacggcauaauaacagacacuaucaagaguuggagaaacaauauauugagaacacaagagucugaaugugcauguguaaaugguucuugcuuuacuguaaugaccgauggaccaagugauggacaggccucauacaagaucuucagaauagaaaagggaaagauagucaaaucagucgaaaugaaugccccuaauuaucacuaugaggaaugcuccuguuauccugauucuagugaaaucacaugugugugcagggauaacuggcauggcucgaaucgaccgugggugucuuucaaccagaauuuggaauaucagauaggauacauaugcagugggauuuucggagacaauccacgcccuaaugauaagacaggcaguugugguccaguaucgucuaauggagcaaauggaguaaaaggauuuucauucaaauacggcaaugguguuuggauagggagaauuaaaagcauuaguucaagaaacgguuuugagaugauuugggauccgaacggauggacugggacagacaauaacuucucaauaaagcaagauaucguaggaauaaaugaguggucaggauauagcgggaguuuuguucagcauccagaacuaacagggcuggauuguauaagaccuugcuucuggguugaacuaaucagagggcgacccaaagagaacacaaucuggacuagcgggagcagcauauccuuuugugguguaaacagugacacuguggguuggucuuggccagacggugcugaguugccauuuaccauugacaaguaa

SEQ ID NO: 50559 - RNA, 1410 nt, Artificial Sequence; identical to SEQ ID NO: 48750
  derived and/or modified CDS sequence (wt) from neuraminidase__InfluenzaA__ADF27532

SEQ ID NO: 50560 - RNA, 1410 nt, Artificial Sequence
  derived and/or modified CDS sequence (wt) from neuraminidase__InfluenzaA__ADF27542
augaauccaaaccaaaagauaauaaccauugguucggucuguaugacaauuggaauggcuaacuuaauauuacaaauuggaaacauaaucucaauauggauuagccacucaauucaacuugggaaucaaaaucagauugaaacaugcaaucaaagcgucauuacuuaugaaaacaacacuuggguaaaucagacauauguuaacaucagcaacaccaacuuugcugcuggacagucagugguuuccgugaaauuagcgggcaauuccucucucugcccuguuaguggaugggcuauauacaguaaagacaacaguguaagaaucgguuccaagggggauguguuugucauaagggaaccauucauaucaugcucccccuuggaaugcagaaccuucuucuugacucaaggggccuugcuaaaugacaaacauuccaauggaacaauuaaagacaggagcccauaucgaacccuaaugagcugcccuauuggugaaguucccucuccauacaacucaagauuugagucagucgcuuggucagcaagugcuugucaugauggcaucaauuggcuaacaauuggaauuucuggcccagacaauggggcaguggcuguguuaaaguacaacggcauaauaacagacacuaucaagaguuggagaaacaauauauugagaacacaagagucugaaugugcauguguaaaugguucuugcuuuacuguaaugaccgauggaccaagugauggacaggccucauacaagaucuucagaauagaaaagggaaagauagucaaaucagucgaaaugaaugccccuaauuaucacuaugaggaaugcuccuguuauccugauucuagugaaaucacaugugugugcagggauaacuggcauggcucgaaucgaccgugggugucuuucaaccagaaucuggaauaucggauaggauacauaugcagugggauuuucggagacaauccacgcccuaaugauaagacaggcaguugugguccaguaucgucuaauggagcaaauggaguaaaaggauuuucauucaaauacggcaaugguguuuggauagggagaacuaaaagcauuaguucaagaaacgguuuugagaugauuugggauccgaacggauggacugggacagacaauaacuucucaauaaagcaagauaucguaggaauaaaugaguggucaggauauagcgggaguuuuguucagcauccagaacuaacagggcuggauuguauaagaccuugcuucuggguugaacuaaucagagggcgacccaaagagaacacaaucuggacuagcgggagcagcauauccuuuugugguguaaacagugacacuguggguuggucuuggccagacggugcugaguugccauuuaccauugacaaguaa

SEQ ID NO: 50561 - RNA, 1410 nt, Artificial Sequence
  derived and/or modified CDS sequence (wt) from neuraminidase__InfluenzaA__ADF27552
augaauccaaaccaaaagauaauaaccauugguucggucuguaugacaauuggauuggcuaacuuaauauuacaaauuggaaacauaaucucaauauggguuagccacucaauucaacuugggaaucaaaaucagauugaaacaugcaaucaaagcgucauuacuuaugaaaacaacacuuggguaaaucagacauauguuaacaucagcaacaccaacuuugcugcuggacagucagugguuuccgugaaauuagcgggcaauuccucucucugcccuguuaguggaugggcuauauacaguaaagacaacaguguaagaauugguuccaagggggauguguuugucauaagggaaccauucauaucaugcucccccuuggaaugcagaaccuucuucuugacucaaggggccuugcuaaaugacaaacauuccaauggaaccauuaaagacaggagcccauaucgaacccuaaugagcuguccuauuggugaaguucccucuccauacaacucaagauuugagucagucgcuuggucagcaagugcuugucaugauggcaucaauuggcuaacaauuggaauuucuggcccagacaauggggcaguggcuguguuaaaguacaacggcauaauaacagacacuaucaagaguuggagaaacaauauauugagaacacaagagucugaaugugcauguguaaaugguucuugcuuuacuguaaugaccgauggaccaagugauggacaggccucauacaagaucuucagaauagaaaagggaaagauagucaaaucagucgaaaugaaugccccuaauuaucacuaugaggaaugcuccuguuauccugauucuagugaaaucacaugugugugcagggauaacuggcauggcucgaaucgaccgugggugucuuucaaccagaaucuggaauaucggauaggauacauaugcagugggauuuucggagacaauccacgcccuaaugauaagacaggcaguugugguccaguaucgucuaauggagcaaauggaguaaaaggauuuucauucaaauacggcaaugguguuuggauagggagaacuaaaagcauuaguucaagaaacgguuuugagaugauuugggauccgaacggauggacugggacagacaaaaacuucucaauaaagcaagauaucguaggaauaaaugaguggucaggauauagcgggaguuuuguucagcauccagaacuaacagggcuggauuguauaagaccuugcuucuggguugaacuaaucagagggcgacccaaagagaacacaaucuggacuagcgggagcagcauauccuuuugugguguaaacagugacacuguggguuggucuuggccagacggugcugaguugccauuuaccauugacaaguaa

SEQ ID NO: 50562 - RNA, 1410 nt, Artificial Sequence
  derived and/or modified CDS sequence (wt) from neuraminidase__InfluenzaA__ADF27562
augaauccaaaccaaaagauaauaaccauugguucggucuguaugacaauuggaauggcuaacuuaauauuacaaauuggaaacauaaucucaauauggauuagccacucaauucaacuugggaaucaaaaucagauugaaacaugcaaucaaagcgucauuacuuaugaaaacaacacuuggguaaaucagacauauguuaacaucagcaacaccaacuuugcugcuggacagucagugguuuccgugaaauuagcgggcaauuccucucucugcccuguuaguggaugggcuauauacaguaaagacaacaguauaagaauugguuccaagggggauguguuugucauaagggaaccauucauaucaugcucccccuuggaaugcagaaccuucuucuugacucaaggggccuugcuaaaugacaaacauuccaauggaaccauuaaagacaggagcccauaucgaacccuaaugagcuguccuauuggugaaguucccucuccauacaacucaagauuugagucagucgcuuggucagcaagugcuugucaugauggcaucaauuggcuaacaauuggaauuucuggcccaaacaauggagcaguggcuguguuaaaguacaacggcauaauaacagacacuaucaagaguuggagaaacaauauauugagaacacaagagucugaaugugcauguguaaaugguucuugcuuuacuguaaugaccgauggaccaagugauggacaggccucauacaagaucuucagaauagaaaagggaaagauagucaaaucagucgaaaugaaugccccuaauuaucacuaugaggaaugcuccuguuauccugauucuagugaaaucacaugugugugcagggauaacuggcauggcucgaaucggccgugggugucuuucaaccagaauuuggaauaucagauaggauacauaugcagugggauuuucggagacaauccacgcccuaaugauaagacaggcaguugugguccaguaucgucuaauggagcaaauggaguaaaaggauuuucauucaaauacggcaaugguguuuggauagggagaacuaaaagcauuaguucaagaaacgguuuugagaugauuugggauccgaacggauggacugggacagacaauaacuucucaauaaagcaagauaucguaggaauaaaugaguggucaggauauagcgggaguuuuguucagcauccagaacuaacagggcuggauuguauaagaccuugcuucuggguugaacuaaucagagggcgacccaaagagaacacaaucuggacuagcgggagcagcauauccuuuugugguguaaacagugacacuguggguuggucuuggccagacggugcugaguugccauuuaccauugacaaguaa

SEQ ID NO: 50563 - RNA, 1410 nt, Artificial Sequence
  derived and/or modified CDS sequence (wt) from neuraminidase__InfluenzaA__ADF27572
augaauccaaaccaaaagauaauaaccauugguucagucuguaugacaauuggaauggcuaacuuaauauuacaaauuggaaacauaaucucaauauggauuagccacucaauucaacuugggaaucaaaaucagauugaaacaugcaaucaaagcgucauuacuuaugaaaacaacacuuggguaaaucagacauauguuaacaucagcaacaccaacuuugcugcuggacagucagugguuuccgugaaauuagcgggcaauuccucucucugcccuguuaguggaugggcuauauacaguaaagacaacaguauaagaaucgguuccaagggggauguguuugucauaagggaaccauucauaucaugcucccccuuggaaugcagaaccuucuucuugacucaaggggccuugcuaaaugacaaacauuccaauggaaccauuaaagacaggagcccauaucgaacccuaaugagcuguccuauuggugaaguucccucuccauacaacucaagauuugagucagucgcuuggucagcaagugcuugucaugauggcaucaauuggcuaacaauuggaauuucuggcccagacaauggggcaguggcuguguuaaaguacaacggcauaauaacagacacuaucaagaguuggagaaacaauauauugagaacacaagagucugaaugugcauguguaaaugguucuugcuuuacuguaaugaccgauggaccaagugauggacaggccucauacaagaucuucagaauagaaaagggaaaaauagucaaaucagucgaaaugaaugccccuaauuaucacuaugaggaaugcuccuguuauccugauucuagugaaaucacaugugugugcagggauaacuggcauggcucgaaucgaccgugggugucuuucaaccagaaucuggaauaucagauaggauacauaugcagugggauuuucggagacaauccacgcccuaaugauaagacaggcaguugugguccaguaucgucuaauggagcaaauggaguaaaaggauuuucauucaaauacggcaaugguguuuggauagggagaacuaaaagcauuaguucaagaaacgguuuugagaugauuugggauccgaacggauggacugggacagacaauaacuucucaauaaagcaagauaucguaggaauaaaugaauggucaggauauagcgggaguuuuguucagcauccagaacuaacagggcuggauuguauaagaccuugcuucuggguugaacuaaucagagggcgacccaaagagaacacaaucuggacuagcgggagcagcauauccuuuugugguguaaacagugacacuguggguuggucuuggccagacggugcugaguugccauuuaccauugacaaguaa

SEQ ID NO: 50564 - RNA, 1410 nt, Artificial Sequence
  derived and/or modified CDS sequence (wt) from neuraminidase__InfluenzaA__ADF27582
augaauccaaaccaaaagauaauaaccauugguucggucuguaugacaauuggaauggcuaacuuaauauuacaaauuggaaacauaaucucaauauggauuagccacucaauucaacuugggaaucaaaaucagauugaaacaugcaaucaaagcgucauuacuuaugaaaacaacacuuggguaaaucagacauauguuaacaucagcaacaccaacuuugcugcuggacagucagugguuuccgugaaauuagcgggcaauuccucucucugcccuguuaguggaugggcuauauacaguaaagacaacaguauaagaaucgguuccaagggggauguguuugucauaagggaaccauucauaucaugcuccccauuggaaugcagaaccuucuucuugacucaaggggccuugcuaaaugacaaacauuccaauggaaccauuaaagacaggagcccauaucgaacccuaaugagcuguccuauuggugaaguucccucuccauacaacucaagauuugagucagucgcuuggucagcaagugcuugucaugauggcaucaauuggcuaacaauuggaauuucuggcccagacaauggggcaguggcuguguuaaaguacaacggcauaauaacagacacuaucaagaguuggagaaacaauauauugagaacacaagagucugaaugugcauguguaaaugguucuugcuuuacuguaaugaccgauggaccaagugauggacaggccucauacaagaucuucagaauagaaaagggaaagauagucaaaucagucgaaaugaaugccccuaauuaucacuaugaggaaugcuccuguuauccugauucuagugaaaucacaugugugugcagggauaacuggcauggcucgaaucgaccgugggugucuuucaaccagaaucuggaauaucggauaggauacauaugcagugggauuuucggagacaauccacgcccuaaugauaagacaggcaguugugguccaguaucgucuaauggagcaaauggaguaaaaggauuuucauucaaauacggcaaugguguuuggauagggagaacuaaaagcauuaguucaagaaacgguuuugagaugauuugggauccgaacggauggacugggacagacaauaacuucucaauaaagcaagauaucguaggaauaaaugaguggucaggauauagcgggaguuuuguucagcauccagaacuaacagggcuggauuguauaagaccuugcuucuggguugaacuaaucagagggcgacccaaagagaacacaaucuggacuagcgggagcagcauauccuuuugugguguaaacagugacacuguggguuggucuuggccagacggugcugaguugccauuuaccauugacaaguaa

SEQ ID NO: 50565 - RNA, 1410 nt, Artificial Sequence; identical to SEQ ID NO: 48750
  derived and/or modified CDS sequence (wt) from neuraminidase__InfluenzaA__ADF27592

SEQ ID NO: 50566 - RNA, 1410 nt, Artificial Sequence
  derived and/or modified CDS sequence (wt) from neuraminidase__InfluenzaA__ADF27602
augaauccaaaccaaaagauaauaaccauugguucggucuguaugacaauuggaauggcuaacuuaauauuacaaauuggaaacauaaucucaauauggauuagccacucaauucaacuugggaaucaaaaucagauugaaacaugcaaucaaagcgucauuacuuaugaaaacaacacuuggguaaaucagacauauguuaacaucagcaacaccaacuuugcugcuggacagucagugguuuccgugaaauuagcgggcaauuccucucucugcccuguuaguggaugggcuauauacaguaaagacaacaguauaagaaucgguuccaagggggauguguuugucauaagagaaccauucauaucaugcucccccuuggaaugcagaaccuucuucuugacucaaggggccuugcuaaaugacaaacauuccaauggaaccauuaaagacaggagcccauaucgaacccuaaugagcuguccuauuggugaaguucccucuccauacaacucaagauuugagucagucgcuuggucagcaagugcuugucaugauggcaucaauuggcuaacaauuggaauuucuggcccagacaauggggcaguggcuguguuaaaguacaacggcauaauaacagacacuaucaagaguuggagaaacaauauauugagaacacaagagucugaaugugcauguguaaaugguucuugcuuuacuguaaugaccgauggaccaagugauggacaggccucauacaagaucuucagaauagaaaggggaaagauagucaaaucagucgaaaugaaugccccuaauuaucacuaugaggaaugcuccuguuauccugauucuagugaaaucacaugugugugcagggauaacuggcauggcucgaaucgaccgugggugucuuucaaccagaaucuggaauaucagauaggauacauaugcagugggauuuucggagacaauccacgcccuaaugauaagacaggcaguugugguccaguaucgucuaauggagcaaauggaguaaaaggauuuucauucaaauacggcaaugguguuuggauagggagaacuaaaagcauuaguucaagaaacgguuuugagaugauuugggauccgaacggauggacugggacagacaauagcuucucaauaaagcaagauaucguaggaauaaaugaguggucaggauauagcgggaguuuuguucagcauccagaacuaacagggcuggauuguauaagaccuugcuucuggguugaacuaaucagaggacgacccaaagagaacacaaucuggacuagcgggagcagcauauccuuuugugguguaaacagugacacuguggguuggucuuggccagacggugcugaguugccauuuaccauugacaaguaa

SEQ ID NO: 50567 - RNA, 1410 nt, Artificial Sequence; identical to SEQ ID NO: 49781
  derived and/or modified CDS sequence (wt) from neuraminidase__InfluenzaA__ADF27612

SEQ ID NO: 50568 - RNA, 1410 nt, Artificial Sequence; identical to SEQ ID NO: 50491
  derived and/or modified CDS sequence (wt) from neuraminidase__InfluenzaA__ADF27622

SEQ ID NO: 50569 - RNA, 1410 nt, Artificial Sequence; identical to SEQ ID NO: 50485
  derived and/or modified CDS sequence (wt) from neuraminidase__InfluenzaA__ADF27632

SEQ ID NO: 50570 - RNA, 1410 nt, Artificial Sequence; identical to SEQ ID NO: 49794
  derived and/or modified CDS sequence (wt) from neuraminidase__InfluenzaA__ADF27642

SEQ ID NO: 50571 - RNA, 1410 nt, Artificial Sequence; identical to SEQ ID NO: 49794
  derived and/or modified CDS sequence (wt) from neuraminidase__InfluenzaA__ADF27652

SEQ ID NO: 50572 - RNA, 1410 nt, Artificial Sequence
  derived and/or modified CDS sequence (wt) from neuraminidase__InfluenzaA__ADF27662
augaauccaaaccaaaagauaauaaccauugguucggucuguaugacaauuggaauggcuaacuuaauauuacaaauuggaaacauaaucucaauauggauuagccacucaauucaacuugggaaucaaaaucagauugaaacaugcaaucaaagcgucauuacuuaugaaaacaacacuuggguaaaucagacauauguuaacaucagcaacaccaacuuugcugcuggacagucagugguuuccgugaaauuagcgggcaauuccucucucugcccuguuaguggaugggcuauauacaguaaagacaacaguguaagaaucgguuccaagggggauguguuugucauaagggaaccauucauaucaugcucccccuuggaaugcagaaccuucuucuugacucaaggggccuugcuaaaugacaaacauuccaauggaacaauuaaagacaggagcccauaucgaacucuaaugagcugcccuauuggugaaguucccucuccauacaacucaagauuugagucagucgcuuggucagcaagugcuuguaaugauggcaucaauuggcuaacaauuggaauuucuggcccagacaauggggcaguggcuguguuaaaguacaacggcauaauaacagacacuaucaagaguuggagaaacaauauauugagaacacaagagucugaaugugcauguguaaaugguucuugcuuuacuguaaugaccgauggaccaagugauggacaggccucauacaagaucuucagaauagaaaagggaaagauagucaaaucagucgaaaugaaugccccuaauuaucacuaugaggaaugcuccuguuauccugauucuagugaaaucacaugugugugcagggauaacuggcauggcucgaaucgaccgugggugucuuucaaccagaaucuggaauaucggauaggauacauaugcagugggauuuucggagacaauccacgcccuaaugauaagacaggcaguugugguccaguaucgucuaauggagcaaauggaguaaaaggauuuucauucaaauacggcaaugguguuuggauagggagaacuaaaagcauuaguucaagaaacgguuuugagaugauuugggauccgaacggauggacugggacagacaauaacuucucaauaaagcaagauaucguaggaauaaaugaguggucaggauauagcgggaguuuuguucagcauccagaacuaacagggcuggauuguauaagaccuugcuucuggguugaacuaaucagagggcgacccaaagagaacacaaucuggacuagcgggagcagcauauccuuuugugguguaaacagugacacuguggguuggucuuggccagacggugcugaguugccauuuaccauugacaaguaa

SEQ ID NO: 50573 - RNA, 1410 nt, Artificial Sequence; identical to SEQ ID NO: 50488
  derived and/or modified CDS sequence (wt) from neuraminidase__InfluenzaA__ADF27672

SEQ ID NO: 50574 - RNA, 1410 nt, Artificial Sequence
  derived and/or modified CDS sequence (wt) from neuraminidase__InfluenzaA__ADF27682
augaauccaaaccaaaagauaauaaccauugguucggucuguaugacaauuggaauggcuaacuuaauauuacaaauuggaaacauaaucucaauauggauuagccacucaauucaacuugggaaucaaaaucagauugaaacaugcaaucaaagcgucauuacuuaugaaaacaacacuuggguaaaucagacauauguuaacaucagcaacaccaacuuugcugcuggacagucagugguuucugugaaauuagcgggcaauuccucucucugcccuguuaguggaugggcuauauacaguaaagacaacaguauaagaaucgguuccaagggggauguguuugucauaagggaaccauucauaucaugcucccccuuggaaugcagaaccuucuucuugacucaaggggccuugcuaaaugacaaacauuccaauggaaccauuaaagacaggagcccauaucgaacccuaaugagcuguccuauuggugaaguucccucuccauacaacucaagauuugagucagucgcuuggucagcaagugcuugucaugauggcaucaauuggcuaacaauuggaauuucuggcccagacaauggggcaguggcuguguuaaaguacaacggcauaauaacagacacuaucaagaguuggagaaacaauauauugagaacacaagagucugaaugugcauguguaaaugguucuugcuuuacugugaugaccgauggaccaagugauggacaggccucauacaagaucuucagaauagaaaagggaaagauagucaaaucagucgaaaugaaugccccuaauuaucacuaugaggaaugcuccuguuauccugauucuagugaaaucacaugugugugcagggauaacuggcauggcucgaaucgaccgugggugucuuucaaccagaaucuggaauaucagauaggauacauaugcagugggauuuucggagacaauccacgcccuaaugauaagacaggcaguugugguccaguaucgucuaauggagcaaauggaguaaaaggauuuucauucaaauacggcaaugguguuuggauagggagaacuaaaagcauuaguucaagaaacgguuuugagaugauuugggauccgaacggauggacugggacagacaauaacuucucaauaaagcaagauaucguaggaauaaaugaguggucaggauauagcgggaguuuuguucagcauccagaacuaacagggcuggacuguauaagaccuugcuucuggguugaacuaaucagagggcgacccaaagagaacacaaucuggacuagcgggagcagcauuuccuuuugugguguaaacagugacacuguggguuggucuuggccagacggugcugaguugccauuuaccauugacaaguaa

SEQ ID NO: 50575 - RNA, 1410 nt, Artificial Sequence
  derived and/or modified CDS sequence (wt) from neuraminidase__InfluenzaA__ADF27692
augaauccaaaccaaaagauaauaaccauugguucggucuguaugacaauuggaauggcuaacuuaauauuacaaauuggaaacauaaucucaauauggauuagccacucaauucaacuugggaaucaaaaucagauugaaacaugcaaucaaagcgucauuacuuaugaaaacaacacuuggguaaaucagacauauguuaacaucagcaacaccaacuuugcugcuggacagucagugguuuccguaaaauuagcgggcaauuccucucucugcccuguuaguggaugggcuauauacaguaaagacaacaguauaagaaucgguuccaagggggauguguuugucauaagggaaccauucauaucaugcucccccuuggaaugcagaaccuucuucuugacucaaggggccuugcuaaaugacaaacauuccaauggaaccauuaaagacaggagcccauaucgaacccuaaugagcuguccuauuggugaaguucccucuccauacaacucaagauuugagucagucgcuuggucagcaagugcuugucaugauggcaucaauuggcuaacaauuggaauuucuggcccagacaauggggcaguggcuguguuaaaguacaacggcauaauaacagacacuaucaagaguuggagaaacaauauauugagaacacaagagucugaaugugcauguguaaaugguucuugcuuuacuguaaugaccgauggaccaagugauggacaggccucauacaagaucuucagaauagaaaagggaaaaauagucaaaucagucgaaaugaaugccccuaauuaucacuaugaggaaugcuccuguuauccugauucuagugaaaucacaugugugugcagggauaacuggcauggcucgaaucgaccgugggugucuuucaaccagaaucuggaauaucagauaggauacauaugcagugggauuuucggagacaauccacgcccuaaugauaagacaggcaguugugguccaguaucgucuaauggagcaaauggaguaaaaggauuuucauucaaauacggcaaugguguuuggauagggagaacuaaaagcauuaguucaagaaacgguuuugagaugauuugggauccgaacggauggacugggacagacaauaacuucucaauaaagcaagauaucguaggaauaaaugaguggucaggauauagcgggagcuuuguccagcauccagaacuaacagggcuggauuguauaagaccuugcuucuggguugaacuaaucagagggcgacccaaagagaacacaaucuggacuagcgggagcagcauauccuuuugugguguaaacagugacacuguggguuggucuuggccagacggugcugaguugccauuuaccauugacaaguaa

SEQ ID NO: 50576 - RNA, 1410 nt, Artificial Sequence
  derived and/or modified CDS sequence (wt) from neuraminidase__InfluenzaA__ADF27702
augaauccaaaccaaaagauaauaaccauugguucggucuguaugacaauuggaauggcuaacuuaauauuacaaauuggaaacauaaucucaauauggauuagccacucaauucaacuugggaaucaaaaucagauugaaacaugcaaucaaagcgucauuacuuaugaaaacaacacuuggguaaaucagacauauguuaacaucagcaacaccaacuuugcugcuggacagucagugguuuccgugaaauuagcgggcaauuccucucucugcccuguuaguggaugggcuauauacaguaaagacaacaguauaagaaucgguuccaagggggauguguuugucauaagggaaccauucauaucaugcucccccuuggaaugcagaaccuucuucuugacucaaggggccuugcuaaaugacaaacauuccaauggaaccauuaaagacaggagcccauaucgaacccuaaugagcuguccuauuggugaaguucccucuccauacaacucaagauuugagucagucgcuuggucagcaagugcuugucaugauggcaucaauuggcuaacaauuggaauuucuggcccagacaauggggcaguggcuguguuaaaguacaacggcauaauaacagacacuaucaagaguuggagaaacaauauauugagaacacaagagucugaaugugcauguguaaaugguucuugcuuuacuguaaugaccgauggaccaagugauggacaggccucauacaagaucuucagaauagaaaagggaaagauagucaaaucagucgaaaugaaugccccuaauuaucacuaugaggaaugcuccuguuauccugauucuagugaaaucacaugugugugcagggauaacuggcauggcucgaaucgaccgugggugucuuucaaccagaaucuggaauaucagauaggauacauaugcagugggauuuucggagacaauccacgcccuaaugauaagacaggcaguugugguccaguaucgucuaauggagcaaauggaguaaaaggauuuucauucaaauacggcaaugguguuuggauagggagaacuaaaagcauuaguucaaggaacgguuuugagaugauuugggauccgaacggauggacugggacagacaauaacuucucaauaaagcaagauaucguaggaauaaaugaguggucaggauauagcgggaguuuuguucagcauccagaacuaacagggcuggauuguauaagaccuugcuucuggguugaacuaaucagagggcgacccaaagagaacacaaucuggacuagcgggagcagcauauccuuuugugguguaaacagugacacuguggguuggucuuggccagacggugcugaguugccauuuaccaucgacaaguaa

SEQ ID NO: 50577 - RNA, 1410 nt, Artificial Sequence
  derived and/or modified CDS sequence (wt) from neuraminidase__InfluenzaA__ADF27712
augaauccaaaccaaaagauaauaaccauugguucggucuguaugacaauuggaauggcuaacuuaauauuacaaauuggaaacauaaucucaauauggauuagccacucaauccaacuugggaaucaaaaucagauugaaacaugcaaucaaagcgucauuacuuaugaaaacaacacuuggguaaaucagacauauguuaacaucagcaacaccaacuuugcugcuggacagucagugguuuccgugaaauuagcgggcaauuccucucucugcccuguuaguggaugggcuauauacaguaaagacaacaguauaagaaucgguuccaagggggauguguuugucauaagggaaccauucauaucaugcucccccuuggaaugcagaaccuucuucuugacucaaggggccuugcuaaaugacaaacauuccaauggaaccauuaaagacaggagcccauaucgaacccuaaugagcuguccuauuggugaaguucccucuccauacaacucaagauuugagucagucgcuuggucagcaagugcuugucaugauggcaucaauuggcuaacaauuggaauuucuggcccagacaauggggcaguggcuguguuaaaguacaacggcauaauaacagacacuaucaagaguuggagaaacaauauauugagaacacaagagucugaaugugcauguguaaaugguucuugcuuuacuguaaugaccgauggaccaagugauggacaggccucauacaagaucuucagaauagaaaagggaaagauagucaaaucagucgaaaugaaugccccuaauuaucauuaugaggaaugcuccuguuauccugauucuagugaaaucacaugugugugcagggauaacuggcauggcucaaaucgaccgugggugucuuucaaccagaaucuggaauaucagauaggauacauaugcagugggauuuucggagacaauccacgcccuaaugauaagacaggcaguugugguccaguaucgucuaauggagcaaauggaguaaaaggauuuucauucaaauacggcaaugguguuuggauagggagaacuaaaagcauuaguucaagaaacgguuuugagaugauuugggauccgaacggauggacugggacagacaauaacuucucaauaaagcaagauaucguaggaauaaaugaguggucaggauauagcgggaguuuuguucagcauccagaacuaacagggcuggauuguauaagaccuugcuucuggguugaacuaaucagagggcgacccaaagagaacacaaucuggacuagcgggagcagcauauccuuuugugguguaaacagugacacuguggguuggucuuggccagacggugcugaguugccauuuaccauugacaaguaa

SEQ ID NO: 50578 - RNA, 1410 nt, Artificial Sequence; identical to SEQ ID NO: 50038
  derived and/or modified CDS sequence (wt) from neuraminidase__InfluenzaA__ADF27788

SEQ ID NO: 50579 - RNA, 1410 nt, Artificial Sequence
  derived and/or modified CDS sequence (wt) from neuraminidase__InfluenzaA__ADF27798
augaauccaaaccaaaagauaauaaccauugguucggucuguaugacaauuggaauggcuaacuuaauauuacaaauuggaaacauaaucucaauauggauuagccacucaauucaacuugggaaucaaaaucagauugaaacaugcaaucaaagcgucauuacuuaugaaaacaacacuuggguaaaucagacauauguuaacaucagcaacaccaacuuugcugcuggacagucagugguuuccgugaaauuagcgggcaauuccucucucugcccuguuaguggaugggcuauauacaguaaagacaacaguauaagaauugguuccaagggggauguguuugucauaagggaaccauucauaucaugcucccccuuggaaugcagaaccuucuucuugacucaaggggccuugcuaaaugacaaacauuccaauggaaccauuaaagacaggagcccauaucgaacccuaaugagcuguccuauuggugaaguucccucuccauacaacucaagauuugagucagucgcuuggucagcaagugcuugucaugauggcaucaauuggcuaacaauuggaauuucuggcccagacaauggagcaguggcuguguuaaaguacaacggcauaauaacagacacuaucaagaguuggagaaacaauauauugagaacacaagagucugaaugugcauguguaaaugguucuugcuuuacuguaaugaccgauggaccaaaugauggacaggccucauacaagaucuucagaauagaaaagggaaagauagucaaaucagucgaaaugaaugccccuaauuaucacuaugaggaaugcuccuguuauccugauucuagugaaaucacaugugugugcagggauaacuggcauggcucgaaucgaccgugggugucuuucaaccagaauuuggaauaucagauaggauacauaugcagugggauuuucggagacaauccacgcccuaaugauaagacaggcaguugugguccaguaucgucuaauggagcaaauggaguaaaaggauuuucauucaaauacggcaaugguguuuggauagggagaacuaaaagcauuaguucaagaaacgguuuugagaugauuugggauccgaacggauggacugggacagacaauaacuucucaauaaagcaagauaucguaggaauaaaugaguggucaggauauagcgggaguuuuguucagcauccagaacuaacagggcuggauuguauaagaccuugcuucuggguugaacuaaucagagggcgacccaaagagaacacaaucuggacuagcgggagcagcauauccuuuugugguguaaacagugacacuguggguuggucuuggccagacggugcugaguugccauuuaccauugacaaguaa

SEQ ID NO: 50580 - RNA, 1410 nt, Artificial Sequence; identical to SEQ ID NO: 50485
  derived and/or modified CDS sequence (wt) from neuraminidase__InfluenzaA__ADF27808

SEQ ID NO: 50581 - RNA, 1410 nt, Artificial Sequence
  derived and/or modified CDS sequence (wt) from neuraminidase__InfluenzaA__ADF27818
augaauccaaaccaaaagauaauaaccauugguucggucuguaugacaauuggaauggcuaacuuaauauuacaaauuggaaacauaaucucaauauggauuagccacucaauucaacuugggaaucaaaaucagauugaaacaugcaaucaaagcgucauuacuuaugaaaacaacacuuggguaaaucagacauauguuaacaucagcaacaccaacuuugcugcuggacagucagugguuuccgugaaauuagcgggcaauuccucucucugcccuguuaguggaugggcuauauacaguaaagacaacaguauaagaaucgguuccaagggggauguguuugucauaagggaaccauucauaucaugcucccccuuggaaugcagaaccuuuuucuugacucaaggggccuugcuaaaugacaaacauuccaauggaaccauuaaagacaggagcccauaucgaacccuaaugagcuguccuauuggugaaguucccucuccauacaacucaagauuugagucagucgcuuggucagcaagugcuugucaugauggcaucaauuggcuaacaauuggaauuucuggcccagacaauggggcaguggcuguguuaaaguacaacggcauaauaacagacacuaucaagaguuggagaaacaauauauugagaacacaagagucugaaugugcauguguaaaugguucuugcuuuacuauaaugaccgauggaccaagugauggacaggccucauacaagaucuucagaauagaaaagggaaagauagucaaaucagucgaaaugaaugccccuaauuaucacuaugaggaaugcuccuguuauccugauucuagugaaaucacaugugugugcagggauaacuggcauggcucgaaucgaccgugggugucuuucaaccagaaucuggaauaucagauaggauacauaugcagugggauuuucggagacaauccacgcccuaaugauaagacaggcaguugugguccaguaucgucuaauggagcaaauggaguaaaaggauuuucauucaaauacggcaaugguguuuggauagggagaacuaaaagcauuaauucaagaaacgguuuugagaugauuugggauccgaacggauggacugggacagacaauaacuucucaauaaagcaagauaucguaggaauaaaugaguggucaggauauagcgggaguuuuguucagcauccagaacuaacagggcuggauuguauaagaccuugcuucuggguugaacuaaucagagggcgacccaaagagaacacaaucuggacuagcgggagcagcauauccuuuugugguguaaacagugacacuguggguuggucuuggccagacggugcugaguugccauuuaccauugacaaguaa

SEQ ID NO: 50582 - RNA, 1410 nt, Artificial Sequence; identical to SEQ ID NO: 50344
  derived and/or modified CDS sequence (wt) from neuraminidase__InfluenzaA__ADF27838

SEQ ID NO: 50583 - RNA, 1410 nt, Artificial Sequence; identical to SEQ ID NO: 50344
  derived and/or modified CDS sequence (wt) from neuraminidase__InfluenzaA__ADF27848

SEQ ID NO: 50584 - RNA, 1410 nt, Artificial Sequence
  derived and/or modified CDS sequence (wt) from neuraminidase__InfluenzaA__ADF27858
augaauccaaaccaaaagauaauaaccauugguucggucuguaugacaauuggaauggcuaacuuaauauuacaaauuggaaacauaaucucaauauggauuagccacucaauucaacuugggaaucaaaaucagauugaaacaugcaaucaaagcgucauuacuuaugaaaacaacacuuggguaaaucagacauauguuaacaucagcaacaccaacuuugcugcuggacagucagugguuuccgugaaauuagcgggcaauuccucucucugcccuguuaguggaugggcuauauacaguaaagacaacaguauaagaaucgguuccaagggggauguguuugucauaagggaaccauucauaucaugcucccccuuggaaugcagaaccuucuucuugacucaaggggccuugcuaaaugacaaacauuccaauggaaccauuaaagacaggagcccauaucgaacccuaaugagcuguccuauuggugaaguucccucuccauacaacucaagauuugagucagucgcuuggucaucaagugcuugucaugauggcaucaauuggcuaacaauuggaauuucuggcccagacaauggggcaguggcuguguuaaaguacaacggcauaauaacagacacuaucaagaguuggagaaacaauauauugagaacacaagagucugaaugugcauguguaaaugguucuugcuuuacuguaaugaccgauggaccaagugauggacaggccucauacaagaucuucagaauagaaaagggaaagauagucaaaucagucgaaaugaaugccccuaauuaucacuaugaggaaugcuccuguuauccugauucuagugaaaucacaugugugugcagggauaacuggcauggcucgaaucgaccgugggugucuuucaaccagaaucuggaauaucagauaggauacauaugcagugggauuuucggagacaauccacgcccuaaugauaagaaaggcaguugugguccaguaucgucuaauggagcaaauggaguaaaaggauuuucauucaaauacggcaaugguguuuggauagggagaacuaaaagcauuaguucaagaaacgguuuugagaugauuugggauccgaacggauggacugggacagacaauaacuucucaauaaagcaagauaucguaggaauaaaugaauggucaggauauagcgggaguuuuguucagcauccagaacuaacagggcuggauuguauaagaccuugcuucuggguugaacuaaucagagggcgacccaaagagaacacaaucuggacuagcgggagcagcauauccuuuugugguguaaacggugacacuguggguuggucuuggccagacggugcugaguugccauuuaccauugacaaguaa

SEQ ID NO: 50585 - RNA, 1410 nt, Artificial Sequence
  derived and/or modified CDS sequence (wt) from neuraminidase__InfluenzaA__ADF27878
augaauccaaaccaaaagauaauaaccauugguucggucuguaugacaauuggaauggcuaacuuaauauuacaaauuggaaacauaaucucaauauggauuagccacucaauucaacuugggaaucaaaaucagauugaaacaugcaaucaaagcgucauuacuuaugaaaacaacacuuggguaaaucagacauauguuaacaucagcaacaccaacuuugcugcuggacagucagugguuuccgugaaauuagcgggcaauuccucucucugcccuguuaguggaugggcuauauacaguaaagacaacaguauaagaaucgguuccaagggggauguguuugucauaagggaaccauucauaucaugcucccccuuggaaugcagaaccuucuucuugacucaaggggccuugcuaaaugacaaacauuccaauggaaccauuaaagacaggagcccauaucgaacccuaaugagcuguccuauuggugaaguucccucuccauacaacucaagauuugagucagucgcuuggucagcaagugcuugucaugauggcaucaauuggcuaacaauuggaauuucuggcccagacaauggggcaguggcuguguuaaaguacaacggcauaauaacagacacuaucaagaguuggagaaacaauauauugagaacacaagagucugaaugugcauguguaaaugguucuugcuuuacuguaaugaccgauggaccaagugauggacaggccucauacaagaucuucagaauagaaaagggaaagauagucaaaucagucgaaaugaaugccccuaauuaucacuaugaggaaugcuccuguuauccugauucuagugaaaucacaugugugugcagggauaacuggcauggcucgaaucgaccgugggugucuuucaaccagaaucuggaauaucagauaggauacauaugcagugggauuuucggagacaauccacgcccuaaugauaagaaaggcaguugugguccaguaucgucuaauggagcaaauggaguaaaaggauuuucauucaaauacggcaaugguguuuggauagggagaacuaaaagcauuaguucaagaaacgguuuugagaugauuugggauccgaacggauggacugggacagacaauaacuucucaauaaagcaagauaucguaggaauaaaugaauggucaggauauagcgggaguuuuguucagcauccagaacuaacagggcuggauuguauaagaccuugcuucuggguugaacuaaucagagggcgacccaaagagaacacaaucuggacuagcgggagcagcauauccuuuugugguguaaacggugacacuguggguuggucuuggccagacggugcugaguugccauuuaccauugacaaguaa

SEQ ID NO: 50586 - RNA, 1410 nt, Artificial Sequence
  derived and/or modified CDS sequence (wt) from neuraminidase__InfluenzaA__ADF27888
augaauccaaaccaaaagauaauaaccauugguucggucuguaugacaauuggaauggcuaacuuaauauuacaaauuggaaacauaaucucaauauggauuagccacucaauucaacuugggaaucaaaaucagauugaaacaugcaaucaaagcgucauuacuuaugaaaacaacacuuggguaaaucagacauauguuaacaucagcaacaccaacuuugcugcuggacagucagugguuucagugaaauuagcgggcaauuccucucucugcccuguuaguggaugggcuauauacaguaaagacaacaguauaagaaucgguuccaagggggauguguuugucauaagggaaccauucauaucaugcucccccuuggaaugcagaaccuucuucuugacucaaggggccuugcuaaaugacaaacauuccaauggaaccauuaaagacaggagcccauaucgaacccuaaugagcuguccuauuggugaaguucccucuccauacaacucaagauuugagucagucgcuuggucagcaagugcuugucaugauggcaucaauuggcuaacaauuggaauuucuggcccagacaauggggcaguggcuguguuaaaguacaacggcauaauaacagacacuaucaagaguuggagaaacaauauauugagaacacaagagucugaaugugcauguguaaaugguucuugcuuuacuguaaugaccgauggaccaagugauggacaggccucauacaagaucuucagaauagaaaagggaaagauagucaaaucagucgaaaugaaugccccuaauuaucacuaugaggaaugcuccuguuauccugauucuagugaaaucacaugugugugcagggauaacuggcauggcucgaaucgaccgugggugucuuucaaccagaaucuggaauaucagauaggauacauaugcagugggauuuucggagacaauccacgcccuaaugauaagaaaggcaguugugguccaguaucgucuaauggagcaaauggaguaaaaggauuuucauucaaauacggcaaugguguuuggauagggagaacuaaaagcauuaguucaagaaacgguuuugagaugauuugggauccgaacggauggacugggacagacaauaacuucucaauaaagcaagauaucguaggaauaaaugaauggucaggauauagcgggaguuuuguucagcauccagaacuaacagggcuggauuguauaagaccuugcuucuggguugaacuaaucagagggcgacccaaagagaacacaaucuggacuagcgggagcagcauauccuuuugugguguaaacagugacacuguggguuggucuuggccagacggugcugaguugccauuuaccauugacaaguaa

SEQ ID NO: 50587 - RNA, 1410 nt, Artificial Sequence; identical to SEQ ID NO: 48750
  derived and/or modified CDS sequence (wt) from neuraminidase__InfluenzaA__ADF27898

SEQ ID NO: 50588 - RNA, 1410 nt, Artificial Sequence; identical to SEQ ID NO: 50038
  derived and/or modified CDS sequence (wt) from neuraminidase__InfluenzaA__ADF27908

SEQ ID NO: 50589 - RNA, 1410 nt, Artificial Sequence; identical to SEQ ID NO: 50038
  derived and/or modified CDS sequence (wt) from neuraminidase__InfluenzaA__ADF27918

SEQ ID NO: 50590 - RNA, 1410 nt, Artificial Sequence
  derived and/or modified CDS sequence (wt) from neuraminidase__InfluenzaA__ADF27938
augaauccaaaccaaaggauaauaaccauugguucggucuguaugacaauuggaauggcuaacuuaauauuacaaauuggaaacauaaucucaauauggauuagccacucaauucaacuugggaaucaaaaucagauugaaacaugcaaucaaagcgucauuacuuaugaaaacaacacuuggguaaaucagacauauguuaacaucagcaacaccaacuuugcugcuggacagucagugguuuccgugaaauuagcgggcaauuccucucucugcccuguuaguggaugggcuauauacaguaaagacaacaguauaagaaucgguuccaagggggauguguuugucauaagggaaccauucauaucaugcucccccuuggaaugcagaaccuucuucuugacucaaggggcuuugcuaaaugacaaacauuccaauggaaccauuaaagacaggagcccauaucgaacccuaaugagcuguccuauuggugaaguucccucuccauacaacucaagauuugagucagucgcuuggucagcaagugcuugucaugauggcaucaauuggcuaacaauuggaauuucuggcccagacaauggggcaguggcuguguuaaaguacaacggcauaauaacagacacuaucaagaguuggagaaacaauauauugagaacacaagagucugaaugugcauguguaaaugguucuugcuuuacuguaaugaccgauggaccaagugauggacaggccucauacaagaucuucagaauagaaaagggaaagauagucaaaucagucgaaaugaaugccccuaauuaucacuaugaggaaugcuccuguuauccugauucuagugaaaucacaugugugugcagggauaacuggcauggcucgaaucgaccgugggugucuuucaaccagaaucuggaauaucagauaggauacauaugcagugggauuuucggagacaauccacgcccuaaugauaagacaggcaguugugguccaguaucgucuaauggagcaaauggaguaaaaggauuuucauucaaauacggcaaugguguuuggauagggagaacuaaaagcauuaguucaagaaacgguuuugagaugauuugggauccgaacggauggacugggacagacaauaacuucucaauaaagcaagauaucguaggaauaaaugaguggucaggauauagcgggaguuuuguucagcauccagaacuaacaggguuggauuguauaagaccuugcuucuggguugaacuaaucagagggcgacccaaagagaacacaaucuggacuagcgggagcagcauguccuuuugugguguaaacagugacacuguggguuggucuuggccagacggugcugaguugccauuuaccauugacaaguaa

SEQ ID NO: 50591 - RNA, 1410 nt, Artificial Sequence
  derived and/or modified CDS sequence (wt) from neuraminidase__InfluenzaA__ADF27948
augaauccaaaccaaaagauaauaaccauugguucggucuguaugacaauuggaauggcuaacuuaauauuacaaauuggaaacauaaucucaauauggauuagccacucaauucaacuugggaaucaaaaucagauugaaacaugcaaucaaagcgucauuacuuaugaaaacaacacuuggguaaaucagacauauguuaacaucagcaacaccaacuuugcugcuggacagucagugguuuccgugaaauuagcgggcaauuccucucucugcccuguuaguggaugggcuauauacaguaaagacaacaguauaagaaucggguccaagggggauguguuugucauaagggaaccauucauaucaugcucccccuuggaaugcagaaccuucuucuugacucaaggggccuugcuaaaugacaaacauuccaauggaaccauuaaagacaggagcccauaucgaacccuaaugagcuguccuauuggugaaguucccucuccauacaacucaagauuugagucagucgcuuggucagcaagugcuugucaugauggcaucaauugguuaacaauuggaauuucuggcccagacaauggggcaguggcuguguuaaaguacaacggcauaauaacagacacuaucaagaguuggagaaacaauauauugagaacacaagagucugaaugugcauguguaaaugguucuugcuuuacuguaaugaccgauggaccaagugauggacaggccucauacaagaucuucagaauagaaaagggaaagauagucaaaucagucgaaaugaaugccccuaauuaucacuaugaggaaugcuccuguuauccugauucuagugaaaucacaugugugugcagggauaacuggcauggcucgaaucgaccgugggugucuuucaaccagaaucuggaauaucagauaggauacauaugcagugggauuuucggagacaauccacgcccuaaugauaagacaggcaguugugguccaguaucgucuaauggagcaaauggaguaaaaggauuuucauucaaauacggcaaugguguuuggauagggagaacuaaaagcauuaguucaagaaacgguuuugagaugauuugggauccgaacggauggacugggacagacaauaacuucucaauaaagcaagauaucguaggaauaaaugaauggucaggauauagcgggaguuuuguucagcauccagaacuaacagggcuggauuguauaagaccuugcuucuggguugaacuaaucagagggcgacccaaagagaacacaaucuggacuagcgggagcagcauaucuuuuugugguguaaacagugacacuguggguuggucuuggccagacggugcugaguugccauuuaccauugacaaguaa

SEQ ID NO: 50592 - RNA, 1410 nt, Artificial Sequence
  derived and/or modified CDS sequence (wt) from neuraminidase__InfluenzaA__ADF27958
augaauccaaaccaaaagauaauaaccauugguucggucuguaugacaauuggaauggcuaacuuaauauuacaaauuggaaacauaaucucaauauggauuagccacucaauucaacuugggaaucaaaaucagauugaaacaugcaaucaaagcgucauuacuuaugaaaacaacacuuggguaaaucagacauauguuaacaucagcaacaccaacuuugcugcuggacagucagugguuuccguaaaauuagcgggcaauuccucucucugcccuguuaguggaugggcuauauacaguaaagacaacaguauaagaaucgguuccaagggggauguguuugucauaagggaaccauucauaucaugcucccccuuggaaugcagaaccuucuucuugacucaaggggccuugcuaaaugacaaacauuccaauggaaccauuaaagacaggagcccauaucgaacccuaaugagcuguccuauuggugaaguucccucuccauacaacucaagauuugagucagucgcuuggucagcaagugcuugucaugauggcaucaauuggcuaacaauuggaauuucuggcccagacaauggggcaguggcuguguuaaaguacaacggcauaauaacagacacuaucaagaguuggagaaacaauauauugagaacacaagagucugaaugugcauguguaaaugguucuugcuuuacuguaaugaccgauggaccaagugauggacaggccucauacaagaucuucagaauagaaaagggaaagauagucaaaucagucgaaaugaaugccccuaauuaucacuaugaggaaugcuccuguuauccugauucuagugaaaucacaugugugugcagggauaacuggcauggcucgaaucgaccgugggugucuuucaaccagaaucuggaauaucagauaggauacauaugcagugggauuuucggagacaauccacgcccuaaugauaagaaaggcaguugugguccaguaucgucuaauggagcaaauggaguaaaaggauuuucauucaaauacggcaaugguguuuggauagggagaacuaaaagcauuaguucaagaaacgguuuugagaugauuugggauccgaacggauggacugggacagacaauaacuucucaauaaagcaagauaucguaggaauaaaugaauggucaggauauagcgggaguuuuguucagcauccagaacuaacagggcuggauuguauaagaccuugcuucuggguugaacuaaucagagggcgacccaaagagaacacaaucuggacuagcgggagcagcauauccuuuugugguguaaacagugacacuguggguuggucuuggccagacggugcugaguugccauuuaccauugacaaguaa

SEQ ID NO: 50593 - RNA, 1410 nt, Artificial Sequence
  derived and/or modified CDS sequence (wt) from neuraminidase__InfluenzaA__ADF27968
augaauccaaaccaaaagauaauaaccauugguucggucuguaugacaauuggaauggcuaacuuaauauuacaaauuggaaacauaaucucaauauggauuagccacucaauucaacuugggaaucaaaaucagauugagacaugcaaucaaagcgucauuacuuaugaaaacaacacuuggguaaaucagacauauguuaacaucagcaacaccaacuuugcugcuggacagucagugguuuccgugaaauuagcgggcaauuccucucucugcccuguuaguggaugggcuauauacaguaaagacaacaguauaagaaucgguuccaagggggauguguuugucauaagggaaccauucauaucaugcucccccuuggaaugcagaaccuucuucuugacucaaggggccuugcuaaaugacaaacauuccaauggaaccauuaaagacaggagcccauaucgaacccuaaugagcuguccuauuggugaaguucccucuccauacaacucaagauuugagucagucgcuuggucagcaagugcuugucaugauggcaucaauuggcuaacaauuggaauuucuggcccagacaauggggcaguggcuguguuaaaguacaacggcauaauaacagacacuaucaagaguuggagaaacaauauauugagaacacaagagucugaaugugcauguguaaaugguucuugcuuuacuguaaugaccgauggaccaagugauggacaggccucauacaagaucuucagaauagaaaagggaaagauagucaaaucagucgaaaugaaugccccuaauuaucacuaugaggaaugcuccuguuauccugauucuagugaaaucacaugugugugcagggauaacuggcauggcucgaaucgaccgugggugucuuucaaccagaaucuggaauaucagauaggauacauaugcagugggauuuucggagacaauccacgcccuaaugauaagacaggcaguugugguccaguaucgucuaauggagcaaauggaguaaaaggauuuucauucaaauacggcaaugguguuuggauagggagaacuaaaagcauuaguucaagaaacgguuuugagaugauuugggauccgaacggauggacugggacagacaauaacuucucaauaaagcaagauaucguaggaauaaaugaauggucaggauauagcgggaguuuuguucagcauccagaacuaacagggcuggauuguauaagaccuugcuucuggguugaacuaaucagagggcgacccaaagagaacacaaucuggacuagcgggagcagcauauccuuuugugguguaaacagugacacuguggguuggucuuggccagacggugcugaguugccauuuaccauugacaaguaa

SEQ ID NO: 50594 - RNA, 1410 nt, Artificial Sequence
  derived and/or modified CDS sequence (wt) from neuraminidase__InfluenzaA__ADF27978
augaauccaaaccaaaagauaauaaccauugguucggucuguaugacaauuggaauggcuaacuuaauauuacaaauuggaaacauaaucucaauauggauuagccacucaauucaacuugggaaucaaaaucagauugaaacaugcaaucaaagcgucauuacuuaugaaaacaacacuuggguaaaucagacauauguuaacaucagcaacaccaacuuugcugcuggacagucagugguuuccgugaaauuagcgggcaauuccucucucugcccuguuaguggaugggcuauauacaguaaagacaacaguauaagaaucgguuccaagggggauguguuugucauaagggaaccauucauaucaugcucccccuuggaaugcagaaccuucuucuugacucaaggggccuugcuaaaugacaaacauuccaauggaaccauuaaagacaggagcccauaucgaacccuaaugagcuguccuauuggugaaguucccucuccauacaacucaagauuugagucagucgcuuggucagcaagugcuugucaugauggcaucaauuggcuaacaauuggaauuucuggcccagacaauggggcaguggcuguguuaaaguacaacggcauaauaacagacacuaucaagaguuggagaaacaauauauugagaacacaagagucugaaugugcauguguaaaugguucuugcuuuacuguaaugaccgauggaccaagugauggacaggccucauacaagaucuucagaauagaaaagggaaagauagucaaaucagucgaaaugaaugccccuaauuaucacuaugaggaaugcuccuguuacccugauucuagugaaaucacaugugugugcagggauaacuggcauggcucgaaucgaccgugggugucuuucaaccagaaucuggaauaucagauaggauacauaugcagugggauuuucggagacaauccacgcccuaaugauaagaaaggcaguugugguccaguaucgucuaauggagcaaauggaguaaaaggauuuucauucaaauacggcaaugguguuuggauagggagaacuaaaagcauuaguucaagaaacgguuuugagaugauuugggauccgaacggauggacugggacagacaauaacuucucaauaaagcaagauaucguaggaauaaaugaauggucaggauauagcgggaguuuuguucagcauccagaacuaacagggcuggauuguauaagaccuugcuucuggguugaacuaaucagagggcgacccaaagagaacacaaucuggacuagcgggagcagcauauccuuuugugguguaaacagugacacuguggguuggucuuggccagacggugcugaguugccauuuaccauugacaaguaa

SEQ ID NO: 50595 - RNA, 1410 nt, Artificial Sequence
  derived and/or modified CDS sequence (wt) from neuraminidase__InfluenzaA__ADF27988
augaauccaaaccaaaagauaauaaccauugguucggucuguaugacaauuggauuggcuaacuuaauauuacaaauuggaaacauaaucucaauauggauuagccacucaauucaacuugggaaucaaaaucagauugaaacaugcaaucaaagcgucauuucuuaugaaaacaacacuuggguaaaucagacauauguuaacaucagcaacaccaacuuugcugcuggacagucagugguuuccgugaaauuagcgggcaauuccucucucugcccuguuaguggaugggcuauauacaguaaagacaacaguguaagaauugguuccaagggggauguguuugucauaagggaaccauucauaucaugcucccccuuggaaugcagaaccuucuucuugacucaaggggccuugcuaaaugacaaacauuccaauggaaccauuaaagacaggagcccauaucgaacccuaaugagcuguccuauuggugaaguucccucuccauacaacucaagauuugagucagucgcuuggucagcaagugcuugucaugauggcaucaauuggcuaacaauuggaauuucuggcccagacaauggggcaguggcuguguuaaaguacaacggcauaauaacagacacuaucaagaguuggagaaacaauauauugagaacacaagagucugaaugugcauguguaaaugguucuugcuuuacuguaaugaccgauggaccaagugauggacaggccucauacaagaucuucagaauagaaaagggaaagauagucaaaucagucgaaaugaaugccccuaauuaucacuaugaggaaugcuccuguuauccugauucuagugaaaucacaugugugugcagggauaacuggcauggcucgaaucgaccgugggugucuuucaaccagaaucuggaauaucggauaggauacauaugcagugggauuuucggagacaauccacgcccuaaugauaagacaggcaguugugguccaguaucgucuaauggagcaaauggaguaaaaggauuuucauucaaauacggcaaugguguuuggauagggagaacuaaaagcauuaguucaagaaacgguuuugagaugauuugggauccgaacggauggacugggacagacaaaaacuucucaauaaagcaagauaucguaggaauaaaugaguggucaggauauagcgggaguuuuguucagcauccagaacuaacagggcuggauuguauaagaccuugcuucuggguugaacuaaucagagggcgacccaaagagaacacaaucuggacuagcgggagcagcauauccuuuugugguguaaacagugacacuguggguuggucuuggccagacggugcugaguugccauuuaccauugacaaguaa

SEQ ID NO: 50596 - RNA, 1410 nt, Artificial Sequence; identical to SEQ ID NO: 49058
  derived and/or modified CDS sequence (wt) from neuraminidase__InfluenzaA__ADF27998

SEQ ID NO: 50597 - RNA, 1410 nt, Artificial Sequence; identical to SEQ ID NO: 48750
  derived and/or modified CDS sequence (wt) from neuraminidase__InfluenzaA__ADF28008

SEQ ID NO: 50598 - RNA, 1410 nt, Artificial Sequence
  derived and/or modified CDS sequence (wt) from neuraminidase__InfluenzaA__ADF28018
augaauccaaaccaaaagauaauaaccauugguucggucuguaugacaauuggaauggcuaacuuaauauuacaaauuggaaacauaaucucaauauggauuagccacucaauucaacuugggaaucaaaaucagauugaaacaugcaaucaaagcgucauuacuuaugaaaacaacacuuggguaaaucagacauaugucaacaucagcaacaccaacuuugcugcuggacagucagugguuuccgugaaauuagcgggcaauuccucucucugcccuguuaguggaugggcuauauacaguaaagacaacaguauaagaaucgguuccaagggggauguguuugucauaagggaaccauucauaucaugcucccccuuggaaugcagaaccuucuucuugacucaaggggccuugcuaaaugacaaacauuccaauggaaccauuaaagacaggagcccauaucgaacccuaaugagcuguccuauuggugaaguucccucuccauacaacucaagauuugagucagucgcuuggucagcaagugcuugucaugauggcaucaauuggcuaacaauuggaauuucuggcccagacaauggggcaguggcuguguuaaaguacaacggcauaauaacagacacuaucaagaguuggagaaacaauauauugagaacacaagagucugaaugugcauguguaaaugguucuugcuuuacuauaaugaccgauggaccaagugauggacaggccucauacaagaucuucagaauagaaaagggaaagauagucaaaucagucgaaaugaaugccccuaauuaucacuaugaggaaugcuccuguuauccugauucuagugaaaucacaugugugugcagggauaacuggcauggcucgaaucgaccgugggugucuuucaaccagaaucuggaauaucagauaggauacauaugcagugggauuuucggagacaauccacgcccuaaugauaagacaggcaguugugguccaguaucgucuaauggagcaaauggaguaaaaggauuuucauucaaauacggcaaugguguuuggauagggagaacuaaaagcauuaguucaagaaacgguuuugagaugauuugggauccgaacggauggacugggacagacaauaacuucucaauaaagcaagauaucguaggaauaaaugaguggucaggauauagcgggaguuuuguucagcauccagaacuaacaggguuggauuguauaagaccuugcuucuggguugaacuaaucagagggcgacccaaagagaacacaaucuggacuagcgggagcagcauauccuuuugugguguaaacagugacacuguggguuggucuuggccagacggugcugaguugccauuuaccauugacaaguaa

SEQ ID NO: 50599 - RNA, 1410 nt, Artificial Sequence; identical to SEQ ID NO: 48750
  derived and/or modified CDS sequence (wt) from neuraminidase__InfluenzaA__ADF28028

SEQ ID NO: 50600 - RNA, 1410 nt, Artificial Sequence
  derived and/or modified CDS sequence (wt) from neuraminidase__InfluenzaA__ADF28038
augaauccaaaccaaaagauaauaaccauugguucggucuguaugacaauuggaauggcuaacuuaauauuacaaauuggaaacauaaucucaauauggauuagccacucaauucaacuugggaaucaaaaucagauugaaacaugcaaucaaagcgucauuacuuaugaaaacaacacuuggguaaaucagacauacguuaacaucagcaacaccaacuuugcuacuggacaguuagugguuuccgugaaauuagcgggcaauuccucucucugcccuguuaguggaugggcuauauacaguaaagacaacaguauaagaaucgguuccaagggggauguguuugucauaagggaaccauucauaucaugcucccccuuggaaugcagaaccuucuucuugacucaaggggccuugcuaaaugacagacauuccaauggaaccauuaaagacaggagcccauaucgaacccuaaugagcuguccuauuggugaaguucccucuccauacaacucaagauuugagucagucgcuuggucagcaagugcuugucaugauggcaucaauuggcuaacaauuggaauuucuggcccagacaauggggcaguggcuguguuaaaguacaacggcauaauaacagacacuaucaagaguuggagaaacaauauauugagaacacaagagucugaaugugcauguguaaaugguucuugcuuuacuguaaugaccgauggaccaagugauggacaggccucauacaagauuuucagaauagaaaagggaaagauagucaaaucagucgaaaugaaugccccuaauuaucacuaugaggaaugcuccuguuauccugauucuagugaaaucacaugugugugcagggauaacuggcauggcucgaaucgaccgugggugucuuucaaccagaaucuggaauaucagauaggauacauaugcagugggauuuucggagacaauccacgcccuaaugauaagacaggcaguugugguccaguaucgucuaauggagcaaauggaguaaaaggauuuucauucaaauacggcaaugguguuuggauagggagaacuaaaagcauuaguucaagaaacgguuuugagaugauuugggauccgaacggauggacugggacagacaauaacuucucaauaaagcaagauaucguaggaauaaaugaguggucaggauauagcgggaguuuuguucagcauccagaacuaacagggcuggauuguauaagaccuugcuucuggguugaacuaaucagagggcgacccaaagagaacacaaucuggacuagcgggagcagcauauccuuuugugguguaaacagugacacuguggguuggucuuggccagacggugcugaguugccauuuaccauugacaaguaa

SEQ ID NO: 50601 - RNA, 1410 nt, Artificial Sequence; identical to SEQ ID NO: 50166
  derived and/or modified CDS sequence (wt) from neuraminidase__InfluenzaA__ADF28048

SEQ ID NO: 50602 - RNA, 1410 nt, Artificial Sequence; identical to SEQ ID NO: 49794
  derived and/or modified CDS sequence (wt) from neuraminidase__InfluenzaA__ADF28058

SEQ ID NO: 50603 - RNA, 1410 nt, Artificial Sequence
  derived and/or modified CDS sequence (wt) from neuraminidase__InfluenzaA__ADF28068
augaauccaaaccaaaagauaauaaccauugguucggucuguaugacaauuggaauggcuaacuuaauauuacaaauuggaaacauaaucucaauauggauuagccacucaauucaacuugggaaucaaaaucagauugaaacaugcaaucaaagcgucauuacuuaugaaaacaacacuuggguaaaucagacauauguuaacaucagcaacaccaacuuugcugcuggacagucagugguuuccgugaaauuagcgggcaguuccucucucugcccuguuaguggaugggcuauauacaguaaagacaacaguauaagaaucgguuccaagggggauguguuugucauaagggaaccauucauaucaugcucccacuuggaaugcagaaccuucuucuugacucaaggggccuugcuaaaugacaaacauuccaauggaaccauuaaagacaggagcccauaucgaacccuaaugagcuguccuauuggugaaguucccucuccauacaacucaagauuugagucagucgcuuggucagcaagugcuugucaugauggcaucaauuggcuaacaauuggaauuucuggcccagacaauggggcaguggcuguguuaaaguacaacggcauaauaacagacacuaucaagaguuggagaaacaauauauugagaacacaagagucugaaugugcauguguaaaugguucuugcuuuacuguaaugaccgauggaccaagugauggacaggccucauacaagaucuucagaauagaaaagggaaagauagucaaaucagucgaaaugaaugccccuaauuaucacuaugaggaaugcuccuguuauccugauucuagugaaaucacaugugugugcagggauaacuggcauggcucgaaucgaccgugggugucuuucaaccagaaucuggaauaucagauaggauacauaugcagugggauuuucggagacaauccacgcccuaaugauaagaaaggcaguugugguccaguaucgucuaauggagcaaauggaguaaaaggauuuucauucaaauacggcaaugguguuuggauagggagaacuaaaagcauuaguucaagaaacgguuuugagaugauuugggauccgaacggauggacugggacagacaauaacuucucaauaaagcaagauaucguaggaauaaaugaauggucaggauauagcgggaguuuuguucagcauccagaacuaacagggcuggauuguauaagaccuugcuucuggguugaacuaaucagagggcgacccaaagagaacacaaucuggacuagcgggagcagcauauccuuuugugguguaaacagugacacuguggguuggucuuggccagacggugcugaguugccauuuaccauugacaaguaa

SEQ ID NO: 50604 - RNA, 1410 nt, Artificial Sequence
  derived and/or modified CDS sequence (wt) from neuraminidase__InfluenzaA__ADF28078
augaauccaaaccaaaagauaauaaccauugguucggucuguaugacaauuggaauggcuaacuuaauauuacaaauuggaaacauaaucucaauauggauuagccacucaauucaacuugggaaucaaaaucagauugaaacaugcaaucaaagcgucauuacuuaugaaaacaacacuuggguaaaucagacauauguuaacaucagcaacaccaacuuugcugcuggacagucagugguuuccgugaaauuagcgggcaauuccucucuuugcccuguuaguggaugggcuauauacaguaaagacaacaguauaagaaucgguuccaagggggauguguuugucauaagggaaccauucauaucaugcucccccuuggaaugcagaaccuucuucuugacucaaggggccuugcuaaaugacaaacauuccaauggaaccauuaaagacaggagcccauaucgaacccuaaugagcuguccuauuggugaaguucccucuccauacaacucaagauuugagucagucgcuuggucagcaagugcuugucaugauggcaucaauuggcuaacaauuggaauuucuggcccagacaauggggcaguggcuguguuaaaguacaacggcauaauaacagacacuaucaagaguuggagaaacaauauauugagaacacaagagucugaaugugcauguguaaaugguucuugcuuuacuguaaugaccgauggaccaagugauggacaggccucauacaagaucuucagaauagaaaagggaaagauagucaaaucagucgaaaugaaugccccuaauuaucacuaugaggaaugcuccuguuauccugauucuagugaaaucacaugugugugcagggauaacuggcauggcucgaaucgaccgugggugucuuucaaccagaaucuggaauaucagauaggauacauaugcagugggauuuucggagacaauccacgcccuaaugauaagacaggcaguugugguccaguaucgucuaauggagcaaauggaguaaaaggauuuucauucaaauacggcaaugguguuuggauagggagaacuaaaagcauuaguucaagaaacgguuuugagaugauuugggauccgaacggauggacugggacagacaauaacuucucaauaaagcaagauaucguaggaauaaaugaguggucaggauauagcgggaguuuuguucagcauccagaacuaacagggcuggauuguauaagaccuugcuucuggguugaacuaaucagagggcgacccaaagagaacacaaucuggacuagcgggagcagcauauccuuuugugguguaaacagugacacuguggguuggucuuggccagacggugcugaguugccauuuaccauugacaaguaa

SEQ ID NO: 50605 - RNA, 1410 nt, Artificial Sequence; identical to SEQ ID NO: 50304
  derived and/or modified CDS sequence (wt) from neuraminidase__InfluenzaA__ADF28088

SEQ ID NO: 50606 - RNA, 1410 nt, Artificial Sequence
  derived and/or modified CDS sequence (wt) from neuraminidase__InfluenzaA__ADF28110
augaauccaaaccaaaagauaauaaccauugguucggucuguaugacaauuggaauggcuaacuuaauauuacaaauuggaaacauaaucucaauauggauuagccacucaauucaacuugggaaucaaaaucagauugaaacaugcaaucaaagcgucauuacuuaugaaaacaacacuuggguaaaucagacauauguuaacaucagcaacaccaacuuugcugcuggacagucagugguucccgugaaauuagcgggcaauuccucucucugcccuguuaguggaugggcuauauacaguaaagacaacaguauaagaaucgguuccaagggggauguguuugucauaagggaaccauucauaucaugcucccccuuggaaugcagaaccuucuucuugacucaaggggccuugcuaaaugacaaacauuccaauggaaccauuaaagacaggagcccauaucgaacccuaaugagcuguccuauuggugaaguucccucuccauacaacucaagauuugagucagucgcuuggucagcaagugcuugucaugauggcaucaauuggcuaacaauuggaauuucuggcccagacaauggggcaguggcuguguuaaaguacaacggcauaauaacagacacuaucaagaguuggagaaacaauauauugagaacacaagagucugaaugugcauguguaaaugguucuugcuuuacuguaaugaccgauggaccaagugauggacaggccucauacaagaucuucagaauagaaaagggaaagauagucaaaucagucgaaaugaaugccccuaauuaucacuaugaggaaugcuccuguuauccugauucuagugaaaucacaugugugugcagggauaacuggcauggcucgaaucgaccgugggugucuuucaaccagaaucuggaauaucagauaggauacauaugcagugggauuuucggagacaauccacgcccuaaugauaagacaggcaguugugguccaguaucgucuaauggagcaaauggaguaaaaggauuuucauucaaauacggcaaugguguuuggauagggagaacuaaaagcauuaguucaagaaacgguuuugagaugauuugggauccgaacggauggacugggacagacaauaacuucucaauaaagcaagauaucguaggaauaaaugaguggucaggauauagcgggaguuuuguucagcauccagaacuaacagggcuggauuguauaagaccuugcuucuggguugaacuaaucagagggcgacccaaagagaacacaaucuggacuagcgggagcagcauauccuuuugugguguaaacagugacacuguggguuggucuuggccagacggugcugaguugccauuuaccauugacaaguaa

SEQ ID NO: 50607 - RNA, 1410 nt, Artificial Sequence
  derived and/or modified CDS sequence (wt) from neuraminidase__InfluenzaA__ADF28120
augaauccaaaccaaaagauaauaaccauugguucggucuguaugacaauuggaauggcuaacuuaauauuacaaauuggaaacauaaucucaauauggauuagccacucaauucaacuugggaaucaaaaucagauugaaacaugcaaucaaagcgucauuacuuaugaaaacaacacuuggguaaaucagacauauguuaacaucagcaacaccaacuuugcugcuggacagucagugguuuccgugaaauuagcgggcaauuccucucucugcccuguuaguggaugggcuauauacaguaaagacaacaguauaagaaucgguuccaagggggauguguuugucauaagggaaccauucauaucaugcucccccuuggaaugcagaaccuucuucuugacucaaggggccuugcuaaaugacaaacauuccaauggaaccauuaaagacaggagcccauaucgaacccuaaugagcuguccuauuggugaaguucccucuccauacaacucaagauuugagucagucgcuuggucagcaagugcuugucaugauggcaucaauuggcuaacaauuggaauuucuggcccagacaauggggcaguggcuguguuaaaguacaacggcauaauaacagacacuaucaagaguuggagaaacaauauauugagaacacaagagucugaaugugcauguguaaaugguucuugcuuuacuguaaugaccgauggaccaagugauggacaggccucauacaagaucuucagaauagaaaagggaaagauagucaaaucagucgaaaugaaugccccuaauuaucauuaugaggaaugcuccuguuauccugauucuagcgaaaucacaugugugugcagggauaacuggcauggcucgaaucgaccgugggugucuuucaaccagaaucuggaauaucagauaggauacauaugcagugggauuuucggagacaauccacgcccuaaugauaagacaggcaguugugguccaguaucgucuaauggagcaaauggaguaaaaggauuuucauucaaauacggcaaugguguuuggauagggagaacuaaaagcauuaguucaagaaacgguuuugagaugauuugggauccgaacggauggacugggacagacaauaacuucucaauaaagcaagauaucguaggaauaaaugaguggucaggauauagcgggaguuuuguucagcauccagaacuaacagggcuggauuguauaagaccuugcuucuggguugaacuaaucagagggcgacccaaagagaacacaaucuggacuagcgggagcagcauauccuuuugugguguaaacagugacacuguggguuggucuuggccagacggugcugaguugccauuuaccauugacaaguaa

SEQ ID NO: 50608 - RNA, 1410 nt, Artificial Sequence; identical to SEQ ID NO: 48947
  derived and/or modified CDS sequence (wt) from neuraminidase__InfluenzaA__ADF29919

SEQ ID NO: 50609 - RNA, 1410 nt, Artificial Sequence
  derived and/or modified CDS sequence (wt) from neuraminidase__InfluenzaA__ADF42692
augaauccaaaccaaaagauaauaaccauugguucggucuguaugacaauuggaauggcuaacuuaauauuacaaauuggaaacauaaucucaauauggauuagccacucaauucaacuugggaaucaaaaucagauugaaacaugcaaucaaagcgucauuacuuaugaaaacaacacuuggguaaaucagacauauguuaacaucagcaacaccaacuuugcugcuggacagucagugguuuccgugaaauuagcgggcaauuccucucucugcccuguuaguggaugggcuauauacaguaaagacaacaguauaagaaucgguuccaagggggauguguuugucauaagggaaccauucauaucaugcucccccuuggaaugcagaaccuucuucuugacucaaggggccuugcuaaaugacaaacauuccaauggaaccauuaaagacaggagcccauaucgaacccuaaugagcuguccuauuggugaaguucccucuccauacaacucaagauuugagucagucgcuuggucagcaagugcuugucaugauggcaucaauuggcuaacaauuggaauuucuggcccagacaauggggcaguggcuguguuaaaguacaacggcauaauaacagacacuaucaagaguuggagaaacaauauauugagaacacaagagucugaaugugcauguguaaaugguucuugcuuuacuguaaugaccgauggaccaagugauggacaggccucauacaagaucuucagaauagaaaagggaaagauagucaaaucagucgaaaugaaugccccuaauuaucacuaugaggaaugcuccuguuauccugauucuagugaaaucacaugugugugcagggauaacuggcauggcucgaaucgaccgugggugucuuucaaccagaaucuggaauaucagauaggauacauaugcagugggauuuucggagacaauccacgcccuaaugauaagacaggcaguugugguccaguaucgucuaauggagcaaauggaguaaaaggauuuucauucaaauacggcaaugguguuuggauagggagaacuaaaagcauuaauucaagaaacgguuuugagaugauuugggauccgaacggauggacugggacagacaauaacuucucaauaaagcaagauaucguaggaauaaaugaguggucaggauauagcgggaguuuuguucagcauccagaacuaacagggcuggauuguauaagaccuugcuucuggguugaacuaaucagagggcgacccaaagagaacacaaucuggacuagcgggagcagcauauccuuuugugguguaaacagugacacuguggguuggucuuggccagacggugcugaguugccauuuacuauugacaaguaa

SEQ ID NO: 50610 - RNA, 1410 nt, Artificial Sequence
  derived and/or modified CDS sequence (wt) from neuraminidase__InfluenzaA__ADF42702
augaauccaaaccaaaagauaauaaccauugguucggucuguaugacaauuggaauggcuaacuuaauauuacaaauuggaaacauaaucucaauauggauuagccacucaauucaacuugggaaucaaaaucagauugaaacaugcaaucaaagcgucauuacuuaugaaaacaacacuuggguaaaucagacauauguuaacaucagcaacaccaacuuugcugcuggacagucagugguuuccgugaaauuagcgggcaauuccucucucugcccuguuaguggaugggcuauauacaguaaagacaacaguauaagaaucgguuccaagggggauguguuugucauaagggaaccauucauaucaugcucccccuuggaaugcagaaccuucuucuugacucaaggggccuugcuaaaugacaaacauuccaauggaaccauuaaagacaggagcccauaucgaacccuaaugagcuguccuauuggugaaguucccucuccauacaacucaagauuugagucagucgcuuggucagcaagugcuugucaugauggcaucaauuggcuaacaauuggaauuucuggcccagacaauggggcaguggcuguguuaaaguacaacggcauaauaacagacacuaucaagaguuggagaaacaauauauugagaacacaagagucugaaugugcauguguaaaugguucuugcuuuacuguaaugaccgauggaccaagugauggacaggccucauacaagaucuucagaauagaaaagggaaagauagucaaaucagucgaaaugaaugccccuaauuaucacuaugaggaaugcuccuguuauccugauucuagugaaaucacaugugugugcagggauaacuggcauggcucgaaucgaccgugggugucuuucaaccagaaucuggaauaucagauaggauacauaugcagugggauuuucggagacaauccacgcccuaaugauaagacaggcaguugugguccaguaucgucuaauggagcaaauggaguaaaaggauuuucauucaaauacggcaaugguguuuggauagggagaacuaaaagcauuaguucaaggaacgguuuugagaugauuugggauccgaacggauggacugggacagacaauaacuucucaauaaagcaagauaucguaggaauaaaugaguggucaggauauagcgggaguuuuguucagcauccagaacuaacagggcuggauuguauaagacccugcuucuggguugaacuaaucagagggcgacccaaagagaacacaaucuggacuagcgggagcagcauauccuuuugugguguaaacagugacacuguggguuggucuuggccagacggugcugaguugccauuuaccauugacaaguaa

SEQ ID NO: 50611 - RNA, 1410 nt, Artificial Sequence; identical to SEQ ID NO: 50585
  derived and/or modified CDS sequence (wt) from neuraminidase__InfluenzaA__ADF42712

SEQ ID NO: 50612 - RNA, 1410 nt, Artificial Sequence
  derived and/or modified CDS sequence (wt) from neuraminidase__InfluenzaA__ADF42722
augaauccaaaccaaaagauaauaaccauugguucggucuguaugacaauuggaauggcuaacuuaauauuacaaauuggaaacauaaucucaauauggauuagccacucaauucaacuugggaaucaaaaucagauugaaacaugcaaucaaagcgucauuacuuaugaaaacaacacuuggguaaaucagacauauguuaacaucagcaacaccaacuuugcugcuggacagucagugguuuccgugaaauuagcgggcaauuccucucucugcccuguuaguggaugggcuauauacaguaaagacaacaguauaagaaucgguuccaagggggauguguuugucauaagggaaccauucauaucaugcucccccuuggaaugcagaaccuucuucuugacucaaggggccuugcuaaaugacaaacauuccaauggaaccauuaaagacaggagcccauaucgaacccuaaugagcuguccuauuggugaaguucccucuccguacaacucaagauuugagucagucgcuuggucagcaagugcuugucaugauggcaucaauuggcuaacaauuggaauuucuggcccagacaauggggcaguggcuguguuaaaguacaacggcauaauaacagacacuaucaagaguuggagaaacaauauauugagaacacaagagucugaaugugcauguguaaaugguucuugcuuuacuguaaugaccgauggaccaagugauggacaggccucauacaagaucuucagaauagaaaagggaaagauagucaaaucagucgaaaugaaugccccuaauuaucacuaugaggaaugcuccuguuauccugauucuagugaaaucacaugugugugcagggauaacuggcauggcucgaaucgaccgugggugucuuucaaccagaaucuggaauaucagauaggauacauaugcagugggauuuucggagacaauccacgcccuaaugauaagacaggcaguugugguccaguaucgucuaauggagcaaauggaguaaaaggauuuucauucaaauacggcaaugguguuuggauagggagaacuaaaagcauuaguucaagaaacgguuuugagaugauuugggauccgaacggauggacugggacagacaauaacuucucaauaaagcaagauaucguaggaauaaaugaauggucaggauauagcgggaguuuuguucagcauccagaacuaacagggcuggauuguauaagaccuugcuucuggguugaacuaaucagagggcgacccaaagagaacacaaucuggacuagugggagcagcauauccuuuugugguguaaacagugacacuguggguuggucuuggccagacggugcugaguugccauuuaccauugacaaguaa

SEQ ID NO: 50613 - RNA, 1410 nt, Artificial Sequence; identical to SEQ ID NO: 50038
  derived and/or modified CDS sequence (wt) from neuraminidase__InfluenzaA__ADF42732

SEQ ID NO: 50614 - RNA, 1410 nt, Artificial Sequence; identical to SEQ ID NO: 48750
  derived and/or modified CDS sequence (wt) from neuraminidase__InfluenzaA__ADF42742

SEQ ID NO: 50615 - RNA, 1410 nt, Artificial Sequence
  derived and/or modified CDS sequence (wt) from neuraminidase__InfluenzaA__ADF58339
augaauccaaaccaaaagauaauaaccauugguucggucuguaugacaauuggaauggcuaacuuaauauuacaaauuggaaacauaaucucaauauggauuagccacucaauucaacuugggaaucaaaaucagauugaaacaugcaaucaaagcgucauuacuuaugaaaacaacacuuggguaaaucagacauauguuaacaucagcaacaccaacuuugcugcuggacagucagugguuuccgugaaauuagcaggcaauuccucucucugcccuguuaguggaugggcuauauacaguaaagacaacaguguaagaaucgguuccaagggggauguguuugucauaagggaaccauucauaucaugcucccccuuggaaugcagaaccuucuucuugacucaaggggccuugcuaaaugacaaacauuccaauggaaccauuaaagacaggagcccauaucgaacccuaaugagcuguccuauuggugaaguucccucuccauacaacucaagauuugagucagucgcuuggucagcaagugcuugucaugauggcaucaauuggcuaacaauuggaauuucuggcccagacaauggggcaguggcuguguuaaaguacaacggcauaauaacagacacuaucaagaguuggagaaacaauauauugagaacacaagagucugaaugugcauguguaaaugguucuugcuuuacuguaaugaccgauggaccaaguaauggacaggccucauacaagaucuucagaauagaaaagggaaagauagucaaaucagucgaaaugaaugccccuaauuaucacuaugaggaaugcuccuguuauccugauucuagugaaaucacaugugugugcagggauaacuggcauggcucgaaucgaccgugggugucuuucaaccagaaucuggaauaucagauaggauacauaugcagugggauuuucggagacaauccacgcccuaaugauaagacaggcaguugugguccaguaucgucuaauggagcaaauggaguaaaaggguuuucauucaaauacggcaaugguguuuggauagggagaacuaaaagcauuaguucaagaaacgguuuugagaugauuugggauccgaacggauggacugggacagacaauaacuucucaauaaagcaagauaucguaggaauaaaugaguggucaggauauagcgggaguuuuguucagcauccagaacuaacagggcuggauuguauaagaccuugcuucuggguugaacuaaucagagggcgacccaaagagaacacaaucuggacuagcgggagcagcauauccuuuugugguguaaacagugacacuguggguuggucuuggccagacggugcugaguugccauuuaccauugacaaguaa

SEQ ID NO: 50616 - RNA, 1410 nt, Artificial Sequence
  derived and/or modified CDS sequence (wt) from neuraminidase__InfluenzaA__ADF58348
augaauccaaaccaaaagauaauaaccauugguucggucuguaugacaauuggaauggcuaacuuaauauuacaaauuggaaacauaaucucaauauggauuagccacucaauucaacuugggaaucaaaaucagauugaaacaugcaaucaaagcgucauuacuuaugaaaacaacacuuggguaaaucagacauauguuaacaucagcaacaccaacuuugcugcuggacagucagugguuuccgugaaauuagcgggcaauuccucucucugcccuguuaguggaugggcuauauacaguaaagacaacaguauaagaaucgguuccaagggggauguguuugucauaagggaaccauucauaucaugcucccccuuggaaugcagaaccuucuucuugacucaaggggccuugcuaaaugacaaacauuccaauggaaccauuaaagacaggagcccauaucgaacccuaaugagcuguccuauuggugaaguucccucuccauacaacucaagauuugagucagucgcuuggucagcaagugcuugucaugauggcaucaauuggcuaacaauuggaauuucuggcccagacaauggggcaguggcuguguuaaaguacaacggcauaauaacagacacuaucaagaguuggagaaacaauauauugagaacacaagagucugaaugugcauguguaaaugguucuugcuuuacuguaaugaccgauggaccaagugauggacaggccucauacaagaucuucagaauagaaaagggaaagauagucaaaucagucgaaaugaaugccccuaauuaucacuaugaggaaugcuccuguuauccugauucuagugaaaucacauguguaugcagggauaacuggcauggcucgaaucgaccgugggugucuuucaaccagaaucuggaauaucagauaggauacauaugcagugggauuuucggagacaauccacgcccuaaugauaagacaggcaguugugguccaguaucgucuaauggagcaaauggaguaaaaggauuuucauucaaauacggcaaugguguuuggauagggagaacuaaaagcauuaguucaagaaacgguuuugagaugauuugggauccgaacggauggacuggaacagacaauaacuucucaauaaagcaagauaucguaggaauaaaugaguggucaggauauagcgggaguuuuguucagcauccagaacuaacagggcuggauuguauaagaccuugcuucuggguugaacuaaucagagggcgacccaaagagaacacaaucuggacuagcgggagcagcauauccuuuugugguguaaacagugacacuguggguuggucuuggccagacggugcugaguugccauuuaccauugacaaguaa

SEQ ID NO: 50617 - RNA, 1410 nt, Artificial Sequence
  derived and/or modified CDS sequence (wt) from neuraminidase__InfluenzaA__ADF58350
augaauccaaaccaaaagauaauaaccauugguucggucuguaugacaauuggaauggcuaacuuaauauuacaaauuggaaacauaaucucaauauggauuagccacucaauucaacuugggaaucaaaaucagauugaaacaugcaaucaaagcgucauuacuuaugaaaacaacacuuggguaaaccagacauauguuaacaucagcaacaccaacuuugcugcuggacagucagugguuuccgugaaauuagcgggcaauuccucucucugcccuguuaguggaugggcuauauacaguaaagacaacaguauaagaaucgguuccaagggggauguguuugucauaagggaaccauucauaucaugcucccccuuggaaugcagaaccuucuucuugacucaaggggccuugcuaaaugacaaacauuccaauggaaccauuaaagacaggagcccauaucgaacccuaaugagcuguccuauuggugaaguucccucuccauacaacucaagauuugagucagucgcuuggucagcaagugcuugucaugauggcaucaauuggcuaacaauuggaauuucuggcccagacaauggggcaguggcuguguuaaaguacaacggcauaauaacagacacuaucaagaguuggagaaacaauauauugagaacacaagagucugaaugugcauguguaaaugguucuugcuucacuguaaugaccgauggaccaagugauggacaggccucauacaagaucuucagaauagaaaagggaaagauagucaaaucagucgaaaugaaugccccuaauuaucacuaugaggaaugcuccuguuauccugauucuagugaaaucacaugugugugcagggauaacuggcauggcucgaaucgaccguggguaucuuucaaccagaaucuggaauaucagauaggauacauaugcagugggauuuucggagacaauccacgcccuaaugauaagacaggcaguugugguccaguaucgucuaauggagcaaauggaguaaaaggauuuucauucaaauacggcaaugguguuuggauagggagaacuaaaagcauuaguucaagaaacgguuuugagaugauuugggauccgaacggauggacugggacagacaauaacuucucaauaaagcaagauaucguaggaauaaaugaguggucaggauauagcgggaguuuuguucagcauccagaacuaacagggcuggauuguauaagaccuugcuucuggguugaacuaaucagagggcgacccaaagagaacacaaucuggacuagcgggagcagcauauccuuuugugguguaaacagugacacuguggguuggucuuggccggacggugcugaguugccauuuaccauugacaaguaa

SEQ ID NO: 50618 - RNA, 1410 nt, Artificial Sequence; identical to SEQ ID NO: 50617
  derived and/or modified CDS sequence (wt) from neuraminidase__InfluenzaA__ADF58352

SEQ ID NO: 50619 - RNA, 1410 nt, Artificial Sequence
  derived and/or modified CDS sequence (wt) from neuraminidase__InfluenzaA__ADF80459
augaauccaaaccaaaagauaauaaccauugguucggucuguaugacaauuggaauggcuaacuuaauauuacaaauuggaaacauaaucucaauauggauuagccacucaauucaacuugggaaucaaaaucagauugaaacaugcaaucaaagcgucaucacuuaugaaaacaacacuuggguaaaucagacauauguuaacaucagcaacaccaacuuugcugcugggcagucagugguuuccgugaaauuagcgggcaauuccucucucugcccuguuaguggaugggcuauauacaguaaagacaacaguauaagaaucgguuccaagggggauguguuugucauaagggaaccauucauaucaugcucccccuuggaaugcagaaccuucuucuugacucaaggggccuugcuaaaugacaaacauuccaauggaaccauuaaagacaggagcccauaucgaacucuaaugagcuguccuauuggugaaguucccucuccauacaacucaagauuugagucagucgcuuggucagcaagugcuugucaugauggcaucaauuggcuaacaauuggaauuucuggcccagacaauggggcaguggcuguguuaaaguacaacggcauaauaacagacacuaucaagaguuggagaaacaauauauugagaacacaagagucugaaugugcauguguaaaugguucuugcuuuacuguaaugaccgauggaccaagugauggacaggccucauacaagaucuucagaauagaaaagggaaagauagucaaaucagucgaaaugaaugccccuaauuauuacuaugaggaaugcuccuguuauccugauucuagugaaaucacaugugugugcagggauaacuggcauggcucgaaucgaccgugggugacuuucaaccagaaucuggaauaucagauaggauacauaugcagugggauuuucggagacaauccacgcccuaaugauaaaacaggcaguugugguccaguaucgucuaauggagcaaauggagugaaaggauuuucauucaaauacggcaaugguguuuggauagggagaacuaaaagcauuaguucaagaaacgguuuugagaugauuugggauccgaacggauggacugggacagauaauaacuucucaauaaagcaagauaucguaggaauaaaugaguggucaggauauagcgggaguuuuguucagcauccagaacuaacagggcuggauuguauaagaccuugcuucuggguugaacuaaucagaggacgacccaaagagaacacagucuggacuagcgggagcagcauauccuuuugugguguaaacagugacacuguggguuggucuuggccagacggugcugaguugccauuuaccauugacaaguaa

SEQ ID NO: 50620 - RNA, 1410 nt, Artificial Sequence
  derived and/or modified CDS sequence (wt) from neuraminidase__InfluenzaA__ADF80503
augaauccaaaccaaaagauaauaaccauugguucggucuguaugacaauuggaauggcuaacuuaauauuacaaauuggaaacauaaccucaauauggauuagccacucaauucaacuugggaaucaaaaucagauugaaacaugcaaucaaagcgucauuacuuaugaaaacaacacuuggguaaaucagacauauguuaacaucagcaacaccaacuuugcugcuggacagucagugguuuccgugaaauuagcgggcaauuccucucucugcccuguuaguggaugggcuauauacaguaaagacaacaguauaagaaucgguuccaagggggauguguuugucauaagggaaccauucauaucaugcucccccuuggaaugcagaaccuucuucuugacucaaggggccuugcuaaaugacaaacauuccaauggaaccauuaaagacaggagcccauaucgaacccuaaugagcuguccuauuggugaaguucccucuccauacaacucaagauuugagucagucgcuuggucagcaagugcuugucaugauggcaucaauuggcuaacaauuggaauuucuggcccagacaauggggcaguggcuguguuaaaguacaacggcauaauaacagacacuaucaagaguuggagaaacaauauauugagaacacaagagucugaaugugcauguguaaaugguucuugcuuuacuguaaugaccgauggaccaagugauggacaggccucauacaagaucuucagaauagaaaagggaaagauagucaaaucagucgaaaugaaugccccuaauuauuacuaugaggaaugcuccuguuauccugauucuagugaaaucacaugugugugcagggauaacuggcauggcucgaaucgaccgugggugucuuucaaccagaaucuggaauaucagauaggauacauaugcagugggauuuucggagacaauccacgcccuaaugauaagacaggcaguugugguccaguaucgucuaauggagcaaauggaguaaaaggauuuucauucaaauacggcaaugguguuuggauagggagaacuaaaagcauuaguucaagaaacgguuuugagaugauuugggauccgaacggauggacugggacagacaauaacuucucaauaaagcaagacaucgugggaauaaaugaguggucaggauauagcgggaguuuuguucagcauccagaacuaacagggcuggauuguauaagaccuugcuucuggguugaacuaaucagagggcgacccaaagagaacacaaucuggacuagcgggagcagcauauccuuuugugguguaaacagugacacuguggguuggucuuggccagacggugcugaguugccauuuaccauugacaaguaa

SEQ ID NO: 50621 - RNA, 1410 nt, Artificial Sequence
  derived and/or modified CDS sequence (wt) from neuraminidase__InfluenzaA__ADF83744
augaauccaaaucaaaagauaauaacgauuggcucuguuucucucaccauuuccacaauaugcuucuucaugcaaauugccaucuugauaacuacuguaacauugcauuucaagcaauaugaauucaacucccccccaaacaaccaagugaugcugugugaaccaacaauaauagaaaaaaacauaacagagauaguguaucugaccaacaccaccauagagaaggaaauaugccccaaacuagcagaauacagaaauuggucaaagccgcaaugugacauuacaggguuugcaccuuuuucuaaggacaauucgauuaggcuuuccgcugguggggacaucugggugacaagagaaccuuaugugucaugcgauccugacaaguguuaucaauuugcccuuggacagggaacaacacuaaacaacguacauucaaauaacacaguacgugauaggaccccuuaucggacccuauugaugaaugaguuagguguuccuuuucaucuggggaccaagcaagugugcauagcaugguccagcucaaguugucacgauggaaaagcauggcugcauguuuguauaacgggggaugauaaaaaugcaacugcuagcuucauuuacaaugggaggcuuguagauaguguuguuucaugguccaaagaaauccucaggacccaggagucagaaugcguuuguaucaauggaacuuguacaguaguaaugacugaugggagugcuucaggaaaagcugauacuaaaauacuauucauugaggaggggaaaaucguccauacuagcacauugucaggaagugcucagcaugucgaggagugcuccugcuauccucgauauccuggugucagaugugucugcagagacaacuggaaaggauccaauaggcccaucguagauauaaacauaaaggaucauagcauugucuccaguuauguguguucaggacuuguuggagacacacccagaaaaaacgacagcuccagcaguagccauuguuuggauccuaacaaugaggaagguggucauggggugaaaggcugggccuuugaugauggaaaugacguguggaugggaagaacgaucagcgagaagucacgcuuaggguaugaaaccuucaaagucauugaaggcugguccaacccuaaguccaaauugcagauaaauaggcaagucauaguugacagagguaauagguccgguuauucugguauuuucucuguugaaggcaaaagcugcaucaaucggugcuuuuauguggaguugauaaggggaagaaaagaggaaacugaagucuuguggaccucaaacaguauuguuguguuuuguggcaccucagguacauauggaacaggcucauggccugauggggcggacaucaaucucaugccuauauaa

SEQ ID NO: 50622 - RNA, 1410 nt, Artificial Sequence
  derived and/or modified CDS sequence (wt) from neuraminidase__InfluenzaA__ADF83755
augaauccaaaucaaaagauaauaacgauuggcucuguuucucucaccauuuccacaauaugcuucuucaugcaaaccgccauccugauaacuacuguaacauugcauuucaagcaaugugaauucaacucccccccaaacaaccaagugaugcugugugaaccaacaauaauagaaagaaacauaacagagauaguguaucugaccaacaccaccauagagaaggaaauaugccccaaacuagcagaauacagaaauuggucaaagccgcaaugugacauuacaggauuugcaccuuuuucuaaggacaauucgauuaggcuuuccgcugguggggacaucugggugacaagagaaccuuaugugucaugcgauccugacaaguguuaucaauuugcccuuggacagggaacaacgcuaaacaacgugcauucaaauaacacaguacgugauaggaccccuuaucggacucuauugaugaaugaguuagguguuccuuuucaucuggggaccaagcaagugugcauagcaugguccagcucaaguugucacgauggaaaagcauggcugcauguuuguauaacgggggaugauaaaaaugcaacugcuagcuucauuuacaaugggaggcuuguagauaguguuguuucaugguccaaagaaauccucaggacccaggagucagaaugcguuuguaucaauggaacuuguacaguaguaaugacugaugggagugcuucaggaaaagcugauacuaaaauacuauucauugaggaggggaaaaucguucauacuagcacauugucaggaagugcucagcaugucgaggagugcuccugcuauccucgauauccuggugucagaugugucugcagagacaacuggaaaggcuccaauaggcccaucguagauauaaacauaaaggaucauagcauuguuuccaguuauguguguucaggacuuguuggagacacaccuagaaaaaacgacagcuccagcaguagccauuguuuggauccuaacaaugaagaagguggucauggagugaaaggcugggccuuugaugauggaaaugacguguggaugggaagaacgaucagcgagaaaucacgcuuaggguaugaaaccuucaaagucauugaaggcugguccaacccuaaguccaaauugcagauaaauaggcaagucauaguugacagagguaauagguccgguuauucugguauuuucucuguugaaggcaaaagcugcaucaaucggugcuuuuauguggaguugauaaggggaaggaaagaggaaacugaagucuuguggaccucaaacaguauuguuguguuuuguggcaccucagguacauauggaacaggcucauggccugauggggcggacaucaaucucaugccuauauaa

SEQ ID NO: 50623 - RNA, 1410 nt, Artificial Sequence
  derived and/or modified CDS sequence (wt) from neuraminidase__InfluenzaA__ADF83766
augaauccaaaccaaaagauaauaaccauugguucggucuguaugacaauuggaauggcuaacuuaauauuacaaauuggaaacauaaucucaauauggauuagccacucaauucaacuugggaaucaaaaucagacugaaacaugcaaucaaagcgucauuacuuaugaaaacaacacuuggguaaaucagacauauguuaacaucagcaacaccaacuuugcugcuggacagucagugguuuccgugaaauuagcgggcaauuccucucucugcccuguuaguggaugggcuauauacaguaaagacaacaguauaagaaucgguuccaagggggauguguuugucauaagggaaccauucauaucaugcucccccuuggaaugcagaaccuucuucuugacucaaggggccuugcuaaaugacaaacauuccaauggaaccauuaaagacaggagcccauaucgaacccuaaugagcuguccuauuggugaaguucccucuccauacaacucaagauuugagucagucgcuuggucagcaagugcuugucaugauggcaucaauuggcuaacaauuggaauuucuggcccagacaauggggcaguggcuguguuaaaguacaacggcauaauaacagacacuaucaagaguuggagaaacaauauauugagaacacaagagucugaaugugcauguguaaaugguucuugcuuuacuguaaugaccgauggaccaagugauggacaggccucauacaagaucuucagaauagaaaagggaaagauagucaaaucagucgaaaugaaugccccuaauuaucacuaugaggaaugcuccuguuauccugauucuagugaaaucacaugugugugcagggauaacuggcauggcucgaaucgaccgugggugucuuucaaccagaaucuggaauaucagauaggauacauaugcagugggauuuucggagacaauccacgcccuaaugauaagacaggcaguugugguccaguaucgucuaauggagcaaauggaguaaaaggauuuucauucaaauacgacaaugguguuuggauagggagaacuaaaagcauuaguucaagaaacgguuuugagaugauuugggauccgaacggauggacugggacagacaauaacuucucaauaaagcaagauaucguaggaauaaaugaguggucaggauauagcgggaguuuuguucagcauccagaacuaacagggcuggauuguauaagaccuugcuucuggguugaacuaaucagagggcgacccaaagagaacacaaucuggacuagcgggagcagcauauccuuuugugguguaaacagugacacuguggguuggucuuggccagacggugcugaguugccauuuaccauugacaaguaa

SEQ ID NO: 50624 - RNA, 1410 nt, Artificial Sequence
  derived and/or modified CDS sequence (wt) from neuraminidase__InfluenzaA__ADF83776
augaauccaaaccaaaagauaauaaccauugguucggucuguaugacaauuggaauggcuaacuuaauauuacaaauuggaaacauaaucucaauauggauuagccacucaauucaacuugggaaucaaaaucagauugaaacaugcaaucaaagcgucauuacuuaugaaaacaacacuuggguaaaucagacauauguuaacaucagcaacaccaacuuugcugcuggacagucagugguuuccgugaaauuagcgggcaauuccucucucugcccuguuaguggaugggcuauauacaguaaagacaacaguauaagaaucgguuccaagggggauguguuugucauaagggaaccauucauaucaugcucccccuuggaaugcagaaccuucuucuugacucaaggggccuugcuaaaugacaaacauuccaauggaaccauuaaagacaggagcccauaucgaacccuaaugagcuguccuauuggugaaguucccucuccauacaacucaagauuugagucagucgcuuggucagcaagugcuugucaugauggcaucaauuggcuaacaauuggaauuucuggcccagacaauggggcaguggcuguguuaaaguacaacggcauaauaacagacacuaucaagaguuggagaaacaauauauugagaacacaagagucugaaugugcuuguguaaaugguucuugcuuuacuguaaugaccgauggaccaagugauggacaggccucauacaagaucuucagaauagaaaagggaaagauagucaaaucagucgaaaugaaugccccuaauuaucacuaugaggaaugcuccuguuauccugauucuagugaaaucacaugugugugcagggauaacuggcauggcucgaaucgaccgugggugucuuucaaccagaaucuggaauaucagauaggauacauaugcagugggauuuucggagacaauccacgcccuaaugauaagacaggcaguugugguccaguaucgucuaauggagcaaauggaguaaaaggauuuucauucaaauacggcaaugguguuuggauagggagaacuaaaagcauuaguucaagaaacgguuuugagaugauuugggauccgaacggauggacugggacagacaauaacuucucaauaaagcaagauaucguaggaauaaaugaguggucaggauauagcgggaguuuuguucagcauccagaacuaacagggcuggauuguauaagaccuugcuucuggguugaacuaaucagagggcgacccaaagagaacacaaucuggacuagcgggagcagcauauccuuuugugguguaaacagugacacuguggguuggucuuggccagacggugcugaguugccauuuaccauugacaaguaa

SEQ ID NO: 50625 - RNA, 1410 nt, Artificial Sequence
  derived and/or modified CDS sequence (wt) from neuraminidase__InfluenzaA__ADF83786
augaauccaaaccaaaagauaauaaccauugguucggucuguaugacaauuggaauggcuaacuuaauauuacaaauuggaaacauaaucucaauauggauuagccacucaauccaacuugggaaucaaaaucagauugaaacaugcaaucaaagcgucauuacuuaugaaaacaacacuuggguaaaucagacauauguuaacaucagcaacaccaacuuugcugcuggacagucagugguuuccgugaaauuagcgggcaauuccucucucugcccuguuaguggaugggcuauauacaguaaagacaacaguauaagaaucgguuccaagggggauguguuugucauaagggaaccauucauaucaugcucccccuuggaaugcagaaccuucuucuugacucaaggggccuugcuaaaugacaaacauuccaauggaaccauuaaagacaggagcccauaucgaacccuaaugagcuguccuauuggugaaguucccucuccauacaacucaagauuugagucagucgcuuggucagcaagugcuugucaugauggcaucaauuggcuaacaauuggaauuucuggcccagacaauggggcaguggcuguguuaaaguacaacggcauaauaacagacacuaucaagaguuggagaaacaauauauugagaacacaagagucugaaugugcauguguaaaugguucuugcuuuacuguaaugaccgauggaccaagugauggacaggccucauacaagaucuucagaauagaaaagggaaagauagucaaaucagucgaaaugaaugccccuaauuaucacuaugaggaaugcuccuguuauccugauucuagugaaaucacaugugugugcagggauaacuggcauggcucgaaucgaccgugggugucuuucaaccagaaucuggaauaucagauaggauacauaugcagugggauuuucggagacaauccacgcccuaaugauaagacaggcaguugugguccaguaucgucuaauggagcaaauggaguaaaaggauuuucauucaaauacggcaaugguguuuggauagggagaacuaaaagcauuaguucaagaaacgguuuugagaugauuugggauccgaacggauggacugggacagacaauaacuucucaauaaagcaagauaucguaggaauaaaugaguggucaggauauagcgggaguuuuguucagcauccagaacuaacagggcuggauuguauaagaccuugcuucuggguugaacuaaucagagggcgacccaaagagaacacaaucuggacuagcgggagcagcauauccuuuugugguguaaacggugacacuguggguuggucuuggccagacggugcugaguugccauuuaccauugacaaguaa

SEQ ID NO: 50626 - RNA, 1410 nt, Artificial Sequence
  derived and/or modified CDS sequence (wt) from neuraminidase__InfluenzaA__ADF83796
augaauccaaaccaaaagauaauaaccauugguucggucuguaugacaauuggaauggcuaacuuaauauuacaaauuggaaacauaaucucaauauggauuagccacucaauccaacuugggaaucaaaaucagauugaaacaugcaaucaaagcgucauuacuuaugaaaacaacacuuggguaaaucagacauauguuaacaucagcaacaccaacuuugcugcuggacagucagugguuuccgugaaauuagcgggcaauuccucucucugcccuguuaguggaugggcuauauacaguaaagacaacaguauaagaaucgguuccaagggggauguguuugucauaagggaaccauucauaucaugcucccccuuggaaugcagaaccuucuucuugacucaaggggccuugcuaaaugacaaacauuccaauggaaccauuaaagacaggagcccauaucgaacccuaaugagcuguccuauuggugaaguucccucuccauacaacucaagauuugagucagucgcuuggucagcaagugcuugucaugauggcaucaauuggcuaacaauuggaauuucuggcccagacaauggggcaguggcuguguuaaaguacaacggcauaauaacagacacuaucaagaguuggagaaacaauauauugagaacacaagagucugaaugugcauguguaaaugguucuugcuuuacuguaaugaccgauggaccaagugauggacaggccucauacaagaucuucagaauagaaaagggaaagauagucaaaucagucgaaaugaaugccccuaauuaucacuaugaggaaugcuccuguuauccugauucuagugaaaucacaugugugugcagggauaacuggcauggcucgaaucgaccguggguuucuuucaaccagaaucuggaauaucagauaggauacauaugcagugggaucuucggagacaauccacgcccuaaugauaagacaggcaguugugguccaguaucgucuaauggagcaaauggaguaaaaggauuuucauucaaauacggaaaugguguuuggauagggagaacuaaaagcauuaguucaagaaacgguuuugagaugauuugggauccgaacggauggacugggacagacaauaacuucucaauaaagcaagauaucguaagaauaaaugaguggucaggauauagcgggaguuuuguucagcauccagaacuaacagggcuggauuguauaagaccuugcuucuggguugaacuaaucagagggcgacccaaagagaacacaaucuggacuagcgggagcagcauauccuuuugugguguaaacagugacacuguggguuggucuuggccagacggugcugaguugccauuuaccauugacaaguaa

SEQ ID NO: 50627 - RNA, 1410 nt, Artificial Sequence
  derived and/or modified CDS sequence (wt) from neuraminidase__InfluenzaA__ADF83806
augaauccaaaccaaaagauaauaaccauugguucggucuguaugacaauuggaauggcuaacuuaauauuacaaauuggaaacauaaucucaauauggauuagccacucaauucaacuugggaaucaaaaucagauugaaacaugcaaucaaagcgucauuacuuaugaaaacaacacuuggguaaaucagacauauguuaacaucagcaacaccaacuuugcugcuggacagucagugguuuccgugaaauuagcgggcaauuccucucucugcccuguuaguggaugggcuauauacaguaaagacaacaguauaagaaucgguuccaagggggauguguuugucauaagggaaccauucauaucaugcucccccuuggaaugcagaaccuucuucuugacucaaggggccuugcuaaaugacaaacauuccaauggaaccauuaaagacaggagcccauaucgaacccuaaugagcuguccuauuggugaaguuccuucuccauacaacucaagauuugagucagucgcuuggucagcaagugcuugucaugauggcaucaauuggcuaacaauuggaauuucuggcccagacaauggggcaguggcuguguuaaaguacaacggcauaauaacagacacuaucaagaguuggagaaacaauauauugagaacacaagagucugaaugugcauguguaaaugguucuugcuuuacuguaaugaccgauggaccaagugauggacaggccucauacaagaucuucagaauagaaaagggaaagauagucaaaucagucgaaaugaaugccccuaauuaucacuaugaggaaugcuccuguuauccugauucuagugaaaucacaugugugugcagggauaacuggcauggcucgaaucgaccgugggugucuuucaaccagaaucuggaauaucagauaggauacauaugcagugggauuuucggagacaauccacgcccuaaugauaagacaggcaguugugguccaguaucgucuaauggagcaaauggaguaaaaggauuuucauucaaauacggcaaugguguuuggauagggagaacuaaaagcauuaguucaagaaacgguuuugagaugauuugggauccgaacggauggacugggacagacaauaacuucucaauaaagcaagauaucguaggaauaaaugaguggucaggauauagcgggaguuuuguccagcauccagaacuaacagggcuggauuguauaagaccuugcuucuggguugaacuaaucagagggcgacccaaagagaacacaaucuggacuagcgggagcagcauauccuuuugugguguaaacagugacacuguggguuggucuuggccagacggugcugaguugccauuuaccauugacaaguaa

SEQ ID NO: 50628 - RNA, 1410 nt, Artificial Sequence
  derived and/or modified CDS sequence (wt) from neuraminidase__InfluenzaA__ADF83816
augaauccaaaccaaaagauaauaaccauugguucggucuguaugacaauuggaauggcuaacuuaauauuacaaauuggaaacauaaucucaauauggauuagccacucaauucaacuugggaaucaaaaucagauugaaacaugcaaucaaagcgucauuacuuaugaaaacaacacuuggguaaaucagacauauguuaacaucagcaacaccaacuuugcugcuggacagucagugguuuccgugaaauuagcgggcaauuccucucucugcccuguuaguggaugggcuauauacaguaaagacaacaguauaagaaucgguuccaagggggauguguuugucauaagggaaccauucauaucaugcucccccuuggaaugcagaaccuucuucuugacucaaggggccuugcuaaaugacaaacauuccaauggaaccauuaaagacaggagcccauaucgaacccuaaugagcuguccuauuggugaaguccccucuccauacaacucaagauuugagucagucgcuuggucagcaagugcuugucaugauggcaucaauuggcuaacaauuggaauuucuggcccagacaauggggcaguggcuguguuaaaguacaacggcauaauaacagacacuaucaagaguuggagaaacaauauauugagaacacaagagucugaaugugcauguguaaaugguucuugcuuuacuguaaugaccgauggaccaagugauggacaggccucauacaagaucuucagaauagaaaagggaaagauagucaaaucagucgaaaugaaugccccuaauuaucacuaugaggaaugcuccuguuauccugauucuagugaaaucacaugugugugcagggauaacuggcauggcucgaaucgaccgugggugucuuucaaccagaaucuggaauaucagauaggauacauaugcagugggauuuucggagacaauccacgcccuaaugauaagacaggcaguugugguccaguaucgucuaauggagcaaauggaguaaaaggauuuucauucaaauacggcaaugguguuuggauagggagaacuaaaagcauuaguucaagaaacgguuuugagaugauuugggauccgaacggauggacugggacagacaauaacuucucaauaaagcaagauaucguaggaauaaaugaguggucaggauauagcgggaguuuuguccagcauccagaacuaacagggcuggauuguauaagaccuugcuucuggguugaacuaaucagagggcgacccaaagagaacacaaucuggacuagcgggagcagcauauccuuuugugguguaaacagugacgcuguggguuggucuuggccagacggugcugaguugccauuuaccauugacaaguaa

SEQ ID NO: 50629 - RNA, 1410 nt, Artificial Sequence; identical to SEQ ID NO: 48949
  derived and/or modified CDS sequence (wt) from neuraminidase__InfluenzaA__ADF83826

SEQ ID NO: 50630 - RNA, 1410 nt, Artificial Sequence; identical to SEQ ID NO: 48750
  derived and/or modified CDS sequence (wt) from neuraminidase__InfluenzaA__ADF83836

SEQ ID NO: 50631 - RNA, 1410 nt, Artificial Sequence; identical to SEQ ID NO: 48750
  derived and/or modified CDS sequence (wt) from neuraminidase__InfluenzaA__ADF83846

SEQ ID NO: 50632 - RNA, 1410 nt, Artificial Sequence; identical to SEQ ID NO: 48750
  derived and/or modified CDS sequence (wt) from neuraminidase__InfluenzaA__ADF83856

SEQ ID NO: 50633 - RNA, 1410 nt, Artificial Sequence
  derived and/or modified CDS sequence (wt) from neuraminidase__InfluenzaA__ADF83866
augaauccaaaccaaaagauaauaaucauugguucggucuguaugacaauuggaauggcuaacuuaauauuacaaauuggaaacauaaucucaauauggauuagccacucaauucaacuugggaaucaaaaucagauugaaacaugcaaucaaagcgucauuacuuaugaaaacaacacuuggguaaaucagacauauguuaacaucagcaacaccaacuuugcugcuggacagucagugguuuccgugaaauuagcgggcaauuccucucucugcccuguuaguggaugggcuauauacaguaaagacaacaguauaagaaucgguuccaagggggauguguuugucauaagggaaccauucauaucaugcucccccuuggaaugcagaaccuucuucuugacucaaggggccuugcuaaaugacaaacauuccaauggaaccauuaaagacaggagcccauaucgaacccuaaugagcuguccuauuggugaaguucccucuccauacaacucaagauuugagucagucgcuuggucagcaagugcuugucaugauggcaucaauuggcuaacaauuggaauuucuggcccagacaauggggcaguggcuguguuaaaguacaacggcauaauaacagacacuaucaagaguuggagaaacaauauauugagaacacaagagucugaaugugcauguguaaaugguucuugcuuuacuguaaugaccgauggaccaagugauggacaggccucauacaagaucuucagaauagaaaagggaaagauagucaaaucagucgaaaugaaugccccuaauuaucacuaugaggaaugcuccuguuauccugauucuagugaaaucacaugugugugcagggauaacuggcauggcucgaaucgaccgugggugucuuucaaccagaaucuggaauaucagauaggauacauaugcagugggauuuucggagacaauccacgcccuaaugauaagacaggcaguugugguccaguaucgucuaauggagcaaauggaguaaaaggauuuucauucaaauacggcaaugguguuuggauagggagaacuaaaagcauuaguucaagaaacggcuuugagaugauuugggauccgaacggauggacugggacagacaauaacuucucaauaaagcaagauaucguaggaauaaaugaguggucaggauauagcgggaguuuuguucagcauccagaacuaacagggcuggauuguauaagaccuugcuucuggguugaacuaaucagagggcgacccaaagagaacacaaucuggacuagcgggagcagcauauccuuuugugguguaaacagugacacuguggguuggucuuggccagacggugcugaguugccauuuaccauugacaaguaa

SEQ ID NO: 50634 - RNA, 1410 nt, Artificial Sequence
  derived and/or modified CDS sequence (wt) from neuraminidase__InfluenzaA__ADF83876
augaauccaaaccaaaagauaauaaccauugguucggucuguaugacaauuggaauggcuaacuuaauauuacaaauuggaaacauaaucucaauauggauuagccacucaauucaacuugggaaucaaaaucagauugaaacaugcaaucaaagcgucauuacuuaugaaaacaacacuuggguaaaucagacauauguuaacaucagcaacaccaacuuugcugcuggacagucagugguuuccgugaaauuagcgggcaauuccucucucugcccuguuaguggaugggcuauauacaguaaagacaacaguauaagaaucgguuccaagggggauguguuugucauaagggaaccauucauaucaugcucccccuuggaaugcagaaccuucuucuugacucaaggggccuugcuaaaugacaaacauuccaauggaaccauuaaagacaggagcccauaucgaacccuaaugagcuguccuauuggugaaguucccucuccauacaacucaagauuugagucagucgcuuggucagcaagugcuugucaugauggcaucaauuggcuaacaauuggaauuucuggcccagacaauggggcaguggcuguguuaaaguacaacggcauaauaacagacacuaucaagaguuggaaaaacaauauauugagaacacaagagucugaaugugcauguguaaaugguucuugcuuuacuguaaugaccgauggaccaagugauggacaggccucauacaagaucuucagaauagaaaagggaaagauagucaaaucagucgaaaugaaugccccuaauuaucacuaugaggaaugcuccuguuauccugauucuagugaaaucacaugugugugcagggauaacuggcauggcucgaaucgaccgugggugucuuucaaccagaaucuggaauaucagauaggauacauaugcagugggauuuucggagacaauccacgcccuaaugauaagacaggcaguugugguccaguaucgucuaauggagcaaauggaguaaaaggauuuucauucaaauacggcaaugguguuuggauagggagaacuaaaagcauuaguucaagaaacgguuuugagaugauuugggauccgaacggauggacugggacagacaauaacuucucaauaaagcaagauaucguaggaauaaaugaauggucaggauauagcgggaguuuuguucagcauccagaacuaacagggcuggauuguauaagaccuugcuucuggguugaacuaaucagagggcgacccaaagagaacacaaucuggacuagcgggagcagcauauccuuuugugguguaaacagugacacuguggguuggucuuggccagacggugcugaguugccauuuaccauugacaaguaa

SEQ ID NO: 50635 - RNA, 1410 nt, Artificial Sequence
  derived and/or modified CDS sequence (wt) from neuraminidase__InfluenzaA__ADF83888
augaauccaaaccaaaagauaauaaccauugguucggucuguaugacaauuggaauggcuaacuuaauauuacaaauuggaaacauaaucucaauauggaucagccacucaauucaacuugggaaucaaaaucagauugaaacaugcaaucaaagcgucauuacuuaugaaaacaacacuugggugaaucagacauauguuaacaucagcaacaccaacuuugcugcuggacagucagugguuuccgugaaauuagcgggcaauuccucucucugcccuguuaguggaugggcuauauacaguaaagacaacaguauaagaaucgguuccaagggggauguguuugucauaagggaaccauucauaucaugcucccccuuggaaugcaggaccuucuucuugacucaaggggccuugcuaaaugacaaacauuccaauggaaccauuaaagacaggagcccauaucgaacccuaaugagcuguccuauuggugaaguucccucuccauacaacucaagauuugagucagucgcuuggucagcaagugcuugucaugauggcaucaauuggcuaacaauuggaauuucuggcccagacaauggggcaguggcuguguuaaaguacaacggcauaauaacagacacuaucaagaguuggagaaacaauauauugagaacacaagagucugaaugugcauguguaaaugguucuugcuuuacuguaaugaccgauggaccaagugauggacaggccucauacaagaucuucagaauagaaaagggaaagauagucaaaucagucgaaaugaaugccccuaauuaucacuaugaggaaugcuccuguuauccugauucuagugaaaucacaugugugugcagggauaacuggcauggcucgaaucgaccgugggugucuuucaaccagaaucuggaauaucagauaggauacauaugcagugggauuuucggagacaauccacgcccuaaugauaagacaggcaguugugguccaguaucgucuaauggagcaaauggaguaaaaggauuuucauucaaauacggcaaugguguuuggauagggagaacuaaaagcauuaguucaagaaacggguuugagaugauuugggauccgaacggauggacugggacagacaauagcuucucaauaaagcaagauaucguaggaauaaaugaauggucaggauauagcgggaguuuuguucagcauccagaacuaacagggcuggauuguauaagaccuugcuucuggguugaacuaaucagagggcgacccaaagagaacacaaucuggacuagcgggagcagcauauccuuuugugguguaaacagugacacuguggguuggucuuggccagacggugcugaguugccauuuaccauugacaaguaa

SEQ ID NO: 50636 - RNA, 1410 nt, Artificial Sequence
  derived and/or modified CDS sequence (wt) from neuraminidase__InfluenzaA__ADF83898
augaauccaaaccaaaagauaauaaccauugguucggucuguaugacaauuggaauggcuaacuuaauauuacaaauuggaaacauaaucucaauauggauuagccacccaauucaacuugggaaucaaaaucagauugaaacaugcaaucaaagcgucauuacuuaugaaaacaacacuuggguaaaucagacauauguuaacaucagcaacaccaacuuugcugcuggacagucagugguuuccgugaaauuagcgggcaauuccucucucugcccuguuaguggaugggcuauauacaguaaagacaacaguauaagaaucggguccaagggggauguguuugucauaagggaaccauucauaucaugcucccccuuggaaugcagaaccuucuucuugacucaaggggccuugcuaaaugacaaacauuccaauggaaccauuaaagacaggagcccauaucgaacccuaaugagcuguccuauuggugaaguucccucuccauacaacucaagauuugagucagucgcuuggucagcaagugcuugucaugauggcaucaauuggcuaacaauuggaauuucuggcccagacaauggggcaguggcuguguuaaaguacaacggcauaauaacagacacuaucaagaguuggagaaacaauauauugagaacacaagagucugaaugugcauguguaaaugguucuugcuuuacuguaaugaccgauggaccaagugauggacaggccucauacaagaucuucagaauagaaaagggaaagauagucaaaucagucgaaaugaaugccccuaauuaucacuaugaggaaugcuccuguuauccugauucuagugaaaucacaugugugugcagggauaacuggcauggcucgaaucgaccgugggugucuuucaaccagaaucuggaauaucagauaggauacauaugcagugggauuuucggagacaauccacgcccuaaugauaagacaggcaguugugguccaguaucgucuaauggagcaaauggaguaaaaggauuuucauucaaauacggcaaugguguuuggauagggagaacuaaaagcauuaguucaagaaacgguuuugagaugauuugggauccgaacggauggacugggacagacaauaacuucucaauaaagcaagauaucguaggaauaaaugaauggucaggauauagcgggaguuuuguucagcauccagaacuaacagggcuggauuguauaagaccuugcuucuggguugaacuaaucagagggcgacccaaggagaacacaaucuggacuagcgggagcagcauaucuuuuugugguguaaacagugacacuguggguuggucuuggccagacggugcugaguugccauuuaccauugacaaguaa

SEQ ID NO: 50637 - RNA, 1410 nt, Artificial Sequence
  derived and/or modified CDS sequence (wt) from neuraminidase__InfluenzaA__ADF83908
augaauccaaaccaaaagauaauaaccauugguucggucuguaugacaauuggaauggcuaacuuaauauuacaaauuggaaacauaaucucaauauggauuagccacucaauucaacuugggaaucaaaaucagauugaaacaugcaaucaaagcgucauuacuuaugaaaacaacacuuggguaaaucagacauauguuaacaucagcaacaccaacuuugcugcuggacagucagugguuuccgugaaauuagcgggcaauuccucucucugcccuguuaguggaugggcuauauacaguaaagacaacaguauaagaaucgguuccaagggggauguguuugucauaagggaaccauucauaucaugcucccccuuggaaugcagaaccuucuucuugacucaaggggccuugcuaaaugacaaacauuccaauggaaccauuaaagacaggagcccauaucgaacccuaaugagcuguccuauuggugaaguucccucuccauacaacucaagauuugagucagucgcuuggucagcaagugcuugucaugauggcaucaauuggcuaacaauuggaauuucuggcccagacaauggggcaguggcuguguuaaaguacaacggcauaauaacagacacuaucaagaguuggagaaacaauauauugagaacacaagagucugaaugugcaugugugaaugguucuugcuuuacuguaaugaccgauggaccaagugauggacaggccucauacaagaucuucagaauagaaaagggaaagauagucaaaucagucgaaaugaaugccccuaauuaucacuaugaggaaugcuccuguuauccugauucuagugaaaucacaugugugugcagggauaacuggcauggcucgaauagaccgugggugucuuucaaccagaaucuggaauaucagauaggauacauaugcagugggauuuucggagacaauccacgcccuaaugauaagacaggcaguugugguccaguaucgucuaauggagcaaauggaguaaaaggauuuucauucaaauacggcaaugguguuuggauagggagaacuaaaagcauuaguucaagaaacgguuuugagaugauuugggauccgaacggauggacugggacagacaauaacuucucaauaaagcaagauaucguaggaauaaaugaguggucuggauauagcgggaguuuuguucagcauccagaacuaacagggcuggauuguauaagaccuugcuucuggguugaacuaaucagagggcgacccaaagagaacacaaucuggacuagcgggagcagcauauccuuuugugguguaaacagugacacuguggguuggucuuggccagacggugcugaguugccauuuaccauugacaaguaa

SEQ ID NO: 50638 - RNA, 1410 nt, Artificial Sequence
  derived and/or modified CDS sequence (wt) from neuraminidase__InfluenzaA__ADF83918
augaauccaaaccaaaagauaauaaccauugguucggucuguaugacaauuggaauggcuaacuuaauauuacaaauuggaaacauaaucucaauauggauuagccacucaauucaacuugggaaucaaaaucagauugaaacaugcaaucaaagcgucauuacuuaugaaaacaacacuuggguaaaucagacauauguuaacaucagcaacaccaacuuugcugcuggacagucagugguuuccgugaaauuagcgggcaauuccucucucugcccuguuaguggaugggcuauauacaguaaagacaacaguauaagaaucgguuccaagggggauguguuugucauaagggaaccauucauaucaugcucccccuuggaaugcagaaccuucuucuugacucaaggggccuugcuaaaugacaaacauuccaauggaaccauuaaagacaggagcccauaucgaacccuaaugagcuguccuauuggugaaguucccucuccauacaacucaagauuugagucagucgcuuggucagcaagugcuugucaugauggcaucaauuggcuaacaauuggaauuucuggcccagacaauggggcaguggcuguguuaaaguacaacggcauaauaacagacacuaucaagaguuggagaaacaauauauugagaacacaagagucugaaugugcauguguaaaugguucuugcuuuacuguaaugaccgauggaccaagugauggacaggccucauacaagaucuucagaauagaaaagggaaagauagucaaaucagucgaaaugaaugccccuaauuaucacuaugaggaaugcuccuguuauccugauucuagugaaaucacaugugugugcagagauaacuggcacggcucgaaucgaccgugggugucuuucaaccagaaucuggaauaucagauaggauacauaugcagugggauuuucggagacaauccacgcccuaaugauaagacaggcaguugugguccaguaucgucuaauggagcaaauggaguaaaaggauuuucauucaaauacggcaaugguguuuggauagggagaacuaaaagcauuaguucaagaaacgguuuugagaugauuugggauccgaacggauggacugggacagacaauaacuucucaauaaagcaagauaucguaggaauaaaugaguggucaggauauagcgggaguuuuguucagcauccagaacuaacagggcuggauuguauaagaccuugcuucuggguugaacuaaucagagggcgacccaaagagaacacaaucuggacuagcgggagcagcauauccuuuugugguguaaacagugacacuguggguuggucuuggccagacggugcugaguugccauuuaccauugacaaguaa

SEQ ID NO: 50639 - RNA, 1410 nt, Artificial Sequence
  derived and/or modified CDS sequence (wt) from neuraminidase__InfluenzaA__ADF84444
augaauccaaaccaaaagauaauaaccauugguucggucuguaugacaauuggaauggcuaacuuaauauuacaaauuggaaacauaaucucaauauggauuagccacucaauucaacuugggaaucaaaaucagauugaaacaugcaaucaaagcgucauuacuuaugaaaacaacacuuggguaaaucagacauauguuaacaucagcaacaccaacuuugcugcuggacagucaguaguuuccgugaaauuagcgggcaauuccucucucugcccuguuaguggaugggcuauauacaguaaagacaacaguauaagaaucgguuccaagggggauguguuugucauaagggaaccauucauaucaugcucccccuuggaaugcagaaccuucuucuugacucaaggggccuugcuaaaugacaaacauuccaauggaaccauuaaagacaggagcccauaucgaacccuaaugagcuguccuauuggugaaguucccucuccauacaacucaagauuugagucagucgcuuggucagcaagugcuugucaugauggcaucaauuggcuaacaauuggaauuucuggcccagacaauggggcaguggcuguguuaaaguacaacggcauaauaacagacacuaucaagaguuggagaaacaauauauugagaacacaagagucugaaugugcauguguaaaugguucuugcuuuacuguaaugaccgauggaccaagugauggacaggccucauacaagaucuucagaauagaaaagggaaagauagucaaaucagucgaaaugaaugccccuaauuaucacuaugaggaaugcuccuguuauccugauucuagugaaaucacaugugugugcagggauaacuggcacggcucgaaucgaccgugggugucuuucaaucagaaucuggaauaucagauaggauacauaugcagugggauuuucggagacaauccacgcccuaaugauaagacaggcaguugugguccaguaucgucuaauggagcaaauggaguaaaaggauuuucauucaaauacggcaaugguguuuggauagggagaacuaaaagcauuaguucaagaaacgguuuugagaugauuugggauccgaacggauggacugggacagacaauaacuucucaauaaagcaagauaucguaggaauaaaugaguggucaggauauagcgggaguuuuguucagcauccagaacuaacagggcuggauuguauaagaccuugcuucuggguugaacuaaucagagggcgacccaaagagaacacaaucuggacuagcgggagcagcauauccuuuugugguguaaacagugacacuguggguuggucuuggccagacggugcugaguugccauuuaccauugacaaguaa

SEQ ID NO: 50640 - RNA, 1410 nt, Artificial Sequence
  derived and/or modified CDS sequence (wt) from neuraminidase__InfluenzaA__ADF84462
augaauccaaaccaaaagauaauaaccauugguucggucuguaugacaauuggaauggcuaacuuaauauuacaaauuggaaacauaaucucaauauggauuagccacucaauucaacuugggaaucaaaaucagauugaaacaugcaaucaaagcgucauuacuuaugaaaacaacacuuggguaaaucagacauauguuaacaucagcaacaccaacuuugcugcuggacagucagugguuuccgugaaauuagcgggcaauuccucucucugcccuguuaguggaugggcuauauacaguaaagacaacaguauaagaaucgguuccaagggggauguguuugucauaagggaaccauucauaucaugcucccccuuggaaugcagaaccuucuucuugacucaaggggccuugcuaaaugacaaacauuccaauggaaccauuaaagacaggagcccauaucgaacccuaaugagcuguccuauuggugaaguucccucuccauacaacucaagauuugagucagucgcuuggucagcaagugcuugucaugauggcaucaauuggcuaacaauuggaauuucuggcccagacaauggggcaguggcuguguuaaaguacaacggcauaauaacagacacuaucaagaguuggagaaacaauauauugagaacacaagagucugaaugugcauguguaaaugguucuugcuuuacuguaaugaccgauggaccaagugauggacaggccucauacaagaucuucagaauagaaaagggaaagauagucaaaucagucgaaaugaaugccccuaauuaucacuaugaggaaugcuccuguuauccugauucuagugaaaucacaugugugugcagggauaacuggcauggcucgaaucgaccgugggugucuuucaaccagaaucuggaauaucagauaggauacauaugcagugggauuuucggagacaauccacgcccuaaugauaagacgggcaguugugguccaguaucgucuaauggagcaaauggaguaaaaggauuuucauucaaauacggcaaugguguuuggauagggagaacuaaaagcauuaguucaagaaacgguuuugagaugauuugggauccgaacggauggacugggacagacaauaacuucucaauaaagcaagauaucguaggaauaaaugaauggucaggauauagcgggaguuuuguucagcauccagaacuaacagggcuggauuguauaagaccuugcuucuggguugaacuaaucagagggcgacccaaagagaacacaaucuggacuagcgggagcagcauauccuuuugugguguaaacagugacacuguggguuggucuuggccagacggugcugaguugccauuuaccauugacaaguaa

SEQ ID NO: 50641 - RNA, 1410 nt, Artificial Sequence
  derived and/or modified CDS sequence (wt) from neuraminidase__InfluenzaA__ADF84472
augaauccaaaccaaaagauaauaaccauugguucggucuguaugacaauuggaauggcuaacuuaauauuacaaauuggaaacauaaucucaauauggauuagccacucaauucaacuugggaaucaaaaucagauugaaacaugcaaucaaagcgucauuacuuaugaaaacaacacuuggguaaaucagacauauguuaacaucagcaacaccaacuuugcugcugaacagucagugguuuccgugaaauuagcgggcaauuccucucucugcccuguuaguggaugggcuauauacaguaaagacaacaguauaagaaucgguuccaagggggauguguuugucauaagggaaccauucauaucaugcucccccuuggaaugcagaaccuucuucuugacucaaggggccuugcuaaaugacaaacauuccaauggaaccauuaaagacaggagcccauaucgaacccuaaugagcuguccuauuggugaaguucccucuccauacaacucaagauuugagucagucgcuuggucagcaagugcuugucaugauggcaucaauuggcuaacaauuggaauuucuggcccagacaauggggcaguggcuguguuaaaguacaacggcauaauaacagacacuaucaagaguuggagaaacaauauauugagaacacaagagucugaaugugcauguguaaaugguucuugcuuuacuguaaugaccgauggaccaagugauggacaggccucauacaagaucuucagaauagaaaagggaaagauagucaaaucagucgaaaugaaugccccuaauuaucacuaugaggaaugcuccuguuauccugauucuagugaaaucacaugugugugcagggauaacuggcauggcucgaaucgaccgugggugucuuucaaccagaaucuggaauaucagauaggauacauaugcagugggauuuucggagacaauccacgcccuaaugauaagacaggcaguugugguccaguaucgucuaauggagcaaauggaguaaaaggauuuucauucaaauacggcaaugguguuuggauagggagaacuaaaagcauuaguucaagaaacgguuuugagaugauuugggauccgaacggauggacugggacagacaauaacuucucaauaaagcaagauaucguaggaauaaaugaguggucaggauacagcgggaguuuuguucagcauccagaacuaacagggcuggauuguauaagaccuugcuucuggguugaacuaaucagagggcgacccaaagagaacacaaucuggacuagcgggagcagcauauccuuuugugguguaaacagugacacuguggguuggucuuggccagacggugcugaguugccauuuaccauugacaaguaa

SEQ ID NO: 50642 - RNA, 1410 nt, Artificial Sequence
  derived and/or modified CDS sequence (wt) from neuraminidase__InfluenzaA__ADF84482
augaauccaaaccaaaagauaauaaucauugguucggucuguaugacaauuggaauggcuaacuuaauauuacaaauuggaaacauaaucucaauauggauuagccacucaauucaacuugggaaucaaaaucagauugaaacaugcaaucaaagcgucauuacuuaugaaaacaacacuuggguaaaucagacauauguuaacaucagcaacaccaacuuugcugcuggacagucagugguuuccgugaaauuagcgggcaauuccucucucugcccuguuaguggaugggcuauauacaguaaagacaacaguauaagaaucgguuccaagggggauguguuugucauaagggaaccauucauaucaugcucccccuuggaaugcagaaccuucuucuugacucaaggggccuugcuaaaugacaaacauuccaauggaaccauuaaagacaggagcccauaucgaacccuaaugagcuguccuauuggugaaguucccucuccauacaacucaagauuugagucagucgcuuggucagcaagugcuugucaugauggcaucaauuggcuaacaauuggaauuucuggcccagacaauggggcaguggcuguguuaaaguacaacggcauaauaacagacacuaucaagaguuggagaaacaauauauugagaacacaagagucugaaugugcauguguaaaugguucuugcuuuacuguaaugaccgauggaccaagugauggacaggccucauacaagaucuucagaauagaaaagggaaagauagucaaaucagucgaaaugaaugccccuaauuaucacuaugaggaaugcuccuguuauccugauucuagugaaaucacaugugugugcagggauaacuggcauggcucgaaucgaccgugggugucuuucaaccagaaucuggaauaucagauaggauacauaugcagugggauuuucggagacaauccacgcccuaaugauaagacaggcaguugugguccaguaucgucuaauggagcaaauggaguaaaaggauuuucauucaaauacggcaaugguguuuggauagggagaacuaaaagcauuaguucaagaaacgguuuugagaugauuugggauccgaacggauggacugggacagacaauaacuucgcaauaaagcaagauaucguaggaauaaaugaguggucaggauauagcgggaguuuuguucagcauccagaacuaacagggcuggauuguauaagaccuugcuucuggguugaacuaaucagagggcgacccaaagagaacacaaucuggacuagcgggagcagcauauccuuuugugguguaaacagugacacugugaguuggucuuggccagacggugcugaguugccauuuaccauugacaaguaa

SEQ ID NO: 50643 - RNA, 1410 nt, Artificial Sequence
  derived and/or modified CDS sequence (wt) from neuraminidase__InfluenzaA__ADF84492
augaauccaaaccaaaagauaauaaccauugguucggucuguaugacaauuggaauggcuaacuuaauauuacaaauuggaaacauaaucucaauauggauuagccacucaauucaacuugggaaucaagaucagauugaaacaugcaaucaaagcgucauuacuuaugaaaacaacacuuggguaaaucagacauauguuaacaucagcaacaccaacuuugcugcuggacagucagugguuuccgugaaauuagcgggcaauuccucucucugcccuguuaguggaugggcuauauacaguaaagacaacaguauaagaaucgguuccaagggggauguguuugucauaagggaaccauucauaucaugcucccccuuggaaugcagaaccuucuucuugacucaaggggccuugcuaaaugacaaacauuccaauggaaccauuaaagacaggagcccauaucgaacccuaaugagcuguccuauuggugaaguucccucuccauacaacucaagauuugagucagucgcuuggucagcaagugcuugucaugauggcaucaauuggcuaacaauuggaauuucuggcccagacaauggggcaguggcuguguuaaaguacaacggcauaauaacagacacuaucaagaguuggagaaacaauauauugagaacacaagagucugaaugugcauguguaaaugguucuugcuuuacuguaaugaccgauggaccaagugauggacaggccucauacaagaucuucagaauagaaaagggaaagauagucaaaucagucgaaaugaaugccccuaauuaucacuaugaggaaugcuccuguuauccugauucuagugaaaucacaugugugugcagggauaacuggcauggcucgaaucgaccgugggugucuuucaaccagaaucuggaauaucagauaggauacauaugcagugggauuuucggagacaauccacgcccuaaugauaagacaggcaguugugguccaguaucgucuaauggagcaaauggaguaaaaggauuuucauucaaauacggcaaugguguuuggauagggagaacuaaaagcauuaguucaagaaacgguuuugagaugauuugggauccgaacggauggacugggacagacaauaacuucucaauaaagcaagauaucguaggaauaaaugaguggucaggauauagcgggaguuuuguucagcauccagaacuaacagggcuggauuguauaagaccuugcuucuggguugaacuaaucagagggcgacccaaagagaacacaaucuggacuagcgggagcagcauauccuuuugugguguaaacagugacacuguggguuggucuuggccagacggugcugaguugccauuuaccauugacaaguaa

SEQ ID NO: 50644 - RNA, 1410 nt, Artificial Sequence
  derived and/or modified CDS sequence (wt) from neuraminidase__InfluenzaA__ADF85020
augaauccaaaccaaaagauaauaaccauugguucggucuguaugacaauuggaauggcuaacuuaauauuacaaauuggaaacauaaucucaauauggauuagccacucaauucaacuugggaaucaaaaucagauugaaacaugcaaucaaagcgucauuacuuaugaaaacaacacuuggguaaaucagacauauguuaacaucagcaacaccaacuuugcugcuggacagucagugguuuccaugaaauuagcgggcaauuccucucucugcccuguuaguggaugggcuauauacaguaaagacaacaguauaagaaucgguuccaagggggauguguuugucauaagggaaccauucauaucaugcucccccuuggaaugcagaaccuucuucuugacucaaggggccuugcuaaaugacaaacauuccaauggaaccauuaaagacaggagcccauaucgaacccuaaugagcuguccuauuggugaaguucccucuccauacaacucaagauuugagucagucgcuuggucagcaagugcuugucaugauggcaucaauuggcuaacaauuggaauuucuggcccagacaauggggcaguggcuguguuaaaguacaacggcauaauaacagacacuaucaagaguuggagaaacaauauauugagaacacaagagucugaaugugcauguguaaaugguucuugcuuuacuguaaugaccgauggaccaagugauggacaggccucauacaagaucuucagaauagaaaagggaaagauagucaaaucagucgaaaugaaugccccuaauuaucacuaugaggaaugcuccuguuauccugauucuagugaaaucacaugugugugcagggauaacuggcauggcucgaaucgaccgugggugucuuucaaccagaaucuggaauaucagauaggauacauaugcagugggauuuucggagacaauccacgcccuaaugauaagacaggcaguugugguccaguaucgucuaauggagcaaauggaguaaaaggauuuucauucaaauacggcaaugguguuuggauagggagaacuaaaagcauuaguucaagaaacgguuuugagaugauuugggauccgaacggauggacugggacagacaauaacuucucaauaaagcaagauaucguaggaauaaaugaguggucaggauauagcgggaguuuuguucagcauccagaacuaacagggcuggauuguauaagaccuugcuucuggguugaacuaaucagagggcgacccaaagagaacacaaucuggacuagcgggagcagcauauccuuuugugguguaaacagugacacuguggguuggucuuggccagacggugcugaguugccauuuaccauugacaaguaa

SEQ ID NO: 50645 - RNA, 1410 nt, Artificial Sequence
  derived and/or modified CDS sequence (wt) from neuraminidase__InfluenzaA__ADF87155
augaauccaaaccaaaagauaauaaccauugguucggucuguaugacaauuggaauggcuaacuuaauauuacaaauuggaaacauaaucucaauauggauuagccacucaauucaacuugggaaucaaaaucagauugaaacaugcaaucaaagcgucauuacuuaugaaaacaacacuuggguaaaucagacauauguuaacaucagcaacaccaacuuugcugcuggacagucagugguuuccgugaaauuagcggguaauuccucucucugcccuguuaguggaugggcuauauacaguaaagacaacaguauaagaaucgguuccaagggggauguguuugucauaagggaaccauucauaucaugcucccccuuggaaugcagaaccuucuucuugacucaaggggccuugcuaaaugacaaacauuccaauggaaccauuaaagacaggagcccauaucgaacccuaaugagcuguccuauuggugaaguucccucuccauacaacucaagauuugagucagucgcuuggucagcaagugcuugucaugauggcaucaauuggcuaacaauuggaauuucuggcccagacaauggggcaguggcuguguuaaaguacaacggcauaauaacagacacuaucaagaguuggagaaacaauauauugagaacacaagagucugaaugugcauguguaaaugguucuugcuuuacuguaaugaccgauggaccaagugauggacaggccucauacaagaucuucagaauagaaaagggaaagauagucaaaucagucgaaaugaaugccccuaauuaucacuaugaggaaugcuccuguuauccugauucuagugaaaucacaugugugugcagggauaacuggcauggcucgaaucgaccgugggugucuuucaaccagaaucuggaauaucagauaggauacauaugcagugggauuuucggagacaauccacgcccuaaugauaagacaggcaguugugguccaguaucgucuaauggagcaaauggaguaaaaggauuuucauucaaauacggcaaugguguuuggauagggagaacuaaaagcauuaguucaagaaacgguuuugagaugauuugggauccgaacggauggacugggacagacaauaacuucucaauaaagcaagauaucguaggaauaaaugaguggucaggauauagcgggaguuuuguucagcauccagaacuaacagggcuggauuguauaagaccuugcuucuggguugaacuaaucagagggcgacccaaagagaacacaaucuggacuagcgggagcagcauauccuuuugugguguaaacagugacacuguggguuggucuuggccagacggugcugaguugccauuuaccauugacaaguaa

SEQ ID NO: 50646 - RNA, 1410 nt, Artificial Sequence
  derived and/or modified CDS sequence (wt) from neuraminidase__InfluenzaA__ADF87165
augaauccaaaccaaaagauaauaaucauugguucggucuguaugacaauuggaauggcuaacuuaauauuacaaauuggaaacauaaucucaauauggauuagccacucaauucaacuugggaaucaaaaucagauugaaacaugcaaucaaagcgucauuacuuaugaaaacaacacuuggguaaaucagacauauguuaacaucagcaacaccaacuuugcugcuggacagucagugguuuccgugaaauuagcgggcaauuccucucucugcccuguuaguggaugggcuauauacaguaaagacaacaguauaagaaucgguuccaagggggauguguuugucauaagggaaccauucauaucaugcucccccuuggaaugcagaaccuucuucuugacucaaggggccuugcuaaaugacaaacauuccaauggaaccauuaaagacaggagcccauaucgaacccuaaugagcuguccuauuggugaaguucccucuccauacaacucaagauuugagucagucgcuuggucagcaagugcuugucaugauggcaucaauuggcuaacaauuggaauuucuggcccagacaauggggcaguggcuguguuaaaguacaacggcauaauaacagacacuaucaagaguuggagaaacaauauauugagaacacaagagucugaaugugcauguguaaaugguucuugcuuuacuguaaugaccgauggaccaagugauggacaggccucauacaagaucuucagaauagacaagggaaagauagucaaaucagucgaaaugaaugccccuaauuaucacuaugaggaaugcuccuguuauccugauucuagugaaaucacaugugugugcagggauaacuggcauggcucgaaucgaccgugggugucuuucaaccagaaucuggaauaucagauaggauacauaugcagugggauuuucggagacaauccacgcccuaaugauaagacaggcaguugugguccaguaucgucuaauggagcaaauggaguaaaaggauuuucauucaaauacggcaaugguguuuggauagggagaacuaaaagcauuaguucaagaaacgguuuugagaugauuugggauccgaacggauggacugggacagacaauaacuucgcaauaaagcaagauaucguaggaauaaaugaguggucaggauauagcgggaguuuuguucagcauccagaacuaacagggcuggauuguauaagaccuugcuucuggguugaacuaaucagagggcgacccaaagagaacacaaucuggacuagcgggagcagcauauccuuuugugguguaaacagugacacuguggguuggucuuggccagacggugcugaguugccauuuaccauugacaaguaa

SEQ ID NO: 50647 - RNA, 1410 nt, Artificial Sequence
  derived and/or modified CDS sequence (wt) from neuraminidase__InfluenzaA__ADF87175
augaauccaaaccaaaagauaauaaccauugguucggucuguaugacaauuggaauggcuaacuuaauauuacaaauuggaaacauaaucucaauauggauuagccacucaauucaacuugggaaucaaaaucagauugaaacaugcaaucaaagcgucauuacuuaugaaaacaacacuuggguaaaucagacauauguuaacaucagcaacaccaacuuugcugcugaacagucagugguuuccgugaaauuagcgggcaauuccucucucugcccuguuaguggaugggcuauauacaguaaagacaacaguauaagaaucgguuccaagggggauguguuugucauaagggaaccauucauaucaugcucccccuuggaaugcagaaccuucuucuugacucaaggggccuugcuaaaugacaaacauuccaauggaaccauuaaagacaggagcccauaucgaacccuaaugagcuguccuauuggugaaguucccucuccauacaacucaagauuugagucagucgcuuggucagcaagugcuugucaugauggcaucaauuggcuaacaauuggaauuucuggcccagacaauggggcaguggcuguguuaaaguacaacggcauaauaacagacacuaucaagaguuggagaaacaauauauugagaacacaagagucugaaugugcauguguaaaugguucuugcuuuacuguaaugaccgauggaccaagugauggacaggccucauacaagaucuucagaauagaaaagggaaagauagucaaaucagucgaaaugaaugccccuaauuaucacuaugaggaaugcuccuguuauccugauucuagugaaaucacaugugugugcagggauaacuggcauggcucgaaucgaccgugggugucuuucaaccagaaucuggaauaucagauaggauacauaugcagugggauuuucggagacaauccacgcccuaaugauaagacaggcaguugugguccaguaucaucuaauggagcaaauggaguaaaaggauuuucauucaaauacggcaaugguguuuggauagggagaacuaaaagcauuaguucaagaaacgguuuugagaugauuugggauccgaacggauggacugggacagacaauaacuucucaauaaagcaagauaucguaggaauaaaugaguggucaggauacagcgggaguuuuguucagcauccagaacuaacagggcuggauuguauaagaccuugcuucuggguugaacuaaucagagggcgacccaaagagaacacaaucuggacuagcgggagcagcauauccuuuugugguguaaacagugacacuguggguuggucuuggccagacggugcugaguugccauuuaccauugacaaguaa

SEQ ID NO: 50648 - RNA, 1410 nt, Artificial Sequence; identical to SEQ ID NO: 48947
  derived and/or modified CDS sequence (wt) from neuraminidase__InfluenzaA__ADF87185

SEQ ID NO: 50649 - RNA, 1410 nt, Artificial Sequence; identical to SEQ ID NO: 50647
  derived and/or modified CDS sequence (wt) from neuraminidase__InfluenzaA__ADF87195

SEQ ID NO: 50650 - RNA, 1410 nt, Artificial Sequence
  derived and/or modified CDS sequence (wt) from neuraminidase__InfluenzaA__ADF87205
augaauccaaaccaaaagauaauaaccauugguucggucuguaugacaauuggaauggcuaacuuaauauuacaaauuggaaacauaaucucaauauggauuagccacucaauucaacuugggaaucaaaaucagauugaaacaugcaaucaaagcgucauuacuuaugaaaacaacacuuggguaaaucagacauauguuaacaucagcaacaccaacuuugcugcuggacagucagugguuuccgugaaauuagcgggcaauuccucucucugcccuguuaguggaugggcuauauacaguaaagacaacaguauaagaaucgguuccaagggggauguguuugucauaagggaaccauucauaucaugcucccccuuggaaugcagaaccuucuucuugacucaaggggccuugcuaaaugacaaacauuccaauggaaccauuaaagacaggagcccauaucgaacccuaaugagcuguccuauuggugaaguucccucuccauacaacucaagauuugagucagucgcuuggucagcaagugcuugucaugauggcaucaauuggcuaacaauuggaauuucuggcccagacaauggggcaguggcuguguuaaaguacaacggcauaauaacagacacuaucaagaguuggagaaacaauauauugagaacacaagagucugaaugugcauguguaaaugguucuugcuuuacuguaaugaccgauggaccaagugauggacaggccucauacaagaucuucagaauagaaaagggaaagauagucaaaucagucgaaaugaaugccccuaauuaucacuaugaggaaugcuccuguuauccugauucuagugaaaucacaugugugugcagggauaacuggcauggcucgaaucgaccgugggugucuuucaaccagaaucuggaauaucagauaggauacauaugcagugggauuuucggagacaauccacgcccuaaugauaagacaggcaguugugguccaguaucgucuaauggagcaaauggaguaaaaggauuuucauucaaauacggcaaugguguuuggauagggagaacuaaaagcauuaguucaagaaacgguuuugagaugauuugggauccgaacggauggacugggacagacaauaacuucucaauaaagcaagauaucguaggaauaaaugaguggucaggauauagcgggaguuuuguucagcauccggaacuaacagggcuggauuguauaagaccuugcuucuggguugaacuaaucagagggcgacccaaagagaacacaaucuggacuagcgggagcagcauauccuuuugugguguaaacagugacacuguggguuggucuuggccagacggugcugaguugccauuuaccauugacaaguaa

SEQ ID NO: 50651 - RNA, 1410 nt, Artificial Sequence
  derived and/or modified CDS sequence (wt) from neuraminidase__InfluenzaA__ADF87215
augaauccaaaccaaaagauaauaaccauugguucggucuguaugacaauuggaauggcuaacuuaauauuacaaauuggaaacauaaucucaauauggauuagccacucaauucaacuugggaaucaaaaucagauugaaacaugcaaucaaagcgucauuacuuaugaaaacaacacuuggguaaaucagacauauguuaacaucagcaacaccaacuuugcugcuggacagucagugguuuccgugaaauuagcgggcaauuccucucucugcccuguuaguggaugggcuauauacaguaaagacaacaguauaagaaucgguuccaagggggauguguuugucauaagggaaccauucauaucaugcucccccuuggaaugcagaaccuucuucuugacucaaggggccuugcuaaaugacaaacauuccaauggaaccauuaaagacaggagcccauaucgaacccuaaugagcuguccuauuggugaaguucccucuccauacaacucaagauuugagucagucgcuuggucagcaagugcuugucaugauggcaucaauuggcuaacaauuggaauuucuggcccagacaauggggcaguggcuguguuaaaguacaacggcauaauaacagacacuaucaagaguuggagaaacaauauauugagaacacaagagucugaaugugcauguguaaaugguucuugcuuuacuguaaugaccgauggaccaagugauggacaggccucauacaagaucuucagaauagaaaagggaaagauagucaaaucagucgaaaugaaugccccuaauuaucacuaugaggaaugcuccuguuauccugauucuagugaaaucacaugugugugcagggauaacuggcauggcucgaaucgaccgugggugucuuucaaccagaaucuggaauaucagauaggauacauaugcagugggauuuucggagacaauccacgcccuaaugauaagacaggcaguugugguccaguaucgucuaauggagcaaauggaguaaaaggauuuucauucaaauacggcaaugguguuuggauagggagaacuaaaagcauuaguucaagaaacgguuuugagaugauuugggauccgaacggauggacugggacagacaauaacuucucaauaaagcaggauaucguaggaauaaaugaguggucaggauauagcgggaguuuuguucagcauccagaacuaacagggcuggauuguauaagaccuugcuucuggguugaacuaaucagagggcgacccaaagagaacacaaucuggacuagcgggagcagcauauccuuuugugguguaaacagugacacuguggguuggucuuggccagacggugcugaguugccauuuaccauugacaaguaa

SEQ ID NO: 50652 - RNA, 1410 nt, Artificial Sequence
  derived and/or modified CDS sequence (wt) from neuraminidase__InfluenzaA__ADF87235
augaauccaaaccaaaagauaauaaccauugguucggucuguaugacaauuggaauggcuaacuuaauauuacaaauuggaaacauaaucucaauauggauuagccacucaauucaacuugggaaucaaaaucagauugaaacaugcaaucaaagcgucauuacuuaugaaaacaacacuuggguaaaucagacauauguuaacaucagcaacaccaacuuugcugcuggacagucagugguuuccgugaaauuagcgggcaauuccucucucugcccuguuaguggaugggcuauauacaguaaagacaacaguauaagaaucgguuccaagggggauguguuugucauaagggaaccauucauaucaugcucccccuuggaaugcagaaccuucuucuugacucaaggggccuugcuaaaugacaaacauuccaauggaaccauuaaagacaggagcccauaucgaacccuaaugagcuguccuauuggugaaguucccucuccauacaacucaagauuugagucaguugcuuggucagcaagugcuugucaugauggcaucaauuggcuaacaauuggaauuucuggcccagacaauggggcaguggcuguguuaaaguacaacggcauaauaacagacacuaucaagaguuggagaaacaauauauugagaacacaagagucugaaugugcauguguaaaugguucuugcuuuacuguaaugaccgauggaccaagugauggacaggccucauacaagaucuucaaaauagaaaagggaaagauagucaaaucagucgaaaugaaugccccuaauuaucacuaugaggaaugcuccuguuauccugauucuagugaaaucacaugugugugcagggauaacuggcauggcucgaaucgaccgugggugucuuucaaccagaaucuggaauaucagauaggauacauaugcagugggauuuucggagacaauccacgcccuaaugauaagacaggcaguugugguccaguaucgucuaauggagcaaauggaguaaaaggauuuucauucaaauacggcaaugguguuuggauagggagaacuaaaagcauuaguucaagaaacgguuuugagaugauuugggauccgaacggauggacugggacagacaauaacuucucaauaaagcaagauaucguaggaauaaaugaguggucaggauauagcgggaguuuuguucagcauccagaacuaacagggcuggauuguauaagaccuugcuucuggguugaacuaaucagagggcgacccaaagagaacacaaucuggacuagcgggagcagcauauccuuuugugguguaaacagugacacuguggguuggucuuggccagacggugcugaguugccauuuaccauugacaaguaa

SEQ ID NO: 50653 - RNA, 1410 nt, Artificial Sequence; identical to SEQ ID NO: 50647
  derived and/or modified CDS sequence (wt) from neuraminidase__InfluenzaA__ADF87245

SEQ ID NO: 50654 - RNA, 1410 nt, Artificial Sequence; identical to SEQ ID NO: 50647
  derived and/or modified CDS sequence (wt) from neuraminidase__InfluenzaA__ADF87265

SEQ ID NO: 50655 - RNA, 1410 nt, Artificial Sequence
  derived and/or modified CDS sequence (wt) from neuraminidase__InfluenzaA__ADF87285
augaauccaaaccaaaagauaauaaccauugguucggucuguaugucaauuggaauggcuaacuuaauauuacaaauuggaaacauaaucucaauauggauuagccacucaauucaacuugggaauaaaaaucagauugaaacaugcaaucaaagcgucauuacuuaugaaaacaacacuuggguaaaucagacauauguuaacaucagcaacaccaacuuugcugcuggacagucagugguuuccgugaaauuagcgggcaauuccucucucugcccuguuaguggaugggcuauauacaguaaagacaacaguauaagaaucgguuccaagggggauguguuugucauaagggaaccauucauaucaugcucccccuuggaaugcagaaccuucuucuugacucaaggggccuugcuaaaugacaaacauuccaauggaaccauuaaagacaggagcccauaucgaacccuaaugagcuguccuauuggugaaguucccucuccauacaacucaagauuugagucagucgcuuggucagcaagugcuugucaugauggcaucaauuggcuaacaauuggaauuucuggcccagacaauggggcaguggcuguguuaaaguacaacggcauaauaacagacacuaucaagaguuggagaaacaauauauugagaacacaagagucugaaugugcauguguaaaugguucuugcuuuacuguaaugaccgauggaccaagugauggacaggccucauacaagaucuucagaauagaaaagggaaagauagucaaaucagucgaaaugaaugccccuaauuaucacuaugaggaaugcucuuguuauccugauucuagugaaaucacaugugugugcagggauaacuggcauggcucgaaucgaccgugggugucuuucaaccagaaucuggaauaucagauaggauacauaugcagugggauuuucggagacaauccacgcccuaaugauaagaaaggcaguugugguccaguaucgucuaauggagcaaauggaguaaaaggauuuucauucaaauacggcaaugguguuuggauagggagaacuaaaagcauuaguucaagaaacgguuuugagaugauuugggauccgaacggauggacugggacagacaauaacuucucaauaaagcaagauaucguaggaaugaaugaauggucaggauauagcgggaguuuuguucagcauccagaacuaacagggcuggauuguaucagaccuugcuucuggguugaacuaaucagagggcgacccaaagagaacacaaucuggacuagcgggagcagcauauccuuuugugguguaaacagugacacuguggguuggucuuggccagacggugcugaguugccauuuaccauugacaaguaa

SEQ ID NO: 50656 - RNA, 1410 nt, Artificial Sequence
  derived and/or modified CDS sequence (wt) from neuraminidase__InfluenzaA__ADF87295
augaauccaaaccaaaagauaauaaccauugguucggucuguaugacaauuggaauggcuaacuuaauauuacaaauuggaaacauaaucucaauauggauuagccacucaauucaacuugggaaucaaaaucagauugaaacaugcaaucaaagcgucauuacuuaugaaaacaacacuuggguaaaucagacauauguuaacaucagcaacaccaacuuugcugcuggacagucagugguuuccgugaaauuagcgggcaauuccucucucugcccuguuaguggaugggcuauauacaguaaagacaacaguauaagaaucgguuccaagggggauguguuugucauaagggaaccauucauaucaugcucccccuuggaaugcagaaccuucuucuugacucaaggggccuugcuaaaugacaaacauuccaauggaaccauuaaagacaggagcccauaucgaacccuaaugagcuguccuauuggugaaguucccucuccauacaacucaagauuugagucagucgcuuggucagcaagugcuugucaugauggcaucaauuggcuaacaauuggaauuucuggcccagacaauggggcaguggcuguguuaaaguacaacggcauaauaacagacacuaucaagaguuggagaaacaauauauugagaacacaagagucugaaugugcauguguaaaugguucuugcuuuacuguaaugaccgauggaccaagugauggacaggccucauacaagaucuucagaauagaaaagggaaagauagucaaaucagucgaaaugaaugccccuaauuaucacuaugaggaaugcuccuguuauccugauucuagugaaaucacaugugugugcagggauaacuggcauggcucgaaucgaccgugggugucuuucaaccagaaucuggaauaucagauaggauacauaugcagugggauuuucggagacaauccacgcccuaaugauaaaacaggcaguugugguccaguaucgucuaauggagcaaauggaguaaaaggauuuucauucaaauacggcaaugguguuuggauagggagaacuaaaagcauuaguucaagaaacgguuuugagaugauuugggauccgaacggauggacugggacagacaauaacuucucaauaaagcaagauaucguaggaauaaaugaguggucaggauauagcgggaguuuuguucagcauccagaacuaacagggcuggauuguauaagaccuugcuucuggguugaacuaaucagagggcgacccaaagagaacacaaucuggacuagcgggagcagcauauccuuuugugguguaaacagugacacuguggguuggucuuggccagacggugcugaguugccauuuaccauugacaaguaa

SEQ ID NO: 50657 - RNA, 1410 nt, Artificial Sequence; identical to SEQ ID NO: 49794
  derived and/or modified CDS sequence (wt) from neuraminidase__InfluenzaA__ADF87305

SEQ ID NO: 50658 - RNA, 1410 nt, Artificial Sequence; identical to SEQ ID NO: 49070
  derived and/or modified CDS sequence (wt) from neuraminidase__InfluenzaA__ADF87334

SEQ ID NO: 50659 - RNA, 1410 nt, Artificial Sequence; identical to SEQ ID NO: 50344
  derived and/or modified CDS sequence (wt) from neuraminidase__InfluenzaA__ADF87344

SEQ ID NO: 50660 - RNA, 1410 nt, Artificial Sequence
  derived and/or modified CDS sequence (wt) from neuraminidase__InfluenzaA__ADF87354
augaauccaaaccaaaagauaauaaccauugguucggucuguaugacaauuggaauggcuaacuuaauauuacaaauuggaaacauaaucucaauauggauuagccacucaauucaacuugggaaucaaaaucagauugaaacaugcaaucaaagcgucauuacuuaugaaaacaacacuuggguaaaucagacauauguuaacaucagcaacaccaacuuugcugcuggacagucagugguuuccgugaaauuagcgggcaauuccucucucugcccuguuaguggaugggcuauauacaguaaagacaacaguauaagaaucgguuccaagggggauguguuugucauaagggaaccauucauaucaugcucccccuuggaaugcagaaccuucuucuugacucaaggggccuugcuaaaugacaaacauuccaauggaaccauuaaagacaggagcccauaucgaacccuaaugagcuguccuauuggugaaguucccucuccauacaacucaagauuugagucagucgcuuggucagcaagugcuugucaugauggcaucaauuggcuaacaauuggaauuucuggcccagacaauggggcaguggcuguguuaaaguacaacggcauaauaacagacacuaucaagaguuggagaaacaauauauugagaacacaagagucugaaugugcauguguaaaugguucuugcuuuacuguaaugaccgauggaccaagugauggacaggccucauacaagaucuucagaauagaaaagggaaagauagucaaaucagucgaaaugaaugccccuaauuaucacuaugaggaaugcuccuguuauccugauucuagugaaaucacaugugugugcagggauaacuggcauggcucgaaucgaccgugggugucuuucaaccagaaucuggaauaucagauaggauacauaugcagugggauuuucggagacaauccacgcccuaaugauaagacaggcaguugugguccaguaucgucuaauggagcaaauggaguaaaaggauuuucauucaaauacggcaaugguguuuggauagggagaacuaaaagcauuaguucaaggaacgguuuugagaugauuugggauccgaacggauggacugggacagacaauuacuucucaauaaagcaagauaucguaggaauaaaugaguggucaggauauagcgggaguuuuguucagcauccagaacuaacagggcuggauuguauaagaccuugcuucuggguugaacuaaucagagggcgacccaaagagaacacaaucuggacuagcgggagcagcauauccuuuugugguguaaacagugacacuguggguuggucuuggccagacggugcugaguugccauuuaccauugacaaguaa

SEQ ID NO: 50661 - RNA, 1410 nt, Artificial Sequence
  derived and/or modified CDS sequence (wt) from neuraminidase__InfluenzaA__ADF87364
augaauccaaaccaaaagauaauaaccauugguucggucuguaugacaauuggaauggccaacuuaauauuacaaauuggaaacauaaucucaauauggauuagccacucaauucaacuugggaaucaaaaucagauugaaacaugcaaucaaagcgucauuacuuaugaaaacaacacuuggguaaaucagacauauguuaacaucagcaacaccaacuuugcugcuggacagucagugguuuccgugaaauuagcgggcaauuccucucucugcccuguuaguggaugggcuauauacaguaaagacaacaguguaagaaucgguuccaagggggauguguuugucauaagggaaccauucauaucaugcucccccuuggaaugcagaaccuucuucuugacucaaggggccuugcuaaaugacaaacauuccaauggaaccauuaaagacaggagcccauaucgaacccuaaugagcuguccuauuggugaaguucccucuccauacaacucaagauuugagucagucgcuuggucagcaagugcuugucaugauggcaucaauuggcuaacaauuggaauuucuggcccagacaauggggcaguggcuguguuaaaguacaacggcauaauaacagacacuaucaagaguuggagaaacaauauauugagaacacaagagucugaaugugcauguguaaaugguucuugcuuuacuguaaugaccgauggaccaagugauggacaggccucauacaagaucuucagaauagaaaagggaaagauagucaaaucagucgaaaugaaugccccuaauuaucacuaugaggaaugcuccuguuauccugauucuagugaaaucacaugugugugcagggauaacuggcauggcucgaaucgaccguggguuucuuucaaccagaaucuggaauaucagauaggauacauaugcagugggauuuuuggagacaauccacgcccuaaugauaagacaggcaguugugguccaguaucgucuaauggagcaaauggaguaaaaggauuuucauucaaauacggcaaugguguuuggauagggagaacuaaaagcauuaguucaagaaacgguuuugagaugauuugggauccgaacggauggacugggacagacaauaacuucucaauaaagcaagauaucguaggaauaaaugaguggucaggauauagcgggaguuuuguucagcauccagaacuaacagggcuggauuguauaagaccuugcuucuggguugaacuaaucagagggcgacccaaagagaacacaaucuggacuagcgggagcagcauauccuuuugugguguaaacagugacacuguggguuggucuuggccagacggugcugaguugccauuuaccauugacaaguaa

SEQ ID NO: 50662 - RNA, 1410 nt, Artificial Sequence; identical to SEQ ID NO: 49794
  derived and/or modified CDS sequence (wt) from neuraminidase__InfluenzaA__ADF87374

SEQ ID NO: 50663 - RNA, 1410 nt, Artificial Sequence
  derived and/or modified CDS sequence (wt) from neuraminidase__InfluenzaA__ADF87384
augaauccaaaccaaaagauaauaaccauugguucggucuguaugacaauuggaauggcuaacuuaauauuacaaauuggaaacauaaucucaauauggauuagccacucaauucaacuugggaaucaaaaucagauugaaacaugcaaucaaagcaucauuacuuaugaaaacaacacuuggguaaaucagacauauguuaacaucagcaacaccaacuuugcugcuggacagucagugguuuccgugaaauuagcgggcaauuccucucucugcccuguuaguggaugggcuauauacaguaaagacaacaguauaagaaucgguuccaagggggauguguuugucauaagggaaccauucauaucaugcucccccuuggaaugcagaaccuucuucuugacucaaggggccuugcuaaaugacaaacauuccaauggaaccauuaaagacaggagcccauaucgaacccuaaugagcuguccuauuggugaaguucccucuccauacaacucaagauuugagucagucgcuuggucagcaagugcuugucaugauggcaucaauuggcuaacaauuggaauuucuggcccagacaauggggcaguggcuguguuaaaguacaacggcauaauaacagacacuaucaagaguuggagaaacaauauauugagaacacaagagucugaaugugcauguguaaaugguucuugcuuuacuguaaugaccgauggaccaagugauggacaggccucauacaagaucuucagaauagaaaagggaaagauagucaaaucagucgaaaugaaugccccuaauuaucacuaugaggaaugcuccuguuauccugauucuagugaaaucacaugugugugcagggauaacuggcauggcucgaaucgaccgugggugucuuucaaccagaaucuggaauaucagauaggauacauaugcagugggauuuucggagacaauccacgcccuaaugauaaaacaggcaguugugguccaguaucgucuaauggagcaaauggaguaaaaggauuuucauucaaauacggcaaugguguuuggauagggagaacuaaaagcauuaguucaagaaacgguuuugagaugauuugggauccgaacggauggacugggacagacaauaacuucucaauaaagcaagauaucguaggaauaaaugaauggucaggauauagcgggaguuuuguucagcauccagaacuaacagggcuggauuguauaagaccuugcuucuggguugaacuaaucagagggcgacccaaagagaacacaaucuggacuagcgggagcagcauauccuuuugugguguaaacagugacacuguggguuggucuuggccagacggugcugaguugccauuuaccauugacaaguaa

SEQ ID NO: 50664 - RNA, 1410 nt, Artificial Sequence
  derived and/or modified CDS sequence (wt) from neuraminidase__InfluenzaA__ADF97251
augaauccaaaccaaaagauaauaaccauugguucggucuguaugacaauuggaauggcuaacuuaauauuacaaauuggaaacauaaucucaauauggauuagccacucaauucaacuugggaaucaaaaucagauugaaacaugcaaucaaagcgucauuacuuaugaaaacaacacuuggguaaaucagacauauguuaacaucagcaacaccaacuuugcugcuggacagucagugguuuccgugaaauuagcgggcaauuccucucucugcccuguuaguggaugggcuauauacaguaaagacaacaguauaagaaucgguuccaagggggauguguuugucauaagggaaccauucauaucaugcucccccuuggaaugcagaaccuucuucuugacucaaggggccuugcuaaaugacaaacauuccaauggaaccauuaaagacaggagcccauaucgaacccuaaugagcuguccuauuggugaaguucccucuccauacaacucaagauuugagucagucgcuuggucagcaagugcuugucaugauggcaucaauuggcuaacaauuggaauuucuggcccagacaauggggcaguggcuguguuaaaguacaacggcauaauaacagacacuaucaagaguuggagaaacaauauauugagaacacaagagucugaaugugcauguguaaaugguucuugcuuuacuguaaugaccgauggaccaagugauggacaggccucauacaagaucuucagaauagaaaagggaaagauagucaaaucagucgaaaugaaugccccuaauuaucacuaugaggaaugcuccuguuauccugauucuagugaaaucacaugugugugcagggauaacuggcauggcucgaaucgaccgugggugucuuucaaccagaaucuggaauaucagauaggauacauaugcagugggauuuucggagacaauccacgcccuaaugauaagacaggcaguugugguccaguaucgucuaauggagcaaauggaguaaaaggauuuucauucaaauacggcaaugguguuuggauagggagaacuaaaagcauuaguucaagaaaugguuuugagaugauuugggauccgaacggauggacugggacagacaauaacuucucaauaaagcaagauaucguaggaauaaaugaguggucaggauauagcgggaguuuuguucagcauccagaacuaacagggcuggauuguauaagaccuugcuucuggguugaacuaaucagagggcgacccaaagagaacacaaucuggacuagcgggagcagcauauccuuuugugguguaaacagugacacuguggguuggucuuggccagacggugcugaguugccauuuaccauugacaaguaa

SEQ ID NO: 50665 - RNA, 1410 nt, Artificial Sequence
  derived and/or modified CDS sequence (wt) from neuraminidase__InfluenzaA__ADF97252
augaauccaaaccaaaagauaauaaccauugguucggucuguaugacaauuggaauggcuaacuuaauauuacaaauuggaaacauaaucucaauauggauuagccacucaauucaacuugggaaucaaaaucagauugaaacaugcaaucaaagcgucauuacuuaugaaaacaacacuuggguaaaucagacauauguuaacaucagcaacaccaacuuugcugcuggacagucagugguuuccgugaaauuagcgggcaauuccucucucugcccuguuaguggaugggcuauauacaguaaagacaacaguauaagaaucgguuccaagggggauguguuugucauaagggaaccauucauaucaugcucccccuuggaaugcagaaccuucuucuugacucaaggggccuugcuaaaugacaaacauuccaauggaaccauuaaagacaggagcccauaucgaacccuaaugagcuguccuauuggugaaguucccucuccauacaacucaagauuugagucagucgcuuggucagcaagugcuugucaugauggcaucaauuggcuaacaauuggaauuucuggcccagacaauggggcaguggcuguguuaaaguacaacggcauaauaacagacacuaucaagaguuggagaaacaauauauugagaacacaagagucugaaugugcauguguaaaugguucuugcuuuacuguaaugaccgauggaccaaaugauggacaggccucauacaagaucuucagaauagaaaagggaaagauagucaaaucagucgaaaugaaugccccuaauuaucacuaugaggaaugcuccuguuauccugauucuagugaaaucacaugugugugcagggauaacuggcauggcucgaaucgaccgugggugucuuucaaccagaaucuggaauaucagauaggauacauaugcagugggauuuucggagacaauccacgcccuaaugauaagacaggcaguugugguccaguaucgucuaauggagcaaauggaguaaaaggauuuucauucaaauacggcaaugguguuuggauagggagaacuaaaagcauuaguucaagaaacgguuuugagaugauuugggauccgaacggauggacugggacagacaauaacuucucaauaaagcaagauaucguaggaauaaaugaguggucaggauauagcgggaguuuuguucagcauccagaacuaacagggcuggauuguauaagaccuugcuucuggguugaacuaaucagagggcgacccaaagagaacacaaucuggacuagcgggagcagcauauccuuuugugguguaaacagugacacuguggguuggucuuggccagacggugcugaguugccauuuaccauugacaaguaa

SEQ ID NO: 50666 - RNA, 1410 nt, Artificial Sequence; identical to SEQ ID NO: 48750
  derived and/or modified CDS sequence (wt) from neuraminidase__InfluenzaA__ADF97253

SEQ ID NO: 50667 - RNA, 1410 nt, Artificial Sequence; identical to SEQ ID NO: 48750
  derived and/or modified CDS sequence (wt) from neuraminidase__InfluenzaA__ADF97254

SEQ ID NO: 50668 - RNA, 1410 nt, Artificial Sequence
  derived and/or modified CDS sequence (wt) from neuraminidase__InfluenzaA__ADF97255
augaauccaaaccaaaagauaauaaccauugguucggucuguaugacaauuggaauggcuaacuuaauauuacaaauuggaaacauaaucucaauauggauuagccacucaauucaacuugggaaucaaaaucagauugaaacaugcaaucaaagcgucauuacuuaugaaaacaacacuuggguaaaucagacauauguuaacaucagcaacaccaacuuugcugcuggacagucagugguuuccgugaaauuagcgggcaauuccucucucugcccuguuaguggaugggcuauauacaguaaagacaacaguauaagaaucgguuccaagggggauguguuugucauaagggaaccauucauaucaugcucccccuuggaaugcagaaccuucuucuugacucaaggggccuugcuaaaugacaaacauuccaauggaaccauuaaagacaggagcccauaucgaacccuaaugagcuguccuauuggugaaguucccucuccauacaacucaagauuugagucagucgcuuggucagcaagugcuugucaugauggcaucaauuggcuaacaauuggaauuucuggcccagacaauggggcaguggcuguguuaaaguacaacggcauaauaacagacacuaucaagaguuggagaaacaauauauugagaacacaagagucugaaugugcauguguaaaugguucuugcuuuacuguaaugaccgauggaccaagugauggacaggccucauacaagaucuucagaauagaaaagggaaagauagucaaaucagucgaaaugaaugccccuaauuaucacuaugaggaaugcuccuguuauccugauucuagugaaaucacaugugugugcagggauaacuggcauggcucgaaucgaccgugggugucuuucaaccagaaucuggaauaucagauaggauacauaugcagugggauuuucggagacaauccacgcccuaaugauaagacaggcaguugugguccaguaucgucuaauggagcaaauggaguaaaaggauuuucauucaaauacggcaaugguguuuggauagggagaacuaaaagcauuaguucaagaaacgguuuugagaugauuugggauccgaacggauggacugggacagacaaucacuucucaauaaagcaagauaucguaggaauaaaugaguggucaggauauagcgggaguuuuguucagcauccagaacuaacagggcuggauuguauaagaccuugcuucuggguugaacuaaucagagggcgaccuaaagagaacacaaucuggacuagcgggagcagcauauccuuuugugguguaaacagugacacuguggguuggucuuggccagacggugcugaguugccauuuaccauugacaaguaa

SEQ ID NO: 50669 - RNA, 1410 nt, Artificial Sequence; identical to SEQ ID NO: 48750
  derived and/or modified CDS sequence (wt) from neuraminidase__InfluenzaA__ADF97256

SEQ ID NO: 50670 - RNA, 1410 nt, Artificial Sequence; identical to SEQ ID NO: 49024
  derived and/or modified CDS sequence (wt) from neuraminidase__InfluenzaA__ADF97257

SEQ ID NO: 50671 - RNA, 1410 nt, Artificial Sequence
  derived and/or modified CDS sequence (wt) from neuraminidase__InfluenzaA__ADF97837
augaauccaaaccaaaagauaauaaccauugguucggucuguaugacaauuggaauggcuaacuuaauauuacaaauuggaaacauaaucucaauauggauuagccacucaauucaacuugggaaucaaaaucagauugaaacaugcaaucaaagcgucauuacuuaugaaaacaacacuuggguaaaucagacauauguuaacaucagcaacaccaacuuugcugcuggacagucagugguuuccgugaaauuagcgggcaauuccucucucugcccuguuaguggaugggcuauauacaguaaagacaacaguauaagaaucgguuccaagggggauguguuugucauaagggaaccauucauaucaugcucccccuuggaaugcagaaccuucuucuugacucaaggggccuugcuaaaugacaaacauuccaauggaaccauuaaagacaggagcccauaucgaacccuaaugagcuguccuauuggugaaguucccucuccauacaacucaagauuugagucagucgcuuggucagcaagugcuugucaugauggcaucaauuggcuaacaauuggaauuucuggcccagacaauggggcaguggcuguguuaaaguacaacggcauaauaacagacacuaucaagaguuggagaaacaauauauugagaacacaagagucugaaugugcauguguaaaugguucuugcuuuacuguaaugaccgauggaccaagugauggacaggccucauacaagaucuucagaauagaaaagggaaagauagucaaaucagucgaaaugaaugccccuaauuauuacuaugaggaaugcuccuguuauccugauucuagugaaaucacaugugugugcagggauaacuggcauggcucaaaucgaccgugggugucuuucaaccagaaucuggaauaucagauaggauacauaugcagugggauuuucggagacaauccacgcccuaaugauaagacaggcaguugugguccaguaucgucuaauggagcaaauggaguaaaaggauuuucauucaaauacggcaaugguguuuggauagggagaacuaaaagcauuaguucaagaaacgguuuugagaugauuugggauccgaacggauggacugggacagacaauaacuucucaauaaagcaagauaucguaggaauaaaugaguggucaggauauagcgggaguuuuguccagcauccagaacuaacagggcuggauuguauaagaccuugcuucuggguugaacuaaucagagggcgacccaaagagaacacaaucuggacuagcgggagcagcauauccuuuugugguguaaacagugacacuguggguuggucuuggccagacggugcugaguugccauuuaccauugacaaguaa

SEQ ID NO: 50672 - RNA, 1410 nt, Artificial Sequence
  derived and/or modified CDS sequence (wt) from neuraminidase__InfluenzaA__ADG08120
augaauccaaaccaaaagauaauaaccauugguucggucuguaugacaauuggaauggcuaacuuaauauuacaaauuggaaacauaaucucaauauggauuagccacucaauucaacuugggaaucaaaaucagauugaaacaugcaaucaaagcgucauuacuuaugaaaacaacacuuggguaaaucagacauauguuaacaucagcaacaccaacuuugcugcuggacagucagugguuuccgugaaauuagcgggcaauuccucucucugcccuguuaguggaugggcuauauacaguaaagacaacaguauaagaaucgguuccaagggggauguguuugucauaagggaaccauucauaucaugcucccccuuggaaugcagaaccuucuucuugacucaaggggccuugcuaaaugacaaacauuccaauggaaccauuaaagacaggaguccauaucgaacccuaaugagcuguccuauuggugaaguucccucuccauacaacucaagauuugagucagucgcuuggucagcaagugcuugucaugauggcaucaauuggcuaacaauuggaauuucuggcccagacaauggggcaguggcuguguuaaaguacaacggcauaauaacagacacuaucaagaguuggagaaacaauauauugagaacacaagagucugaaugugcauguguaaaugguucuugcuuuacuguaaugaccgauggaccaagugauggacaggccucauacaagaucuucagaauagaaaagggaaagauagucaaaucagucgaaaugaaugccccuaauuaucacuaugaggaaugcuccuguuauccugauucuagugaaaucacaugugugugcagggauaacuggcauggcucgaaucgaccgugggugucuuucaaccagaaucuggaauaucagauaggauacauaugcagugggauuuucggagacaauccacgcccuaaugacaagacaggcaguugugguccaguaucgucuaauggagcaaauggaguaaaaggauuuucauucaaauacggcaaugguguuuggauagggagaacuaaaagcauuaguucaagaaacgguuuugagaugauuugggauccgaacggauggacugggacagacaauaacuucucaauaaagcaagauaucguaggaauaaaugaguggucaggauauagcgggaguuuuguucagcauccagaacuaacagggcuggauuguauaagaccuugcuucuggguugaacuaaucagagggcgacccaaagagaacacaaucuggacuagcgggagcagcauauccuuuugugguguaaacagugacacuguggguuggucuuggccagacggugcugaguugccauuuaccauugacaaguaa

SEQ ID NO: 50673 - RNA, 1350 nt, Artificial Sequence
  derived and/or modified CDS sequence (wt) from neuraminidase__InfluenzaA__ADG21408
augaauccaaaucagaagauaauaaccaucggaucaaucuguaugguaauugggauaguuagcuuaauguuacaaauugggaacaugaucucaauaugggucagucauucaauucagacagggaaucaaugccaagaugaaccaaucagcaacacuaaauuucuuacugagaaagcuguggcuucaguaacauuagcgggcaauuuaucucuuugucccguuagcggaugggcuguguacaguaaggacaacagcauaaggaucgguuccagaggggauguguuuguuauaagagagccguucaucucaugcucccacuuggaaugcagaacuuucuuuuuaacccagggagccuuacugaaugacaagcacuccaaugggacugucaaagacagaagcccucacagaacauuaaugaguuguccugugggugaggcucccuccccauauaacucaagguuugagucuguugcuuggucagcaagugcuugccaugauggcaccaguugguugacaauuggaauuucugguccagacaauggggcuguggccguauugaaauacaauggcauaauaacagacaccaucaagaguuggaggaacaauauaaugagaacucaggagucugaaugugcauguguaaauggcucuugcuuuacuguaaugacugauggaccaaguagugggcaggcaucauauaagaucuucaaaauggaaaagggaaaagugguuaaaucagucgaauuggaugcuccuaauuaucacuaugaggagugcuccuguuauccugaugccggcgaaaucacaugugugugcagggauaauuggcauggaucaaauaggccauggguaucuuucaaucaaaauuuggaguaucaaauaggauauauaugcaguggaguuuucggagacaauccacgccccaaugauggaacagguaguugugguccgguguucccuaacggggcauaugggguaaaaggguuuucauuuaaauacggcaaugguguuuggaucgggagaaccaaaagcacuaauuccaggagcggcuuugaaaugauuugggacccaaauggguggacuggaacggacaguagcuuuucagugaagcaagauaucguagcaauaacugauuggucaggauauagcgggaguuuuguccagcauccagaacugacaggauuagauugcauaagaccuuguuuuuggguugaguuaaucagagggcggccuaaagagagcacaauuuggaccaguggaagcagcauaucuuuuugugguguaaauggugacacuguuaguuggucuuggccagacggugcugaguugccauucaccauugacaaguag

SEQ ID NO: 50674 - RNA, 1350 nt, Artificial Sequence
  derived and/or modified CDS sequence (wt) from neuraminidase__InfluenzaA__ADG21409
augaauccaaaucagaagauaauaaccaucggaucaaucuguaugguaauugggauaguuagcuuaauguuacaaauugggaacaugaucucaauaugggucagucauucaauucagacagggaaucaaugccaagaugaaccaaucagcaacacuaaauuucuuacugagaaagcuguggcuucaguaacauuagcgggcaauucaucucuuugucccauuagcggaugggcuguguacaguaaggauaacagcauaaggaucgguuccaggggggauguguuuguuauaagagagccauucaucucaugcucccacuuggaaugcagaacuuucuuuuuaacccagggagccuuacugaaugacaagcacuccaauggaacugucaaagacagaagcccucacagaacauuaaugaguuguccugugggugaggcucccuccccauauaacucaagguuugagucuguugcuuggucagcaagugcuugccaugauggcaccaguugguugacaauuggaauuucugguccagacaauggggcuguggcuguauugaaauacaauggcauaauaacagacaccaucaagaguuggaggaacaacauaaugagaacucaagagucugaaugugcauguguaaauggcucuugcuuuacuguaaugacugauggaccaaguagugggcaggcaucauauaagaucuucaaaauggaaaagggaaaagugguuaaaucagucgaauuggaugcuccuaauuaucacuaugaggagugcuccuguuauccugaugccggcgaaaucacaugugugugcagggauaauuggcauggaucaaauaggccauggguaucuuucaaucaaaauuuggaguaucaaauaggauauauaugcaguggaguuuucggagacaauccacgccccaaugauggaacagguaguugugguccgguguucccuaacggggcauaugggguaaaaggguuuucauuuaaauacggcaaugguguuuggaucgggagaaccaaaagcacuaauuccaggagcggcuuugaaaugauuugggacccaaauggguggacuggaacggacaguagcuuuucagugaagcaagauaucguagcaauaacugauuggucaggauauagcgggaguuuuguccagcauccagaacugacaggauuagauugcauaagaccuuguuucuggguugaguuaaucagagggcggccuaaagagagcacaauuuggaccaguggaagcagcauaucuuuuugugguguaaauggugacacuguuaguuggucuuggccagacggugcugaguugccauucaccauugacaaguaa

SEQ ID NO: 50675 - RNA, 1350 nt, Artificial Sequence
  derived and/or modified CDS sequence (wt) from neuraminidase__InfluenzaA__ADG21415
augaauccaaaucagaagauaauaaccaucggaucaaucuguaugguaauugggauaguuagcuuaauguuacaaauugggaacaugaucucaauaugggucagucauucaauucagacagggaaucaaugccaagaugaaccaaucagcaacacuaaauuucuuacugagaaagcuguggcuucaguaacauuagcgggcaauucaucucuuugucccauuagcggaugggcuguguacaguaaggauaacagcauaaggaucgguuccaggggggauguguuuguuauaagagagccauucaucucaugcucccacuuggaaugcagaacuuucuuuuuaacccagggagccuuacugaaugacaagcacuccaauggaacugucaaagacagaagcccucacagaacauuaaugaguuguccugugggugaggcucccuccccauauaacucaagguuugagucuguugcuuggucagcaagugcuugccaugauggcaccaguugguugacaauuggaauuucugguccagacaauggggcuguggcuguauugaaauacaauggcauaauaacagacaccaucaagaguuggaggaacaacauaaugagaacucaagagucugaaugugcauguguaaauggcucuugcuuuacuguaaugacugauggaccaaguagugggcaggcaucauauaagaucuucaaaauggaaaagggaaaagugguuaaaucagucgaauuggaugcuccuaauuaucacuaugaggagugcuccuguuauccugaugccggcgaaaucacaugugugugcagggauaauuggcauggaucaaauaggccauggguaucuuucaaucaaaauuuggaguaucaaauaggauauauaugcaguggaguuuucggagacaauccacgccccaaugauggaacagguaguugugguccgguguucccuaacggggcauauggggugaaaggguuuucauuuaaauacggcaaugguguuuggaucgggaggaccaaaaguacuaauuccaggagcggcuuugaaaugauuugggacccaaauggguggacuggaacggacaguagcuuuucagugaagcaagauaucguagcaauaacugauuggucaggauauagcgggaguuuuguccagcauccagaacugacaggauuagauugcauaagaccuuguuucuggguugaguuaaucagagggcggccuaaagagagcacaauuuggaccaguggaagcagcauaucuuuuugugguguaaauggugacacuguuaguuggucuuggccagacggugcugaguugccauucaccauugacaaguaa

SEQ ID NO: 50676 - RNA, 1350 nt, Artificial Sequence
  derived and/or modified CDS sequence (wt) from neuraminidase__InfluenzaA__ADG21417
augaauccaaaucagaagauaauaaccaucggaucaaucuguaugguaauugggauaguuagcuuaauguuacaaauugggaacaugaucucaauaugggucagucauucaauucagacagggaaucaaugccaagaugaaccaaucagcaacacuaaauuucuuacugagaaagcuguggcuucaguaacauuagcgggcaauucaucucuuugucccauuagcggaugggcuguguacaguaaggauaacagcauaaggaucgguuccaggggggauguguuuguuauaagagagccauucaucucaugcucccacuuggaaugcagaacuuucuuuuuaacccagggagccuuacugaaugacaagcacuccaauggaacugucaaagacagaagcccucacagaacauuaaugaguuguccugugggugaggcucccuccccauauaacucaagguuugagucuguugcuuggucagcaagugcuugccaugauggcaccaguugguugacaauuggaauuucugguccagacaauggggcuguggcuguauugaaauacaauggcauaauaacagacaccaucaagaguuggaggaacaacauaaugagaacucaagagucugaaugugcauguguaaauggcucuugcuuuacuguaaugacugauggaccaaguagugggcaggcaucauauaagaucuucaaaauggaaaagggaaaagugguuaaaucagucgaauuggaugcuccuaauuaucacuaugaggagugcuccuguuauccugaugccggggaaaucacaugugugugcagggauaauuggcauggaucaaauaggccauggguaucuuucaaucaaaauuuagaauaucaaauaggauauauaugcaguggaguuuucggagacaauccacgccccaaugauggaacagguaguugugguccgguguucccuaacggggcauaugggguaaaaggguuuucauuuaaauacggcaaugguguuuggaucgggagaaccaaaagcacuaauuccaggagcggcuuugaaaugauuugggacccaaauggguggacuggaacggacaguagcuuuucagugaagcaagauaucguagcaauaacugauuggucaggauauagcgggaguuuuguccagcauccagaacugacaggauuagauugcauaagaccuuguuucuggguugaguuaaucagagggcggccuaaagagagcacaauuuggaccaguggaagcagcauaucuuuuugugguguaaauggugacacuguuaguuggucuuggccagacggugcugaguugccauucaccauugacaaguaa

SEQ ID NO: 50677 - RNA, 1350 nt, Artificial Sequence
  derived and/or modified CDS sequence (wt) from neuraminidase__InfluenzaA__ADG21419
augaauccaaaucagaagauaauaaccaucggaucaaucuguaugguaauugggauaguuagcuuaauguuacaaauugggaacaugaucucaauaugggucagucauucaauucagacagggaaucaaugccaagaugaaucaaucagcaacacuaaauuucuuacugagaaagcuguggcuucaguaacauuagcgggcaauucaucucuuugucccauuagcggaugggcuguguacaguaaggauaacagcauaaggaucgguuccaggggggauguguuuguuauaagagagccauucaucucaugcucccacuuggaaugcagaacuuucuuuuuaacccagggagccuuacugaaugacaagcacuccaauggaacugucaaagacagaagcccucacagaacauuaaugaguuguccugugggugaggcucccuccccauauaacucaagguuugagucuguugcuuggucagcaagugcuugccaugauggcaccaguugguugacaauuggaauuucugguccagacaauggggcuguggcuguauugaaauacaauggcauaauaacagacaccaucaagaguuggaggaacaacauaaugagaacucaagagucugaaugugcauguguaaauggcucuugcuuuacuguaaugacugauggaccaaguagugggcaggcaucauauaagaucuucaaaauggaaaagggaaaagugguuaaaucagucgaauuggaugcuccuaauuaucacuaugaggagugcuccuguuauccugaugccggcgaaaucacaugugugugcagggauaauuggcauggaucaaauaggccauggguaucuuucaaucaaaauuuggaguaucaaauaggauauauaugcaguggaguuuucggagacaauccacgccccaaugauggaacagguaguugugguccgguguucccuaacggggcauaugggguaaaaggguuuucauuuaaauacggcaaugguguuuggaucgggagaaccaaaagcacuaauuccaggagcggcuuugaaaugauuugggacccaaauggguggacuggaacggacaguagcuuuucagugaagcaagauaucguagcaauaacugauuggucaggauauagcgggaguuuuguccagcauccagaacugacaggauuagauugcauaagaccuuguuucuggguugaguuaaucagagggcggccuaaagagagcacaauuuggaccaguggaagcagcauaucuuuuugugggguaaauggugacacuguuaguuggucuuggccagacggugcugaguugccauucaccauugacaaguaa

SEQ ID NO: 50678 - RNA, 1350 nt, Artificial Sequence
  derived and/or modified CDS sequence (wt) from neuraminidase__InfluenzaA__ADG21423
augaauccaaaucagaagauaauaaccaucggaucaaucuguaugguaauugggauaguuagcuuaauguuacaaauugggaacaugaucucaauaugggucagucauucaauucagacagggaaucaaugccaagaugaaccaaucagcaacacuaaauuucuuacugagaaagcuguggcuucaguaacauuagcgggcaauucaucucuuugucccauuagcggaugggcuguguacaguaaggacaacagcauaaggaucgguuccaggggggauguguuuguuauaagagagccguucaucucaugcucccacuuggaaugcagaacuuucuuuuuaacccaaggagccuuacugaaugacaagcacuccaaugggacugucaaagacagaagcccucacagaacauuaaugaguuguccugugggugaggcucccuccccauauaacucaagguuugagucuguugcuuggucagcaagugcuugccaugauggcaccaguugguugacaauuggaauuucugguccagacaauggggcuguggcuguauugaaauacaauggcauaauaacagacacuaucaagaguuggaggaacaacauaaugagaacucaagagucugaaugugcauguguaaauggcucuugcuuuacuguaaugacugauggaccaaguagugggcaggcaucauauaagaucuucaaaauggaaaagggaaaagugguuaaaucagucgaauuggaugcuccuaauuaucacuaugaggagugcuccuguuauccugaugccggcgagaucacaugugugugcagggauaguuggcauggaucaaauaggccauggguaucuuucaaucaaaauuuggaguaucaaauaggauauauaugcaguggaguuuucggagacaauccacgccccaaugauggaacagguaguugugguccgguguucccuaacggggcauaugggguaaaaggguuuucauuuaaauacggcaaugguguuuggaucgggagaaccaaaagcacuaauuccaggagcggcuuugaaaugauuugggacccaaauggguggacuggaacggacaguagcuuuucaguaaagcaagauaucguagcaauaacugauuggucaggauauagcggaaguuuuguccagcauccagaacugacaggauuagauugcauaagaccuuguuucuggguugaguuaaucagaggacggccuaaagagagcacaauuuggaccaguggaagcagcauauccuuuugugguguaaauggugacacuguuaguuggucuuggccagacggugcugaguugccauucaccauugacaaguag

SEQ ID NO: 50679 - RNA, 1350 nt, Artificial Sequence
  derived and/or modified CDS sequence (wt) from neuraminidase__InfluenzaA__ADG21424
augaauccaaaucagaagauaauaaccaucggaucaaucuguaugguaauugggauagcuagcuuaauguuacaaauuggaaacaugaucucaauaugggucagucauucaauucagacagggaaucaaugccaagaugaaucaaucagcaacacuaaauuucuuacugagaaagcuguggcuucaguaacauuagcgggcaauucaucucuuugucccauuagcggaugggcuguguacaguaaggauaacagcauaaggaucgguuccaagggggauguguuuguuauaagagagccauucaucucaugcucccacuuggaaugcagaacuuucuuuuuaacccagggagccuuacugaaugacaagcacuccaauggaacugucaaagacagaagcccucacagaacauuaaugaguuguccugugggugaggcucccuccccauauaacucaagguuugagucuguugcuuggucagcaagugcuugccaugauggcaccaguugguugacaauuggaauuucugguccagacaauggggcuguggcuguauugaaauacaauggcauaauaacagacaccaucaagaguuggaggaacaacauaaugagaacucaagagucugaaugugcauguguaaauggcucuugcuuuacuguaaugacugauggaccaaguagugggcaggcaucauauaagaucuucaaaauggaaaagggaaaagugguuaaaucagucgaauuggaugcuccuaauuaucacuaugaggagugcuccuguuauccugaugccggcgaaaucacaugugugugcagggauaauuggcauggaucaaauaggccauggguaucuuucaaucaaaauuuggaguaucaaauaggauauauaugcaguggaguuuucggagacaauccacgccccaaugauggaacagguaguugugguccgguguucccuaacggggcauaugggguaaaaggguuuucauuuaaauacggcaaugguguuuggaucgggagaaccaaaagcacuaauuccaggagcggcuuugaaaugauuugggacccaaauggguggacuggaacggacaguagcuuuucagugaagcaagauaucguagcaauaacugauuggucaggauauagcgggaguuuuguccagcauccagaacugacaggauuagauugcauaagaccuuguuucuggguugaguuaaucagagggcggccuaaagagagcacaauuuggaccaguggaagcagcauaucuuuuugugggguaaauggugacacuguuaguuggucuuggccagacggugcugaguugccauucaccauugacaaguaa

SEQ ID NO: 50680 - RNA, 1350 nt, Artificial Sequence
  derived and/or modified CDS sequence (wt) from neuraminidase__InfluenzaA__ADG21426
augaauccaaaucagaagauaauaaccaucggaucaaucuguaugguaauugggauaguuagcuuaauguuacaaauugggaacaugaucucaauaugggucagucauucaauucagacagagaaucaaugccaagaugaaccaaucagcaacacuaaauuucuuacugagaaagcuguggcuucaguaacauuagcgggcaauucaucucuuugucccauuagcggaugggcuguguacaguaaggacaacagcauaaggaucgguuccaggggggacguguuuguuauaagagagccauucaucucaugcucccacuuggaaugcagaacuuucuuuuuaacccagggagccuuacugaaugacaagcacuccaaugggacugucaaggacagaagcccucacagaacauuaaugaguuguccugugggugaggcucccuccccauauaacucaagguuugagucuguugcuuggucagcaagugcuugccaugauggcaccaguugguugacaauuggaauuucugguccagacaauggggcuguggcuguauugaaauacaauggcauaauaacagacaccaucaagaguuggaggaacaacauaaugagaacucaagagucugaaugugcauguguaaauggcucuugcuuuacuguaaugacugauggaccaaguagugggcaggcaucauauaagaucuucaaaauggaaaagggaaaagugguuaaaucagucgaauuggaugcuccuaauuaucacuaugaggagugcuccuguuauccugaugccggcgaaaucacaugugugugcagggauaauuggcauggaucaaauaggccauggguaucuuucaaucaaaauuuggaguaucaaauaggauauauaugcaguggaguuuucggagacaauccacgccccaaugauggaacagguaguugugguccgguguucccuaacggggcauaugggguaaaaggguuuucauuuaaauacggcaaugguguuuggaucgggagaaccaaaagcacuaauuccaggagcggcuuugaaaugauuugggacccaaauggguggacuggaacggacaguagcuuuucagugaggcaagauaucguagcaauaacugauuggucaggauauagcgggaguuuuguccagcauccagaacugacaggauuagauugcauaagaccuuguuucuggguugaguuaaucagagggcggccuaaagagagcacaauuuggaccaguggaagcagcauaucuuuuugugguguaaauggugacacuguuaguuggucuuggccagacggugcugaguugccauucaccauugacaaguag

SEQ ID NO: 50681 - RNA, 1350 nt, Artificial Sequence
  derived and/or modified CDS sequence (wt) from neuraminidase__InfluenzaA__ADG21428
augaauccaaaucagaagauaauaaccaucgggucaaucuguaugguaauugggauaguuagcuuaauguuacaaauugggaacaugaucucaauaugggucagucauccaauucagacagggaaucaaugccaagauaaaccaaucagcaacacuaaauuucuuacugagaaagcuguggcuucaguaacauuagcgggcaauucaucucuuugucccauuagcggaugggcuguguacaguaaggacaacagcauaaggaucgguuccaggggggauguguuuguuauaagagagccguucaucucaugcucccacuuggaaugcagaacuuucuuuuuaacccagggagccuuacugaaugacaagcacuccaaugggacugucaaagacagaagcccucacagaacauuaaugaguuguccugugggugaggcucccuccccauauaacucaagguuugagucuguugcuuggucagcaagugcuugccaugauggcaccaguugguugacaauuggaauuucugguccagacaauggggcuguggcuguauugaaauacaauggcauaaucacagacaccaucaagaguuggaggaacagcauaaugagaacucaagagucugaaugugcauguguaaauggcucuugcuuuacuguaaugacugauggaccaaguagugggcaggcaucauauaagaucuucaaaauggaaaagggaaaagugguuaaaucagucgaauuggaugcuccuaauuaucacuaugaggagugcuccuguuauccugaugccggcgaaaucacaugugugugcagggauaauuggcauggaucaaauaggccauggguaucuuucaaucaaaauuuggaguaucaaauaggauauauaugcaguggaguuuucggagacaauccacgccccaaugauggaacagguaguugugguccaguguucccuaacggggcauacgggguaaaaggguuuucauuuaaauacggcaaugguguuuggaucgggagaaccaaaagcacuaauuccaggagcggcuuugaaaugauuugggacccaaauggguggacuggaacggacaguagcuuuucagugaagcaagauaucguagcaauaacugauuggucaggauauagcgggaguuuuguccagcauccagaacugacaggauuagauugcauaagaccuuguuucuggguugaguuaaucagagggcggccuaaagagagcacaauuuggaccaguggaagcagcauaucuuuuugugguguaaauggugacacuguuaguuggucuuggccagacggugcugaguugccauucaccauugacaaguaa

SEQ ID NO: 50682 - RNA, 1350 nt, Artificial Sequence
  derived and/or modified CDS sequence (wt) from neuraminidase__InfluenzaA__ADG21430
augaauccaaaucagaagauaauaaccaucggaucaaucuguaugguaauugggauaguuagcuuaauguuacaaauugggaacaugaucucaauaugggucagucauucaauucagacagggaaucaaugccaagaugaaccaaucagcaacacuaaauuucuuacugagaaagcuguggcuucaguaacauuagcgggcaauucaucucuuugucccauuagcggaugggcuguguacaguaaggauaacagcauaaggaucgguuccaggggggauguguuuguuauaagagagccauucaucucaugcucccacuuggaaugcagaacuuucuuuuuaacccagggagccuuacugaaugacaagcacuccaauggaacugucaaagacagaagcccucacagaacuuuaaugaguuguccugugggugaggcucccuccccauauaacucaagguuugagucuguugcuuggucagcaagugcuugccaugauggcaccaguugguugacaauuggaauuucugguccagacaauggggcuguggcuguauugaaauacaauggcauaauaacagacaccaucaagaguuggaggaacaacauaaugaggacucaagagucugaaugugcauguguaaauggcucuugcuuuacuguaaugacugauggaccaaguagugggcaggcaucauauaagaucuucaaaauggaaaagggaaaagugguuaaaucagucgaauuggaugcuccuaauuaucacuaugaggagugcuccuguuauccugaugccggggaaaucacaugugugugcagggauaauuggcauggaucaaauaggccauggguaucuuucaaucaaaauuuggaguaucaaauaggauauauaugcaguggaguuuucggagacaauccacgccccaaugauggaacagguaguugugguccgguguucccuaacggggcauaugggguaaaaggguuuucauuuaaauacggcaaugguguuuggaucgggagaaccaaaagcacuaauuccaggagcggcuuugaaaugauuugggacccaaauggguggacuggaacggacaguagcuuuucagugaagcaagauaucguagcaauaacugauuggucaggauauagcgggaguuuuguccagcauccagaacugacaggauuagauugcauaagaccuuguuucuggguugaguuaaucagagggcggccuaaagagagcacaauuuggaccaguggaagcagcauaucuuuuugugguguaaauggugacacuguuaguuggucuuggccagacggugcugaguugccauucaccauugacaaguaa

SEQ ID NO: 50683 - RNA, 1350 nt, Artificial Sequence
  derived and/or modified CDS sequence (wt) from neuraminidase__InfluenzaA__ADG21432
augaauccaaaucagaagauaauaaccaucggaucaaucuguaugguaauugggauaguuagcuuaauguuacaaauugggaacaugaucucaauaugggucagucauucaauucagacagggaaucaaugccaagaugaaccaaucagcaacacuaaauuucuuacugagaaagcuguggcuucaguaacauuagcgggcaauucaucucuuugucccauuagcggaugggcuguguacaguaaggacaacagcauaaggaucgguuccagaggggauguguuuguuauaagagagccguucaucucaugcucccacuuggaaugcagaacuuucuuuuuaacccagggagccuuacugaaugacaagcacuccaaugggacugucaaagacagaagcccucacagaacauuaaugaguuguccugugggugaggcucccuccccauauaacucaagguuugagucuguugcuuggucagcaagcgcuugccaugauggcaccaguuggcugacaauuggaauuucugguccagacaauggggcuguggcuguauugaaauacaauggcauaauaacagacaccaucaagaguuggaggaacaacauaaugagaacccaagagucugaaugugcauguguaaauggcucuugcuuuacuguaaugacugauggaccaaguagugggcaggcaucauauaagaucuucaaaauggaaaagggaaaagugguuaaaucagucgaauuggaugcuccuaauuaucacuaugaggagugcuccuguuauccugaugccggugaaaucacgugugugugcagggauaauuggcauggaucaaauaggccauggguaucuuucaaucaaaauuuggaguaucaaauaggauauauaugcaguggaguuuucggagacaauccacgccccaaugauggaacagguaguugugguccgguguuccccaacggggcauaugggguaaaaggauuuucauuuagauacggcaaugguguuuggaucgggagaaccaaaagcacuaauuccaggagcggcuuugaaaugauuugggacccaaauggguggacuggaacggacaguagcuuuucagugaagcaagauaucguagcaauaacugauuggucaggauauagcgggaguuuuguccagcauccagaacugacaggauuagauugcauaagaccuuguuuuuggguugaguuaaucagagggcggccuaaagagagcacaauuuggaccaguggaagcagcauaucuuuuugugguguaaauggugacacuguuaguuggucuuggccagacggugcugaguugccauucaccauugacaaguag

SEQ ID NO: 50684 - RNA, 1350 nt, Artificial Sequence
  derived and/or modified CDS sequence (wt) from neuraminidase__InfluenzaA__ADG21438
augaauccaaaucagaagauaauaaccaucggaucaaucuguaugguaauugggauaguuagcuuaauguuacaaauugggaacaugaucucaauauggaucagucauucaauucagacagggaaucaaugccaagaugaaccaaucagcaacacuaaauuucuuacugagaaagcuguggcuucaguaacauuagcgggcaauucaucucuuugucccauuagcggaugggcuguguacaguaaggauaacagcauaaggaucgguuccaggggggauguguuuguuauaagagagccauucaucucaugcucccacuuggaaugcagaacuuucuuuuuaacccagggagccuuacugaaugacaagcacuccaauggaacugucaaagacagaagcccucacagaacauuaaugaguuguccugugggugaggcucccuccccauauaacucaagguuugagucuguugcuuggucagcaagugcuugccaugauggcaccaguugguugacaauuggaauuucugguccagacaauggggccguggcuguauugaaauacaauggcauaauaacagacaccaucaagaguuggaggaacaacauaaugagaacucaagagucugaaugcgcauguguaaauggcucuugcuuuacuguaaugacugauggaccaaguagugggcaggcaucauauaagaucuucaaaauggaaaagggaaaagugguuaaaucagucgaauuggaugcuccuaauuaucacuaugaggagugcuccuguuauccugaugccggggaaaucacaugugugugcagggauaauuggcauggaucaaauaggccauggguaucuuucaaucaaaauuuggaguaucaaauaggauauauaugcaguggaguuuucggagacaauccacgccccaaugauggaacagguaguugugguccgguguucccuaacggggcauaugggguaaaaggguuuucauuuaaauacggcagugguguuuggaucgggagaaccaaaagcacuaauuccaggagcggcuuugaaaugauuugggacccaaauggguggacuggaacggacaguagcuuuucagugaagcaagauaucguagcaauaacugauuggucaggauauagcgggaguuuuguccagcauccagaacugacaggauuagauugcauaagaccuuguuucuggguugaguuaaucagagggcggccuaaagagagcacaauuuggaccaguggaagcagcauaucuuuuugugguguaaauggugacacuguuaguuggucuuggccagacggugcugaguugccauucaccauugacaaguaa

SEQ ID NO: 50685 - RNA, 1350 nt, Artificial Sequence
  derived and/or modified CDS sequence (wt) from neuraminidase__InfluenzaA__ADG21440
augaauccaaaucagaagauaauaaccaucggaucaaucuguaugguaauugggauagcuagcuuaauguuacaaauugggaacaugaucucaauaugggucagucauucaauucagacagggaaucaaugccaagaugaaucaaucagcaacacuaaauuucuuacugagaaagcuguggcuucaguaacauuagcgggcaauucaucucuuugucccauuagcggaugggcuguguacaguaaggauaacagcauaaggaucgguuccaggggggauguguuuguuauaagagagccauucaucucaugcucccacuuggaaugcagaacuuucuuuuuaacccagggagccuuacugaaugacaagcacuccaauggaacugucaaagacagaagcccucacagaacauuaaugaguuguccugugggugaggcucccuccccguauaacucaagguuugagucuguugcuuggucagcaagugcuugccaugauggcaccaguugguugacaauuggaauuucugguccagacaauggggcuguggcuguauugaaauacaauggcauaauaacagacaccaucaagaguuggaggaacaacauaaugagaacucaagagucugaaugugcauguguaaauggcucuugcuuuacuguaaugacugauggaccaaguagugggcaggcaucauauaagaucuucaaaauggaaaagggaaaagugguuaaaucagucgaauuggaugcuccuaauuaucacuaugaggagugcuccuguuauccugaugccggcgaaaucacaugugugugcagggauaauuggcauggaucaaauaggccauggguaucuuucaaucaaaauuuggaguaucaaauaggauauauaugcaguggaguuuucggagacaauccacgccccaaugauggaacagguaguugugguccgguguucccuaacggggcauaugggguaaaaggguuuucauuuaaauacggcaaugguguuuggaucgggagaaccaaaagcacuaauuccaggagcggcuuugaaaugauuugggacccaaauggguggacuggaacggacaguagcuuuucagugaagcaagauaucguagcaauaacugauuggucaggauauagcgggaguuuuguccagcauccagaacugacaggauuagauugcauaagaccuuguuucuggguugaguuaaucagagggcggccuaaagagagcacaauuuggaccaguggaagcagcauaucuuuuugugggguaaauggugacacuguuaguuggucuuggccagacggugcugaguugccauucacuauugacaaguaa

SEQ ID NO: 50686 - RNA, 1350 nt, Artificial Sequence
  derived and/or modified CDS sequence (wt) from neuraminidase__InfluenzaA__ADG21442
augaauccaaaucagaagauaauaaccaucggaucaaucuguaugguaauugggauaguuagcuuaauguuacaaauugggaauaugaucucaauaugggucagucauucaauucagacagggaaucaaugccaagaugaaccaaucagcaacacuaaauuucuuacugagaaagcuguggcuucgguaacauuagcgggcaauucaucucuuugucccauuagcggaugggcuguguacaguaaggauaacagcauaaggaucgguuccaggggggauguguuugugauaagagagccauucaucucaugcucccacuuggaaugcagaacuuucuucuuaacccagggagccuuacugaaugacaagcacuccaauggaacugucaaagacagaagcccucacagaacauuaaugaguuguccugugggugaggcucccuccccauauaacucaagguuugagucuguugcuuggucagcaagugcuugccaugauggcaccaguugguugacaauuggaauuucugguccagacaauggggcuguggcuguauugaaauacaauggcauaauaacagacaccaucaagaguuggaggaacaacauaaugagaacucaagagucugaaugugcauguguaaauggcucuugcuuuacuguaaugacugauggaccaaguagugggcaggcaucauauaagaucuucaaaauggaaaagggaaaagugguuaaaucagucgaauuggaugcuccuaauuaucacuaugaggagugcuccuguuauccugaugccggcgaaaucaccugugugugcagggauaauuggcauggaucaaauaggccauggguaucuuucaaucaaaauuuggaguaucaaauaggauauauaugcaguggaguuuucggagacaauccacgccccaaugauggaacagguaguugugguccgguguucccuaacggggcauaugggguaaaaggguuuucauuuaaauacggcaaugguguuuggaucgggagaaccaaaagcacuaauuccaggagcggcuuugaaaugauuugggacccaaauggguggacuggaacggacaguagcuuuucagugaagcaagauaucguagcaauaacugauuggucaggauauagcgggaguuuuguccagcauccagaacugacaggauuagauugcauaagaccuuguuucuggguugaguuaaucagagggcggccuaaagagagcacaauuuggaccaguggaagcagcauaucuuuuugugguguaaauggugacacuguuaguuggucuuggccagacggugcugaguugccauucaccauugacaaguaa

SEQ ID NO: 50687 - RNA, 1350 nt, Artificial Sequence
  derived and/or modified CDS sequence (wt) from neuraminidase__InfluenzaA__ADG21444
augaauccaaaucagaagauaauaaccaucggaucaaucuguaugguaauugggauaguuagcuuaauguuacaaauugggaacaugaucucaauaugggucagucauucaauucagacagggaaucaaugccaagaugaaucaaucagcaacacuaaauuucuuacugagaaagcugugacuucaguaacauuagcgggcaauucaucucuuugucccauuagcggaugggcuguguacaguaaggauaacagcauaaggaucgguuccaggggggauguguuuguuauaagagagccauucaucucaugcucccacuuggaaugcagaacuuucuuuuuaacccagggagccuuacugaaugacaagcacuccaauggaacugucaaagacagaagcccucacagaacauuaaugaguuguccugugggugaggcucccucuccauauaacucaagguuugagucuguugcuuggucagcaagugcuugccaugauggcaccaguugguugacaauuggaauuucugguccagacaauggggcuguggcuguauugaaauacaauggcauaauaacagacaccaucaagaguuggaggaacaacauaaugagaacucaagagucugaaugugcauguguaaauggcucuugcuuuacuguaaugacugauggaccaaguagugggcaggcaucauauaagaucuucaaaauggaaaagggaaaagugguuaaaucagucgaauuggaugcuccuaauuaucacuaugaggagugcuccuguuauccugaugccggcgaaaucacaugugugugcagggauaauuggcauggaucaaauaggccauggauaucuuucaaucaaaauuuggaguaucaaauaggauauauaugcaguggaguuuucggagacaauccacgccccaaugauggaacagguaguugugguccgguguucccuaacggggcauaugggguaaaaggguuuucauuuaaauacggcaaugguguuuggaucgggagaaccaaaagcacuaauuccaggagcggcuuugaaaugauuugggacccaaauggguggacuggaacggacaguagcuuuucagugaagcaagauaucguagcaauaacugauuggucaggauauagcgggaguuuuguccagcauccagagcugacaggauuagauugcauaagaccuuguuucuggguugaguuaaucagagggcggccuaaagagagcacaauuuggaccaguggaagcagcauaucuuuuugugggguaaauggugacacuguuaguuggucuuggccagacggugcugaguugccauucaccauugacaaguaa

SEQ ID NO: 50688 - RNA, 1350 nt, Artificial Sequence
  derived and/or modified CDS sequence (wt) from neuraminidase__InfluenzaA__ADG21446
augaauccaaaucagaagauaauaaccaucggaucaaucuguaugguaauugggauaguuagcuuaauguuacaaauugggaauaugaucucaauaugggucagucauucaauucagacagggaaucaaugccaagaugaaccaaucagcaacacuaaauuucuuacugagaaagcuguggcuucgguaacauuagcgggcaauucaucucuuugucccauuagcggaugggcuguguacaguaaggauaacagcauaaggaucgguuccaggggggauguguuuguuauaagagagccauucaucucaugcucccacuuggaaugcagaacuuucuucuuaacccagggagccuuacugaaugacaagcacuccaauggaacugucaaagacagaagcccucacagaacauuaaugaguuguccugugggugaggcucccuccccauauaacucaagguuugagucuguugcuuggucagcaagugcuugccaugauggcaccaguugguugacaauuggaauuucugguccagacaauggggcuguggcuguauugaaauacaauggcauaauaacagacaccaucaagaguuggaggaacaacauaaugagaacucaagagucugaaugugcauguguaaauggcucuugcuuuacuguaaugacugauggaccaaguagugggcaggcaucauauaagaucuucaaaauggaaaagggaaaagugguuaaaucagucgaauuggaugcuccuaauuaucacuaugaggagugcuccuguuauccugaugccggcgaaaucaccugugugugcagggauaauuggcauggaucaaauaggccauggguaucuuucaaucaaaauuuggaguaucaaauaggauauauaugcaguggaguuuucggagacaauccacgccccaaugauggaacagguaguugugguccgguguucccuaacggggcauaugggguaaaaggguuuucauuuaaauacggcaaugguguuuggaucgggagaaccaaaagcacuaauuccaggagcggcuuugaaaugauuugggacccaaauggguggacuggaacggacaguagcuuuucaguaaagcaagauaucguagcaauaacugauuggucaggauauagcgggaguuuuguccagcauccagaacugacaggauuagauugcauaagaccuuguuucuggguugaguuaaucagagggcggccuaaagagagcacaauuuggaccaguggaagcagcauaucuuuuugugguguaaauggugacacuguuaguuggucuuggccagacggugcugaguugccauucaccauugacaaguaa

SEQ ID NO: 50689 - RNA, 1350 nt, Artificial Sequence
  derived and/or modified CDS sequence (wt) from neuraminidase__InfluenzaA__ADG21448
augaauccaaaucagaagauaauaaccaucggaucaaucuguaugguaauugggauaguuagcuuaauguuacaaauugggaauaugaucucaauaugggucagucauucaauucagacagggaaucaaugccaagaugaaccaaucagcaacacuaaauuucuuacugagaaagcuguggcuucaguaacauuagcgggcaauucaucucuuugucccauuagcggaugggcuguguacaguaaggacaacagcauaaggaucgguuccaggggggauguguuuguuauaagagagccguucaucucaugcucccauuuggaaugcagaacuuucuuuuuaacccagggagccuuacugaaugacaagcacuccaaugggacugucaaagacagaagcccucacagaacauuaaugaguuguccugugggugaggcucccuccccauauaacucaagguuugagucuguugcuuggucagcaagugcuugccaugauggcaccaguugguugacaauuggaauuucugguccagacaauggggcuguggcuguauugaaauacaauggcauaauaacagacaccaucaagaguuggaggaacaacauaaugagaacucaagagucugaaugugcauguguaaauggcucuugcuuuacuguaaugacugauggaccaaguagugggcaggcaucauauaagaucuucaaaauggaaaagggaaaagugguuaaaucagucgaauuggaugcuccuaauuaucacuaugaggagugcuccuguuauccugaugccggcgaaaucacaugugugugcagggauaauuggcauggaucaaauaggccauggauaucuuucaaucaaaauuuggaguaucaaauaggauauauaugcaguggaguuuucggagacaauccacgccccaaugauggaacagguaguugugguccgguguucccuaacggggcauaugggguaaaaggguuuucauuuaaauacggcaaugguguuuggaucgggagaaccaaaagcacuaauuccaggagcggcuuugaaaugauuugggacccaaauggguggacuggaacggacaguagcuuuucagugaagcaagauaucguagcaauaacugauuggucaggauauagcgggaguuuuguccagcauccagaacugacaggauuagauuguauaagaccuuguuucuggguugaguuaaucagagggcggccuaaagagagcacaauuuggaccaguggaagcagcauaucuuuuugugguguaaauggugacacuguuaguuggucuuggccagacggugcugaguugccauucaccauugacaaguag

SEQ ID NO: 50690 - RNA, 1350 nt, Artificial Sequence
  derived and/or modified CDS sequence (wt) from neuraminidase__InfluenzaA__ADG21450
augaauccaaaucagaagauaauaaccaucggaucaaucuguaugguaauugggauaguuagcuuaauguuacaaauugggaacaugaucucaauaugggucagucauucaauucagacagggaaucaaugccaagaugaaccaaucagcaacacuaaauuucuuacugagaaagcuguggcuucaguaacauuagcgggcaauucaucucuuugucccauuagcggaugggcuguguacaguaaggacaacagcauaaggaucgguuccaggggggauguguuuguuauaagagagccguucaucucaugcucccauuuggaaugcagaacuuucuuuuuaacccagggagccuuacugaaugacaagcacuccaaugggacugucaaagacagaagcccucacagaacauuaaugaguuguccugugggugaggcuccuuccccauauaacucaagguuugagucuguugcuuggucagcaagugcuugccaugauggcaccaguugguugacaauuggaauuucuggucccgacaauggggcuguggcuguauugaaauacaauggcauaauaacagacaccaucaagaguuggaggaacaacauaaugagaacucaagagucugaaugugcauguguaaauggcucuugcuuuacuguaaugacugauggaccaaguagugggcaggcaucauauaagaucuucaaaauggaaaagggaaaagugguuaaaucagucgaauuggaugcuccuaauuaucacuaugaggagugcuccuguuauccugaugccggcgaaaucacaugugugugcagggauaauuggcauggaucaaauaggccauggauaucuuucaaucaaaauuuggaguaucaaauaggauauauaugcaguggaguuuucggagacaauccacgccccaaugauggaacagguaguugugguccgguguucccuaacggggcauaugggguaaaaggguuuucauuuaaauacggcaaugguguuuggaucgggagaaccaaaagcacuaauuccaggagcggcuuugaaaugauuugggacccaaauggguggacuggaacggacaguagcuuuucagugaagcaagauaucguagcaauaacugauuggucaggauauagcgggaguuuuguccagcauccagaacugacaggauuagauuguauaagaccuuguuucuggguugaguuaaucagagggcggccuaaagagagcacaauuuggaccaguggaagcaguauaucuuuuugugguguaaauggugacacuguuaguuggucuuggccagacggugcugaguugccauucaccauugacaaguag

SEQ ID NO: 50691 - RNA, 1410 nt, Artificial Sequence; identical to SEQ ID NO: 48750
  derived and/or modified CDS sequence (wt) from neuraminidase__InfluenzaA__ADG27797

SEQ ID NO: 50692 - RNA, 1410 nt, Artificial Sequence
  derived and/or modified CDS sequence (wt) from neuraminidase__InfluenzaA__ADG27983
augaauccaaaccaaaagauaauaaccauugguucggucuguaugacaauuggaauggcuaacuuaauauuacaaauuggaaacauaaucucaauauggauuagccacucaauucaacuugggaaucaaaaucagauugaaacaugcaaucaaagcgucauuacuuaugaaaacaacacuuggguaaaucagacauauguuaacaucagcaacaccaacuuugcugcuggacagucagugguuuccgugaaauuggcgggcaauuccucucucugcccuguuaguggaugggcuauauacaguaaagacaacaguauaagaaucgguuccaagggggauguguuugucauaagggaaccauucauaucaugcucccccuuggaaugcagaaccuucuucuugacucaaggggccuugcuaaaugacaaacauuccaauggaaccauuaaagacaggagcccauaucgaacccuaaugagcuguccuauuggugaaguucccucuccauacaacucaagauuugagucagucgcuuggucagcaagugcuugucaugauggcaucaauuggcuaacaauuggaauuucuggcccagacaauggggcaguggcuguguuaaaguacaacggcauaauaacagacacuaucaagaguuggagaaacaauauauugagaacacaagagucugaaugugcauguguaaaugguucuugcuuuacuguaaugaccgauggaccaagugauggacaggccucauacaagaucuucagaauagaaaagggaaagauagucaaaucagucgaaaugaaugccccuaaucaucacuaugaggaaugcuccuguuauccugauucuagugaaaucacaugugugugcagggauaacuggcauggcucgaaucgaccgugggugucuuucaaccagaaucuggaauaucagauaggauacauauguagugggauuuucggagacaauccacgcccuaaugauaagacaggcaguugugguccaguaucgucuaauggagcaaauggaguaaaaggauuuucauucaaauacggcaaugguguuuggauagggagaacuaaaagcauuaguucaagaaacgguuuugagaugauuugggauccgaacggauggacugggacagacaauaacuucucaauaaagcaagauaucguaggaauaaaugaguggucaggauauagcgggaguuuuguucagcauccagaacuaacagggcuggauuguauaagaccuugcuucuggguugaacuaaucagagggcgacccaaagagaacacaaucuggacuagcgggagcagcauauccuuuugugguguaaacagugacacuauggguuggucuuggccagacggugcugaguugccauuuaccauugacaaguaa

SEQ ID NO: 50693 - RNA, 1410 nt, Artificial Sequence; identical to SEQ ID NO: 49070
  derived and/or modified CDS sequence (wt) from neuraminidase__InfluenzaA__ADG27989

SEQ ID NO: 50694 - RNA, 1410 nt, Artificial Sequence; identical to SEQ ID NO: 50692
  derived and/or modified CDS sequence (wt) from neuraminidase__InfluenzaA__ADG27998

SEQ ID NO: 50695 - RNA, 1410 nt, Artificial Sequence; identical to SEQ ID NO: 50023
  derived and/or modified CDS sequence (wt) from neuraminidase__InfluenzaA__ADG28013

SEQ ID NO: 50696 - RNA, 1410 nt, Artificial Sequence
  derived and/or modified CDS sequence (wt) from neuraminidase__InfluenzaA__ADG42086
augaauccaaaccaaaagauaauaaccauugguucggucuguaugacaauuggaauggcuaacuuaauauuacaaauuggaaacauaaucucaauauggauuagccacucaauucaacuugggaaucaaaaucagauugaaacaugcaaucaaagcgucauuacuuaugaaaacaacacuuggguaaaucagacauauguuaacaucagcaacaccaacuuugcugcuggacagucagugguuuccgugaaauuagcgggcaauuccucucucugcccuguuaguggaugggcuauauacaguaaagacaacaguauaagaaucgguuccaagggggauguguuugucauaagggaaccauucauaucaugcucccccuuggaaugcagaaccuucuucuugacucaaggggccuugcuaaaugacaaacauuccaauggaaccauuaaagacaggagcccauaucgaacccuaaugagcuguccuauuggugaaguucccucuccauacaacucaagauuugagucagucgcuuggucagcaagugcuugucaugauggcaucaauuggcuaacaauuggaauuucuggcccagacaauggggcaguggcuguguuaaaguacaacggcauaauaacagacacuaucaagaguuggagaaacaauauauugagaacacaagagucugaaugugcauguguaaaugguucuugcuuuacuguaaugaccgauggaccaagugauggacaggccucauacaagaucuucagaauagaaaagggaaagauagucaaaucagucgaaaugaaugccccuaauuaucacuaugaggaaugcuccuguuauccugauucuagugaaaucacaugugugugcagggauaacuggcauggcucgaaucgaccgugggugucuuucaaccagaaucuggaauaucagauaggauacauaugcagugggauuuucggagacaauccacgcccuaaugauaagacaggcaguugugguccaguaucgucuaauggagcaaauggaguaaaaggauuuucauucaaauacggcaaugguguuuggauagggagaacuaaaagcauuaguucaagaaacgguuuugagaugauuugggauccgaacggauggacugggacagacaauaacuucucaauaaagcaagauaucguaggaauaaaugaguggucaggauauagcgggaguuuuguucaacauccagaacuaacagggcuggauuguauaagaccuugcuucuggguugaacuaaucagagggcgacccaaagagaacacaaucuggacuagcgggagcagcaucuccuuuugugguguaaacagugacacuguggguuggucuuggccagacggugcugaguugccauuuaccauugacaaguaa

SEQ ID NO: 50697 - RNA, 1410 nt, Artificial Sequence
  derived and/or modified CDS sequence (wt) from neuraminidase__InfluenzaA__ADG42096
augaauccaaaccaaaagauaauaaccauugguucggucuguaugacaauuggaauggcuaacuuaauauuacaaauuggaaacauaaucucaauauggauuagccacucaauucaacuugggaaucaaaaucagauugaaacaugcaaucaaagcgucauuacuuaugaaaacaacacuuggguaaaucagacauauguuaacaucagcaacaccaacuuugcugcuggacagucagugguuuccgugaaauuagcgggcaauuccucucucugcccuguuaguggaugggcuauauacaguaaagacaacaguauaagaauagguuccaagggggauguguuugucauaagggaaccauucauaucaugcucccccuuggaaugcagaaccuucuucuugacucaaggggccuugcuaaaugacaaacauuccaauggaaccauuaaagacaggagcccauaucgaacccuaaugagcuguccuauuggugaaguucccucuccauacaacucaagauuugagucagucgcuuggucagcaagugcuugucaugauggcaucaauuggcuaacaauuggaauuucuggcccagacaauggggcaguggcuguguuaaaguacaacggcauaauaacagacacuaucaagaguuggagaaacaauauauugagaacacaagagucugaaugugcauguguaaaugguucuugcuuuacuguaaugaccgauggaccaagugauggacaggccucauacaagaucuucagaauagaaaagggaaagauagucaaaucagucgaaaugaaugccccuaauuaucacuaugaggaaugcuccuguuauccugauucuagugaaaucacaugugugugcagggauaacuggcauggcucgaaucgaccgugggugucuuucaaccagaaucuggaauaucagauaggauacauaugcagugggauuuucggagacaauccacgcccuaaugauaagacaggcaguugugguccaguaucgucuaauggagcaaauggaguaaaaggauuuucauucaaauacggcaaugguguuuggauagggagaacuaaaagcauuaguucaagaaacgguuuugagaugauuugggauccgaacggauggacugggacagacaauaacuucucaauaaagcaagauaucguaggaauaaaugaguggucaggauauagcgggaguuuuguucagcauccagaacuaacagggcuggauuguauaagaccuugcuucuggguugaacuaaucagagggcgacccaaagagaacacaaucuggacuagcgggagcagcauauccuuuugugguguaaacagugacacuguggguuggucuuggccagacggugcugaguugccauuuaccauugacaaguaa

SEQ ID NO: 50698 - RNA, 1410 nt, Artificial Sequence; identical to SEQ ID NO: 50327
  derived and/or modified CDS sequence (wt) from neuraminidase__InfluenzaA__ADG42106

SEQ ID NO: 50699 - RNA, 1410 nt, Artificial Sequence; identical to SEQ ID NO: 48947
  derived and/or modified CDS sequence (wt) from neuraminidase__InfluenzaA__ADG42116

SEQ ID NO: 50700 - RNA, 1410 nt, Artificial Sequence; identical to SEQ ID NO: 50607
  derived and/or modified CDS sequence (wt) from neuraminidase__InfluenzaA__ADG42126

SEQ ID NO: 50701 - RNA, 1410 nt, Artificial Sequence
  derived and/or modified CDS sequence (wt) from neuraminidase__InfluenzaA__ADG42136
augaauccaaaccaaaagauaauaaccauugguucggucuguaugacaauuggaauggcuaacuuaauauuacaaauuggaaacauaaucucaauauggauuagccacucaauucaacuugggaaucaaaaucagauugaaacaugcaaucaaagcgucauuacuuaugaaaacaacacuuggguaaaucagacauauguuaacaucagcaacaccaacuuugcugcuggacagucagugguuuccgugaaauuagcgggcaauuccucucucugcccuguuaguggaugggcuauauacaguaaagacaacaguauaagaaucgguuccaagggggauguguuugucauaagggaaccauucauaucaugcucccccuuggaaugcagaaccuucuucuugacucaaggggccuugcuaaaugacaaacauuccaauggaaccauuaaagacagaagcccauaucgaacccuaaugagcuguccuauuggugaaguucccucuccauacaacucaagauuugagucagucgcuuggucagcaagugcuugucaugauggcaucaauuggcuaacaauuggaauuucuggcccagacaauggggcaguggcuguguuaaaguacaacggcauaauaacagacacuaucaagaguuggagaaacaauauauugagaacacaagagucugaaugugcauguguaaaugguucuugcuuuacuguaaugaccgauggaccaagugauggacaggcuucauacaagaucuucagaauagaaaagggaaagauagucaaaucagucgaaaugaaugccccuaauuaucacuaugaggaaugcuccuguuauccugauucuagugaaaucacaugugugugcagggauaacuggcauggcucgaaucgaccguggguaucuuucaaccagaaucuggaauaucagauaggauacauaugcagugggauuuucggagacaauccacgcccuaaugauaagacaggcaguugugguccaguaucgucuaauggagcaaauggaguaaaaggauuuucauucaaauacggcaaugguguuuggauagggagaacuaaaagcauuaguucaagaaacgguuuugagaugauuugggauccgaacggauggacugggacagacaauaacuucucaauaaagcaagauaucguaggaauaaaugaguggucaggauauagcgggaguuuuguucagcauccagaacuaacagggcuggauuguauaagaccuugcuucuggguugaacuaaucagagggcgacccaaagagaacacaaucuggacuagcgggagcagcauauccuuuugugguguaaacagugacacuguggguuggucuuggccggacggugcugaguugccauuuaccauugacaaguaa

SEQ ID NO: 50702 - RNA, 1410 nt, Artificial Sequence; identical to SEQ ID NO: 50179
  derived and/or modified CDS sequence (wt) from neuraminidase__InfluenzaA__ADG42146

SEQ ID NO: 50703 - RNA, 1410 nt, Artificial Sequence; identical to SEQ ID NO: 48947
  derived and/or modified CDS sequence (wt) from neuraminidase__InfluenzaA__ADG42156

SEQ ID NO: 50704 - RNA, 1410 nt, Artificial Sequence; identical to SEQ ID NO: 49215
  derived and/or modified CDS sequence (wt) from neuraminidase__InfluenzaA__ADG42166

SEQ ID NO: 50705 - RNA, 1410 nt, Artificial Sequence
  derived and/or modified CDS sequence (wt) from neuraminidase__InfluenzaA__ADG42186
augaauccaaaccaaaagauaauaaccauugguucggucuguaugacaauuggaauggcuaacuuaauauuacaaauuggaaacauaaucucaauauggauuagccacucaauucaacuugggaaucaaaaucagauugaaacaugcaaucaaagcgucauuacuuaugaaaacaacacuuggguaaaucagacauauguuaacaucagcaacaccaacuuugcugcuggacagucagugguuuccgugaaauuagcgggcaauuccucucucugcccuguuaguggaugggcuauauacaguaaagacaacaguauaagaaucgguuccaagggggauguguuugucauaagggaaccauucauaucaugcucccccuuggaaugcagaaccuucuucuugacucaaggggccuugcuaaaugacaaacauuccaauggaaccauuaaagacaggagcccauaucgaacccuaaugagcuguccuauuggugaaguucccucuccauacaacucaagauuugagucagucgcuuggucagcaagugcuugucaugauggcaucaauuggcuaacaauuggaauuucuggcccagacaauggggcaguggcuguguuaaaguacaacggcauaauaacagacacuaucaagaguuggagaaacaauauauugagaacacaagagucugaaugugcauguguaaaugguucuugcuuuacuguaaugaccgauggaccaagugacggacaggccucauacaagaucuucagaauagaaaagggaaagauagucaaaucagucgaaaugaaugccccuaauuaucacuaugaggaaugcuccuguuauccugauucuagugaaaucacaugugugugcagggauaacuggcauggcucgaaucgaccguggguaucuuucaaccagaaucuggaauaucagauaggauacauaugcagugggauuuucggagacaauccacgcccuaaugauaagacaggcaguugugguccaguaucgucuaauggagcaaauggaguaaaaggauuuucauucaaauacggcaaugguguuuggauagggagaacuaaaagcauuaguucaagaaacgguuuugagaugauuugggauccgaacggauggacugggacagacaauaacuucucaauaaagcaagauaucguaggaauaaaugaguggucaggauauagcgggaguuuuguucagcauccagaacuaacagggcuggauuguauaagaccuugcuucuggguugaacuaaucagagggcgacccaaagagaacacaaucuggacuagcgggagcagcauauccuuuugugguguaaacagugacacuguggguuggucuuggccggacggugcugaguugccauuuaccauugacaaguaa

SEQ ID NO: 50706 - RNA, 1410 nt, Artificial Sequence
  derived and/or modified CDS sequence (wt) from neuraminidase__InfluenzaA__ADG42196
augaauccaaaccaaaagauaauaaccauugguucggucuguaugacaauuggaauggcuaacuuaauauuacaaauuggaaacauaaucucaauauggauuagccacucaauucaacuugggaaucaaaaucagauugaaacaugcaaucaaagcgucauuacuuaugaaaacaacacuuggguaaaucagacauauguuaacaucagcaacaccaacuuugcugcugaacagucagugguuuccgugaaauuagcgggcaauuccucucucugcccuguuaguggaugggcuauauacaguaaagacaacaguauaagaaucgguuccaagggggauguguuugucauaagggaaccauucauaucaugcucccccuuggaaugcagaaccuucuucuugacucaaggggccuugcuaaaugacaaacauuccaauggaaccauuaaagacaggagcccauaucgaacccuaaugagcuguccuauuggugaaguucccucuccauacaacucaagauuugagucagucgcuuggucagcaagugcuugucaugauggcaucaauuggcuaacaauuggaauuucuggcccagacaauggggcaguggcuguguuaaaguacaacggcauaauaacagacacuaucaagaguuggagaaacaauauauugagaacacaagagucugaaugugcauguguaaaugguucuugcuuuacuguaaugaccgauggaccaagugauggacaggccucauacaagaucuucagaauagaaaagggaaagauagucaaaucagucgaaaugaaugccccuaauuaucacuaugaggaaugcuccuguuauccugauucuagugaaaucacaugugugugcagggauaacuggcauggcucgaaucgaccgugggugucuuucaaccagaaucuggaauaucagauaggauacauaugcagugggauuuucggagacaauccacgcccuaaugauaagacaggcaguugugguccaguaucgucuaauggagcaaauggaguaaaaggauuuucauucaaauacggcaaugguguuuggauagggagaacuaaaagcauuaguucaagaaacgguuuugagaugauuugggauccgaacggauggacugggacagacaauaacuucucaauaaagcaagauaucguaggaauaaaugaguggucaggauauagcgggaguuuuguucagcauccagaacuaacagggcuggauuguauaagaccuugcuucuggguugaacuaaucagagggcgacccaaagagaacacaaucuggacuagcgggagcagcauauccuuuugugguguaaacagugacacuguggguuggucuuggccagacggugcugaguugccauuuaccauugacaaguaa

SEQ ID NO: 50707 - RNA, 1410 nt, Artificial Sequence
  derived and/or modified CDS sequence (wt) from neuraminidase__InfluenzaA__ADG42206
augaauccaaaccaaaagauaauaaccauugguucggucuguaugacaauuggaauggcuaacuuaauauuacaaauuggaaacauaaucucaauauggauuagccacucaauucaacuugggaaucaaaaucagauugaaacaugcaaucaaagcgucauuacuuaugaaaacaacacuuggguaaaucagacauauguuaacaucagcaacaccaacuuugcugcuggacagucagugguuuccgugaaauuagcgggcaauuccucucucugcccuguuaguggaugggcuauauacaguaaagacaacaguauaagaaucgguuccaagggggauguguuugucauaagggaaccauucauaucaugcucccccuuggaaugcagaaccuucuucuugacucaaggggccuugcuaaaugacaaacauuccaauggaaccauuaaagacaggagcccauaucgaacccuaaugagcuguccuauuggugaaguucccucuccauacaacucaagauuugagucagucgcuuggucagcaagugcuugucaugauggcaucaauuggcuaacaauuggaauuucuggcccagacaauggggcaguggcuguguuaaaguacaacggcauaauaacagacacuaucaagaguuggagaaacaauauauugagaacacaagagucugaaugugcauguguaaaugguucuugcuuuacuguaaugaccgauggaccaagugauggacaggccucauacaagaucuucagaauagaaaagggaaagauagucaaaucagucgaaaugaaugccccuaauuaucacuaugaggaaugcuccuguuauccugauucuaguaaaaucacaugugugugcagggauaacuggcauggcucgaaucgaccgugggugucuuucaaccagaaucuggaauaucagauaggauacauaugcagugggauuuucggagacaauccacgcccuaaugauaagacaggcaguugugguccaguaucgucuaauggagcaaauggaguaaaaggauuuucauucaaauacggcaaugguguuuggauagggagaacuaaaagcauuaguucaagaaacgguuuugagaugauuugggauccgaacggauggacugggacagacaauaacuucucaauaaagcaagauaucguaggaauaaaugaguggucaggauauagcgggaguuuuguccagcauccagaacuaacagggcuggauuguauaagaccuugcuucuggguugaacuaaucagagggcgacccaaagagaacacaaucuggacuagcgggagcagcauauccuuuugugguguaaacagugacacuguggguuggucuuggccagacggugcugaguugccauuuaccauugacaaguaa

SEQ ID NO: 50708 - RNA, 1410 nt, Artificial Sequence
  derived and/or modified CDS sequence (wt) from neuraminidase__InfluenzaA__ADG42216
augaauccaaaccaaaagauaauaaccauugguucggucuguaugacaauuggaauggcuaacuuaauauuacaaauuggaaacauaaucucaauauggauuagccacucaauucaacuugggaaucaaaaucagauugaaacaugcaaucaaagcgucauuacuuaugaaaacaacacuuggguaaaucagacauauguuaacaucagcaacaccaacuuugcugcuggacagucagugguuuccgugaaauuagcgggcaauuccucucucugcccuguuaguggaugggcuauauacaguaaagacaacaguauaagaaucgguuccaagggggauguguuugucauaagggaaccauucauaucaugcucccccuuggaaugcagaaccuucuucuugacucaaggggccuugcuaaaugacaaacauuccaauggaaccauuaaagacaggagcccauaucgaacccuaaugagcuguccuauuggugaaguucccucuccauacaacucaagauuugagucagucgcuuggucagcaagugcuugucaugauggcaucaauuggcuaacaauuggaauuucuggcccagacaauggggcaguggcuguguuaaaguacaacggcauaauaacagacacuaucaagaguuggagaaacaauauauugagaacacaagagucugaaugugcauguguaaaugguucuugcuuuacuguaaugaccgauggaccaagugauggacaggccucauacaagaucuucagaauagaaaagggaaagauagucaaaucagucgaaaugaaugccccuaauuaucacuaugaggaaugcuccuguuauccugauucuagugaaaucacaugugugugcagggauaacuggcauggcucgaaucgaccgugggugucuuucaaccagaaucuggaauaucagauaggauacauaugcagugggauuuucggagacaauccacgcccuaaugauaagacaggcaguugugguccaguaucgucuaauggagcaaauggaguaaaaggauuuucauucaaauacggcaaugguguuuggauagggagaacuaaaagcauuaguucaagaaacgguuuugagaugauuugggauccgaacggauggacugggacagacaauaacuucucaauaaagcaagauaucguaggaauaaaugaguggucaggauauagcgggaguuuuguucagcauccagaacuaacagggcuggauuguauaagaccuugcuucuggguugaacuaaucagagggcgacccaaagagaacacaaucuggacuagcgggagcagcauauccuuuugugguguaaacagugacacuguggguuggucuuggccagacggugcugaauugccauuuaccauugacaaguaa

SEQ ID NO: 50709 - RNA, 1410 nt, Artificial Sequence
  derived and/or modified CDS sequence (wt) from neuraminidase__InfluenzaA__ADG42226
augaauccaaaccaaaagauaauaaucauugguucggucuguaugacaauuggaauggcuaacuuaauauuacaaauuggaaacauaaucucaauauggauuagccacucaauucaacuugggaaucaaaaucagauugaaacaugcaaucaaagcgucauuacuuaugaaaacaacacuuggguaaaucagacauauguuaacaucagcaacaccaacuuugcugcuggacagucagugguuuccguaaaauuagcgggcaauuccucucucugcccuguuaguggaugggcuauauacaguaaagacaacaguauaagaaucgguuccaagggggauguguuugucauaagggaaccauucauaucaugcucccccuuggaaugcagaaccuucuucuugacucaaggggccuugcuaaaugacaaacauuccaauggaaccauuaaagacaggagcccauaucgaacccuaaugagcuguccuauuggugaaguucccucuccauacaacucaagauuugagucagucgcuuggucagcaagugcuugucaugauggcaucaauuggcuaacaauuggaauuucuggcccagacaauggggcaguggcuguguuaaaguacaacggcauaauaacagacacuaucaagaguuggagaaacaauauauugagaacacaagagucugaaugugcauguguaaaugguucuugcuuuacuguaaugaccgauggaccaagugauggacaggccucauacaagaucuucagaauagaaaagggaaagauagucaaaucagucgaaaugaaugccccuaauuaucacuaugaggaaugcuccuguuauccugauucuagugaaaucacauguguaugcagggauaacuggcauggcucgaaucgaccgugggugucuuucaaccagaaucuggaauaucagauaggauacauaugcagugggauuuucggagacaauccacgcccuaaugauaagacaggcaguugugguccaguaucgucaaauggagcaaauggaguaaaaggauuuucauucaaauacggcaaugguguuuggauagggagaacuaaaagcauuaguucaagaaacgguuuugagaugauuugggauccgaacggauggacugggacagacaauaacuucucaauaaagcaagauaucguaggaauaaaugaguggucaggauauagcgggaguuuuguucagcauccagaacuaacagggcuggauuguauaagaccuugcuucuggguugaacuaaucagagggcgacccaaagagaacacaaucuggacuagcgggagcagcauauccuuuugugguguaaacagugacacuguggguuggucuuggccagacggugcugaguugccauuuaccauugacaaguaa

SEQ ID NO: 50710 - RNA, 1410 nt, Artificial Sequence
  derived and/or modified CDS sequence (wt) from neuraminidase__InfluenzaA__ADG42236
augaauccaaaccaaaagauaauaaccauugguucggucuguaugacaauuggaauggcuaacuuaauauuacaaauuggaaacauaaucucaauauggauuagccacucaauucaacuugggaaucaaaaucagauugaaacaugcaaucaaagcgucauuacuuaugaaaacaacacuuggguaaaucagacauauguuaacaucagcaacaccaacuuugcugcuggacagucagugguuuccgugaaauuagcgggcaauuccucucucugcccuguuaguggaugggcuauauacaguaaagacaacaguauaagaaucgguuccaagggggauguguuugucauaagggaaccauucauaucaugcucccccuuggaaugcagaaccuucuucuugacucaaggggccuugcuaaaugacaaacauuccaauggaaccauuaaagacaggagcccauaucgaacccuaaugagcuguccuauuggugaaguucccucuccauacaacucaagauuugagucagucgcuuggucagcaagugcuugucaugauggcaucaauuggcuaacaauuggaauuucuggcccagacaauggggcaguggcuguguuaaaguacaacggcauaauaacagacacuaucaagaguuggagaaacaauauauugagaacacaagagucugaaugugcauguguaaaugguucuugcuuuacuguaaugaccgauggaccaagugauggacaggccucauacaagaucuucagaauagaaaagggaaaaauagucaaaucagucgaaaugaaugccccuaauuaucacuaugaggaaugcuccuguuauccugauucuagugaaaucacaugugugugcagggacaacuggcauggcucgaaucgaccguggguaucuuucaaccagaaucuggaauaucagauaggauacauaugcagugggauuuucggagacaauccacgcccuaaugauaagacaggcaguugugguccaguaucgucuaauggagcaaauggaguaaaaggauuuucauucaaauacggcaaugguguuuggauagggagaacuaaaagcauuaguucaagaaacgguuuugagaugauuugggauccgaacggauggacugggacagacaauaacuucucaauaaagcaagauaucguaggaauaaaugaguggucaggauauagcgggaguuuuguucagcauccagaacuaacagggcuggauuguauaagaccuugcuucuggguugaacuaaucagagggcgacccaaagagaacacaaucuggacuagcgggagcagcauauccuuuugugguguaaacagugacacuguggguuggucuuggccggacggugcugaguugccauuuaccauugacaaguaa

SEQ ID NO: 50711 - RNA, 1410 nt, Artificial Sequence; identical to SEQ ID NO: 50159
  derived and/or modified CDS sequence (wt) from neuraminidase__InfluenzaA__ADG42246

SEQ ID NO: 50712 - RNA, 1410 nt, Artificial Sequence
  derived and/or modified CDS sequence (wt) from neuraminidase__InfluenzaA__ADG42256
augaauccaaaccaaaagauaauaaccauugguucggucuguaugacaauuggaauggcuaacuuaauauuacaaauuggaaacauaaucucaauauggauuagccacucaauucaacuugggaaucaaaaucagauugaaacaugcaaucaaagcgucauuacuuaugaaaacaacacuuggguaaaucagacauauguuaacaucagcaacaccaacuuugcugcuggacagucagugguuuccgugaaauuagcgggcaauuccucucuuugcccuguuaguggaugggcuauauacaguaaagacaacaguauaagaaucgguuccaagggggauguguuugucauaagggaaccauucauaucaugcucccccuuggaaugcagaaccuucuucuugacucaaggggccuugcuaaaugacaaacauuccaauggaaccauuaaagacaggagcccauaucgaacccuaaugagcuguccuauuggugaaguucccucuccauacaacucaagauuugagucagucgcuuggucagcaagugcuugucaugauggcaucaauuggcuaacaauuggaauuucuggcccagacaauggggcaguggcuguguuaaaguacaacggcauaauaacagacacuaucaagaguuggagaaacaauauauugagaacacaagagucugaaugugcauguguaaaugguucuugcuuuacuguaaugaccgauggaccaagugauggacaggccucauacaagaucuucagaauagaaaagggaaagauagucaaaucagucgaaaugaaugccccuaauuaucacuaugaggaaugcuccuguuauccugauucuagugaaaucacauguguaugcagggauaacuggcauggcucgaaucgaccgugggugucuuucaaccagaaucuggaauaucagauaggauacauaugcagugggauuuucggagacaauccacgcccuaaugauaagacaggcaguugugguccaguaucgucuaauggagcaaauggaguaaaaggauuuucauucaaauauggcaaugguguuuggauagggagaacuaaaagcauuaguucaagaaacgguuuugagaugauuugggauccgaacggauggacugggacagacaauaacuucucaauaaagcaagauaucguaggaauaaaugaguggucaggauauagcgggaguuuuguucagcauccagaacuaacagggcuggauuguauaagaccuugcuucuggguugaacuaaucagagggcgacccaaagagaacacaaucuggacuagcgggagcagcauauccuuuugugguguaaacagugacacuguggguuggucuuggccagacggugcugaguugccauuuaccauugacaaguaa

SEQ ID NO: 50713 - RNA, 1410 nt, Artificial Sequence; identical to SEQ ID NO: 50305
  derived and/or modified CDS sequence (wt) from neuraminidase__InfluenzaA__ADG42276

SEQ ID NO: 50714 - RNA, 1410 nt, Artificial Sequence
  derived and/or modified CDS sequence (wt) from neuraminidase__InfluenzaA__ADG42296
augaauccaaaccaaaagauaauaaccauugguucggucuguaugacaauuggaauggcuaacuuaauauuacaaauuggaaacauaaucucaauauggauuagccacucaauucaacuugggaaucaaaaucagauugaaacaugcaaucaaagcgucauuacuuaugaaaacaacacuuggguaaaucagacauauguuaacaucagcaacaccaacuuugcugcuggacagucagugguuuccgugaaauuagcgggcaauuccucucucugcccuguuaguggaugggcuauauacaguaaagacaacaguauaagaaucgguuccaagggggauguguuugucauaagggaaccauucauaucaugcucccccuuggaaugcagaaccuucuucuugacucaaggggccuugcuaaaugacaaacauuccaauggaaccauuaaagacaggagcccauaucgaacccuaaugagcuguccuauuggugaaguucccucuccauacaacucaagauuugagucagucgcuuggucagcaagugcuugucaugauggcaucaauuggcuaacaauuggaauuucuggcccagacaauggggcaguggcuguguuaaaguacaacggcauaauaacagacacuaucaagaguuggagaaacaauauauugagagcacaagagucugaaugugcauguguaaaugguucuugcuuuacuguaaugaccgauggaccaagugauggacaggccucauacaagaucuucagaauagaaaagggaaagauagucaaaucagucgaaaugaaugccccuaauuaucacuaugaggaaugcuccuguuauccugauucuagugaaaucacaugugugugcagggauaacuggcauggcucgaaucgaccgugggugucuuucaaccagaaucuggaauaucagauaggauacauaugcagugggauuuucggagacaauccacgcccuaaugauaagacaggcaguugugguccaguaucgucuaauggagcaaauggaguaaaaggauuuucauucaaauacggcaaugguguuuggauagggagaacuaaaagcauuaguucaagaaacgguuuugagaugauuugggauccgaacggauggacugggacagacaauaacuucucaauaaagcaagauaucguaggaauaaaugaguggucaggauauagcgggaguuuuguccagcauccagaacuaacagggcuggauuguauaagaccuugcuucuggguugaacuaaucagagggcgacccaaagagaacacaaucuggacuagcgggagcagcauauccuuuugugguguaaacagugacacuguggguuggucuuggccagacggugcugaguugccauuuaccauugacaaguaa

SEQ ID NO: 50715 - RNA, 1410 nt, Artificial Sequence
  derived and/or modified CDS sequence (wt) from neuraminidase__InfluenzaA__ADG42306
augaauccaaaccaaaagauaauaaccauugguucggucuguaugacaauuggaauggcuaacuuaauauuacaaauuggaaacauaaucucaauauggauuagccacucaauucaacuugggaaucaaaaucagauugaaacaugcaaucaaagcgucauuacuuaugaaaacaacacuuggguaaaucagacauauguuaacaucagcaacaccaacuuugcugcuggacagucagugguuuccgugaaauuagcgggcaauuccucucucugcccuguuaguggaugggcuauauacaguaaagacaacaguauaagaaucgguuccaagggggauguguuugucauaagggaaccauucauaucaugcucccccuuggaaugcagaaccuucuucuugacucaaggggccuugcuaaaugacaaacauuccaauggaaccauuaaagacaggagcccauaucggacccuaaugagcuguccuauuggugaaguucccucuccauacaacucaagauuugagucagucgcuuggucagcaagugcuugucaugauggcaucaauuggcuaacaauuggaauuucuggcccagacaauggggcaguggcuguguuaaaguacaacggcauaauaacagacacuaucaagaguuggagaaacaauauauugagaacacaagagucugaaugugcauguguaaaugguucuugcuuuacuguaaugaccgauggaccaagugauggacaggccucauacaagaucuucagaauagaaaagggaaagauagucaaaucagucgaaaugaaugccccuaauuaucacuaugaggaaugcuccuguuauccugauucuagugaaaucacaugugugugcagggauaacuggcauggcucgaaucgaccgugggugucuuucaaccagaaucuggaauaucagauaggauacauaugcagugggauuuucggagacaauccacgcccuaaugauaagacaggcaguugugguccaguaucgucuaauggagcaaauggaguaaaaggauuuucauucaaauacggcaaugguguuuggauagggagaacuaaaagcauuaguucaagaaacgguuuugagaugauuugggauccaaacggauggacugggacagacaauaacuucucaauaaagcaagauaucguaggaauaaaugaguggucaggauauagcgggaguuuuguucagcauccagaacuaacagggcuggauuguauaagaccuugcuucuggguugaacuaaucagagggcgacccaaagagaacacaaucuggacuagcgggagcagcauauccuuuugugguguaaacagugacacuguggguuggucuuggccagacggugcugaguugccauuuaccauugacaaguaa

SEQ ID NO: 50716 - RNA, 1410 nt, Artificial Sequence; identical to SEQ ID NO: 48947
  derived and/or modified CDS sequence (wt) from neuraminidase__InfluenzaA__ADG42316

SEQ ID NO: 50717 - RNA, 1410 nt, Artificial Sequence; identical to SEQ ID NO: 50104
  derived and/or modified CDS sequence (wt) from neuraminidase__InfluenzaA__ADG42326

SEQ ID NO: 50718 - RNA, 1410 nt, Artificial Sequence
  derived and/or modified CDS sequence (wt) from neuraminidase__InfluenzaA__ADG42336
augaauccaaaccaaaagauaauaaccauugguucggucuguaugacaauuggaauggcuaacuuaauauuacaaauuggaaacauaaucucaauauggauuagccacucaauucaacuugggaaucaaaaucagauugaaacaugcaaucaaagcgucauuacuuaugaaaacaacacuuggguaaaucagacauauguuaacaucagcaacaccaacuuugcugcuggacagucagugguuuccaugaaauuagcgggcaauuccucucucugcccuguuaguggaugggcuauauacaguaaagacaacaguauaagaaucggcuccaagggggauguguuugucauaagggaaccauucauaucaugcucccccuuggaaugcagaaccuucuucuugacucaaggggccuugcuaaaugacaaacauuccaauggaaccauuaaagacaggagcccauaucgaacccuaaugagcuguccuauuggugaaguucccucuccauacaacucaagauuugagucagucgcuuggucagcaagugcuugucaugauggcaucaauuggcuaacaauuggaauuucuggcccagacaauggggcaguggcuguguuaaaguacaacggcauaauaacagacacuaucaagaguuggagaaacaauauauugagaacacaagagucugaaugugcauguguaaaugguucuugcuuuacuguaaugaccgauggaccaagugauggacaggccucauacaagaucuucagaauagaaaagggaaagauagucaaaucagucgaaaugaaugccccuaauuaucacuaugaggaaugcuccuguuauccugauucuagugaaaucacaugugugugcagggauaacuggcauggcucgaaucgaccguggguaucuuucaaccagaaucuggaauaucagauaggauacauaugcagugggauuuucggagacaauccacgcccuaaugauaagacaggcaguugugguccaguaucgucuaauggagcaaauggaguaaaaggauuuucauucaaauacggcaaugguguuuggauagggagaacuaaaagcauuaguucaagaaacgguuuugagaugauuugggauccgaacggauggacugggacagacaauaaauucucaauaaagcaagauaucguaggaauaaaugaguggucaggauauagcgggaguuuuguucagcauccagaacuaacagggcuggauuguauaagaccuugcuucuggguugaacuaaucagagggcgacccaaagagaacacaaucuggacuagcgggagcagcauauccuuuugugguguaaacagugacacuguggguuggucuuggccagacggugcugaguugccauuuaccauugacaaguaa

SEQ ID NO: 50719 - RNA, 1410 nt, Artificial Sequence
  derived and/or modified CDS sequence (wt) from neuraminidase__InfluenzaA__ADG42346
augaauccaaaccaaaagauaauaaccauugguucggucuguaugacaauuggaauggcuaacuuaauauuacaaauuggaaacauaaucucaauauggauuagccacucaauucaacuugggaaucaaaaucagauugaaacaugcaaucaaagcgucauuacuuaugaaaacaacacuuggguaaaucagacauauguuaacaucagcaacaccaacuuugcugcuggacagucagugguucccgugaaauuagcgggcaauuccucucucugcccuguuaguggaugggcuauauacaguaaagacaacaguauaagaaucgguuccaagggggauguguuugucauaagggaaccauucauaucaugcucccccuuggaaugcagaaccuucuucuugacucaaggggccuugcuaaaugacaaacauuccaauggaaccauuaaagacaggagcccauaucgaacccuaaugagcuguccuauuggugaaguucccucuccauacaacucaagauuugagucagucgcuuggucagcaagugcuugucaugauggcaucaauuggcuaacaauuggaauuucuggcccagacaauggggcaguggcuguguuaaaguacaacggcauaauaacagacacuaucaagaguuggagaaacaauauauugagaacacaagagucugaaugugcauguguaaaugguucuugcuuuacuguaaugaccgauggaccaagugauggacaggccucauacaagaucuucagaauagaaaagggaaagauagucaaaucagucgaaaugaaugccccuaauuaucacuaugaggaaugcuccuguuauccugauucuagugaaaucacaugugugugcagggauaacuggcauggcucgaaucgaccguggguaucuuucaaccagaaucuggaauaucagauaggauacauaugcagugggauuuucggagacaauccacgcccuaaugauaagacaggcaguugugguccaguaucgucuaauggagcaaauggaguaaaaggauuuucauucaaauacggcaaugguguuuggauagggagaacuaaaagcauuaguucaagaaacgguuuugagaugauuugggauccgaacggauggacugggacagacaauaacuucucaauaaagcaagauaucguaggaauaaaugaguggucaggauauagcgggaguuuuguucagcauccagaacuaacagggcuggauuguauaagaccuugcuucuggguugaacuaaucagagggcgacccaaagagaacacaaucuggacuagcgggagcagcauauccuuuugugguguaaacagugacacuguggguuggucuuggccggacggugcugaguugccauuuaccauugacaaguaa

SEQ ID NO: 50720 - RNA, 1410 nt, Artificial Sequence
  derived and/or modified CDS sequence (wt) from neuraminidase__InfluenzaA__ADG42356
augaauccaaaccaaaagauaauaaccauugguucggucuguaugacaauuggaauggcuaacuuaauauuacaaauuggaaacauaaucucaauauggauuagccacucaauucaacuugggaaucaaaaucagauugaaacaugcaaucaaagcgucauuacuuaugaaaacaacacuuggguaaaucagacauauguuaacaucagcaacaccaacuuugcugcuggacagucagugguuuccgugaaauuagcgggcaauuccucucucugcccuguuaguggaugggcuauauacaguaaagacaacaguauaagaaucggcuccaagggggauguguuugucauaagggaaccauucauaucaugcucccccuuggaaugcagaaccuucuucuugacucaaggggccuugcuaaaugacaaacauuccaauggaaccauuaaagacaggagcccauaucgaacccuaaugagcuguccuauuggugaaguucccucuccauacaacucaagauuugagucagucgcuuggucagcaagugcuugucaugauggcaucaauuggcuaacaauuggaauuucuggcccagacaauggggcaguggcuguguuaaaguacaacggcauaauaacagacacuaucaagaguuggagaaacaauauauugagaacacaagagucugaaugugcauguguaaaugguucuugcuuuacuguaaugaccgauggaccaagugauggacaggccucauacaagaucuucagaauagaaaagggaaagauagucaaaucagucgaaaugaaugccccuaauuaucacuaugaggaaugcuccuguuauccugauucuagugaaaucacaugugugugcagggauaacuggcauggcucgaaucgaccguggguaucuuucaaccagaaucuggaauaucagauaggauacauaugcagugggauuuucggagacaauccacgcccuaaugauaagacaggcaguugugguccaguaucgucuaauggagcaaauggaguaaaaggauuuucauucaaauacggcaaugguguuuggauagggagaacuaaaagcauuaguucaagaaacgguuuugagaugauuugggauccgaacggauggacugggacagacaauaaauucucaauaaagcaagauaucguaggaauaaaugaguggucaggauauagcgggaguuuuguucagcauccagaacuaacagggcuggauuguauaagaccuugcuucuggguugaacuaaucagagggcgacccaaagagaacacaaucuggacuagcgggagcagcauauccuuuugugguguaaacagugacacuguggguuggucuuggccagacggugcugaguugccauuuaccauugacaaguaa

SEQ ID NO: 50721 - RNA, 1410 nt, Artificial Sequence
  derived and/or modified CDS sequence (wt) from neuraminidase__InfluenzaA__ADG42366
augaauccaaaccaaaagauaauaaccauugguucggucuguaugacaauuggaauggcuaacuuaauauuacaaauuggaaacauaaucucaauauggauuagccacucaauucaacuugggaaucaaaaucagauugaaacaugcaaucaaagcgucauuacuuaugaaaacaacacuuggguaaaucagacauauguuaacaucagcaacaccaacuuugcugcuggacagucagugguuuccgugaaauuagcgggcaauuccucucucugcccuguuaguggaugggcuauauacaguaaagacaacaguauaagaaucggcuccaagggggauguguuugucauaagggaaccauucauaucaugcucccccuuggaaugcagaaccuucuucuugacucaaggggccuugcuaaaugacaaacauuccaauggaaccauuaaagacaggagcccauaucgaacccuaaugagcuguccuauuggugaaguucccucuccauacaacucaagauuugagucagucgcuuggucagcaagugcuugucaugauggcaucaauuggcuaacaauuggaauuucuggcccagacaauggggcaguggcuguguuaaaguacaacggcauaauaacagacacuaucaagaguuggagaaacaauauauugagaacacaagagucugaaugugcauguguaaaugguucuugcuuuacuguaaugaccgauggaccaagugauggacaggccucauacaaaaucuucagaauagaaaagggaaagauagucaaaucagucgaaaugaaugccccuaauuaucacuaugaggaaugcuccuguuauccugauucuagugaaaucacaugugugugcagggauaacuggcauggcucgaaucgaccguggauaucuuucaaccagaaucuggaauaucagauaggauacauaugcagugggauuuucggagacaauccacgcccuaaugauaagacaggcaguugugguccaguaucgucuaauggagcaaauggaguaaaaggauuuucauucaaauacggcaaugguguuuggauagggagaacuaaaagcauuaguucaagaaacgguuuugagaugauuugggauccgaacggauggacugggacagacaauaaauucucaauaaagcaagauaucguaggaauaaaugaguggucaggauauagcgggaguuuuguucagcauccagaacuaacagggcuggauuguauaagaccuugcuucuggguugaacuaaucagagggcgacccaaagagaacacaaucuggacuagcgggagcagcauauccuuuugugguguaaacagugacacuguggguuggucuuggccagacggugcugaguugccauuuaccauugacaaguaa

SEQ ID NO: 50722 - RNA, 1410 nt, Artificial Sequence
  derived and/or modified CDS sequence (wt) from neuraminidase__InfluenzaA__ADG42376
augaauccaaaccaaaagauaauaaccauugguucggucuguaugacaauuggaauggcuaacuuaauauuacaaauuggaaacauaaucucaauauggauuagccacucaauucaacuugggaaucaaaaucagauugaaacaugcaaucaaagcgucauuacuuaugaaaacaacacuugggugaaucagacauauguuaacaucagcaacaccaacuuugcugcuggacagucagugguuuccgugaaauuagcgggcaauuccucucucugcccuguuaguggaugggcuauauacaguaaagacaacaguauaagaaucgguuccaagggggauguguuugucauaagggaaccauucauaucaugcucccccuuggaaugcagaaccuucuucuugacucaaggggccuugcuaaaugacaaacauuccaauggaaccauuaaagacaggagcccauaucgaacccuaaugagcuguccuauuggugaaguucccucuccauacaacucaagauuugagucagucgcuuggucagcaagugcuugucaugauggcaucaauuggcuaacaauuggaauuucuggcccagacaauggggcaguggcuguguuaaaguacaacggcauaauaacagacacuaucaagaguuggagaaacaauauauugagaacacaagagucugaaugugcauguguaaaugguucuugcuuuacuguaaugaccgauggaccaagugauggacaggccucauacaagaucuucagaauagaaaagggaaagauagucaaaucagucgaaaugaaugccccuaauuaucacuaugaggaaugcuccuguuauccugauucuagugaaaucacaugugugugcagggauaacuggcauggcucgaaucgaccgugggugucuuucaaccagaaucuggaauaucagauaggauacauaugcagugggauuuucggagacaauccacgcccuaaugauaagacaggcaguugugguccaguaucgucuaauggagcaaauggaguaaaaggauuuucauucaaauacggcaaugguguuuggauagggagaacuaaaagcauuaguucaagaaacgguuuugagaugauuugggauccgaacggauggacugggacagacaauaacuucucaauaaagcaagauaucguaggaauaaaugaguggucaggauauagcgggaguuuuguucagcauccagaacuaacagggcuggauuguauaagaccuugcuucuggguugaacuaaucagagggcgacccaaagagaacacaaucuggacuagcgggagcagcauauccuuuugugguguaaacagugacacuguggguuggucuuggccagacggugcugaguugccauuuaccauugacaaguaa

SEQ ID NO: 50723 - RNA, 1410 nt, Artificial Sequence
  derived and/or modified CDS sequence (wt) from neuraminidase__InfluenzaA__ADG42386
augaauccaaaccaaaagauaauaaccauugguucggucuguaugacaauuggaauggcuaacuuaauauuacaaauuggaaacauaaucucaauauggauuagccacucaauucaacuugggaaucaaaaucagauugaaacaugcaaucaaagcgucauuacuuaugaaaacaacacuuggguaaaucagacauauguuaacaucagcaacaccaacuuugcugcuggacagucagugguuuccgugaaauuugcgggcaauuccucucucugcccuguuaguggaugggcuauauacaguaaagacaacaguauaagaaucgguuccaagggggauguguuugucauaagggaaccauucauaucaugcucccccuuggaaugcagaaccuucuucuugacucaaggggccuugcuaaaugacaaacauuccaauggaaccauuaaagacaggagcccauaucgaacccuaaugagcuguccuauuggugaaguucccucuccauacaacucaagauuugagucagucgcuuggucagcaagugcuugucaugauggcaucaauuggcuaacaauuggaauuucuggcccagacaauggggcaguggcuguguuaaaguacaacggcauaauaacagacacuaucaagaguuggagaaacaauauauugagaacacaagagucugaaugugcauguguaaaugguucuugcuuuacuguaaugaccgauggaccaaaugauggacaggccucauacaagaucuucagaauagaaaagggaaagauagucaaaucagucgaaaugaaugccccuaauuaucacuaugaggaaugcuccuguuauccugauucuagugaaaucacaugugugugcagggauaacuggcauggcucgaaucgaccgugggugucuuucaaccagaaucuggaauaucagauaggauacauaugcagugggauuuucggagacaauccacgcccuaaugacaagacaggcaguugugguccaguaucgucuaauggagcaaauggaguaaaaggauuuucauucaaauacggcaaugguguuuggauagggagaacuaaaagcauuaguucaagaagcgguuuugagaugauuugggauccgaacggauggacugggacagacaauaaguucucaauaaagcaggauaucguaggaauaaaugaguggucaggauauagcgggaguuuuguucagcauccagaacuaacagggcuggauuguauaagaccuugcuucuggguugaacuaaucagagggcgacccaaagagaacacaaucuggacuagcgggagcagcauauccuuuugugguguaaacagugacacuguggguuggucuuggccagacggugcugaguugccauuuaccauugacaaguaa

SEQ ID NO: 50724 - RNA, 1410 nt, Artificial Sequence
  derived and/or modified CDS sequence (wt) from neuraminidase__InfluenzaA__ADG42396
augaauccaaaccaaaagauaauaaccauugguucggucuguaugacaauuggaauggcuaacuuaauauuacaaauuggaaacauaaucucaauauggauuagccacucaauucaacuugggaaucaaaaucagauugaaacaugcaaucaaagcgucauuacuuaugaaaacaacacuuggguaaaucagacauauguuaacaucagcaacaccaacuuugcugcuggacaaucagugguuuccgugaaauuagcgggcaauuccucucucugcccuguuaguggaugggcuauauacaguaaagacaacaguauaagaaucgguuccaagggggacguguuugucauaagggaaccauucauaucaugcucccccuuggaaugcagaaccuucuucuugacucaaggggccuugcuaaaugacaaacauuccaauggaaccauuaaagacaggagcccauaucgaacccuaaugagcuguccuauuggugaaguucccucuccauacaacucaagauuugagucagucgcuuggucagcaagugcuugucaugauggcaucaauuggcuaacaauuggaauuucuggcccagacaauggggcaguggcuguguuaaaguacaacggcauaauaacagacacuaucaagaguuggagaaacaauauauugagaacacaagagucugaaugugcauguguaaaugguucuugcuuuacuguaaugaccgauggaccaagugauggacaggccucauacaagaucuucagaauagaaaagggaaagauagucaaaucagucgaaaugaaugccccuaauuaucacuaugaggaaugcuccuguuauccugauucuaguaaaaucacauguguaugcagggauaacuggcauggcucgaaucgaccgugggugucuuucaaccagaaucuggaauaucagauaggauacauaugcagugggauuuucggagacaauccacgcccuaaugauaagacaggcaguugugguccaguaucgucuaauggagcaaauggaguaaaaggauuuucauucaaauacggcaaugguguuuggauagggagaacuaaaagcauuaguucaagaaacgguuuugagaugauuugggauccgaacggauggacugggacagacaauaacuucucaauaaagcaagauaucguaggaauaaaugaguggucaggauauagcgggaguuuuguucagcauccagaacuaacagggcuggauuguauaagaccuugcuucuggguugaacuaaucagagggcgacccaaagagaacacaaucuggacuagcgggagcagcauauccuuuugugguguaaacagugacacuguggguuggucuuggccagacggugcugaguugccauuuaccauugacaaguaa

SEQ ID NO: 50725 - RNA, 1410 nt, Artificial Sequence
  derived and/or modified CDS sequence (wt) from neuraminidase__InfluenzaA__ADG42406
augaauccaaaccaaaagauaauaaccauugguucggucuguaugacaauuggaauggcuaacuuaauauuacaaauuggaaacauacucucaacauggauuagccacucaauucaacuugggaaucaaaaucagauugaaacaugcaaucaaagcgucauuacuuaugaaaacaacacuuggguaaaucagacauauguuaacaucaguaacaccaacuuugcugcuggacagucagugguuuccgugaaauuagcgggcaauuccucucucugcccuguuaguggaugggcuauauacaguaaagacaacaguauaagaaucgguuccaagggggauguguuugucauaagggaaccauucauaucaugcucccccuuggaaugcagaaccuucuucuugacucaaggggccuugcuaaaugacaaacauuccaauggaaccauuaaagacaggagcccauaucgaacccuaaugagcuguccuauuggugaaguucccucuccauacaacucaagauuugagucagucgcuuggucagcaagugcuugucaugauggcaucaauuggcuaacaauuggaauuucuggcccagacaauggggcaguggcuguguuaaaguacaacggcauaauaacagacacuaucaagaguuggagaaacaauauauugagaacacaagagucugaaugugcauguguaaaugguucuugcuuuacuguaaugaccgauggaccaagugauggacaggccucauacaagaucuucagaauagaaaagggaaagauagucaaaucagucgaaaugaaugccccuaauuaucacuaugaggaaugcuccuguuauccugauucuagugaaaucacaugugugugcagggauaacuggcauggcucgaaucgaccgugggugucuuucaaccagaaucuggaauaucagauaggauacauaugcagugggauuuucggagacaauccacgcccuaaugauaagaaaggcaguugugguccaguaucgucuaauggagcaaauggaguaaaaggauuuucauucaaauacggcaaugguguuuggauagggagaacuaaaagcauuaguucaagaaacgguuuugagaugauuugggauccgaacggauggacugggacagacaauaacuucucaauaaagcaagauaucguaggaauaaaugaauggucaggauauagcgggaguuuuguucagcauccagaacuaacagggcuggauuguauaagaccuugcuucuggguugaacuaaucagagggcgacccaaagagaacacaaucuggacuagcgggagcagcauauccuuuugugguguaaacagugacacuguggguuggucuuggccagacggugcugaguugccauuuaccauugacaaguaa

SEQ ID NO: 50726 - RNA, 1410 nt, Artificial Sequence; identical to SEQ ID NO: 50720
  derived and/or modified CDS sequence (wt) from neuraminidase__InfluenzaA__ADG42426

SEQ ID NO: 50727 - RNA, 1410 nt, Artificial Sequence
  derived and/or modified CDS sequence (wt) from neuraminidase__InfluenzaA__ADG42436
augaauccaaaccaaaagauaauaaccauugguucggucuguaugacaauuggaauggcuaacuuaauauuacaaauuggaaacauaaucucaauauggauuagccacucaauucaacuugggaaucaaaaucagauugaaacaugcaaucaaagcgucauuacuuaugaaaacaacacuuggguaaaucagacauauguuaacaucagcaacaccaacuuugcugcuggacagucagugguuuccgugaaauuagcgggcaauuccucucucugcccuguuaguggaugggcuauauacaguaaagacaacaguauaagaaucgguuccaagggggauguguuugucauaagggaaccauucauaucaugcucccccuuggaaugcagaaccuucuucuugacucaaggggccuugcuaaaugacaaacauuccaauggaaccauuaaagacaggagcccauaucggacccuaaugagcuguccuauuggugaaguucccucuccauacaacucaagauuugagucagucgcuuggucagcaagugcuugucaugauggcaucaauuggcuaacaauuggaauuucuggcccagacaauggggcaguggcuguguuaaaguacaacggcauaauaacagacacuaucaagaguuggagaaacaauauauugagaacacaagagucugaaugugcauguguaaaugguucuugcuuuacuguaaugaccgauggaccaagugauggacaggccucauacaagaucuucagaauagaaaagggaaagauagucaaaucagucgaaaugaaugccccuaauuaucacuaugaggaaugcuccuguuauccugauucuagugaaaucacaugugugugcagggauaacuggcauggcucgaaucgaccgugggugucuuucaaccagaaucuggaauaucagauaggauacauaugcagugggauuuucggagacaauccacgcccuaaugauaagacaggcaguugugguccaguaucgucuaauggagcaaauggaguaaaaggauuuucauucaaauacggcaaugguguuuggauagggagaacuaaaagcauuaguucaagaaacgguuuugagaugauuugggauccgaacggauggacugggacagacaauaacuucucaauaaagcaagauaucguaggaauaaaugaguggucaggauauagcgggaguuuuguucagcauccagaacuaacagggcuggauuguauaagaccuugcuucuggguugaacuaaucagagggcgacccaaagagaacacaaucuggacuagcgggagcagcauauccuuuugugguguaaacagugacacuguggguuggucuuggccagacggugcugaguugccauuuaccauugacaaguaa

SEQ ID NO: 50728 - RNA, 1410 nt, Artificial Sequence
  derived and/or modified CDS sequence (wt) from neuraminidase__InfluenzaA__ADG42446
augaauccaaaccaaaagauaauaaccauugguucggucuguaugacaauuggaauggcuaacuuaauauuacaaauuggaaacauaaucucaauauggauuagccacucaauucaacuugggaaucaaaaucagauugaaacaugcaaucaaagcgucauuacuuaugaaaacaacacuuggguaaaucagacauauguuaacaucagcaacaccaacuuugcugcuggacagucagugguuuccgcgaaauuagcgggcaauuccucucucugcccuguuaguggaugggcuauauacaguaaagacaacaguauaagaaucgguuccaagggggauguguuugucauaagggaaccauucauaucaugcucccccuuggaaugcagaaccuucuucuugacucaaggggccuugcuaaaugacaaacauuccaauggaaccauuaaagacaggagcccauaucgaacccuaaugagcuguccuauuggugaaguucccucuccauacaacucaagauuugagucagucgcuuggucagcaagugcuugucaugauggcaucaauuggcuaacaauuggaauuucuggcccagacaauggggcaguggcuguguuaaaguacaacggcauaauaacagacacuaucaagaguuggagaaacaauauauugagaacacaagagucugaaugugcauguguaaaugguucuugcuuuacuguaaugaccgauggaccaagugauggacaggccucauacaagaucuucagaauagaaaagggaaagauagucaaaucagucgaaaugaaugccccuaauuaucacuaugaggaaugcuccuguuauccugauucuagugaaaucacaugugugugcagggauaacuggcauggcucgaaucgaccguggguaucuuucaaccagaaucuggaauaucagauaggauacauaugcagugggauuuucggagacaauccacgcccuaaugauaagacaggcaguugugguccaguaucgucuaauggagcaaauggaguaaaaggauuuucauucaaauacggcaaugguguuuggauagggagaacuaaaagcauuaguucaagaaacgguuuugagaugauuugggauccgaacggauggacugggacagacaauaacuucucaauaaagcaagauaucguaggaauaaaugaguggucaggauauagcgggaguuuuguucagcauccagaacuaacagggcuggauuguauaagaccuugcuucuggguugaacuaaucagagggcgacccaaagagaacacaaucuggacuagcgggagcagcauauccuuuugugguguaaacagugacacuguggguuggucuuggccggacggugcugaguugccauuuaccauugacaaguaa

SEQ ID NO: 50729 - RNA, 1410 nt, Artificial Sequence
  derived and/or modified CDS sequence (wt) from neuraminidase__InfluenzaA__ADG42456
augaauccaaaccaaaagauaauaaccauugguucggucuguaugacaauuggaauggcuaacuuaauauuacaaauuggaaacauaaucucaauauggauuagccacucaauucaacuugggaaucaaaaucagauugaaacaugcaaucaaagcgucauuacuuaugaaaacaacacuuggguaaaucagacauauguuaacaucagcaacaccaacuuugcugcuggacagucagugguuuccgugaaauuagcgggcaauuccucucucugcccuguuaguggaugggcuauauacaguaaagacaacaguauaagaaucgguuccaagggggauguguuugucauaagggaaccauucauaucaugcucccccuuggaaugcagaaccuucuucuugacucaaggggccuugcuaaaugacaaacauuccaauggaaccauuaaagacaggagcccacaucgaacccuaaugagcuguccuauuggugaaguucccucuccauacaacucaagauuugagucagucgcuuggucagcaagugcuugucaugauggcaucaauuggcuaacaauuggaauuucuggcccagacaauggggcaguggcuguguuaaaguacaacggcauaauaacagacacuaucaagaguuggagaaacaauauauugagaacacaagagucugaaugugcauguguaaaugguucuugcuucacuguaaugaccgauggaccaagugauggacaggccucauacaagaucuucagaauagaaaagggaaagauagucaaaucagucgaaaugaaugccccuaauuaucacuaugaggaaugcuccuguuauccugauucuagugaaaucacaugugugugcagggauaacuggcauggcucgaaucgaccguggguaucuuucaaccagaaucuggaauaucagauaggauacauaugcagugggauuuucggagacaauccacgcccuaaugauaagacaggcaguugugguccaguaucgucuaauggagcaaauggaguaaaaggauuuucauucaaauacggcaaugguguuuggauagggagaacuaaaagcauuaguucaagaaacgguuuugagaugauuugggauccgaacggauggacugggacagacaauaacuucucaauaaagcaagauaucguaggaauaaaugaguggucaggauauagcgggaguuuuguucagcauccagaacuaacagggcuggauuguauaagaccuugcuucuggguugaacuaaucagagggcgacccaaagagaacacaaucuggacuagcgggagcagcauauccuuuugugguguaaacagugacacuguggguuggucuuggccggacggugcugaguugccauuuaccauugacaaguaa

SEQ ID NO: 50730 - RNA, 1410 nt, Artificial Sequence; identical to SEQ ID NO: 48814
  derived and/or modified CDS sequence (wt) from neuraminidase__InfluenzaA__ADG42466

SEQ ID NO: 50731 - RNA, 1410 nt, Artificial Sequence
  derived and/or modified CDS sequence (wt) from neuraminidase__InfluenzaA__ADG42476
augaauccaaaccaaaagauaauaaccauugguucggucuguaugacaauuggaauggcuaacuuaauauuacaaauuggaaacauaaucucaauauggauuagccacucaauucaacuugggaaucaaaaucagacugaaacaugcaaucaaagcgucauuacuuaugaaaacaacacuuggguaaaucagacauauguuaacaucagcaacaccaacuuugcugcuggacagucagugguuuccgugaaauuagcgggcaauuccucucucugcccuguuagcggaugggcuauauacaguaaagacaacaguauaagaaucgguuccaagggggauguguuugucauaagggaaccauucauaucaugcucccccuuggaaugcagaaccuucuucuugacucaaggggccuugcuaaaugacaaacauuccaauggaaccauuaaagacaggagcccauaucgaacccuaaugagcuguccuauuggugaaguucccucuccauacaacucaagauuugagucagucgcuuggucagcaagugcuugucaugauggcaucaauuggcuaacaauuggaauuucuggcccagacaauggggcaguggcuguguuaaaguacaacggcauaauaacagacacuaucaagaguuggagaaacaauauauugagaacacaagagucugaaugugcauguguaaaugguucuugcuuuacuguaaugaccgauggaccaagugauggacaggccucauacaagaucuucagaauagaaaagggaaagauagucaaaucagucgaaaugaaugccccuaauuaucacuaugaggaaugcuccuguuauccugauucuagugaaaucacaugugugugcagggauaacuggcauggcucgaaucgaccguggguaucuuucaaccagaaucuggaauaucagauaggauacauaugcagugggauuuucggagacaauccacgcccuaaugauaagacaggcaguugugguccaguaucgucuaauggagcaaauggaguaaaaggauuuucauucaaauacggcaaugguguuuggauagggagaacuaaaagcauuaguucaagaaacgguuuugagaugauuugggauccgaacggauggacugggacagacaauaacuucucaauaaagcaagauaucguaggaauaaaugaguggucaggauauagcgggaguuuuguucagcauccagaacuaacagggcuggauuguauaagaccuugcuucuggguugaacuaaucagagggcgacccaaagagaacacaaucuggacuagcgggagcagcauauccuuuugugguguaaacagugacacuguggguuggucuuggccggacggugcugaguugccauuuaccauugacaaguaa

SEQ ID NO: 50732 - RNA, 1410 nt, Artificial Sequence
  derived and/or modified CDS sequence (wt) from neuraminidase__InfluenzaA__ADG42486
augaauccaaaccaaaagauaauaaccauugguucggucuguaugacaauuggaauggcuaacuuaauauuacaaauuggaaacauaaucucaauauggauuagccacucaauucaacuugggaaucaaaaucagauugaaacaugcaaucaaagcgucauuacuuaugaaaacaacacuuggguaaaucagacauauguuaacaucagcaacaccaacuuugcugcuggacagucagugguuuccgugaaauuagcgggcaauuccucucucugcccuguuaguggaugggcuauauacaguaaagacaacaguauaagaaucgguuccaagggggauguguuugucauaagggaaccauucauaucaugcucccccuuggaaugcagaaccuucuucuugacucaaggggccuugcuaaaugacaaacauuccaauggaaccauuaaagacaggagcccauaucgaacccuaaugagcuguccuauuggugaaguucccucuccauacaacucaagauuugagucagucgcuuggucagcaagugcuugucaugauggcaucaauuggcuaacaauuggaauuucuggcccagacaauggggcaguggcuguguuaaaguacaacggcauaauaacagacacuaucaagaguuggagaaacaauauauugagaacacaagagucugaaugugcauguguaaaugguucuugcuuuacuguaaugaccgauggaccaagugauggacaggccucauacaagaucuucaaaauagaaaagggaaagauagucaaaucagucgaaaugaaugccccuaauuaucacuaugaggaaugcuccuguuauccugauucuagugaaaucacauguguaugcagggauaacuggcauggcucgaaucgaccgugggugucuuucaaccagaaucuggaauaucagauaggauacauaugcagugggauuuucggagacaauccacgcccuaaugauaagacaggcaguugugguccaguaucgucuaauggagcaaauggaguaaaaggauuuucauucaaauacggcaaugguguuuggauagggagaacuaaaagcauuaguucaagaaacgguuuugagaugauuugggauccgaacggauggacugggacagacaauaacuucucaauaaagcaagauaucguaggaauaaaugaguggucaggauauagcgggaguuuuguucagcauccagaacuaacagggcuggauuguauaagaccuugcuucuggguugaacuaaucagagggcgacccaaagagaacacaaucuggacuagcgggagcagcauauccuuuugugguguaaacagugacacuguggguuggucuuggccagacggugcugaguugccauuuaccauugacaaguaa

SEQ ID NO: 50733 - RNA, 1410 nt, Artificial Sequence
  derived and/or modified CDS sequence (wt) from neuraminidase__InfluenzaA__ADG42496
augaauccaaaccaaaagauaauaaccauugguucggucuguaugacaauuggaauggcuaacuuaauauuacaaauuggaaacauaaucucaauauggauuagccacucaauucaacuugggaaucaaaaucagauugaaacaugcaaucaaagcgucauuacuuaugaaaacaacacuuggguaaaucaaacauauguuaacaucagcaacaccaacuuugcugcuggacaaucagugguuuccgugaaauuagcgggcaauuccucucucugcccuguuaguggaugggcuauauacaguaaagacaacaguauaagaaucgguuccaagggggauguguuugucauaagggaaccauucauaucaugcucccccuuggaaugcagaaccuucuucuugacucaaggggccuugcuaaaugacaaacauuccaauggaaccauuaaagacaggagcccauaucgaacccuaaugagcuguccuauuggugaaguucccucuccauacaacucaagauuugagucagucgcuuggucagcaagugcuugucaugauggcaucaauuggcuaacaauuggaauuucuggcccagacaauggggcaguggcuguguuaaaguacaacggcauaauaacagacacuaucaagaguuggagaaacaauauauugagaacacaagagucugaaugugcauguguaaaugguucuugcuuuacuguaaugaccgauggaccaagugauggacaggccucauacaagaucuucagaauagaaaagggaaagauagucaaaucagucgaaaugaaugccccuaauuaucacuaugaggaaugcuccuguuauccugauucuagugaaaucacaugugugugcagggauaacuggcauggcucgaaucgaccgugggugucuuucaaccagaaucuggaauaucagauaggauacauaugcagugggauuuucggagacaauccacgcccuaaugauaagacaggcaguugugguccaguaucgucuaauggagcaaauggaguaaaaggauuuucauucaaauacggcaaugguguuuggauagggagaacuaaaagcauuaguucaagaaacgguuuugagaugauuugggauccgaacggauggacugggacagacaauaacuucucaauaaagcaagauaucguaggaauaaaugaguggucaggauauagcgggaguuuuguucagcauccagaacuaacagggcuggauuguauaagaccuugcuucuggguugaacuaaucagagggcgacccaaagagaacacaaucuggacuagcgggagcagcauauccuuuugugguguaaacagugacacuguggguuggucuuggccagacggugcugaguugccauuuaccauugacaaguaa

SEQ ID NO: 50734 - RNA, 1410 nt, Artificial Sequence
  derived and/or modified CDS sequence (wt) from neuraminidase__InfluenzaA__ADG42506
augaauccaaaccaaaagauaauaaucauugguucggucuguaugacaauuggaauggcuaacuuaauauuacaaauuggaaacauaaucucaauauggauuagccacucaauucaacuugggaaucaaaaucagauugaaacaugcaaucaaagcaucauuacuuaugaaaacaacacuuggguaaaucagacauauguuaacaucagcaacaccaacuuugcugcuggacagucagugguuuccgugaaauuagcgggcaauuccucucucugcccuguuaguggaugggcuauauacaguaaagacaacaguauaagaaucgguuccaagggggauguguuugucauaagggaaccauucauaucaugcucccccuuggaaugcagaaccuucuucuugacucaaggggccuugcuaaaugacaaacauuccaauggaaccauuaaagacaggagcccauaucgaacccuaaugagcuguccuauuggugaaguucccucuccauacaacucaagauuugagucagucgcuuggucagcaagugcuugucaugauggcaucaauuggcuaacaauuggaauuucuggcccagacaauggggcaguggcuguguuaaaguacaacggcauaauaacagacacuaucaagaguuggagaaacaauauauugagaacacaagagucugaaugugcauguguaaaugguucuugcuuuacuguaaugaccgauggaccaagugauggacaggccucauacaagaucuucagaauagaaaagggaaagguagucaaaucagucgaaaugaaugccccuaauuaucacuaugaggaaugcuccuguuauccugauucuagugaaaucacaugugugugcagggauaacuggcauggcucgaaucgaccgugggugucuuucaaccagaaucuggaauaucagauaggauacauauguagugggauuuucggagacaauccacgcccuaaugauaagacaggcaguugugguccaguaucgucuaauggagcaaauggaguaaaaggauuuucauucaaauacggcaaugguguuuggauagggagaacuaaaagcauuaguucaagaaacgguuuugagaugauuugggauccgaacggauggacugggacagacaauaacuucucaauaaagcaagauaucguaggaauaaaugaguggucaggauauagcgggaguuuuguucagcauccagaacuaacagggcuggauuguauaagaccuugcuucuggguugaacuaaucagagggcgacccaaagagaacacaaucuggacuagcgggagcagcauauccuuuugugguguaaacagugacacuguggguuggucuuggccagacggugcugaguugccauuuaccauugacaaguaa

SEQ ID NO: 50735 - RNA, 1410 nt, Artificial Sequence; identical to SEQ ID NO: 49925
  derived and/or modified CDS sequence (wt) from neuraminidase__InfluenzaA__ADG42516

SEQ ID NO: 50736 - RNA, 1410 nt, Artificial Sequence
  derived and/or modified CDS sequence (wt) from neuraminidase__InfluenzaA__ADG42526
augaauccaaaccaaaagauaauaaccauugguucggucuguaugacaauuggaauggcuaacuuaauauuacaaauuggaaacauaaucucaauauggauuagccacucaauucaacuugggaaucaaaaucagauugaaacaugcaaucaaagcgucauuacuuaugaaaacaacacuuggguaaaucagacauauguuaacaucagcaacaccaacuuugcugcuggacagucagugguuuccgugaaauuagcgggcaauuccucucucugcccuguuaguggaugggcuauauacaguaaagacaacaguauaagaaucgguuccaagggggauguguuugucauaagggaaccauucauaucaugcucccccuuggaaugcagaaccuucuucuugacucaaggggccuugcuaaaugacaaacauuccaauggaaccauuaaagacaggagcccauaucgaacccuaaugagcuguccuauuggugaaguucccucuccauacaacucaagauuugagucagucgcuuggucagcaagugcuugucaugauggcaucaauuggcuaacaauuggaauuucuggcccagacaauggggcaguggcuguguuaaaguacaacggcauaauaacagacacuaucaagaguuggagaaacaauauauugagaacacaagagucugaaugugcauguuuaaaugguucuugcuuuacuguaaugaccgauggaccaagugauggacaggccucauacaagaucuucagaauagaaaagggaaagauagucaaaucagucgaaaugaaugccccuaauuaucacuaugaggaaugcuccuguuauccugauucuagugaaaucacaugugugugcagggauaacuggcauggcucgaaucgaccguggguaucuuucaaccagaaucuggaauaucagauaggauacauaugcagugggauuuucggagacaauccacgcccuaaugauaagacaggcaguugugguccaguaucgucuaauggagcaaauggaguaaaaggauuuucauucaaauacggcaaugguguuuggauagggagaacuaaaagcauuaguucaagaaacgguuuugagaugauuugggauccgaacggauggacugggacagacaauaacuucucaauaaagcaagauaucguaggaauaaaugaguggucaggauauagcgggaguuuuguucagcauccagaacuaacagggcuggauuguauaagaccuugcuucuggguugagcuaaucagagggcgacccaaagagaacacaaucuggacuagcgggagcagcauauccuuuugugguguaaacagugacacuguggguuggucuuggccggacggugcugaguugccauuuaccauugacaaguaa

SEQ ID NO: 50737 - RNA, 1410 nt, Artificial Sequence
  derived and/or modified CDS sequence (wt) from neuraminidase__InfluenzaA__ADG42536
augaauccaaaccaaaagauaauaaccauugguucggucuguaugacaauuggaauggcuaacuuaauauuacaaauuggaaacauaaucucaauauggauuagccacucaauucaacuugggaaucaaaaucagauugaaacaugcaaucaaagcgucauuacuuaugaaaacaacacuuggguaaaucagacauauguuaacaucagcaacaccaacuuugcugcuggacagucagugguuuccgugaaauuagcgggcaauuccucucucugcccuguuaguggaugggcuauauacaguaaagacaacaguauaagaaucgguuccaagggggauguguuugucauaagggaaccauucauaucaugcucccccuuggaaugcagaaccuucuucuugacucaaggggccuugcuaaaugacaaacauuccaauggaaccauuaaagacaggagcccauaucgaacccuaaugagcuguccuauuggugaaguucccucuccauacaacucaagauuugagucagucgcuuggucagcaagugcuugucaugauggcaucaauuggcuaacaauuggaauuucuggcccagacaauggggcaguggcuguguuaaaguacaacggcauaauaacagacacuaucaagaguuggagaaacaauauauugagaacacaagagucugaaugugcauguguaaaugguucuugcuuuacuguaaugaccgauggaccaagugauggacaggccucauacaagaucuucagaauagaaaagggaaagauagucaaaucagucgaaaugaaugccccuaauuaucacuaugaggaaugcuccuguuauccugauucuagugaaaucacaugugugugcagggauaacuggcauggcucgaaucgaccgugggugucuuucaaccagaaucuggaauaucagauaggauacauaugcagugggauuuucggagacaauccacgcccuaaugauaagacaggcaguugugguccaguaucgucuaauggagcaaauggaguaaaaggauuuucauucaaauacggcaaugguguuuggauagggagaacuaaaagcauuaguucaagaaacgguuuugagaugauuugggauccgaacggauggacugggacagacaauaacuucucaauaaagcaagauaucguaggaauaaaugaguggucaggauauagcgggaguuuuguccagcauccagaacuaacagggcuggauuguauaagaccuugcuucuggguugaacuaaucagagggcgacccaaagagaacacaaucuggacuagcgggagcagcauauccuuuugugguguaaccagugacacuguggguuggucuuggccagacggugcugaguugccauuuaccauugacaaguaa

SEQ ID NO: 50738 - RNA, 1410 nt, Artificial Sequence
  derived and/or modified CDS sequence (wt) from neuraminidase__InfluenzaA__ADG42546
augaauccaaaccaaaagauaauaaccauugguucggucuguaugacaauuggaauggcuaacuuaauauuacaaauuggaaacauaaucucaauauggauuagccacucaauucaacuuggaaaucaaaaucagauugaaacaugcaaucaaagcgucauuacuuaugaaaacaacacuuggguaaaucagacauauguuaacaucagcaauaccaacuuugcugcuggacagucagugguuuccgugaaauuggcgggcaauuccucucucugcccuguuaguggaugggcuauauacaguaaagacaacaguauaagaaucgguuccaagggggauguguuugucauaagggaaccauucauaucaugcucccccuuggaaugcagaaccuucuucuugacucaaggggccuugcuaaaugacaaacauuccaauggaaccauuaaagacaggagcccauaucgaacccuaaugagcuguccuauuggugaaguucccucuccauacaacucaagauuugagucagucgcuuggucagcaagugcuugucaugauggcaucaauuggcuaacaauuggaauuucuggcccagacaauggggcaguggcuguguuaaaguacaacggcauaauaacagacacuaucaagaguuggagaaacaauauauugagaacacaagagucugaaugugcauguguaaaugguucuugcuuuacuguaaugaccgauggaccaagugauggacaggccucauacaagaucuucagaauagaaaagggaaagauagucaaaucagucgaaaugaaugccccuaauuaucacuaugaggaaugcuccuguuauccugauucuagugaaaucacauguguaugcagggauaacuggcauggcucgaaucgaccgugggugucuuucaaccagaaucuggaauaucagauaggauacauaugcagugggauuuucggagacaauccacgcccuaaugauaagacaggcaguugugguccaguaucgucuaauggagcaaauggaguaaaaggauuuucauucaaauacggcaaugguguuuggauagggagaacuaaaagcauuaguucaagaaacgguuuugagaugauuugggauccgaacggauggacugggacagacaauaacuucucaauaaagcaagauaucguagggauaaaugaguggucaggauauagcgggaguuuuguucagcauccagaacuaacagggcuggauuguauaagaccuugcuucuggguugaacuaaucagagggcgacccaaagagaacacaaucuggacuagcgggagcagcauauccuuuugugguguaaacagugacacuguggguuggucuuggccagacggugcugaguugccauuuaccauugacaaguaa

SEQ ID NO: 50739 - RNA, 1410 nt, Artificial Sequence; identical to SEQ ID NO: 50738
  derived and/or modified CDS sequence (wt) from neuraminidase__InfluenzaA__ADG42556

SEQ ID NO: 50740 - RNA, 1410 nt, Artificial Sequence
  derived and/or modified CDS sequence (wt) from neuraminidase__InfluenzaA__ADG42566
augaauccaaaccaaaagauaauaaccauugguucggucuguaugacaauuggaauggcuaacuuaauauuacaaauuggaaacauaaucucaauauggauuagccacucaauucaacuugggaaucaaaaucagauugaaacaugcaaucaaagcgucauuacuuaugaaaacaacacuuggguaaaucagacauauguuaacaucagcaacaccaacuuugcugcuggacauucagugguuuccgugaaauuagcgggcaauuccucucucugcccuguuaguggaugggcuauauacaguaaagacaacaguauaagaaucgguuccaagggggauguguuugucauaagggaaccauucauaucaugcucccccuuggaaugcagaaccuucuucuugacucaaggggccuugcuaaaugacaaacauuccaauggaaccauuaaagacaggagcccauaucgaacccuaaugagcuguccuauuggugaaguucccucuccauacaacucaagauuugagucagucgcuuggucagcaagugcuugucaugauggcaucaauuggcuaacaauuggaauuucuggcccagacaauggggcaguggcuguguuaaaguacaacggcauaauaacagacacuaucaagaguuggagaaacaauauauugagaacacaagagucugaaugugcauguguaaaugguucuugcuuuacuguaaugaccgauggaccaagugauggacaggccucauacaagaucuucagaauagaaaagggaaagauagucaaaucagucgaaaugaaugccccuaauuaucacuaugaggaaugcuccuguuauccugauucuagugaaaucacaugugugugcagggauaacuggcauggcucgaaucgaccgugggugucuuucaaccagaaucuggaauaucagauaggauacauaugcagugggauuuucggagacaauccacgcccuaaugauaagacaggcaguugugguccaguaucgucuaauggagcaaauggaguaaaaggauuuucauucaaauacggcaaugguguuuggauagggagaacuaaaagcauuaguucaagaaacgguuuugagaugauuugggauccgaacggauggacugggacagacaauaacuucucaauaaagcaagauaucguaggaauaaaugaguggucaggauauagcgggaguuuuguucagcauccagaacuaacagggcuggauuguauaagaccuugcuucuggguugaacuaaucagagggcgacccaaagagaacacaaucuggacuagcgggagcagcauauccuuuugugguguaaacagugacacuguggguuggucuuggccagacggugcugaguugccauuuaccauugacaaguaa

SEQ ID NO: 50741 - RNA, 1410 nt, Artificial Sequence
  derived and/or modified CDS sequence (wt) from neuraminidase__InfluenzaA__ADG42576
augaauccaaaccaaaagauaauaaccauugguucggucuguaugacaauuggaauggcuaacuuaauauuacaaauuggaaacauaaucucaauauggauuagccacucaauucaacuugggaaucaaaaucagauugaaacaugcaaucaaagcgucauuacuuaugaaaacaacacuuggguaaaucagacauauguuaacaucagcaacaccaacuuugcugcuggacagucagugguuuccgugaaauuagcgggcaauuccucucucugcccuguuaguggaugggcuauauacaguaaagacaacaguauaagaaucgguuccaagggggauguguuugucauaagggagccauucauaucaugcucccccuuggaaugcagaaccuucuucuugacucaaggggccuugcuaaaugacaaacauuccaauggaaccauuaaagacaggagcccauaucgaacccuaaugagcuguccuauuggugaaguucccucuccauacaacucaagauuugagucagucgcuuggucagcaagugcuugucaugauggcaucaauuggcuaacaauuggaauuucuggcccauacaauggggcaguggcuguguuaaaguacaacggcauaauaacagacacuaucaagaguuggagaaacaauauauugagaacacaagagucugaaugugcauguguaaaugguucuugcuuuacuguaaugaccgauggaccaagugauggacaggccucauacaagaucuucaaaauagaaaagggaaagauagucaaaucagucgaaaugaaugccccuaauuaucacuaugaggaaugcuccuguuauccugauucuagugaaaucacaugugugugcagggauaacuggcauggcucgaaucgaccguggguaucuuucaaccagaaucuggaauaucagauaggauacauaugcagugggauuuucggagacaauccacgcccuaaugauaagacaggcaguugugguccaguaucgucuaauggagcaaauggaguaaaaggauuuucauucaaauacggcaaugguguuuggauagggagaacuaaaagcauuaguucaagaaaugguuuugagaugauuugggauccgaacggauggacugggacagacaauaacuucucaauaaagcaagauaucguaggaauaaaugaguggucaggauauagcgggaguuuuguucagcauccagaacuaacagggcuggauuguauaagaccuugcuucuggguugaacuaaucagagggcgacccaaagagaacacaaucuggacuagcgggagcagcauauccuuuugugguguaaacagugacacuguggguuggucuuggccggacggugcugaguugccauuuaccauugacaaguaa

SEQ ID NO: 50742 - RNA, 1410 nt, Artificial Sequence; identical to SEQ ID NO: 49215
  derived and/or modified CDS sequence (wt) from neuraminidase__InfluenzaA__ADG42586

SEQ ID NO: 50743 - RNA, 1410 nt, Artificial Sequence
  derived and/or modified CDS sequence (wt) from neuraminidase__InfluenzaA__ADG42606
augaauccaaaccaaaagauaauaaccauugguucggucuguaugacaauuggaauggcuaacuuaauauuacaaauuggaaacauaaucucaauauggauuagccacucaauucaacuugggaaucaaaaucagauugaaacaugcaaucaaagcgucauuacuuaugaaaacaacacuuggguaaaucagacauauguuaacaucagcaacaccaacuuugcugcuggacagucagugguuuccguaaaauuagcgggcaauuccucucucugcccuguuaguggaugggcuauauacaguaaagacaacaguauaagaaucgguuccaagggggauguguuugucauaagggaaccauucauaucaugcuccccuuuggaaugcagaaccuucuucuugacucaaggggccuugcuaaaugacaaacauuccaauggaaccauuaaagacaggagcccauaucgaacccuaaugagcuguccuauuggugaaguucccucuccauacaacucaagauuugagucagucgcuuggucagcaagugcuugucaugauggcaucaauuggcuaacaauuggaauuucuggcccagacaauggggcaguggcuguguuaaaguacaacggcauaauaacagacacuaucaagaguuggagaaacaauauauugagaacacaagagucugaaugugcauguguaaaugguucuugcuuuacuguaaugaccgauggaccaagugauggacaggccucauacaagaucuucagaauagaaaagggaaagauagucaaaucagucgaaaugaaugccccuaauuaucacuaugaggaaugcuccuguuauccugauucuagugaaaucacaugugugugcagggauaacuggcauggcucgaaucgaccguggguauccuucaaccagaaucuggaauaucagauaggauacauaugcagugggauuuucggagacaauccacgcccuaaugauaagacaggcaguugugguccaguaucgucuaauggagcaaauggaguaaaaggauuuucauucaaauacggcaaugguguuuggauagggagaacuaaaagcauuaguucaagaaacgguuuugagaugauuugggauccgaacggauggacugggacagacaauaacuucucaauaaagcaagauaucguaggaauaaaugaguggucaggauauagcgggaguuuuguucagcauccagaacuaacagggcuggauuguauaagaccuugcuucuggguugaacuaaucagagggcgacccaaagagaacacaaucuggacuagcgggagcagcauauccuuuugugguguaaacagugacacuguggguuggucuuggccggacggugcugaguugccauuucccauugacaaguaa

SEQ ID NO: 50744 - RNA, 1410 nt, Artificial Sequence
  derived and/or modified CDS sequence (wt) from neuraminidase__InfluenzaA__ADG42616
augaauucaaaccaaaagauaauaaccauugguucggucuguaugacaauuggaauggcuaacuuaauauuacaaauuggaaacauaaucucaauauggauuagccacucaauucaacuugggaaucaaaaucagauugaaacaugcaaucaaagcgucauuacuuaugaaaacaacacuuggguaaaucagacauauguuaacaucagcaacaccaacuuugcugcuggacagucagugguuuccgugaaauuagcgggcaauuccucucucugcccuguuaguggaugggcuauauacaguaaagacaacaguauaagaaucgguuccaagggggauguguuugucauaagggaaccauucauaucgugcucccccuuggaaugcagaaccuucuucuugacucaaggggccuugcuaaaugacaaacauuccaauggaaccauuaaagacaggagcccauaucgaacccuaaugagcuguccuauuggugaaguucccucuccauacaacucaagauuugagucagucgcuuggucagcaagugcuugucaugauggcaucaauuggcuaacaauuggaauuucuggcccagacaauggggcaguggcuguguuaaaguacaacggcauaauaacagacacuaucaagaguuggagaaacaauauauugagaacacaagagucugaaugugcauguguaaaugguucuugcuucacuguaaugaccgauggaccaagugauggacaggccucauacaagaucuucagaauagaaaagggaaagauagucaaaucagucgaaaugaaugccccuaauuaucacuaugaggaaugcuccuguuauccugauucuagugaaaucacaugugugugcagggauaacuggcauggcucgaaucgaccguggguaucuuucaaccagaaucuggaauaucagauaggauacauaugcagugggauuuucggagacaauccacgcccuaaugauaagacaggcaguugugguccaguaucgucuaauggagcaaauggaguaaaaggauuuucauucaaauacggcaaugguguuuggauagggagaacuaaaagcauuaguucaagaaacgguuuugagaugauuugggauccgaacggauggacugggacagacaauaacuucucaauaaagcaagauaucguaggaauaaaugaguggucaggauauagcgggaguuuuguucagcauccagaacuaacagggcuggauuguauaagaccuugcuucuggguugaacuaaucagagggcgacccaaagagaacacaaucuggacuagcgggagcagcauauccuuuugugguguaaacagugacacuguggguuggucuuggccggacggugcugaguugccauuuaccauugacaaguaa

SEQ ID NO: 50745 - RNA, 1410 nt, Artificial Sequence; identical to SEQ ID NO: 50179
  derived and/or modified CDS sequence (wt) from neuraminidase__InfluenzaA__ADG42626

SEQ ID NO: 50746 - RNA, 1410 nt, Artificial Sequence
  derived and/or modified CDS sequence (wt) from neuraminidase__InfluenzaA__ADG42636
augaauccaaaccaaaagauaauaaccauugguucggucuguaugacaauuggaauggcuaacuuaauauuacaaauuggaaacauaaucucaauauggauuagccacucaauucaacuugggaaucagaaucagacugaaacaugcaaucaaagcgucauuacuuaugaaaacaacacuuggguaaaucagacauauguuaacaucagcaacaccaacuuugcugcuggacagucagugguuuccgugaaauuagcgggcaauuccucucucugcccuguuaguggaugggcuauauacaguaaagacaacaguauaagaaucgguuccaagggggauguguuugucauaagggaaccauucauaucaugcucccccuuggaaugcagaaccuucuucuugacucaaggggccuugcuaaaugacaaacauuccaauggaaccauuaaagacaggagcccauaucgaacccuaaugagcuguccuauuggugaaguucccucuccauacaacucaagauuugagucagucgcuuggucagcaagugcuugucaugauggcaucaauuggcuaacaauuggaauuucuggcccagacaauggggcaguggcuguguuaaaguacaacggcauaauaacagacacuaucaagaguuggagaaacaauauauugagaacacaagagucugaaugugcauguguaaaugguucuugcuuuacuguaaugaccgauggaccaagugauggacaggccucauacaagaucuucagaauagaaaagggaaagauagucaaaucagucgaaaugaaugccccuaauuaucacuaugaggaaugcuccuguuauccugauucuagugaaaucacaugugugugcagggauaacuggcauggcucgaaucgaccgugggugucuuucaaccagaaucuggaauaucagauaggauacauaugcagugggauuuucggagacaauccacgcccuaaugauaagacaggcaguugugguccaguaucgucuaauggagcaaauggaguaaaaggauuuucauucaaauacggcaaugguguuuggauagggagaacuaaaagcauuaguucaagaaacgguuuugagaugauuugggauccgaacggauggacugggacagacaauaacuucucaauaaagcaagauaucguaggaauaaaugaguggucaggauauagcgggaguuuuguucagcauccagaacuaacagggcuggauuguauaagaccuugcuucuggguugaacuaaucagagggcgacccaaagagaacacaaucuggacuagcgggagcagcauauccuuuugugguguaaacagugacacuguggguuggucuuggccagacggugcugaguugccauuuaccauugacaaguaa

SEQ ID NO: 50747 - RNA, 1410 nt, Artificial Sequence
  derived and/or modified CDS sequence (wt) from neuraminidase__InfluenzaA__ADG42646
augaauccaaaccaaaggauaauaaccauugguucgguauguaugacaauuggaauggcuaacuuaauauuacaaauuggaaacauaaucucaauauggauuagccacucaauucaacuugggaaucaaaaucagauugaaacaugcaaucaaagcgucauuacuuaugaaaacaacacuuggguaaaucagacauauguuaacaucagcaacaccaacuuugcugcuggacagucagugguuuccgugaaauuagcgggcaauuccucucucugcccuguuaguggaugggcuauauacaguaaagacaacaguauaagaaucgguuccaagggggauguguuugucauaagggaaccauucauaucaugcucccccuuggaaugcagaaccuucuucuugacucaaggggccuugcuaaaugacaaacauuccaauggaaccauuaaagacaggagcccauaucgaacccuaaugagcuguccuauuggugaaguacccucuccauacaacucaagauuugagucagucgcuuggucagcaagugcuugucaugauggcaucaauuggcuaacaauuggaauuucuggcccagacaauggggcaguggcuguguuaaaguacaacggcauaauaacagacacuaucaagaguuggagaaacaauauauugagaacacaagagucugaaugugcauguguaaaugguucuugcuuuacuguaaugaccgauggaccaagugauggacaggccucauacaagaucuucagaauagaaaagggaaagauagucaaaucagucgaaaugaaugccccuaauuaucacuaugaggaaugcuccuguuauccugauucuagugaaaucacaugugugugcagggauaacuggcauggcucgaaucgaccgugggugucuuucaaccagaaucuggaauaucagauaggauacauaugcagugggauuuucggagacaauccacgcccuaaugauaagacaggcaguugugguccaguaucgucuaauggagcaaauggaguaaaaggauuuucauucaaauacggcaaugguguuuggauagggagaacuaaaagcauuaguucaagaaacgguuuugagaugauuugggauccgaacggauggacugggacagacaauaacuucucaauaaagcaagauaucguaggaauaaaugaguggucaggauauagcgggaguuuuguucagcauccagaacuaacagggcuggauuguauaagaccuugcuucuggguugaacuaaucagagggcgacccaaagagaacacaaucuggacuagcgggagcagcauauccuuuugugguguaaacagugacacuguggguuggucuuggccagacggugcugaguugccauuuaccauugacaaguaa

SEQ ID NO: 50748 - RNA, 1410 nt, Artificial Sequence; identical to SEQ ID NO: 50104
  derived and/or modified CDS sequence (wt) from neuraminidase__InfluenzaA__ADG42656

SEQ ID NO: 50749 - RNA, 1410 nt, Artificial Sequence
  derived and/or modified CDS sequence (wt) from neuraminidase__InfluenzaA__ADG42666
augaauccaaaccaaaagauaauaaccauugguucggucuguaugacaauuggaauggcuaacuuaauauuacaaauuggaaacauaaucucaauauggauuagccacucaauucaacuugggaaucaaaaucagauugaaacaugcaaucaaagcaucauuacuuaugaaaacaacacuuggguaaaucaaacauauguuaacaucagcaacaccaacuuugcugcuggacagucagugguuuccgugaaauuggcgggcaauuccucucucugcccuguuaguggaugggcuauauacaguaaagacaacaguauaagaaucgguuccaagggggauguguuugucauaagggaaccauucauaucaugcucccccuuggaaugcagaaccuucuucuugacucaaggggccuugcuaaaugacaaacauuccaauggaaccauuaaagacaggagcccauaucgaacccuaaugagcuguccuauuggugaaguucccucuccauacaacucaagauuugagucagucgcuuggucagcaagugcuugucaugauggcaucaauuggcuaacaauuggaauuucuggcccagacaauggggcaguggcuguguuaaaguacaacggcauaauaacagacacuaucaagaguuggagaaacaauauauugagaacacaagagucagaaugugcauguguaaaugguucuugcuuuacuguaaugaccgauggaccaagugauggacaggccucauacaagaucuucagaauagaaaagggaaagauagucaaaucagucgaaaugaaugccccuaauuaucacuaugaggaaugcuccuguuauccugauucuagugaaaucacaugugugugcagggauaacuggcauggcucgaaucgaccgugggugucuuucaaccagaaucuggaauaucagauaggauacauaugcagugggauuuucggagacaauccacgcccuaaugauaagacaggcaguugugguccaguaucgucuaauggagcaaauggaguaaaaggauuuucauucaaauacggcaaugguguuuggauagggagaacuaaaagcauuaguucaagaaacgguuuugagaugauuugggauccgaacggauggacugggacagacaauaacuucucaauaaagcaagauaucguaggaauaaaugaauggucaggauauagcgggaguuuuguucagcauccagaacuaacagggcuggauuguauaagaccuugcuucuggguugaacuaaucagagggcgacccaaagagaacacaaucuggacuagcgggagcagcauauccuuuugugguguaaacagugacacuguggguuggucuuggccagacggugcugaguugccauuuaccauugacaaguaa

SEQ ID NO: 50750 - RNA, 1410 nt, Artificial Sequence
  derived and/or modified CDS sequence (wt) from neuraminidase__InfluenzaA__ADG42676
augaauccaaaccaaaagauaauaaccauugguucggucuguaugacaauuggaauggcuaacuuaauauuacaaauuggaaacauaaucucaauauggauuagccacucaauucaacuugggaaucaaaaucagauugaaauaugcaaucaaagcgucauuacuuaugaaaacaacacuuggguaaaucagacauauguuaacaucagcaacaccaacuuugcugcuggacagucagugguuuccgugaaauuagcgggcaauuccucucucugcccuguuaguggaugggcuauauacaguaaagacaacaguauaagaaucgguuccaagggggauguguuugucauaagggaaccauucauaucaugcucccccuuggaaugcagaaccuucuucuugacucaaggggccuugcuaaaugacaaacauuccaauggaaccauuaaagacaggagcccauaucgaacccuaaugagcuguccuauuggugaaguucccucuccauacaacucaagauuugagucagucgcuuggucagcaagugcuugucaugauggcaucaauuggcuaacaauuggaauuucuggcccagacaauggggcaguggcuguguuaaaguacaacggcauaauaacagacacuaucaagaguuggagaaacaauauauugagaacacaagagucugaaugugcauguguaaaugguucuugcuuuacuguaaugaccgauggaccaagugauggacaggccucauacaagaucuucagaauagaaaagggaaagauagucaaaucagucgaaaugaaugccccuaauuaucacuaugaggaaugcuccuguuauccugauucuagugaaaucacaugugugugcagggauaacuggcauggcucgaaucgaccgugggugucuuucaaccagaaucuggaauaucagauaggauacauaugcagugggauuuucggagacaauccacgcccuaaugauaagacaggcaguugugguccaguaucgucuaauggagcaaauggaguaaaaggauuuucauucaaauacggcaaugguguuuggauagggagaacuaaaagcauuaguucaagaaacgguuuugagaugauuugggauccgaacggauggacugggacagacaauaacuucucaauaaagcaagauaucguaggaauaaaugaguggucaggauauagcgggaguuuuguucagcauccagaacuaacagggcuggauuguauaagaccuugcuucuggguugaacuaaucagagggcgacccaaagagaacacaaucuggacuagcgggagcagcauauccuuuugugguguaaacagugacacuguggguuggucuuggccagacggugcugaguugccauuuaccauugacaaguaa

SEQ ID NO: 50751 - RNA, 1410 nt, Artificial Sequence; identical to SEQ ID NO: 48750
  derived and/or modified CDS sequence (wt) from neuraminidase__InfluenzaA__ADG42686

SEQ ID NO: 50752 - RNA, 1410 nt, Artificial Sequence; identical to SEQ ID NO: 50327
  derived and/or modified CDS sequence (wt) from neuraminidase__InfluenzaA__ADG42696

SEQ ID NO: 50753 - RNA, 1410 nt, Artificial Sequence; identical to SEQ ID NO: 50634
  derived and/or modified CDS sequence (wt) from neuraminidase__InfluenzaA__ADG42706

SEQ ID NO: 50754 - RNA, 1410 nt, Artificial Sequence; identical to SEQ ID NO: 48750
  derived and/or modified CDS sequence (wt) from neuraminidase__InfluenzaA__ADG42716

SEQ ID NO: 50755 - RNA, 1410 nt, Artificial Sequence
  derived and/or modified CDS sequence (wt) from neuraminidase__InfluenzaA__ADG42726
augaauccaaaccaaaagauaauaaccauugguucggucuguaugacaauuggaauggcuaacuuaauauuacaaauuggaaacauaaucucaauauggauuagccacucaauucaacuugggaaucaaaaucagauugaaacaugcaaucaaagcgucauuacuuaugaaaacaacacuuggguaaaucagacauauguuaacaucagcaacaccaacuuugcugcuggacagucagugguuuccgugaaauuagcgggcaauuccucucucugcccuguuaguggaugggcuauauacaguaaagacaacaguauaagaaucgguuccaagggggauguguuugucauaagggaaccauucauaucaugcucccccuuggaaugcagaaccuucuucuugacucaaggggccuugcuaaaugacaaacauuccaauggaaccauuaaagacaggagcccauaucgaacccuaaugagcuguccuauuggugaaguucccucuccauacaacucaagauuugagucagucgcuuggucagcaagugcuugucaugauggcaucaauuggcuaacaauuggaauuucuggcccagacaauggggcaguggcuguguuaaaguacaacggcauaauaacagacacuaucaagaguuggagaaacaauauauugagaacacaagagucugaaugugcaugcguaaaugguucuugcuuuacuguaaugaccgauggaccaagugauggacaggccucauacaagaucuucagaauagaaaagggaaagauagucaaaucagucgaaaugaaugccccuaauuaucacuaugaggaaugcuccuguuauccugauucuagugaaaucacaugugugugcagggauaacuggcauggcucgaaucgaccgugggugucuuucaaccagaaucuggaauaucagauaggauacauaugcagugggauuuucggagacaauccacgcccuaaugauaagaaaggcaguugugguccaguaucgucuaauggagcaaauggaguaaaaggauuuucauucaaauacggcaaugguguuuggauagggagaacuaaaagcauuaguucaagaaacgguuuugagaugauuugggauccgaacggauggacugggacagacaauaacuucucaauaaagcaagauaucguaggaauaaaugaauggucaggauauagcgggaguuuuguucagcauccagaacuaacagggcuggauuguauaagaccuugcuucuggguugaacuaaucagagggcgacccaaagagaacacaaucuggacuagcgggagcagcauauccuuuugugguguaaacagugacacuguggguuggucuuggccagacggugcugaguugccauuuaccauugacaaguaa

SEQ ID NO: 50756 - RNA, 1410 nt, Artificial Sequence; identical to SEQ ID NO: 50661
  derived and/or modified CDS sequence (wt) from neuraminidase__InfluenzaA__ADG42746

SEQ ID NO: 50757 - RNA, 1410 nt, Artificial Sequence; identical to SEQ ID NO: 50263
  derived and/or modified CDS sequence (wt) from neuraminidase__InfluenzaA__ADG42756

SEQ ID NO: 50758 - RNA, 1410 nt, Artificial Sequence; identical to SEQ ID NO: 50038
  derived and/or modified CDS sequence (wt) from neuraminidase__InfluenzaA__ADG42766

SEQ ID NO: 50759 - RNA, 1410 nt, Artificial Sequence
  derived and/or modified CDS sequence (wt) from neuraminidase__InfluenzaA__ADG42776
augaauccaaaccaaaagauaauaaccauugguucggucuguaugacaauuggaauggcuaacuuaauauuacaaauuggaaacauaaucucaauauggauuagccacucaauucaacuugggaaucaaaaucagauugaaacaugcaaucaaagcgucauuacuuaugaaaacaacacuuggguaaaucagacauauguuaacaucagcaacaccaacuuugcugcuggacagucagugguuuccgugaaauuagcgggcaauuccucucucugcccuguuaguggaugggcuauauacaguaaagacaacaguauaagaaucgguuccaagggggauguguuugucauaagggaaccauucauaucaugcucccccuuggaaugcagaaccuucuucuugacucaaggggccuugcuaaaugacaaacauuccaauggaaccauuaaagacaggagcccauaucgaacccuaaugagcuguccuauuggugaaguucccucuccauacaacucaagauuugagucagucgcuuggucagcaagugcuugucaugauggcaucaauuggcuaacaauuggaauuucuggcccagacaauggggcaguggcuguguuaaaguacaacggcauaauaacagacacuaucaagaguuggagaaacaauauauugagaacacaagagucugaaugugcauguguaaaugguucuugcuuuacuguaaugaccgauggaccaagugauggacaggccucauacaagaucuucagaauagaaaagggaaagauagucaaaucagucgaaaugaaugccccuaauuaucacuaugaggaaugcuccuguuauccugauucuagugaaaucacaugugugugcagggauaacuggcauggcucgaaucgaccgugggugucuuucaaccagaaucuggaauaucagauaggauacauaugcagugggauuuucggagacaauccacgcccuaaugauaagaaaggcaguugugguccaguaucgucuaauggagcaaauggaguaaaaggauuuucauucaaauacggcaaugguguuuggauagggagaaccaaaagcauuaguucaagaaacgguuuugagaugauuugggauccgaacggauggacugggacagacaauaacuucucaauaaagcaagauaucguaggaauaaaugaauggucaggauauagcgggaguuuuguucagcauccagaacuaacagggcuggauuguauaagaccuugcuucuggguugaacuaaucagagggcgacccaaagagaacacaaucuggacuagcgggagcagcauauccuuuugugguguaaacagugacacuguggguuggucuuggccagacggugcugaguugccauuuaccauugacaaguaa

SEQ ID NO: 50760 - RNA, 1410 nt, Artificial Sequence; identical to SEQ ID NO: 50759
  derived and/or modified CDS sequence (wt) from neuraminidase__InfluenzaA__ADG42796

SEQ ID NO: 50761 - RNA, 1410 nt, Artificial Sequence
  derived and/or modified CDS sequence (wt) from neuraminidase__InfluenzaA__ADG42806
augaauccaaaccaaaagauaauaaccauugguucggucuguaugacaauuggaauggcuaacuuaauauuacaaauuggaaacauaaucucaauauggauuagccacucaauucaacuugggaaucaaaaucagauugaaacaugcaaucaaagcgucauuacuuaugaaaacaacacuuggguaaaucagacauauguuaacaucagcaacaccaacuuugcugcuggacagucagugguuuccgugaaauuagcgggcaauuccucucucugcccuguuaguggaugggcuauauacaguaaagacaacaguauaagaaucgguuccaagggggauguguuugucauaagggaaccauucauaucaugcucccccuuggaaugcagaaccuucuucuugacucaaggggccuugcuaaaugacaaacauuccaauggaaccauuaaagacaggagcccauaucgaacccuaaugagcuguccuauuggugaaguucccucuccauacaacucaagauuugagucagucgcuuggucagcaagugcuugucaugauggcaucaauuggcuaacaauuggaauuucuggcccagacaauggggcaguggcuguguuaaaguacaacggcauaauaacagacacuaucaagaguuggagaaacaauauauugagaacacaagagucugaaugugcauguguaaaugguucuugcuuuacuguaaugaccgauggaccaagugauggacaggccucauacaagaucuucagaauagaaaagggaaagauagucaaaucagucgaaaugaaugccccuaauuaucacuaugaggaaugcuccuguuauccugauucuagugaaaucacaugugugugcagggauaacuggcauggcucgaaucgaccgugggugucuuucaaccagaaucuggaauaucagauaggauacauaugcagugggauuuucggagacaauccacgcccuaaugauaagacaggcaguugugguccaguaucgucuaauggagcaaauggaguaaaaggauuuucauucaaauacggcaaugguguuuggauagggagaacuaaaagcauuaguucaagaaacgguuuugagaugauuugggauccgaacggauggacugggacagacaauaacuucucaauaaagcaagauaucguaggaauaaaugaauggucaggauauagcgggaguuuuguucagcauccagaacuaacagggcuggauuguauaagaccuugcuucuggguugaacuaaucagagggcgacccaaagagaacacaaucuggacuagcgggagcagcauauccuuuugugguguaaacagugacacugugaguuggucuuggccagacggugcugaguugccauuuaccauugacaaguaa

SEQ ID NO: 50762 - RNA, 1410 nt, Artificial Sequence; identical to SEQ ID NO: 48750
  derived and/or modified CDS sequence (wt) from neuraminidase__InfluenzaA__ADG42816

SEQ ID NO: 50763 - RNA, 1410 nt, Artificial Sequence
  derived and/or modified CDS sequence (wt) from neuraminidase__InfluenzaA__ADG42826
augaauccaaaccaaaagauaauaaccauugguucggucuguaugacaauuggaauggcuaacuuaauauuacaaauuggaaacauaaucucaauauggauuagccacucaauucaacuugggaaucaaaaucagauugaaacaugcaaucaaagcgucauuacuuaugaaaacaacacuuggguaaaucagacauauguuaacaucagcaacaccaacuuugcugcuggacagucagugguuuccgugaaauuagcgggcaauuccucucucugcccuguuaguggaugggcuauauacaguaaagacaacaguauaagaaucgguuccaagggggauguguuugucauaagggaaccauucauaucaugcucccccuuggaaugcagaaccuucuuccugacucaaggggccuugcuaaaugacaaacauuccaauggaaccauuaaagacaggagcccauaucgaacccuaaugagcuguccuauuggugaaguucccucuccauacaacucaagauuugagucagucgcuuggucagcaagugcuugucaugauggcaucaauuggcuaacaauuggaauuucuggcccagacaauggggcaguggcuguguuaaaguacaacggcauaauaacagacacuaucaagaguuggagaaacaauauauugagaacacaagagucugaaugugcauguguaaaugguucuugcuuuacuguaaugaccgauggaccaagugauggacaggccucauacaagaucuucagaauagaaaagggaaagauagucaaaucagucgaaaugaaugccccuaauuaucacuaugaggaaugcuccuguuauccugauucuagugaaaucacaugugugugcagggauaacuggcauggcucgaaucgaccgugggugucuuucaaccagaaucuggaauaucagauaggauacauaugcagugggauuuucggagacaauccacgcccuaaugauaagacaggcaguugugguccaguaucgucuaauggagcaaauggaguaaaaggauuuucauucaaauacggcaaugguguuuggauagggagaacuaaaagcauuaguucaagaaacgguuuugagaugauuugggauccgaacggauggacugggacagacaauaacuucucaauaaagcaagauaucguaggaauaaaugaguggucaggauauagcgggaguuuuguucagcauccagaacuaacagggcuggacuguauaagaccuugcuucuggguugaacuaaucagagggcgacccaaagagaacacaaucuggacuagcgggagcagcauaucuuuuugugguguaaacagugacacuguggguuggucuuggccagacggugcugaguugccauuuaccauugacaaguaa

SEQ ID NO: 50764 - RNA, 1410 nt, Artificial Sequence
  derived and/or modified CDS sequence (wt) from neuraminidase__InfluenzaA__ADG42836
augaauccaaaccaaaagauaauaaccauugguucggucuguaugacaauuggaauggcuaacuuaauauuacaaauuggaaacauaaucucaauauggauuagccacucaauucaacuugggaaucaaaaucagauugaaacaugcaaucaaagcgucauuacuuaugaaaacaacacuuggguaaaucagacauauguuaacaucagcaacaccaacuuugcugcuggacagucagugguuuccgugaaauuagcgggcaauuccucucucugcccuguuaguggaugggcuauauacaguaaagacaacaguauaagaaucgguuccaagggggauguguuugucauaagggaaccauucauaucaugcucccccuuggaaugcagaaccuucuucuugacucaaggggccuugcuaaaugacaaacauuccaauggaaccauuaaagacaggagcccauaucgaacccuaaugagcuguccuauuggugaaguucccucuccauacaacucaagauuugagucagucgcuuggucagcaagugcuugucaugauggcaucaauuggcuaacaauuggaauuucuggcccagacaauggggcaguggcuguguuaaaguacaacggcauaauaacagacacuaucaagaguuggagaaacaauauauugagaacacaagagucugaaugugcauguguaaaugguucuugcuuuacuguaaugaccgauggaccaagugauggacaggccucauacaagaucuucagaauagaaaagggaaagauagucaaaucagucgaaaugaaugccccuaauuaucacuaugaggaaugcuccuguuauccugauucuagugaaaucacaugugugugcagggauaacuggcauggcucgaaucgaccgugggugucuuucaaccagaaucuggaauaucagauaggauacauaugcagugggauuuucggagacaauccacgcccuaaugauaagacaggcaguugugguccaguaucgucuaauggagcaaauggaguaaaaggauuuucauucaaauacggcaaugguguuuggauagggagaacuaaaagcauuaguucaagaaacgguuuugaaaugauuugggauccgaacggauggacugggacagacaauaacuucucaauaaagcaagauaucguaggaauaaaugaguggucaggauauagcgggaguuuuguucagcauccagaacuaacagggcuggauuguauaagaccuugcuucuggguugaacuaaucagagggcgacccaaagagaacacaaucuggacuagcgggagcagcauauccuuuugugguguaaacagugacacuguggguuggucuuggccagacggugcugaguugccauuuaccauugacaaguaa

SEQ ID NO: 50765 - RNA, 1410 nt, Artificial Sequence
  derived and/or modified CDS sequence (wt) from neuraminidase__InfluenzaA__ADG42846
augaauccaaaccaaaagauaauaaccauugguucggucuguaugacaauuggaauggcuaacuuaauauuacaaauuggaaacauaaucucaauauggauuagccacacaauucaacuugggaaucaaaaucagauugaaacaugcaaucaaagcgucauuacuuaugaaaacaacacuuggguaaaucagacauauguuaacaucagcaacaccaacuuugcugcuggacagucagugguuuccgugaaauuagcgggcaauuccucucucugcccuguuaguggaugggcuauauacaguaaagacaacaguauaagaaucgguuccaagggggauguguuugucauaagggaaccauucauaucaugcucccccuuggaaugcagaaccuucuucuugacucaaggggccuugcuaaaugacaaacauuccaauggaaccauuaaagacaggagcccauaucgaacccuaaugagcuguccuauuggugaaguucccucuccauacaacucaagauuugagucagucgcuuggucagcaagugcuugucaugauggcaucaauuggcuaacaauuggaauuucuggcccagacaauggggcaguggcuguguuaaaguacaacggcauaauaacagacacuaucaagaguuggagaaacaauauauugagaacacaagagucugaaugugcauguguaaaugguucuugcuuuacuguaaugaccgauggaccaagugauggacaggccucauacaagaucuucagaauagaaaagggaaagauagucaaaucagucgaaaugaaugccccuaauuaucacuaugaggaaugcuccuguuauccugauucuagugaaaucacaugugugugcagggauaacuggcauggcucgaaucgaccgugggugucuuucaaccagaaucuggaauaucagauaggauacauaugcagugggauuuucggagacaauccacgcccuaaugauaagacaggcaguugugguccaguaucgucuaauggagcaaauggaguaaaaggauuuucauucaaauacggcaaugguguuuggauagggagaacuaaaagcauuaguucaagaaacgguuuugagaugauuugggauccgaacggauggacugggacagacaauaacuucucaauaaagcaagauaucguaggaauaaaugaauggucaggauauagcgggaguuuuguucagcauccagaacuaacagggcuggauuguauaagaccuugcuucuggguugaacuaaucagagggcgacccaaagagaacacaaucuggacuagcgggagcagcauauccuuuugugguguaaacagugacacuguggguuggucuuggccagacggugcugaguugccauuuaccauugacaaguaa

SEQ ID NO: 50766 - RNA, 1410 nt, Artificial Sequence
  derived and/or modified CDS sequence (wt) from neuraminidase__InfluenzaA__ADG42856
augaauccaaaccaaaagauaauaaccauugguucggucuguaugacaauuggaauggcuaacuuaauauuacaaauuggaaacauaaucucaauauggauuagccacucaauucaacuugggaaucaaaaucagauugaaacaugcaaucaaagcgucauuacuuaugaaaacaacacuuggguaaaucagacauauguuaacaucagcaacaccaacuuugcugcuggacagucagugguuuccgugaaauuagcgggcaauuccucucucugcccuguuaguggaugggcuauauacaguaaagacaacaguauaagaaucgguuccaagggggauguguuugucauaagggaaccauucauaucaugcucccccuuggaaugcagaaccuucuucuugacccaaggggccuugcuaaaugacaaacauuccaauggaaccauuaaagacaggagcccauaucgaacccuaaugagcuguccuauuggugaaguucccucuccauacaacucaagauuugagucagucgcuuggucagcaagugcuugucaugauggcaucaauuggcuaacaauuggaauuucuggcccagacaauggggcaguggcuguguuaaaguacaacggcauaauaacagacacuaucaagaguuggagaaacaauauauugagaacacaagagucugaaugugcauguguaaaugguucuugcuuuacuguaaugaccgauggaccaagugauggacaggccucauacaagaucuucagaauagaaaagggaaagauagucaaaucagucgaaaugaaugccccuaauuaucacuaugaggaaugcuccuguuauccugauucuagugaaaucacaugugugugcagggauaacuggcauggcucgaaucgaccgugggugucuuucaaccagaaucuggaauaucagauaggauacauaugcagugggauuuucggagacaauccacgcccuaaugauaagacaggcaguugugguccaguaucgucuaauggagcaaauggaguaaaaggauuuucauucaaauacggcaaugguguuuggauagggagaacuaaaagcauuaguucaagaaacgguuuugagaugauuugggauccgaacggauggacugggacagacaauaacuucucaauaaagcaagauaucguaggaauaaaugaauggucaggauauagcgggaguuuuguucagcauccagaacuaacagggcuggauuguauaagaccuugcuucuggguugaacuaaucagagggcgacccaaagagaacacaaucuggacuagcgggagcagcauauccuuuugugguguaaacagugacacuguggguuggucuuggccagacggugcugaguugccauuuaccauugacaaguaa

SEQ ID NO: 50767 - RNA, 1410 nt, Artificial Sequence; identical to SEQ ID NO: 50362
  derived and/or modified CDS sequence (wt) from neuraminidase__InfluenzaA__ADG42866

SEQ ID NO: 50768 - RNA, 1410 nt, Artificial Sequence; identical to SEQ ID NO: 48750
  derived and/or modified CDS sequence (wt) from neuraminidase__InfluenzaA__ADG42876

SEQ ID NO: 50769 - RNA, 1410 nt, Artificial Sequence; identical to SEQ ID NO: 50399
  derived and/or modified CDS sequence (wt) from neuraminidase__InfluenzaA__ADG42886

SEQ ID NO: 50770 - RNA, 1410 nt, Artificial Sequence; identical to SEQ ID NO: 50386
  derived and/or modified CDS sequence (wt) from neuraminidase__InfluenzaA__ADG42896

SEQ ID NO: 50771 - RNA, 1410 nt, Artificial Sequence
  derived and/or modified CDS sequence (wt) from neuraminidase__InfluenzaA__ADG42906
augaauccaaaccaaaagauaauaaccauugguucggucuguaugacaauuggaauggcuaacuuaauauuacaaauuggaaacauaaucucaauauggauuagccacucaauucaacuugggaaucaaaaucagauugaaacaugcaaucaaagcgucauuacuuaugaaaacaacacuuggguaaaucagacauauguuaacaucagcaacaccaacuuugcugcuggacagucagugguuuccgugaaauuagcgggcaauuccucucucugcccuguuaguggaugggcuauauacaguaaagacaacaguauaagaaucgguuccaaaggggauguguuugucauaagggaaccauucauaucaugcucccccuuggaaugcagaaccuucuucuugacucaaggggccuugcuaaaugacaaacauuccaauggaaccauuaaagacaggagcucauaucgaacccuaaugagcuguccuauuggugaaguucccucuccauacaacucaagauuugagucagucgcuuggucagcaagugcuugucaugauggcaucaauuggcuaacaauuggaauuucuggcccagacaauggggcaguggcuguguuaaaguacaacggcauaauaacagacacuaucaagaguuggagaaacaauauauugagaacacaagagucugaaugugcauguguaaaugguucuuguuuuacuguaaugaccgauggaccaagugauggacaggccucauacaagaucuucagaauagaaaagggaaagauagucaaaucagucgaaaugaaugccccuaauuaucacuaugaggaaugcuccuguuauccugauucuagugaaaucacaugugugugcagggauaacuggcauggcucgaaucgaccgugggugucuuucaaccagaaucuggaauaucagauaggauacauaugcagugggauuuucggagacaauccacgcccuaaugauaagacaggcaguugugguccaguaucgucuaauggagcaaauggaguaaaaggauuuucauucaaauauggcaaugguguuuggauagggagaacuaaaagcauuaguucaagaaacgguuuugagaugauuugggauccgaacggauggacugggacagacaauaacuucucaauaaagcaagauaucguaggaauaaaugaguggucaggauauagcgggaguuuuguucagcauccagaacuaacagggcuggauuguauaagaccuugcuucuggguugaacuaaucagagggcgacccaaagagaacacaaucuggacuagcgggagcagcauauccuuuugugguguaaacagugacacuguggguuggucuuggccagacggugcugaguugccauuuaccauugacaaguaa

SEQ ID NO: 50772 - RNA, 1410 nt, Artificial Sequence; identical to SEQ ID NO: 49794
  derived and/or modified CDS sequence (wt) from neuraminidase__InfluenzaA__ADG42916

SEQ ID NO: 50773 - RNA, 1410 nt, Artificial Sequence; identical to SEQ ID NO: 48947
  derived and/or modified CDS sequence (wt) from neuraminidase__InfluenzaA__ADG42926

SEQ ID NO: 50774 - RNA, 1410 nt, Artificial Sequence
  derived and/or modified CDS sequence (wt) from neuraminidase__InfluenzaA__ADG58909
augaauccaaaccaaaagauaauaaccauugguucggucuguaugacaauuggaauggcuaacuuaauauuacaaauuggaaacauaaucucaauauggauuagccacucaauucaacuugggaaucaaaaucagauugaaacaugcaaucaaagcgucauuacuuaugaaaacaacacuuggguaaaucagacauauguuaacaucagcaacaccaacuuugcugcuggacagucagugguuuccgugaaauuagcgggcaauuccucucucugcccuguuaguggaugggcuauauacaguaaagacaacaguauaagaaucgguuccaagggggauguguuugucauaagggaaccauucauaucaugcucccccuuggaaugcagaaccuucuucuugacucaaggggccuugcuaaaugacaaacauuccaauggaaccauuaaagacaggagcccauaucgaacccuaaugagcuguccuauuggugaaguucccucuccauacaacucaagauuugagucagucgcuuggucagcaagugcuugucaugauggcaucaauuggcuaacaauuggaauuucuggcccagacaauggggcaguggcuguguuaaaguacaacggcauaauaacagacacuaucaagaguuggagaaacaauauauugagaacacaagagucugaaugugcauguguaaaugguucuugcuuuacuguaaugaccgauggaccaagugauggacaggccucauacaagaucuucagaauagaaaagggaaagauagucaaaucagucgaaaugaaugccccuaauuaucacuaugaggaaugcuccuguuauccugauucuagugaaaucacaugugugugcagggauaacuggcauggcucgaaucgaccgugggugucuuucaaccagaaucuggaauaucagauaggauacauaugcagugggauuuucggagacaauccacgcccuaaugauaagacaggcaguugugguccaguaucaucuaauggagcaaauggaguaaaaggauuuucauucaaauacggcaaugguguuuggauagggagaacuaaaagcauuaguucaagaaacgguuuugagaugauuugggauccgaacggauggacugggacagacaauaacuucucaauaaagcaagauaucguaggaauaaaugaguggucaggauauagcgggaguuuuguucagcauccagaacuaacagggcuggauuguauaagaccuugcuucuggguugaacuaaucagagggcgacccaaagagaacacaaucuggacuagcgggagcagcauauccuuuugugguguaaacagugacacuguggguuggucuuggccagacggugcugaguugccauuuaccauugacaaguaa

SEQ ID NO: 50775 - RNA, 1410 nt, Artificial Sequence; identical to SEQ ID NO: 48750
  derived and/or modified CDS sequence (wt) from neuraminidase__InfluenzaA__ADG58910

SEQ ID NO: 50776 - RNA, 1410 nt, Artificial Sequence
  derived and/or modified CDS sequence (wt) from neuraminidase__InfluenzaA__ADG58913
augaauccaaaccaaaagauaauaaccauugguucggucuguaugacaauuggaauggcuaacuuaauauuacaaauuggaaacauaaucucaauauggauuagccacucaauucaacuugggaaucaaaaucagauugaaacaugcaaucaaagcgucaucacuuaugaaaacaacacuuggguaaaucagacauauguuaacaucagcaacaccaacuuugcugcugggcagucagugguuuccgugaaauuagcgggcaauuccucucucugcccuguuaguggaugggcuauauacaguaaagacaacaguauaagaaucgguuccaagggggauguguuugucauaagggaaccauucauaucaugcucccccuuggaaugcagaaccuucuucuugacucaaggggccuugcuaaaugacaaacauuccaauggaaccauuaaagacaggagcccauaucgaacucuaaugagcuguccuauuggugaaguucccucuccauacaacucaagauuugagucagucgcuuggucagcaagugcuugucaugauggcaucaauuggcuaacaauuggaauuucuggcccagacaauggggcaguggcuguguuaaaguacaacggcauaauaacagacacuaucaagaguuggagaaacaauauauugagaacacaagagucugaaugugcauguguaaaugguucuugcuuuacuguaaugaccgauggaccaagugauggacaggccucauacaagaucuucagaauagaaaagggaaagauagucaaaucagucgaaaugaaugccccuaauuaucacuaugaggaaugcuccuguuauccugauucuagugaaaucacaugugugugcagggauaacuggcauggcucgaaucgaccgugggugacuuucaaccagaaucuggaauaucagauaggauacauaugcagugggauuuucggagacaauccacgcccuaaugauaaaacaggcaguugugguccaguaucgucuaauggagcaaauggaguaaaaggauuuucauucaaauacggcaaugguguuuggauagggagaacuaaaagcauuaguucaagaaacgguuuugagaugauuugggauccgaacggauggacugggacagacaauaacuucucaauaaagcaagauaucguaggaauaaaugaguggucaggauauagcgggaguuuuguucagcauccagaacuaacagggcuggauuguauaagaccuugcuucuggauugaacuaaucagagggcgacccaaagagaacacaaucuggacuagcgggagcagcauauccuuuugugguguaaacagugacacuguggguuggucuuggccagacggugcugaguugccauuuaccauugacaaguaa

SEQ ID NO: 50777 - RNA, 1410 nt, Artificial Sequence
  derived and/or modified CDS sequence (wt) from neuraminidase__InfluenzaA__ADG58914
augaauccaaaccaaaagauaauaaccauugguucggucuguaugacaauuggaauggcuaacuuaauauuacaaauuggaaacauaaucucaauauggauuagccacucaauucaacuugggaaucaaaaucagauugaaacaugcaaucaaagcgucauuacuuaugaaaacaacacuuggguaaaucagacauauguuaacaucagcaacaccaacuuugcugcuggacagucagugguuuccgugaaauuagcgggcaauuccucucucugcccuguuaguggaugggcuauauacaguaaagacaacaguauaagaaucgguuccaagggggauguguuugucauaagggaaccauucauaucaugcucccccuuggaaugcagaaccuucuucuugacucaaggggccuugcuaaaugacaaacauuccaauggaaccauuaaagacaggagcccauaucgaacccuaaugagcuguccuauuggugaaguucccucuccauacaacucaagauuugagucagucgcuuggucagcaagugcuugucaugauggcaucaauuggcuaacaauuggaauuucuggcccagacaauggggcaguggcuguguuaaaguacaacggcauaauaacagacacuaucaagaguuggagaaacaauauauugagaacacaagagucugaaugugcauguguaaaugguucuugcuuuacuguaaugaccgauggaccaagugauggacaggccucauacaagaucuucagaauagaaaagggaaagauagucaaaucagucgaaaugaaugccccuaauuaucacuaugaggaaugcuccuguuauccugauucuagugaaaucacaugugugugcagggauaacuggcauggcucgaaucgaccgugggugucuuucaaccagaaucuggaauaucagauaggauacauaugcagugggauuuucggagacaauccacgcccuaaugauaagacaggcaguugugguccaguaucgucuaauggagcaaauggaguaaaaggauuuucauucaaauacggcaaugguguuuggauagggagaacuaaaagcauuaguucaagaaacgguuuugagaugauuugggauccgaacggauggacugggacagacaauaacuucucaauaaagcaagauaucgugggaauaaaugaguggucaggauauagcgggaguuuuguucagcauccagaacuaacagggcuggauuguauaagaccuugcuucuggguugaacuaaucagagggcgacccaaagagaacacaaucuggacuagcgggagcagcauauccuuuugugguguaaacagugacacuguggguuggucuuggccagacggugcugaguugccauuuaccauugacaaguaa

SEQ ID NO: 50778 - RNA, 1410 nt, Artificial Sequence
  derived and/or modified CDS sequence (wt) from neuraminidase__InfluenzaA__ADG58916
augaauccaaaccaaaagauaauaaccauugguucggucuguaugacaauuggaauggcuaacuuaauauuacaaauuggaaacauaaucucaauauggauuagccacucaauucaacuugggaaucaaaaucagauugaaacaugcaaucaaagcgucauuacuuaugaaaacaacacuuggguaaaucagacauauguuaacaucagcaacaccaacuuugcugcuggacagucagugguuuccgugaaauuagcgggcaauuccucucucugcccuguuaguggaugggcuauauacaguaaagacaacaguauaagaaucgguuccaagggggauguguuugucauaagggaaccauucauaucaugcucccccuuggaaugcagaaccuucuuuuugacucaaggggccuugcuaaaugacaaacauuccaauggaaccauuaaagacaggagcccauaucgaacccuaaugagcuguccuauuggugaaguucccucuccauacaacucaagauuugagucagucgcuuggucagcaagugcuugucaugauggcaucaauuggcuaacaauuggaauuucuggcccagacaauggggcaguggcuguguuaaaguacaacggcauaauaacagacacuaucaagaguuggagaaacaauauauugagaacacaagagucugaaugugcauguguaaaugguucuugcuuuacuguaaugaccgauggaccaagugauggacaggccucauacaagaucuucagaauagaaaagggaaagauagucaaaucagucgaaaugaaugccccuaauuaucacuaugaggaaugcuccuguuauccugauucuagugaaaucacaugugugugcagggauaacuggcauggcucgaaucgaccgugggugucuuucaaccagaaucuggaauaucagauaggguacauaugcagugggauuuucggagacaauccacgcccuaaugauaagacaggcaguugugguccaguaucgucuaauggagcaaauggaguaaaaggauuuucauucaaauacggcaaugguguuuggauagggagaacuaaaagcauuaguucaagaaacgguuuugagaugauuugggauccgaacggauggacugggacagacaauaacuucucaauaaagcaagauaucguaggaauaaaugaguggucaggauauagcgggaguuuuguucagcauccagaacuaacagggcuggauuguauaagaccuugcuucuggguugaacuaaucagagggcgacccaaagagaacacaaucuggacuagcgggagcagcauauccuuuugugguguaaacagugacacuguggguuggucuuggccagacggugcugaguugccauuuaccauugacaaguaa

SEQ ID NO: 50779 - RNA, 1410 nt, Artificial Sequence; identical to SEQ ID NO: 50777
  derived and/or modified CDS sequence (wt) from neuraminidase__InfluenzaA__ADG58917

SEQ ID NO: 50780 - RNA, 1410 nt, Artificial Sequence
  derived and/or modified CDS sequence (wt) from neuraminidase__InfluenzaA__ADG58918
augaauccaaaccaaaagauaauaaccauugguucggucuguaugacaauuggaauggcuaacuuaauauuacaaauuggaaacauaaucucaauauggauuagccacucaauucaacuugggaaucaaaaucagauugaaacaugcaaucaaagcgucaucacuuaugaaaacaacacuuggguaaaucagacauauguuaacaucagcaacaccaacuuugcugcugggcagucagugguuuccgugaaauuagcgggcaauuccucucucugcccuguuaguggaugggcuauauacaguaaagacaacaguauaagaaucgguuccaagggggauguguuugucauaagggaaccauucauaucaugcucccccuuggaaugcagaaccuucuucuugacucaaggggccuugcuaaaugacaaacauuccaauggaaccauuaaagacaggagcccauaucgaacucuaaugagcuguccuauuggugaaguucccucuccauacaacucaagauuugagucagucgcuuggucagcaagugcuugucaugauggcaucaauuggcuaacaauuggaauuucuggcccagacaauggggcaguggcuguguuaaaguacaacggcauaauaacagacacuaucaagaguuggagaaacaauauauugagaacacaagagucugaaugugcauguguaaaugguucuugcuuuacuguaaugaccgauggaccaagugauggacaggccucauacaagaucuucagaauagaaaagggaaagauagucaaaucagucgaaaugaaugccccuaauuaucacuaugaggaaugcuccuguuauccugauucuagugaaaucacaugugugugcagggauaacuggcauggcucgaaucgaccgugggugacuuucaaccagaaucuggaauaucagauaggauacauaugcagugggauuuucggagacaauccacgcccuaaugauaaaacaggcaguugugguccaguaucgucuaauggagcaaauggaguaaaaggauuuucauucaaauacggcaaugguguuuggauagggagaacuaaaagcauuaguucaagaaacgguuuugagaugauuugggauccgaacggauggacugggacagacaauaacuucucaauaaagcaagauaucguaggaauaaaugaguggucaggauauagcgggaguuuuguucagcauccagaacuaacagggcuggauuguauaagaccuugcuucuggguugaacuaaucagagggcgacccaaagagaacacaaucuggacuagcgggagcagcauauccuuuugugguguaaacagugacacuguggguuggucuuggccagacggugcugaguugccauuuaccauugacaaguaa

SEQ ID NO: 50781 - RNA, 1410 nt, Artificial Sequence
  derived and/or modified CDS sequence (wt) from neuraminidase__InfluenzaA__ADG58919
augaauccaaaccaaaagauaauaaccauugguucggucuguaugacaauuggaauggcuaacuuaauauuacaaauuggaaacauaaucucaauauggauuagccacucaauucaacuugggaaucaaaaucagauugaaacaugcaaucaaagcgucaucacuuaugaaaacaacacuuggguaaaucagacauauguuaacaucagcaacaccaacuuugcugcugggcagucagugguuuccgugaaauuagcgggcaauuccucucucugcccuguuaguggaugggcuauauacaguaaagacaacaguauaagaaucgguuccaagggggauguguuugucauaagggaaccauucauaucaugcucccccuuggaaugcagaaccuucuucuugacucaaggggccuugcuaaaugacaaacauuccaauggaaccauuaaagacaggagcccauaucgaacucuaaugagcuguccuauuggugaaguucccucuccauacaacucaagauuugagucagucgcuuggucagcaagugcuugucaugauggcaucaauuggcuaacaauuggaauuucuggcccagacaauggggcaguggcuguguuaaaguacaacggcauaauaacagacacuaucaagaguuggagaaacaauauauugagaacacaagagucugaaugugcauguguaaaugguucuugcuuuacuguaaugaccgauggaccaagugauggacaggccucauacaagaucuucagaauagaaaagggaaagauagucaaaucagucgaaaugaaugccccuaauuaucacuaugaggaaugcuccuguuauccugauucuagugaaaucacaugugugugcagggauaacuggcaugguucgaaucgaccgugggugacuuucaaccagaaucuggaauaucagauaggauacauaugcagugggauuuucggagacaauccacgcccuaaugauaaaacaggcaguugugguccaguaucgucuaauggagcaaauggaguaaaaggauuuucauucaaauacggcaaugguguuuggauagggagaacuaaaagcauuaguucaagaaacgguuuugagaugauuugggauccgaacggauggacugggacagacaauaacuucucaauaaagcaagauaucguaggaauaaaugaguggucaggauauagcgggaguuuuguucagcauccagaacuaacagggcuggauuguauaagaccuugcuucuggauugaacuaaucagagggcgacccaaagagaacacaaucuggacuagcgggagcagcauauccuuuugugguguaaacagugacacuguggguuggucuuggccagacggugcugaguugccauuuaccauugacaaguaa

SEQ ID NO: 50782 - RNA, 1410 nt, Artificial Sequence
  derived and/or modified CDS sequence (wt) from neuraminidase__InfluenzaA__ADG58920
augaauccaaaccaaaagauaauaaccauugguucggucuguaugacaauuggaauggcuaacuuaauauuacaaauuggaaacauaaucucaauauggauuagccacucaauucaacuugggaaucaaaaucagauugaaacaugcaaucaaagcgucauuacuuaugaaaacaacacuuggguaaaucagacauauguuaacaucagcaacaccaacuuugcugcuggacagucagugguuuccgugaaauuagcgggcaauuccucucucugcccuguuaguggaugggcuauauacaguaaagacaacaguauaagaaucgguuccaagggggauguguuugucauaagggaaccauucauaucaugcucccccuuggaaugcagaaccuucuucuugacucaaggggccuugcuaaaugacaaacauuccaauggaaccauuaaagacaggagcccauauagaacccuaaugagcuguccuauuggugaaguucccucuccauacaacucaagauuugagucagucgcuuggucagcaagugcuugucaugauggcaucaauuggcuaacaauuggaauuucuggcccagacaauggggcaguggcuguguuaaaguacaacggcauaauaacagacacuaucaagaguuggagaaacaauauauugagaacacaagagucugaaugugcauguguaaaugguucuugcuuuacuguaaugacugauggaccaaguaauggacaggccucauacaagaucuucagaauagaaaagggaaagauagucaaaucagucgaaaugaaugccccuaauuaucacuaugaggaaugcuccuguuauccugauucuagugaaaucacaugugugugcagggauaacuggcauggcucgaaucgaccgugggugucuuucaaccagaaucuggaauaucagauaggauacauaugcagugggauuuucggagacaauccacgcccuaaugacaagacaggcaguugugguccaguaucgucuaauggagcaaauggaguaaaaggauuuucauucaaauacggcaaugguguuuggauagggagaacuaaaagcauuaguucaagaaacgguuuugagaugauuugggauccgaacggauggacugggacagacaauaacuucucaauaaagcaagauaucguaggaauaaaugaguggucaggauauagcgggaguuuuguucagcauccagaacuaacagggcuggauuguauaagaccuugcuucuggguugaacuaaucagagggcgacccaaagagaacacaaucuggacuagcgggagcagcauauccuuuugugguguaaacagugacacuguggguuggucuuggccagacggugcugaguugccauuuaccauugacaaguaa

SEQ ID NO: 50783 - RNA, 1410 nt, Artificial Sequence; identical to SEQ ID NO: 50782
  derived and/or modified CDS sequence (wt) from neuraminidase__InfluenzaA__ADG58921

SEQ ID NO: 50784 - RNA, 1410 nt, Artificial Sequence; identical to SEQ ID NO: 50782
  derived and/or modified CDS sequence (wt) from neuraminidase__InfluenzaA__ADG58922

SEQ ID NO: 50785 - RNA, 1410 nt, Artificial Sequence; identical to SEQ ID NO: 50782
  derived and/or modified CDS sequence (wt) from neuraminidase__InfluenzaA__ADG58923

SEQ ID NO: 50786 - RNA, 1410 nt, Artificial Sequence; identical to SEQ ID NO: 50782
  derived and/or modified CDS sequence (wt) from neuraminidase__InfluenzaA__ADG58924

SEQ ID NO: 50787 - RNA, 1410 nt, Artificial Sequence; identical to SEQ ID NO: 50782
  derived and/or modified CDS sequence (wt) from neuraminidase__InfluenzaA__ADG58925

SEQ ID NO: 50788 - RNA, 1410 nt, Artificial Sequence; identical to SEQ ID NO: 50782
  derived and/or modified CDS sequence (wt) from neuraminidase__InfluenzaA__ADG58926

SEQ ID NO: 50789 - RNA, 1410 nt, Artificial Sequence; identical to SEQ ID NO: 50782
  derived and/or modified CDS sequence (wt) from neuraminidase__InfluenzaA__ADG58927

SEQ ID NO: 50790 - RNA, 1410 nt, Artificial Sequence
  derived and/or modified CDS sequence (wt) from neuraminidase__InfluenzaA__ADG58928
augaauccaaaccaaaagauaauaaccauugguucggucuguaugacaauuggaauggcuaacuuaauauuacaaauuggaaacauaaucucaauauggauuagccacucaauucaacuugggaaucaaaaucagauugaaacaugcaaucaaagcgucauuacuuaugaaaacaacacuuggguaaaucagacauauguuaacaucagcaacaccaacuuugcugcuggacagucagugguuuccgugaaauuagcgggcaauuccucucucugcccuguuaguggaugggcuauauacaguaaagacaacaguauaagaaucgguuccaagggggauguguuugucauaagggaaccauucauaucaugcucccccuuggaaugcagaaccuucuucuugacucaaggggccuugcuaaaugacaaacauuccaauggaaccauuaaagacaggagcccauaucgaacccuaaugagcuguccuauuggugaaguucccucuccauacaacucaagauuugagucagucgcuuggucagcaagugcuugucaugauggcaucaauuggcuaacaauuggaauuucuggcccagacaauggggcaguggcuguguuaaaguacaacggcauaauaacagacacuaucaagaguuggagaaacaauauauugagaacacaagagucugaaugugcauguguaaaugguucuugcuuuacuguaaugaccgauggaccaagugauggacaggccucauacaagaucuucagaauagaaaagggaaagauagucaaaucagucgaaaugaaugccccuaauuaucacuaugaggaaugcuccuguuauccugauucuagugaaaucacaugugugugcagggauaacuggcauggcucgaaucgaccgugggugucuuucaaccagaaucuggaauaucagauaggauacauaugcagugggauuuucggagacaauccacgcccuaaugauaagacaggcaguugugguccaguaucgucuaauggagcaaauggaguaaaaggauuuucauucaaauacggcaaugguguuuggauagggagaacuaaaagcauuaguucaagaaacgguuuugagaugauuugggauccgaacggauggacugggacagacaauaacuucucaauaaagcaagauaucgugggaauaaaugaguggucaggauauagcgggaguuuuguucagcauccagaacuaacagggcugaauuguauaagaccuugcuucuggguugaacuaaucagagggcgacccaaagagaacacaaucuggacuagcgggagcagcauauccuuuugugguguaaacagugacacuguggguuggucuuggccagacggugcugaguugccauuuaccauugacaaguaa

SEQ ID NO: 50791 - RNA, 1410 nt, Artificial Sequence; identical to SEQ ID NO: 50790
  derived and/or modified CDS sequence (wt) from neuraminidase__InfluenzaA__ADG58929

SEQ ID NO: 50792 - RNA, 1410 nt, Artificial Sequence
  derived and/or modified CDS sequence (wt) from neuraminidase__InfluenzaA__ADG58931
augaauccaaaccaaaagauaauaaccauugguucggucuguaugacaauuggaauggcuaacuuaauauuacaaauuggaaacacaaucucaauauggauuaaccacucaauucaacuugggaaucaaaaucagauugaaacaugcaaucaaagcgucauuacuuaugaaaacaacacuuggguaaaucagacauauguuaacaucagcaacaccaacuuugcugcuggacagucagugguuuccgugaaauuagcgggcaauuccucucucugcccuguuaguggaugggcuauauacaguaaagacaacaguauaagaaucgguuccaagggggauguguuugucauaagggaaccauucauaucaugcucccccuuggaaugcagaaccuucuucuugacucaaggggccuugcuaaaugacaaacauuccaauggaaccauuaaagacaggagcccauaucgaacccuaaugagcuguccuauuggugaaguucccucuccauacaacucaagauuugagucagucgcuuggucagcaagugcuugucaugauggcaucaauuggcuaacaauuggaauuucuggcccagacaauggggcaguggcuguguuaaaguacaacggcauaauaacagacacuaucaagaguuggagaaacaauauauugagaacacaagagucugaaugugcauguguaaaugguucuugcuucacuguaaugaccgauggaccaagugauggacaggccucauacaagaucuucagaauagaaaagggaaagauagucaaaucagucgaaaugaaugccccuaauuaucacuaugaggaaugcuccuguuauccugauucuagugaaaucacaugugugugcagggauaacuggcauggcucgaaucgaccgugggugucuuucaaccagaaucuggaauaucagauaggauacauaugcagugggauuuucggagacaauccacgcccuaaugauaagacaggcaguugugguccaguaucgucuaauggagcaaauggaguaaaaggauuuucauucaaauacggcaaugguguuuggauagggagaacuaaaagcauuaguucaaggaacgguuuugagaugauuugggauccgaacggauggacugggacagacaauaacuucucaauaaagcaagauaucguaggaauaaaugaguggucaggauauagcgggaguuuuguucagcauccagaacuaacagggcuggauuguauaagaccuugcuucuggguugaacuaaucagagggcgacccaaagagaacacaaucuggacuagcgggagcagcauauccuuuugugguguaaacagugacacuguggguuggucuuggccagacggugcugaguugccauuuaccauugacaaguaa

SEQ ID NO: 50793 - RNA, 1410 nt, Artificial Sequence; identical to SEQ ID NO: 50792
  derived and/or modified CDS sequence (wt) from neuraminidase__InfluenzaA__ADG58932

SEQ ID NO: 50794 - RNA, 1410 nt, Artificial Sequence; identical to SEQ ID NO: 50792
  derived and/or modified CDS sequence (wt) from neuraminidase__InfluenzaA__ADG58933

SEQ ID NO: 50795 - RNA, 1410 nt, Artificial Sequence; identical to SEQ ID NO: 50792
  derived and/or modified CDS sequence (wt) from neuraminidase__InfluenzaA__ADG58934

SEQ ID NO: 50796 - RNA, 1410 nt, Artificial Sequence; identical to SEQ ID NO: 50792
  derived and/or modified CDS sequence (wt) from neuraminidase__InfluenzaA__ADG58935

SEQ ID NO: 50797 - RNA, 1410 nt, Artificial Sequence; identical to SEQ ID NO: 50792
  derived and/or modified CDS sequence (wt) from neuraminidase__InfluenzaA__ADG58936

SEQ ID NO: 50798 - RNA, 1410 nt, Artificial Sequence
  derived and/or modified CDS sequence (wt) from neuraminidase__InfluenzaA__ADG58937
augaauccaaaccaaaagauaauaaccauugguucggucugcaugacaauuggaauggcuaacuuaauauuacaaauuggaaacacaaucucaauauggauuaaccacucaauucaacuugggaaucaaaaucagauugaaacaugcaaucaaagcgucauuacuuaugaaaacaacacuuggguaaaucagacauauguuaacaucagcaacaccaacuuugcugcuggacagucagugguuuccgugaaauuagcgggcaauuccucucucugcccuguuaguggaugggcuauauacaguaaagacaacaguauaagaaucgguuccaagggggauguguuugucauaagggaaccauucauaucaugcucccccuuggaaugcagaaccuucuucuugacucaaggggccuugcuaaaugacaaacauuccaauggaaccauuaaagacaggagcccauaucgaacccuaaugagcuguccuauuggugaaguucccucuccauacaacucaagauuugagucagucgcuuggucagcaagugcuugucaugauggcaucaauuggcuaacaauuggaauuucuggcccagacaauggggcaguggcuguguuaaaguacaacggcauaauaacagacacuaucaagaguuggagaaacaauauauugagaacacaagagucugaaugugcauguguaaaugguucuugcuucacuguaaugaccgauggaccaagugauggacaggccucauacaagaucuucagaauagaaaagggaaagauagucaaaucagucgaaaugaaugccccuaauuaucacuaugaggaaugcuccuguuauccugauucuagugaaaucacaugugugugcagggauaacuggcauggcucgaaucgaccgugggugucuuucaaccagaaucuggaauaucagauaggauacauaugcagugggauuuucggagacaauccacgcccuaaugauaagacaggcaguugugguccaguaucgucuaauggagcaaauggaguaaaaggauuuucauucaaauacggcaaugguguuuggauagggagaacuaaaagcauuaguucaaggaacgguuuugagaugauuugggauccgaacggauggacugggacagacaauaacuucucaauaaagcaagauaucguaggaauaaaugaguggucaggauauagcgggaguuuuguucagcauccagaacuaacagggcuggauuguauaagaccuugcuucuggguugaacuaaucagagggcgacccaaagagaacacaaucuggacuagcgggagcagcauauccuuuugugguguaaacagugacacuguggguuggucuuggccagacggugcugaguugccauuuaccauugacaaguaa

SEQ ID NO: 50799 - RNA, 1410 nt, Artificial Sequence; identical to SEQ ID NO: 50792
  derived and/or modified CDS sequence (wt) from neuraminidase__InfluenzaA__ADG58938

SEQ ID NO: 50800 - RNA, 1410 nt, Artificial Sequence
  derived and/or modified CDS sequence (wt) from neuraminidase__InfluenzaA__ADG59589
augaauccaaaccaaaagauaauaaccauugguucggucuguaugacaauuggaauggcuaacuuaauauuacaaauuggaaacauaaucucaauauggauuagccacucaauucaacuugggaaucaaaaucagauugaaacaugcaaucaaagcgucauuacuuaugaaaacaacacuuggguaaaucagacauauguuaacaucagcaacaccaacuuugcugcuggacagucagugguuuccgugaaauuagcgggcaauuccucucucugcccuguuaguggaugggcuauauacaguaaagacaacaguauaagaaucgguuccaagggggauguguuugucauaagggaaccauucauaucaugcucccccuuggaaugcagaaccuucuucuugacucaaggggccuugcuaaaugacaaacauuccaauggaaccauuaaagacaggagcccauaucgaacccuaaugagcuguccuauuggugaaguucccucuccauacaacucaagauuugagucagucgcuuggucagcaagugcuugucaugauggcaucaauuggcuaacaauuggaauuucuggcccagacaauggggcaauggcuguguuaaaguacaacggcauaauaacagacacuaucaagaguuggagaaacaauauauugagaacacaagagucugaaugugcauguguaaaugguucuugcuuuacuguaaugaccgauggaccaagugauggacaggccucauacaagaucuucagaauagaaaagggaaagguagucaaaucagucgaaaugaaugccccuaauuaucacuaugaggaaugcuccuguuauccugauucuagugaaaucacaugugugugcagggauaacuggcauggcucgaaucgaccgugggugucuuucaaccagaaucuggaauaucagauaggauacauaugcagugggauuuucggagacaauccacgcccuaaugauaagacaggcaguugugguccaguaucgucuaauggagcaaauggaguaaaaggauuuucauucaaauacggcaaugguguuuggauagggagaacuaaaagcauuaguucaagaaacgguuuugagaugauuugggauccgaacggauggacugggacagacaauaacuucucaauaaagcaagauaucguaggaauaaaugaguggucaggauauagcgggaguuuuguccagcauccagaacuaacagggcuggauuguauaagaccuugcuucuggguugaacuaaucagagggcgacccaaagagaacacaaucuggacuagcgggagcagcauauccuuuugugguguaaacagugacacuguggguuggucuuggccagacggugcugaguugccauuuaccauugacaaguag

SEQ ID NO: 50801 - RNA, 1410 nt, Artificial Sequence; identical to SEQ ID NO: 48947
  derived and/or modified CDS sequence (wt) from neuraminidase__InfluenzaA__ADG59590

SEQ ID NO: 50802 - RNA, 1410 nt, Artificial Sequence; identical to SEQ ID NO: 48947
  derived and/or modified CDS sequence (wt) from neuraminidase__InfluenzaA__ADG59591

SEQ ID NO: 50803 - RNA, 1410 nt, Artificial Sequence; identical to SEQ ID NO: 48947
  derived and/or modified CDS sequence (wt) from neuraminidase__InfluenzaA__ADG59592

SEQ ID NO: 50804 - RNA, 1410 nt, Artificial Sequence
  derived and/or modified CDS sequence (wt) from neuraminidase__InfluenzaA__ADG59593
augaauccaaaccaaaagauaauaaccauugguucggucuguaugacaauuggaauggcuaacuuaauauuacaaauuggaaacauaaucucaauauggauuagccacucaauucaacuugggaaucaaaaucagauugaaacaugcaaucaaagcgucauuacuuaugaaaacaacacuuggguaaaucagacauauguuaacaucagcaacaccaacuuugcugcuggacagucagugguuuccgugaaauuagcgggcaauuccucucucugcccuguuaguggaugggcuauauacaguaaagacaacaguauaagaaucgguuccaagggggauguguuugucauaagggaaccauucauaucaugcucccccuuggaaugcagaaccuucuucuugacucaaggggccuugcuaaaugacaaacauuccaauggaaccauuaaagacaggagcccauaucgaacccuaaugagcuguccuauuggugaaguucccucuccauacaacucaagauuugagucagucgcuuggucagcaagugcuugucaugauggcaucaauuggcuaacaauuggaauuucuggcccagacaauggggcaguggcuguguuaaaguacaacggcauaauaacagacacuaucaagaguuggagaaacaauauauugagaacacaagagucugaaugugcauguguaaaugguucuugcuuuacuguaaugaccgauggaccaagugauggacaggccucauacaagaucuucaaaauagaaaagggaaagauagucaaaucagucgaaaugaaugccccuaauuaucacuaugaggaaugcuccuguuauccugauucuagugaaaucacaugugugugcagggauaacuggcauggcucgaaucgaccgugggugucuuucaaccagaaucuggaauaucagauaggauacauaugcagugggauuuucggagacaauccacgcccuaaugauaagacaggcaguugugguccaguaucgucuaauggagcaaauggaguaaaaggauuuucauucaaauacggcaaugguguuuggauagggagaacuaaaagcauuaguucaagaaacgguuuugagaugauuugggauccgaacggauggacugggacagacaauaacuucucaauaaagcaagauaucguaggaauaaaugaguggucaggauauagcgggaguuuuguccagcauccagaacuaacagggcuggauuguauaagaccuugcuucuggguugaacuaaucagagggcgacccaaagagaacacaaucuggacuagcgggagcagcauauccuuuugugguguaaacagugacacuguggguuggucuuggccagacggugcugaguugccauuuaccauugacaaguaa

SEQ ID NO: 50805 - RNA, 1410 nt, Artificial Sequence; identical to SEQ ID NO: 49927
  derived and/or modified CDS sequence (wt) from neuraminidase__InfluenzaA__ADG59594

SEQ ID NO: 50806 - RNA, 1410 nt, Artificial Sequence; identical to SEQ ID NO: 49927
  derived and/or modified CDS sequence (wt) from neuraminidase__InfluenzaA__ADG59595

SEQ ID NO: 50807 - RNA, 1410 nt, Artificial Sequence
  derived and/or modified CDS sequence (wt) from neuraminidase__InfluenzaA__ADG59596
augaauccaaaccaaaagauaauaaccauugguucggucuguaugacaauuggaauggcuaacuuaauauuacaaauuggaaacauaaucucaauauggauuagccacucaauucaacuugggaaucaaaaucagauugaaacaugcaaucaaagcgucauuacuuaugaaaacaacacuuggguaaaucagacauauguuaacaucagcaacaccaacuuugcugcuggacagucagugguuuccgugaaauuagcgggcaauuccucucucugcccuguuaguggaugggcuauauacaguaaagacaacaguauaagaaucgguuccaagggggauguguuugucauaagggaaccauucauaucaugcucccccuuggaaugcagaaccuucuucuugacucaaggggccuugcuaaaugacaaacauuccaauggaaccauuaaagacaggagcccauaucgaacccuaaugagcuguccuauuggugaaguucccucuccauacaacucaagauuugagucagucgcuuggucagcaagugcuugucaugauggcaucaauuggcuaacaauuggaauuucuggcccagacaauggggcaguggcuguguuaaaguacaacggcauaauaacagacacuaucaagaguuggagaaacaauauauugagaacacaagagucugaaugugcauguguaaaugguucuugcuuuacuguaaugaccgauggaccaagugauggacaggccucauacaagaucuucagaauagaaaagggaaagauagucaaaucagucgaaaugaaugccccuaauuaucacuaugaggaaugcuccuguuauccugauucuagugaaaucacaugugugugcagggauaacuggcauggcucgaaucgaccgugggugucuuucaaccagaaucuggaauaucagauaggauacauaugcagugggauuuucggagacaauccacgcccuaaugauaggacaggcaguugugguccaguaucgucuaauggagcaaauggaguaaaaggauuuucauucaaauacggcaaugguguuuggauagggagaacuaaaagcauuaguucaagaaacgguuuugagaugauuugggauccgaacggauggacugggacagacaauaacuucucaauaaagcaagauaucguaggaauaaaugaguggucaggauauagcgggaguuuuguccagcauccagaacuaacagggcuggauuguauaagaccuugcuucuggguugaacuaaucagagggcgacccaaagagaacacaaucuggacuagcgggagcagcauauccuuuugugguguaaacagugacacuguggguuggucuuggccagacggugcugaguugccauuuaccauugacaaguaa

SEQ ID NO: 50808 - RNA, 1410 nt, Artificial Sequence
  derived and/or modified CDS sequence (wt) from neuraminidase__InfluenzaA__ADG59597
augaauccaaaccaaaagauaauaaccauugguucggucuguaugacaauuggaauggcuaaccuaauauuacaaauuggaaacauaaucucaauauggauuagccacucaauucaacuugggaaucaaaaucagauugaaacaugcaaucaaagcgucauuacuuaugaaaacaacacuuggguaaaucagacauauguuaacaucagcaacaccaacuuugcugcuggacagucagugguuuccgugaaauuagcgggcaauuccucucucugcccuguuaguggaugggcuauauacaguaaagacaacaguauaagaaucgguuccaagggggauguguuugucauaagggaaccauucauaucaugcucccccuuggaaugcagaaccuucuucuugacucaaggggccuugcuaaaugacaaacauuccaauggaaccauuaaagacaggagcccauaucgaacccuaaugagcuguccuauuggugaaguucccucuccauacaacucaagauuugagucagucgcuuggucagcaagugcuugucaugauggcaucaauuggcuaacaauuggaauuucuggcccagacaauggggcaguggcuguguuaaaguacaacggcauaauaacagacacuaucaagaguuggagaaacaauauauugagaacacaagagucugaaugugcauguguaaaugguucuugcuuuacuguaaugaccgauggaccaagugauggacaggccucauacaagaucuucagaauagaaaagggaaagauagucaaaucagucgaaaugaaugccccuaauuaucacuaugaggaaugcuccuguuauccugauucuagugaaaucacaugugugugcagggauaacuggcauggcucgaaucgaccgugggugucuuucaaccagaaucuggaauaucagauaggauacauaugcagugggauuuucggagacaauccacgcccuaaugauaagacaggcaguugugguccaguaucgucuaauggagcaaauggaguaaaaggauuuucauucaaauacggcaaugguguuuggauagggagaacuaaaagcauuaguucaagaaacgguuuugagaugauuugggauccgaacggauggacugggacagacaauaacuucucaauaaagcaagauaucguaggaauaaaugaguggucaggauauagcgggaguuuuguccagcauccagaacuaacagggcuggauuguauaagaccuugcuucuggguugaacuaaucagagggcgacccaaagagaacacaaucuggacuagcgggagcagcauauccuuuugugguguaaacagugacacuguggguuggucuuggccagacggugcugaguugccauuuaccauugacaaguag

SEQ ID NO: 50809 - RNA, 1410 nt, Artificial Sequence
  derived and/or modified CDS sequence (wt) from neuraminidase__InfluenzaA__ADG59598
augaauccaaaccaaaagauaauaaccauugguucggucuguaugacaauuggaauggcuaacuuaauauuacaaauuggaaacauaaucucaauauggauuagccacucaauucaacuugggaaucaaaaucagauugaaacaugcaaucaaagcgucauuacuuaugaaaacaacacuuggguaaaucagacauauguuaacaucagcaacaccaacuuugcugcuggacagucagugguuuccgugaaauuagcgggcaauuccucucucugcccuguuaguggaugggcuauauacaguaaagacaacaguauaagaaucgguuccaaaggggauguguuugucauaagggaaccauucauaucaugcucccccuuggaaugcagaaccuucuucuugacucaaggggccuugcuaaaugacaaacauuccaauggaaccauuaaagacaggagcccauaucgaacccuaaugagcuguccuauuggugaaguucccucuccauacaacucaagauuugagucagucgcuuggucagcaagugcuugucaugauggcaucaauuggcuaacaauuggaauuucuggcccagacaauggggcaguggcuguguuaaaguacaacggcauaauaacagacacuaucaagaguuggagaaacaauauauugagaacacaagagucugaaugugcauguguaaaugguucuugcuuuacuguaaugaccgauggaccaagugauggacaggccucauacaagaucuucagaauagaaaagggaaagauagucaaaucagucgaaaugaaugccccuaauuaucacuaugaggaaugcuccuguuauccugauucuagugaaaucacaugugugugcagggauaacuggcauggcucgaaucgaccgugggugucuuucaaccagaaucuggaauaucagauaggauacauaugcagugggauuuucggagacaauccacgcccuaaugauaagacaggcaguugugguccaguaucgucuaauggagcaaauggaguaaaaggauuuucauucaaauacggcaaugguguuuggauagggagaacuaaaagcauuaguucaagaaacgguuuugagaugauuugggauccgaacggauggacugggacagacaauaacuucucaauaaagcaagauaucguaggaauaaaugaguggucaggauauagcgggaguuuuguccagcauccagaacuaacagggcuggauuguauaagaccuugcuucuggguugaacuaaucagagggcgacccaaagagaacacaaucuggacuagcgggagcagcauauccuuuugugguguaaacagugacacuguggguuggucuuggccagacggugcugaguugccauuuaccauugacaaguaa

SEQ ID NO: 50810 - RNA, 1410 nt, Artificial Sequence; identical to SEQ ID NO: 49925
  derived and/or modified CDS sequence (wt) from neuraminidase__InfluenzaA__ADG59599

SEQ ID NO: 50811 - RNA, 1410 nt, Artificial Sequence
  derived and/or modified CDS sequence (wt) from neuraminidase__InfluenzaA__ADG59601
augaauccaaaucagaagauaauaaccauugguucggucuguaugacaauuggaauggcuaacuuaauauuacaaauuggaaacauaaucucaauauggauuagccacucaauucaacuugggaaucaaaaucagauugaaacaugcaaucaaagcgucauuacuuaugaaaacaacacuuggguaaaucagacauauguuaacaucagcaacaccaacuuugcugcuggacagucagugguuuccgugaaauuagcgggcaauuccucucucugcccuguuaguggaugggcuauauacaguaaagacaacaguauaagaaucgguuccaagggggauguguuugucauaagggaaccauucauaucaugcucccccuuggaaugcagaaccuucuucuugacucaaggggccuugcuaaaugacaaacauuccaauggaaccauuaaagacaggagcccauaucgaacccuaaugagcuguccuauuggugaaguucccucuccauacaacucaagauuugagucagucgcuuggucagcaagugcuugucaugauggcaucaauuggcuaacaauuggaauuucuggcccagacaauggggcaguggcuguguuaaaguacaacggcauaauaacagacacuaucaagaguuggagaaacaauauauugagaacacaagagucugaaugugcauguguaaaugguucuugcuuuacuguaaugaccgauggaccaagugauggacaggccucauacaagaucuucagaauagaaaagggaaagauagucaaaucagucgaaaugaaugccccuaauuaucacuaugaggaaugcuccuguuauccugauucuagugaaaucacaugugugugcagggauaacuggcauggcucgaaucgaccgugggugucuuucaaccagaaucuggaauaucagauaggauacauaugcagugggauuuucggagacaauccacgcccuaaugauaagacaggcaguugugguccaguaucgucuaauggagcaaauggaguaaaaggauuuucauucaaauacggcaaugguguuuggauagggagaacuaaaagcauuaguucaagaaacgguuuugagaugauuugggauccgaacggauggacugggacagacaauaacuucucaauaaagcaagauaucguaggaauaaaugaguggucaggauauagcgggaguuuuguucagcauccagaacuaacagggcuggauuguauaagaccuugcuucuggguugaacuaaucagagggcgacccaaagagaacacaaucuggacuagcgggagcagcauauccuuuugugguguaaacagugacacuguggguuggucuuggccagacggugcugaguugccauuuaccauugacaaguag

SEQ ID NO: 50812 - RNA, 1410 nt, Artificial Sequence
  derived and/or modified CDS sequence (wt) from neuraminidase__InfluenzaA__ADG59602
augaauccaaaucagaagauaauaaccauugguucggucuguaugacaauuggaauggcuaacuuaauauuacaaauuggaaacauaaucucaauauggauuagccacucaauucaacuugggaaucaaaaucagauugaaacaugcaaucaaagcgucauuacuuaugaaaacaacacuuggguaaaucagacauauguuaacaucagcaacaccaacuuugcugcuggacagucagugguuuccgugaaauuagcgggcaauuccucucucugcccuguuaguggaugggcuauauacaguaaagacaacaguauaagaaucgguuccaagggggauguguuugucauaagggaaccauucauaucaugcucccccuuggaaugcagaaccuucuucuugacucaaggggccuugcuaaaugacaaacauuccaauggaaccauuaaagacaggagcccauaucgaacccuaaugagcuguccuauuggugaaguucccucuccauacaacucaagauuugagucagucgcuuggucagcaagugcuugucaugauggcaucaauuggcuaacaauuggaauuucuggcccagacaauggggcaguggcuguguuaaaguacaacggcauaauaacagacacuaucaagaguuggagaaacaauauauugagaacacaagagucugaaugugcauguguaaaugguucuugcuuuacuguaaugaccgauggaccaagugauggacaggccucauacaagaucuucaaaauagaaaagggaaagauagucaaaucagucgaaaugaaugccccuaauuaucacuaugaggaaugcuccuguuauccugauucuagugaaaucacaugugugugcagggauaacuggcauggcucgaaucgaccgugggugucuuucaaccagaaucuggaauaucagauaggauacauaugcagugggauuuucggagacaauccacgcccuaaugauaagacaggcaguugugguccaguaucgucuaauggagcaaauggaguaaaaggauuuucauucaaauacggcaaugguguuuggauagggagaacuaaaagcauuaguucaagaaacgguuuugagaugauuugggauccgaacggauggacugggacagacaauaacuucucaauaaagcaagauaucguaggaauaaaugaguggucaggauauagcgggaguuuuguccagcauccagaacuaacagggcuggauuguauaagaccuugcuucuggguugaacuaaucagagggcgacccaaagagaacacaaucuggacuagcgggagcagcauauccuuuugugguguaaacagugacacuguggguuggucuuggccagacggugcugaguugccauuuaccauugacaaguag

SEQ ID NO: 50813 - RNA, 1410 nt, Artificial Sequence; identical to SEQ ID NO: 50812
  derived and/or modified CDS sequence (wt) from neuraminidase__InfluenzaA__ADG59603

SEQ ID NO: 50814 - RNA, 1410 nt, Artificial Sequence
  derived and/or modified CDS sequence (wt) from neuraminidase__InfluenzaA__ADG59604
augaauccaaaccaaaagauaauaaccauugguucggucuguaugacaauuggaauggcuaacuuaauauuacaaauuggaaacauaaucucaauauggauuagccacucaauucaacuugggaaucaaaaucagauugaaacaugcaaucaaagcgucauuacuuaugaaaacaacacuuggguaaaucagacauauguuaacaucagcaacaccaacuuugcugcuggacagucagugguuuccgugaaauuagcgggcaauuccucucucugcccuguuaguggaugggcuauauacaguaaagacaacaguauaagaaucgguuccaagggggauguguuugucauaagggaaccauucauaucaugcucccccuuggaaugcagaaccuucuucuugacucaaggggccuugcuaaaugacaaacauuccaauggaaccauuaaagacaggagcccauaucgaacccuaaugagcuguccuauuggugaaguucccucuccauacaacucaagauuugagucagucgcuuggucagcaagugcuugucaugauggcaucaauuggcuaacaauuggaauuucuggcccagacaauggggcaguggcuguguuaaaguacaacggcauaauaacagacacuaucaagaguuggagaaacaauauauugagaacacaagagucugaaugugcauguguaaaugguucuugcuuuacuguaaugaccgauggaccaagugauggacaggccucauacaagaucuucagaauagaaaagggaaagauagucaaaucagucgaaaugaaugccccuaauuaucacuaugaggaaugcuccuguuauccugauucuagugaaaucacaugugugugcagggauaacuggcauggcucgaaucgaccgugggugucuuucaaccagaaucuggaauaucagauaggauacauaugcagugggauuuucggagacaauccacgcccuaaugauaagacaggcaguugugguccaguaucgucuaauggagcaaauggaguaaaaggauuuucauucaaauacggcaaugguguuuggauagggagaacuaaaagcauuaguucaagaaacgguuuugagaugauuugggauccgaacggauggacugggacagacaauaacuucucaauaaagcaagauaucguaggaauaaaugaguggucaggauauagugggaguuuuguucagcauccagaacuaacagggcuggauuguauaagaccuugcuucuggguugaacuaaucagagggcgacccaaagagaacacaaucuggacuagcgggagcagcauauccuuuugugguguaaacagugacacuguggguuggucuuggccagacggugcugaguugccauuuaccauugacaaguaa

SEQ ID NO: 50815 - RNA, 1410 nt, Artificial Sequence; identical to SEQ ID NO: 49794
  derived and/or modified CDS sequence (wt) from neuraminidase__InfluenzaA__ADG59605

SEQ ID NO: 50816 - RNA, 1410 nt, Artificial Sequence; identical to SEQ ID NO: 49963
  derived and/or modified CDS sequence (wt) from neuraminidase__InfluenzaA__ADG59606

SEQ ID NO: 50817 - RNA, 1410 nt, Artificial Sequence
  derived and/or modified CDS sequence (wt) from neuraminidase__InfluenzaA__ADG59607
augaauccaaaucagaagauaauaaccauugguucggucuguaugacaauuggaauggcuaacuuaauauuacaaauuggaaacauaaucucaauauggauuagccacucaauucaacuugggaaucaaaaucagauugaaacaugcaaucaaagcgucauuacuuaugaaaacaacacuuggguaaaucagacauauguuaacaucagcaacaccaacuuugcugcuggacagucagugguuuccgugaaauuagcgggcaauuccucucucugcccuguuaguggaugggcuauauacaguaaagacaacaguauaagaaucgguuccaagggggauguguuugucauaagggaaccauucauaucaugcucccccuuggaaugcagaaccuucuucuugacucaaggggccuugcuaaaugacaaacauuccaauggaaccauuaaagacaggagcccauaucgaacccuaaugagcuguccuauuggugaaguucccucuccauacaacucaagauuugagucagucgcuuggucagcaagugcuugucaugauggcaucaauuggcuaacaauuggaauuucuggcccagacaauggggcaguggcuguguuaaaguacaacggcauaauaacagacacuaucaagaguuggagaaacaauauauugagaacacaagagucugaaugugcauguguaaaugguucuugcuuuacuguaaugaccgauggaccaagugauggacaggccucauacaagaucuucagaauagaaaagggaaagauagucaaaucagucgaaaugaaugccccuaauuaucacuaugaggaaugcuccuguuauccugauucuagugaaaucacauguguaugcagggauaacuggcauggcucgaaucgaccgugggugucuuucaaccagaaucuggaauaucagauaggauacauaugcagugggauuuucggagacaauccacgcccuaaugauaagacaggcaguugugguccaguaucgucuaauggagcaaauggaguaaaaggauuuucauucaaauacggcaaugguguuuggauagggagaacuaaaagcauuaguucaagaaacgguuuugagaugauuugggauccgaacggauggacugggacagacaauaacuucucaauaaagcaagauaucguaggaauaaaugaguggucaggauauagcgggaguuuuguucagcauccagaacuaacagggcuggauuguauaagaccuugcuucuggguugaacuaaucagagggcgacccaaagagaacacaaucuggacuagcgggagcagcauauccuuuugugguguaaacagugacacuguggguuggucuuggccagacggugcugaguugccauuuaccauugacaaguag

SEQ ID NO: 50818 - RNA, 1410 nt, Artificial Sequence; identical to SEQ ID NO: 50817
  derived and/or modified CDS sequence (wt) from neuraminidase__InfluenzaA__ADG59608

SEQ ID NO: 50819 - RNA, 1410 nt, Artificial Sequence
  derived and/or modified CDS sequence (wt) from neuraminidase__InfluenzaA__ADG59609
augaauccaaaccaaaagauaauaaccauugguucggucuguaugacaauuggaauggcuaacuuaauauuacaaauuggaaacauaaucucaauauggauuagccacucaauucaacuugggaaucaaaaucagauugaaacaugcaaucaaagcgucauuacuuaugaaaacaacacuuggguaaaucagacauauguuaacaucagcaacaccaaccuugcugcuggacagucagugguuuccgugaaauuagcgggcaauuccucucucugcccuguuaguggaugggcuauauacaguaaagacaacaguauaagaaucgguuccaagggggauguguuugucauaagggaaccauucauaucaugcucccccuuggaaugcagaaccuucuucuugacucaaggggccuugcuaaaugacaaacauuccaauggaaccauuaaagacaggagcccauaucgaacccuaaugagcuguccuauuggugaaguucccucuccauacaacucaagauuugagucagucgcuuggucagcaagugcuugucaugauggcaucaauuggcuaacaauuggaauuucuggcccagacaauggggcaguggcuguguuaaaguacaacggcauaauaacagacacuaucaagaguuggagaaacaauauauugagaacacaagagucugaaugugcauguguaaaugguucuugcuuuacuguaaugaccgauggaccaagugauggacaggccucauacaagaucuucagaauagaaaagggaaagauagucaaaucagucgaaaugaaugccccuaauuaucacuaugaggaaugcuccuguuauccugauucuagugaaaucacaugugugugcagggauaacuggcauggcucgaaucgaccgugggugucuuucaaccagaaucuggaauaucagauaggauacauaugcagugggauuuucggagacaauccacgcccuaaugacaagacaggcaguugugguccaguaucgucuaauggagcaaauggaguaaaaggauuuucauucaaauacggcaaugguguuuggauagggagaacuaaaagcauuaguucaagaaacgguuuugagaugauuugggauccgaacggauggacugggacagacaauaacuucucaauaaagcaagauaucguaggaauaaaugaguggucaggauauagcgggaguuuuguucagcauccagaacuaacagggcuggauuguauaagaccuugcuucuggguugaacuaaucagagggcgacccaaagagaacacaaucuggacuagcgggagcagcauauccuuuugugguguaaacagugacacuguggguuggucuuggccagacggugcugaguugccauuuaccauugacaaguag

SEQ ID NO: 50820 - RNA, 1410 nt, Artificial Sequence
  derived and/or modified CDS sequence (wt) from neuraminidase__InfluenzaA__ADG59610
augaauccaaaccaaaagauaauaaccauugguucggucuguaugacaauuggaauggcuaacuuaauauuacaaauuggaaacauaaucucaauauggauuagccacucaauucaacuugggaaucaaaaucagauugaaacaugcaaucaaagcgucauuacuuaugaaaacaacacuuggguaaaucagacauauguuaacaucagcaacaccaacuuugcugcuggacagucagugguuuccgugaaauuagcgggcaauuccucucucugcccuguuaguggaugggcuauauacaguaaagacaacaguauaagaaucgguuccaagggggauguguuugucauaagggaaccauucauaucaugcucccccuuggaaugcagaaccuucuucuugacucaaggggccuugcuaaaugacaaacauuccaauggaaccauuaaagacaggagcccauaucgaacccuaaugagcuguccuauuggugaaguucccucuccauacaacucaagauuugagucagucgcuuggucagcaagugcuugucaugauggcaucaauuggcuaacaauuggaauuucuggcccagacaauggggcaguggcuguguuaaaguacaacggcauaauaacagacacuaucaagaguuggagaaacaauauauugagaacacaagagucugaaugugcauguguaaaugguucuugcuuuacuguaaugaccgauggaccaagugauggacaggccucauacaagaucuucaaaauagaaaagggaaagauagucaaaucagucgaaaugaaugcuccuaauuaucacuaugaggaaugcuccuguuauccugauucuagugaaaucacaugugugugcagggauaacuggcauggcucgaaucgaccgugggugucuuucaaccagaaucuggaauaucagauaggauacauaugcagugggauuuucggagacaauccacgcccuaaugauaagacaggcaguugugguccaguaucgucuaauggagcaaauggaguaaaaggauuuucauucaaauacggcaaugguguuuggauagggagaacuaaaagcauuaguucaagaaacgguuuugagaugauuugggauccgaacggauggacugggacagacaauaacuucucaauaaagcaagauaucguaggaauaaaugaguggucaggauauagcgggaguuuuguccagcauccagaacuaacagggcuggauuguauaagaccuugcuucuggguugaacuaaucagagggcgacccaaagagaacacaaucuggacuagcgggagcagcauauccuuuugugguguaaacagugacacugugggcuggucuuggccagacggugcugaguugccauuuaccauugacaaguag

SEQ ID NO: 50821 - RNA, 1410 nt, Artificial Sequence
  derived and/or modified CDS sequence (wt) from neuraminidase__InfluenzaA__ADG59611
augaauccaaaccaaaagauaauaaccauugguucggucuguaugacaauuggaauggcuaacuuaauauuacaaauuggaaacauaaucucaauauggauuagccacucaauucaacuugggaaucaaaaucagauugaaacaugcaaucaaagcgucauuacuuaugaaaacaacacuuggguaaaucagacauauguuaacaucagcaacaccaacuuugcugcuggacagucagugguuuccgugaaauuagcgggcaauuccucucucugcccuguuaguggaugggcuauauacaguaaagacaacaguauaagaaucgguuccaagggggauguguuugucauaagagaaccauucauaucaugcucccccuuggaaugcagaaccuucuucuugacucaaggggccuugcuaaaugacaaacauuccaauggaaccauuaaagacaggagcccauaucgaacccuaaugagcuguccuauuggugaaguucccucuccauacaacucaagauuugagucagucgcuuggucagcaagugcuugucaugauggcaucaauuggcuaacaauuggaauuucuggcccagacaauggggcaguggcuguguuaaaguacaacggcauaauaacagacacuaucaagaguuggagaaacaauauauugagaacacaagagucugaaugugcauguguaaaugguucuugcuuuacuguaaugaccgauggaccaagugauggacaggccucauacaagaucuucagaauagaaaagggaaagauagucaaaucagucgaaaugaaugccccuaauuaucacuaugaggaaugcuccuguuauccugauucuagugaaaucacaugugugugcagggauaacuggcauggcucgaaucgaccgugggugucuuucaaccagaaucuggaauaucagauaggauacauaugcaguggaauuuucggagacaauccacgcccuaaugauaagacaggcaguugugguccaguaucgucuaauggagcaaauggaguaaaaggauuuucauucaaauacggcaaugguguuuggauagggagaacuaaaagcauuaguucaagaaacgguuuugagaugauuugggauccgaacggauggacugggacagacaauaacuucucaauaaagcaagauaucguaggaauaaaugaguggucaggauauagcgggaguuuuguccagcauccagaacuaacagggcugaauuguauaagaccuugcuucuggguugaacuaaucagagggcgacccaaagagaacacaaucuggacuagcgggagcagcauauccuuuugugguguaaacagugacacuguggguuggucuuggccagacggugcugaguugccauuuaccauugacaaguaa

SEQ ID NO: 50822 - RNA, 1410 nt, Artificial Sequence
  derived and/or modified CDS sequence (wt) from neuraminidase__InfluenzaA__ADG59612
augaauccaaaccaaaagauaauaaccauugguucggucuguaugacaauuggaauggcuaacuuaauauuacaaauuggaaacauaaucucaauauggauuagccacucaauucaacuugggaaucaaaaucagauugaaacaugcaaucaaagcgucauuacuuaugaaaacaacacuuggguaaaucagacauauguuaacaucagcaacaccaacuuugcugcuggacagucagugguuuccgugaaauuagcgggcaauuccucucucugcccuguuaguggaugggcuauauacaguaaagacaacaguauaagaaucgguuccaagggggauguguuugucauaagggaaccauucauaucaugcucccccuuggaaugcagaaccuucuucuugacucaaggggccuugcuaaaugacaaacauuccaauggaaccauuaaagacaggagcccauaucgaacccuaaugagcuguccuauuggugaaguucccucuccauacaacucaagauuugagucagucgcuuggucagcaagugcuugucaugauggcaucaauuggcuaacaauuggaauuucuggcccagacaauggggcaguggcuguguuaaaguacaacggcauaauaacagacacuaucaagaguuggagaaacaauauauugagaacacaagagucugaaugugcauguguaaaugguucuugcuuuacuguaaugaccgauggaccaagugauggacaggccucauacaagaucuucaaaauagaaaagggaaagauagucaaaucagucgaaaugaaugccccuaauuaucacuaugaggaaugcuccuguuauccugauucuagugaaaucacaugugugugcagggauaacuggcauggcucgaaucgaccgugggugucuuucaaccagaaucuggaauaucaaauaggauacauaugcagugggauuuucggagauaauccacgcccuaaugauaagacaggcaguugugguccaguaucgucuaauggagcaaauggaguaaaaggauuuucauucaaauacggcaaugguguuuggauagggagaacuaaaagcauuaguucaagaaacgguuuugagaugauuugggauccgaacggauggacugggacagacaauaacuucucaauaaagcaagauaucgugggaauaaaugaguggucaggauauagcgggaguuuuguccagcauccagaacuaacagggcuggauuguauaagaccuugcuucuggguugaacuaaucagagggcgacccaaagagaacacaaucuggacuagcgggagcagcauauccuuuugugguguaaacagugacacuguggguuggucuuggccagacggugcugaguugccauuuaccauugacaaguaa

SEQ ID NO: 50823 - RNA, 1410 nt, Artificial Sequence
  derived and/or modified CDS sequence (wt) from neuraminidase__InfluenzaA__ADG59613
augaauccaaaccaaaagauaauaaccauugguucggucuguaugacaauuggaaugacuaacuuaauauuacaacuuggaaacauaaucucaauauggauuagccacucaauucaacuugggaaucaaaaucagauugaaacaugcaaucaaagcgucauuacuuaugaaaacaacacuuggguaaaucagacauauguuaacaucagcaacaccaacuuugcugcuggacagucagugguuuccgugaaauuagcgggcaauuccucucucugcccuguuaguggaugggcuauauacaguaaagacaacaguauaagaaucgguuccaagggggauguguuugucauaagggaaccauucauaucaugcucccccuuggaaugcagaaccuucuucuugacucaaggggccuugcuaaaugacaaacauuccaauggaaccauuaaagacaggagcccauaucgaacccuaaugagcuguccuauuggugaaguucccucuccauacaacucaagauuugagucagucgcuuggucagcaagugcuugucaugauggcaucaauuggcuaacaauuggaauuucuggcccagacaauggggcaguggcuguguuaaaguacaacggcauaauaacagacacuaucaagaguuggagaaacaauauauugagaacacaagagucugaaugugcauguguaaaugguucuugcuuuacuguaaugaccgauggaccaagugauggacaggccucauacaagaucuucagaauagaaaagggaaagauagucaaaucagucgaaaugaaugccccuaauuaucacuaugaggaaugcuccuguuauccugauucuagugaaaucacaugugugugcagggauaacuggcauggcucgaaucggccgugggugucuuucaaccagaaucuggaauaucagauaggauacauaugcagugggauuuucggagacaauccacgcccuaaugauaagacaggcaguugugguccaguaucgucuaauggagcaaauggaguaaaaggauuuucauucaaauacggcaaugguguuuggauagggagaacuaaaagcauuaguucaagaaacgguuuugagaugauuugggauccgaacggauggacugggacagacaauagcuucucaauaaagcaagauaucguaggaauaaaugaauggucaggauauagcgggaguuuuguucagcauccagaacuaacagggcuggauuguauaagaccuugcuucuggguugaacuaaucagagggcgacccaaagagaacacagucuggacuagcgggagcagcauauccuuuugugguguaaacagugacacuguggguuggucuuggccagacggugcugaguugccauuuaccauugacaaguaa

SEQ ID NO: 50824 - RNA, 1410 nt, Artificial Sequence; identical to SEQ ID NO: 49925
  derived and/or modified CDS sequence (wt) from neuraminidase__InfluenzaA__ADG59614

SEQ ID NO: 50825 - RNA, 1410 nt, Artificial Sequence; identical to SEQ ID NO: 48750
  derived and/or modified CDS sequence (wt) from neuraminidase__InfluenzaA__ADH01811

SEQ ID NO: 50826 - RNA, 1410 nt, Artificial Sequence; identical to SEQ ID NO: 48750
  derived and/or modified CDS sequence (wt) from neuraminidase__InfluenzaA__ADH01821

SEQ ID NO: 50827 - RNA, 1410 nt, Artificial Sequence; identical to SEQ ID NO: 48750
  derived and/or modified CDS sequence (wt) from neuraminidase__InfluenzaA__ADH01831

SEQ ID NO: 50828 - RNA, 1410 nt, Artificial Sequence; identical to SEQ ID NO: 48750
  derived and/or modified CDS sequence (wt) from neuraminidase__InfluenzaA__ADH01841

SEQ ID NO: 50829 - RNA, 1410 nt, Artificial Sequence; identical to SEQ ID NO: 48750
  derived and/or modified CDS sequence (wt) from neuraminidase__InfluenzaA__ADH01851

SEQ ID NO: 50830 - RNA, 1410 nt, Artificial Sequence; identical to SEQ ID NO: 48750
  derived and/or modified CDS sequence (wt) from neuraminidase__InfluenzaA__ADH01861

SEQ ID NO: 50831 - RNA, 1410 nt, Artificial Sequence; identical to SEQ ID NO: 48750
  derived and/or modified CDS sequence (wt) from neuraminidase__InfluenzaA__ADH01871

SEQ ID NO: 50832 - RNA, 1410 nt, Artificial Sequence; identical to SEQ ID NO: 48750
  derived and/or modified CDS sequence (wt) from neuraminidase__InfluenzaA__ADH01881

SEQ ID NO: 50833 - RNA, 1410 nt, Artificial Sequence; identical to SEQ ID NO: 49544
  derived and/or modified CDS sequence (wt) from neuraminidase__InfluenzaA__ADH01891

SEQ ID NO: 50834 - RNA, 1410 nt, Artificial Sequence; identical to SEQ ID NO: 48750
  derived and/or modified CDS sequence (wt) from neuraminidase__InfluenzaA__ADH01901

SEQ ID NO: 50835 - RNA, 1410 nt, Artificial Sequence; identical to SEQ ID NO: 48750
  derived and/or modified CDS sequence (wt) from neuraminidase__InfluenzaA__ADH01911

SEQ ID NO: 50836 - RNA, 1410 nt, Artificial Sequence
  derived and/or modified CDS sequence (wt) from neuraminidase__InfluenzaA__ADH01921
augaauccaaaccaaaagauaauaaccauugguucggucuguaugacaauuggaauggcuaacuuaauauuacaaauuggaaacauaaucucaauauggauuagccacucaauucaacuugggaaucaaaaucagauugaaacaugcaaucaaagcgucauuacuuaugaaaacaacacuuggguaaaucagacauauguuaacaucagcaacaccaacuuugcugcuggacagucagugguuuccgugaaauuagcgggcaauuccucucucugcccuguuaguggaugggcuauauacaguaaagacaacaguauaagaaucgguuccaagggggauguguuugucauaagggaaccauucauaucaugcucccccuuggaaugcagaaccuucuucuugacucaaggggccuugcuaaaugacaaacauuccaauggaaccauuaaagacaggagcccauaucgaacccuaaugagcuguccuauuggugaaguucccucuccauacaacucaagauuugagucagucgcuuggucagcaagugcuugucaugauggcaucaauuggcuaacaauuggaauuucuggcccagacaauggggcaguggcuguguuaaaguacaacggcauaauaacagacacuaucaagaguuggagaaacaauauauugagaacacaagagucugaaugugcauguguaaaugguucuugcuuuacuguaaugaccgauggaccaagugauggacaggccucauacaagaucuucagaauagaaaagggaaagauagucaaaucagucgaaaugaaugccccuaauuaucacuaugaggaaugcuccuguuauccugauucuagugaaaucacaugugugugcagggauaacuggcauggcucgaaucgaccgugggugucuuucaaccagaaucuggaauaucagauaggauacauaugcagugggauuuucggagacaauccacgcccuaaugauaagacaggcaguugugguccaguaucgucuaauggagcaaauggaguaaaaggauuuucauucaaauacggcaaugguguuuggauagggagaacuaaaagcauuaguucaagaaacgguuuugagaugauuugggauccgaacggauggacugggacagacaauaacuucucaauaaagcaagauaucguaggaauaaaugaguggucaggauauagcgggaguuuuguucagcauccagaacuaacagggcuggacuguauaagaccuugcuucuggguugaacuaaucagagggcgacccaaagagaacacaaucuggacuagcgggagcagcauauccuuuugugguguaaacagugacacuguggguuggucuuggccagacggugcugaguugccauuuacuauugacaaguaa

SEQ ID NO: 50837 - RNA, 1410 nt, Artificial Sequence; identical to SEQ ID NO: 50607
  derived and/or modified CDS sequence (wt) from neuraminidase__InfluenzaA__ADH01931

SEQ ID NO: 50838 - RNA, 1410 nt, Artificial Sequence
  derived and/or modified CDS sequence (wt) from neuraminidase__InfluenzaA__ADH01941
augaauccaaaccaaaagauaauaaccauugguucggucuguaugacaauuggaauggcuaacuuaauauuacaaauuggaaacauaaucucaauauggauuagccacucaauucaacuugggaaucaaaaucagauugaaacaugcaaucaaagcgucauuacuuaugaaaacaacacuuggguaaaucagacauauguuaacaucagcaacaccaacuuugcugcugaacagucagugguuuccgugaaauuagcgggcaauuccucucucugcccuguuaguggaugggcuauauacaguaaagacaacaguauaagaaucgguuccaagggggauguguuugucauaagggaaccauucauaucaugcucccccuuggaaugcagaaccuucuucuugacucaaggggccuugcuaaaugacaaacauuccaauggaaccauuaaagacaggagcccauaucgaacccuaaugagcuguccuauuggugaaguucccucuccauacaacucaagauuugagucagucgcuuggucagcaagugcuugucaugauggcaucaauuggcuaacaauuggaauuucuggcccagacaauggggcaguggcuguguuaaaguacaacggcauaauaacagacacuaucaagaguuggagaaacaauauauugagaacacaagagucugaaugugcauguguaaaugguucuugcuuuacuguaaugaccgauggaccaagugauggacaggccucauacaagaucuucagaauagaaaagggaaagauagucaaaucagucgaaaugaaugccccuaauuaucacuaugaggaaugcuccuguuauccugauucuagugaaaucacaugugugugcagggauaacuggcauggcucgaaucgaccgugggugucuuucaaccagaaucuggaauaucagauaggauacauaugcagugggauuuucggagacaauccacgcccuaaugauaagacaggcaguugugguccaguaucgucuaauggagcaaauggaguaaaaggauuuucauucaaauacggcaaugguguuuggauagggagaacuaaaagcauuaguucaagaaacgguuuugagaugauuugggauccgaacggauggacugggacagacaauaacuucucaauaaagcaagauaucguaggaauaaaugaguggucaggauauagcgggaguuuuguucagcauccagaacuaacagggcuggauuguauaagaccuugcuucuggguugaacugaucagagggcgacccaaagagaacacaaucuggacuagcgggagcagcauauccuuuugugguguaaacagugacacuguggguuggucuuggccagacggugcugaguugccauuuaccauugacaaguaa

SEQ ID NO: 50839 - RNA, 1410 nt, Artificial Sequence; identical to SEQ ID NO: 49794
  derived and/or modified CDS sequence (wt) from neuraminidase__InfluenzaA__ADH01951

SEQ ID NO: 50840 - RNA, 1410 nt, Artificial Sequence; identical to SEQ ID NO: 49794
  derived and/or modified CDS sequence (wt) from neuraminidase__InfluenzaA__ADH01961

SEQ ID NO: 50841 - RNA, 1410 nt, Artificial Sequence
  derived and/or modified CDS sequence (wt) from neuraminidase__InfluenzaA__ADH01981
augaauccaaaccaaaagauaauaaccauugguucggccuguaugacaauuggaauggcuaacuuaauauuacaaauuggaaacauaaucucaauauggauuagccacucaauucaacuugggaaucaaaaucagacugaaacaugcaaucaaagcgucauuacuuaugaaaacaacacuuggguaaaucagacauauguuaacaucagcaacaccaacuuugcugcuggacagucagugguuuccgugaaauuagcgggcaauuccucucucugcccuguuaguggaugggcuauauacagcaaagacaacaguauaagaaucgguuccaagggggauguguuugucauaagggaaccauucauaucaugcucccccuuggaaugcagaaccuucuucuugacucaaggggccuugcuaaaugacaaacauuccaauggaaccauuaaagacaggagcccauaucgaaccuuaaugagcuguccuauuggugaaguucccucuccauacaacucaagauuugagucagucgcuuggucagcaagugcuugucaugauggcaucaauuggcuaacaauuggaauuucuggcccagacaauggggcaguggcuguguuaaaguacaauggcauaauaacagacacuaucaagaguuggagaaacaauauauugagaacacaagagucugaaugugcauguguaaaugguucuugcuuuacuguaaugaccgauggaccaagugauggacaggccucauacaagaucuucagaauagaaaagggaaagauagucaaaucagucgaaaugaaugccccuaauuaucacuaugaggaaugcuccuguuauccugauucuagugaaaucacaugugugugcagggauaacuggcauggcucgaaucgaccgugggugucuuucaaccagaaucuggaauaucagauaggauacauaugcagugggauuuucggagacaacccacgcccuaaugauaagacaggcaguugugguccaguaucgucuaauggagcaaauggaguaaaaggauuuucauucaaauacggcaaugguguuuggauagggagaacuaaaagcauuaguucaagaaacgguuuugagaugauuugggauccgaacggauggacugggacagacaauaacuucucaauaaagcaagauaucguaggaauaaaugaguggucaggauauagcgggaguuuuguucagcauccagaacuaacagggcuggauuguauaagaccuugcuucuggguugaacuaaucagagggcgacccaaagagaacacaaucuggacuagcgggagcagcauauccuuuugugguguaaacagugacacuguggguuggucuuggccagacggugcugaguugccauuuaccauugacaaguaa

SEQ ID NO: 50842 - RNA, 1410 nt, Artificial Sequence
  derived and/or modified CDS sequence (wt) from neuraminidase__InfluenzaA__ADH01991
augaauccaaaccaaaagauaauaaccauugguucggucuguaugacaauuggaauggcuaacuuaauauuacaaauuggaaacauaauuucaauauggauuagccacucaauucaacuugggaaucaaaaucagauugaaacaugcaaucaaagcgucauuacuuaugaaaacaacacuuggguaaaucagacauauguuaacaucagcaacaccaacuuugcugcuggacagucagugguuuccgugaaauuagcgggcaauuccucucucugcccuguuaguggaugggcuauauacaguaaagacaacaguauaagaaucgguuccaagggggauguguuugucauaagggaaccauucauaucaugcucccccuuggaaugcagaaccuucuucuugacucaaggggccuugcuaaaugacaaacauuccaauggaaccauuaaagacaggagcccauaucgaacccuaaugagcuguccuauuggugaaguucccucuccauacaacucaagauuugagucagucgcuuggucagcaagugcuugucaugauggcaucaauuggcuaacaauuggaauuucuggcccagacaauggggcaguggcuguguuaaaguacaacggcauaauaacagacacuaucaagaguuggagaaacaauauauugagaacacaagagucugaaugugcauguguaaaugguucuugcuuuacuguaaugaccgauggaccaagugauggacaggccucauacaagaucuucagaauagaaaagggaaagauagucaaaucagucgaaaugaaugccccuaauuaucacuaugaggaaugcuccuguuauccugauucuagugaaaucacaugugugugcagggauaacuggcauggcucgaaucgaccgugggugucuuucaaccagaaucuggaauaucagauaggauacauaugcagugggauuuucggagacaauccacgcccuaaugauaagaaaggcaguugugguccaguaucgucuaauggagcaaauggaguaaaaggauuuucauucaaauacggcaaugguguuuggauagggagaacuaaaagcauuaguucaagaaacgguuuugagaugauuugggauccgaacggauggacugggacagacaauaacuucucaauaaagcaagauaucguaggaauaaaugaauggucaggauauagcgggaguuuuguucagcauccagaacuaacagggcuggauuguauaagaccuugcuucuggguugaacuaaucagagggcgacccaaagagaacacaaucuggacuagcgggagcagcauauccuuuugugguguaaacagugacacuguggguuggucuuggccagacggugcugaguugccauuuaccauugacaaguaa

SEQ ID NO: 50843 - RNA, 1410 nt, Artificial Sequence; identical to SEQ ID NO: 50707
  derived and/or modified CDS sequence (wt) from neuraminidase__InfluenzaA__ADH02011

SEQ ID NO: 50844 - RNA, 1410 nt, Artificial Sequence
  derived and/or modified CDS sequence (wt) from neuraminidase__InfluenzaA__ADH02021
augaauccaaaccaaaagauaauaaccauugguucggucuguaugacaauuggaauggcuaacuuaauauuacaaauuggaaacauaaucucaauauggauuagccacucaauucaacuugggaaucaaaaucagauugaaacaugcaaucaaagcgucauuacuuaugaaaacaacacuuggguaaaucagacauauguuaacaucagcaacaccaacuuugcugcuggacagucagugguuuccgugaaauuagcgggcaauuccucucucugcccuguuaguggaugggcuauauacaguaaagacaacaguauaagaaucggcuccaagggggauguguuugucauaagggaaccauucauaucaugcucccccuuggaaugcagaaccuucuucuugacucaaggggccuugcuaaaugacaaacauuccaauggaaccauuaaagacaggagcccauaucgaacccuaaugagcuguccuauuggugaaguucccucuccauacaacucaagauuugagucagucgcuuggucagcaagugcuugucaugauggcaucaauuggcuaacaauuggaauuucuggcccagacaauggggcaguggcuguguuaaaguacaacggcauaauaacagacacuaucaagaguuggagaaacaauauauugagaacacaagagucugaaugugcauguguaaaugguucuugcuuuacuguaaugaccgauggaccaagugauggacaggccucauacaagaucuucagaauagaaaagggaaagauagucaaaucagucgaaaugaaugccccuaauuaucacuaugaggaaugcuccuguuauccugauucuagugaaaucacaugugugugcagggauaacuggcauggcucgaaucgaccguggguaucuuucaaccagaaucuggaauaucagauaggauacauaugcagugggauuuucggagacaauccacgcccuaaugauaagacaggcaguugugguccaguaucgucuaauggagcaaauggaguaaaaggauuuucauucaaauacggcaaugguguuuggauagggagaacuaaaagcauuaguucaagaaacgguuuugagaugauuugggauccgaacggauggacugggacagacaauaaauucucaauaaagcaagauaucguaggaauaaaugaguggucaggauauagcgggaguuuuguucaacauccagaacuaacagggcuggauuguauaagaccuugcuucuggguugaacuaaucagagggcgacccaaagagaacacaaucuggacuagcgggagcagcauauccuuuugugguguaaacagugacacuguggguuggucuuggccagacggugcugaguugccauuuaccauugacaaguaa

SEQ ID NO: 50845 - RNA, 1410 nt, Artificial Sequence; identical to SEQ ID NO: 48750
  derived and/or modified CDS sequence (wt) from neuraminidase__InfluenzaA__ADI24510

SEQ ID NO: 50846 - RNA, 1410 nt, Artificial Sequence; identical to SEQ ID NO: 49524
  derived and/or modified CDS sequence (wt) from neuraminidase__InfluenzaA__ADI24516

SEQ ID NO: 50847 - RNA, 1410 nt, Artificial Sequence; identical to SEQ ID NO: 48750
  derived and/or modified CDS sequence (wt) from neuraminidase__InfluenzaA__ADI24518

SEQ ID NO: 50848 - RNA, 1410 nt, Artificial Sequence
  derived and/or modified CDS sequence (wt) from neuraminidase__InfluenzaA__ADI24522
augaauccaaaccaaaagauaauaaccauugguucggucuguaugacaauuggaauggcuaacuuaauauuacaaauuggaaacauaaucucaauauggauuagccacucgauucaacuugggaaucaaaaucagauugaaacaugcaaucaaagcgucauuacuuaugaaaacaacacuuggguaaaucagacauauguuaacaucagcaacaccaacuuugcugcuggacagucagugguuuccgugaaauuagcgggcaauuccucucucugcccuguuaguggaugggcuauauacaguaaagacaacaguauaagaaucgguuccaagggggauguguuugucauaagggaaccauucauaucaugcucccccuuggaaugcagaaccuucuucuugacucaaggggccuugcuaaaugacaaacauuccaauggaaccauuaaagacaggagcccauaucgaacccuaaugagcuguccuauuggugaaguucccucuccauacaacucaagauuugagucagucgcuuggucagcaagugcuugucaugauggcaucaauuggcuaacaauuggaauuucuggcccagacaauggggcaguggcuguguuaaaguacaacggcauaauaacagacacuaucaagaguuggagaaacaauauauugagaacacaagagucugaaugugcauguguaaaugguucuugcuuuacuguaaugaccgauggaccaagugauggacaggccucauacaagaucuucagaauagaaaagggaaaaauagucaaaucagucgaaaugaaugccccuaauuaucacuaugaggaaugcuccuguuauccugauucuagugaaaucacaugugugugcagggauaacuggcauggcucgaaucgaccgugggugucuuucaaccagaaucuggaauaucagauaggauacauaugcagugggauuuucggagacaauccacgcccuaaugauaagacaggcaguugugguccaguaucgucuaauggagcaaauggaguaaaaggauuuucauucaaauacggcaaugguguuuggauagggagaacuaaaagcauuaguucaagaaacgguuuugagaugauuugggauccgaacggauggacugggacagacaauaacuucucaauaaagcaagauaucguaggaauaaaugaguggucaggauauagcgggaguuuuguucagcauccagaacuaacagggcuggauuguauaagaccuugcuucuggguugaacuaaucagaggacgacccaaagagaacacaaucuggacuagcgggagcagcauauccuuuugugguguaaacagugacacuguggguuggucuuggccagacggugcugaguugccauuuaccauugacaaguaa

SEQ ID NO: 50849 - RNA, 1410 nt, Artificial Sequence
  derived and/or modified CDS sequence (wt) from neuraminidase__InfluenzaA__ADI24524
augaauccaaaccaaaagauaauaaccauugguucggucuguaugacaauuggaauggcuaacuuaauauuacaaauuggaaacauaaucucaauauggauuagccacucaauucaacuugggaaucaaaaucagauugaaacaugcaaucaaagcgucauuacuuaugaaaacaacacuuggguaaaucagacauauguuaacaucagcaacaccaacuuugcugcuggacagucagugguuuccgugaaauuagcgggcaauuccucucucugcccuguuaguggaugggcuauauacaguaaagacaacaguauaagaaucgguuccaagggggauguguuugucauaagggaaccauucauaucaugcucccccuuggaaugcagaaccuucuucuugacucaaggggccuugcuaaaugacaaacauuccaauggaaccauuaaagacaggagcccauaucgaacccuaaugagcuguccuauuggugaaguucccucuccauacaacucaagauuugagucagucgcuuggucagcaagugcuugucaugauggcaucaauuggcuaacaauuggaauuucuggcccagacaauggggcaguggcuguguuaaaguacaacggcauaauaacagacacuaucaagaguuggagaaacaauauauugagaacacaagagucugaaugugcauguguaaaugguucuugcuuuacuguaaugaccgauggaccaagugauggacaggccucauacaagaucuucagaauagaaaagggaaagauagucaaaucagucgaaaugaaugccccuaauuaucacuaugaggaaugcuccuguuauccugauucuagugaaaucacaugugugugcagggauaacuggcauggcucgaaucgaccgugggugucuuucaaccagaaucuggaauaucagauaggauacauaugcagugggauuuucggagacaauccacgcccuaaugauaagacaggcaguugugguccaguaucgucuaauggagcaaauggaguaaaaggauuuucauucaaauacggcaaugguguuuggauagggagaacuaaaagcauuaguucaagaaacgguuuugagaugauuugggauccgaacggauggacugggacagacaauaacuucucaauaaagcaagauaucguaggaauuaaugaguggucaggauauagcgggaguuuuguucagcauccagaacuaacagggcuggauuguauaagaccuugcuucuggguugaacuaaucagagggcgacccaaagagaacacaaucuggacuagcgggagcagcauauccuuuugugguguaaacagugacacuguggguuggucuuggccagacggugcugaguugccauuuaccauugacaaguaa

SEQ ID NO: 50850 - RNA, 1410 nt, Artificial Sequence; identical to SEQ ID NO: 48750
  derived and/or modified CDS sequence (wt) from neuraminidase__InfluenzaA__ADI24526

SEQ ID NO: 50851 - RNA, 1410 nt, Artificial Sequence
  derived and/or modified CDS sequence (wt) from neuraminidase__InfluenzaA__ADI24528
augaauccaaaccaaaagauaauaaccauugguucggucuguaugacaauuggaauggcuaacuuaauauuacaaauuggaaacauaaucucaauauggauuagccacucaauucaacuugggaaucaaaaucagauugaaacaugcaaucaaagcgucauuacuuaugaaaacaacacuuggguaaaucagacauauguuaacaucagcaacaccaacuuugcugcuggacagucagugguuuccgugaaauuagcgggcaauuccucucucugcccuguuaguggaugggcuauauacaguaaagacaacaguauaagaaucgguuccaagggggauguguuugucauaagggaaccauucauaucaugcucccccuuggaaugcagaaccuucuucuugacucaaggggccuugcuaaaugacaaacauuccaauggaaccauuaaagacaggagcccauaucgaaccuuaaugagcuguccuauuggugaaguucccucuccauacaacucaagauuugagucagucgcuuggucagcaagugcuugucaugauggcaucaauuggcuaacaauuggaauuucuggcccagacaauggggcaguggcuguguuaaaguacaacggcauaauaacagacacuaucaagaguuggagaaacaauauauugagaacacaagagucugaaugugcauguguaaaugguucuugcuuuacuguaaugaccgauggaccaagugauggacaggccucauacaagaucuucagaauagaaaagggaaagauagucaaaucagucgaaaugaaugccccuaauuaucacuaugaggaaugcuccuguuauccugauucuagugaaaucacaugugugugcagggauaacuggcauggcucgaaucgaccgugggugucuuucaaccagaaucuggaauaucagauaggauacauaugcagugggauuuucggagacaauccacgcccuaaugauaagacaggcaguugugguccaguaucgucuaauggagcaaauggaguaaaaggauuuucauucaaauacggcaaugguguuuggauagggagaacuaaaagcauuaguucaagaaacgguuuugagaugauuugggauccgaacggauggacugggacagacaauaacuucucaauaaagcaagauaucguaggaauaaaugaauggucaggauauagcgggaguuuuguucagcauccagaacuaacagggcuggauuguauaagaccuugcuucuggguugaacuaaucagagggcgacccaaagagaacacaaucuggacuagcgggagcagcauauccuuuugugguguaaacagugacacuguggguuggucuuggccagacggugcugaguugccauuuaccauugacaaguaa

SEQ ID NO: 50852 - RNA, 1410 nt, Artificial Sequence; identical to SEQ ID NO: 50849
  derived and/or modified CDS sequence (wt) from neuraminidase__InfluenzaA__ADI24530

SEQ ID NO: 50853 - RNA, 1410 nt, Artificial Sequence
  derived and/or modified CDS sequence (wt) from neuraminidase__InfluenzaA__ADI24532
augaauccaaaccaaaagauaauaaccauugguucggucuguaugacaauuggaauggcuaacuuaauauuacaaauuggaaacauaaucucaauauggauuagccacucaauucaacuugggaaucaaaaucagauugaaacaugcaaucaaagcgucauuacuuaugaaaacaacacuuggguaaaucagacauauguuaacaucagcaacaccaacuuugcugcuggacagucagugguuuccgugaaauuagcgggcaauuccucucucugcccuguuaguggaugggcuauauacaguaaagacaacaguauaagaaucgguuccaagggggauguguuugucauaagggaaccauucauaucaugcucccccuuggaaugcagaaccuucuucuugacucaaggggccuugcuaaaugacaaacauuccaauggaaccauuaaagacaggagcccauaucgaacccuaaugagcuguccuauuggugaaguucccucuccauacaacucaagauuugagucagucgcuuggucagcaagugcuugucaugauggcaucaauuggcuaacaauuggaauuucuggcccagacaauggggcaguggcuguguuaaaguacaacggcauaauaacagacacuaucaagaguuggagaaacaauauauugagaacacaagagucugaaugugcauguguaaaugguucuugcuuuacuguaaugaccgauggaccaagugauggacaggccucauacaagaucuucagaauagaaaagggaaagauagucaaaucagucgaaaugaaugccccuaauuaucacuaugaggaaugcuccuguuauccugauucuagugaaaucacaugugugugcagggauaacuggcauggcucgaaucgaccgugggugucuuucaaccagaaucuggaauaucagauaggauacauaugcagugggauuuucggagacaauccacgcccuaaugauaagacaggcaguugugguccaguaucgucuaguggagcaaauggaguaaaaggauuuucauucaaauacggcaaugguguuuggauagggagaacuaaaagcauuaguucaagaaacgguuuugagaugauuugggauccgaacggauggacugggacagacaauaacuucucaauaaagcaagauaucguaggaauuaaugaguggucaggauauagcgggaguuuuguucagcauccagaacuaacagggcuggauuguauaagaccuugcuucuggguugaacuaaucagagggcgacccaaagagaacacaaucuggacuagcgggagcagcauauccuuuugugguguaaacagugacacuguggguuggucuuggccagacggugcugaguugccauuuaccauugacaaguaa

SEQ ID NO: 50854 - RNA, 1410 nt, Artificial Sequence; identical to SEQ ID NO: 48750
  derived and/or modified CDS sequence (wt) from neuraminidase__InfluenzaA__ADI24538

SEQ ID NO: 50855 - RNA, 1410 nt, Artificial Sequence; identical to SEQ ID NO: 48750
  derived and/or modified CDS sequence (wt) from neuraminidase__InfluenzaA__ADI24548

SEQ ID NO: 50856 - RNA, 1410 nt, Artificial Sequence
  derived and/or modified CDS sequence (wt) from neuraminidase__InfluenzaA__ADI24556
augaauccaaaccaaaagauaauaaccauugguucggucuguaugacaauuggaauggcuaacuuaauauuacaaauuggaaacauaaucucaauauggauuagccacucaauucaacuugggaaucaaaaucagauugaaacaugcaaucaaagcgucauuacuuaugaaaacaacacuuggguaaaucagacauauguuaacaucagcaacaccaacuuugcugcuggacagucagugguuuccgugaaauuagcgggcaauuccucucucugcccuguuaguggaugggcuauauacaguaaagacaauaguauaagaaucgguuccaagggggauguguuugucauaagggaaccauucauaucaugcucccccuuggaaugcagaaccuucuucuugacucaaggggccuugcuaaaugacaaacauuccaauggaaccauuaaagacaggagcccauaucgaacccuaaugagcuguccuauuggugaaguucccucuccauacaacucaagauuugagucagucgcuuggucagcaagugcuugccaugauggcaucaauuggcuaacaauuggaauuucuggcccagacaauggggcaguggcuguguuaaaguacaacggcauaauaacagacacuaucaagaguuggagaaacaauauauugagaacacaagagucugaaugugcauguguaaaugguucuugcuuuacuguaaugaccgauggaccaagugauggacaggccucauacaagaucuucagaauagaaaagggaaagauagucaaaucagucgaaaugaaugccccuaauuaucacuaugaggaaugcuccuguuauccugauucuagugaaaucacaugugugugcagggauaacuggcauggcucgaaucgaccgugggugucuuucaaccagaaucuggaauaucagauaggauacauaugcagugggauuuucggagacaauccacgcccuaaugauaagacaggcaguugugguccaguaucgucuaauggagcaaauggaguaaaaggauuuucauucaaauacggcaaugguguuuggauagggagaacuaaaagcauuaguucaagaaacgguuuugagaugaucugggauccgaacggauggacugggacagacaauaacuucucaauaaagcaagauaucguaggaauaaaugaguggucaggauauagcgggaguuuuguucagcauccagaacuaacagggcuggauuguauaagaccuugcuucuggguugaacuaaucagagggcgacccaaagagaacacaaucuggacuagcgggagcagcauauccuuuugugguguaaacagugacacuguggguuggucuuggccagacggugcugaguugccauuuaccauugacaaguaa

SEQ ID NO: 50857 - RNA, 1410 nt, Artificial Sequence; identical to SEQ ID NO: 48750
  derived and/or modified CDS sequence (wt) from neuraminidase__InfluenzaA__ADI24558

SEQ ID NO: 50858 - RNA, 1410 nt, Artificial Sequence; identical to SEQ ID NO: 48750
  derived and/or modified CDS sequence (wt) from neuraminidase__InfluenzaA__ADI24560

SEQ ID NO: 50859 - RNA, 1410 nt, Artificial Sequence; identical to SEQ ID NO: 48750
  derived and/or modified CDS sequence (wt) from neuraminidase__InfluenzaA__ADI24562

SEQ ID NO: 50860 - RNA, 1410 nt, Artificial Sequence; identical to SEQ ID NO: 48750
  derived and/or modified CDS sequence (wt) from neuraminidase__InfluenzaA__ADI24564

SEQ ID NO: 50861 - RNA, 1410 nt, Artificial Sequence; identical to SEQ ID NO: 48750
  derived and/or modified CDS sequence (wt) from neuraminidase__InfluenzaA__ADI24566

SEQ ID NO: 50862 - RNA, 1410 nt, Artificial Sequence
  derived and/or modified CDS sequence (wt) from neuraminidase__InfluenzaA__ADI24568
augaauccaaaccaaaagauaauaaccauugguucggucuguaugacaauuggaauggcuaacuuaauauuacaaauuggaaacauaaucucaauauggauuagccacucaauucaacuugggaaucaaaaucagauugaaacaugcaaucaaagcgucauuacuuaugaaaacaacacuuggguaaaucagacauauguuaacaucagcaacaccaacuuugcugcuggacagucagugguuuccgugaaauuagcgggcaauuccucucucugcccuguuaguggaugggcuauauacaguaaagacaacaguauaagaaucgguuccaagggggauguguuugucauaagggaaccauucauaucaugcucccccuuggaaugcagaaccuucuucuugacucaaggggccuugcuaaaugacaaacauuccaauggaaccauuaaagacaggagcccauaucgaacccuaaugagcuguccuauuggugaaguucccucuccauacaacucaagauuugagucagucgcuuggucagcaagugcuugucaugauggcaucaauuggcuaacaauuggaauuucuggcccagacaauggggcaguggcuguguuaaaguacaacggcauaauaacagacacuaucaagaguuggagaaacaauauauugagaacacaagagucugaaugugcauguguaaaugguucuugcuuuacuguaaugaccgauggaccaagugauggacaggccucauacaagaucuucagaauagaaaagggaaagauagucaaaucagucgaaaugaaugccccuaauuaucacuaugaggaaugcuccuguuauccugauucuagugaaaucacaugugugugcagggauaacuggcauggcucgaaucgaccgugggugucuuucaaccagaaucuggaauaucagauaggauacauaugcagugggauuuucggagacaauccacgcccuaaugauaagacagguaguugugguccaguaucgucuaauggagcaaauggaguaaaaggauuuucauucaaauacggcaaugguguuuggauagggagaacuaaaagcauuaguucaagaaacgguuuugagaugauuugggauccgaacggauggacuggaacagacaauaacuucucaauaaagcaagauaucguaggaauaaaugaauggucaggauauagcgggaguuuuguucagcauccagaacuaacagggcuggauuguauaagaccuugcuucuggguugaacuaaucagagggcgacccaaagagaacacaaucuggacuagcgggagcagcauauccuuuugugguguaaacagugacacuguggguuggucuuggccagacggugcugaguugccauuuaccauugacaaguaa

SEQ ID NO: 50863 - RNA, 1410 nt, Artificial Sequence
  derived and/or modified CDS sequence (wt) from neuraminidase__InfluenzaA__ADI24570
augaauccaaaccaaaagauaauaaccauugguucggucuguaugacaauuggaauggcuaacuuaauauuacaaauuggaaacauaaucucaauauggauuagccacucaauucaacuugggaaucaaaaucagauugaaacaugcaaucaaagcgucauuacuuaugaaaacaacacuuggguaaaucagacauauguuaacaucagcaacaccaacuuugcugcuggacagucagugguuuccgugaaauuagcuggcaauuccucucucugcccuguuaguggaugggcuauauacaguaaagacaacaguauaagaaucgguuccaagggggauguguuugucauaagggaaccauucauaucaugcucccccuuggaaugcagaaccuucuucuugacucaaggggccuugcuaaaugacaaacauuccaauggaaccauuaaagacaggagcccauaucgaacccuaaugagcuguccuauuggugaaguucccucuccauacaacucaagauuugagucagucgcuuggucagcaagugcuugucaugauggcaucaauuggcuaacaauuggaauuucuggcccagacaauggggcaguggcuguguuaaaguacaacggcauaauaacagacacuaucaagaguuggagaaacaauauauugagaacacaagagucugaaugugcauguguaaaugguucuugcuuuacuguaaugaccgauggaccaagugauggacaggccucauacaagaucuucagaauagaaaagggaaagauagucaaaucagucgaaaugaaugccccuaauuaucacuaugaggaaugcuccuguuauccugauucuagugaaaucacaugugugugcagggauaacuggcauggcucgaaucgaccgugggugucuuucaaccagaaucuggaauaucagauaggauacauaugcagugggauuuucggagacaauccacgcccuaaugauaagacaggcaguugugguccaguaucgucuaauggagcaaauggaguaaaaggauuuucauucaaauacggcaaugguguuuggauagggagaacuaaaagcauuaguucaagaaacgguuuugagaugauuugggauccgaacggauggacugggacagacaauaacuucucaauaaagcaagauaucguaggaauaaaugaguggucaggauauagcgggaguuuuguucagcauccagaacuaacagggcuggauuguauaagaccuugcuucuggguugaacuaaucagagggcgacccaaagagaacacaaucuggacuagcgggagcagcauauccuuuugugguguaaacagugacacuguggguuggucuuggccagacggugcugaguugccauuuaccauugacaaguaa

SEQ ID NO: 50864 - RNA, 1410 nt, Artificial Sequence
  derived and/or modified CDS sequence (wt) from neuraminidase__InfluenzaA__ADI24572
augaauccaaaccaaaagauaauaaccauugguucggucuguaugacaauuggaauggcuaacuuaauauuacaaauuggaaacauaaucucaauauggauuagccacucaauucaacuugggaaucaaaaucagauugaaacaugcaaucaaagcgucauuacuuaugaaaacaacacuuggguaaaucagacauauguuaacaucagcaacaccaacuuugcugcuggacagucagugguuuccgugaaauuagcgggcaauuccucucucugcccuguuaguggaugggcuauauacaguaaagacaacaguauaagaaucgguuccaagggggauguguuugucauaagggaaccauucauaucaugcucccccuuggaaugcagaaccuucuucuugacucaaggggccuugcuaaaugacaaacacuccaauggaaccauuaaagacaggagcccauaucgaacccuaaugagcuguccuauuggugaaguucccucuccauacaacucaagauuugagucagucgcuuggucagcaagugcuugucaugauggcaucaauuggcuaacaauuggaauuucuggcccagacaauggggcaguggcuguguuaaaguacaacggcauaauaacagacacuaucaagaguuggagaaacaauauauugagaacacaagagucugaaugugcauguguaaaugguucuugcuuuacuguaaugaccgauggaccaagugauggacaggccucauacaagaucuucagaauagaaaagggaaagauagucaaaucagucgaaaugaaugccccuaauuaucacuaugaggaaugcuccuguuauccugauucuagugaaaucacaugugugugcagggauaacuggcauggcucgaaucgaccgugggugucuuucaaccagaaucuggaauaucagauaggauacauaugcagugggauuuucggagacaauccacgcccuaaugauaagacaggcaguugugguccaguaucgucuaauggagcaaauggaguaaaaggauuuucauucaaauacggcaaugguguuuggauagggagaacuaaaagcauuaguucaagaaacgguuuugagaugauuugggauccgaacggauggacugggacagacaauaacuucucaauaaagcaagauaucguaggaauaaaugaguggucaggauauagcgggaguuuuguucagcauccagaacuaacagggcuggauuguauaagaccuugcuucuggguugaacuaaucagagggcgacccaaagagaacacaaucuggacuagcgggagcagcauauccuuuugugguguaaacagugacacugugggcuggucuuggccagacggugcugaguugccauuuaccauugacaaguaa

SEQ ID NO: 50865 - RNA, 1410 nt, Artificial Sequence; identical to SEQ ID NO: 50849
  derived and/or modified CDS sequence (wt) from neuraminidase__InfluenzaA__ADI24574

SEQ ID NO: 50866 - RNA, 1410 nt, Artificial Sequence; identical to SEQ ID NO: 50849
  derived and/or modified CDS sequence (wt) from neuraminidase__InfluenzaA__ADI24576

SEQ ID NO: 50867 - RNA, 1410 nt, Artificial Sequence; identical to SEQ ID NO: 50388
  derived and/or modified CDS sequence (wt) from neuraminidase__InfluenzaA__ADI24580

SEQ ID NO: 50868 - RNA, 1410 nt, Artificial Sequence
  derived and/or modified CDS sequence (wt) from neuraminidase__InfluenzaA__ADI24582
augaauccaaaccaaaagauaauaaccauugguucggucuguaugacaauuggaauggcuaacuuaauauuacaaauuggaaacauaaucucaauauggauuagccacucaauucaacuugggaaucaaaaucagauugaaacaugcaaucaaagcgucauuacuuaugaaaacaacacuuggguaaaucagacauauguuaacaucagcaacaccaacuuugcugcuggacagucagugguuuccgugaaauuagcgggcaauuccucucucugcccuguuaguggaugggcuauauacaguaaagacaacaguauaagaaucgguuccaagggggauguguuugucauaagggaaccauucauaucaugcucccccuuggaaugcagaaccuucuucuugacucaaggggccuugcuaaaugacaaacauuccaauggaaccauuaaagacaggagcccauaucgaacccuaaugagcuguccuauuggugaaguucccucuccauacaacucaagauuugagucagucgcuuggucagcaagugcuugucaugauggcaucaauuggcuaacaauuggaauuucuggcccagacaauggggcaguggcuguguuaaaguacaacggcauaauaacagacacuaucaagaguuggagaaacaauauauugagaacacaagagucugaaugugcauguguaaaugguucuugcuuuacuguaaugaccgauggaccaagugauggacaggccucauacaagaucuucagaauagaaaagggaaagguagucaaaucagucgaaaugaaugccccuaauuaucacuaugaggaaugcuccuguuauccugauucuagugaaaucacaugugugugcagggauaacuggcauggcucgaaucgaccgugggugucuuucaaccagaaucuggaauaucagauaggauacauaugcagugggauuuucggagacaauccacgcccuaaugauaagacaggcaguugugguccaguaucgucuaauggagcaaauggaguaaaaggauuuucauucaaauacggcaaugguguuuggauagggagaacuaaaagcauuaguucaagaaacgguuuugagaugauuugggauccgaacggauggacugggacagacaauaacuucucaauaaagcaagauaucguaggaauaaaugaguggucaggauauagcgggaguuuuguucagcauccagaacuaacagggcuggauuguauaagaccuugcuucuggguugaacuaaucagagggcgacccaaagagaacacaaucuggacuagcgggagcagcauauccuuuugugguguaaacagugacacuguggguuggucuuggccagacggugcugaguugccauuuaccauugacaaguaa

SEQ ID NO: 50869 - RNA, 1410 nt, Artificial Sequence
  derived and/or modified CDS sequence (wt) from neuraminidase__InfluenzaA__ADI24584
augaauccaaaucaaaagauaauaaccauugguucggucuguaugacaauuggaauggcuaacuuaauauuacaaauuggaaacauaaucucaauauggauuagccacucaauucaacuugggaaucaaaaucagauugaaacaugcaaucaaagcgucauuacuuaugaaaacaacacuuggguaaaucagacauauguuaacaucagcaacaccaacuuugcugcuggacagucagugguucccgugaaauuagcgggcaauuccucccucugcccuguuaauggaugggcuauauacaguaaagacaacaguauaagaaucgguuccaagggggauguguuugucauaagggaaccauucauaucaugcucccccuuggaaugcagaaccuucuucuugacucaaggggccuugcuaaaugacaaacauuccaauggaaccauuaaagacaggagcccauaucgaacccuaaugagcuguccuauuggugaaguucccucuccauacaacucaagauuugagucagucgcuuggucagcaagugcuugucaugauggcaucaauuggcuaacaauuggaaucucuggcccagacaauggggcaguggcuguguuaaaguacaacggcauaauaacagacacuaucaagaguuggagaaacaauauauugagaacacaagagucugaaugugcauguguaaaugguucuugcuuuacuguaaugaccgauggaccaagugauggacaggccucauacaagaucuucagaauagaaaagggaaagauagucaaaucagucgaaaugaaugccccuaauuaucacuaugaggaaugcuccuguuauccugauucuagugaaaucacaugugugugcagggauaacuggcauggcucgaaucgaccgugggugucuuucaaccagaaucuggaauaucagauaggauacauaugcagugggauuuucggagacaauccacgcccuaaugauaagacaggcaguugugguccaguaucgucuaauggagcaaauggaguaaaaggauuuucauucaaauacggcaaugguguuuggauagggagaacuaaaagcauuaguucaagaaacgguuuugagaugauuugggauccgaacggauggacugggacagacaauaacuucucaauaaagcaagauaucguaggaauaaaugaguggucaggauauagcgggaguuuuguucagcauccagaacuaacagggcuggauuguauaagaccuugcuucuggguugaacuaaucagagggcgacccaaagagaacacaaucuggacuagcgggagcagcauauccuuuugugguguaaacagugacacuguggguuggucuuggccagacggugcugaguugccauuuaccauugacaaguaa

SEQ ID NO: 50870 - RNA, 1410 nt, Artificial Sequence
  derived and/or modified CDS sequence (wt) from neuraminidase__InfluenzaA__ADI24592
augaauccaaaccaaaagauaauaaccauugguucggucuguaugacaauuggaauggcuaacuuaauauuacaaauuggaaacauaaucucaauauggauuagccacucaauucaacuugggaaucaaaaucagauugaaacaugcaaccaaagcgucauuacuuaugaaaacaacacuuggguaaaucagacauauguuaacaucagcaacaccaacuuugcugcuggacagucagugguuuccgugaaauuagcgggcaauuccucucucugcccuguuaguggaugggcuauauacaguaaagacaacaguauaagaaucgguuccaagggggauguguuugucauaagggaaccauucauaucaugcucccccuuggaaugcagaaccuucuucuugacucaaggggccuugcuaaaugacaaacauuccaauggaaccauuaaagacaggagcccauaucgaacccuaaugagcuguccuauuggugaaguucccucuccauacaacucaagauuugagucagucgcuuggucagcaagugcuugucaugauggcaucaauuggcuaacaauuggaauuucuggcccagacaauggggcaguggcuguguuaaaguacaacggcauaauaacagacacuaucaagaguuggagaaacaauauauugagaacacaagagucugaaugugcauguguaaaugguucuugcuuuacuguaaugaccgauggaccaagugauggacaggccucauacaagaucuucagaauagaaaagggaaagauagucaaaucagucgaaaugaaugccccuaauuauuacuaugaggaaugcuccuguuauccugauucuagugaaaucacaugugugugcagggauaacuggcauggcucgaaucgaccgugggugucuuucaaccagaaucuggaauaucagauaggauacauaugcagugggauuuucggagacaauccacgcccuaaugauaagacaggcaguugugguccaguaucgucuaauggagcaaauggaguaaaaggauuuucauucaaauacggcaaugguguuuggauagggagaacuaaaagcauuaguucaagaaacgguuuugagaugauuugggauccgaacggauggacugggacagacaauaacuucucaauaaagcaagauaucguaggaauaaaugaguggucaggauauagcgggaguuuuguucagcauccagaacuaacagggcuggauuguauaagaccuugcuucuggguugaacuaaucagagggcgacccaaagagaacacaaucuggacuagcgggaguagcauauccuuuugugguguaaacagugacacuguggguuggucuuggccagacggugcugaguugccauuuaccauugacaaguaa

SEQ ID NO: 50871 - RNA, 1410 nt, Artificial Sequence; identical to SEQ ID NO: 50388
  derived and/or modified CDS sequence (wt) from neuraminidase__InfluenzaA__ADI24598

SEQ ID NO: 50872 - RNA, 1410 nt, Artificial Sequence; identical to SEQ ID NO: 48750
  derived and/or modified CDS sequence (wt) from neuraminidase__InfluenzaA__ADI24604

SEQ ID NO: 50873 - RNA, 1410 nt, Artificial Sequence
  derived and/or modified CDS sequence (wt) from neuraminidase__InfluenzaA__ADI24620
augaauccaaaccaaaagauaauaaccauugguucggucuguaugacaauuggaauggcuaacuuaauauuacaaauuggaaacauaaucucaauauggauuagccacucaauucaacuugggaaucaaaaucagauugaaacaugcaaccaaagcgucauuacuuaugaaaacaacacuuggguaaaucagacauauguuaacaucagcaacaccaacuuugcugcuggacagucagugguuuccgugaaauuagcgggcaauuccucucucugcccuguuaguggaugggcuauauacaguaaagacaacaguauaagaaucgguuccaagggggauguguuugucauaagggaaccauucauaucaugcucccccuuggaaugcagaaccuucuucuugacucaaggggccuugcuaaaugacaaacauuccaauggaaccauuaaagacaggagcccauaucgaacccuaaugagcuguccuauuggugaaguucccucuccauacaacucaagauuugagucagucgcuuggucagcaagugcuugucaugauggcaucaauuggcuaacaauuggaauuucuggcccagacaauggggcaguggcuguguuaaaguacaacggcauaauaacagacacuaucaagaguuggagaaacaauauauugagaacacaagagucugaaugugcauguguaaaugguucuugcuuuacuguaaugaccgauggaccaagugauggacaggccucauacaagaucuucagaauagaaaagggaaagauagucaaaucagucgaaaugaaugccccuaauuaucacuaugaggaaugcuccuguuauccugauucuagugaaaucacaugugugugcagggauaacuggcauggcucgaaucgaccaugggugucuuucaaccagaaucuggaauaucagauaggauacauaugcagugggauuuucggagacaauccacgcccuaaugauaagacaggcaguugugguccaguaucgucuaauggagcaaauggaguaaaaggauuuucauucaaauacggcaaugguguuuggauagguagaacuaaaagcauuaguucaagaaacgguuuugagaugauuugggauccgaacggauggacugggacagacaauaacuucucaauaaagcaagauaucguaggaauaaaugaguggucaggauauagcgggaguuuuguucagcauccagaacuaacagggcuggauuguauaagaccuugcuucuggguugaacuaaucagagggcgacccaaagagaacacaaucuggacuagcgggagcagcauauccuuuugugguguaaacagugacacuguggguuggucuuggccagacggugcugaguugccauuuaccauugacaaguaa

SEQ ID NO: 50874 - RNA, 1410 nt, Artificial Sequence
  derived and/or modified CDS sequence (wt) from neuraminidase__InfluenzaA__ADI24622
augaauccaaaccaaaagauaauaaccauugguucggucuguaugacaauuggaauggcuaacuuaauauuacaaauuggaaacauaaucucaauauggauuagccacucaauucaacuugggaaccaaaaucagauugaaacaugcaaucaaagcgucauuacuuaugaaaacaacacuuggguaaaucagacauauguuaacaucagcaacaccaacuuugcugcuggacagucagugguuuccgugaaauuagcgggcaauuccucucucugcccuguuaguggaugggcuauauacaguaaagacaacaguauaagaaucgguuccaagggggauguguuugucauaagggaaccauucauaucaugcucccccuuggaaugcagaaccuucuucuugacucaaggggccuugcuaaaugacaaacauuccaauggaaccauuaaagacaggagcccauaucgaacccuaaugagcuguccuauuggugaaguucccucuccauacaacucaagauuugagucagucgcuuggucagcaagugcuugucaugauggcaucaauuggcuaacaauuggaauuucuggcccagacaauggggcaguggcuguguuaaaguacaacggcauaauaacagacacuaucaagaguuggagaaacaauauauugagaacacaagagucugaaugugcauguguaaaugguucuugcuuuacuguaaugaccgauggaccaagugauggacaggccucauacaagaucuucagaauagaaaagggaaagauagucaaaucagucgaaaugaaugccccuaauuaucacuaugaggaaugcuccuguuauccugauucuagugaaaucacaugugugugcagggauaacuggcauggcucgaaucgaccgugggugucuuucaaccagaaucuggaauaucagauaggauacauaugcagugggauuuucggagacaauccacgcccuaaugauaagacaggcaguugugguccaguaucgucuaauggagcaaauggaguaaaaggauuuucauucaaauacggcaaugguguuuggauagggagaacuaaaagcauuaguucaagaaacgguuuugagaugauuugggauccgaacggauggacugggacagacaauaacuucucaauaaagcaagauaucguaggaauaaaugaguggucaggauauagcgggaguuuuguucagcauccagaacuaacagggcuggauuguauaagaccuugcuucuggguugaacuaaucagagggcgacccaaagagaacacaaucuggacuagcgggagcagcauauccuuuugugguguaaacagugacacuguggguuggucuuggccagacggugcugaguugccauuuaccauugacaaguaa

SEQ ID NO: 50875 - RNA, 1410 nt, Artificial Sequence; identical to SEQ ID NO: 50023
  derived and/or modified CDS sequence (wt) from neuraminidase__InfluenzaA__ADI46780

SEQ ID NO: 50876 - RNA, 1410 nt, Artificial Sequence
  derived and/or modified CDS sequence (wt) from neuraminidase__InfluenzaA__ADI46789
augaauccaaaccaaaagauaauaaccauugguucggucuguaugacaauuggaauggcuaacuuaauguuacaaauuggaaacauaaucucaauauggauuagccacucaauucaacuugggaaucaaaaucagauugaaacaugcaaucaaagcgucauuacuuaugaaaacaacacuuggguaaaucagacauauguuaacaucagcaacaccaacuuugcugcuggacagucagugguuuccgugaaauuagcgggcaauuccucucucugcccuguuaguggaugggcuauauacaguaaagacaacaguguaagaaucgguuccaagggggauguguuugucauaagggaaccauucauaucaugcucccccuuggaaugcagaaccuucuucuugacucaaggggccuugcuaaaugacaaacauuccaauggaaccauuaaagacaggagcccauaucgaacccuaaugagcuguccuauuggugaaguucccucuccauacaacucaagauuugagucagucgcuuggucagcaagugcuugucaugauggcaucaauuggcuaacaauuggaauuucuggcccagacaauggggcaguggcuguguuaaaguacaacggcauaauaacagacacuaucaagaguuggagaaacaauauauugagaacacaagagucugaaugugcauguguaaaugguucuugcuuuacuguaaugaccgauggaccaaguaaugaacaggccucauacaagaucuucagaauagaaaagggaaagauagucaaaucagucgaaaugaaugccccuaauuaucacuaugaggaaugcuccuguuauccugauucuagugaaaucacaugugugugcagggauaacuggcauggcucgaaucgaccgugggugucuuucaaccagaaucuggaauaucagauaggauacauaugcagugggauuuucggagacaauccacgcccuaaugauaagacaggcaguugugguccaguaucgucuaauggagcaaauggaguaaaaggauuuucauucaaauacggcaaugguguuuggauagggagaacuaaaagcauuaguucaagaaacgguuuugagaugauuugggauccgaacggauggacugggacagacaauaacuucucaauaaagcaagauaucguaggaauaaaugaguggucaggauauagcgggaguuuuguucagcauccagaacuaacagggcuggauuguauaagaccuugcuucuggguugaacuaaucagagggcgacccaaagagaacacaaucuggacuagcgggagcagcauauccuuuugugguguaaacagugacacuguggguuggucuuggccagacggugcugaguugccauuuaccauugacaaguaa

SEQ ID NO: 50877 - RNA, 1410 nt, Artificial Sequence; identical to SEQ ID NO: 48750
  derived and/or modified CDS sequence (wt) from neuraminidase__InfluenzaA__ADI48185

SEQ ID NO: 50878 - RNA, 1410 nt, Artificial Sequence
  derived and/or modified CDS sequence (wt) from neuraminidase__InfluenzaA__ADI48187
augaauccaaaccaaaagauaauaaccauugguucggucuguaugacaauuggaauggcuaacuuaauauuacaaauuggaaacauaaucucaauauggauuagccacucaauucaacuugggaaucaaaaucagauugaaacaugcaaucaaagcgucauuacuuaugaaaacaacacuuggguaaaucagacauauguuaacaucagcaacaccaacuuugcugcuggacagucagugguuucugugaaauuggcgggcaauuccucucucugcccuguuaguggaugggcuauauacaguaaagacaacaguauaagaaucgguuccaagggggauguguuugucauaagggaaccauucauaucaugcucccccuuggaaugcagaaccuucuucuugacucaaggggccuugcuaaaugacaaacauuccaauggaaccauuaaagacaggagcccauaucgaacccuaaugagcuguccuauuggugaaguucccucuccauacaacucaagauuugagucagucgcuuggucagcaagugcuugucaugauggcaucaauuggcuaacaauuggaauuucuggcccagacaauggggcaguggcuguguuaaaguacaacggcauaauaacagacacuaucaagaguuggagaaacaauauauugagaacacaagagucugaaugugcauguguaaaugguucuugcuuuacuguaaugaccgauggaccaagugauggacaggccucauacaagaucuucagaauagaaaagggaaagauagucaaaucagucgaaaugaaugccccuaauuaucacuaugaggaaugcuccuguuauccugauucuagugaaaucacaugugugugcagggauaacuggcauggcucgaaucgaccgugggugucuuucaaccagaaucuggaauaucagauaggauacauaugcagugggauuuucggagacaauccacgcccuaaugauaagacaggcaguugugguccaguaucgucuaauggagcaaauggaguaaaaggauuuucauucaaauacggcaaugguguuuggauagggagaacuaaaagcauuaguucaagaaacgguuuugagaugauuugggauccgaacggauggacugggacagacaauaacuucucaauaaagcaagauaucguaggaauaaaugaguggucaggauauagcgggaguuuuguucagcauccagaacuaacagggcuggauuguauaagaccuugcuucuggguugaacuaaucagagggcgacccaaagagaacacaaucuggacuagcgggagcagcauauccuuuugugguguaaacagugacacuguggguuggucuuggccagacggugcugaguugccauuuaccauugacaaguaa

SEQ ID NO: 50879 - RNA, 1410 nt, Artificial Sequence; identical to SEQ ID NO: 50878
  derived and/or modified CDS sequence (wt) from neuraminidase__InfluenzaA__ADI48189

SEQ ID NO: 50880 - RNA, 1410 nt, Artificial Sequence; identical to SEQ ID NO: 48750
  derived and/or modified CDS sequence (wt) from neuraminidase__InfluenzaA__ADI48191

SEQ ID NO: 50881 - RNA, 1410 nt, Artificial Sequence; identical to SEQ ID NO: 48750
  derived and/or modified CDS sequence (wt) from neuraminidase__InfluenzaA__ADI48193

SEQ ID NO: 50882 - RNA, 1410 nt, Artificial Sequence; identical to SEQ ID NO: 48750
  derived and/or modified CDS sequence (wt) from neuraminidase__InfluenzaA__ADI48195

SEQ ID NO: 50883 - RNA, 1410 nt, Artificial Sequence
  derived and/or modified CDS sequence (wt) from neuraminidase__InfluenzaA__ADI48197
augaauccaaaccaaaagauaauaaccauugguucggucuguaugacaauuggaauggcuaacuuaauauuacaaauuggaaacauaaucucaauauggauuagccacucaauucaauuugggaaucaaaaucagauugaaacaugcaaucaaagcgucauuacuuaugaaaacaacacuuggguaaaucagacauauguuaacaucagcaacaccaacuuugcugcuggacagucagugguuuccgugaaauuagcgggcaauuccucucucugcccuguuaguggaugggcuauauacaguaaagacaacaguauaagaaucgguuccaagggggauguguuugucauaagggaaccauucauaucaugcucccccuuggaaugcagaaccuucuucuugacucaaggggccuugcuaaaugacaaacauuccaauggaaccauuaaagacaggagcccauaucgaacccuaaugagcuguccuauuggugaaguucccucuccauacaacucaagauuugagucagucgcuuggucagcaagugcuugucaugauggcaucaauuggcuaacaauuggaauuucuggcccagacaauggggcaguggcuguguuaaaguacaacggcauaauaacagacacuaucaagaguuggagaaacaauauauugagaacacaagagucugaaugugcauguguaaaugguucuugcuuuacuguaaugaccgauggaccaagugauggacaggccucauacaagaucuucagaauagaaaagggaaagauagucaaaucagucgaaaugaaugccccuaauuaucacuaugaggaaugcuccuguuauccugauucuagugaaaucacaugugugugcagggauaacuggcauggcucgaaucgaccgugggugucuuucaaccagaaucuggaauaucagauaggauacauaugcagugggauuuucggagacaauccacgcccuaaugauaagacaggcaguugugguccaguaucgucuaauggagcaaauggaguaaaaggauuuucauucaaauacggcaaugguguuuggauagggagaacuaaaagcauuaguucaagaaacgguuuugagaugauuugggauccgaacggauggacugggacagacaauaacuucucaauaaagcaagauaucguaggaauaaaugaguggucaggauauagcgggaguuuuguccagcauccagaacuaacagggcuggauuguauaagaccuugcuucuggguugaacuaaucagagggcgacccaaagagaacacaaucuggacuagcgggagcagcauauccuuuugugguguaaacagugacacuguggguuggucuuggccagacggugcugaguugccauuuaccauugacaaguaa

SEQ ID NO: 50884 - RNA, 1410 nt, Artificial Sequence; identical to SEQ ID NO: 48750
  derived and/or modified CDS sequence (wt) from neuraminidase__InfluenzaA__ADI48199

SEQ ID NO: 50885 - RNA, 1410 nt, Artificial Sequence; identical to SEQ ID NO: 48947
  derived and/or modified CDS sequence (wt) from neuraminidase__InfluenzaA__ADI48201

SEQ ID NO: 50886 - RNA, 1410 nt, Artificial Sequence; identical to SEQ ID NO: 50075
  derived and/or modified CDS sequence (wt) from neuraminidase__InfluenzaA__ADI48203

SEQ ID NO: 50887 - RNA, 1410 nt, Artificial Sequence
  derived and/or modified CDS sequence (wt) from neuraminidase__InfluenzaA__ADI48205
augaauccaaaccaaaagauaauaaccauugguucggucuguaugacaauuggaauggcuaacuuaauauuacaaauuggaaacauaaucucaauauggauuagccacucaauucaacuugggaaucaaaaucagauugaaacaugcaaucaaagcgucauuacuuaugaaaacaacacuuggguaaaucagacauauguuaacaucagcaacaccaacuuugcugcuggacagucagugguuuccgugaaauuagcgggcaauuccucucucugcccuguuaguggaugggcuauauacaguaaagacaacaguauaagaaucgguuccaagggggauguguuugucauaagggaaccauucauaucaugcucccacuuggaaugcagaaccuucuucuugacucaaggggccuugcuaaaugacaaacauuccaauggaaccauuaaagacaggagcccauaucgaacccuaaugagcuguccuauuggugaaguucccucuccauacaacucaagauuugagucagucgcuuggucagcaagugcuugucaugauggcaucaauuggcuaacaauuggaauuucuggcccagacaauggggcaguggcuguguuaaaguacaacggcauaauaacagacacuaucaagaguuggagaaacaauauauugagaacacaagagucugaaugugcauguguaaaugguucuugcuuuacuguaaugaccgauggaccaagugauggacaggccucauacaagaucuucagaauagaaaagggaaagauagucaaaucagucgaaaugaaugccccuaauuaucacuaugaggaaugcuccuguuauccugauucuagugaaaucacaugugugugcagggauaacuggcauggcucgaaucgaccgugggugucuuucaaccagaaucuggaauaucagauaggauacauaugcagugggauuuucggagacaauccacgcccuaaugauaagacaggcaguugugguccaguaucgucuaauggagcaaauggaguaaaaggauuuucauucaaauacggcaaugguguuuggauagggagaacuaaaagcauuaguucaagaaacgguuuugagaugauuugggauccgaacggauggacugggacagacaauaacuucucaauaaagcaagauaucguaggaauaaaugaguggucaggauauagcgggaguuuuguucagcauccagaacuaacagggcuggauuguauaagaccuugcuucuggguugaacuaaucagagggcgacccaaagagaacacaaucuggacuagcgggagcagcauauccuuuugugguguaaacagugacacuguggguuggucuuggccagacggugcugaguugccauuuaccauugacaaguaa

SEQ ID NO: 50888 - RNA, 1410 nt, Artificial Sequence; identical to SEQ ID NO: 48750
  derived and/or modified CDS sequence (wt) from neuraminidase__InfluenzaA__ADI48207

SEQ ID NO: 50889 - RNA, 1410 nt, Artificial Sequence
  derived and/or modified CDS sequence (wt) from neuraminidase__InfluenzaA__ADI48209
augaauccaaaccaaaagauaauaaccauugguucggucuguaugacaauuggaauggcuaacuuaauauuacaaauuggaaacauaaucucaauauggauuagccacucaauucaacuugggaaucaaaaucagauugaaacaugcaaucaaagcgucauuacuuaugaaaacaacacuuggguaaaucagacauauguuaacaucagcaacaccaacuuugcugcuggacagucagugguuuccgugaaauuagcgggcaauuccucucucugcccuguuaguggaugggcuauauacaguaaagacaacaguauaagaaucgguuccaagggggauguguuugucauaagggaaccauucauaucaugcucccccuuggaaugcagaaccuucuucuugacucaaggggccuugcuaaaugacaaacauuccaauggaaccauuaaagacaggagcccauaucgaacccuaaugagcuguccuauuggugaaguucccucuccauacaacucaagauuugagucagucgcuuggucagcaagugcuugucaugauggcaucaauuggcuaacaauuggaauuucuggcccagacaauggggcaguggcuguguuaaaguacaacggcauaauaacagacacuaucaagaguuggagaaacaauauauugagaacacaagagucugaaugugcauguguaaaugguucuugcuuuacuguaaugaccgauggaccaagugauggacaggccucauacaagaucuucagaauagaaaagggaaagauagucaaaucagucgaaaugaaugccccuaauuaucacuaugaggaaugcuccuguuauccugauucuagugaaaucacaugugugugcagggauaacuggcauggcucgaaucgaccgugggugucuuucaaccagaaucuggaauaucagauaggauacauaugcagugggauuuucggagacaauccacgcccuaaugauaagacaggcaguugugguccaguaucgucuaauggagcaaauggaguaaaaggauuuucauucaaauacggcaaugguguuuggauagggagaacuaaaagcauuaguucaagaaacgguuuugagaugauuugggauccgaacggauggacugggacagacaauaauuucucaauaaagcaagauaucguaggaauaaaugaguggucaggauauagcgggaguuuuguucagcauccagaacuaacagggcuggauuguauaagaccuugcuucuggguugaacuaaucagagggcgacccaaagagaacacaaucuggacuagcgggagcagcauauccuuuugugguguaaacagugacacuguggguuggucuuggccagacggugcugaguugccauuuaccauugacaaguaa

SEQ ID NO: 50890 - RNA, 1410 nt, Artificial Sequence
  derived and/or modified CDS sequence (wt) from neuraminidase__InfluenzaA__ADI48211
augaauccaaaccaaaagauaauaaccauugguucggucuguaugacaauuggaauggcuaacuuaauauuacaaauuggaaacauaaucucaauauggauuagccacucaauucaacuuggaaaucaaaaucagauugaaacaugcaaucaaagcgucauuacuuaugaaaacaacacuuggguaaaucagacauauguuaacaucagcaacaccaacuuugcugcuggacagucagugguuuccgugaaauuagcgggcaauuccucucucugcccuguuaguggaugggcuauauacaguaaagacaacaguauaagaaucgguuccaagggggauguguuugucauaagggaaccauucauaucaugcucccccuuggaaugcagaaccuucuucuugacucaaggggccuugcuaaaugacaaacauuccaauggaaccauuaaagacaggagcccauaucgaacccuaaugagcuguccuauuggugaaguucccucuccauacaacucaagauuugagucagucgcuuggucagcaagugcuugucaugauggcaucaauuggcuaacaauuggaauuucuggcccagacaauggggcaguggcuguguuaaaguacaacggcauaauaacagacacuaucaagaguuggagaaacaauauauugagaacacaagagucugaaugugcauguguaaaugguucuugcuuuacuguaaugaccgauggaccaagugauggacaggccucauacaagaucuucagaauagaaaagggaaagauagucaaaucagucgaaaugaaugccccuaauuaucacuaugaggaaugcuccuguuauccugauucuagugaaaucacaugugugugcagggauaacuggcauggcucgaaucgaccgugggugucuuucaaccagaaucuggaauaucagauaggauacauaugcagugggauuuucggagacaauccacgcccuaaugauaagacaggcaguugugguccaguaucgucuaauggagcaaauggaguaaaaggauuuucauucaaauacggcaaugguguuuggauagggagaacuaaaagcauuaguucaagaaacgguuuugagaugauuugggauccgaacggauggacugggacagacaauaacuucucaauaaagcaagauaucguaggaauaaaugaguggucaggauauagcgggaguuuuguucagcauccagaacuaacagggcuggauuguauaagaccuugcuucuggguugaauuaaucagagggcgacccaaagagaacacaaucuggacuagcgggagcagcauauccuuuugugguguaaacagugacacuguggguuggucuuggccagacggugcugaguugccauuuaccauugacaaguaa

SEQ ID NO: 50891 - RNA, 1410 nt, Artificial Sequence; identical to SEQ ID NO: 48750
  derived and/or modified CDS sequence (wt) from neuraminidase__InfluenzaA__ADI48213

SEQ ID NO: 50892 - RNA, 1410 nt, Artificial Sequence
  derived and/or modified CDS sequence (wt) from neuraminidase__InfluenzaA__ADI48215
augaauccaaaccaaaagauaauaaccauugguucggucuguaugacaauuggaauggcuaacuuaauauuacaaauuggaaacauaaucucaauauggauuagccacucaauucaacuugggaaucaaaaucagauugaaacaugcaaucaaagugucauuacuuaugaaaacaacacuuggguaaaucagacauauguuaacaucagcaacaccaacuuugcugcuggacagucagugguuuccgugaaauuagcgggcaauuccucucucugcccuguuaguggaugggcuauauacaguaaagacaacaguauaagaaucgguuccaagggggauguguuugucauaagggaaccauucauaucaugcucccccuuggaaugcagaaccuucuucuugacucaaggggccuugcuaaaugacaaacauuccaauggaaccauuaaagacaggagcccauaucgaacccuaaugagcuguccuauuggugaaguucccucuccauacaacucaagauuugagucagucgcuuggucagcaagugcuugucaugauggcaucaauuggcuaacaauuggaauuucuggcccagacaauggggcaguggcuguguuaaaguacaacggcauaauaacagacacuaucaagaguuggagaaacaauauauugagaacacaagagucugaaugugcauguguaaaugguucuugcuuuacuguaaugaccgauggaccaagugauggacaggccucauacaagaucuucagaauagaaaagggaaagauagucaaaucagucgaaaugaaugccccuaauuaucacuaugaggaaugcuccuguuauccugauucuagugaaaucacaugugugugcagggauaacuggcauggcucgaaucgaccgugggugucuuucaaccagaaucuggaauaucagauaggauacauaugcagugggauuuucggagacaauccacgcccuaaugauaagacaggcaguugugguccaguaucgucuaauggagcaaauggaguaaaaggauuuucauucaaauacggcaaugguguuuggauagggagaacuaaaagcauuaguucaagaaacgguuuugagaugauuugggauccgaacggauggacugggacagacaauaacuucucaauaaagcaagauaucguaggaauaaaugaguggucaggauauagcgggaguuuuguucagcauccagaacuaacagggcuggauuguauaagaccuugcuucuggguugaauuaaucagagggcgacccaaagagaacacaaucuggacuagcgggagcagcauauccuuuugugguguaaacagugacacuguggguuggucuuggccagacggugcugaguugccauuuaccauugacaaguaa

SEQ ID NO: 50893 - RNA, 1410 nt, Artificial Sequence; identical to SEQ ID NO: 48750
  derived and/or modified CDS sequence (wt) from neuraminidase__InfluenzaA__ADI48217

SEQ ID NO: 50894 - RNA, 1410 nt, Artificial Sequence; identical to SEQ ID NO: 48750
  derived and/or modified CDS sequence (wt) from neuraminidase__InfluenzaA__ADI48219

SEQ ID NO: 50895 - RNA, 1410 nt, Artificial Sequence
  derived and/or modified CDS sequence (wt) from neuraminidase__InfluenzaA__ADI48221
augaauccaaaccaaaagauaauaaccauugguucggucuguaugacaaucggaauggcuaacuuaauauuacaaauuggaaacauaaucucaauauggauuagccacucaauucaacuugggaaucaaaaucagauugaaacaugcaaucaaagcgucauuacuuaugaaaacaacacuuggguaaaucagacauauguuaacaucagcaacaccaacuuugcugcuggacagucagugguuuccgugaaauuagcgggcaauuccucucucugcccuguuaguggaugggcuauauacaguaaagacaacaguauaagaaucgguuccaagggggauguguuugucauaagggaaccauucauaucaugcucccccuuggaaugcagaaccuucuucuugacucaaggggccuugcuaaaugacaaacauuccaauggaaccauuaaagacaggagcccauaucgaacccuaaugagcuguccuauuggugaaguucccucuccauacaacucaagauuugagucagucgcuuggucagcaagugcuugucaugauggcaucaauuggcuaacaauuggaauuucuggcccagacaauggggcaguggcuguguuaaaguacaacggcauaauaacagacacuaucaagaguuggagaaacaauauauugagaacacaagagucugaaugugcauguguaaaugguucuugcuuuacuguaaugaccgauggaccaagugauggacaggccucauacaagaucuucagaauagaaaagggaaagauagucaaaucagucgaaaugaaugccccuaauuaucacuaugaggaaugcuccuguuauccugauucuagugaaaucacaugugugugcagggauaacuggcauggcucgaaucgaccgugggugucuuucaaccagaaucuggaauaucagauaggauacauaugcagugggauuuucggagacaauccacgcccuaaugauaagacaggcaguugugguccaguaucgucuaauggagcaaauggaguaaaaggauuuucauucaaauacggcaaugguguuuggauagggagaacuaaaagcauuaguucaagaaacgguuuugagaugauuugggauccgaacggauggacugggacagacaauaacuucucaauaaagcaagauaucguaggaauaaaugaguggucaggauauagcgggaguuuuguucagcauccagaacuaacagggcuggauuguauaagaccuugcuucuggguugaacuaaucagagggcgacccaaagagaacacaaucuggacuagcgggagcagcauauccuuuugugguguaaacagugacacuguggguuggucuuggccagacggugcugaguugccauuuaccauugacaaguaa

SEQ ID NO: 50896 - RNA, 1410 nt, Artificial Sequence; identical to SEQ ID NO: 48750
  derived and/or modified CDS sequence (wt) from neuraminidase__InfluenzaA__ADI48625

SEQ ID NO: 50897 - RNA, 1410 nt, Artificial Sequence; identical to SEQ ID NO: 48750
  derived and/or modified CDS sequence (wt) from neuraminidase__InfluenzaA__ADI48635

SEQ ID NO: 50898 - RNA, 1410 nt, Artificial Sequence; identical to SEQ ID NO: 48750
  derived and/or modified CDS sequence (wt) from neuraminidase__InfluenzaA__ADI48655

SEQ ID NO: 50899 - RNA, 1410 nt, Artificial Sequence; identical to SEQ ID NO: 48750
  derived and/or modified CDS sequence (wt) from neuraminidase__InfluenzaA__ADI48665

SEQ ID NO: 50900 - RNA, 1410 nt, Artificial Sequence
  derived and/or modified CDS sequence (wt) from neuraminidase__InfluenzaA__ADI48675
augaauccaaaccaaaagauaauaaccauugguucggucuguaugacaauuggaauggcuaacuuaauauuacaaauuggaaacauaaucucaauauggauuagccacucaauucaacuugggaaucaaaaucagauugaaacaugcaaucaaagcgucauuacuuaugaaaacaacacuuggguaaaucagacauauguuaacaucagcaacaccaacuuugcugcuggacagucagugguuuccgugaaauuagcgggcaauuccucucucugcccuguuaguggaugggcuauauacaguaaagacaacaguauaagaaucgguuccaagggggauguguuugucauaagggaaccauucauaucaugcucccccuuggaaugcagaaccuucuucuugacucaaggggccuugcuaaaugacaaacauuccaauggaaccauuaaagacaggagcccauaucgaacccuaaugagcuguccuauuggugaaguucccucuccauacaacucaagauuugagucagucgcuuggucagcaagugcuugucaugauggcaucaauuggcuaacaauuggaauuucuggcccagacaauggggcaguggcuguguuaaaguacaacggcauaauaacagacacuaucaagaguuggagaaacaauauauugagaacacaagagucugaaugugcauguguaaaugguucuugcuuuacuguaaugaccgauggaccaagugauggacaggccucauacaagaucuucagaauagaaaagggaaagauagucaaaucagucgaaaugaaugccccuaauuaucacuaugaggaaugcuccuguuauccugauucuagugaaaucacaugugugugcagggauaacuggcauggcucgaaucgaccgugggugucuuucaaccagaaucuggaauaucagauaggauacauaugcagugggauuuucggagacaauccacgcccuaaugauaagacaggcaguugugguccaguaucgucuaauggagcaaauggaguaaaaggauuuucauucaaauacggcaaugguguuuggauagggagaacuaaaagcauuaguucaagaaacgguuuugagaugauuugggauccgaacggauggacugggacagacaauaacuucucaauaaagcaagauaucguaggaauaaaugaguggucaggauauagcgggaguuuuguucagcauccagaacuaacagggcuggauuguauaagaccuugcuucuggguugaacuaaucagagggcgacucaaagagaacacaaucuggacuagcgggagcagcauauccuuuugugguguaaacagugacacuguggguuggucuuggccagacggugcugaguugccauuuaccauugacaaguaa

SEQ ID NO: 50901 - RNA, 1410 nt, Artificial Sequence
  derived and/or modified CDS sequence (wt) from neuraminidase__InfluenzaA__ADI48685
augaauccaaaccaaaagauaauaaccauugguucggucuguaugacaauuggaauggcuaacuuaauauuacaaauuggaaacauaaucucaauauggauuagccacucaauucaacuugggaaucaaaaucagauugaaacaugcaaucaaagcgucauuacuuaugaaaacaacacuuggguaaaucagacauauguuaacaucagcaacaccaacuuugcugcuggacagucagugguuuccgugaaauuagcgggcaauuccucucucugcccuguuaguggaugggcuauauacaguaaagacaacaguauaagaaucgguuccaagggggauguguuugucauaagggaaccauucauaucaugcucccccuuggaaugcagaaccuucuucuugacucaaggggccuugcuaaaugacaaacauuccaauggaaccauuaaagacaggagcccauaucgaacccuaaugagcuguccuauuggugaaguucccucuccauacaacucaagauuugagucagucgcuuggucagcaagugcuugucaugauggcaucaauuggcuaacaauuggaauuucuggcccagacaauggggcaguggcuguguuaaaguacaacggcauaauaacagacacuaucaagaguuggagaaacaauauauugagaacacaagagucugaaugugcauguguaaauggugcuugcuuuacuguaaugaccgauggaccaagugauggacaggccucauacaagaucuucagaauagaaaagggaaagauagucaaaucagucgaaaugaaugccccuaauuaucacuaugaggaaugcuccuguuauccugauucuagugaaaucacaugugugugcagggauaacuggcauggcucgaaucgaccgugggugucuuucaaccagaaucuggaauaucagauaggauacauaugcagugggauuuucggagacaauccacgcccuaaugauaagacaggcaguugugguccaguaucgucuaauggagcaaauggaguaaaaggauuuucauucaaauacggcaaugguguuuggauagggagaacuaaaagcauuaguucaagaaacgguuuugagaugauuugggauccgaacggauggacugggacagacaauaacuucucaauaaagcaagauaucguaggaauaaaugaguggucaggauauagcgggaguuuuguucagcauccagaacuaacagggcuggacuguauaagaccuugcuucuggguugaacuaaucagagggcgacccaaagagaacacaaucuggacuagcgggagcagcauauccuuuugugguguaaacagugacacuguggguuggucguggccagacggugcugaguugccauuuacuauugacaaguaa

SEQ ID NO: 50902 - RNA, 1410 nt, Artificial Sequence; identical to SEQ ID NO: 48750
  derived and/or modified CDS sequence (wt) from neuraminidase__InfluenzaA__ADI48695

SEQ ID NO: 50903 - RNA, 1410 nt, Artificial Sequence; identical to SEQ ID NO: 48749
  derived and/or modified CDS sequence (wt) from neuraminidase__InfluenzaA__ADI48705

SEQ ID NO: 50904 - RNA, 1410 nt, Artificial Sequence; identical to SEQ ID NO: 48750
  derived and/or modified CDS sequence (wt) from neuraminidase__InfluenzaA__ADI48715

SEQ ID NO: 50905 - RNA, 1410 nt, Artificial Sequence; identical to SEQ ID NO: 48750
  derived and/or modified CDS sequence (wt) from neuraminidase__InfluenzaA__ADI48725

SEQ ID NO: 50906 - RNA, 1410 nt, Artificial Sequence; identical to SEQ ID NO: 49020
  derived and/or modified CDS sequence (wt) from neuraminidase__InfluenzaA__ADI48735

SEQ ID NO: 50907 - RNA, 1410 nt, Artificial Sequence; identical to SEQ ID NO: 48750
  derived and/or modified CDS sequence (wt) from neuraminidase__InfluenzaA__ADI48745

SEQ ID NO: 50908 - RNA, 1410 nt, Artificial Sequence
  derived and/or modified CDS sequence (wt) from neuraminidase__InfluenzaA__ADI48755
augaauccaaaccaaaagauaauaaccauugguucggucuguaugacaauuggaauggcuaacuuaauauuacaaauuggaaacauaaucucaauauggauuagccacucaauucaacuugggaaucaaaaucagauugaaacaugcaaucaaagcgucauuacuuaugaaaacaacacuuggguaaaucagacauauguuaacaucagcaacaccaacuuugcugcuggacagucagugguuuccgugaaauuagcgggcaauuccucucucugcccuguuaguggaugggcuauauacaguaaagacaacaguauaagaaucgguuccaagggggauguguuugucauaagggaaccauucauaucaugcucccccuuggaaugcagaaccuucuucuugacucaaggggccuugcuaaaugacaaacauuccaauggaaccauuaaagacaggagcccauaucgaacccuaaugagcuguccuauuggugaaguucccucuccauacaacucaagauuugagucagucgcuuggucagcaagugcuugucaugauggcaucaauuggcuaacaauuggaauuucuggcccagacaauggggcaguggcuguguuaaaguacaacggcauaauaucagacacuaucaagaguuggagaaacaauauauugagaacacaagagucugaaugugcauguguaaaugguucuugcuuuacuguaaugaccgauggaccaagugauggacaggccucauacaagaucuucagaauagaaaagggaaagauagucaaaucagucgaaaugaaugccccuaauuaucacuaugaggaaugcuccuguuauccugauucuagugaaaucacaugugugugcagggauaacuggcauggcucgaaucgaccgugggugucuuucaaccagaaucuggaauaucagauaggauacauaugcagugggauuuucggagacaauccacgcccuaaugauaagacaggcaguugugguccaguaucgucuaauggagcaaauggaguaaaaggauuuucauucaaauacggcaaugguguuuggauagggagaacuaaaagcauuaguucaagaaacgguuuugagaugauuugggauccgaacggauggacugggacagacaauaacuucucaauaaagcaagauaucguaggaauaaaugaguggucaggauauagcgggaguuuuguucagcauccagaacuaacagggcuggauuguauaagaccuugcuucuggguugaacuaaucagagggcgacccaaagagaacacaaucuggacuagcgggagcagcauauccuuuugugguguaaacagugacacuguggguuggucuuggccagacggugcugaguugccauuuaccauugacaaguaa

SEQ ID NO: 50909 - RNA, 1410 nt, Artificial Sequence; identical to SEQ ID NO: 48750
  derived and/or modified CDS sequence (wt) from neuraminidase__InfluenzaA__ADI48765

SEQ ID NO: 50910 - RNA, 1410 nt, Artificial Sequence; identical to SEQ ID NO: 48750
  derived and/or modified CDS sequence (wt) from neuraminidase__InfluenzaA__ADI48775

SEQ ID NO: 50911 - RNA, 1410 nt, Artificial Sequence; identical to SEQ ID NO: 48750
  derived and/or modified CDS sequence (wt) from neuraminidase__InfluenzaA__ADI48785

SEQ ID NO: 50912 - RNA, 1410 nt, Artificial Sequence; identical to SEQ ID NO: 48750
  derived and/or modified CDS sequence (wt) from neuraminidase__InfluenzaA__ADI48795

SEQ ID NO: 50913 - RNA, 1410 nt, Artificial Sequence; identical to SEQ ID NO: 48750
  derived and/or modified CDS sequence (wt) from neuraminidase__InfluenzaA__ADI49032

SEQ ID NO: 50914 - RNA, 1410 nt, Artificial Sequence
  derived and/or modified CDS sequence (wt) from neuraminidase__InfluenzaA__ADI49243
augaauccaaaccaaaagauaauaaccauugguucggucuguaugacaauuggaauggcuaacuuaauauuacaaauuggaaacauaaucucaauauggauuagccacucaauucaacuugggaaucaaaaucagauugaaacaugcaaucaaagcgucauuacuuaugaaaacaacacuuggguaaaucagacauauguuaacaucagcaacaccaacuuugcugcuggacagucagugguuuccgugaaauuagcgggcaauuccucucucugcccuguuaguggaugggcuauauacaguaaagacaacaguauaagaaucgguuccaagggggauguguuugucauaagggaaccauucauaucauguucccccuuggaaugcagaaccuucuucuugacucaaggggccuugcuaaaugacaaacauuccaauggaaccauuaaagacaggagcccauaucgaacccuaaugagcuguccuauuggugaaguucccucuccauacaacucaagauuugagucagucgcuuggucagcaagugcuugucaugauggcaucaauuggcuaacaauuggaauuucuggcccagacaauggggcaguggcuguguuaaaguacaacggcauaauaacagacacuaucaagaguuggagaaacaauauauugagaacacaagagucugaaugugcauguguaaaugguucuugcuuuacuguaaugaccgauggaccaagugauggacaggccucauacaagaucuucagaauagaaaagggaaagauagucaaaucagucgaaaugaaugccccuaauuaucacuaugaagaaugcuccuguuauccugauucuagugaaaucacaugugugugcagggauaacuggcauggcucgaaucgaccgugggugucuuucaaccagaaucuggaauaucagauaggauacauaugcagugggauuuucggagacaauccacgcccuaaugauaagacaggcaguugugguccaguaucgucuaauggagcaaauggaguaaaaggauuuucauucaaauacggcaaugguguuuggauagggagaacuaaaagcauuaguucaagaaacgguuuugagaugauuugggauccgaacggauggacugggacagacaauaacuucucaauaaagcaagauaucguaggaauaaaugaguggucaggauauagcgggaguuuuguucagcauccagaacuaacagggcuggauuguauaagaccuugcuucuggguugaacuaaucagagggcgacccaaagagaacacaaucuggacuagcgggagcagcauauccuuuugugguguaaacagugacacuguggguuggucuuggccagacggugcugaguugccauuuaccauugacaaguaa

SEQ ID NO: 50915 - RNA, 1410 nt, Artificial Sequence; identical to SEQ ID NO: 48750
  derived and/or modified CDS sequence (wt) from neuraminidase__InfluenzaA__ADI49263

SEQ ID NO: 50916 - RNA, 1410 nt, Artificial Sequence; identical to SEQ ID NO: 48947
  derived and/or modified CDS sequence (wt) from neuraminidase__InfluenzaA__ADI49273

SEQ ID NO: 50917 - RNA, 1410 nt, Artificial Sequence; identical to SEQ ID NO: 48750
  derived and/or modified CDS sequence (wt) from neuraminidase__InfluenzaA__ADI49283

SEQ ID NO: 50918 - RNA, 1410 nt, Artificial Sequence; identical to SEQ ID NO: 50503
  derived and/or modified CDS sequence (wt) from neuraminidase__InfluenzaA__ADI49315

SEQ ID NO: 50919 - RNA, 1410 nt, Artificial Sequence; identical to SEQ ID NO: 48750
  derived and/or modified CDS sequence (wt) from neuraminidase__InfluenzaA__ADI49325

SEQ ID NO: 50920 - RNA, 1410 nt, Artificial Sequence; identical to SEQ ID NO: 48750
  derived and/or modified CDS sequence (wt) from neuraminidase__InfluenzaA__ADI49335

SEQ ID NO: 50921 - RNA, 1410 nt, Artificial Sequence
  derived and/or modified CDS sequence (wt) from neuraminidase__InfluenzaA__ADI49345
augaauccaaaccaaaagauaauaaccauugguucggucuguaugacaauuggaauggcuaacuuaauauuacaaauuggaaacauaaucucaauauggauuagccacucaauucaacuugggaaucaaaaucagauugaaacaugcaaccaaagcgucauuacuuaugaaaacaacacuuggguaaaucagacauauguuaacaucagcaacaccaaccuugcugcuggacagucagugguuuccgugaaauuagcgggcaauuccucucucugcccuguuaguggaugggcuauauacaguaaagacaacaguauaagaaucgguuccaagggggauguguuugucauaagggaaccauucauaucaugcucccccuuggaaugcagaaccuucuucuugacucaaggggccuugcuaaaugacaaacauuccaauggaaccauuaaagacaggagcccauaucgaacccuaaugagcuguccuauuggugacguucccucuccauacaacucaagauuugagucagucgcuuggucagcaagugcuugucaugauggcaucaauuggcuaacaauuggaauuucuggcccagacaauggggcaguggcuguguuaaaguacaacggcauaauaacagacacuaucaagaguuggagaaacaauauauugagaacacaagagucugaaugugcauguguaaaugguucuugcuuuacuguaaugaccgauggaccaagugauggacaggccucauacaagaucuucagaauagaaaagggaaagauagucaaaucagucgaaaugaaugccccuaauuaucacuaugaggaaugcuccuguuauccugauucuagugaaaucacaugugugugcagggauaacuggcauggcucgaaucgaccgugggugucuuucaaccagaaucuggaauaucagauaggauacauaugcagugggauuuucggagacaauccacgcccuaaugauaagacaggcaguugugguccaguaucgucuaauggagcaaauggaguaaaaggauuuucauucaaauacggcaaugguguuuggauagggagaacuaaaagcauuaguucaagaaacgguuuugagaugauuugggauccgaacggauggacugggacagacaauaacuucucaauaaagcaagauaucguaggaauaaaugaguggucaggauauagcgggaguuuuguucagcauccagaacuaacagggcuggauuguauaagaccuugcuucuggguugaacuaaucagagggcgacccaaagagaacacaaucuggacuagcgggagcagcauauccuuuugugguguaaacagugacacuguggguuggucuuggccagacggugcugaguugccauuuaccauugacaaguaa

SEQ ID NO: 50922 - RNA, 1410 nt, Artificial Sequence; identical to SEQ ID NO: 48750
  derived and/or modified CDS sequence (wt) from neuraminidase__InfluenzaA__ADI49355

SEQ ID NO: 50923 - RNA, 1410 nt, Artificial Sequence; identical to SEQ ID NO: 48750
  derived and/or modified CDS sequence (wt) from neuraminidase__InfluenzaA__ADI49365

SEQ ID NO: 50924 - RNA, 1410 nt, Artificial Sequence; identical to SEQ ID NO: 48750
  derived and/or modified CDS sequence (wt) from neuraminidase__InfluenzaA__ADI49375

SEQ ID NO: 50925 - RNA, 1410 nt, Artificial Sequence; identical to SEQ ID NO: 48750
  derived and/or modified CDS sequence (wt) from neuraminidase__InfluenzaA__ADI49385

SEQ ID NO: 50926 - RNA, 1410 nt, Artificial Sequence
  derived and/or modified CDS sequence (wt) from neuraminidase__InfluenzaA__ADI49395
augaauccaaaccaaaagauaauaaccauugguucggucuguaugacaauuggaauggcuaacuuaauauuacaaauuggaaacaugaucucaauauggauuagccacucaauucaacuugggaaucaaaaucagauugaaacaugcaaucaaagcgucauuacuuaugaaaacaacacuuggguaaaucagacauauguuaacaucagcaacaccaacuuugcugcuggacagucagugguuuccgugaaauuagcgggcaauuccucucucugcccuguuaguggaugggcuauauacaguaaagacaacaguauaagaaucgguuccaagggggauguguuugucauaagggaaccauucauaucaugcucccccuuggaaugcagaaccuucuucuugacucaaggggccuugcuaaaugacaaacauuccaauggaaccauuaaagacaggagcccauaucgaacccuaaugagcuguccuauuggugaaguucccucuccauacaacucaagauuugagucagucgcuuggucagcaagugcuugucaugauggcaucaauuggcuaacaauuggaauuucuggcccagacaauggggcaguggcuguguuaaaguacaacggcauaauaacagacacuaucaagaguuggagaaacaauauauugagaacacaagagucugaaugugcauguguaaaugguucuugcuuuacuguaaugaccgauggaccaagugauggacaggccucauacaagaucuucagaauagaaaagggaaagauagucaaaucagucgaacugaaugccccuaauuaucacuaugaggaaugcuccuguuauccugauucuagugaaaucacauguguaugcagggauaacuggcauggcucgaaucgaccgugggugucuuucaaccagaaucuggaauaucagauaggauacauaugcagugggauuuucggagacaauccacgcccuaaugauaagacaggcaguugugguccaguaucgucuaauggagcaaauggaguaaaaggauuuucauucaaauacggcaaugguguuuggauagggagaacuaaaagcauuaguucaagaaacgguuuugagaugauuugggauccgaacggauggacugggacagacaauaauuucucaauaaagcaagauaucguaggaauaaaugaguggucaggauauagcgggaguuuuguucagcauccagaacuaacaggacuggauuguauaagaccuugcuucuggguugaacuaaucagagggcgacccaaagagaacacaaucuggacuagcgggagcagcauauccuuuugugguguaaacagugacacuguggguuggucuuggccagacggugcugaguugccauuuaccauugacaaguaa

SEQ ID NO: 50927 - RNA, 1410 nt, Artificial Sequence
  derived and/or modified CDS sequence (wt) from neuraminidase__InfluenzaA__ADI49720
augaauccaaaccaaaagauaauaaccauugguucggucuguaugacaauuggaauggcuaacuuaauauuacaaauuggaaacauaaucucaauauggauuagccacucaauucaacuugggaaucaaaaucagauugaaacaugcaaucaaagcgucauuacuuaugaaaacaacacuuggguaaaucagacauauguuaacaucagcaacaccaacuuugcugcuggacagucagugguuuccgugaaauuagcgggcaauuccucucucugcccuguuaguggaugggcuauauacaguaaagacaacaguauaagaaucgguuccaagggggauguguuugucauaagggaaccauucauaucaugcucccccuuggagugcagaaccuucuucuugacucaaggggccuugcuaaaugacaaacauuccaauggaaccauuaaagacaggagcccauaucgaacccuaaugagcuguccuauuggugaaguucccucuccauacaacucaagauuugagucagucgcuuggucagcaagugcuugucaugauggcaucaauuggcuaacaauuggaauuucuggcccagacaauggggcaguggcuguguuaaaguacaacggcauaauaacagacacuaucaagaguuggagaaacaauauauugagaacacaagagucugaaugugcauguguaaaugguucuugcuuuacuguaaugaccgauggaccaagugauggacaggccucauacaagaucuucagaauagaaaagggaaagauagucaaaucagucgaaaugaaugccccuaauuaucacuaugaggaaugcuccuguuauccugauucuagugaaaucacaugugugugcagggauaacuggcauggcucgaaucgaccgugggugucuuucaaccagaaucuggaauaucagauaggauacauaugcagugggauuuucggagacaauccacgcccuaaugauaagacaggcaguugugguccaguaucgucuaauggagcaaauggaguaaaaggauuuucauucaaauacggcaaugguguuuggauagggagaacuaaaagcauuaguucaagaaacgguuuugagaugauuugggauccgaacggauggacugggacagacaauaacuucucaauaaagcaagauaucguaggaauaaaugaguggucaggauauagcgggaguuuuguucagcauccagaacuaacagggcuggauuguauaagaccuugcuucuggguugaacuaaucagagggcgacccaaagagaacacaaucuggacuagcgggagcagcaucuccuuuugugguguaaacagugacacuguggguuggucuuggccagacggugcugaguugccauuuaccauugacaaguaa

SEQ ID NO: 50928 - RNA, 1410 nt, Artificial Sequence; identical to SEQ ID NO: 48953
  derived and/or modified CDS sequence (wt) from neuraminidase__InfluenzaA__ADI49730

SEQ ID NO: 50929 - RNA, 1410 nt, Artificial Sequence; identical to SEQ ID NO: 48953
  derived and/or modified CDS sequence (wt) from neuraminidase__InfluenzaA__ADI49740

SEQ ID NO: 50930 - RNA, 1410 nt, Artificial Sequence; identical to SEQ ID NO: 48953
  derived and/or modified CDS sequence (wt) from neuraminidase__InfluenzaA__ADI49750

SEQ ID NO: 50931 - RNA, 1410 nt, Artificial Sequence; identical to SEQ ID NO: 48750
  derived and/or modified CDS sequence (wt) from neuraminidase__InfluenzaA__ADI49760

SEQ ID NO: 50932 - RNA, 1410 nt, Artificial Sequence; identical to SEQ ID NO: 48780
  derived and/or modified CDS sequence (wt) from neuraminidase__InfluenzaA__ADI49780

SEQ ID NO: 50933 - RNA, 1410 nt, Artificial Sequence
  derived and/or modified CDS sequence (wt) from neuraminidase__InfluenzaA__ADI49790
augaauccaaaccaaaagauaauaaccauugguucggucuguaugacaauuggaauggcuaacuuaauauuacaaauuggaaacauaaucucaauauggauuagccacucaauucaacuugggaaccaaaaucagauugaaacaugcaaucaaagcgucauuacuuaugaaaacaacacuuggguaaaucagacauauguuaacaucagcaacaccaacuuugcugcuggacagucagugguuuccgugaaauuagcgggcaauuccucucucugcccuguuaguggaugggcuauauacaguaaagacaacaguguaagaaucgguuccaagggggauguguuugucauaagggaaccauucauaucaugcucccccuuggaaugcagaaccuucuucuugacucaaggggccuugcuaaaugacaaacauuccaauggaaccauuaaagacaggagcccauaucgaacccuaaugagcuguccuauuggugaaguucccucuccauacaacucaagauuugagucagucgcuuggucagcaagugcuugucaugauggcaucaauuggcuaacaauuggaauuucuggcccagacaauggggcaguggcuguguuaaaguacaacggcauaauaacagacacuaucaagaguuggagaaacaauauauugagaacacaagagucugaaugugcauguguaaaugguucuugcuuuacuguaaugaccgauggaccaaguaauggacaggccucauacaagaucuucagaauagaaaagggaaagauagucaaaucagucgaaaugaaugccccuaauuaucacuaugaggaaugcuccuguuauccugauucuagugaaaucacaugugugugcagggauaacuggcauggcucgaaucgaccgugggugucuuucaaccagaaucuggaauaucagauaggauacauaugcagugggauuuucggagacaauccacgcccuaaugauaagacaggcaguugugguccaguaucgucuaauggagcaaauggaguaaaaggauuuucauucaaauacggcaaugguguuuggauagggagaacuaaaagcauuaguucaagaaacgguuuugagaugauuugggauccgaacggauggacugggacagacaauaacuuuucaauaaagcaagauaucguaggaauaaaugaguggucaggauauagcgggaguuuuguucagcauccagaacuaacagggcuggauuguauaagaccuugcuucuggguugaacuaaucagagggcgacccaaagagaacacaaucuggacuagcgggagcagcauauccuuuugugguguaaacagugacacuguggguuggucuuggccagacggugcugaguugccauuuaccauugacaaguaa

SEQ ID NO: 50934 - RNA, 1410 nt, Artificial Sequence; identical to SEQ ID NO: 48750
  derived and/or modified CDS sequence (wt) from neuraminidase__InfluenzaA__ADI49821

SEQ ID NO: 50935 - RNA, 1410 nt, Artificial Sequence; identical to SEQ ID NO: 48761
  derived and/or modified CDS sequence (wt) from neuraminidase__InfluenzaA__ADI50029

SEQ ID NO: 50936 - RNA, 1410 nt, Artificial Sequence
  derived and/or modified CDS sequence (wt) from neuraminidase__InfluenzaA__ADI52830
augaauccaaaccaaaagauaauaaccauugguucggucuguaugacaauuggaauggccaacuuaauauuacaaauuggaaacauaaucucaauauggauuagccacucaauucaacuugggaaucaaaaucagauugaaacaugcaaucaaagcgucauuacuuaugaaaacaacacuuggguaaaucagacauauguuaacaucagcaacaccaacuuugcugcuggacagucagugguuuccgugaaauuagcgggcaauuccucucucugcccuguuaguggaugggcuauauacaguaaagacaacaguguaagaaucgguuccaagggggauguguuugucauaagggaaccauucauaucaugcucccccuuggaaugcagaaccuucuucuugacucaaggggccuugcuaaaugacaaacauuccaauggaaccauuaaagacaggagcccauaucgaacccuaaugagcuguccuauuggugaaguucccuccccauacaacucaagauuugagucagucgcuuggucagcaagugcuugucaugauggcaucaauuggcuaacaauuggaauuucuggcccagacaauggggcaguggcuguguuaaaguacaacggcauaauaacagacacuaucaagaguuggagaaacaauauauugagaacacaagagucugaaugugcauguguaaaugguucuugcuuuacuguaaugaccgauggaccaagugauggacaagccucauacaagaucuucagaauagaaaagggaaagauagucaaaucagucgaaaugaaugccccuaauuaucacuaugaggaaugcuccuguuauccugauucuagugaaaucacaugugugugcagagauaacuggcauggcucgaaucgaccguggguuucuuucaaccagaaucuggaauaucagauaggauacauaugcagugggauuuucggagacaauccacgcccuaaugauaagacaggcaguugugguccaguaucgucuaauggagcaaauggaguaaaaggauuuucauucaaauacggcaaugguguuuggauagggagaacuaaaagcauuaguucaagaaacgguuuugagaugauuugggauccgaacggauggacuggaacagacaauaacuucucaauaaagcaagauaucguaggaauaaaugaguggucaggauauagcgggaguuuuguucagcauccagaacuaacagggcuggauuguauaagaccuugcuucuggguugaacuaaucagagggcgacccaaagagaacacaaucuggacuagcgggagcagcauauccuuuugugguguaaacagugacacuguggguuggucuuggccagacggugaugaguugccauuuaccauugacaaguaa

SEQ ID NO: 50937 - RNA, 1410 nt, Artificial Sequence
  derived and/or modified CDS sequence (wt) from neuraminidase__InfluenzaA__ADI52831
augaauccaaaccaaaagauaauaaccauugguucggucuguaugacaauuggaauggcuaacuuaauauuacaaauuggaaacauaaucucaauauggauuagccacucaauucaacuugggaaucaaaaucagauugaaacaugcaaucaaagcgucauuacuuaugaaaacaacacuuggguaaaucagacauauguuaacaucagcaacaccaacuuugcugcuggacagucagugguuuccgugaaauuagcgggcaauuccucucucugcccuguuaguggaugggcuauauacaguaaagacaacaguauaagaaucgguuccaagggggauguguuugucauaagggaaccauucauaucaugcucccccuuggaaugcagaaccuucuucuugacucaaggggccuugcuaaaugacaaacauuccaauggaaccauuaaagacaggagcccauaucgaacccuaaugagcuguccuauuggugaaguucccucuccauacaacucaagauuugagucagucgcuuggucagcaagugcuugucaugauggcaucaauuggcuaacaauuggaauuucuggcccagacaauggggcaguggcuguguuaaaguacaacggcauaauaacagacacuaucaagaguuggagaaacaauauauugagaacacaagagucugaaugugcauguguaaaugguucuugcuuuacuguaaugaccgauggaccaagugauggacaggccucauacaagaucuucagaauagaaaagggaaagauagucaaaucagucgaaaugaaugccccuaauuaucacuaugaggaaugcuccuguuauccugauucuagugaaaucacaugugugugcagggauaacuggcauggcucgaaucgaccgugggugucuuucaaccagaaucuggaauaucagauaggauacauaugcagugggauuuucggagacaauccacgcccuaaugauaagacaggcaguugugguccaguaucgucuaauggagcaaauggaguaaaaggauuuucauucaaauacggcaaugguguuuggauagggagaacuaaaagcguuaguucaagaaacgguuuugagaugauuugggauccgaacggauggacugggacagacaauaacuucucaauaaagcaagauaucguaggaauaaaugaauggucaggauauagcgggaguuuuguucagcauccagaacuaacagggcuggauuguauaagaccuugcuucuggguugaacuaaucagagggcgacccaaagagaacacaaucuggacuagcgggagcaguauauccuuuugugguguaaacagugacacuguggguuggucuuggccagacggugcugaguugccauuuaccauugacaaguaa

SEQ ID NO: 50938 - RNA, 1410 nt, Artificial Sequence; identical to SEQ ID NO: 50512
  derived and/or modified CDS sequence (wt) from neuraminidase__InfluenzaA__ADI52832

SEQ ID NO: 50939 - RNA, 1410 nt, Artificial Sequence
  derived and/or modified CDS sequence (wt) from neuraminidase__InfluenzaA__ADI52833
augaauccaaaccaaaagauaauaaccauugguucggucuguaugacaauuggaauggcuaacuuaauauuacaaauuggaaacauaaucucaauauggauuagccacucaauucaacuugggaaucaaaaucagauugaaacaugcaaucaaagcgucauuacuuaugaaaacaacacuuggguaaaucagacauauguuaacaucagcaacaccaacuuugcugcuggacagucagugguuuccgugaaauuagcgggcaauuccucucucugcccuguuaguggaugggcuauauacaguaaagacaacaguauaagaaucgguuccaagggggauguguuugucauaagggaaccauucauaucaugcucccccuuggaaugcagaaccuucuucuugacucaaggggccuugcuaaaugacaaacauuccaauggaaccauuaaagacaggagcccauaucgaacccuaaugagcuguccuauuggugaagcucccucuccauacaacucaagauuugagucagucgcuuggucagcaagugcuugucaugauggcaucaauuggcuaacaauuggaauuucuggcccagacaauggggcaguggcuguguuaaaguacaacggcauaauaacagacacuaucaagaguuggagaaacaauauauugagaacacaagagucugaaugugcauguguaaaugguucuugcuuuacuguaaugaccgauggaccaagugauggacaggccucauacaagaucuucagaauagaaaagggaaagauagucaaaucagucgaaaugaaugccccuaauuaucacuaugaggaaugcuccuguuauccugauucuagugaaaucacaugugugugcagggauaacuggcauggcucgaaucgaccgugggugucuuucaaccagaaucuggaauaucagauaggauacauaugcagugggauuuucggagacaauccacgcccuaaugauaagacaggcaguugugguccaguaucgucuaauggagcaaauggaguaaaaggauuuucauucaaauacggcaaugguguuuggauagggagaacuaaaagcauuaguucaagaaacgguuuugagaugauuugggauccgaacggauggacugggacagacaauaacuucucaauaaagcaagauaucguaggaauaaaugaauggucaggauauagcgggaguuuuguucagcauccagaacuaacagggcuggauuguauaagaccuugcuucuggguugaacuaaucagagggcgacccaaagagaacacaaucuggacuagcgggagcaguauauccuuuugugguguaaacagugacacuguggguuggucuuggccagacggugcugaguugccauuuaccauugacaaguaa

SEQ ID NO: 50940 - RNA, 1413 nt, Artificial Sequence
  derived and/or modified CDS sequence (wt) from neuraminidase__InfluenzaA__ADI75821
augaacccaaaucaaaagauaauaaccauuggaucaaucaguauagcaaucggaauaauuagucuaauguuacaaauaggaaauauuauuucaauaugggcuagucacucaauccaaacuggaagucaaaacaacacuggaauaugcaaccaaagaaucaucacauaugaaaacagcaccugggugaaccacacauauguuaauauuaacaacacuaauguuguugcuggagaggacaaaacuucagugacauuggccggcaauucaucucuuuguucuaucaguggaugggcuauauacacaaaagacaacagcauaagaauuggcuccaaaggagauguuuuugucauaagagaaccuuucauaucauguucucacuuggaaugcagaaccuuuuuucugacccaaggcgcucuauuaaaugacaaacauucaaaugggaccguaaaggacagaaguccuuauagggccuugaugagcuguccucuaggugaagcuccguccccauacaauucaaaguucgaaucaguugcauggucagcaagcgcaugccaugauggcaugggcugguuaacaaucggaauuucugguccagacaauggagcuguggcuguacuaaaauacaacggaauaauaacugggaccauaaaaaguuggaaaaagcaaauauuaagaacacaagagucugaaugugucuguaugaacgggucauguuucaccauaaugaccgauggcccgaguaauaaggccgccucguacaaaauuuucaagaucgaaaaggggaagguuacuaaaucaauagaguugaaugcacccaauuuuuauuaugaggaaugcuccuguuacccagacacuggcauagugauguguguaugcagggacaacuggcaugguucaaaucgaccuugggugucuuuuaaucaaaacuuggauuaucaaauaggauacaucugcaguggaguguuuggugacaauccgcgucccgaagauggagagggcagcugcaauccagugacuguugauggagcaaacggaguaaaaggguuuucauacaaauaugguaaugguguuuggauaggaaggaccaaaaguaacagacuuagaaagggguuugagaugauuugggauccuaauggauggacaaauaccgacagugauuucucagugaaacaggauguuguagcaauaacugauuggucaggguacagcggaaguuucguccaacauccugaguuaacaggauuggacuguauaagaccuugcuucuggguugaguuagucagagggcugccuagagaaaauacaacaaucuggacuagugggagcagcauuucuuuuuguggcguuaauagugauacugcaaacuggucuuggccagacggugcugaguugccguucaccaucgacaaguag

SEQ ID NO: 50941 - RNA, 1410 nt, Artificial Sequence
  derived and/or modified CDS sequence (wt) from neuraminidase__InfluenzaA__ADI75832
augaauccaaaucaaaagauaauaacgauuggcucuguuucucucaccauuuccacaauaugcuucuucaugcaaauugccaucuugauaacuacuguaacauugcauuucaagcaauaugaauucaacucccccccaaacaaccaagugaugcugugugaaccaacaauaauagaaagaaacauaacagagauaguguaucugaccaacaccaccauagagaaggaaauaugccccaaacuagcagaauauagaaauuggucaaagccgcaaugugacauuacaggauuugcaccuuuuucuaaggacaauucgauuaggcuuuccgcugguggggacaucugggugacaagagaaccuuaugugucaugcgauccugacaaguguuaucaauuugcccuuggacagggaacaacacuaaacaacgugcauucaaauaacacaguacgugauaggaccccuuaucggacccuauugaugaaugaguuagguguuccuuuucaucuggggaccaagcaagugugcauagcaugguccagcucaaguugucacgauggaaaagcauggcugcauguuuguauaacgggggaugauaaaaaugcaacugcuagcuucauuuacaaugggaggcuuguagauaguguuguuucaugguccaaagaaauccucaggacccaggagucagaaugcgucuguaucaauggaacuuguacaguaguaaugacugaugggagugcuucaggaaaagcugauacuaaaauacuauucauugaggaggggaaaaucguucauaccagcacauugucaggaagugcucagcaugucgaggagugcucuugcuauccucgauauccuggugucagaugugucugcagagacaacuggaaaggcuccaauaggcccaucguagauauaaacauaaaggaucauagcauuguuuccaguuauguguguucaggacuuguuggagacacacccagaaaaaacgacagcuccagcaguagccauuguuuggauccuaacaaugaagaagguggucauggagugaaaggcugggccuuugaugauggaaaugacguguggaugggaagaacgaucagcgagaagucacgcuuaggguaugaaaccuucaaagucauugaaggcuggucaaaccauaaguccaaauugcagauaaauaggcaagucauaguugacagagguaauagguccgguuauucugguauuuucucuguugaaggcaaaagcugcaucaaucggugcuuuuauguggaguugauuaggggaagaaaagaggaaacugaagucuuguggaccucaaacaguauuguuguguuuuguggcaccucagguacauauggaacaggcucauggccugauggggcggaccucaaucucaugccuauauaa

SEQ ID NO: 50942 - RNA, 1413 nt, Artificial Sequence
  derived and/or modified CDS sequence (wt) from neuraminidase__InfluenzaA__ADI75854
augaacccaaaucaaaagauaauaaccauuggaucaaucaguauagcaaucggaauaauuagucuaauguugcaaauaggaaguauuauuucaauaugggcuagucacucaauccaaacuggaagucaaaacaauacuggaauaugcaaccaaagaaucaucacauaugaaaacagcaccugggugaaucacacauauguuaauauuaacaacacuaauguuguugcuggagaggacaaaacgucagugacauuggccggcaauucaucucuuuguucuaucaguggaugggcuauauacacaaaagacaacagcauaagaauuggcuccaaaggagauguuuuugucauaagagaaccuuucauaucauguucucacuuggaaugcagaaccuuuuuucugacccaaggcgcucuauuaaaugacaaacauucaaaugggaccguaaaggacagaaguccuuauagggccuuaaugagcuguccucuaggugaagcuccguccccauacaauucaaaguucgaaucaguugcauggucagcaagcgcaugccaugauggcaugggcugguuaacaaucggaauuucugguccagacaauggagcuguggcuguacuaaaauacaacggaauaauaacuggaaccauaaaaaguuggaaaaagcaaauauuaagaacacaagagucugaaugugucuguaugaacgggucauguuucaccauaaugaccgauggcccgaguaauaaagccgccucguacaaaauuuucaagaucgaaaaggggaagguuacuaaaucaauagaguugaaugcacccaauuuuuauuaugaggaaugcuccuguuacccagacacuggcauagugauguguguaugcagggacaacuggcaugguucaaaucgaccuugggugucuuuuaaucaaaauuuggauuaucaaauaggauacaucugcaguggaguguuuggugacaauccgcgucccgaagauggagagggcagcugcaauccagugacuguagauggagcaaacggaguaaaaggguuuucauacaaauaugguaaugguguuuggauaggaaggaccaaaaguaacagacuuagaaagggguuugagaugauuugggauccuaauggauggacaaauaccgacagugauuucucagugaaacaggauguuguagcaauaacugauuggucaggguacagcggaaguuucguccaacauccugaauugacaggauuggacuguauaagaccuugcuucuggguugaguuagucagagggcugccuagagaaaauacaacaaucuggacuagugggagcagcauuucuuuuuguggcguuaauagugauacugcaaacuggucuuggccagacggugcugaguugccguucaccauugacaaguag

SEQ ID NO: 50943 - RNA, 1410 nt, Artificial Sequence
  derived and/or modified CDS sequence (wt) from neuraminidase__InfluenzaA__ADI75876
augaauccaaaucaaaagauaauaacgauuggcucuguuucucucaccauuuccacaauaugcuucuucaugcaaauugccaucuugauaacuacuguaacauugcauuucaagcaauaugaauucaacucccccccaaacaaccaagugaugcugugugaaccaacaauaauagagagaaacauaacagagauaguguaucugaccaacaccaccauagagaaggaaguaugccccaaacuagcagaauacagaaauuggucaaagccgcaaugugacauuacaggauuugcaccuuuuucuaaggacaauucgauuaggcuuuccgcugguggggacaucugggugacaagagaaccuuaugugucaugcgauccugacaaguguuaucaauuugcccuuggacagggaacaacacuaaacaacgugcauucaaauaacacaguacgugauaggaccccuuaucggacccuauugaugaaugaguuagguguuccuuuucaucuggggaccaagcaagugugcauagcaugguccagcucaaguugucacgauggaaaagcauggcugcauguuuguauaacgggggaugauaaaaaugcaacugcuagcuucauuuacaaugggaggcuuguagauaguguuguuucaugguccaaagaaauccucaggacccaggagucagaaugcgucuguaucaauggaacuuguacaguaguaaugacugaugggagugcuucaggaaaagcugauacuaaaauacuauucauugaggaggggaaaaucguucauacuagcacauugucaggaagugcucagcaugucgaggagugcucuugcuauccucgauauccuggugucagaugugucugcagagacaacuggaaaggcuccaauaggcccaucguagauauaaacauaaaggaucauagcguuguuuccaguuauguguguucaggacuuguuggagacacacccagaaaaaacgacagcuccagcaguagccauuguuuggauccuaacaaugaagaagguggucauggagugaaaggcugggccuuugaugauggaaaugacguguggaugggaagaacgaucagcgagaagucacgcuuaggguaugaaaccuucaaagucauugaaggcugguccaaccauaaguccaaauugcagauaaauaggcaagucauaguugacagagguaauagguccgguuauucugguauuuucucuguugaaggcaaaagcugcaucaaucggugcuuuuauguggaguugauuaggggaagaaaagaggaaacugaagucuuguggaccucaaacaguauuguuguguuuuguggcaccucagguacauauggaacaggcucauggccugauggggcggaccucaaucucaugccuauauaa

SEQ ID NO: 50944 - RNA, 1410 nt, Artificial Sequence
  derived and/or modified CDS sequence (wt) from neuraminidase__InfluenzaA__ADI75887
augaauccaaaucaaaagauaauaacgauuggcucuguuucucucaccauuuccacaauaugcuucuucaugcaaauugccaucuugauaacuacuguaacauugcauuucaagcaauaugaauucaacucccccccaaacaaccaagugaugcugugugaaccaacaauaauagaaagaaacauaacagagauaguguaucugaccaacaccaccauagagaaggaaauaugccccaaacuagcagaauacagaaauuggucaaagccgcaaugugacauuacaggauuugcaccuuuuucuaaggacaauucgauuaggcuuuccgcugguggggacaucugggugacaagagaaccuuaugugucaugcgauccugacaaguguuaucaauuugcccuuggacagggaacaacacuaaacaacgugcauucaaauaacacaguacgugauaggaccccuuaucggacccuauugaugaaugaguuagguguuccuuuucaucuggggaccaagcaagugugcauagcaugguccagcucaaguugucacgauggaaaagcauggcugcauguuuguauaacgggggaugauaaaaaugcaacugcuagcuucauuuacaaugggaggcuuguagauaguguuguuucaugguccaaagaaauccucaggacccaggagucagaaugcgucuguaucaauggaacuuguacaguaguaaugacugaugggagugcuucaggaaaagcugauacuaaaauacuauucauugaggaggggaaaaucguucauacuagcacauugucaggaagugcucagcaugucgaggagugcucuugcuauccucgauauccuggugucagaugugucugcagagacaacuggaaaggcuccaauaggcccaucguagauauaaacauaaaggaucauagcauuguuuccaguuauguguguucaggacuuguuggagacacacccagaaaaaacgacagcuccagcaguagccauuguuuggauccuaacaaugaagaagguggucauggagugaaaggcugggccuuugaugauggaaaugacguguggaugggaagaacgaucagcgagaagucacgcuuaggguaugaaaccuucaaagucauugaaggcugguccaaccauaaguccaaauugcagauaaauaggcaagucauaguugacagggguaauagauccgguuauucugguauuuucucuguugaaggcaaaagcugcaucaaucggugcuuuuauguggaguugauuaggggaagaaaagaggagacugaagucuuguggaccucaaacaguauuguuguguuuuguggcaccucagguacauauggaacaggcucauggccugauggggcggaccucaaucucaugccuauauaa

SEQ ID NO: 50945 - RNA, 1413 nt, Artificial Sequence
  derived and/or modified CDS sequence (wt) from neuraminidase__InfluenzaA__ADI75909
augaacccaaaucaaaagauaauaaccauuggaucaaucaguauagcaaucggaauaauuagucuaauguugcaaauaggaaauauuauuucaauaugggcuagucacucaauccaaacugggagucaaaacaacacuggaauaugcaaccaaagaaucaucacauaugaaaacagcaccugggugaaucacacuuauguuaauauuaacaacacuaauguuguugcuggagaggacaaaacaucagugacauuggccggcaacucaucucuuuguucuaucaguggaugggcuauauacacaaaagacaacagcauaagaauuggcuccaaaggagauguuuuugucauaagagaaccuuucauaucauguucucacuuggaaugcagaaccuuuuuucugacccaaggcgcucuauuaaaugacaaacauucaaaugggaccguaaaggacagaagcccuuauagggccuuaaugagcuguccucuaggugaagcuccguccccauacaauucaaaguucgaaucaguugcauggucagcaagcgcaugccaugauggcaugggcugguuaacaaucggaauuucugguccagacaauggagcuguggcuguacuaaaauacaacggaauaauaacuggaaccauaaaaaguuggaaaaagcaaauauuaagaacacaagagucugaaugugucuguaugaacgggucauguuucaccauaaugaccgauggcccgaguaauaaggccgccucguacaaaauuuucaagaucgaaaaggggaagguuacuaaaucaauagaguugaaugcacccaauuuuuauuaugaggaaugcuccuguuacccagauacuggcauagugauguguguaugcagggacaacuggcaugguucaaaucgaccuugggugucuuuuaaucaaaacuuggauuaucaaauaggauacaucugcaguggaguguuuggugacaauccgcgucccgaagauggagagggcagcugcaauccagugacuguugauggagcaaacggaguaaaaggguuuucauacaaauaugguaaugguguuuggauagggaggaccaaaaguaacagacuuagaaagggguuugagaugauuugggauccuaauggauggacaaauaccgacagugauuucucagugaaacaggauguuguagcaauaacugauuggucaggguacagcggaaguuucguccaacauccugaguuaacaggauuggacuguauaagaccuugcuucuggguugaguuagucagagggcugccuagagaaaauacaacaaucuggacuagugggagcagcauuucuuuuuguggcguuaauagugauacugcaaacuggucuuggccagacggugcugaguugccguucaccauugacaaguag

SEQ ID NO: 50946 - RNA, 1410 nt, Artificial Sequence
  derived and/or modified CDS sequence (wt) from neuraminidase__InfluenzaA__ADI75920
augaauccaaaucaaaagauaauaacgauuggcucuguuucucucaccauuuccacaauaugcuucuucaugcaaauugccaucuugguaacuacuguaacauugcauuucaagcaauaugaauucaacucccccccaaacaaccaagugaugcugugugaaccaacaauaauagaaagaaacauaacagagauaguguaucugaccaacaccaccauagagaaggaaauaugccccaaacuagcagaauacagaaauuggucaaagccgcaaugugacauuacaggauuugcaccuuuuucuaaggacaauucgauuaggcuuuccgcugguggggacaucugggugacaagagaaccuuaugugucaugcgauccugacaaguguuaucaauuugcccuuggacagggaacaacacuaaacaacgugcacucaaauaacacaguacgugauaggaccccuuaucggacccuauugaugaaugaguuagguguuccuuuucaucuggggaccaagcaagugugcauagcaugguccagcucaaguugucacgauggaaaagcauggcugcauguuuguauaacgggggaugauaaaaaugcaacugcuagcuucauuuacaaugggaggcuuguagauaguguuguuucaugguccaaagacauccucaggacccaggagucagaaugcguuuguaucaauggaacuuguacaguaguaaugacugaugggagugcuucaggaaaagcugauacuaaaauacuauucauugaggaggggaaaaucguucauacuagcacauugucaggaagugcucagcaugucgaggagugcuccugcuauccucgauauccuggugucagaugugucugcagagacaacuggaaaggcuccaauaggcccaucguagauauaaacauaaaggaucauagcauuguuuccaguuauguguguucaggacuuguuggagacacacccagaaaaaacgacagcuccagcaguagccauuguuuggauccuaacaaugaagaagguggucauggagugaaaggcugggccuuugaugauggaaaugacguguggaugggaagaacgaucagcgagaagucacgcuuaggguaugaaaccuucaaagucauugaaggcugguccaacccuaaauccaaauugcagauaaauaggcaagucauaguugacagagguaauagguccgguuauucugguauuuucucuguugaaggcaaaagcugcaucaaucggugcuuuuauguggaguugauaaggggaagaaaagaggaaacugaagucuuguggaccucaaacaguauuguuguguuuuguggcaccucagguacauauggaacaggcucauggccugauggggcgaacaucaaucucaugccuauauaa

SEQ ID NO: 50947 - RNA, 1413 nt, Artificial Sequence
  derived and/or modified CDS sequence (wt) from neuraminidase__InfluenzaA__ADI77352
augaacccaaaucaaaagauaauaaccauuggaucaaucaguauagcaaucggaauaauuagucuaauguugcaaauaggaaauauuauuucaauaugggcuagucacucaauccaaacugggagucaaaacaacacuggaauaugcaaccaaagaaucaucacauaugaaaacagcaccugggugaaucacacauauguuaauauuaacaacacuaauguuguugcuggagaggacaaaacaucagugacauuggccggcaauucaucucuuuguucuaucaguggaugggcuauauacacaaaagacaacagcauaagaauuggcuccaaaggagauguuuuugucauaagagaaccuuucauaucauguucucacuuggaaugcagaaccuuuuuucugacccaaggcgcucuauuaaaugacaaacauucaaaugggaccguaaaggacagaaguccuuauagggccuuaaugagcuguccucuaggcgaagcuccguccccauacaauucaaaguucgaaucaguugcauggucagcaagcgcaugccaugauggcaugggcugguuaacaaucggaauuucugguccagacaauggagcuguggcuguacuaaaauacaacggaauaauaacuggaaccauaaaaaguuggaaaaagcaaauauuaagaacacaagagucugaaugugucuguaugaacgggucauguuucaccauaaugaccgauggcccgaguaauaaggccgccucguacaaaauuuucaagaucgaaaaggggaagguuacuaaaucaauagaguugaaugcacccaauuuuuauuaugaggaaugcuccuguuacccagauacuggcauagugauguguguaugcagggacaacuggcaugguucaaaucgaccuugggugucuuuuaaucaaaacuuggauuaucaaauaggauacaucugcaguggaguguuuggugacaauccgcgucccgaagauggagagggcagcugcaauccaguaacuguugauggagcaaacggaguaaaaggguuuucauacaaauaugguaaugguguuuggauagggaggaccaaaaguaacagacuuagaaagggguuugagaugauuugggauccuaauggauggacaaauaccgacagugauuucucagugaaacaggauguuguagcaauaacugauuggucaggguacagcggaaguuucguccaacauccugaguuaacaggauuggacuguauaagaccuugcuucuggguugaguuagucagagggcugccuagagaaaauacaacaaucuggacuagugggagcagcauuucuuuuuguggcguuaauagugauacugcaaacuggucuuggccagacggugcugaguugccguucaccauugacaaguag

SEQ ID NO: 50948 - RNA, 1410 nt, Artificial Sequence; identical to SEQ ID NO: 48750
  derived and/or modified CDS sequence (wt) from neuraminidase__InfluenzaA__ADI77363

SEQ ID NO: 50949 - RNA, 1410 nt, Artificial Sequence; identical to SEQ ID NO: 49927
  derived and/or modified CDS sequence (wt) from neuraminidase__InfluenzaA__ADI99500

SEQ ID NO: 50950 - RNA, 1410 nt, Artificial Sequence
  derived and/or modified CDS sequence (wt) from neuraminidase__InfluenzaA__ADI99553
augaauccaaaccaaaagauaauaaccauugguucggucuguaugacaauuggaauggcuaacuuaauauuacaaauuggaaacauaaucucaauauggauuagccacucaauucaacuugggaaucaaaaucagauugaaacaugcaaucaaagcgucauuacuuaugaaaacaacacuuggguaaaucagacauauguuaacaucagcaacaccaacuuugcugcuggacagucaguggauuccgugaaauuagcgggcaauuccucucucugcccuguuaguggaugggcuauauacaguaaagacaacaguauaagaaucgguuccaagggggauguguuugucauaagggaaccauucauaucaugcucccccuuggaaugcagaaccuucuucuugacucaaggggccuugcuaaaugacaaacauuccaauggaaccauuaaagacaggagcccauaucgaacccuaaugagcuguccuauuggugaaguucccucuccauacaacucaagauuugagucagucgcuuggucagcaagugcuugucaugauggcaucaauuggcuaacaauuggaauuucuggcccagacaauggggcaguggcuguauuaaaauacaacggcauaauaacagacacuaucaagaguuggagaaacaauauauugagaacacaagagucugaaugugcauguguaaaugguucuugcuuuacuguaaugaccgauggaccaagugauggacaggccucauacaagaucuucagaauagaaaagggaaagauagucaaaucagucgaaaugaaugccccuaauuaucacuaugaggaaugcuccuguuauccugauucuagugaaaucacaugugugugcagggauaacuggcauggcucgaaucgaccgugggugucuuucaaccagaaucuggaauaucagauaggauacauaugcagugggauuuucggagacaauccacgcccuaaugauaagacaggcaguugugguccaguaucgucuaauggagcaaauggaguaaaaggauuuucauucaaauacggcaaugguguuuggauagggagaacuaaaagcauuaguucaagaaacgguuuugagaugauuugggauccgaacggauggacugggacagacaauaacuucucaauaaagcaagauaucguaggaauaaaugaguggucaggauauagcgggaguuuuguucagcauccagaacuaacagggcuggauuguauaagaccuugcuucuggguugaacuaaucagagggcgacccaaagagaacacaaucuggacuagcgggagcagcauauccuuuugugguguaaacagugacacuguggguuggucuuggccagacggugcugaguugccauuuaccauugacaaguaa

SEQ ID NO: 50951 - RNA, 1410 nt, Artificial Sequence
  derived and/or modified CDS sequence (wt) from neuraminidase__InfluenzaA__ADI99563
augaauccaaaccaaaagauaauaaccauugguucggucuguaugacaauuggaauggcuaacuuaauauuacaaauuggaaacauaaucucaauauggauuagccacucaauucaacuugggaaucaaaaucagauugaaacaugcaaucaaagcgucauuacuuaugaaaacaacacuuggguaaaucagacauauguuaacaucagcaacaccaacuuugcugcuggacagucagugguuuccgugaaauuagcgggcaauuccucucucugcccuguuaguggaugggcuauauacaguaaagacaacaguauaagaaucgguuccaagggggauguguuugucauaagggaaccauucauaucaugcucccccuuggaaugcagaaccuucuucuugacucaaggggccuugcuaaaugacaaacauuccaauggaaccauuaaagacaggagcccauaucgaacccuaaugagcuguccuauuggugaaguucccucuccauacaacucaagauuugagucagucgcuuggucagcaagugcuugucaugauggcaucaauuggcuaacaauuggaauuucuggcccagacaauggggcaguggcuguguuaaaguacaacggcauaauaacagacacuaucaagaguuggagaaacaauauauugagaacacaagagucugaaugugcauguguaaaugguucuugcuuuacuguaaugaccgauggaccaagugauggacaggccucauacaagaucuucagaauagaaaagggaaagauagucaaaucagucgaagugaaugccccuaauuaucacuaugaggaaugcuccuguuauccugauucuagugaaaucacaugugugugcagggauaacuggcauggcucgaaucgaccgugggugucuuucaaccagaaucuggaauaucagauaggauacauaugcagugggauuuucggagacaauccacgcccuaaugauaagacaggcaguugugguccaguaucgucuaauggagcaaauggaguaaaaggauuuucauucaaauacggcaaugguguuuggauagggagaacuaaaagcauuaguucaagaaacgguuuugagaugauuugggauccgaacggauggacugggacagacaauaacuucucaauaaagcaagauaucguaggaauaaaugaguggucaggauauagcgggaguuuuguucagcauccagaacuaacagggcuggauuguauaagaccuugcuucuggguugaacuaaucagagggcgacccaaagagaacacaaucuggacuagcgggagcagcauauccuuuugugguguaaacagugacacuguggguuggucuuggccagacggugcugaguugccauuuaccauugacaaguaa

SEQ ID NO: 50952 - RNA, 1410 nt, Artificial Sequence; identical to SEQ ID NO: 50951
  derived and/or modified CDS sequence (wt) from neuraminidase__InfluenzaA__ADI99573

SEQ ID NO: 50953 - RNA, 1410 nt, Artificial Sequence; identical to SEQ ID NO: 50951
  derived and/or modified CDS sequence (wt) from neuraminidase__InfluenzaA__ADI99583

SEQ ID NO: 50954 - RNA, 1410 nt, Artificial Sequence
  derived and/or modified CDS sequence (wt) from neuraminidase__InfluenzaA__ADI99593
augaauccaaaccaaaagauaauaaucauugguucggucuguaugacaauuggaauggcuaacuuaauauuacaaauuggaaacauaaucucaauauggauuagccacucaauucaacuugggaaucaaaaucagauugaaacaugcaaucaaagcgucauuacuuaugaaaacaacacuuggguaaaucagacauauguuaacaucagcaacaccaacuuugcugcuggacagucagugguuuccgugaaauuagcgggcaauuccucucucugcccuguuaguggaugggcuauauacaguaaagacaacaguauaagaaucgguuccaagggggauguguuugucauaagggaaccauucauaucaugcucccccuuggaaugcagaaccuucuucuugacucaaggggccuugcuaaaugacaaacauuccaauggaaccauuaaagacaggagcccauaucgaacccuaaugagcuguccuauuggugaaguucccucuccauacaacucaagauuugagucagucgcuuggucagcaagugcuugucaugauggcaucaauuggcuaacaauuggaauuucuggcccagacaauggggcaguggcuguguuaaaguacaacggcauaauaacagacacuaucaagaguuggagaaacaauauauugagaacacaagagucugaaugugcauguguaaaugguucuugcuuuacuguaaugaccgauggaccaagugauggacaggccucauacaagaucuucagaauagaaaagggaaagauagucaaaucagucgaaaugaaugccccuaauuaucacuaugaggaaugcuccuguuauccugauucuagugaaaucacaugugugugcagggauaacuggcauggcucgaaucgaccgugggugucuuucaaccagaaucuggaauaucagauaggauacauaugcagugggauuuucggagacaauccacgcccuaaugauaagacaggcaguugugguccaguaucgucuaauggagcaaauggaguaaaaggauuuucauucaaauacggcaaugguguuuggauagggagaacuaaaagcauuaguucaagaaacgguuuugagaugauuugggauccgaacggauggacugggacagacaauaacuucucaauaaagcaagauaucguaggaauaaaugaguggucaggauauagcgggaguuuuguucagcauccagaacuaacagggcuggauuguauaagaccuugcuucuggguugaacuaauuagagggcgacccaaagagaacacaaucuggacuagcgggagcagcauauccuuuugugguguaaacagugacacuguggguuggucuuggccagacggugcugaguugccauuuaccauugacaaguaa

SEQ ID NO: 50955 - RNA, 1410 nt, Artificial Sequence
  derived and/or modified CDS sequence (wt) from neuraminidase__InfluenzaA__ADI99613
augaauccaaaccaaaagauaauaaccauugguucggucuguaugacaauuggaauggcuaacuuaauauuacaaauuggaaacauaaucucaauauggauuagccacucaauucaacuugggaaucaaaaucagauugaaacaugcaaucaaagcgucauuacuuaugaaaacaacacuuggguaaaucagacauauguuaacaucagcaacaccaacuuugcugcuggacagucagugguuuccgugaaauuagcgggcaauuccucucucugcccuguuaguggaugggcuauauacaguaaagacaacaguauaagaaucgguuccaagggggauguguuugucauaagggaaccauucauaucaugcucccccuuggaaugcagaaccuucuucuugacucaaggggccuugcuaaaugacaaacauuccaauggaaccauuaaagacaggagcccauaucgaacccuaaugagcuguccuauuggugaaguucccucuccauacaacucaagauuugagucagucgcuuggucagcaagugcuugucaugauggcaucaauuggcuaacaauuggaauuucuggcccagacaauggggcaguggcuguguuaaaguacaacggcauaauaacagacacuaucaagaguuggagaaacaauauauugagaacacaagagucugaaugugcauguguaaaugguucuugcuuuacuguaaugaccgauggaccaagugauggacaggccucauacaagaucuucagaauagaaaagggaaagauagucaaaucagucgaaaugaaugccccuaauuaucacuaugaggaaugcuccuguuauccugauucuagugaaaucacaugugugugcagggauaacuggcauggcucgaaucgaccgugggugucuuucaaccagaaucuggaauaucagauaggauacauaugcagugggauuuucggagacaauccacgcccuaaugauaagacaggcaguugugguccaguaucgucuaauggagcaaauggaguaaaaggauuuucauucaaauacggcaaugguguuuggauagggagaacuaaaagcauuaguucaagaaacgguuuugagaugauuugggauccgaacggauggacugggacagacaauaacuucucaauaaagcaagauaucguaggaauaaaugaauggucaggauauagcgggaguuuuguucagcauccagaacuaacagggcuggauuguauaagaccuugcuucuggguugaacuaaucagagggcgacccaaagagaacacaaucuggacuagcgggagcaucauauccuuuugugguguaaacagugacacuguggguuggucuuggccagacggugcugaguugccauuuaccauugacaaguaa

SEQ ID NO: 50956 - RNA, 1410 nt, Artificial Sequence
  derived and/or modified CDS sequence (wt) from neuraminidase__InfluenzaA__ADI99623
augaauccaaaccaaaagauaauaaccauugguucggucuguaugacaauuggaauggcuaacuuaauauuacaaauuggaaacauaaucucaauauggauuagccacucaauucaacuugggaaucaaaaucagauugaaacaugcaaucaaagcgucauuacuuaugaaaacaacacuuggguaaaucagacauauguuaacaucagcaacaccaacuuugcugcuggacagucagugguuuccaugaaauuagcgggcaauuccucucucugcccuguuaguggaugggcuauauacaguaaagacaacaguauaagaaucgguuccaagggggauguguuugucauaagggaaccauucauaucaugcucccccuuggaaugcagaaccuucuucuugacucaaggggccuugcuaaaugacaaacauuccaauggaaccauuaaagacaggagcccauaucgaacccuaaugagcuguccuauuggugaaguucccucuccauacaacucaagauuugagucagucgcuuggucagcaagugcuugucaugauggcaucaauuggcuaacaauuggaauuucuggcccagacaauggggcaguggcuguguuaaaguacaacggcauaauaacagacacuaucaagaguuggagaaacaauauauugagaacacaagagucugaaugugcauguguaaaugguucuugcuuuacuguaaugaccgauggaccaagugauggacaggccucauacaagaucuucagaauagaaaagggaaagauagucaaaucagucgaaaugaaugccccuaauuaucacuaugaggaaugcuccuguuauccugauucuaaugaaaucacaugugugugcagggauaacuggcauggcucgaaucgaccgugggugucuuuuaaccagaaucuggaauaucagauaggauacauaugcagugggauuuucggagacaauccacgcccuaaugauaagacaggcaguugugguccaguaucgucuaauggagcaaauggaguaaaaggauuuucauucaaauacggcaaugguguuuggauagggagaacuaaaagcauuaguucaagaaacgguuuugagaugauuugggauccgaacggauggacugggacagacaauaacuucucaauaaagcaagauaucguaggaauuaaugaguggucaggauauagcgggaguuuuguucagcauccagaacuaacagggcuggauuguauaagaccuugcuucuggguugaacuaaucagagggcgacccaaagagaacacaaucuggacuagcgggagcagcauauccuuuugugguguaaacagugacacuguggguuggucuuggccagacggugcugaguugccauuuaccauugacaaguaa

SEQ ID NO: 50957 - RNA, 1410 nt, Artificial Sequence
  derived and/or modified CDS sequence (wt) from neuraminidase__InfluenzaA__ADI99633
augaauccaaaccaaaagauaauaaccauugguucggucuguaugacaauuggaauggcuaacuuaauauuacaaauuggaaacauaaucucaauauggauuagccacucaauucaacuugggaaucaaaaucagauugaaacaugcaaucaaagcgucauuacuuaugaaaacaacacuuggguaaaucagacauauguuaacaucagcaacaccaacuuugcugcuggacagucagugguuuccgugaaauuagcgggcaauuccucucucugcccuguuaguggaugggcuauauacaguaaagacaacaguauaagaaucgguuccaagggggauguguuugucauaagggaaccauucauaucaugcucccccuuggaaugcagaaccuucuucuugacucaaggggccuugcuaaaugacaaacauuccaauggaaccauuaaagacaggagcccauaucgaacccuaaugagcuguccuauuggugaaguucccucuccauacaacucaagauuugagucagucgcuuggucagcaagugcuugucaugauggcaucaauuggcuaacaauuggaauuucuggcccagacaauggggcaguggcuguguuaaaguacaacggcauaauaacagacacuaucaagaguuggagaaacaauauauugagaacacaagagucugaaugugcauguguaaaugguucuugcuuuacuguaaugaccgauggaccaagugauggacaggccucauacaagaucuucagaauagaaaagggaaagauagucaaaucagucgaaaugaaugccccuaauuaucacuaugaggaaugcuccuguuauccugauucuagugaaaucacaugugugugcagggauaacuggcauggcucgaaucgaccgugggugucuuucaaccagaaucuggaauaucagauaggauacauaugcagugggauuuucggagacaauccacgcccuaaugauaagaaaggcaguugugguccaguaucgucuaauggagcaaauggaguaaaaggauuuucauucaaauacggcaaugguguuuggauagggagaacuaaaagcauuaguucaagaaacgguuucgagaugauuugggauccgaacggauggacugggacagacaauaacuucucaauaaagcaagauaucguaggaauaaaugaauggucaggauauagcgggaguuuuguucagcauccagaacuaacagggcuggauuguauaagaccuugcuucuggguugaacuaaucagagggcgacccaaagagaacacaaucuggacuagcgggagcagcauauccuuuugugguguaaacagugacacuguggguuggucuuggccagacggugcugaguugccauuuaccauugacaaguaa

SEQ ID NO: 50958 - RNA, 1410 nt, Artificial Sequence; identical to SEQ ID NO: 50176
  derived and/or modified CDS sequence (wt) from neuraminidase__InfluenzaA__ADI99643

SEQ ID NO: 50959 - RNA, 1410 nt, Artificial Sequence
  derived and/or modified CDS sequence (wt) from neuraminidase__InfluenzaA__ADI99653
augaauccaaaccaaaagauaauaaccauugguucggucuguaugacaauuggaauggcuaacuuaauauuacaaauuggaaacauaaucucaauauggauuagccacucaauucaacuugggaaucaaaaucagauugaaacaugcaaucaaagcgucauuacuuaugaaaacaacacuuggguaaaucagacauauguuaacaucagcaacaccaacuuugcugcuggacagucagugguuuccgugaaauuagcgggcaauuccucucucugcccuguuaguggaugggcuauauacaguaaagacaacaguauaagaaucgguuccaagggggauguguuugucauaagggaaccauucauaucaugcucccccuuggaaugcagaaccuucuucuugacucaaggggccuugcuaaaugacaaacauuccaauggaaccauuaaagacaggagcccauaucgaacccuaaugagcuguccuauuggugaaguucccucuccauacaacucaagauuugagucagucgcuuggucagcaagugcuugucaugauggcaucaauuggcuaacaauuggaauuucuggcccagacaauggggcaguggcuguguuaaaguacaacggcauaauaacagacacuaucaagaguuggagaaacaauauauugagaacacaagagucugaaugugcauguguaaaugguucuugcuuuacuguaaugaccgauggaccaagugauggacaggccucauacaagaucuucagaauagaaaagggaaagauagucaaaucagucgaaaugaaugccccuaauuaucacuaugaagaaugcuccuguuauccugauucuagugaaaucacaugugugugcagggauaacuggcauggcucgaaucgaccgugggugucuuucaaccagaaucuggaauaucagauaggauacauaugcagugggauuuucggagacaauccacgcccuaaugauaagacaggcaguugugguccaguaucgucuaauggagcaaauggaguaaaaggauuuucauucaaauacggcaaugguguuuggauagggagaacuaaaagcauuaguucaagaaacgguuuugagaugauuugggauccgaacggauggacugggacagacaauaacuucucaauaaagcaagauaucguaggaauaaaugaguggucaggauauagcgggaguuuuguucagcauccagaacuaacagggcuggauuguauaagaccuugcuucuggguugaacuaaucagagggcgacccaaagagaacacaaucuggacuagcgggagcagcauauccuuuugugguguaaacagugacacuguggguuggucuuggccagacggugcugaguugccauuuaccauugacaaguaa

SEQ ID NO: 50960 - RNA, 1410 nt, Artificial Sequence
  derived and/or modified CDS sequence (wt) from neuraminidase__InfluenzaA__ADI99663
augaauccaaaccaaaagauaauaaccauugguucggucuguaugacaauuggaauggcuaacuuaauauuacaaauuggaaacauaaucucaauauggauuagccacucaauucaacuugggaaucaaaaucagauugaaacaugcaaucaaagcgucauuacuuaugaaaacaacacuuggguaaaucagacauauguuaacaucagcaacaccaacuuugcugcuggacagucagugguuuccgugaaauuagcgggcaauuccucucucugcccugucaguggaugggcuauauacaguaaagacaacaguauaagaaucgguuccaagggggauguguuugucauaagggaaccauucauaucaugcucccccuuggaaugcagaaccuucuucuugacucaaggggccuugcuaaaugacaaacauuccaauggaaccauuaaagacaggagcccauaucgaacccuaaugagcuguccuauuggugaaguucccucuccauacaacucaagauuugagucagucgcuuggucagcaagugcuugucaugauggcaucaauuggcuaacaauuggaauuucuggcccagacaauggggcaguggcuguguuaaaguacaacggcauaauaacagacacuaucaagaguuggagaaacaauauauugagaacacaagagucugaaugugcauguguaaaugguucuugcuuuacuguaaugaccgauggaccaagugauggacaggccucauacaagaucuucagaauagaaaagggaaagauagucaaaucagucgaaaugaaugccccuaauuaucacuaugaggaaugcuccuguuauccugauucuagugaaaucacaugugugugcagggauaacuggcauggcucgaaucgaccgugggugucuuucaaccagaaucuggaauaucagauaggauacauaugcagugggauuuucggagacaauccacgcccuaaugauaagacaggcaguugugguccaguaucgucuaauggagcaaauggaguaaaaggauuuucauucaaauacggcaaugguguuuggauagggagaacuaaaagcauuaguucaagaaacgguuuugagaugauuugggauccgaacggauggacugggacagacaauaacuucucaauaaagcaagauaucguaggaauaaaugaguggucaggauauagcgggaguuuuguucagcauccagaacuaacagggcuggauuguauaagaccuugcuucuggguugaacuaaucagagggcgacccaaagagaacacaaucuggacuagcgggagcaguauauccuuuugugguguaaacagugacacuguggguuggucuuggccagacggugcugaguugccauuuaccauugacaaguaa

SEQ ID NO: 50961 - RNA, 1410 nt, Artificial Sequence; identical to SEQ ID NO: 48750
  derived and/or modified CDS sequence (wt) from neuraminidase__InfluenzaA__ADI99673

SEQ ID NO: 50962 - RNA, 1410 nt, Artificial Sequence; identical to SEQ ID NO: 50959
  derived and/or modified CDS sequence (wt) from neuraminidase__InfluenzaA__ADI99683

SEQ ID NO: 50963 - RNA, 1410 nt, Artificial Sequence
  derived and/or modified CDS sequence (wt) from neuraminidase__InfluenzaA__ADI99703
augaauccaaaccaaaagauaauaaccauugguucggucuguaugacaauuggaauggcuaacuuaauauuacaaauuggaaacauaaucucaauauggauuagccacucaauucaacuugggaaucaaaaucagauugaaacaugcaaucaaagcgucauuacuuaugaaaacaacacuuggguaaaucagacauauguuaacaucagcaacaccaacuuugcugcuggacagucagugguucccgugaaauuagcgggcaauuccucucucugcccuguuaguggaugggcuauauacaguaaagacaacaguauaagaaucgguuccaagggggauguguuugucauaagggaaccauucauaucaugcucccccuuggaaugcagaaccuucuucuugacucaaggggccuugcuaaaugacaaacauuccaauggaaccauuaaagacaggagcccauaucgaacccuaaugagcuguccuauuggugaaguucccucuccauacaacucaagauuugagucagucgcuuggucagcaagugcuugucaugauggcaucaauuggcuaacaauuggaauuucuggcccagacaauggggcaguggcuguguuaaaguacaacggcauaauaacagacacuaucaagaguuggagaaacaauauauugagaacacaagagucugaaugugcauguguaaaugguucuugcuuuacuguaaugaccgauggaccaagugauggacaggccucauacaagaucuucagaauagaaaagggaaagauagucaaaucagucgaaaugaaugccccuaauuaucacuaugaggaaugcucuuguuauccugauucuagugaaaucacaugugugugcagggauaacuggcauggcucgaaucgaccgugggugucuuucaaccagaaucuggaauaucagauaggauacauaugcagugggauuuucggagacaauccacgcccuaaugauaagacaggcaguugugguccaguaucgucuaauggagcaaauggaguaaaaggauuuucauucaaauacggcaaugguguuuggauagggagaacuaaaagcauuaguucaagaaacgguuuugagaugauuugggauccgaacggauggacugggacagacaauaacuucucaauaaagcaagauaucguaggaauaaaugaguggucaggauauagcgggaguuuuguucagcauccagaacuaacagggcuggauuguauaagaccuugcuucuggguugaacuaaucagagggcgacccaaagagaacacaaucuggacuagcgggagcagcauauccuuuugugguguaaacagugacacuguggguuggucuuggccagacggugcugaguugccauuuaccauugacaaguaa

SEQ ID NO: 50964 - RNA, 1410 nt, Artificial Sequence; identical to SEQ ID NO: 48947
  derived and/or modified CDS sequence (wt) from neuraminidase__InfluenzaA__ADI99713

SEQ ID NO: 50965 - RNA, 1410 nt, Artificial Sequence; identical to SEQ ID NO: 48814
  derived and/or modified CDS sequence (wt) from neuraminidase__InfluenzaA__ADI99723

SEQ ID NO: 50966 - RNA, 1410 nt, Artificial Sequence; identical to SEQ ID NO: 48806
  derived and/or modified CDS sequence (wt) from neuraminidase__InfluenzaA__ADI99733

SEQ ID NO: 50967 - RNA, 1410 nt, Artificial Sequence
  derived and/or modified CDS sequence (wt) from neuraminidase__InfluenzaA__ADJ00487
augaauccaaaccaaaagauaauaaccauugguucggucuguaugacaauuggaauggcuaacuuaauauuacaaauuggaaacauaaucucaauauggauuagccacucaauucaacuugggaaucaaaaucagauugaaacaugcaaucaaagcgucauuacuuaugaaaacaacacuuggguaaaucagacauauguuaacaucagcaacaccaacuuugcugcuggacagucagugguuuccgugaaauuagcgggcaauuccucucucugcccuguuaguggaugggcuauauacaguaaagacaacaguauaagaaucgguuccaagggggauguguuugucauaagggaaccauucauaucaugcucccccuuggaaugcagaaccuucuucuugacucaaggggccuugcuaaaugacaaacauuccaauggaaccauuaaagacaggagcccauaucgaacccuaaugagcuguccuauuggugaaguucccucuccauacaacucaagauuugagucagucgcuuggucagcaagugcuugucaugauggcaucaauuggcuaacaauuggaauuucuggcccagacaauggggcaguggcuguguuaaaguacaacggcauaauaacagacacuaucaagaguuggagaaacaauauauugagaacacaagagucugaaugugcauguguaaaugguucuugcuuuacuguaaugaccgauggacccaguaauggacaggccucauacaagaucuucagaauagaaaagggaaagauagucaaaucagucgaaaugaaugccccuaauuaucacuaugaggaaugcuccuguuauccugauucuagugaaaucacaugugugugcagggauaacuggcauggcucgaaucgaccgugggugucuuucaaccagaaucuggaauaucagauaggauacauaugcagugggauuuucggagacaauccacgcccuaaugauaagacaggcaguugugguccaguaucgucuaauggagcaaauggaguaaaaggauuuucauucaaauacggcaaugguguuuggauagggagaacuaaaagcauuaguucaagaaacgguuuugagaugauuugggauccgaacggauggacugggacagacaauaacuucucaauaaagcaagauaucguaggaauaaaugaguggucaggauauagcgggaguuuuguucagcauccagaacuaacagggcuggauuguauaagaccuugcuucuggguugaacuaaucagagggcgacccaaagagaacacaaucuggacuagcgggagcagcauauccuuuugugguguaaacagugacacuguggguuggucuuggccagacggugcugaguugccauuuaccauugacaaguaa

SEQ ID NO: 50968 - RNA, 1410 nt, Artificial Sequence; identical to SEQ ID NO: 50967
  derived and/or modified CDS sequence (wt) from neuraminidase__InfluenzaA__ADJ00488

SEQ ID NO: 50969 - RNA, 1410 nt, Artificial Sequence; identical to SEQ ID NO: 50967
  derived and/or modified CDS sequence (wt) from neuraminidase__InfluenzaA__ADJ00489

SEQ ID NO: 50970 - RNA, 1410 nt, Artificial Sequence; identical to SEQ ID NO: 50967
  derived and/or modified CDS sequence (wt) from neuraminidase__InfluenzaA__ADJ00490

SEQ ID NO: 50971 - RNA, 1410 nt, Artificial Sequence; identical to SEQ ID NO: 50967
  derived and/or modified CDS sequence (wt) from neuraminidase__InfluenzaA__ADJ00491

SEQ ID NO: 50972 - RNA, 1410 nt, Artificial Sequence
  derived and/or modified CDS sequence (wt) from neuraminidase__InfluenzaA__ADJ18160
augaauccaaaccaaaagauaauaaccauugguucggucuguaugacaauuggaauggcuaacuuaauauuacaaauuggaaacauaaucucaauauggauuagccacucaauucaacuugggaaucaaaaucagauugaaacaugcaaucaaagcgucauuacuuaugaaaacaacacuuggguaaaucagacauauguuaacaucagcaacaccaacuuugcugcuggacagucagugguuuccgugaaauuagcgggcaauuccucucucugcccuguuaguggaugggcuauauacaguaaagacaacaguauaagaaucgguuccaagggggauguguuugucauaagggaaccauucauaucaugcucccccuuggaaugcagaaccuucuucuugacucaaggggccuugcuaaaugacaaacauuccaauggaaccauuaaagacaggagcccauaucgaacccuaaugagcuguccuauuggugaaguucccucuccauacaacucaagauuugagucagucgcuuggucagcaagugcuugucaugauggcauaaauuggcuaacaauuggaauuucuggcccagacaauggggcaguggcuguguuaaaguacaacggcauaauaacagacacuaucaagaguuggagaaacaauauauugagaacacaagagucugaaugugcauguguaaaugguucuugcuuuacuguaaugaccgauggaccaagugauggacaggccucauacaagaucuucagaauagaaaagggaaagauagucaaaucagucgaaaugaaugccccuaauuaucacuaugaggaaugcuccuguuauccugauucuagugaaaucacaugugugugcagggauaacuggcauggcucgaaucgaccgugggugucuuucaaccagaaucuggaauaucagauaggauacauaugcagugggauuuucggagacaauccacgcccuaaugauaagacaggcaguugugguccaguaucgucuaauggagcaaauggaguaaaaggauuuucauucaaauacggcaaugguguuuggauagggagaacuaaaagcauuaguucaagaaacgguuuugagaugauuugggauccgaacggauggacugggacagacaauaacuucucaauaaagcaagauaucguaggaauaaaugaguggucaggauauagcgggaguuuuguucagcauccagaacuaacagggcuggauuguauaagaccuugcuucuggguugaacuaaucagagggcgacccaaagagaacacaaucuggacuagcgggagcagcauauccuuuugugguguaaacagugacacuguggguuggucuuggccagacggugcugaguugccauuuaccauugacaaauaa

SEQ ID NO: 50973 - RNA, 1410 nt, Artificial Sequence
  derived and/or modified CDS sequence (wt) from neuraminidase__InfluenzaA__ADJ18161
augaauccaaaccaaaagauaauaaccauugguucggucuguaugacaauuggaauggcuaacuuaauauuacaaauuggaaauauaaucucaauauggauuagccacucaauucaacuugggaaucaaaaucagauugaaacaugcaaucaaagcgucauuacuuaugaaaacaacacuuggguaaaucagacguauguuaacaucagcaacaccaacuuugcugcuggacagucagugguuuccgugaaauuagcgggcaauuccucucucugcccuguuaguggaugggcuauauacaguaaagacaacaguauaagaaucgguuccaagggggauguguuugucauaagggaaccauucauaucaugcucccccuuggaaugcagaaccuucuucuugacucaaggggccuugcuaaaugacaaacauuccaauggaaccauuaaagacaggagcccauaucgaacccuaaugagcuguccuauuggugaaguucccucuccauacaacucaagauuugagucagucgcuuggucagcaagugcuugucaugauggcaucaauuggcuaacaauuggaauuucuggcccagacaauggggcaguggcuguguuaaaguacaacggcauaauaacagacacuaucaagaguuggagaaacaauauauugagaacacaagagucugaaugugcauguguaaaugguucuugcuuuacuguaaugaccgauggaccaagugauggacaggccucauacaagaucuucagaauagaaaagggaaagauagucaaaucagucgaaaugaaugccccuaauuaucacuaugaggaaugcuccuguuauccugauucuagugaaaucacaugugugugcagggauaacuggcauggcucgaaucgaccgugggugucuuucaaccagaaucuggaauaucagauaggauacauaugcagugggauuuucggagacaauccacgcccuaaugauaagacaggcaguugugguccaguaucgucuaauggagcaaauggaguaaaaggauuuucauucaaauacggcaaugguguuuggauagggagaacuaaaagcauuaguucaagaaacgguuuugagaugauuugggauccgaacggauggacugggacagacaauaacuucucaauaaagcaagauaucguaggaauaaaugaguggucaggauauagcgggaguuuuguucagcauccagaacuaacagggcuggauuguauaagaccuugcuucuggguugaacuaaucagagggcgacccaaagagaacacaaucuggacuagcgggagcagcauauccuuuugugguguaaacagugacacuguggguuggucuuggccagacggugcugaguugccauuuaccauugacaaauaa

SEQ ID NO: 50974 - RNA, 1410 nt, Artificial Sequence
  derived and/or modified CDS sequence (wt) from neuraminidase__InfluenzaA__ADJ18162
augauuccaaaccaaaagauaauaaccauugguucggucuguaugacaauuggaauggcuaacuuaauauuacaaauuggaaacauaaucucaauauggauuagccacucaauucaacuugggaaucaaaaucagauugaaacaugcaaucaaagcgucauuacuuaugaaaacaacacuuggguaaaucagacauauguuaacaucagcaacaccaacuuugcugcuggacagucagugguuuccgugaaauuagcgggcaauuccucucucugcccuguuaguggaugggcuauauacaguaaagacaacaguauaagaaucgguuccaagggggauguguuugucauaaggaaaccauucauaucaugcucccccuuggaaugcagaaccuucuucuugacucaaggggccuugcuaaaugacaaacauuccaauggaaccauuaaagacaggagcccauaucgaacccuaaugagcuguccuauuggugaaguucccucuccauacaacucaagauuugagucagucgcuuggucagcaagugcuugucaugauggcaucaauuggcuaacaauuggaauuucuggcccagacaauggggcaguggcuguguuaaaguacaacggcauaauaacagacacuaucaagaguuggagaaacaauauauugagaacacaagagucugaaugugcauguguaaaugguucuugcuuuacuguaaugaccgauggaccaagugauggacaggccucauacaagaucuucagaauagaaaagggaaagauagucaaaucagucgaaaugaaugccccuaauuaucacuaugaggaaugcuccuguuauccugauucuagugaaaucacaugugugugcagggauaacuggcauggcucgaaucgaccgugggugucuuucaaccagaaucuggaauaucagauaggauacauaugcagugggauuuucggagacaauccacgcccuaaugauaagacaggcaguugugguccaguaucgucuaauggagcaaauggaguaaaaggauuuucauucaaauacggcaaugguguuuggauagggagaacuaaaagcauuaguucaagaaacgguuuugagaugauuugggauccgaacggauggacugggacagacaauaacuucucaauaaagcaagauaucguaggaauaaaugaguggucaggauauagcgggaguuuuguucagcauccagaacuaacagggcuggauuguauaagaccuugcuucuggguugaacuaaucagagggcgacccaaagagaacacaaucuggacuagcgggagcagcauauccuuuugugguguaaacagugacacuguggguuggucuuggccagacggugcugaguugccauuuaccauugacaaauaa

SEQ ID NO: 50975 - RNA, 1410 nt, Artificial Sequence
  derived and/or modified CDS sequence (wt) from neuraminidase__InfluenzaA__ADJ18164
augaauccaaaacaaaagauaauaaccauugguucggucuguaugacaauuggaauggcuaacuuaauauuacaaauuggaaacauaaucucaauauggauuagccacucaauucaacuugggaaucaaaaucagauugaaacaugcaaucaaagcgucauuacuuaugaaaacaacacuuggguaaaucagacauauguuaacaucagcaacaccaacuuugcugcuggacagucagugguuuccgugaaauuagcgggcaauuccucucucugcucuguuaguggaugggcuauauacaguaaagacaacaguauaagaaucgguuccaagggggauguguuugucauaagggaaccauucauaucaugcucccccuuggaaugcagaaccuucuucuugacucaaggggccuugcuaaaugacaaacauuccaauggaaccauuaaagacaggagcccauaucgaacccuaaugagcuguccuauuggugaaguucccucuccauacaacucaagauuugagucagucgcuuggucagcaagugcuugucaugauggcaucaauuggcuaacaauuggaauuucuggcccagacaauggggcaguggcuguguuaaaguacaacggcauaauaacagacacuaucaagaguuggagaaacaauauauugagaacacaagagucugaaugugcauguguaaaugguucuugcuuuacuguaaugaccgauggaccaagugauggacaggccucauacaagaucuucagaauagaaaagggaaagauagucaaaucagucgaaaugaaugccccuaauuaucacuaugaggaaugcuccuguuauccugauucuagugaaaucacaugugugugcagggauaacuggcauggcucgaaucgaccgugggugucuuucaaccagaaucuggaauaucagauaggauacauaugcagugggauuuucggagacaauccacgcccuaaugauaagacaggcaguugugguccaguaucgucuaauggagcaaauggaguaaaaggauuuucauucaaauacggcaaugguguuuggauagggagaacuaaaagcauuaguucaagaaacgguuuugagaugauuugggauccgaacggauggacugggacagacaauaacuucucaauaaagcaagauaucguaggaauaaaugaguggucaggauauagcgggaguuuuguucagcauccagaacuaacagggcuggauuguauaagaccuugcuucuggguugaacuaaucagagggcgacccaaagagaacacaaucuggacuagcgggagcagcauauccuuuugugguguaaacagugacacuguggguuggucuuggccagacggugcugaguugccauuuaccauugacaaauaa

SEQ ID NO: 50976 - RNA, 1410 nt, Artificial Sequence; identical to SEQ ID NO: 50354
  derived and/or modified CDS sequence (wt) from neuraminidase__InfluenzaA__ADJ18166

SEQ ID NO: 50977 - RNA, 1410 nt, Artificial Sequence
  derived and/or modified CDS sequence (wt) from neuraminidase__InfluenzaA__ADJ18168
augaauccaaaccaaaagauaauaaccauugguucggucuguaugacaauuggaauggcuaacuuaauauuacaaauuggaaacauaaucucaauauggauuagccacucaauucaacuugggaaucaaaaucagauugaaacaugcaaucaaagcgucauuacuuaugaaaacaacacuuggguaaaucagacauauguuaacaucagcaacaccaacuuugcugcuggacagucagugguuuccgugaaauuagcgggcaauuccucucucugcccuguuaguggaugggcuauauacaguaaagacaacaguauaagaaucgguuccaagggggauguguuugucauaagggaaccauucauaucaugcucccccuuggaaugcagaaccuucuucuugacucaaggggccuugcuaaaugacaaacauuccaauggaaccauuaaagacaggagcccauaucgaacccuaaugagcuguccuauuggugaaguucccucuccauacaacucaagauuugagucagucgcuuggucagcaagugcuugucaugauggcaucaauuggcuaacaauuggaauuucuggcccagacaauggggcaguggcuguguuaaaguacaacggcauaauaacagacacuaucaagaguuggagaaacaauauauugagaacacaagagucugaaugugcauguguaaaugguucuugcuuuacuguaaugaccgauggaccaagugauggacaggccucauacaagaucuucagaauagaaaagggaaagauagucaaaucagucgaaaugaaugccccuaauuaucacuaugaggaaugcuccuguuauccugauucuagugaaaucacaugugugugcagggauaacuggcauggcucgaaucgaccgugggugucuuucaaccagaaucuggaauaucagauaggauacauaugcagugggauuuucggagacaauccacgcccuaaugauaagacaggcaguugugguccaguaucgucuaauggagcaaauggaguaaaaggauuuucauucaaauacggcaaugguguuuggauagggagaacuaaaagcauuaguucaagaaacgguuuugagaugauuugggauccgaacggauggacugggacagacaauaacuucucaauaaagcaagauaucguaggaauaaaugaguggucaggauauagcgggaguuuuguucagcauccagaacuaacagggcuggauuguauaagaccuugcuucuggguugaacuaaucagagggcgacccaaagagaacacaaucuggacuagcgggagcagcauauccuuuugugguguaaacagugacacuguggguuggucuuggccagacggugcugaguugccauuuaccauugacaaauaa

SEQ ID NO: 50978 - RNA, 1410 nt, Artificial Sequence
  derived and/or modified CDS sequence (wt) from neuraminidase__InfluenzaA__ADJ18170
augaauccaaaccaaaagauaauaaccauugguucggucuguaugacaauuggaauggcuaacuuaauauuacaaauuggaaauauaaucucaauauggauuagccacucaauucaacuugggaaucaaaaucagauugaaacaugcaaucaaagcgucauuacuuaugaaaacaacacuuggguaaaucagacguauguuaacaucagcaacaccaacuuugcugcuggacagucagugguuuccgugaaauuagcgggcaauuccucucucugcccuguuaguggaugggcuauauacaguaaagacaacaguauaagaaucgguuccaagggggauguguuugucauaagggaaccauucauaucaugcucccccuuggaaugcagaaccuucuucuugacucaaggggccuugcuaaaugacaaacauuccaauggaaccauuaaagacaggagcccauaucgaacccuaaugagcuguccuauuggugaaguucccucuccauacaacucaagauuugagucagucgcuuggucagcaagugcuugucaugauggcaucaauuggcuaacaauuggaauuucuggcccagacaauggggcaguggcuguguuaaaguacaacggcauaauaacagacacuaucaagaguuggagaaacaauauauugagaacacaagagucugaaugugcauguguaaaugguucuugcuuuacuguaaugaccgauggaccaagugauggacaggccucauacaagaucuucagaauagaaaagggaaagauagucaaaucagucgaaaugaaugccccuaauuaucacuaugaggaaugcuccuguuauccugauucuagugagaucacaugugugugcagggauaacuggcauggcucgaaucgaccgugggugucuuucaaccagaaucuggaauaucagauaggauacauaugcagugggauuuucggagacaauccacgcccuaaugauaagacaggcaguugugguccaguaucgucuaauggagcaaauggaguaaaaggauuuucauucaaauacggcaaugguguuuggauagggagaacuaaaagcauuaguucaagaaacgguuuugagaugauuugggauccgaacggauggacugggacagacaauaacuucucaauaaagcaagauaucguaggaauaaaugaguggucaggauauagcgggaguuuuguucagcauccagaacuaacagggcuggauuguauaagaccuugcuucuggguugaacuaaucagagggcgacccaaagagaacacaaucuggacuagcgggagcagcauauccuuuugugguguaaacagugacacuguggguuggucuuggccagacggugcugaguugccauuuaccauugacaaguaa

SEQ ID NO: 50979 - RNA, 1410 nt, Artificial Sequence
  derived and/or modified CDS sequence (wt) from neuraminidase__InfluenzaA__ADJ18172
augaauccaaaccaaaagauaauaaccauugguucggucuguaugacaauuggaauggcuaacuuaauauuacgaauuggaaacauaaucucaauauggauuagccacucaauucaacuugggaaucaaaaucagauugaaacaugcaaucaaagcgucauaacuuaugaaaacaacacuuggguaaaucagacauauguuaacaucagcaacaccaacuuugcugcuggacagucagugguuuccgugaaauuagcgggcaauuccucucucugcccuguuaguggaugggcuauauacagaaaagacaacaguauaagaaucgguuccaagggggauguguuugucauaagggaaccauucauaucaugcucccccuuggaaugcagaaccuucuucuugacucaaggggccuugcuaaaugacaaacauuccaauggaaccauuaaagacaggagcccauaucgaacccuaaugagcuguccuauuggugaaguucccucuccauacaacucaagauuugagucagucgcuuggucagcaagugcuugucaugauggcaucaauuggcuaacaauuggaauuucuggcccagacaauggggcaguggcuguguuaaaguacaacggcauaauaacagacacuaucaagaguuggagaaacaauauauugagaacacaagagucugaaugugcauguguaaauggcucuugcuuuacuguaaugaccgauggaccaagugauggacaggccucauacaagaucuucagaauagaaaagggaaagauagucaaaucagucgaaaugaaugccccuaauuaucacuaugaggaaugcuccuguuauccugauucuagugaaaucacaugugugugcagggauaacuggcauggcucgaaucgaccgugggugucuuucaaccagaaucuggaauaucagauaggauacauaugcagugggauuuucggagacaauccacgcccuaaugauaagacaggcaguugugguccaguaucgucuaauggagcaaauggaguaaaaggauuuucauucaaauacggcaaugguguuuggauagggagaacuaaaagcauuaguucaagaaacgguuuugagaugauuugggauccgaacggauggacugggacagacaauaacuucucaauaaagcaagauaucguaggaauaaaugaguggucaggauauagcgggaguuuuguucagcauccagaacuaacagggcuggauuguauaagaccuugcuucuggguugaacuaaucagagggcgacccaaagagaacacaaucuggacuagcgggagcagcauauccuuuugugguguaaacagugacacuguggguuggucuuggccagacggugcugaguugccauuuaccauugacaaauaa

SEQ ID NO: 50980 - RNA, 1410 nt, Artificial Sequence
  derived and/or modified CDS sequence (wt) from neuraminidase__InfluenzaA__ADJ18174
augaauccaaaccaaaagauaauaaccauugguucggucuguaugacaauuggaauggcuaacuuaauauuacaaauuggaaacauaaucucaauauggauuagccacucaauucaacuugggaaucaaaaucagauugaaacaugcaaucaaagcgucauuacuuaugaaaacaacacuuggguaaaucagacuuauguuaacaucagcaacaccaacuuugcugcuggacagucagugguuuccgugaaauuagcgggcaauuccucucucugcccuguuaguggaugggcuauauacaguaaagacaacaguauaagaaucgguuccaagggggauguguuugucauaagggaaccauucauaucaugcucccccuuggaaugcagaaccuucuucuugacucaaggggccuugcuaaaugacaaacauuccaauggaaccauuaaagacaggagcccauaucgaacccuaaugagcuguccuauuggugaaguucccucuccauacaacucaagauuugagucagucgcuuggucagcaagugcuugucaugauggcaucaauuggcuaacaauuggaauuucuggcccagacaauggggcaguggcuguguuaaaauacaacggcauaauaacagacacuaucaagaguuggagaaacaauauauugagaacacaagagucugaaugugcauguguaaaugguucuugcuuuacuguaaugaccgauggaccaagugauggacaggccucauacaagaucuucagaauagaaaagggaaagauagucaaaucagucgaaaugaaugccccuaauuaucacuaugaggaaugcuccuguuauccugauucuagugaaaucacaugugugugcagggauaacuggcauggcucgaaucgaccgugggugucuuucaaccagaaucuggaauaucagauaggauacauaugcagugggauuuucggagacaauccacgcccuaaugauaagacaggcaguugugguccaguaucgucuaauggagcaaauggaguaaaaggauuuucauucaaauacggcaaugguguuuggauagggagaacuaaaagcauuaguucaagaaacgguuuugagaugauuugggauccgaacggauggacugggacagacaauaacuucucaauaaagcaagauaucguaggaauaaaugaguggucaggauauagcgggaguuuuguucagcauccagaacuaacagggcuggacuguauaagaccuugcuucuggguugaacuaaucagagggcgacccaaagagaacacaaucuggacuagcgggagcagcauauccuuuugugguguaaacagugacacuguggguuggucuuggccagacggugcugaguugccauuuaccauugacaaguaa

SEQ ID NO: 50981 - RNA, 1410 nt, Artificial Sequence
  derived and/or modified CDS sequence (wt) from neuraminidase__InfluenzaA__ADJ18176
augaauccaaaccaaaagauaauaaccauugguucggucuguaugacaauuggaauggcuaacuuaauauuacaaauuggaaacauaaucucaauauggauuagccucucaauucaacuugggaaucaaaaucagauugaaacaugcaaucaaagcgucauuacuuaugaaaacaacacuugggugaaucagacauauguuaacaucagcaacaccaacuuugcugcuggacagucagugguuuccgugaaauuagcgggcaauuccucucucugcccuguuaguggaugggcuauauacaguaaagacaauaguauaagaaucgguuccaagggggauguguuugucauaagggaaccauucauaucaugcucccccuuggaaugcagaaccuucuucuugacucaaggggccuugcuuaaugacaaacauuccaauggaaccauuaaagacaggagcccauaucgaacccuaaugagcuguccuauuggugaaguucccucuccauacaacucaagauuugagucagucgcuuggucagcaagugcuugucaugauggcaucaauuggcuaacuauuggaauuucuggcccagacaauggggcaguggcuguguuaaaguacaacggcauaauaacagacacuaucaagaguuggagaaacaauauauugagaacacaagagucugaaugugcauguguaaaugguucuugcuuuacuguaaugaccgauggaccaagugauggacaggccucauacaagaucuucagaauagaaaagggaaagauagucaaaucagucgaaaugaaugccccuaauuaucacuaugaggaaugcuccuguuauccugauucuagugaaaucacaugugugugcagggauaacuggcauggcucgaaucgaccgugggugucuuucaaccagaaucuggaauaucagauaggauacauaugcagugggauuuucggagacaauccacgcccuaaugauaagacaggcaguugugguccaguaucgucuaauggagcaaauggaguaaaaggauuuucauucaaauacggcaaugguguuuggauagggagaacuaaaagcauuaguucaagaaacgguuuugagaugauuugggauccgaacggauggacugggacagacaauaacuucucaauaaagcaagauaucguaggaauaaaugaguggucaggauauagcgggaguuuuguucagcauccagaacuaacagggcuggacuguauaagaccuugcuucuggguugaacuaaucagagggcgacccaaagagaacacaaucuggacuagcgggagcagcauauccuuuugugguguaaacagugacacuguggguuggucuuggccagacggugcugaguugccauuuaccauugacaaguaa

SEQ ID NO: 50982 - RNA, 1410 nt, Artificial Sequence; identical to SEQ ID NO: 48523
  derived and/or modified CDS sequence (wt) from neuraminidase__InfluenzaA__ADJ37250

SEQ ID NO: 50983 - RNA, 1410 nt, Artificial Sequence
  derived and/or modified CDS sequence (wt) from neuraminidase__InfluenzaA__ADJ37252
augaauccaaaucaaaagauaauaacgauuggcucuguuucucucaccauuuccacaauaugcuucuucaugcaaauugccaucuugguaacuacuguaacauugcauuucaagcaauaugaauucaacucccccccaaacaaccaagugaugcugugugaaccaacaauaauagaaagaaacauaacagagauaguguaucugaccaacaccaccauagagaaggaaauaugccccaaacuagcagaauacagaaauuggucaaagccgcaaugugacauuacaggauuugcaccuuuuucuaaggacaauucgauuaggcuuuccgcugguggggacaucugggugacaagagaaccuuaugugucaugcgauccugacaaguguuaucaauuugcccuuggacagggaacaacacuaaacaacgugcauucaaauaacauaguacgugauaggaccccuuaucggacccuauugaugaaugaguuagguguuccuuuucaucuggggaccaagcaagugugcauagcaugguccagcucaaguugucacgauggaaaagcauggcugcauguuuguauaacgggggaugauaaaaaugcaacugcuagcuucauuuacaaugggaggcuuguagauaguguuguuucaugguccaaagacauccucaggacccaggagucagaaugcguuuguaucaauggaacuuguacaguaguaaugacugaugggagugcuucaggaaaagcugauacuaaaauacuauucauugaggaggggaaaaucguucauacuagcacauugucaggaagugcucagcaugucgaggagugcuccugcuauccucgauauccuggugucagaugugucugcagagacaacuggaaaggcuccaauaggcccaucguagauauaaacauaaaggaucauagcauuguuuccaguuauguguguucaggacuuguuggagacacacccagaaaaaacgacagcuccagcaguagccauuguuuggauccuaacaaugaagaagguggucauggagugaaaggcugggccuuugaugauggaaaugacguguggaugggaagaacgaucagcgagaagucacgcuuaggguaugaaaccuucaaagucauugaaggcugguccaacccuaaguccaaauugcagauaaauaggcaagucauaguugacagagguaauagguccgguuauucugguauuuucucuguugaaggcaaaagcugcaucaaucggugcuuuuauguggaguugauaaggggaagaaaagaggaaacugaagucuuguggaccucaaacaguauuguuguguuuuguggcaccucagguacauauggaacaggcucauggccugauggggcgaacaucaaucucaugccuauauaa

SEQ ID NO: 50984 - RNA, 1410 nt, Artificial Sequence; identical to SEQ ID NO: 48750
  derived and/or modified CDS sequence (wt) from neuraminidase__InfluenzaA__ADJ37263

SEQ ID NO: 50985 - RNA, 1410 nt, Artificial Sequence; identical to SEQ ID NO: 48740
  derived and/or modified CDS sequence (wt) from neuraminidase__InfluenzaA__ADJ37273

SEQ ID NO: 50986 - RNA, 1410 nt, Artificial Sequence
  derived and/or modified CDS sequence (wt) from neuraminidase__InfluenzaA__ADJ40447
augaauccaaaccaaaagauaauaaccauugguucggucuguaugacaauuggaauggcuaacuuaauauuacaaauuggaaacauaaucucaauauggauuagccacucaauucaacuugggaaucaaaaucagauugaaacaugcaaucaaagcgucauuacuuaugaaaacaacacuuggguaaaucagacauauguaaacaucagcaacaccaacuuugcugcuggacagucagugguuuccgugaaauuagcgggcaauuccucucucugcccuguuaguggaugggcuauauacaguaaagacaacaguauaagaaucgguuccaagggggauguguuugucauaagggaaccauucauaucaugcucccccuuggaaugcagaaccuucuucuugacucaaggggccuugcuaaaugacaaacauuccaauggaaccauuaaagacaggagcccauaucgaacccuaaugagcuguccuauuggugaaguucccucuccauacaacucaagauuugagucagucgcuuggucagcaagugcuugucaugauggcaucaauuggcuaacaauuggaauuucuggcccagacaauggggcaguggcuguguuaaaguacaacggcauaauaacagacacuaucaagaguuggagaaacaauauauugagaacacaagagucugaaugugcauguguaaaugguucuugcuuuacuguaaugaccgauggaccaagugauggacaggccucauacaagaucuucagaauagaaaagggaaagauagucaaaucagucgaaaugaaugccccuaauuaucacuaugaggaaugcuccuguuauccugauucuagugaaaucacaugugugugcagggauaacuggcauggcucgaaucgaccgugggugucuuucaaccagaaucuggaauaucagauaggauacauaugcagugggauuuucggagacaauccacgcccuaaugauaagacaggcaguugugguccaguaucgucuaauggagcaaauggaguaaaaggauuuucauucaaauacggcaaugguguuuggauagggagaacuaaaagcauuaguucaagaaacgguuuugagaugauuugggauccgaacggauggacugggacagacaauaacuucucaauaaagcaagauaucguaggaauaaaugaguggucaggauauagcgggaguuuuguucagcauccagaacuaacagggcuggauuguauaagaccuugcuucuggguugaacuaaucagagggcgacccaaagagaacacaaucuggacuagcgggagcagcauauccuuuugugguguaaacagugacacuguggguuggucuuggccagacggugcugaguugccauuuaccauugacaaguaa

SEQ ID NO: 50987 - RNA, 1410 nt, Artificial Sequence; identical to SEQ ID NO: 48947
  derived and/or modified CDS sequence (wt) from neuraminidase__InfluenzaA__ADJ40457

SEQ ID NO: 50988 - RNA, 1410 nt, Artificial Sequence; identical to SEQ ID NO: 50176
  derived and/or modified CDS sequence (wt) from neuraminidase__InfluenzaA__ADJ40467

SEQ ID NO: 50989 - RNA, 1410 nt, Artificial Sequence
  derived and/or modified CDS sequence (wt) from neuraminidase__InfluenzaA__ADJ40477
augaauccaaaccaaaagauaauaaccauugguucggucuguaugacaauuggaauggcuaacuuaauauuacaaauuggaaacauaaucucaauauggauuagccacucaauucaacuugggaaucaaaaucagauugaaacaugcaaucaaagcgucauuacuuaugaaaacaacacuuggguaaaucagacauauguuaacaucagcaacaccaacuuugcugcuggacagucagugguuuccgugaaauuagcgggcaauuccucucucugcccuguuaguggaugggcuauauacaguaaagacaacaguauaagaaucgguuccaagggggauguguuugucauaagggaaccauucauaucaugcucccccuuggaaugcagaaccuucuucuugacucaaggggccuugcuaaaugacaaacauuccaauggaaccauuaaagacaggagcccauaucgaacccuaaugagcuguccuauuggugaaguucccucuccauacaacucaagauuugagucagucgcuuggucagcaagugcuugucaugauggcaucaauuggcuaacaauuggaauuucuggcccagacaauggggcaguggcuguguuaaaguacaacggcauaauaacagacacuaucaagaguuggagaaacaauauauugagaacacaagagucugaaugugcauguguaaaugguucuugcuuuacuguaaugaccgauggaccaagugauggacaggccucauacaagaucuucagaauagaaaagggaaagauagucaaaucagucgaaaugaaugccccuaauuauuacuaugaggaaugcuccuguuauccugauucuagugaaaucacauguguaugcagggauaacuggcauggcucgaaucgaccgugggugucuuucaaccagaaucuggaauaucagauaggauacauaugcagugggauuuucggagacaauccacgcccuaaugauaagacaggcaguugugguccaguaucgucuaauggagcaaauggaguaaaaggauuuucauucaaauacggcaaugguguuuggauagggagaacuaaaagcauuaguucaagaaacgguuuugagaugauuugggauccgaacggauggacugggacagacaauaacuucucaauaaagcaagauaucguaggaauaaaugaguggucaggauauagcgggaguuuuguucagcauccagaacuaacagggcuggauuguauaagaccuugcuucuggguugaacuaaucagagggcgacccaaagagaacacaaucuggacuagcgggagcagcauauccuuuugugguguaaacagugacacuauggguuggucuuggccagacggugcugaguugccauuuaccauugacaaguag

SEQ ID NO: 50990 - RNA, 1410 nt, Artificial Sequence
  derived and/or modified CDS sequence (wt) from neuraminidase__InfluenzaA__ADJ40487
augaauccaaaccaaaagauaauaaccauugguucggucugcaugacaauuggaauggcuaacuuaauauuacaaauuggaaacauaaucucaauauggauuagccacucaauucaacuugggaaucaaaaucagauugaaacaugcaaucaaagcgucauuacuuaugaaaacaacacuuggguaaaucagacauauguuaacaucagcaacaccaacuuugcugcuggacagucagugguuuccgugaaauuagcgggcaauuccucucucugcccuguuaguggaugggcuauauacaguaaagacaacaguauaagaaucgguuccaagggggauguguuugucauaagggaaccauucauaucaugcucccccuuggaaugcagaaccuucuucuugacucaaggggccuugcuaaaugacaaacauuccaauggaaccauuaaagacaggagcccauaucgaacccuaaugagcuguccuauuggugaaguucccucuccauacaacucaagauuugagucagucgcuuggucagcaagugcuugucaugauggcaucaauuggcuaacaauuggaauuucuggcccagacaauggggcaguggcuguguuaaaguacaacggcauaauaacagacacuaucaagaguuggagaaacaauauauugagaacacaagagucugaaugugcauguguaaaugggucuugcuuuacuguaaugaccgauggaccaagugauggacaggccucauacaagaucuucagaauagaaaagggaaagauagucaaaucaguugaaaugaaugccccuaauuaucacuaugaggaaugcuccuguuauccugauucuagugaaaucacaugugugugcagggauaacuggcauggcucgaaucgaccgugggugucuuucaaccagaaucuggaauaucagauaggauacauaugcagugggauuuucggagacaauccacgcccuaaugauaagacaggcaguugugguccaguaucgucuaauggagcaaauggaguaaaaggauuuucauucaaauacggcaaugguguuuggauagggagaacuaaaagcauuaguucaagaaacgguuuugagaugauuugggauccgaacggauggacugggacagacaauaacuucucaauaaagcaagauaucguaggaauaaaugaguggucaggauauagcgggaguuuuguccagcauccagaacuaacagggcuggauuguauaagaccuugcuucuggguugaacuaaucagagggcgacccaaagagaacacaaucuggacuagcgggagcagcauauccuuuugugguguaaacagugacacuguggguuggucuuggccagacggugcugaguugccauuuaccauugacaaguaa

SEQ ID NO: 50991 - RNA, 1410 nt, Artificial Sequence; identical to SEQ ID NO: 50309
  derived and/or modified CDS sequence (wt) from neuraminidase__InfluenzaA__ADJ40507

SEQ ID NO: 50992 - RNA, 1410 nt, Artificial Sequence; identical to SEQ ID NO: 48947
  derived and/or modified CDS sequence (wt) from neuraminidase__InfluenzaA__ADJ40517

SEQ ID NO: 50993 - RNA, 1410 nt, Artificial Sequence; identical to SEQ ID NO: 50309
  derived and/or modified CDS sequence (wt) from neuraminidase__InfluenzaA__ADJ40527

SEQ ID NO: 50994 - RNA, 1410 nt, Artificial Sequence
  derived and/or modified CDS sequence (wt) from neuraminidase__InfluenzaA__ADJ40537
augaauccaaaccaaaagauaauaaccauugguucggucuguaugacaauuggaauggcuaacuuaauauuacaaauuggaaacauaaucucaauauggauuagccacucaauucaacuugggaaucaaaaucagauugaaacaugcaaucaaagcgucauuacuuaugaaaacaacacuuggguaaaucagacauauguuaacaucagcaacaccaacuuugcugcuggacagucagggguuuccgugaaauuagcgggcaauuccucucucugcccuguuaguggaugggcuauauacaguaaagacaacaguauaagaaucgguuccaagggggauguguuugucauaagggaaccauucauaucaugcucccccuuggaaugcagaaccuucuucuugacucaaggggccuugcuaaaugacaaacauuccaauggaaccauuaaagacaggagcccauaucgaacccuaaugagcuguccuauuggugaaguucccucuccauauaacucaagauuugagucagucgcuuggucagcaagugcuugucaugauggcaucaauuggcuaacaauuggaauuucuggcccagacaauggggcaguggcuguguuaaaguacaacggcauaauaacagacacuaucaagaguuggagaaacaauauauugagaacacaagagucugaaugugcauguguaaaugguucuugcuuuacuguaaugaccgauggaccaagugauggacaggccucauacaagaucuucagaauagaaaagggaaagauagucaaaucagucgaaaugaaugccccuaauuaucacuaugaggaaugcuccuguuauccugauucuagugaaaucacauguguaugcagggauaacuggcauggcucgaaucgaccgugggugucuuucaaccagaaucuggaauaucagauaggauacauaugcagugggauuuucggagacaauccacgcccuaaugauaagacaggcaguugugguccaguaucgucuaauggagcaaauggaguaaaaggauuuucauucaaauacggcaaugguguuuggauagggagaacuaaaagcauuaguucaagaaacgguuuugagaugauuugggauccgaacggauggacugggacagacaauaacuucucaauaaagcaagauaucguaggaauaaaugaguggucaggauauagcgggaguuuuguucagcauccagaacuaacagggcuggauuguauaagaccuugcuucuggguugaacuaaucagagggcgacccaaagagaacacaaucuggacuagcgggagcagcauaucuuuuugugguguaaacagugacacuguggguuggucuuggccagacggugcugaguugccauuuaccauugacaaguaa

SEQ ID NO: 50995 - RNA, 1410 nt, Artificial Sequence
  derived and/or modified CDS sequence (wt) from neuraminidase__InfluenzaA__ADJ40547
augaauccaaaccaaaagauaauaaccauugguucggucuguaugacaauuggaauggcuaacuuaauauuacaaauuggaaacauaaucucaauauggauuagccacucaauucaacuugggaaucaaaaucagauugaaacaugcaaucaaagcgucauuacuuaugaaaacaacacuuggguaaaucagacauauguuaacaucagcaacaccaacuuugcugcuggacagucagugguuuccgugaaauuagcgggcaauuccucucucugcccuguuaguggaugggcuauauacaguaaagacaacaguauaagaaucgguuccaagggggauguguuugucauaagggaaccauucauaucaugcucccccuuggaaugcagaaccuucuucuugacucaaggggccuugcuaaaugacaaacauuccaauggaaccauuaaagacaggagcccauaucgaacccuaaugagcuguccuauuggugaaguucccucuccauacaacucaagauuugagucagucgcuuggucagcaagugcuugucaugauggcaucaauuggcuaacaauuggaauuucuggcccagacaauggggcaguggcuguguuaaaguacaacggcauaauaacagacacuaucaagaguuggagaaacaauauauugagaacacaagagucugaaugugcauguguaaaugguucuugcuuuacuguaaugaccgauggaccaagugauggacaggccucauacaagaucuucagaauagaaaagggaaagauaaucaaaucagucgaaaugaaugccccuaauuaucacuaugaggaaugcuccuguuauccugauucuagugaaaucacaugugugugcagggauaacuggcauggcucgaaucgaccgugggugucuuucaaccagaaucuggaauaucagauaggauacauaugcagugggauuuuuggagacaauccacgcccuaaugauaagacaggcaguugugguccaguaucgucuaauggagcaaauggaguaaaaggauuuucauucaaauacggcaaugguguuuggauagggagaacuaaaagcauuaguucaagaaacgguuuugagaugauuugggauccgaacggauggacugggacagacaauaacuucucaauaaagcaagauaucauaggaauaaaugaguggucaggauauagcgggaguuuuguccagcauccagaacuaacagggcuggauuguauaagaccuugcuucuggguugaacuaaucagagggcgacccaaagagaacacaaucuggacuagcgggagcagcauauccuuuugugguguaaacagugacacuguggguuggucuuggccagacggugcugaguugccauuuaccauugacaaguaa

SEQ ID NO: 50996 - RNA, 1410 nt, Artificial Sequence; identical to SEQ ID NO: 50309
  derived and/or modified CDS sequence (wt) from neuraminidase__InfluenzaA__ADJ40557

SEQ ID NO: 50997 - RNA, 1410 nt, Artificial Sequence; identical to SEQ ID NO: 49215
  derived and/or modified CDS sequence (wt) from neuraminidase__InfluenzaA__ADJ40577

SEQ ID NO: 50998 - RNA, 1410 nt, Artificial Sequence; identical to SEQ ID NO: 49215
  derived and/or modified CDS sequence (wt) from neuraminidase__InfluenzaA__ADJ40587

SEQ ID NO: 50999 - RNA, 1410 nt, Artificial Sequence
  derived and/or modified CDS sequence (wt) from neuraminidase__InfluenzaA__ADJ40597
augaauccaaaccaaaagauaauaaccauugguucggucuguaugacaauuggaauggcuaacuuaauauuacaaauuggaaacauaaucucaauauggauuagccacucaauucaacuugggaaucaaaaucagauugaaacaugcaaucaaagcgucauuacuuaugaaaacaacacuuggguaaaucagacauauguuaacaucagcaacaccaacuuugcugcuggacagucagugguuuccgugaaauuagcgggcaauuccucucucugcccuguuaguggaugggcuauauacaguaaagacaacaguauaagaaucgguuccaagggggauguguuugucauaagggaaccauucauaucaugcucccccuuggaaugcagaaccuucuucuugacucaaggggccuugcuaaaugacaaacauuccaauggaaccauuaaagacaggagcccauaucgaacccuaaugagcuguccuauuggugaaguucccucuccauacaacucaagauuugagucagucgcuuggucagcaagugcuugucaugauggcaucaauuggcuaacaauuggaauuucuggcccagacaauggggcaguggcuguguuaaaguacaacggcauaauaacagacacuaucaagaguuggagaaacaauauauugagaacacaagagucugaaugugcauguguaaaugguucuugcuuuacuguaaugaccgauggaccaagugauggacaggccucauacaagaucuucagaauagaaaagggaaagauagucaaaucagucgaaaugaaugccccuaauuaucacuaugaggaaugcuccuguuauccugauucuagugaaaucacaugugugugcagggauaacuggcauggcucgaaucgaccgugggugucuuucaaccagaaucuggaauaucagauaggauacauaugcagugggauuuucggagacaauccacgcccuaaugauaagacaggcaguugugguccaguaucgucuaauggagcaaauggaguaaaaggauuuucauucaaauacggcaaugguguuuggauagggagaacuaaaagcauuaguucaagaaacgguuuugagaugauuugggauccgaacggauggacugggacagacaauaacuucuuaauaaagcaagauaucguaggaauaaaugaguggucaggauauagcgggaguuuuguccagcauccagaacuaacagggcuggauuguauaagaccuugcuucuggguugaacuaaucagagggcgacccaaagagaacacaaucuggacuagcgggagcagcauauccuuuugugguguaaacagugacacuguggguuggucuuggccagacggugcugaguugccauuuaccauugacaaguaa

SEQ ID NO: 51000 - RNA, 1410 nt, Artificial Sequence
  derived and/or modified CDS sequence (wt) from neuraminidase__InfluenzaA__ADJ40607
augaauccaaaccaaaagauaauaaccauugguucggucuguaugacaauuggaauggcuaacuuaauauuacaaauuggaaacauaaucucaauauggauuagccacucaauucaacuugggaaucaaaaucagauugaaacaugcaaucaaagcgucauuacuuaugaaaacaacacuuggguaaaucagacauauguuaacaucagcaacaccaacuuugcugcuggacagucagugguuuccgugaaauuagcgggcaauuccucucucugcccuguuaguggaugggcuauauacaguaaagacaacaguauaagaaucgguuccaagggggauguguuugucauaagggaaccauucauaucaugcucccccuuggaaugcagaaccuucuucuugacucaaggggccuugcuaaaugacaaacauuccaauggaaccaucaaagacaggagcccauaucgaacccuaaugagcuguccuauuggugaaguucccucuccauacaacucaagauuugagucagucgcuuggucagcaagugcuugucaugauggcaucaauuggcuaacaauuggaauuucuggcccagacaauggggcaguggcuguguuaaaguacaacggcauaauaacagacacuaucaagaguuggagaaacaauauauugagaacacaagagucugaaugugcauguguaaaugguucuugcuuuacuguaaugaccgauggaccaagugauggacaggccucauacaagaucuucagaauagaaaagggaaagauagucaaaucagucgaaaugaaugccccuaauuaucacuaugaggaaugcuccuguuauccugauucuagugaaaucacaugugugugcagggauaacuggcauggcucgaaucgaccgugggugucuuucaaccagaaucuggaauaucagauaggauacauaugcagugggauuuucggagacaauccacgcccuaaugauaagacaggcaguugugguccaguaucgucuaauggagcaaauggaguaaaaggauuuucauucaaauacggcaaugguguuuggauagggagaacuaaaagcauuaguucaagaaacgguuuugagaugauuugggauccgaacggauggacugggacagacaauaacuucucaauaaagcaagauaucguaggaauaaaugaguggucaggauauagcgggaguuuuguccagcauccagaacuaacagggcuggauuguauaagaccuugcuucuggguugaacuaaucagagggcgacccaaagagaacacaaucuggacuagcgggagcagcauauccuuuugugguguaaacagugacacuguggguuggucuuggccagacggugcugaguugccauuuaccauugacaaguaa

SEQ ID NO: 51001 - RNA, 1410 nt, Artificial Sequence; identical to SEQ ID NO: 51000
  derived and/or modified CDS sequence (wt) from neuraminidase__InfluenzaA__ADJ40617

SEQ ID NO: 51002 - RNA, 1410 nt, Artificial Sequence
  derived and/or modified CDS sequence (wt) from neuraminidase__InfluenzaA__ADJ40627
augaauccaaaccaaaagauaauaaccauugguucggucuguaugacaauuggaauggcuaacuuaauauuacaaauuggaaacauaaucucaauauggauuagccacucaauucaacuugggaaucaaaaucagauugaaacaugcaaucaaagcgucauuacuuaugaaaacaacacuuggguaaaucagacauauguuaacaucagcaacaccaacuuugcugcuggacagucagugguuuccgugaaauuagcgggcaauuccucucucugcccuguuaguggaugggcuauauacaguaaagacaacaguauaagaaucgguuccaagggggauguguuugucauaagggaaccauucauaucaugcucccccuuggaaugcagaaccuucuucuugacucaaggggccuugcuaaaugacaaacauuccaauggaaccauuaaagacaggagcccauaucgaacccuaaugagcuguccuauuggugaaguucccucuccauacaacucaagauuugagucagucgcuuggucagcaagugcuugucaugauggcaucaauuggcuaacaauuggaauuucuggcccagacaauggggcaguggcuguguuaaaguacaacggcauaauaacagacacuaucaagaguuggagaaacaauauauugagaacacaagagucugaaugugcauguguaaaugguucuugcuuuacuguaaugaccgauggaccaagugauggacaggccucauacaagaucuucagaauagaaaagggaaagauagucaaaucagucgaaaugaaugccccuaauuauuacuaugaggaaugcuccuguuauccugauucuagugaaaucacaugugugugcagggauaacuggcauggcucgaaucgaccgugggugucuuucaaccagaaucuggaauaucagauaggauacauaugcagugggauuuucggagacaauccacgcccuaaugacaagacaggcaguugugguccaguaucgucuaauggagcaaauggaguaaaaggauuuucauucaaauacggcaaugguguuuggauagggagaacuaaaagcauuaguucaagaaacgguuuugagaugauuugggauccgaacggauggacugggacagacaauaacuucucaauaaagcaggauaucguaggaauaaaugaguggucaggauauagcgggaguuuuguucagcauccagaacuaacagggcuggauuguauaagaccuugcuucuggguugaacuaaucagagggcgacccaaagagaacacaaucuggacuagcgggagcagcauauccuuuugugguguaaacagugacacuguggguuggucuuggccagacggugcugaguugccauuuaccauugacaaguaa

SEQ ID NO: 51003 - RNA, 1410 nt, Artificial Sequence; identical to SEQ ID NO: 48750
  derived and/or modified CDS sequence (wt) from neuraminidase__InfluenzaA__ADJ40637

SEQ ID NO: 51004 - RNA, 1410 nt, Artificial Sequence
  derived and/or modified CDS sequence (wt) from neuraminidase__InfluenzaA__ADJ40657
augaauccaaaccaaaagauaauaaccauugguucggucuguaugacaauuggaauggcuaacuuaauauuacaaauuggaaacauaaucucaauauggauuagccacucaauucaacuugggaaucaaaaucagauugaaacaugcaaucaaagcgucauuacuuaugaaaacaacacuuggguaaaucagacauauguuaacaucagcaacaccaacuuugcugcuggacagucagugguuuccgugaaauuagcgggcaauuccucucucugcccuguuaguggaugggcuauauacaguaaagacaacaguauaagaaucgguuccaagggggauguguuugucauaagggaaccauucauaucaugcucccccuuggaaugcagaaccuucuucuugacucaaggggccuugcuaaaugacaaacauucuaauggaaccauuaaagacaggagcccauaucgaacccuaaugagcuguccuauuggugaaguucccucuccauacaacucaagauuugagucagucgcuuggucagcaagugcuugucaugauggcaucaauuggcuaacaauuggaauuucuggcccagacaauggggcaguggcuguguuaaaguacaacggcauaauaacagacacuaucaagaguuggagaaacaauauauugagaacacaagagucugaaugugcauguguaaaugguucuugcuuuacuguaaugaccgauggaccaagugauggacaggccucauacaagaucuucagaauagaaaagggaaagauagucaaaucagucgaaaugaaugccccuaauuaucacuaugaggaaugcuccuguuauccugauucuagugaaaucacaugugugugcagggauaacuggcauggcucgaaucgaccgugggugucuuucaaccagaaucuggaauaucagauaggauacauaugcagugggauuuucggagacaauccacgcccuaaugauaagacaggcaguugugguccaguaucgucuaauggagcaaauggaguaaaaggauuuucauucaaauacggcaaugguguuuggauagggagaacuaaaagcauuaguucaagaaacgguuuugagaugauuugggauccgaacggauggacugggacagacaauaacuucucaauaaagcaagauaucguaggaauaaaugaguggucaggauauagcgggaguuuuguucagcauccagaacuaacagggcuggauuguauaagaccuugcuucuggguugaacuaaucagagggcgacccaaagagaacacaaucuggacuagcgggagcagcauauccuuuugugguguaaacagugacacuguggguuggucuuggccagacggugcugaguugccauuuaccauugacaaguaa

SEQ ID NO: 51005 - RNA, 1410 nt, Artificial Sequence; identical to SEQ ID NO: 48750
  derived and/or modified CDS sequence (wt) from neuraminidase__InfluenzaA__ADJ40667

SEQ ID NO: 51006 - RNA, 1410 nt, Artificial Sequence; identical to SEQ ID NO: 48750
  derived and/or modified CDS sequence (wt) from neuraminidase__InfluenzaA__ADJ40677

SEQ ID NO: 51007 - RNA, 1410 nt, Artificial Sequence
  derived and/or modified CDS sequence (wt) from neuraminidase__InfluenzaA__ADJ41819
augaauccaaaucaaaagauaauaacaauuggcucugucucucucaccauugcaacaauaugcuuccuuaugcaaauugccauccugguaacuacuguaacauugcauuucaagcaauaugagugcagcucccccccaaacaaccaaguagugccgugugaaccaauaauaauagaaagaaacauaacagagauaguguauuugacuaacaccaccauagagaaagagauaugccccaaacuaguggaauacagaaauuggucaaagccgcaauguaaaauuacaggauuugcaccuuuuucuaaggacaauucaauucggcuuucugcugguggggacauuugggugacgagagaaccuuaugugucaugcgauccuggcaaguguuaucaauuugcacucgggcaggggaccacgcuagacaacaagcauucaaaugacacaauacaugauaggaccccuuaucgaacccuauugaugaaugaguuggguguuccauuucauuugggaaccaggcaaguguguauagcaugguccagcucaaguugucacgauggaaaagcauggcugcauguuuguaucacuggguaugauaaaaaugcaacugcuagcuucauuuacgaugggaggcuuguagacaguauugguucaugguccaaaaauauccucaggacccaggagucggaaugcguuuguaucaaugggacuuguacaguaguaaugacugauggaagugcuucagaaagagcugauaccaaaauacuauucauugaagaggggaaaaucguucauauuagcccauugucaggaagugcucagcauguagaggaguguuccuguuauccucgauauccuggugucagaugugucugcagagacaacuggaaaggcuccaauaggcccgucguagauauaaaugugaaagauuauagcauuguuuccaguuaugugugcucagggcuuguuggcgacacacccagaaaaaacgacagaucuagcaguagcuauugccggaauccuaacaaugagaaagggaaucauggagugaaaggcugggccuuugacgauggaaaugacguguggaugggaagaacaaucagcgaggagucacgcucagguuaugaaaccuucaaagucauuggugguugguccacacccaauuccaaauugcagauaaauaggcaagucauaguugacagcgguaauagguccgguuauucugguauuuucucuguugagggcaaaagcugcaucaauaggugcuuuuauguggaguugauaaggggaagggaacaggaaacuagagucugguggaccucaaacagcauuguuguguuuuguggcacuucagguaccuauggaacaggcucauggccugauggagcggacaucaaucucaugccuauauaa

SEQ ID NO: 51008 - RNA, 1410 nt, Artificial Sequence; identical to SEQ ID NO: 48750
  derived and/or modified CDS sequence (wt) from neuraminidase__InfluenzaA__ADJ56642

SEQ ID NO: 51009 - RNA, 1410 nt, Artificial Sequence; identical to SEQ ID NO: 49970
  derived and/or modified CDS sequence (wt) from neuraminidase__InfluenzaA__ADJ56652

SEQ ID NO: 51010 - RNA, 1410 nt, Artificial Sequence; identical to SEQ ID NO: 48750
  derived and/or modified CDS sequence (wt) from neuraminidase__InfluenzaA__ADJ80637

SEQ ID NO: 51011 - RNA, 1410 nt, Artificial Sequence
  derived and/or modified CDS sequence (wt) from neuraminidase__InfluenzaA__ADJ80647
augaauccaaaccaaaagauaauaaccauugguucggucuguaugacaauuggaauggcuaacuuaauauuacaaauuggaaacauaaucucaauauggauuagccacucaauucaacuugggaaucaaaaucagauugaaacaugcaaucaaagcgucauuacuuaugaaaacaacacuuggguaaaucagacauauguuaacaucagcaacaccaacuuugcugcuggacagucagugguuuccgugaaauuagcgggcaauuccucucucugcccuguuaguggaugggcuauauacaguaaagacaacaguauaagaaucgguuccaagggggauguguuugucauaagggaaccauucauaucaugcucccccuuggaaugcagaaccuucuucuugacucaaggggccuugcuaaaugacaaacauuccaauggaaccauuaaagacaggagcccauaucgaacccuaaugagcuguccuauuggugaaguucccucuccauacaacucaagauuugagucagucgcuuggucagcaagugcuugucaugauggcaucaauuggcuaacaauuggaauuucuggcccagacaauggggcaguggcuguguuaaaguacaacggcauaauaacagacacuaucaagaguuggagaaacaauauauugagaacacaagagucugaaugugcauguguaaaugguucuugcuuuacuguaaugaccgauggaccaagugauggacaggccucauacaagaucuucagaauagaaaagggaaagauagucaaaucagucgaaaugaaugccccuaauuaucacuaugaggaaugcuccuguuauccugauucuagugaaaucacaugugugugcagggauaacuggcauggcucgaaucgaccgugggugucuuucaaccagaaucuggaauaucagauaggauacauaugcagugggauuuucggagacaauccacgcccuaaugauaagacaggcaguugugguccaguaucgucuaauggagcaaauggaguaaaaggauuuucauucaaauacggcaaugguguuuggauagggagaacuaaaagcauuaguucaaggaacgguuuugagaugauuugggauccgaacggauggacugggacagacaauaacuucucaauaaagcaagauaucguaggaauaaaugaguggucaggauauagcgggaguuuuguucagcauccagaacuaacagggcugaauuguauaagaccuugcuucuggguugaacuaaucagagggcgacccaaagagaacacaaucuggacuagcgggagcagcauauccuuuugugguguaaacagugacacuguggguuggucuuggccagacggugcugaguugccauuuaccauugacaaguaa

SEQ ID NO: 51012 - RNA, 1410 nt, Artificial Sequence
  derived and/or modified CDS sequence (wt) from neuraminidase__InfluenzaA__ADJ80657
augaauccaaaccaaaagauaauaaccauugguucggucuguaugacaauuggaauggcuaacuuaauauuacaaauuggaaacauaaucucaauauggauuagccacucaauucaacuugggaaucaaaaucagauugaaacaugcaaucaaagcgucauuacuuaugaaaacaacacuuggguaaaucagacauauguuaacaucagcaacaccaacuuugcugcuggacagucagugguuuccgugaaauuagcgggcaauuccucucucugcccuguuaguggaugggcuauauacaguaaagacaacaguauaagaaucgguuccaagggggauguguuugucauaagggaaccauucauaucaugcucccccuuggaaugcagaaccuucuucuugacucaaggggccuugcuaaaugacaaacauuccaauggaaccauuaaagacaggagcccauaucgaacccuaaugagcuguccuauuggugaaguucccucuccauacaacucaagauuugagucagucgcuuggucagcaagugcuugucaugauggcaucaauuggcuaacaauuggaauuucuggcccagacaauggggcaguggcuguguuaaaguacaacggcauaauaacagacacuaucaagaguuggagaaacaauauauugagaacacaagagucugaaugugcauguguaaaugguucuugcuuuacuguaaugaccgauggaccaagugauggacaggccucauacaagaucuucagaauagaaaagggaaagauagucaaaucagucgaaaugaaugccccuaauuaucacuaugaggaaugcuccuguuauccugauucuagugaaaucacaugugugugcagggauaacuggcauggcucgaaucgaccgugggugucuuucaaccagaaucuggaauaucagauaggauacauaugcagugggauuuucggagacaauccacgcccuaaugauaagacaggcaguugugguccaguaucgucuaauggagcaaauggaguaaaaggauuuucauucaaauacggcaaugguguuuggauagggagaacuaaaagcauuaguucaaggaacgguuuugagaugauuugggauccgaacggauggacugggacagacaauaacuucucaauaaaacaagauaucguaggaauaaaugaguggucaggauauagcgggaguuuuguucagcauccagaacuaacagggcugaauuguauaagaccuugcuucuggguugaacuaaucagagggcgacccaaagagaacacaaucuggacuagcgggagcagcauauccuuuugugguguaaacagugacacuguggguugguccuggccagacggugcugaguugccauuuaccauugacaaguaa

SEQ ID NO: 51013 - RNA, 1410 nt, Artificial Sequence; identical to SEQ ID NO: 48750
  derived and/or modified CDS sequence (wt) from neuraminidase__InfluenzaA__ADJ80667

SEQ ID NO: 51014 - RNA, 1410 nt, Artificial Sequence
  derived and/or modified CDS sequence (wt) from neuraminidase__InfluenzaA__ADJ80677
augaauccaaaccaaaagauaauaaccauugguucggucuguaugacaauuggaauggcuaacuuaauauuacaaauuggaaacauaaucucaauauggauuagccacucaauucaacuugggaaucaaaaucagauugaaacaugcaaucaaagcaucauuacuuaugaaaacaacacuuggguaaaucagacauauguuaacaucagcaacaccaacuuugcugcuggacagucagugguuuccgugaaauuagcgggcaauuccucucucugcccuguuaguggaugggcuauauacaguaaagacaacaguauaagaaucgguuccaagggggauguguuugucauaagggaaccauucauaucaugcucccccuuggaaugcagaaccuucuucuugacucaaggggccuugcuaaaugacaaacauuccaauggaaccauuaaagacaggagcccauaucgaacccuaaugagcuguccuauuggugaaguucccucuccauacaacucaagauuugagucagucgcuuggucagcaagugcuugucaugauggcaucaauuggcuaacaauuggaauuucuggcccagacaauggggcaguggcuguguuaaaguacaacggcauaauaacagacacuaucaagaguuggagaaacaauauauugagaacacaagagucugaaugugcauguguaaaugguucuugcuuuacuguaaugaccgauggaccaagugauggacaggccucauacaagaucuucagaauagaaaagggaaagauagucaaaucagucgaaaugaaugccccuaauuaucacuaugaggaaugcuccuguuauccugauucuagugaaaucacaugugugugcagggauaacuggcauggcucgaaucgaccgugggugucuuucaaccagaaucuggaauaucagauaggauacauaugcagugggauuuucggagacaauccacgcccuaaugauaagacaggcaguugugguccaguaucgucuaauggagcaaauggaguaaaaggauuuucauucaaauacggcaaugguguuuggauagggagaacuaaaagcauuaguucaagaaacgguuuugagaugauuugggauccgaacggauggacugggacagacaauaacuucucaauaaagcaagauaucguaggaauaaaugaauggucaggauauagcgggaguuuuguucagcauccagaacuaacagggcuggauuguauaagaccuugcuucuggguugaacuaaucagagggcgacccaaagagaacacaaucuggacuagcgggagcagcauauccuuuugugguguaaacagugacacuguggguuggucuuggccagacggugcugaguugccauuuaccauugacaaguaa

SEQ ID NO: 51015 - RNA, 1410 nt, Artificial Sequence; identical to SEQ ID NO: 50038
  derived and/or modified CDS sequence (wt) from neuraminidase__InfluenzaA__ADJ80687

SEQ ID NO: 51016 - RNA, 1410 nt, Artificial Sequence
  derived and/or modified CDS sequence (wt) from neuraminidase__InfluenzaA__ADJ80697
augaauccaaaccaaaagauaauaaccauugguucggucuguaugacaauuggaauggccaacuuaauauuacaaauuggaaacauaaucucaauauggauuagccacucaauucaacuugggaaucaaaaucagauugaaacaugcaaucaaagcgucauuacuuaugaaaacaacacuuggguaaaucagacauauguuaacaucagcaacaccaacuuugcugcuggacagucagugauuuccgugaaauuagcaggcaauuccucucucugcccuguuaguggaugggcuauauacaguaaagacaacaguguaagaaucgguuccaagggggauguguuugucauaagggaaccauucauaucaugcucccccuuggaaugcagaaccuucuucuugacucaaggggccuugcuaaaugacaaacauuccaauggaaccauuaaagacaggagcccauaucgaacccuaaugagcuguccuauuggugaaguucccucuccauacaacucaagauuugagucagucgcuuggucagcaagugcuugucaugauggcaucaauuggcuaacaauuggaauuucuggcccagacaauggggcaguggcuguguuaaaguacaacggcauaauaacagacacuaucaagaguuggagaaacaauauauugagaacacaagagucugaaugugcauguguaaaugguucuugcuuuacuguaaugaccgauggaccaagugauggacaggccucauacaagaucuucagaauagaaaagggaaagauagucaaaucagucgaaaugaaugccccuaauuaucacuaugaggaaugcuccuguuauccugauucuagugaaaucacaugugugugcagggauaacuggcauggcucgaaucgaccguggguuucuuucaaccagaaucuggaauaucagauaggauacauaugcagugggauuuucggagacaauccacgcccuaaugauaagacaggcaguugugguccaguaucgucuaauggagcaaauggaguaaaaggauuuucauucaaauacggcaaugguguuuggauagggagaacuaaaagcauuaguucaagaaacgguuuugagaugauuugggauccgaacggauggacugggacagacaauaacuucucaauaaagcaagauaucguaggaauaaaugaguggucaggauauagcgggaguuuuguucagcauccagaacuaacagggcuggauuguauaagaccuugcuucuggguugaacuaaucagagggcgacccaaagagaacacaaucuggacuagcgggagcagcauauccuuuugugguguaaacagugacacuguggguuggucuuggccagacggugcugaguugccauuuaccauugacaaguaa

SEQ ID NO: 51017 - RNA, 1410 nt, Artificial Sequence
  derived and/or modified CDS sequence (wt) from neuraminidase__InfluenzaA__ADJ80717
augaauccaaaccaaaagauaauaaccauugguucggucuguaugacaauuggaauggcuaacuuaauauuacaaauuggaaacauaaucucaauauggauuagccacucaauucaacuugggaaucaaaaucagauugaaacaugcaaucaaagcgucauuacuuaugaaaacaacacuuggguaaaucagacauauguuaacaucagcaacaccaacuuugcugcuggacagucagugguuuccgugaaauuagcgggcaauuccucucucugcccuguuaguggaugggcuguauacaguaaagacaacaguauaagaaucgguuccaagggggauguguuugucauaagggaaccauucauaucaugcucccccuuggaaugcagaaccuucuucuugacucaaggggccuugcuaaaugacaaacauuccaauggaaccauuaaagacaggagcccauaucgaacccuaaugagcuguccuauuggugaaguucccucuccauacaacucaagauuugagucagucgcuuggucagcaagugcuugucaugauggcaucaauuggcuaacaauuggaauuucuggcccagacaauggggcaguggcuguguuaaaguacaacggcauaauaacagacacuaucaagaguuggagaaacaauauauugagaacacaagagucugaaugugcauguguaaaugguucuugcuuuacuguaaugaccgauggaccaagugauggacaggccucauacaagaucuucagaauagaaaagggaaagauagucaaaucagucgaaaugaaugccccuaauuaucacuaugaggaaugcuccuguuauccugauucuagugaaaucacaugugugugcagggauaacuggcauggcucgaaucgaccgugggugucuuucaaccagaaucuggaauaucagauaggauacauaugcagugggauuuucggagacaauccacgcccuaaugauaagacaggcaguugugguccaguaucgucuaauggagcaaauggaguaaaaggauuuucauucaaauacggcaaugguguuuggauagggagaacuaaaagcauuaguucaagaaacgguuuugagaugauuugggauccgaacggauggacugggacagacaauaacuucucaauaaagcaagauaucguaggaauaaaugaauggucaggauauagcgggaguuuuguucagcauccagaacuaacagggcuggauuguauaagaccuugcuucuggguugaacuaaucagagggcgacccaaagagaacacaaucuggacuagcgggagcagcauauccuuuugugguguaaacagugacacuguggguuggucuuggccagacggugcugaguugccauuuaccauugacaaguaa

SEQ ID NO: 51018 - RNA, 1410 nt, Artificial Sequence
  derived and/or modified CDS sequence (wt) from neuraminidase__InfluenzaA__ADJ80727
augaauccaaaccaaaagauaauaaccauugguucggucuguaugacaauuggaauggcuaacuuaauauuacaaauuggaaacauaaucucaauauggauuagccacucaauucaacuugggaaucaaaaucagauugaaacaugcaaucaaagcgucauuacuuaugaaaacaacacuuggguaaaucagacauauguuaacaucagcaacaccaacuuugcugcuggacagucagugguuuccgugaaauuagcgggcaauuccucucucugcccuguuaguggauggguuauauacaguaaagacaacaguauaagaaucgguuccaagggggauguguuugucauaagggaaccauucauaucaugcucccccuuggaaugcagaaccuucuucuugacucaaggggccuugcuaaaugacaaacauuccaauggaaccauuaaagacaggagcccauaucgaacccuaaugagcuguccuauuggugaaguucccucuccauacaacucaagauuugagucagucgcuuggucagcaagugcuugucaugauggcaucaauuggcuaacaauuggaauuucuggcccagacaauggggcaguggcuguguuaaaguacaacggcauaauaacagacacuaucaagaguuggagaaacaauauauugagaacacaagagucugaaugugcauguguaaaugguucuugcuuuacuguaaugaccgauggaccaagugauggacaggccucauacaagaucuucagaauagaaaagggaaagauagucaaaucagucgaaaugaaugccccuaauuaucacuaugaggaaugcuccuguuauccugauucuagugaaaucacaugugugugcagggauaacuggcauggcucgaaucgaccgugggugucuuucaaccagaaucuggaauaucagauaggauacauaugcagugggauuuucggagacaauccacgcccuaaugauaagacaggcaguugugguccaguaucgucuaauggagcaaauggaguaaaaggauuuucauucaaauacggcaaugguguuuggauagggagaacuaaaagcauuaguucaagaaacgguuuugagaugauuugggauccgaacggauggacugggacagacaauaacuucucaauaaagcaagauaucguaggaauaaaugaguggucaggauauagcgggaguuuuguucagcauccagaacuaacagggcuggauuguauaagaccuugcuucuggguugaacuaaucagagggcgaccuaaagagaacacaaucuggacuagcgggagcagcauauccuuuugugguguaaacagugacacuguggguuggucuuggccagacggugcugaguugccauuuaccauugacaaguaa

SEQ ID NO: 51019 - RNA, 1410 nt, Artificial Sequence
  derived and/or modified CDS sequence (wt) from neuraminidase__InfluenzaA__ADJ80737
augaauccaaaccaaaagauaauaaccauugguucggucuguauaacaauuggaauggcuaacuuaauauuacaaauuggaaacauaaucucaauauggauuagccacucaauucaacuugggaaucaaaaucagauugaaacaugcaaucaaagcgucauuacuuaugaaaacaacacuuggguaaaucagacauauguuaacaucagcaacaccaacuuugcugcuggacagucagugguuuccgugaaauuagcgggcaauuccucucucugcccuguuaguggaugggcuauauacaguaaagacaacaguauaagaaucgguuccaagggggauguguuugucauaagggaaccauucauaucaugcucccccuuggaaugcagaaccuucuucuugacucaaggggccuugcuaaaugacaaacauuccaauggaaccauuaaagacaggagcccauaucgaacccuaaugagcuguccuauuggugaaguucccucuccauacaacucaagauuugagucagucgcuuggucagcaagugcuugucaugauggcaucaauuggcuaacaauuggaauuucuggcccagacaauggggcaguggcuguguuaaaguacaacggcauaauaacagacacuaucaagaguuggagaaacaauauauugagaacacaagagucugaaugugcauguguaaaugguucuugcuuuacuguaaugaccgauggaccaagugauggacaggccucauacaagaucuucagaauagaaaagggaaagauagucaaaucagucgaaaugaaugccccuaauuaucacuaugaggaaugcuccuguuauccugauucuagugaaaucacaugugugugcagggauaacuggcauggcucgaaucgaccgugggugucuuucaaccagaaucuggaauaucagauaggauacauaugcagugggauuuucggagacaauccacgcccuaaugauaagacaggcaguugugguccaguaucgucuaauggagcaaauggaguaaaaggauuuucauucaaauacggcaaugguguuuggauagggagaacuaaaagcauuaguucaagaaacgguuuugagaugauuugggauccgaacggauggacugggacagacaauaacuucucaauaaagcaagauaucguaggaauaaaugaauggucaggauacagcgggaguuuuguucagcauccagaacuaacagggcuggauuguauaagaccuugcuucuggguugaacuaaucagagggcgacccaaagagaacacaaucuggacuagcgggagcagcauauccuuuugugguguaaacagugacacuguggguuggucuuggccagacggugcugaguugccauuuaccauugacaaguaa

SEQ ID NO: 51020 - RNA, 1410 nt, Artificial Sequence
  derived and/or modified CDS sequence (wt) from neuraminidase__InfluenzaA__ADJ80747
augaauccaaaccaaaagauaauaaccauugguucggucuguaugacaauuggaauggcuaacuuaauauuacaaauuggaaacauaaucucaauauggauuagccacucaauucaacuugggaaucaaaaucagauugaaacaugcaaucaaagcgucauuacuuaugaaaacaacacuuggguaaaucagacauauguuaacaucagcaacaccaacuuugcugcuggacagucagugguuuccgugaaauuagcgggcaguuccucucucugcccuguuaguggaugggcuauauacaguaaagacaacaguauaagaaucgguuccaagggggauguguuugucauaagggaaccauucauaucaugcucccccuuggaaugcagaaccuucuucuugacucaaggggccuugcuaaaugacaaacauuccaauggaaccauuaaagacaggagcccauaucgaacccuaaugagcuguccuauuggugaaguucccucuccauacaacucaagauuugagucagucgcuuggucagcaagugcuugucaugauggcaucaauuggcuaacaauuggaauuucuggcccagacaauggggcaguggcuguguuaaaguacaacggcauaauaacagacacuaucaagaguuggagaaacaauauauugagaacacaagagucugaaugugcauguguaaaugguucuugcuuuacuguaaugaccgauggaccaagugauggacaggccucauacaagaucuucagaauagaaaggggaaagauagucaaaucagucgaaaugaaugccccuaauuaucacuaugaggaaugcuccuguuauccugauucuagugaaaucacaugugugugcagggauaacuggcauggcucgaaucgaccgugggugucuuucaaccagaaucuggaauaucagauaggauacauaugcagugggauuuucggagacaauccacgcccuaaugauaagaaaggcaguugugguccaguaucgucuaauggagcaaauggaguaaaaggauuuucauucaaauacggcaaugguguuuggauagggagaacuaaaagcauuaguucaagaaacgguuuugagaugauuugggauccgaacggauggacugggacagacaauaacuucucaauaaagcaagauaucguagaaauaaaugaauggucaggauauagcgggaguuuuguucagcauccagaacuaacagggcuggauuguauaagaccuugcuucuggguugaacuaaucagagggcgacccaaagagaacacaaucuggacuagcgggagcagcauauccuuuugugguguaaacagugacacuguggguuggucuuggccagacggugcugaguugccauuuaccauugacaaguaa

SEQ ID NO: 51021 - RNA, 1410 nt, Artificial Sequence
  derived and/or modified CDS sequence (wt) from neuraminidase__InfluenzaA__ADJ80757
augaauccaaaccaaaagauaauaaccauugguucggucuguaugacaauuggaauggcuaacuuaauauuacaaauuggaaacauaaucucaauauggauuagccacucaauucaacuugggaaucaaaaucagauugaaacaugcaaucaaagcgucauuacuuaugaaaacaacacuuggguaaaucagacauauguuaacaucagcaacaccaacuuugcugcuggacagucagugguuuccgugaaauuagcgggcaauuccucucucugcccuguuaguggaugggcuauauacaguaaagacaacaguauaagaaucgguuccaagggggauguguuugucauaagggaaccauucauaucaugcucccccuuggaaugcagaaccuucuucuugacucaaggggccuugcuaaaugacaaacauuccaauggaaccauuaaagacaggagcccauaucgaacccuaaugagcuguccuauuggugaaguucccucuccauacaacucaagauuugagucagucgcuuggucagcaagugcuugucaugauggcaucaauuggcuaacaauuggaauuucuggcccagacaauggggcaguggcuguguuaaaguacaacggcauaauaacagacacuaucaagaguuggagaaacaauauauugagaacacaagagucugaaugugcauguguaaaugguucuugcuuuacuguaaugaccgauggaccaagugauggacaggccucauacaagaucuucagaauagaaaagggaaagauagucaaaucagucgaaaugaaugccccuaauuaucacuaugaggaaugcuccuguuauccugauucuagugaaaucacaugugugugcagggauaacuggcauggcucgaaucgaccgugggugucuuucaaccagaaucuggaauaucagauaggauacauaugcagugggauuuucggagacaauccacgcccuaaugauaagacaggcaguugugguccaguaucgucuaauggagcaaauggaguaaaaggguuuucauucaaauacggcaaugguguuuggauagggagaacuaaaagcauuaguucaagaaacgguuuugagaugauuugggauccgaacggauggacugggacagacaauaacuucucaauaaagcaagauaucguaggaauaaaugaauggucaggauauagcgggaguuuuguucagcauccagaacuaacagggcuggauuguauaagaccuugcuucuggguugaacuaaucagagggcgacccaaagagaacacaaucuggacuagcgggagcagcauauccuuuugugguguaaacagugacacuguggguuggucuuggccagacggugcugaguugccauuuaccauugacaaguaa

SEQ ID NO: 51022 - RNA, 1410 nt, Artificial Sequence
  derived and/or modified CDS sequence (wt) from neuraminidase__InfluenzaA__ADJ80767
augaauccaaaccaaaagauaauaaccauugguucggucuguaugacaauuggaauggcuaacuuaauauuacaaauuggaaacauaaucucaauauggauuagccacucaauucaacuugggaaucaaaaucagauugaaacaugcaaucaaagcgucauuacuuaugaaaacaacacuuggguaaaucagacauauguuaacaucagcaacaccaacuuugcugcuggacagucagugguuuccgugaaauuagcgggcaauuccucucucugcccuguuaguggaugggcuauauacaguaaagacaacaguauaagaaucgguuccaagggggauguguuugucauaagggaaccauucauaucaugcucccccuuggaaugcagaaccuucuucuugacucaaggggccuugcuaaaugacaaacauuccaauggaaccauuaaagacaggagcccauaucgaacccuaaugagcuguccuauuggugaaguucccucuccauacaacucaagauuugagucagucgcuuggucagcaagugcuugucaugauggcaucaauuggcuaacaauuggaauuucuggcccagacaauggggcaguggcuguguuaaaguacaacggcauaauaacagacacuaucaagaguuggagaaacaauauauugagaacacaagagucugaaugugcauguguaaaugguucuugcuuuacuguaaugaccgauggaccaagugauggacaggccucauacaagaucuucagaauagaaaagggaaagauagucaaaucagucgaaaugaaugccccuaauuaucacuaugaggaaugcuccuguuauccugauucuagugaaaucacaugugugugcagggauaacuggcauggcucgaaucgaccgugggugucuuucaaccagaaucuggaauaucagauaggauacauaugcagugggauuuucggagacaauccacgcccuaaugauaagacaggcaguugugguccaguaucgucuaauggagcaaauggaguaaaaggauuuucauucaaauacggcaaugguguuuggauagggagaacuaaaagcauuaguucaagaaacgguuuugagaugauuugggauccgaacggauggacugggacagacaauaacuucucaauaaagcaagauaucguaggaauaaaugaauggucaggauauagcgggaguuuuguacagcauccagaacuaacagggcuggauuguauaagaccuugcuucuggguugaacuaaucagagggcgacccaaagagaacacaaucuggacuagcgggagcagcauauccuuuugugguguaaacagugacacuguggguuggucuuggccagacggugcugaguugccauuuaccauugacaaguaa

SEQ ID NO: 51023 - RNA, 1410 nt, Artificial Sequence
  derived and/or modified CDS sequence (wt) from neuraminidase__InfluenzaA__ADJ80777
augaauccaaaccaaaagauaauaaccauugguucggucuguaugacaauuggaauggccaacuuaauauuacaaauuggaaacauaaucucaauauggauuagccacucaauucaacuugggaaucaaaaucagauugaaacaugcaaucaaagcgucauuacuuaugaaaacaacacuuggguaaaucagacauauguuaacaucagcaacaccaacuuugcugcuggacagucagugguuuccgugaaauuagcgggcaauuccucucucugcccuguuaguggaugggcuauauacaguaaagacaacaguguaagaaucgguuccaagggggauguguuugucauaagggaaccauucauaucaugcucccccuuggaaugcagaaccuucuucuugacucaaggggccuugcuaaaugacaaacauuccaauggaaccauuaaagacaggagcccauaucgaacccugaugagcuguccuauuggugaaguucccucuccauacaacucaagauuugagucagucgcuuggucagcaagugcuugucaugauggcaucaauuggcuaacaauuggaauuucuggcccagacaauggggcaguggcuguguuaaaguacaacggcauaauaacagacacuaucaagaguuggagaaacaauauauugagaacacaagagucugaaugugcauguguaaaugguucuugcuuuacuguaaugaccgauggaccaagugauggacaggccucauacaagaucuucagaauagaaaagggaaagauagucaaaucagucgaaaugaaugccccuaauuaucacuaugaggaaugcuccuguuauccugauucuagugaaaucacaugugugugcagggauaacuggcauggcucgaaucgaccguggguuucuuucaaccagaaucuggaauaucagauaggauacauaugcagugggauuuucggagacaauccacgcccuaaugauaagacaggcaguugugguccaguaucgucuaauggagcaaauggaguaaaaggauuuucauucaaauacggcaaugguguuuggauagggagaacuaaaagcauuaguucaagaaacgguuuugagaugauuugggauccgaacggauggacugggacagacaauaacuucucaauaaagcaagauaucguaggaauaaaugaguggucaggauauagcgggaguuuuguucagcauccagaacuaacagggcuggauuguauaagaccuugcuucuggguugaacuaaucagagggcgacccaaagagaacacaaucuggacuagcgggagcagcauauccuuuugugguguaaacagugacacuguggguuggucuuggccagacggugcugaguugccauuuaccauugacaaguaa

SEQ ID NO: 51024 - RNA, 1410 nt, Artificial Sequence; identical to SEQ ID NO: 49794
  derived and/or modified CDS sequence (wt) from neuraminidase__InfluenzaA__ADJ80787

SEQ ID NO: 51025 - RNA, 1410 nt, Artificial Sequence
  derived and/or modified CDS sequence (wt) from neuraminidase__InfluenzaA__ADJ80797
augaauccaaaccaaaagauaauaaccauugguucggucuguaugacaauuggaauggcuaacuuaauauuacaaauuggaaacauaaucucaauauggauuagccacucaauucaacuugggaauaaaaaucagauugaaacaugcaaucaaagcgucauuacuuaugaaaacaacacuuggguaaaucagacauauguuaacaucagcaacaccaacuuugcugcuggacagucagugguuuccgugaaauuagcgggcaauuccucucucugcccuguuaguggaugggcuauauacaguaaagacaacaguauaagaaucgguuccaagggggauguguuugucauaagggaaccauucauaucaugcucccccuuagaaugcagaaccuucuucuugacucaaggggccuugcuaaaugacaaacauuccaauggaaccauuaaagacaggagcccauaucgaacccuaaugagcuguccuauuggugaaguucccucuccauacaacucaagauuugagucagucgcuuggucagcaagugcuugucaugauggcaucaauuggcuaacaauuggaauuucuggcccagacaauggggcaguggcuguguuaaaguacaacggcauaauaacagacacuaucaagaguuggagaaacaauauauugagaacacaagagucugaaugugcauguguaaaugguucuugcuuuacuguaaugaccgauggaccaagugauggacaggccucauacaagaucuucagaauagaaaagggaaagauagucaaaucagucgaaaugaaugccccuaauuaucacuaugaggaaugcuccuguuauccugauucuagugaaaucacaugugugugcagggauaacuggcauggcucgaaucgaccgugggugucuuucaaccagaaucuggaauaucagauaggauacauaugcagugggauuuucggagacaauccacgcccuaaugauaagaaaggcaguugugguccaguaucgucuaauggagcaaauggaguaaaaggauuuucauucaaauacggcaaugguguuuggauagggagaacuaaaagcauuaguucaagaaacgguuuugagaugauuugggauccgaacggauggacugggacagacaauaacuucucaauaaagcaagauaucguaggaauaaaugaauggucaggauauagcgggaguuuuguucagcauccagaacuaacagggcuggauuguauaagaccuugcuucuggguugaacuaaucagagggcgacccaaagagaacacaaucuggacuagcgggagcagcauauccuuuugugguguaaacagugacacuguggguuggucuuggccagacggugcugaguugccauuuaccauugacaaguaa

SEQ ID NO: 51026 - RNA, 1410 nt, Artificial Sequence; identical to SEQ ID NO: 51012
  derived and/or modified CDS sequence (wt) from neuraminidase__InfluenzaA__ADJ80807

SEQ ID NO: 51027 - RNA, 1410 nt, Artificial Sequence
  derived and/or modified CDS sequence (wt) from neuraminidase__InfluenzaA__ADJ80817
augaauccaaaccaaaagauaauaaccauugguucggucuguaugacaauuggaauggcuaacuuaauauuacaaauuggaaacauaaucucaauauggauuagccacucaauucaacuugggaaucaaaaucagauugaaacaugcaaucaaagcgucauuacuuaugaaaacaacacuuggguaaaucagacauauguuaacaucagcaacaccaacuuugcugcuggacagucagugguuuccgugaaauuagcgggcaauuccucucucugcccuguuaguggaugggcuauauacaguaaagacaacaguauaagaaucggguccaagggggauguguuugucauaagggaaccauucauaucaugcucccccuuggaaugcagaaccuucuucuugacucaaggggccuugcuaaaugacaaacauuccaauggaaccauuaaagacaggagcccauaucgaacccuaaugagcuguccuauuggugaaguucccucuccauacaacucaagauuugagucagucgcuuggucagcaagugcuugucaugauggcaucaauuggcuaacaauuggaauuucuggcccagacaauggggcaguggcuguguuaaaguacaacggcauaauaacagacacuaucaagaguuggagaaacaauauauugagaacacaagagucugaaugugcauguguaaaugguucuugcuuuacuguaaugaccgauggaccaagugauggacaggccucauacaagaucuucagaauagaaaagggaaagauagucaaaucagucgaaaugaaugccccuaauuaucacuaugaggaaugcuccuguuauccugauucuagugaaaucacaugugugugcagggauaacuggcauggcucgaaucgaccgugggugucuuucaaccagaaucuggaauaucagauaggauacauaugcagugggauuuucggagacaauccacgcccuaaugauaagacaggcaguugugguccaguaucgucuaauggagcaaauggaguaaaaggauuuucauucaaauacggcaaugguguuuggauagggagaacuaaaagcauuaguucaagaaacgguuuugagaugauuugggauccgaacggauggacugggacagacaauaacuucucaauaaagcaagauaucguaggaauaaaugaauggucaggauauagcgggaguuuuguucagcauccagaacuaacagggcuggauuguauaagaccuugcuucuggguugaacuaaucagagggcgacccaaagagaacacaaucuggacuagcgggagcagcauauccuuuugugguguaaacagugacacuguggguuggucuuggccagacggugcugaguugccauuuaccauugacaaguaa

SEQ ID NO: 51028 - RNA, 1410 nt, Artificial Sequence; identical to SEQ ID NO: 48750
  derived and/or modified CDS sequence (wt) from neuraminidase__InfluenzaA__ADJ80827

SEQ ID NO: 51029 - RNA, 1410 nt, Artificial Sequence
  derived and/or modified CDS sequence (wt) from neuraminidase__InfluenzaA__ADJ80837
augaauccaaaccaaaagauaauaaccauugguucggucuguaugacaauuggaauggcuaacuuaauauuacaaauuggaaacauaaucucaauauggauuagccacucaauucaacuugggaaucaaaaucagauugaaacaugcaaucaaagcgucauuacuuaugaaaacaacacuuggguaaaucagacauauguuaacaucagcaacaccaacuuugcugcuggacagucagugguuuccgugaaauuagcaggcaauuccucucucugcccuguuaguggaugggcuauauacaguaaagacaacaguauaagaaucgguuccaagggggauguguuugucauaagggaaccauucauaucaugcucccccuuggaaugcagaaccuucuucuugacucaaggggccuugcuaaaugacaaacauuccaauggaaccauuaaagacaggagcccauaucgaacccuaaugagcuguccuauuggugaaguucccucuccauacaacucaagauuugagucagucgcuuggucagcaagugcuugucaugauggcaucaauuggcuaacaauuggaauuucuggcccagacaauggggcaguggcuguguuaaaguacaacggcauaauaacagacacuaucaagaguuggagaaacaauauauugagaacacaagagucugaaugugcauguguaaaugguucuugcuuuacuguaaugaccgauggaccaagugauggacaggccucauacaagaucuucagaauagaaaagggaaagauagucaaaucagucgaaaugaaugccccuaauuaucacuaugaggaaugcuccuguuauccugauucuagugaaaucacaugugugugcagggauaacuggcauggcucgaaucgaccgugggugucuuucaaccagaaucuggaauaucagauaggauacauaugcagugggauuuucggagacaauccacgcccuaaugauaagacaggcaguugugguccaguaucgucuaauggagcaaauggaguaaaaggauuuucauucaaauacggcaaugguguuuggauagggagaacuaaaagcauuaguucaagaaacgguuuugagaugauuugggauccgaacggauggacugggacagacaauaacuucucaauaaagcaagauaucguaggaauaaaugaguggucaggauauagcgggaguuuuguccagcauccagaacuaacagggcuggauuguauaagaccuugcuucuggguugaacuaaucagagggcgacccaaagagaacacaaucuggacuagcgggagcagcauauccuuuugugguguaaacagugacgcuguggguuggucuuggccagacggugcugaguugccauuuaccauugacaaguaa

SEQ ID NO: 51030 - RNA, 1410 nt, Artificial Sequence; identical to SEQ ID NO: 50761
  derived and/or modified CDS sequence (wt) from neuraminidase__InfluenzaA__ADJ80851

SEQ ID NO: 51031 - RNA, 1410 nt, Artificial Sequence
  derived and/or modified CDS sequence (wt) from neuraminidase__InfluenzaA__ADJ80861
augaauccaaaccaaaagauaauaaccauugguucggucuguaugacaauuggaauggcuaacuuaauauuacaaauuggaaacauaaucucaauauggauuagccacucaauucaacuugggaaucaaaaucagauugaaacaugcaaucaaagcgucauuacuuaugaaaacaacacuuggguaaaucagacauauguuaacaucagcaacaccaacuuugcugcuggacagucagugguuuccgugaaauuagcgggcaauuccucucucugcccuguuaguggaugggcuauauacaguaaagacaacaguauaagaaucgguuccaagggggauguguuugucauaagggaaccauucauaucaugcucucccuuggaaugcagaaccuucuucuugacucaaggggccuugcuaaaugacaaacauuccaauggaaccauuaaagacaggagcccauaucgaacccuaaugagcuguccuauuggugaaguucccucuccauacaacucaagauuugagucagucgcuuggucagcaagugcuugucaugauggcaucaauuggcuaacaauuggaauuucuggcccagacaauggagcaguggcuguguuaaaguacaacggcauaauaacagacacuaucaagaguuggagaaacaauauauugagaacacaagagucugaaugugcauguguaaaugguucuugcuuuacuguaaugaccgauggaccaagugauggacaggccucauacaagaucuucagaauagaaaagggaaagauagucaaaucagucgaaaugaaugccccuaauuaucacuaugaggaaugcuccuguuauccugauucuagugaaaucacaugugugugcagggauaacuggcauggcucgaaucgaccgugggugucuuucaaccagaaucuggaauaucagauaggauacauaugcagugggauuuucggagacaauccacgcccuaaugauaagacaggcaguugugguccaguaucgccuaauggagcaaauggaguaaaaggauuuucauucaaauacggcaaugguguuuggauagggagaacuaaaagcauuaguucaagaaacgguuuugagaugauuugggauccgaacggauggacugggacagacaauaacuucucaauaaagcaagauaucguagguauaaaugaauggucaggauauagcgggaguuuuguucagcauccagaacuaacagggcuggauuguauaagaccuugcuucuggguugaauuaaucagagggcgacccaaagagaacacaaucuggacuagcgggagcagcauauccuuuugugguguaaacagugacacuguggguuggucuuggccagacggugcugaguugccauuuaccauugacaaguaa

SEQ ID NO: 51032 - RNA, 1410 nt, Artificial Sequence
  derived and/or modified CDS sequence (wt) from neuraminidase__InfluenzaA__ADJ80871
augaauccaaaccaaaagauaauaaccauugguucggucuguaugacaauuggaauggcuaacuuaauauuacaaauuggaaacauaaucucaauauggauuagccacucaauucaacuugggaauaaaaaucagauugaaacaugcaaucaaagcgucauuacuuaugaaaacaacacuuggguaaaucagacauauguuaacaucagcaacaccaacuuugcugcuggacagucagugguuuccgugaaauuagcgggcaauuccucucucugcccuguuaguggaugggcuauauacaguaaagacaacaguauaagaaucgguuccaagggggauguguuugucauaagggaaccauucauaucaugcucccccuuggaaugcagaaccuucuucuugacucaaggggccuugcuaaaugacaaacauuccaauggaaccauuaaagacaggagcccauaucgaacccuaaugagcuguccuauuggugaaguucccucuccauacaacucaagauuugagucagucgcuuggucagcaagugcuugucaugauggcaucaauuggcuaacaauuggaauuucuggcccagacaauggggcaguggcuguguuaaaguacaacggcauaauaacagacacuaucaagaguuggagaaacaauauauugagaacacaagagucugaaugugcauguguaaaugguucuugcuuuacuguaaugaccgauggaccaagugauggacaggccucauacaagaucuucagaauagaaaagggaaagauagucaaaucagucgaaaugaaugccccuaauuaucacuaugaggaaugcuccuguuauccugauucuagugaaaucacaugugugugcagggauaacuggcauggcucgaaucgaccgugggugucuuucaaccagaaucuggaauaucagauaggauacauaugcagugggauuuucggagacaauccacgcccuaaugauaagaaaggcaguugugguccaguaucgucuaauggagcaaauggaguaaaaggauuuucauucaaauacggcaaugguguuuggauagggagaacuaaaagcauuaguucaagaaacgguuuugagaugauuugggauccgaacggauggacugggacagacaauaacuucucaauaaagcaagauaucguaggaauaaaugaauggucaggauauagcgggaguuuuguucagcauccagaacugacagggcuggauuguauaagaccuugcuucuggguugaacuaaucagagggcgacccaaagagaacacaaucuggacuagcgggagcagcauauccuuuugugguguaaacagugacacuguggguuggucuuggccagacggugcugaguugccauuuaccauugacaaguaa

SEQ ID NO: 51033 - RNA, 1410 nt, Artificial Sequence
  derived and/or modified CDS sequence (wt) from neuraminidase__InfluenzaA__ADJ80886
augaauccaaaccaaaagauaauaaccauugguucggucuguaugacaauuggaauggcuaacuuaauauuacaaauuggaaacauaaucucaauauggauuagccacucaauucaacuugggaaucaaaaucagauugaaacaugcaaucaaagcgucauuacuuaugaaaacaacacuuggguaaaucagacauauguuaacaucagcaacaccaacuuugcugcuggacagucagugguuuccgugaaauuagcgggcaauuccucucucugcccuguuaguggaugggcuauauacaguaaagacaacaguauaagaaucgguuccaagggggauguguuugucauaagggaaccauucauaucaugcucccccuuggaaugcagaaccuucuucuugacucaaggggccuugcuaaaugacaaacauuccaauggaaccauuaaagacaggagcccauaucgaacccuaaugagcuguccuauuggugaaguucccucuccauacaacucaagauuugagucagucgcuuggucagcaagugcuugucaugauggcaucaauuggcuaacaauuggaauuucuggcccagacaauggggcaguggcuguguuaaaguacaacggcauaauaacagacacuaucaagaguuggagaaacaauauuuugagaacacaagagucugaaugugcauguguaaaugguucuugcuuuacuguaaugaccgauggaccaagugauggacaggccucauacaagaucuucagaauagaaaagggaaagauagucaaaucagucgaaaugaaugccccuaauuaucacuaugaggaaugcuccuguuauccugauucuagugaaaucacauguguguguagggauaacuggcauggcucgaaucgaccgugggugucuuucaaccagaaucuggaauaucagauaggauacauaugcagugggauuuucggagacaauccacgcccuaaugauaagacaggcaguugugguccaguaucgucuaauggagcaaauggaguaaaaggauuuucauucaaauacggcaaugguguuuggauagggagaacuaaaagcauuaguucaagaaacgguuuugagaugauuugggauccgaacggauggacugggacagacaauaacuucucaauaaagcaagauaucguaggaauaaaugaauggucaggauauagcgggaguuuuguucagcauccagaacuaacagggcuggauuguauaagaccuugcuucuggguugaacuaaucagagggcgacccaaagagaacacaaucuggacuagcgggagcagcauauccuuuugugguguaaacagugacacuguggguuggucuuggccagacggugcugaguugccauuuaccauugacaaguaa

SEQ ID NO: 51034 - RNA, 1410 nt, Artificial Sequence
  derived and/or modified CDS sequence (wt) from neuraminidase__InfluenzaA__ADJ80896
augaauccaaaccaaaagauaauaaccauugguucggucuguaugacaauuggaauggcuaacuuaauauuacaaauuggaaacauaaucucaauauggauuagccacucaauucaacuugggaaucaaaaucagauugaaacaugcaaucaaagcaucauuacuuaugaaaacaacacuuggguaaaucagacauauguuaacaucagcaacaccaacuuugcugcuggacagucagugguuuccgugaaauuaacgggcaauuccucucucugcccuguuaguggaugggcuauauacaguaaagacaacaguauaagaaucgguuccaagggggauguguuugucauaagggaaccauucauaucaugcucccccuuggaaugcagaaccuucuucuugacucaaggggccuugcuaaaugacaaacauuccaauggaaccauuaaagacaggagcccauaucgaacccuaaugagcuguccuauuggugaaguucccucuccauacaacucaagauuugagucagucgcuuggucagcaagugcuugucaugauggcaucaauuggcuaacaauuggaauuucuggcccagacaauggggcaguggcuguguuaaaguacaacggcauaauaacagacacuaucaagaguuggagaaacaauauauugagaacacaagagucugaaugugcauguguaaaugguucuugcuuuacuguaaugaccgauggaccaagugauggacaggccucauacaagaucuucagaauagaaaagggaaagauagucaaaucagucgaaaugaaugccccuaauuaucacuaugaggaaugcuccuguuauccugauucuagugaaaucacaugugugugcagggauaacuggcauggcucgaaucgaccgugggugucuuucaaucagaaucuggaauaucagauaggauacauaugcagugggauuuucggagacaauccacgcccuaaugauaagacaggcaguugugguccaguaucgucuaauggagcaaauggaguaaaaggauuuucauucaaauacggcaaugguguuuggauagggagaacuaaaagcauuaguucaagaaacgguuuugagaugauuugggauccgaacggauggacugggacagacaauaacuucucaauaaagcaagauaucguaggaauaaaugaauggucaggauauagcgggaguuuuguucagcauccagaacuaacagggcuggauuguauaagaccuugcuucuggguugaacuaaucagagggcgacccaaagagaacacaaucuggacuagcgggagcagcauauccuuuugugguguaaacagugacacuguggguuggucuuggccagacggugcugaguugccauuuaccauugacaaguaa

SEQ ID NO: 51035 - RNA, 1410 nt, Artificial Sequence
  derived and/or modified CDS sequence (wt) from neuraminidase__InfluenzaA__ADJ80913
augaauccaaaccaaaagauaauaaccauugguucggucuguaugacaauuggaauggcuaacuuaauauuacaaauuggaaacauaaucucaauauggauuagccacucaauucaacuugggaaucaaaaucagauugaaacaugcaaucaaagcgucauuacuuaugaaaacaacacuuggguaaaucagacauauguuaacaucagcaacaccaacuuugcugcuggacagucagugguuuccgugaaauuagcgggcaguuccucucucugcccuguuaguggaugggcuauauacaguaaagacaacaguauaagaaucgguuccaagggggauguguuugucauaagggaaccauucauaucauguucccccuuggaaugcagaaccuucuucuugacucaaggggccuugcuaaaugacaaacauuccaauggaaccauuaaagacaggagcccauaucgaacccuaaugagcuguccuauuggugaaguucccucuccauacaacucaagauuugagucagucgcuuggucagcaagugcuugucaugauggcaucaauuggcuaacaauuggaauuucuggcccagacaauggggcaguggcuguguuaaaguacaacggcauaauaacagacacuaucaagaguuggagaaacaauauauugagaacacaagagucugaaugugcauguguaaaugguucuugcuuuacuguaaugaccgauggaccaagugauggacaggccucauacaagaucuucagaauagaaaagggaaagauagucaaaucagucgaaaugaaugccccuaauuaucacuaugaggaaugcuccuguuauccugauucuagugaaaucacaugugugugcagggauaacuggcauggcucgaaucgaccgugggugucuuucaaccagaaucuggaauaucagauaggauacauaugcagugggauuuucggagacaauccacgcccuaaugauaagaaaggcaguugugguccaguaucgucuaauggagcaaauggaguaaaaggauuuucauucaaauacggcaaugguguuuggauagggagaacuaaaagcauuaguucaagaagcgguuuugagaugauuugggauccgaacggauggacugggacagacaauaacuucucaauaaagcaagauaucguaggaauaaaugaauggucaggauauagcgggaguuuuguucagcauccagaacuaacagggcuggauuguauaagaccuugcuucuggguugaacuaaucagagggcgacccaaagagaacacaaucuggacuagcgggagcagcauauccuuuugugguguaaacagugacacuguggguuggucuuggccagacggugcugaguugccauuuaccauugacaaguaa

SEQ ID NO: 51036 - RNA, 1410 nt, Artificial Sequence; identical to SEQ ID NO: 48750
  derived and/or modified CDS sequence (wt) from neuraminidase__InfluenzaA__ADJ80930

SEQ ID NO: 51037 - RNA, 1410 nt, Artificial Sequence; identical to SEQ ID NO: 50166
  derived and/or modified CDS sequence (wt) from neuraminidase__InfluenzaA__ADJ80950

SEQ ID NO: 51038 - RNA, 1410 nt, Artificial Sequence; identical to SEQ ID NO: 50038
  derived and/or modified CDS sequence (wt) from neuraminidase__InfluenzaA__ADJ80960

SEQ ID NO: 51039 - RNA, 1410 nt, Artificial Sequence
  derived and/or modified CDS sequence (wt) from neuraminidase__InfluenzaA__ADJ80970
augaauccaaaccaaaagauaauaaccauugguucggucuguaugacaauuggaauggcuaacuuaauauuacaaauuggaaacauaaucucaauauggauuagccacucaauucaacuugggaauaaaaaucagauugaaacaugcaaucaaagcgucauuacuuaugaaaacaacacuuggguaaaucagacauauguuaacaucagcaacaccaacuuugcugcuggacagucagugguuuccgugaaauuagcgggcaauuccucucucugcccuguuaguggaugggcuauauacaguaaagacaacaguauaagaaucgguuccaagggggauguguuugucauaagggaaccauucauaucaugcucccccuuggaaugcagaaccuucuucuugacucaaggggccuugcuaaaugacaaacauuccaauggaaccauuaaagacaggagcccauaucgaacccuaaugagcuguccuauuggugaaguucccucuccauacaacucaagauuugagucagucgcuuggucagcaagugcuugucaugauggcaucaauuggcuaacaauuggaauuucuggcccagacaauggggcaguggcuguguuaaaguacaacggcauaauaacagacacuaucaagaguuggagaaacaauauauugagaacacaagagucugaaugugcauguguaaaugguucuugcuuuacuguaaugaccgauggaccaagugauggacaggccucauacaagaucuucagaauagaaaagggaaagauagucaaaucagucgaaaugaaugccccuaauuaucacuaugaggaaugcuccuguuauccugauucuagugaaaucacaugugugugcagggauaacuggcauggcucgaaucgaccgugggugucuuucaaccagaaucuggaauaucagauaggauacauaugcagugggauuuucggagacaauccacgcccuaaugauaagaaaggcaguugugguccaguaucgucuaauggagcaaauggaguaaaaggauuuucauucaaauacggcaaugguguuuggauagggagaacuaaaagcauuaguucaagaaacgguuuugagaugauuugggauccgaacggauggacugggacagacaauaacuucucaauaaagcaagauaucguaggaauaaaugaauggucaggauauagcgggaguuuuguucagcauccagaacuaacagggcuggauuguauaagaccuugcuucuggguugaacuaaucagagggcgacccaaagagaacacaaucuggacuagcgggagcagcauauccuuuugugguguaaacagugacacuguggguuggucuuggccagacggugcugaguugccauuuaccauugacaaguaa

SEQ ID NO: 51040 - RNA, 1410 nt, Artificial Sequence
  derived and/or modified CDS sequence (wt) from neuraminidase__InfluenzaA__ADJ80980
augaauccaaaccaaaagauaauaaccauugguucggucuguaugacaauuggaauggcuaacuuaauauuacaaauuggaaacauaaucucaauauggauuagccacucaauucaacuugggaaucaaaaucagauugaaacaugcaaucaaagcgucauuacuuaugaaaacaacacuuggguaaaucagacauauguuaacaucagcaacaccaacuuugcugcuggacagucagugguuuccgugaaauuagcgggcaauuccucucucugcccuguuaguggaugggcuauauacaguaaagacaacaguauaagaaucgguuccaagggggauguguuugucauaagggaaccauucauaucaugcucccccuuggaaugcagaaccuucuucuugacucaaggggccuugcuaaaugacaaacauuccaauggaaccauuaaagacaggagcccauaucgaacccuaaugagcuguccuauuggugaaguucccucuccauacaacucaagauuugagucagucgcuuggucagcaagugcuugucaugauggcaucaauuggcuaacaauuggaauuucuggcccagacaauggggcaguggcuguguuaaaguacaacggcauaauaacagacacuaucaagaguuggagaaacaauauauugagaacacaagagucugaaugugcauguguaaaugguucuugcuuuacuguaaugaccgauggaccaagugauggacaggccucauacaagaucuucagaauagaaaagggaaagauagucaaaucagucgaaaugaaugccccuaauuaucacuaugaggaaugcuccuguuauccugauucuagugaaaucacaugugugugcagggauaacuggcauggcucgaaucgaccgugggugucuuucaaccagaaucuggaauaucagauaggauacauaugcagugggauuuucggagacaauccacgcccuaaugauaagacaggcaguugugguccaguaucgucuaauggagcaaauggaguaaaaggauuuucauucaaauacggcaaugguguuuggauagggagaacuaaaagcauuaguucaagaaacgguuuugagaugauuugggauccgaacggauggacugggacagacaauaacuucucaauaaagcaagauauaguaggaauaaaugaauggucaggauauagcgggaguuuuguucagcauccagaacuaacagggcuggauuguauaagaccuugcuucuggguugaacuaaucagagggcgacccaaagagaacacaaucuggacuagcgggagcagcauauccuuuugugguguaaacagugacacuguggguuggucuuggccagacggugcugaguugccauuuaccauugacaaguaa

SEQ ID NO: 51041 - RNA, 1410 nt, Artificial Sequence; identical to SEQ ID NO: 51032
  derived and/or modified CDS sequence (wt) from neuraminidase__InfluenzaA__ADJ80996

SEQ ID NO: 51042 - RNA, 1410 nt, Artificial Sequence
  derived and/or modified CDS sequence (wt) from neuraminidase__InfluenzaA__ADJ81006
augaauccaaaccaaaagauaauaaccauugguucggucuguaugacaauuggaauggcuaauuuaauauuacaaguuggaaacauaaucucaauauggauuagccacucaauucaacuugggaaucaaaaucagauugaaacaugcaaucaaagcaucauuacuuaugaaaacaacacuuggguaaaucagacauauguuaacaucagcaacaccaacuuugcugcuggacagucagugguuuccgugaaauuagcgggcaauuccucucucugcccuguuaguggaugggcuauauacaguaaagacaacaguauaagaaucgguuccaagggggauguguuugucauaagggaaccauucauaucaugcucccccuuggaaugcagaaccuucuucuugacucaaggggccuugcuaaaugacaaacauuccaauggaaccauuaaagacaggagcccauaucgaacccuaaugagcuguccuauuggugaaguucccucuccauacaacucaagauuugagucagucgcuuggucagcaagugcuugucaugauggcaucaauuggcuaacaauuggaauuucuggcccagacaauggggcaguggcuguguuaaaguacaacggcauaauaacagacacuaucaagaguuggagaaacaauauauugagaacacaagagucugaaugugcauguguaaaugguucuugcuuuacuguaaugaccgauggaccaagugauggacaggccucauacaagaucuucagaauagaaaagggaaagauagucaaaucagucgaaaugaaugccccuaauuaucacuaugaggaaugcuccuguuauccugauucuagugaaaucacaugugugugcagggauaacuggcauggcucgaaucgaccgugggugucuuucaaccagaaucuggaauaucagauaggauacauaugcagugggauuuucggagacaauccacgcccuaaugauaagacaggcaguugugguccaguaucgucuaauggagcaaauggaguaaaaggauuuucauucaaauacggcaaugguguuuggauagggagaacuaaaagcacuaguucaagaaacgguuuugagaugauuugggauccgaacggauggacugggacagacaauaacuucucaauaaagcaagauaucguaggaauaaaugaauggucaggauauagcgggaguuuuguucagcauccagaacuaacagggcuggauuguauaagaccuugcuucuggguugaacuaaucagagggcgacccaaagagaacacaaucuggacuagcgggagcagcauauccuuuugugguguaaacagugacacuguggguuggucuuggccagacggugcugaguugccauuuaccauugacaaguaa

SEQ ID NO: 51043 - RNA, 1410 nt, Artificial Sequence; identical to SEQ ID NO: 50761
  derived and/or modified CDS sequence (wt) from neuraminidase__InfluenzaA__ADJ81016

SEQ ID NO: 51044 - RNA, 1410 nt, Artificial Sequence
  derived and/or modified CDS sequence (wt) from neuraminidase__InfluenzaA__ADJ81026
augaauccaaaccaaaagauaauaaccauugguucggucuguaugacaauuggaauggcuaacuuaauauuacaaauuggaaacauaaucucaauauggauuagccacucaauucaacuugggaaucaaaaucagauugaaacaugcaaucaaagcgucauuacuuaugaaaacaacacuuggguaaaucagacauauguuaacaucagcaacaccaacuuugcugcuggacagucaguggauuccgugaaauuagcgggcaauuccucucucugcccuguuaguggaugggcuauauacaguaaagacaacaguauaagaaucgguuccaaaggggauguguuugucauaagggaaccauucauaucaugcucccccuuggaaugcagaaccuucuucuugacucaaggggccuugcuaaaugacaaacauuccaauggaaccauuaaagacaggagcccauaucgaacccuaaugagcuguccuauuggugaaguucccucuccauacaacucaagauuugagucagucgcuuggucagcaagugcuugucaugauggcaucaauuggcuaacaauuggaauuucuggcccagacaauggggcaguggcuguauuaaaguacaacggcauaauaacagacacuaucaagaguuggagaaacaauauauugagaacacaagagucugaaugugcauguguaaaugguucuugcuuuacuguaaugaccgauggaccaagugauggacaggccucauacaagaucuucagaauagaaaagggaaagauagucaaaucagucgaaaugaaugccccuaauuaucacuaugaggaaugcuccuguuauccugauucuagugaaaucacaugugugugcagggauaacuggcauggcucgaaucgaccgugggugucuuucaaccagaaucuggaauaucagauaggauacauaugcagugggauuuucggagacaauccacgcccuaaugauaagacaggcaguugugguccaguaucgucuaauggagcaaauggaguaaaaggauuuucauucaaauacggcaaugguguuuggauagggagaacuaaaagcauuaguucaagaaacgguuuugagaugauuugggauccgaacggauggacugggacagacaauaacuucucaauaaagcaagauaucguaggaauaaaugaguggucaggauauagcgggaguuuuguucagcauccagaacuaacagggcuggauuguauaagaccuugcuucuggguugaacuaaucagagggcgacccaaagagaacacaaucuggacuagcgggagcagcauauccuuuugugguguaaacagugacacuguggguuggucuuggccagacggugcugaguugccauuuaccauugacaaguaa

SEQ ID NO: 51045 - RNA, 1410 nt, Artificial Sequence
  derived and/or modified CDS sequence (wt) from neuraminidase__InfluenzaA__ADJ81036
augaauccaaaccaaaagauaauaaccauugguucggucuguaugacaauuggaauggcuaacuuaauauuacaaauuggaaacauaaucucaauauggauuagccacucaauucaacuugggaaucaaaaucagauugaaacaugcaaucaaagcgucauuacuuaugaaaacaacacuuggguaaaucagacauauguuaacaucagcaacaccaacuuugcugcuggacagucagugguuuccgugaaauuagcgggcaauuccucucucugcccuguuaguggaugggcuauauacaguaaagacaacaguauaagaaucgguuccaagggggauguguuugucauaagggaaccauucauaucaugcucccccuuggaaugcagaaccuucuucuugacucaaggggccuugcuaaaugacaaacauuccaauggaaccauuaaagacaggagcccauaucgaacccuaaugagcuguccuauuggugaaguucccucuccauacaacucaagauuugagucagucgcuuggucagcaagugcuugucaugauggcaucaauuggcuaacaauuggaauuucuggcccagacaauggggcaguggcuguguuaaaguacaacggcauaauaacagacacuaucaagaguuggagaaacaauauauugagaacacaagagucugaaugugcauguguaaaugguucuugcuuuacuguaaugaccgauggaccaagugauggacaggccucauacaagaucuucagaauagaaaagggaaagauagucaaaucaguagaaaugaaugccccuaauuaucacuaugaggaaugcuccuguuauccugauucuagugaaaucacaugugugugcagggauaacuggcauggcucgaaucgaccgugggugucuuucaaccagaaucuggaauaucagauaggauacauaugcagugggauuuucggagacaauccacgcccuaaugauaagacaggcaguugugguccaguaucgucuaauggagcaaauggaguaaaaggauuuucauucaaauacggcaaugguguuuggauagggagaacuaaaagcauuaguucaagaaacgguuuugagaugauuugggauccgaacggauggacugggacagacaauaacuucucaauaaagcaagauaucguaggaauaaaugaauggucaggauauagcgggaguuuuguucagcauccagaacuaacagggcuggauuguauaagaccuugcuucuggguugaacuaaucagagggcgacccaaagagaacacaaucuggacuagcgggagcagcauauccuuuugugguguaaacagugacacuguggguuggucuuggccagacggugcugaguugccauuuaccauugacaaguaa

SEQ ID NO: 51046 - RNA, 1410 nt, Artificial Sequence
  derived and/or modified CDS sequence (wt) from neuraminidase__InfluenzaA__ADJ81046
augaauccaaaccaaaagauaauaaccauugguucggucuguaugacaguuggaauggcuaacuuaauauuacaaauuggaaacauaaucucaauauggauuagccacucuauucaacuugggaaucaaaaucagauugaaacaugcaaucaaagcgucauuacuuaugaaaacaacacuuggguaaaucagacauauguuaacaucagcaacaccaacuuugcugcuggacagucagugguuuccgugaaauuagcgggcaauuccucucucugcccuguuaguggaugggcuauauacaguaaagacaacaguauaagaaucgguuccaagggggauguguuugucauaagggaaccauucauaucaugcucccccuuggaaugcagaaccuucuucuugacucaaggggccuugcuaaaugacaaacauuccaauggaaccauuaaagacaggagcccauaucgaacccuaaugagcuguccuauuggugaaguucccucuccauacaacucaagauuugagucagucgcuuggucagcaagugcuugucaugauggcaucaauuggcuaacaauuggaauuucuggcccagacaauggggcaguggcuguguuaaaguacaacggcauaauaacagacacuaucaagaguuggagaaacaauauauugagaacacaagagucugaaugugcauguguaaaugguucuugcuuuacuguaaugaccgauggaccaagugauggacaggccucauacaagaucuucagaauagaaaagggaaagauagucaaaucagucgaaaugaaugccccuaauuaucacuaugaggaaugcuccuguuauccugauucuagugaaaucacaugugugugcagggauaacuggcauggcucgaaucgaccgugggugucuuucaaccagaaucuggaauaucagauaggauacauaugcagugggauuuucggagacaauccacgcccuaaugauaagacaggcaguugugguccaguaucgucuaauggagcaaauggaguaaaaggauuuucauucaaauacggcaaugguguuuggauagggagaacuaaaagcauuaauucaagaaacgguuuugagaugauuugggauccgaacggauggacugggacagacaauaacuucucaauaaagcaagauaucguaggaacaaaugaguggucaggauauagcgggaguuuuguucagcauccagaacuaacagggcuggauuguauaagaccuugcuucuggguugaacuaaucagagggcgacccaaagagaacacaaucuggacuagcgggagcagcauauccuuuugugguguaaacagugacacuguggguuggucuuggccagacggugcugaguugccauuuaccauugacaaguaa

SEQ ID NO: 51047 - RNA, 1410 nt, Artificial Sequence
  derived and/or modified CDS sequence (wt) from neuraminidase__InfluenzaA__ADJ81056
augaauccaaaccaaaagauaauaaccauugguucggucuguaugacaauuggaauggcuaacuuaauauuacaaauuggaaacauaaucucaauauggauuagccacucaauucaacuugggaaucaaaaucagauugaaacaugcaaucaaagcgucauuacuuaugaaaacaacacuuggguaaaucagacauauguuaacaucagcaacaccaacuuugcugcuggacagucagugguucccgugaaauuagcgggcaguuccucucucugcccuguuaguggaugggcuauauacaguaaagacaacaguauaagaaucgguuccaagggggauguguuugucauaagggaaccauucauaucaugcucccccuuggaaugcagaaccuucuucuugacucaaggggccuugcuaaaugacaaacauuccaauggaaccauuaaagacaggagcccauaucgaacccuaaugagcuguccuauuggugaaguucccucuccauacaacucaagauuugagucagucgcuuggucagcaagugcuugucaugauggcaucaauuggcuaacaauuggaauuucuggcccagacaauggggcaguggcuguguuaaaguacaacggcauaauaacagacacuaucaagaguuggagaaacaauauauugagaacacaagagucugaaugugcauguguaaaugguucuugcuuuacuguaaugaccgauggaccaagugauggacaggccucauacaagaucuucagaauagaaaagggaaagauagucaaaucagucgaaaugaaugccccuaauuaucacuaugaggaaugcuccuguuauccugauucuagugaaaucacaugugugugcagggauaacuggcauggcucgaaucgaccgugggugucuuucaaccagaaucuggaauaucagauaggauacauaugcagugggauuuucggagacaauccacgcccuaaugauaagaaaggcaguugugguccaguaucgucuaauggagcaaauggaguaaaaggauuuucauucaaauacggcaaugguguuuggauagggagaacuaaaagcauuaauucaagaaacgguuuugagaugauuugggauccgaacggauggacugggacagacaauaacuucucaauaaagcaagauaucguaggaauaaaugaauggucaggauauagcgggaguuuuguucagcauccagaacuaacagggcuggauuguauaagaccuugcuucuggguugaacuaaucagagggcgacccaaagagaacacaaucuggacuagcgggagcagcauauccuuuugugguguaaacagugacacuguggguuggucuuggccagacggugcugaguugccauuuaccauugacaaguaa

SEQ ID NO: 51048 - RNA, 1410 nt, Artificial Sequence
  derived and/or modified CDS sequence (wt) from neuraminidase__InfluenzaA__ADJ81066
augaauccaaaccaaaagauaauaaccauugguucggucuguaugacaauuggaauggcuaacuuaauauuacagauuggaaacauaaucucaauauggauuagccacucaauucaacuugggaaucaaaaucagauugaaacaugcaaucaaagcgucauuacuuaugaaaacaacacuuggguaaaucagacauauguuaacaucagcaacaccaacuuugcugcuggacagucagugguuuccgugaaauuagcgggcaauuccucucucugcccuguuaguggaugggcuauauacaguaaagacaacaguauaagaaucgguuccaagggggauguguuugucauaagggaaccauucauaucaugcucccccuuggaaugcagaaccuucuucuugacucaaggggccuugcuaaaugacaaacauuccaauggaaccauuaaagacaggagcccauaucgaacccuaaugagcuguccuauuggugaaguucccucuccauacaauucaagauuugagucagucgcuuggucagcaagugcuugucaugauggcaucaauuggcuaacaauuggaauuucuggcccagacaauggggcaguggcuguguuaaaguacaacggcauaauaacagacacuaucaagaguuggagaaacaauauauugagaacacaagagucugaaugugcauguguaaaugguucuugcuuuacuguaaugaccgauggaccaagugauggacaggccucauacaagaucuucagaauagaaaagggaaagauagucaaaucagucgaaaugaaugccccuaauuaucacuaugaggaaugcuccuguuauccugauucuagugaaaucacaugugugugcagggauaacuggcauggcucgaaucgaccgugggugucuuucaaccagaaucuggaauaucagauaggauacauaugcagugggauuuucggagacaauccacgcccuaaugauaagaaaggcaguugugguccaguaucgucuaauggagcaaauggaguaaaaggauuuucauucaaauacggcaaugguguuuggauagggagaacuaaaagcauuaguucaagaaacgguuuugagaugauuugggauccgaacggauggacugggacagacaauaacuucucaauaaagcaagauaucguaggaauaaaugaauggucaggauauagcgggaguuuuguucagcauccagaacuaacagggcuggauuguauaagaccuugcuucuggguugaacuaaucagagggcgacccaaagagaacacaaucuggacuagcgggagcagcauauccuuuugugguguaaacagugacacuguggguuggucuuggccagacggugcugaguugccauuuaccauugacaaguaa

SEQ ID NO: 51049 - RNA, 1410 nt, Artificial Sequence; identical to SEQ ID NO: 49470
  derived and/or modified CDS sequence (wt) from neuraminidase__InfluenzaA__ADJ84775

SEQ ID NO: 51050 - RNA, 1410 nt, Artificial Sequence
  derived and/or modified CDS sequence (wt) from neuraminidase__InfluenzaA__ADJ88785
augaauccaaaucaaaagauaauaacgauuggcucuguuucucucaccauuuccacaauaugcuucuucaugcaaauugccaucuugauaacuacuguaacauugcauuucaagcaauaugaauucaacucccccccaaacaaccaagugaugcugugugaaccaacaauaauagaaagaaacauaacagagauaguguaucugaccaacaccaccauagagaaggaaauaugccccaaacuagcagaauacagaaauuggucaaagccgcaaugugacauuacaggauuugcaccuuuuucuaaggacaauucgauuaggcuuuccgcugguggggacaucugggugacaagagaaccuuaugugucaugcgauccugacaaguguuaucaauuugcccuuggacagggaacaacacuaaacaacgugcauucaaauaacacaguacgugauaggaccccuuaucggacccuauugaugaaugaguuagguguuccuuuucaucuggggaccaagcaagugugcauagcaugguccagcucaaguugucacgauggaaaagcauggcugcauguuuguauaacgggggaugauaaaaaugcaacugcuagcuucauuuacaaugggaggcuuguagauaguguuguuucaugguccaaagaaauccucaggacccaggagucagaaugcgucuguaucaauggaacuuguacaguaguaaugacugaugggagugcuucaggaaaagcugauacuaaaauacuauucauugaggaggggaaaaucguucauacuagcacauugucaggaagugcucagcaugucgaggagugcucuugcuauccucgauauccuggugucagaugugucugcagagacaacuggaaaggcuccaauaggcccaucguagauauaaacauaaaggaucauagcguuguuuccaguuauguguguucaggacuuguuggagacacacccagaaaaaacgacagcuccagcaguagccauuguuuggauccuaacaaugaagaagguggucauggagugaaaggcugggccuuugaugauggaaaugacguguggaugggaagaacgaucagcgagaagucacgcuuaggguaugaaaccuucaaagucauugaaggcugguccaaccauaaguccaaauugcagauaaauaggcaagucauaguugacagagguaauagguccgguuauucugguauuuucucuguugaaggcaaaagcugcaucaaucggugcuuuuauguggaguugauuaggggaagaaaagaggaaacugaagucuuguggaccucaaacaguauuguuguguuuuguggcaccucagguacauauggaacaggcucauggccugauggggcggaccucaaucucaugccuauauaa

SEQ ID NO: 51051 - RNA, 1410 nt, Artificial Sequence; identical to SEQ ID NO: 48750
  derived and/or modified CDS sequence (wt) from neuraminidase__InfluenzaA__ADK21716

SEQ ID NO: 51052 - RNA, 1410 nt, Artificial Sequence; identical to SEQ ID NO: 49794
  derived and/or modified CDS sequence (wt) from neuraminidase__InfluenzaA__ADK21726

SEQ ID NO: 51053 - RNA, 1410 nt, Artificial Sequence; identical to SEQ ID NO: 50159
  derived and/or modified CDS sequence (wt) from neuraminidase__InfluenzaA__ADK21736

SEQ ID NO: 51054 - RNA, 1410 nt, Artificial Sequence
  derived and/or modified CDS sequence (wt) from neuraminidase__InfluenzaA__ADK21746
augaauccaaaccaaaagauaauaaccauugguucggucuguaugacaauuggaauggcuaacuuaauauuacaaauuggaaacauaaucucaauauggauuagccacucaauucaacuugggaaucaaaaucagauugaaacaugcaaucaaagcaucauuacuuaugaacacaacacuuggguaaaucagacauauguuaacaucagcaacaccaacuuugcugcuggacagucagugguuuccgugaaauuagcgggcaauuccucucucugcccuguuaguggaugggcuauauacaguaaagacaacaguauaagaaucgguuccaagggggauguguuugucauaagggaaccauucauaucaugcucccccuuggaaugcagaaccuucuucuugacucaaggggccuugcuaaaugacaaacauuccaauggaaccauuaaagacaggagcccauaucgaacccuaaugagcuguccuauuggugaaguucccucuccauacaacucaagauuugagucagucgcuuggucagcaagugcuugucaugauggcaucaauuggcuaacaauuggaauuucuggcccagacaauggggcaguggcuguguuaaaguacaacggcauaauaacagacacuaucaagaguuggagaaacaauauauugagaacacaagagucugaaugugcauguguaaaugguucuugcuuuacuguaaugaccgauggaccaagugauggacaggccucauacaagaucuucagaauagaaaagggaaagauagucaaaucagucgaaaugaaugccccuaauuaucacuaugaggaaugcuccuguuauccugauucuagugaaaucacaugugugugcagggauaacuggcauggcucgaaucgaccgugggugucuuucaaccagaaucuggaauaucagauaggauacauaugcagugggauuuucggagacaauccacgcccuaaugauaagacaggcaguugugguccaguaucgucuaauggagcaaauggaguaaaaggauuuucauucaaauacggcaaugguguuuggauagggagaacuaaaagcauuaguucaagaagcgguuuugagaugauuugggauccgaacggauggacugggacagacaauaacuucucaauaaagcaagauaucguaggaauaaaugaguggucaggauauagcgggaguuuuguucagcauccagaacuaacagggcuggauuguauaagaccuugcuucuggguugaacuaaucagagggcgacccgaagagaacacaaucuggacuagcgggagcagcauauccuuuugugguguaaacagugacacuguggguuggucuuggccagacggugcugaguugccauuuaccauugacaaguaa

SEQ ID NO: 51055 - RNA, 1410 nt, Artificial Sequence; identical to SEQ ID NO: 50166
  derived and/or modified CDS sequence (wt) from neuraminidase__InfluenzaA__ADK21756

SEQ ID NO: 51056 - RNA, 1410 nt, Artificial Sequence
  derived and/or modified CDS sequence (wt) from neuraminidase__InfluenzaA__ADK21766
augaauccaaaccaaaagauaauaaccauugguucggucuguaugacaauuggaauggcuaacuuaauauuacaaauuggaaacauaaucucaauauggauuagccacucaauucaacuugggaaucaaaaucagauugaaacaugcaaucaaagcgucauuacuuaugaaaacaacacuuggguaaaucagacauauguuaacaucagcaacaccaacuuugcugcuggacagucagugguuuccgugaaauuagcgggcaauuccucucucugcccuguuaguggaugggcuauauacaguaaagacaacaguauaagaaucgguuccaagggggauguguuugucauaagggaaccauucauaucaugcucccccuuggaaugcagaaccuucuucuugacucaaggggccuugcuaaaugacaaacauuccaauggaaccauuaaagacaggagcccauaucgaacccuaaugagcuguccuauuggugaaguucccucuccauacaacucaagauuugagucagucgcuuggucagcaagugcuugucaugauggcaucaauuggcuaacaauuggaauuucuggcccagacaauggggcaguggcuguguuaaaguacaacggcauaauaacagacacuaucaagaguuggagaaacaauauauugagaacacaagagucugaaugugcaugugugaaugguucuugcuuuacuguaaugaccgauggaccaagugauggacaggccucauacaagaucuucagaauagaaaagggaaagauagucaaaucagucgaaaugaaugccccuaauuaucacuaugaggaaugcuccuguuauccugauucuagugaaaucacaugugugugcagggauaacuggcauggcucgaaucgaccgugggugucuuucaaccagaaucuggaauaccagauaggauacauaugcagugggauuuucggagacaauccacgcccuaaugauaagacaggcaguugugguccaguaucgucuaauggagcaaauggaguaaaaggauuuucauucaaauacggcaaugguguuuggauagggagaacuaaaagcauuaguucaagaaacgguuuugagaugauuugggauccgaacggauggacugggacagacaauaacuucucaauaaagcaagauaucguaggaauaaaugaguggucaggauauagcgggaguuuuguucagcauccagaacuaacagggcuggauuguauaagaccuugcuucuggguugaacuaaucagagggcgacccaaagagaacacaaucuggacuagcgggagcagcauauccuuuugugguguaaacagugacacuguggguuggucuuggccagacggugcugaguugccauuuaccauugacaaguaa

SEQ ID NO: 51057 - RNA, 1410 nt, Artificial Sequence
  derived and/or modified CDS sequence (wt) from neuraminidase__InfluenzaA__ADK21776
augaauccaaaccaaaagauaauaaccauugguucggucuguaugacaauuggaauggcuaacuuaauauuacaaauuggaaacauaaucucaauauggauuagccacucaauucaacuugggaaucaaaaucagauugaaacaugcaaucaaagcgucauuacuuaugaaaacaacacuuggguaaaucagacauauguuaacaucagcaacaccaacuuugcugcuggacagucagugguuuccgugaaauuagcgggcaauuccucucucugcccuguuaguggaugggcuauauacaguaaagacaacaguauaagaaucgguuccaagggggauguguuugucauaagggaaccauucauaucaugcucccccuuggaaugcagaaccuucuucuugacucaaggggccuugcuaaaugacaaacauuccaauggaaccauuaaagacaggagcccauaucgaacccuaaugagcuguccuauuggugaaguucccucuccauacaacucaagauuugagucagucgcuuggucagcaagugcuugucaugauggcaucaauuggcuaacaauuggaauuucuggcccagacaauggggcaguggcuguguuaaaguacaacggcauaauaacagacacuaucaagaguuggagaaacaauauauugagaacacaagagucugaaugugcauguguaaaugguucuugcuuuacuguaaugaccgauggaccaagugauggacaggccucauacaagaucuucagaauagaaaagggaaagauagucaaaucagucgaaaugaaugccccuaauuaucacuaugaggaaugcuccuguuauccugauucuagugaaaucacaugugugugcagggauaacuggcauggcucgaaucgaccgugggugucuuucaaccagaaucuggaauaucagauaggauacauaugcagugggauuuucggagacaauccacgcccuaaugauaagacaggcaguugugguccaguaucgucuaauggagcaaauggaguaaaaggauuuucauucaaauacggcaaugguguuuggauagggagaacuaaaagcauuaguucaagaaacgguuuugagaugauuugggauccgaacggauggacugggacagacaauagcuucucaauaaagcaagauaucguaggaauaaaugaauggucaggauauagcgggaguuuuguucagcauccagaacuaacagggcuggauuguauaagaccuugcuucuggguugaacuaaucagagggcgacccaaagagaacacaaucuggacuagcgggagcagcauauccuuuugugguguaaacagugacacuguggguuggucuuggccagacggugcugaguugccauuuaccauugacaaguaa

SEQ ID NO: 51058 - RNA, 1410 nt, Artificial Sequence; identical to SEQ ID NO: 49794
  derived and/or modified CDS sequence (wt) from neuraminidase__InfluenzaA__ADK21786

SEQ ID NO: 51059 - RNA, 1410 nt, Artificial Sequence
  derived and/or modified CDS sequence (wt) from neuraminidase__InfluenzaA__ADK21796
augaauccaaaccaaaagauaauaaccauugguucggucuguaugacaauuggaauggcuaacuuaauauuacaaauuggaaacauaaucucaauauggauuagccacucaauucaacuugggaaucaaaaucagauugaaacaugcaaucaaagcgucauuacuuaugaaaacaacacuuggguaaaucagacauauguuaacaucagcaacaccaacuuugcugcuggacagucagugguuuccgugaaauuagcgggcaauuccucucucugcccuguuaguggaugggcuauauacaguaaagacaacaguauaagaaucgguuccaagggggauguguuugucauaagggaaccauucauaucaugcucccccuuggaaugcagaaccuucuucuugacucaaggggccuugcuaaaugacaaacauuccaauggaaccauuaaagacaggagcccauaucgaacccuaaugagcuguccuauuggugaaguucccucuccauacaacucaagauuugagucagucgcuuggucagcaagugcuugucaugauggcaucaauuggcuaacaauuggaauuucuggcccagacaauggggcaguggcuguguuaaaguacaacggcauaauaacagacacuaucaagaguuggagaaacaauauauugagaacacaagagucugaaugugcauguguaaaugguucuugcuucacuguaaugaccgauggaccaagugauggacaggccucauacaagaucuucagaauagaaaagggaaagauagucaaaucagucgaaaugaaugccccuaauuaucauuaugaggaaugcuccuguuauccugauucuagugaaaucacaugugugugcagggauaacuggcauggcucgaaucgaccgugggugucuuucaaccagaaucuggaauaucagauaggauacauaugcagugggauuuucggagacaauccacgcccuaaugauaagacaggcaguugugguccaguaucgucuaauggagcaaauggaguaaaaggauuuucauucaaauacggcaaugguguuuggauagggagaacuaaaagcauuaguucaaggaacgguuuugagaugauuugggauccgaacggauggacugggacagacaauaacuucucaauaaagcaagauaucguaggaauaaaugaguggucaggauauagcgggaguuuuguucagcauccagaacuaacagggcuggauuguauaagaccuugcuucuggguugaacuaaucagagggcgacccaaagagaacacaaucuggacuagcgggagcagcauauccuuuugugguguaaacagugacacuguggguuggucuuggccagacggugcugaguugccauuuaccauugacaaguaa

SEQ ID NO: 51060 - RNA, 1410 nt, Artificial Sequence
  derived and/or modified CDS sequence (wt) from neuraminidase__InfluenzaA__ADK21806
augaauccaaaccaaaagauaauaaccauugguucggucuguaugacaauuggaauggcuaacuuaauauuacaaauuggaaacauaaucucaauauggauuagccacucaauucaacuugggaaucaaaaucagauugaaacaugcaaucaaagcgucauuacuuaugaaaacaacacuugggugaaucagacauauguuaacaucagcaacaccaacuuugcugcuggacagucagugguuuccgugaaauuagcgggcaauuccucucucugcccuguuaguggaugggcuauauacaguaaagacaacaguauaagaaucgguuccaagggggauguguuugucauaagggaaccauucauaucaugcucccccuuggaaugcagaaccuucuucuugacucaaggggccuugcuaaaugacaaacauuccaauggaaccauuaaagacaggagcccauaucgaacccuaaugagcuguccuauuggugaaguucccucuccauacaacucaagauuugagucagucgcuuggucagcaagugcuugucaugauggcaucaauuggcuaacaauuggaauuucuggcccagacaauggggcaguggcuguguuaaaguacaacggcauaauaacagacacuaucaagaguuggagaaacaauauauugagaacacaagagucugaaugugcauguguaaaugguucuugcuuuacuguaaugaccgauggaccaagugauggacaggccucauacaagaucuucagaauagaaaagggaaagauagucaaaucagucgaaaugaaugccccuaauuaucacuaugaggaaugcuccuguuauccugauucuagugaaaucacaugugugugcagggauaacuggcauggcucgaaucgaccguggguaucuuucaaccagaaucuggaauaucagauaggauacauaugcagugggauuuucggagacaauccacgcccuaaugauaagacaggcaguugugguccaguaucgucuaauggagcaaauggaguaaaaggauuuucauucaaauacggcaaugguguuuggauagggagaacuaaaagcauuaguucaagaaacgguuuugagaugauuugggauccgaacggauggacugggacagacaauaacuucucaauaaagcaagauaucguaggaauaaaugaguggucaggauauagcgggaguuuuguucagcauccagaacuaacagggcuggauuguauaagaccuugcuucuggguugaacuaaucagagggcgacccaaagagaacacaaucuggacuagcgggagcagcauauccuuuugugguguaaacagugacacuguggguuggucuuggccagacggugcugaguugccauuuaccauugacaaguaa

SEQ ID NO: 51061 - RNA, 1410 nt, Artificial Sequence
  derived and/or modified CDS sequence (wt) from neuraminidase__InfluenzaA__ADK21816
augaauccaaaccaaaagauaauaaccauugguucggucuguaugacaauuggaauggcuaacuuaauauuacaaauuggaaacauaaucucaauauggauuagccacucaauucaacuugggaaucaaaaucagauugaaacaugcaaucaaagcgucauuacuuaugaaaacaacacuuggguaaaucagacauauguuaacaucagcaacaccaacuuugcugcuggacagucagugguuuccgugaaauuagcaggcaauuccucacucugcccuguuaguggaugggcuauauacaguaaagacaacaguauaagaaucgguuccaagggggauguguuugucauaagggaaccauucauaucaugcucccccuuggaaugcagaaccuucuucuugacucaaggggccuugcuaaaugacaaacauuccaauggaaccauuaaagacaggagcccauaucgaacccuaaugagcuguccuauuggugaaguccccucuccauacaacucaagauuugagucagucgcuuggucagcaagugcuugucaugauggcaucaauuggcuaacaauuggaauuucuggcccagacaauggggcaguggcuguguuaaaguacaacggcauaauaacagacacuaucaagaguuggagaaacaauauauugagaacacaagagucugaaugugcauguguaaaugguucuugcuuuacuguaaugaccgauggaccaagugauggacaggccucauacaagaucuucagaauagaaaagggaaagauagucaaaucagucgaaaugaaugccccuaauuaucacuaugaggaaugcuccuguuauccugauucuagugaaaucacaugugugugcagggauaacuggcauggcucgaaucgaccgugggugucuuucaaccagaaucuggaauaucagauaggauacauaugcagugggauuuucggagacaauccacgcccuaaugauaagacaggcaguugugguccaguaucgucuaauggagcaaauggaguaaaaggauuuucauucaaauacggcaaugguguuuggauagggagaacuaaaagcauuaguucaagaaacgguuuugagaugauuugggauccgaacggauggacugggacagacaauaacuucucaauaaagcaagauaucguaggaauaaaugaguggucaggauauagcgggaguuuuguccagcauccagaacuaacagggcuggauuguauaagaccuugcuucuggguugaacuaaucagagggcgacccaaagagaacacaaucuggacuagcgggagcagcauauccuuuugugguguaaacagugacacuguggguuggucuuggccagacggugcugaguugccauuuaccauugacaaguaa

SEQ ID NO: 51062 - RNA, 1410 nt, Artificial Sequence
  derived and/or modified CDS sequence (wt) from neuraminidase__InfluenzaA__ADK21826
augaauccaaaccaaaagauaauaaccauugguucggucuguaugacaauuggaauggcuaacuuaauauuacaaauuggaaacauaaucucaauauggauuagccacucaauucaacuugggaaucaaaaucagauugaaacaugcaaucaaagcgucauuacuuaugaaaacaacacuuggguaaaucagacauauguuaacaucagcaacaccaacuuugcugcuggacagucagugguuuccgcgaaauuagcgggcaauuccucucucugcccuguuaguggaugggcuauauacaguaaagacaacaguauaagaaucgguuccaagggggauguguuugucauaagggaaccauucauaucaugcucccccuuggaaugcagaaccuucuucuugacucaaggggccuugcuaaaugacaaacauuccaauggaaccauuaaagacaggagcccauaucgaacccuaaugagcuguccuauuggugaaguucccucuccauacaacucaagauuugagucagucgcuuggucagcaagugcuugucaugauggcaucaauuggcuaacaauuggaauuucuggcccagacaauggggcaguggcuguguuaaaguacaacggcauaauaacagacacuaucaagaguuggaggaacaauauauugagaacacaagagucugaaugugcauguguaaaugguucuugcuuuacuguaaugaccgauggaccaagugauggacaggccucauacaagaucuucagaauagaaaagggaaagauagucaaaucagucgaaaugaaugccccuaauuaucacuaugaggaaugcuccuguuauccugauucuagugaaaucacaugugugugcagggauaacuggcauggcucgaaucgaccguggguaucuuucaaccagaaucuggaauaucagauaggauacauaugcagugggauuuucggagacaauccacgcccuaaugauaagacaggcaguugugguccaguaucgucuaauggagcaaauggaguaaaaggauuuucauucaaauacggcaaugguguuuggauagggagaacuaaaagcauuaguucaagaaacgguuuugagaugauuugggauccgaacggauggacugggacagacaauaacuucucaauaaagcaagauaucguaggaauaaaugaguggucaggauauagcgggaguuuuguucagcauccagaacuaacagggcuggauuguauaagaccuugcuucuggguugaacuaaucagagggcgacccaaagagaacacaaucuggacuagcgggagcagcauauccuuuugugguguaaacagugacacuguggguuggucuuggccggacggugcugaguugccauuuaccauugacaaguaa

SEQ ID NO: 51063 - RNA, 1410 nt, Artificial Sequence; identical to SEQ ID NO: 50838
  derived and/or modified CDS sequence (wt) from neuraminidase__InfluenzaA__ADK21836

SEQ ID NO: 51064 - RNA, 1410 nt, Artificial Sequence
  derived and/or modified CDS sequence (wt) from neuraminidase__InfluenzaA__ADK21846
augaauccaaaccaaaagauaauaaccauugguucggucuguaugacaauuggaauggcuaacuuaauauuacaaauuggaaacauaaucucaauauggauuagccacucaauucaacuugggaaucaaaaucagauugaaacaugcaaucaaagcgucauuacuuaugaaaacaacacuuggguaaaucagacauauguuaacaucagcaacaccaacuuugcugcuggacagucagugguuuccgugaaauuagcgggcaauuccucucucugcccuguuaguggaugggcuauauacaguaaagacaacaguauaagaaucgguuccaagggggauguguuugucauaagggaaccauucauaucaugcucccccuuggaaugcagaaccuucuucuugacucaaggggccuugcuaaaugacaaacauuccaauggaaccauuaaagacaggagcccauaucgaacccuaaugagcuguccuauuggugaaguucccucuccauacaacucaagauuugagucagucgcuuggucagcaagugcuugucaugauggcaucaauuggcuaacaauuggaauuucuggcccagacaauggggcaguggcuguguuaaaguacaacggcauaauaacagacacuaucaagaguuggagaaacaauauauugagaacacaagagucugaaugugcauguguaaaugguucuugcuuuacuguaaugaccgauggaccaagugauggacaggccucauacaagaucuucagaauagaaaagggaaagauagucaaaucagucgaaaugaaugccccuaauuaucacuaugaggaaugcuccuguuauccugauucuagugaaaucacaugugugugcagggauaacuggcauggcucgaaucgaccgugggugucuuucaaccagaaucuggaauaucagauaggauacauaugcagugggauuuucggagacaauccacgcccuaaugauaagacaggcaguugugguccaguaucgucuaauggagcaaauggaguaaaaggauuuucauucaaauacggcaaugguguuuggauagggagaacuaaaagcauuaguucaagaaacgguuuugagaugauuugggauccgaacggauggacugggacagacaauaacuucucaaugaagcaagauaucguaggaauaaaugaauggucaggauauagcgggaguuuuguucagcauccagaacuaacagggcuggauuguauaagaccuugcuucuggguugaacuaaucagagggcgacccaaagagaacacaaucugggcuagcgggagcagcauauccuuuugugguguaaacagugacacuguggguuggucuuggccagacggugcugaguugccauuuaccauugacaaguaa

SEQ ID NO: 51065 - RNA, 1410 nt, Artificial Sequence
  derived and/or modified CDS sequence (wt) from neuraminidase__InfluenzaA__ADK21856
augaauccaaaccaaaagauaauaaccauugguucggucuguaugacaauuggaauggcuaacuuaauauuacaaauuggaaacauaaucucaauauggauuagccacucaauucaacuugggaaucaaaaucagauugaaacaugcaaucaaagcgucauuacuuaugaaaacaacacuuggguaaaucagacauauguuaacaucagcaacaccaacuuugcugcuggacagucagugguuuccgugaaauuagcgggcaauuccucucucugcccuguuaguggaugggcuauauacaguaaagacaacaguauaagaaucgguuccaagggggauguguuugucauaagggaaccauucauaucaugcucccccuuggaaugcagaaccuucuucuugacucaaggggccuuacuaaaugacaaacauuccaauggaaccauuaaagacaggagcccauaucgaacccuaaugagcuguccuauuggugaaguucccucuccauacaacucaagauuugagucagucgcuuggucagcaagugcuugucaugauggcaucaauuggcuaacaauuggaauuucuggcccagacaauggggcaguggcuguguuaaaguacaacggcauaauaacagacacuaucaagaguuggagaaacaauauauugagaacacaagagucugaaugugcauguguaaaugguucuugcuuuacuguaaugaccgauggaccaagugauggacaggccucauacaagaucuucagaauagaaaagggaaagauagucaaaucagucgaaaugaaugccccuaauuaucacuaugaggaaugcuccuguuauccugauucuagugaaaucacauguguaugcagggauaacuggcauggcucgaaucgaccgugggugucuuucaaccagaaucuggaauaucagauaggauacauaugcagugggauuuucggagacaauccacgcccuaaugauaagacaggcaguugugguccaguaucgucuaauggagcaaauggaguaaaaggauuuucauucaaauacggcaaugguguuuggauagggagaacuaaaagcauuaguucaagaaacgguuuugagaugauuugggauccgaacggauggacugggacagacaauaacuucucaauaaagcaagauaucguaggaauaaaugaguggucaggauauagcgggaguuuuguucaacauccagaacuaacagggcuggauuguauaagaccuugcuucuggguugaacuaaucagagggcgacccaaagagaacacaaucuggacuagcgggagcagcauauccuuuugugguguaaacagugacacuguggguuggucuuggccagacggugcugaguugccauuuaccauugacaaguaa

SEQ ID NO: 51066 - RNA, 1410 nt, Artificial Sequence
  derived and/or modified CDS sequence (wt) from neuraminidase__InfluenzaA__ADK21866
augaauccaaaccaaaagauaauaaccauugguucggucuguaugacaauuggaauggcuaacuuaauauuacaaauuggaaacauaaucucaauauggauuagccacucaauucaacuugggaaucaaaaucagauugaaacaugcaaucaaagcgucauuacuuaugaaaacaacacuuggguaaaucagacauauguuaacaucagcaacaccaacuuugcugcuggacagucagugguuuccgugaaauuagcgggcaauuccucucucugcccuguuaguggaugggcuauauacaguaaagacaacaguauaagaaucgguuccaagggggauguguuugucauaagggaaccauucauaucaugcucccccuuggaaugcagaaccuucuucuugacucaaggggccuugcuaaaugacaaacauuccaauggaaccauuaaagacaggagcccauaucgaacccuaaugagcuguccuauuggugaaguucccucuccauacaacucaagauuugagucagucgcuuggucagcaagugcuugucaugauggcaucaauuggcuaacaauuggaauuucuggcccagacaauggggcaguggcuguauuaaaguacaacggcauaauaacagacacuaucaagaguuggagaaacaauauauugagaacacaagagucugaaugugcauguguaaaugguucuugcuuuacuguaaugaccgauggaccaagugauggacaggccucauacaagaucuucagaauagaaaagggaaagauagucaaaucagucgaaaugaaugccccuaauuaucacuaugaggaaugcuccuguuauccugauucuagugaaaucacaugugugugcagggauaacuggcauggcucgaaucgaccgugggugucuuucaaccagaaucuggaauaucagauaggauacauaugcagugggauuuucggagacaauccacgcccuaaugauaagacaggcaguugugguccaguaucgucuaauggagcaaauggaguaaaaggauuuucauucaaauacggcaaugguguuuggauugggagaacuaaaagcauuaguucaagaaacgguuuugagaugauuugggauccgaacggauggacugggacagacaauaacuucucaauaaagcaagauaucguaggaauaaaugaguggucaggauauagcgggaguuuuguccagcauccagaacuaacagggcuggauuguauaagaccuugcuucuggguugaacuaaucagagggcgacccaaagagaacacaaucuggacuagcgggagcagcauauccuuuugugguguaaacagugacacuguggguuggucuuggccagacggugcugaguugccauuuaccauugacaaguaa

SEQ ID NO: 51067 - RNA, 1410 nt, Artificial Sequence
  derived and/or modified CDS sequence (wt) from neuraminidase__InfluenzaA__ADK21876
augaauccaaaccaaaagauaauaaccauugguucggucuguaugacaauuggaauggcuaacuuaauauuacaaauuggaaacauaaucucaauauggauuagccacucaauucaacuugggaaucaaaaucagauugaaacaugcaaucaaagcgucauuacuuaugaaaacaacacuuggguaaaucagacauauguuaacaucagcaacaccaacuuugcugcuggacagucagugguuuccgugaaauuagcgggcaauuccucucucugcccuguuaguggaugggcuauauacaguaaagacaacaguauaagaaucgguuccaagggggauguguuugucauaagggaaccauucauaucaugcucccccuuggaaugcagaaccuucuucuugacucaaggggccuugcuaaaugacaaacauuccaauggaaccauuaaagacaggagcccauaucgaacccuaaugagcuguccuauuggugaaguucccucuccauacaacucaagauuugagucagucgcuuggucagcaagugcuugucaugauggcaucaauuggcuaacaauuggaauuucuggcccagacaauggggcaguggcuguguuaaaguacaacggcauaauaacagacacuaucaagaguuggagaaacaauauauugagaacacaagagucugaaugugcauguguaaaugguucuugcuuuacuguaaugaccgauggaccaagugauggacaggccucauacaagaucuucagaauagaaaagggaaagauagucaaaucagucgaaaugaaugccccuaauuaucacuaugaggaaugcuccuguuauccugauucuagugaaaucacauguguaugcagggauaacuggcauggcucaaaucgaccgugggugucuuucaaccagaaucuggaauaucagauaggauacauaugcagugggauuuucggagacaauccacgcccuaaugauaagacaggcaguugugguccaguaucgucuaauggagcaaauggaguaaaaggauuuucauucaaauacggcaaugguguuuggauagggagaacuaaaagcauuaguucaagaaacgguuuugagaugauuugggauccgaacggauggacuggaacagacaauaacuucucaauaaagcaagauaucguaggaauaaaugaguggucaggauauagcgggaguuuuguucagcauccagaacuaacagggcuggauuguauaagaccuugcuucuggguugaacuaaucagagggcgacccaaagagaacacaaucuggacuagcgggagcagcauauccuuuugugguguaaacagugacacuguggguuggucuuggccagacggugcugaguugccauuuaccauugacaaguaa

SEQ ID NO: 51068 - RNA, 1410 nt, Artificial Sequence
  derived and/or modified CDS sequence (wt) from neuraminidase__InfluenzaA__ADK21886
augaauccaaaccaaaagauaauaaccauugguucggucuguaugacaauuggaauggcuaacuuaauauuacaaauuggaaacauaaucucaauauggauuagccacucaauucaacuugggaaucaaaaucagauugaaacaugcaaucaaagcgucauuacuuaugaaaacaacacuuggguaaaucagacauauguuaacaucagcaacaccaacuuugcugcuggacagucagugguuuccgugaaauuagcgggcaauuccucucucugcccuguuaguggaugggcuauauacaguaaagacaacaguauaagaaucgguuccaagggggauguguuugucauaagggaaccauucauaucaugcucccccuuggaaugcagaaccuucuucuugacucaaggggccuugcuaaaugacaaacauuccaauggaaccauuaaagacaggagcccauaucgaacccuaaugagcuguccuauuggugaaguucccucuccauacaauucaagauuugagucagucgcuuggucagcaagugcuugucaugauggcaucaauuggcuaacaauuggaauuucuggcccagacaauggggcaguggcuguguuaaaguacaacggcauaauaacagacacuaucaagaguuggagaaacaauauauugagaacacaagagucugaaugugcauguguaaaugguucuugcuuuacuguaaugaccgauggaccaagugauggacaggccucauacaagaucuucagaauagaaaagggaaagauagucaaaucagucgaaaugaaugccccuaauuaucacuaugaggaaugcuccuguuauccugauucuagugaaaucacaugugugugcagggauaacuggcauggcucgaaucgaccgugggugucuuucaaccagaaucuggaauaucagauaggauacauaugcagugggauuuucggagacaauccacgcccuaaugauaagacaggcaguugugguccaguaucgucuaauggagcaaauggaguaaaaggauuuucauucaaauacggcaaugguguuuggauagggagaacuaaaagcauuaguucaagaaacgguuuugagaugauuugggauccgaacggauggacugggacagacaauaacuucucaauaaagcaagauaucguaggaauaaaugaguggucaggauauagcgggaguuuuguccagcauccagaacuaacagggcuggauuguauaagaccuugcuucuggguugaacuaaucagagggcgacccaaagagaacacaaucuggacuagcgggagcagcauauccuuuugugguguaaacagugacacuguggguuggucuuggccagacggugcugaguugccauuuaccauugacaaguaa

SEQ ID NO: 51069 - RNA, 1410 nt, Artificial Sequence
  derived and/or modified CDS sequence (wt) from neuraminidase__InfluenzaA__ADK21896
augaauccaaaccaaaagauaauaaccauugguucggucuguaugacaauuggaauggcuaacuuaauauuacaaauuggaaacauaaucucaauauggauuagccacucaauucaacuugggaaucaaaaucagauugaaacaugcaaucaaagcgucauuacuuaugaaaacaacacuuggguaaaucagacauauguuaacaucagcaacaccaacuuugcugcuggacagucagugguuuccgugaaauuagcgggcaauuccucucucugcccuguuaguggaugggcuauauacaguaaagacaacaguauaagaaucgguuccaagggggauguguuugucauaagggaaccauucauaucaugcucccccuuggaaugcagaaccuucuucuugacucaaggggccuugcuaaaugacaaacauuccaauggaaccauuaaagacaggagcccauaucgaacccuaaugagcuguccuauuggugaaguucccucuccauacaacucaagauuugagucagucgcuuggucagcaagugcuugucaugauggcaucaauuggcuaacaauuggaauuucuggcccagacaauggggcaguggcuguguuaaaguacaacggcauaauaacagacacuaucaagaguuggagaaacaauauauugagaacacaagagucugaaugugcauguguaaaugguucuugcuuuacuguaaugaccgauggaccaagugauggacaggccucauacaagaucuucagaauagaaaagggaaagauagucaaaucagucgaaaugaaugccccuaauuaucacuaugaggaaugcuccuguuauccugauucuagugaaaucacaugugugugcagggauaacuggcauggcucgaaucgaccgugggugucuuucaaccagaaucuggaauaucagauaggauacauaugcagugggauuuucggagacaauccacgcccuaaugauaagacaggcaguugugguccaguaucgucuaauggagcaaauggaguaaaaggauuuucauucaaauacggcaaugguguuuggauagggagaacuaaaagcauuaguucaagaaacgguuuugagaugauuugggauccgaacggauggacugggacagacaauaacuucucaauaaagcaagauaucguaggaacaaaugaguggucaggauauagcgggaguuuuguccagcauccagaacuaacagggcuggauuguauaagaccuugcuucuggguugaacuaaucagagggcgacccaaagagaacacaauuuggacuagcgggagcagcauauccuuuugugguguaagcagugacacuguggguuggucuuggccagacggugcugaguugccauuuaccauugacaaguaa

SEQ ID NO: 51070 - RNA, 1410 nt, Artificial Sequence
  derived and/or modified CDS sequence (wt) from neuraminidase__InfluenzaA__ADK21906
augaauccaaaccaaaagauaauaaccauugguucggucuguaugacaauuggaauggcuaacuuaauauuacaaauuggaaacauaaucucaauauggauuagccacucaauucaacuugggaaucaaaaucagauugaaacaugcaaucaaagcgucauuacuuaugaaaacaacacuuggguaaaucagacauauguuaacaucagcaacaccaacuuugcugcuggacagucagugguuuccgugaaauuagcgggcaauuccucucucugcccuguuaguggaugggcuauauacaguaaagacaacaguauaagaaucgguuccaagggggauguguuugucauaagggaaccauucauaucaugcucccccuuggaaugcagaaccuucuucuugacucaaggggccuugcuaaaugacaaacauuccaauggaaccauuaaagacaggagcccauaucgaacccuaaugagcuguccuauuggugaaguucccucuccauacaacucaagauuugagucagucgcuuggucagcaagugcuugucaugauggcaucaauuggcuaacaauuggaauuucuggcccagacaauggggcaguggcuguguuaaaguacaacggcauaauaacagacacuaucaagaguuggagaaacaauauauugagaacacaagagucugaaugugcauguguaaaugguucuugcuuuacuguaaugaccgauggaccaagugauggacaggccucauacaagaucuucagaauagaaaagggaaagauagucaaaucagucgaaaugaaugccccuaauuaucacuaugaggaaugcuccuguuauccugauucuagugaaaucacaugugugugcagggauaacuggcauggcucgaaucgaccguggauaucuuucaaccagaaucuggaauaucagauaggauacauaugcagugggauuuucggagacaauccacgcccuaaugauaagacaggcaguugugguccaguaucgucuaauggagcaaauggaguaaaaggauuuucauucaaauacggcaaugguguuuggauagggagaacuaaaagcauugguucaagaaacgguuuugagaugauuugggauccgaacggauggacugggacagacaauaacuucucaauaaagcaagauaucguaggaauaaaugaguggucaggauauagcgggaguuuuguucagcauccagaacuaacagggcuggauuguauaagaccuugcuucuggguugaacuaaucagagggcgacccaaagagaacacaaucuggacuagcgggagcagcauauccuuuugugggguaaacagugacacuguggguuggucuuggccggacggugcugaguugccauuuaccauugacaaguaa

SEQ ID NO: 51071 - RNA, 1410 nt, Artificial Sequence; identical to SEQ ID NO: 48947
  derived and/or modified CDS sequence (wt) from neuraminidase__InfluenzaA__ADK21916

SEQ ID NO: 51072 - RNA, 1410 nt, Artificial Sequence; identical to SEQ ID NO: 50304
  derived and/or modified CDS sequence (wt) from neuraminidase__InfluenzaA__ADK21926

SEQ ID NO: 51073 - RNA, 1410 nt, Artificial Sequence; identical to SEQ ID NO: 48750
  derived and/or modified CDS sequence (wt) from neuraminidase__InfluenzaA__ADK21936

SEQ ID NO: 51074 - RNA, 1410 nt, Artificial Sequence
  derived and/or modified CDS sequence (wt) from neuraminidase__InfluenzaA__ADK21946
augaauccaaaccaaaagauaauaaccauugguucggucuguaugacaauuggaauggcuaacuuaauauuacaaauuggaaacauaaucucaauauggauuagccacucaauucaacuugggaaucaaaaucagauugaaacaugcaaucaaagcgucauuacuuaugaaaacaacacuuggguaaaucagacauauguuaacaucagcaacaccaacuuugcugcuggacagucagugguuuccgugaaauuagcgggcaauuccucucucugcccuguuaguggaugggcuauauacaguaaagacaacaguauaagaaucgguuccaagggggauguguuugucauaagggaaccauucauaucaugcucccccuuggaaugcagaaccuucuucuugacucaaggggccuugcuaaaugacaaacauuccaauggaaccauuaaagacaggagcccauaucgaacccuaaugagcuguccuauuggugaaguucccucuccauacaacucaagauuugagucagucgcuuggucagcaagugcuugucaugauggcaucaauuggcuaacaauuggaauuucuggcccagacaauggggcaguggcuguguuaaaguacaacggcauaauaacagacacuaucaagaguuggagaaacaauauauugagaacacaagagucugaaugugcauguguaaaugguucuugcuuuacuguaaugaccgauggaccaagugauggacaggccucauacaagaucuucagaauagaaaagggaaagauagucaaaucagucgaaaugaaugccccuaauuaucacuaugaggaaugcuccuguuauccugauucuagugaaaucacaugugugugcagggauaacuggcauggcucgaaucgaccgugggugucuuucaaccagaaucuggaauaucagauaggauacauaugcagugggauuuucggagacaauccacgcccuaaugauaagacaggcaguugugguccaguaucgucuaauggagcaaauggaguaaaaggauuuucauucaaauacggcaaugguguuuggauagggagaacuaaaagcauuaguucaagaaacgguuuugagaugauuugggauccgaacggauggacugggacagacaauaacuucucaauaaagcaagauaucguaggaauaaaugaguggucaggauauagcgggaguuuuguucagcauccagaacuaacagggauggauuguauaagaccuugcuucuggguugaacuaaucagagggcgacccaaagagaacacaaucuggacuagcgggagcagcauauccuuuugugguguaaacagugacacuguggguuggucuuggccagacggugcugaguugccauuuaccauugacaaguaa

SEQ ID NO: 51075 - RNA, 1410 nt, Artificial Sequence
  derived and/or modified CDS sequence (wt) from neuraminidase__InfluenzaA__ADK21956
augaauccaaaccaaaagauaauaaccauugguucggucuguaugacaauuggaauggcuaacuuaauauuacaaauuggaaacauaaucucaauauggauuagccacucaauucaacuugggaaucaaaaucagauugaaacaugcaaucaaagcgucauuacuuaugaaaacaacacuuggguaaaucagacauauguuaacaucagcaacaccaacuuugcugcuggacagucagugguuuccgugaaauuagcgggcaauuccucucucugcccuguuaguggaugggcuauauacaguaaagacaacaguauaagaaucgguuccaagggggauguguuugucauaagggagccauucauaucaugcucccccuuggaaugcagaaccuucuucuugacucaaggggccuugcuaaaugacaaacauuccaauggaaccauuaaagacaggagcccauaucgaacccuaaugagcuguccuauuggugaaguucccucuccauacaacucaagauuugagucagucgcuuggucagcaagugcuugucaugauggcaucaauuggcuaacaauuggaauuucuggcccagacaauggggcaguggcuguguuaaaguacaacggcauaauaacagacacuaucaagaguuggagaaacaauauauugagaacacaagagucugaaugugcauguguaaaugguucuugcuuuacuguaaugaccgauggaccaagugauggacaggccucauacaagaucuucaaaauagaaaagggaaagauagucaaaucagucgaaaugaaugccccuaauuaucacuaugaggaaugcuccuguuauccugauucuagugaaaucacaugugugugcagggauaacuggcauggcucgaaucgaccguggguaucuuucaaccagaaucuggaauaucagauaggauacauaugcagugggauuuucggagacaauccacgcccuaaugauaagacaggcaguugugguccaguaucgucuaauggagcaaauggaguaaaaggauuuucauucaaauacggcaaugguguuuggauagggagaacuaaaagcauuaguucaagaaacgguuuugagaugauuugggauccgaacggauggacugggacagacaauaacuucucaauaaagcaagauaucguaggaauaaaugaguggucaggauauagcgggaguuuuguucagcauccagaacuaacagggcuggauuguauaagaccuugcuucuggguugaacuaaucagagggcgacccaaagagaacacaaucuggacuagcgggagcagcauauccuuuugugguguaaacaguaacacuguggguuggucuuggccggacggugcugaguugccauuuaccauugacaaguaa

SEQ ID NO: 51076 - RNA, 1410 nt, Artificial Sequence; identical to SEQ ID NO: 50304
  derived and/or modified CDS sequence (wt) from neuraminidase__InfluenzaA__ADK32393

SEQ ID NO: 51077 - RNA, 1410 nt, Artificial Sequence; identical to SEQ ID NO: 50304
  derived and/or modified CDS sequence (wt) from neuraminidase__InfluenzaA__ADK32403

SEQ ID NO: 51078 - RNA, 1410 nt, Artificial Sequence; identical to SEQ ID NO: 50304
  derived and/or modified CDS sequence (wt) from neuraminidase__InfluenzaA__ADK32413

SEQ ID NO: 51079 - RNA, 1410 nt, Artificial Sequence
  derived and/or modified CDS sequence (wt) from neuraminidase__InfluenzaA__ADK32423
augaauccaaaccaaaagauaauaaccauugguucggucuguaugacaauuggaaugacuaacuuaauauuacaaauuggaaacauaaucucaauauggauuagccacucaauucaacuugggaaucaaaaucagauugaaacaugcaaucaaagcgucauuacuuaugaaaacaacacuuggguaaaucagacauauguuaacaucagcaacaccaacuuugcugcuggacagucagugguuuccgugaaauuagcgggcaauuccucucucugcccuguuaguggaugggcuauauacaguaaagacaacaguauaagaaucgguuccaagggggauguguuugucauaagagaaccauucauaucaugcucccccuuggaaugcagaaccuucuucuugacucaaggggccuugcuaaaugacaaacauuccaauggaaccauuaaagacaggagcccauaucgaacccuaaugagcuguccuauuggugaaguucccucuccauacaacucaagauuugagucagucgcuuggucagcaagugcuugucaugauggcaucaauuggcuaacaauuggaauuucuggcccagacaauggggcaguggcuguguuaaaguacaacggcauaauaacagacacuaucaagaguuggagaaacaauauauugagaacacaagagucugaaugugcauguguaaaugguucuugcuuuacuguaaugaccgauggaccaagugauggacaggccucauacaagaucuucagaauagaaaagggaaagauagucaaaucagucgaaaugaaugccccuaauuaucacuaugaggaaugcuccuguuauccugauucuagugaaaucacauguguaugcagggauaacuggcauggcucgaaucgaccgugggugucuuucaaccagaaucuggaauaucagauaggauacauaugcagugggauuuucggagacaauccacgcccuaaugauaagacaggcaguugugguccaguaucgucuaauggagcaaauggaguaaaaggauuuucauucaaauacggcaaugguguuuggauagggagaacuaaaagcauuaguucaagaaacgguuuugagaugauuugggauccgaacggauggacugggacagacaauaacuucucaauaaagcaagauaucguaggaauaaaugaguggucaggauauagcgggaguuuuguucagcauccagaacuaacagggcuggauuguauaagaccuugcuucuggguugaacuaaucagagggcgacccaaagagaacacaaucuggacuagcgggagcagcauauccuuuugugguguaaacagugacacuguggguuggucuuggccagacggugcugaguugccauuuaccauugacaaguaa

SEQ ID NO: 51080 - RNA, 1410 nt, Artificial Sequence; identical to SEQ ID NO: 48750
  derived and/or modified CDS sequence (wt) from neuraminidase__InfluenzaA__ADK32433

SEQ ID NO: 51081 - RNA, 1410 nt, Artificial Sequence
  derived and/or modified CDS sequence (wt) from neuraminidase__InfluenzaA__ADK32443
augaauccaaaccaaaagauaauaaccauugguucggucuguaugacaauuggaauggcuaacuuaauauuacaaauuggaaacauaaucucaauauggauuagccacucaauucaacuugggaaucaaaaucagauugaaacaugcaaucaaagcgucauuacuuaugaaaacaacacuuggguaaaucagacauauguuaacaucagcaacaccaacuuugcugcuggacagucagugguuuccgugaaauuagcgggcaauuccucucucugcccuguuaguggaugggcaauauacaguaaagacaacaguauaagaaucgguuccaagggggauguguuugucauaagggaaccauucauaucaugcucccccuuggaaugcagaaccuucuucuugacucaaggggccuugcuaaaugacaaacauuccaauggaaccauuaaagacaggagcccauaucgaacccuaaugagcuguccuauuggugaaguucccucuccauacaacucaagauuugagucagucgcuuggucagcaagugcuugucaugauggcaucaauuggcuaacaauuggaauuucuggcccagacaauggggcaguggcuguguuaaaguacaacggcauaauaacagacacuaucaagaguuggagaaacaauauauugagaacacaagagucugaaugugcauguguaaaugguucuugcuuuacuguaaugaccgauggaccaagugauggacaggccucauacaagaucuucagaauagaaaagggaaagauagucaaaucagucgaaaugaaugccccuaauuaucacuaugaggaaugcuccuguuauccugauucuagugaaaucacaugugugugcagggauaacuggcauggcucgaaucgaccgugggugucuuucaaccagaaucuggaauaucagauaggauacauaugcagugggauuuucggagacaauccacgcccuaaugauaagacaggcaguugugguccaguaucgucuaauggagcaaauggaguaaaaggauuuucauucaaauacggcaaugguguuuggauagggagaacuaaaagcauuaguucaagaaacgguuuugagaugauuugggauccgaacggauggacugggacagacaauaacuucucaauaaagcaagauaucguaggaauaaaugaguggucaggauauagcgggaguuuuguucagcauccagaacuaacagggcuagauuguauaagaccuugcuucuggguugaacuaaucagagggcgacccaaagagaacacaaucuggacuagcgggagcagcauauccuuuugugguguaaacagugacacuguggguuggucuuggccagacggugcugaguugccauuuaccauugacaaguaa

SEQ ID NO: 51082 - RNA, 1410 nt, Artificial Sequence
  derived and/or modified CDS sequence (wt) from neuraminidase__InfluenzaA__ADK32453
augaauccaaaccaaaagauaauaaccauugguucggucuguaugacaauuggaauggccaacuuaauauuacaaauuggaaacauaaucucaauauggauuagccacucaauucaacuugggaaucaaaaucagauugaaacaugcaaucaaagcgucauuacuuaugaaaacaacacuuggguaaaucagacauauguuaacaucagcaacaccaacuuugcugcuggacagucagugguuuccgugaaauuaucgggcaauuccucucucugcccuguuaguggaugggcuauauacaguaaagacaacaguguaagaaucgguuccaagggggauguguuugucauaagggaaccauucauaucaugcucccccuuggaaugcagaaccuucuucuugacucaaggggccuugcuaaaugacaaacauuccaauggaaccauuaaagacaggagcccauaucgaacccuaaugagcuguccuauuggugaaguucccucuccauacaacucaagauuugagucagucgcuuggucagcaagugcuugucaugauggcaucaauuggcuaacaauuggaauuucuggcccagacaauggggcaguggcuguguuaaaguacaacggcauaauaacagacacuaucaagaguuggagaaacaauauauugagaacacaagagucugaaugugcauguguaaaugguucuugcuuuacuguaaugaccgauggaccaagugauggacaggccucauacaagaucuucagaauagaaaagggaaagauagucaaaucagucgaaaugaaugccccuaauuaucacuaugaggaaugcuccuguuauccugauucuagugaaaucacaugugugugcagggauaacuggcauggcucgaaucgaccguggguuucuuucaaccagaaucuggaauaucagauaggauacauaugcagugggauuuucggagacaauccacgcccuaaugauaagacaggcaguugugguccaguaucgucuaauggagcaaauggaguaaaaggauuuucauucaaauacggcaaugguguuuggauagggagaacuaaaagcauuaguucaagaaacgguuuugagaugauuugggauccgaacggauggacugggacagacaauaacuucucaauaaagcaagauaucguaggaauaaaugaguggucaggauauagcgggaguuuuguucagcauccagaacuaacagggcuggauuguauaagaccuugcuucuggguugaacuaaucagagggcgacccaaagagaacacaaucuggacuagcgggagcagcauauccuuuugugguguaaacagugacacuguggguuggucuuggccagacggugcugaguugccauuuaccauugacaaguaa

SEQ ID NO: 51083 - RNA, 1410 nt, Artificial Sequence
  derived and/or modified CDS sequence (wt) from neuraminidase__InfluenzaA__ADK32463
augaauccaaaccaaaagauaauaaccauugguucggucuguaugacaauuggaauggcuaacuuaauauuacaaauuggaaacauaaucucaauauggauuagccacucaauucaacuugggaaucaaaaucagauugaaacaugcaaucaaagcgucauuacuuaugaaaacaacacuuggguaaaucagacauauguuaacaucagcaacaccaacuuugcugcuggacagucagugguuuccgugaaauuagcgggcaauuccucucucugcccuguuaguggaugggcuauauacaguaaagacaacaguauaagaaucgguuccaagggggauguguuugucauaagggaaccauucauaucaugcucccccuuggaaugcagaaccuucuucuugacucaaggggccuugauaaaugacaaacauuccaauggaaccauuaaagacaggagcccauaucgaacccuaaugagcuguccuauuggugaaguucccucuccauacaacucaagauuugagucagucgcuuggucagcaagugcuugucaugauggcaucaauuggcuaacaauuggaauuucuggcccagacaauggggcaguggcuguguuaaaguacaacggcauaauaacagacacuaucaagaguuggagaaacaauauauugagaacacaagagucugaaugugcauguguaaaugguucuugcuuuacuguaaugaccgauggaccaagugauggacaggccucauacaagaucuucagaauagaaaagggaaagauagucaaaucagucgaaaugaaugccccuaauuaucacuaugaggaaugcuccuguuauccugauucuagugaaaucacaugugugugcagggauaacuggcauggcucgaaucgaccgugggugucuuucaaccagaaucuggaauaucagauaggauacauaugcagugggauuuucggagacaauccacgcccuaaugauaagacaggcaguugugguccaguaucgucuaauggagcaaauggaguaaaaggauuuucauucaaauacggcaaugguguuuggauagggagaacuaaaagcauuaguucaagaaacgguuuugagaugauuugggauccgaacggauggacugggacagacaauaacuucucaauaaagcaagauaucguaggaauaaaugaguggucaggauauagcgggaguuuuguucagcauccagaacuaacagggcuggauuguauaagaccuugcuucuggguugaacuaaucagagggcgacccaaagagaacacaaucuggacuagcgggagcagcauauccuuuugugguguaaacagugacacuguggguuggucuuggccagacggugcugaguugccauuuaccauugacaaguaa

SEQ ID NO: 51084 - RNA, 1410 nt, Artificial Sequence; identical to SEQ ID NO: 49794
  derived and/or modified CDS sequence (wt) from neuraminidase__InfluenzaA__ADK32473

SEQ ID NO: 51085 - RNA, 1410 nt, Artificial Sequence
  derived and/or modified CDS sequence (wt) from neuraminidase__InfluenzaA__ADK32483
augaauccaaaccaaaagauaauaaccauugguucggucuguaugacaauuggaauggcuaacuuaauauuacaaauuggaaacauaaucucaauauggauuagccacucaauucaacuugggaaucaaaaucagauugaaacaugcaaucaaagcgucauuacuuaugaaaacaacacuuggguaaaucagacauauguuaacaucagcaacaccaacuuugcugcuggacagucagugguuuccgugaaauuagcgggcaauuccucucucugcccuguuaguggaugggcuauauacaguaaagacaacaguauaagaaucgguuccaagggggauguguuugucauaagggaaccauucauaucaugcucccccuuggaaugcagaaccuucuucuugacucaaggggccuugcuaaaugacaaacauuccaauggaaccauuaaagacaggagcccauaucgaacccuaaugagcuguccuauuggugaaguucccucuccauacaacucaagauuugagucagucgcuuggucagcaagugcuugucaugauggcaucaauuggcuaacaauuggaauuucuggcccagacaauggggcaguggcuguguuaaaguacaacggcauaauaacagacacuaucaagaguuggagaaacaauauauugagaacacaagagucugaaugugcauguguaaaugguucuugcuuuacuguaaugaccgauggaccaagugauggacaagccucauacaagaucuucagaauagaaaagggaaagauagucaaaucagucgaaaugaaugccccuaauuaucacuaugaggaaugcuccuguuauccugauucuagugaaaucacaugugugugcagggauaacuggcauggcucgaaucgaccgugggugucuuucaaccagaaucuggaauaucagauaggauacauaugcagugggauuuucggagacaauccacgcccuaaugauaagacaggcaguugugguccaguaucgucuaauggagcaaauggaguaaaaggauuuucauucaaauacggcaaugguguuuggauagggagaacuaaaagcauuaguucaagaaacgguuuugagaugauuugggauccgaacggauggacugggacagacaauaacuucucaauaaagcaagauaucguaggaauaaaugaguggucaggauauagcgggaguuuuguucagcauccagaacuaacagggcuggauuguauaagaccuugcuucuggguugaacuaaucagagggcgacccaaagagaacacaaucuggacuagcgggagcagcauauccuuuugugguguaaacagugacacuguggguuggucuuggccagacggugcugaguugccauuuaccauugacaaguaa

SEQ ID NO: 51086 - RNA, 1410 nt, Artificial Sequence; identical to SEQ ID NO: 49794
  derived and/or modified CDS sequence (wt) from neuraminidase__InfluenzaA__ADK32493

SEQ ID NO: 51087 - RNA, 1410 nt, Artificial Sequence
  derived and/or modified CDS sequence (wt) from neuraminidase__InfluenzaA__ADK32505
augaauccaaaccaaaagauaauaaccauugguucggucuguaugacaauuggaauggcuaacuuaauauuacaaauuggaaacauaaucucaauauggauuagccacucaauucaacuugggaaucaaaaucagauugaaacaugcaaucaaagcaucauuacuuaugaaaacaacacuuggguaaaucagacauauguuaacaucagcaacaccaacuuugcugcuggacagucagugguuuccgugaaauuagcgggcaauuccucucucugcccuguuaguggaugggcuauauacaguaaagacaacaguauaagaaucgguuccaagggggauguguuugucauaagggaaccauucauaucaugcucccccuuggaaugcagaaccuucuucuugacucaaggggccuugcuaaaugacaaacauuccaauggaaccauuaaagacaggagcccauaucgaacccuaaugagcuguccuauuggugaaguucccucuccauacaacucaagauuugagucagucgcuuggucagcaagugcuugucaugauggcaucaauuggcuaacaauuggaauuucuggcccagacaauggggcaguggcuguguuaaaguacaacggcauaauaacagacacuaucaagaguuggagaaacaauauauugagaacacaagagucugaaugugcauguguaaaugguucuugcuuuacuguaaugaccgauggaccaagugauggacaggccucauacaagaucuucagaauagaaaagggaaagauagucaaaucagucgaaaugaaugccccuaauuaucacuaugaggaaugcuccuguuauccugauucuagugaaaucacaugugugugcagggauaacuggcauggcucgaaucgaccgugggugucuuucaaccagaaucuggaauaucagauaggauacauaugcagugggauuuucggagacaauccacgcccuaaugauaagacaggcaguugugguccaguaucgucuaauggagcaaauggaguaaaaggauuuucauucaaauacggcaaugguguuuggauagggagaacuaaaagcauuaguucaagaaacgguuuugagaugauuugggauccgaacggauggacugggacagacaauaacuucucaauaaagcaagauaucguaggaauaaaugaauggucaggauauagcgggaguuuuguucagcauccagaacuaacagggcuggauuguauaagaccuugcuucuggguugaacuaaucagagggcgacccaaagagaacacaaucuggacuagugggagcagcauauccuuuugugguguaaacagugacacuguggguuggucuuggccagacggugcugaguugccauuuaccauugacaaguaa

SEQ ID NO: 51088 - RNA, 1410 nt, Artificial Sequence
  derived and/or modified CDS sequence (wt) from neuraminidase__InfluenzaA__ADK32640
augaauccaaaccaaaagauaauaaccauugguucggucuguaugacaauuggaauggccaacuuaauauuacaaauuggaaacauaaucucaauauggauuagccacucaauucaacuugggaaucaaaaucagauugaaacaugcaaucaaagcgucauuacuuaugaaaacaacacuuggguaaaucagacauauguuaacaucagcaacaccaacuuugcugcuggacagucaguggccuccgugaaauuagcgggcaauuccucucucugcccuguuaguggaugggcuauauacaguaaagacaacaguauaagaaucgguuccaagggggauguguuugucauaagggaaccauucauaucaugcucccccuuggaaugcagaaccuucuucuugacucaaggggccuugcuaaaugacaaacauuccaauggaaccauuaaagacaggagcccauaucgaacccuaaugagcuguccuauuggugaaguucccucuccauacaacucaagauuugagucagucgcuuggucagcaagugcuugucaugauggcaucaauuggcuaacaauuggaauuucuggcccagacaauggggcaguggcuguguuaaaguacaacggcauaauaacagacacuaucaagaguuggagaaacaauauauugagaacacaagagucugaaugugcauguguaaaugguucuugcuuuacuguaaugaccgauggaccaagugauggacaggccucauacaagaucuucagaauagaaaagggaaagauagucaaaucagucgaaaugaaugccccuaauuaucacuaugaggaaugcuccuguuauccugauucuagugaaaucacaugugugugcagggauaacuggcauggcucgaaucgaccgugggugucuuucaaccagaaucuggaauaucagauaggauacauaugcagugggauuuucggagacaauccacgcccuaaugauaagacaggcaguugugguccaguaucgucuaauggagcaaauggaguaaaaggauuuucauucaaauacggcaaugguguuuggauagggagaacuaaaagcauuaguucaagaaacgguuuugagaugauuugggauccgaacggauggacugggacagacaauaacuucucaauaaagcaagauaucguaggaauaaaugaguggucaggauauagcgggaguuuuguucagcauccagaacuaacagggcuggauuguauaagaccuugcuucuggguugaacuaaucagagggcgacccaaagagaacacaaucuggacuagcgggagcagcauauccuuuugugguguaaacagugacacuguggguuggucuuggccagacggugcugaguugccauuuaccauugacaaguaa

SEQ ID NO: 51089 - RNA, 1410 nt, Artificial Sequence; identical to SEQ ID NO: 48750
  derived and/or modified CDS sequence (wt) from neuraminidase__InfluenzaA__ADK32650

SEQ ID NO: 51090 - RNA, 1410 nt, Artificial Sequence; identical to SEQ ID NO: 49939
  derived and/or modified CDS sequence (wt) from neuraminidase__InfluenzaA__ADK32660

SEQ ID NO: 51091 - RNA, 1410 nt, Artificial Sequence
  derived and/or modified CDS sequence (wt) from neuraminidase__InfluenzaA__ADK32670
augaauccaaaccaaaagauaauaaccauugguucggucuguaugacaauuggaauggcuaacuuaauauuacaaauuggaaacauaaucucaauauggauuagccacucaauucaacuugggaaucaaaaucagauugaaacaugcaaucaaagcgucauuacuuaugaaaacaacacuuggguaaaucagacauauguuaacaucagcaacaccaacuuugcugcuggacagucagugguuuccgugaaauuagcgggcaauuccucucucugcccuguuaguggaugggcuauauacaguaaagacaacaguauaagaaucgguuccaagggggauguguuugucauaagggaaccauucauaucaugcucccccuuggaaugcagaaccuucuucuugacucaaggggccuugcuaaaugacaaacauuccaauggaaccauuaaagacaggagcccauaucgaacccuaaugagcuguccuauuggugaaguucccucuccauacaacucaagauuugagucagucgcuuggucagcaagugcuugucaugauggcaucaauuggcuaacaauuggaauuucuggcccagacaauggggcaguggcuguguuaaaguacaacggcauaauaacagacacuaucaagaguuggagaaacaauauauugagaacacaagagucugaaugugcauguguaaaugguucuugcuuuacuguaaugaccgauggaccaagugauggacaggccucauacaagaucuucagaauagaaaagggaaagauagucaaaucagucgaaaugaaugccccuaauuaucacuaugaggaaugcuccuguuauccugauucuagugaaaucacaugugugugcagggauaacuggcauggcucgaaucgaccguggguaucuuucaaccagaaucuggaauaucagauaggauacauaugcagugggauuuucggagacaauccacgcccuaaugauaagacaggcaguugugguccaguaucgucuaauggagcaaauggaguaaaaggauuuucauucaaauacggcaaugguguuuggauagggagaacuaaaagcauuaguucaagaaacgguuuugagaugauuugggauccgaauggauggacugggacagacaauaacuucucaauaaagcaagauaucguaggaauaaaugaguggucaggauauagcgggaguuuuguucagcauccagaacuaacagggcuggauuguauaagaccuugcuucuggguugaacuaaucagagggcgacccaaagagaacacaaucuggacuagcgggagcagcauauccuuuugugguguaaacagugacacuguggguuggucuuggccggacggugcugaguugccauuuacuauugacaaguaa

SEQ ID NO: 51092 - RNA, 1410 nt, Artificial Sequence
  derived and/or modified CDS sequence (wt) from neuraminidase__InfluenzaA__ADK32680
augaauccaaaccaaaagauaauaaccauugguucggucuguaugacaauuggaauggcuaacuuaauauuacaaauuggaaacauaaucucaauauggauuagccacucaauucaacuugggaaucaaaaucagauugaaacaugcaaucaaagcgucauuacuuauaaaaacaacacuuggguaaaucagacauauguuaacaucagcaacaccaacuuugcugcuggacagucagugguuuccgugaaauuagcgggcaauuccucucucugcccuguuaguggaugggcuauauacaguaaagacaacaguauaagaaucgguuccaagggggauguguuugucauaagggaaccauucauaucaugcucccccuuggaaugcagaaccuucuucuugacucaaggggccuugcuaaaugacaaacauuccaauggaaccauuaaagacaggagcccauaucgaacccuaaugagcuguccuauuggugaaguucccucuccauacaacucaagauuugagucagucgcuuggucagcaagugcuugucaugauggcaucaauuggcuaacaauuggaauuucuggcccagacaauggggcaguggcuguguuaaaguacaacggcauaauaacagacacuaucaagaguuggagaaacaauauauugagaacacaagagucugaaugugcauguguaaaugguucuugcuuuacuguaaugaccgauggaccaagugauggacaggccucauacaagaucuucagaauagaaaagggaaagauagucaaaucagucgaaaugaaugccccuaauuaucacuaugaggaaugcuccuguuauccugauucuagugaaaucacaugugugugcagggauaacuggcauggcucgaaucgaccgugggugucuuucaaccagaaucuggaauaucagauaggauacauaugcagugggauuuucggagacaauccacgcccuaaugauaagacaggcaguugugguccaguaucgucuaauggagcaaauggaguaaaaggauuuucauucaaauacggcaaugguguuuggauagggagaacuaaaagcauuaguucaagaaacgguuuugagaugauuugggauccgaacggauggacugggacagacaauaacuucucaauaaagcaagauaucguaggaauaaaugaguggucaggauauagcgggaguuuuguucagcauccagaacuaacagggcuggauuguauaagaccuugcuucuggguugaacuaaucagagggcgacccaaagagaacacaaucuggacuagcgggagcagcauauccuuuugugguguaaacagugacacuguggguuggucuuggccagacggugcugaguugccauuuaccauugacaaguaa

SEQ ID NO: 51093 - RNA, 1410 nt, Artificial Sequence; identical to SEQ ID NO: 49794
  derived and/or modified CDS sequence (wt) from neuraminidase__InfluenzaA__ADK32690

SEQ ID NO: 51094 - RNA, 1410 nt, Artificial Sequence
  derived and/or modified CDS sequence (wt) from neuraminidase__InfluenzaA__ADK32700
augaauccaaaccaaaagauaauaaccauugguucggucuguaugacaauuggaauggcuaacuuaauauuacaaauuggaaacauaaucucaauauggauuagccacucaauucaacuugggaaucaaaaucagauugaaacaugcaaucaaagcgucauuacuuaugaaaacaacacuuggguaaaucagacauauguuaacaucagcaacaccaacuuugcugcuggacagucagugguuuccgugaaauuagcgggcaauuccucucucugcccuguuaguggaugggcuauauacaguaaagacaacaguauaagaaucgguuccaagggggauguguuugucauaagggaaccauucauaucaugcuccccuuuggaaugcagaaccuucuucuugacucaaggggccuugcuaaaugacaaacauuccaauggaaccauuaaagacaggagcccauaucgaacccuaaugagcuguccuauuggugaaguucccucuccauacaacucaagauuugagucagucgcuuggucagcaagugcuugucaugauggcaucaauuggcuaacaauuggaauuucugguccagacaauggggcaguggcuguguuaaaguacaacggcauaauaacagacacuaucaagaguuggagaaacaauauauugagaacacaagagucugaaugugcauguguaaaugguucuugcuuuacuguaaugaccgauggaccaagugauggacaggccucauacaagaucuucagaauagaaaagggaaagauagucaaaucagucgaaaugaaugccccuaauuaucacuaugaggaaugcuccuguuauccugauucuagugaaaucacaugugugugcagggauaacuggcauggcucgaaucgaccgugggugucuuucaaccagaaucuggaauaucagauaggauacauaugcagugggauuuucggagacaauccacgcccuaaugauaagacaggcaguugugguccaguaucgucuaauggagcaaauggaguaaaaggauuuucauucaaauacggcaaugguguuuggauagggagaacuaaaagcauuaguucaagaaacgguuuugagaugauuugggauccgaacggauggacugggacagacaauaacuucucaauaaagcaagauaucguaggaauaaaugaguggucaggauauagcgggaguuuuguucagcauccagaacuaacagggcuggauuguauaagaccuugcuucuggguugaacuaaucagagggcgacccaaagagaacacaaucuggacuagcgggagcagcauauccuuuugugguguaaacagugacacuguggguuggucuuggccagacggugcugaguugccauuuaccauugacaaguaa

SEQ ID NO: 51095 - RNA, 1410 nt, Artificial Sequence
  derived and/or modified CDS sequence (wt) from neuraminidase__InfluenzaA__ADK32779
augaauccaaaccaaaagauaauaaccauugguucggucuguaugacaauuggaauggcuaacuuaauauuacaaauuggaaacauaaucucaauauggauuagccacucaauucaacuugggaaucaaaaucagauugaaacaugcaaucaaagcgucauuacuuaugaaaacaacacuuggguaaaucagacauauguuaacaucagcaacaccaacuuugcugcuggacagucagugguuuccgugaaauuagcgggcaauuccucucucugcccuguuaguggaugggcuauauacaguaaagacaacaguauaagaaucgguuccaagggggauguguuugucauaagggaaccauucauaucaugcucccccuuggaaugcagaaccuucuucuugacucaaggggccuugcuaaaugacaaacauuccaauggaaccauuaaagacaggagcccauaucgaacccuaaugagcuguccuauuggugaaguucccucuccauauaacucaagauuugagucagucgcuuggucagcaagugcuugucaugauggcaucaauuggcuaacaauuggaauuucuggcccagacaauggggcaguggcuguguuaaaguacaacggcauaauaacagacacuaucaagaguuggagaaacaauauauugagaacacaagagucugaaugugcauguguaaaugguucuugcuuuacuguaaugaccgauggaccaagugauggacaggccucauacaagaucuucagaauagaaaagggaaagauagucaaaucagucgaaaugaaugccccuaauuaucacuaugaggaaugcuccuguuauccugauucuagugaaaucacaugugugugcagggauaacuggcauggcucgaaucgaccgugggugucuuucaaccagaaucuggaauaucagauaggauacauaugcagugggauuuucggagacaauccacgcccuaaugauaagacaggcaguugugguccaguaucgucuaauggagcaaauggaguaaaaggauuuucauucaaauacggcaaugguguuuggauagggagaacuaaaagcauuaguucaagaaacgguuuugagaugauuugggauccgaacggauggacugggacagacaauaacuucucaauaaagcaagauaucguaggaauaaaugaauggucaggauauagcgggaguuuuguucagcauccagaacuaacagggcuggacuguauaagaccuugcuucuggguugaacuaaucagagggcgacccaaagagaacacaaucuggacuagcgggagcagcauauccuuuugugguguaaacagugacacuguggguuggucuuggccagacggugcugaguugccauuuaccauugacaaguaa

SEQ ID NO: 51096 - RNA, 1410 nt, Artificial Sequence; identical to SEQ ID NO: 50656
  derived and/or modified CDS sequence (wt) from neuraminidase__InfluenzaA__ADK33614

SEQ ID NO: 51097 - RNA, 1410 nt, Artificial Sequence
  derived and/or modified CDS sequence (wt) from neuraminidase__InfluenzaA__ADK33624
augaauccaaaccaaaagauaauaaccauugguucggucuguaugacaauuggaauggcuaacuuaauauuacaaauuggaaacauaaucucaauauggauuagccacucaauucaacuugggaaucaaaaucagauugaaacaugcaaucaaagcgucauuacuuaugaaaacaacacuuggguaaaucagacauauguuaacaucagcaacaccaacuuugcugcuggacagucagugguuuccgugaaauuagcgggcaauuccucucucugcccuguuaguggaugggcuauauacaguaaagacaacaguauaagaaucgguuccaagggggauguguuugucauaagggaaccauucauaucaugcucccccuuggaaugcagaaccuucuucuugacucaaggggccuugcuaaaugacaaacauuccaauggaaccauuaaagacaggagcccauaucgaacccuaaugagcuguccuauuggugaaguucccucuccauacaacucaagauuugagucagucgcuuggucagcaagugcuugucaugauggcaucaauuggcuaacaauuggaauuucuggcccggacaauggggcaguggcuguguuaaaguacaacggcauaauaacagacacuaucaagaguuggagaaacaauauauugagaacacaagagucugaaugugcauguguaaaugguucuugcuuuacuguaaugaccgauggaccaagugauggacaggccucauacaagaucuucagaauagaaaagggaaagauagucaaaucagucgaaaugaaugccccuaauuaucacuaugaggaaugcuccuguuauccugauucuagugaaaucacaugugugugcagggauaacuggcauggcucgaaucgaccgugggugucuuucaaccagaaucuggaauaucagauaggauacauaugcagugggauuuucggagacaauccacgcccuaaugauaagacaggcaguugugguccaguaucgucuaauggagcaaauggaguaaaaggauuuucauucaaauacggcaaugguguuuggauagggagaacuaaaagcauuaguucaagaaacgguuuugagaugauuugggauccgaacggauggacugggacagacaauaacuucucaauaaagcaagauaucguaggaauaaaugaguggucaggauauagcgggaguuuuguucagcauccagaacuaacagggcuggauuguauaagaccuugcuucuggguugaacuaaucagagggcgacccaaagagaacacaaucuggacuagcgggagcagcauauccuuuugugguguaaacagugacacuguggguuggucuuggccagacggugcugaguugccauuuacuauugacaaguaa

SEQ ID NO: 51098 - RNA, 1410 nt, Artificial Sequence
  derived and/or modified CDS sequence (wt) from neuraminidase__InfluenzaA__ADK33634
augaauccaaaccaaaagauaauaaccauugguucggucuguaugacaauuggaauggcuaacuuaauauuacaaauuggaaacauaaucucaauauggauuagccacucaauucaacuugggaaucaaaaucagauugaaacaugcaaucaaagcgucauuacuuaugaaaacaacacuuggguaaaucagacauauguuaacaucagcaacaccaacuuugcugcuggacagucagugguuuccgugaaauuagcgggcaauuccucucucugcccuguuaguggaugggcuauauacaguaaagacaacaguauaagaaucgguuccaagggggauguguuugucauaagggaaccauucauaucaugcucccccuuggaaugcagaaccuucuucuugacucaaggugccuugcuaaaugacaaacauuccaauggaaccauuaaagacaggagcccauaucgaacucuaaugagcuguccuauuggugaaguucccucuccauacaacucaagauuugagucagucgcuuggucagcaagugcuugucaugauggcaucaauuggcuaacaauuggaauuucuggcccagacaauggggcaguggcuguguuaaaguacaacggcauaauaacagacacuaucaagaguuggagaaacaauauauugagaacacaagagucugaaugugcauguguaaaugguucuugcuuuacuguaaugaccgauggaccaagugauggacaggccucauacaagaucuucagaauagaaaagggaaagauagucaaaucagucgaaaugaaugccccuaauuaucacuaugaggaaugcuccuguuauccugauucuagugaaaucacaugugugugcagggauaacuggcauggcucgaaucgaccgugggugucuuucaaccagaaucuggaauaucagauaggauacauaugcagugggauuuucggagacaauccacgcccuaaugauaaaacaggcaguugugguccaguaucgucuaauggagcaaauggaguaaaaggauuuucauucaaauacggcaaugguguuuggauagggagaacuaaaagcauuaguucaagaaacgguuuugagaugauuugggauccgaacggauggacugggacagacaauaacuucucaauaaagcaagauaucguaggaauaaaugaguggucaggauauagcgggaguuuuguucagcauccagaacuaacagggcuggauuguauaagaccuugcuucuggguugaacuaaucagagggcgacccaaagagaacacaaucuggacuagcgggagcagcauauccuuuugugguguaaacagugacacuguggguuggucuuggccagacggugcugaguugccauuuaccauugacaaguaa

SEQ ID NO: 51099 - RNA, 1410 nt, Artificial Sequence
  derived and/or modified CDS sequence (wt) from neuraminidase__InfluenzaA__ADK33644
augaauccaaaccaaaagauaauaaccauugguucggucuguaugacaauuggaauggcuaacuuaauauuacaaauuggaaacauaaucucaauauggauuagccacucaauucaacuugggaaucaaaaucagauugaaacaugcaaucaaagcgucauuacuuaugaaaacaacacuuggguaaaucagacauauguuaacaucagcaacaccaacuuugcugcuggacagucagugguuuccgugaaauuagcgggcaauuccucucucugcccuguuaguggaugggcuauauacaguaaagacaacaguauaagaaucgguuccaagggggauguguuugucauaagggaaccauucauaucaugcucccccuuggaaugcagaaccuucuucuugacucaaggggccuugcuaaaugacaaacauuccaauggaaccauuaaagacaggagcccauaucgaacccuaaugagcuguccuauuggugaaguucccucuccauacaacucaagauuugagucagucgcuuggucagcaagugcuugucaugauggcaucaauuggcuaacaauuggaauuucuggcucagacaauggggcaguggcuguguuaaaguacaacggcauaauaacagacacuaucaagaguuggagaaacaauauauugagaacacaagagucugaaugugcauguguaaaugguucuugcuuuacuguaaugaccgauggaccaagugauggacaggccucauacaagaucuucagaauagaaaagggaaagauagucaaaucagucgaaaugaaugccccuaauuaucacuaugaggaaugcuccuguuauccugauucuagugaaaucacaugugugugcagggauaacuggcauggcucgaaucgaccgugggugucuuucaaccagaaucuggaauaucagauaggauacauaugcagugggauuuucggagacaauccacgcccuaaugauaagacaggcaguugugguccaguaucgucuaauggagcaaauggaguaaaaggauuuucauucaaauacggcaaugguguuuggauagggagaacuaaaagcauuaguucaagaaacgguuuugagaugauuugggauccgaacggauggacugggacagacaauaacuucucaauaaagcaagauaucguaggaauaaaugaguggucaggauauagcgggaguuuuguucagcauccagaacuaacagggcuggauuguauaagaccuugcuucuggguugaacuaaucagagggcgacccaaagagaacacaaucuggacuagcgggagcagcauauccuuuugugguguaaacagugacacuguggguuggucuuggccagacggugcugaguugccauuuaccauugacaaguaa

SEQ ID NO: 51100 - RNA, 1410 nt, Artificial Sequence
  derived and/or modified CDS sequence (wt) from neuraminidase__InfluenzaA__ADK33654
augaauccaaaccaaaagauaauaaccauugguucggucuguaugacaauuggaauggcuaacuuaauauuacaaauuggaaacauaaucucaauauggauuagccacucaauucaacuugggaaucaaaaucagauugaaacaugcaaucaaagcgucauuacuuaugaaaacaacacuuggguaaaucagacauauguuaacaucagcaacaccaacuuugcugcuggacagucagugguuuccgugaaauuagcgggcaauuccucucucugcccuguuaguggaugggcuauauacaguaaagacaacaguauaagaaucgguuccaagggggauguguuugucauaagggaaccauucauaucaugcucccccuuggaaugcagaaccuucuucuugacucaaggggccuugcuaaaugacaaacauuccaauggaaccauuaaagacaggagcccauaucgaacccuaaugagcuguccuauuggugaaguucccucuccauacaacucaagauuugagucagucgcuuggucagcaagugcuugucaugauggcaucaauuggcuaacaauuggaauuucuggcccagacaauggggcaguggcuguguuaaaguacaacggcauaauaacagacacuaucaagaguuggagaaacaauauauugagaacacaagagucugaaugugcauguauaaaugguucuugcuuuacuguaaugaccgauggaccaagugauggacaggccucauacaagaucuucagaauagaaaagggaaagauagucaaaucagucgaaaugaaugccccuaauuaucacuaugaggaaugcuccuguuauccugauucuagugaaaucacaugugugugcagggauaacuggcauggcucgaaucgaccgugggugucuuucaaccagaaucuggaauaucagauaggauacauaugcagugggauuuucggagacaauccacgcccuaaugauaagacaggcaguugugguccaguaucgucuaauggagcaaauggaguaaaaggauuuucauucaaauacggcaaugguguuuggauagggagaacuaaaagcauuaguucaagaaacgguuuugagaugauuugggauccgaacggauggacugggacagacaauaacuucucaauaaagcaagauaucguaggaauaaaugaauggucaggauauagcgggaguuuuguucagcauccagaacuaacagggcuggauuguauaagaccuugcuucuggguugaacuaaucagagggcgacccaaagagaacacaauuuggacuagcgggagcagcauauccuuuugugguguaaacagugacacuguggguuggucuuggccagacggugcugaguugccauuuaccauugacaaguaa

SEQ ID NO: 51101 - RNA, 1410 nt, Artificial Sequence; identical to SEQ ID NO: 51100
  derived and/or modified CDS sequence (wt) from neuraminidase__InfluenzaA__ADK33664

SEQ ID NO: 51102 - RNA, 1410 nt, Artificial Sequence; identical to SEQ ID NO: 48750
  derived and/or modified CDS sequence (wt) from neuraminidase__InfluenzaA__ADK33674

SEQ ID NO: 51103 - RNA, 1410 nt, Artificial Sequence
  derived and/or modified CDS sequence (wt) from neuraminidase__InfluenzaA__ADK33684
augaauccaaaccaaaagauaauaaccauugguucggucuguaugacaauuggaauggcuaacuuaauauuacaaauuggaaacauaaucucaauauggauuagccacucaauucaacuugggaaucaaaaucagauugaaacaugcaaucaaagcgucauuacuuaugaaaacaacacuuggguaaaucagacauauguuaacaucagcaacaccaauuuugcugcuggacagucagugguuuccgugaaauuagcgggcaauuccucucucugcccuguuaguggaugggcuauauacaguaaagacaacaguauaagaaucgguuccaagggggauguguuugucauaagggaaccauucauaucaugcucccccuuggaaugcagaaccuucuucuugacucaaggggccuugcuaaaugacaaacauuccaauggaaccauuaaagacaggagcccauaucgaacccuaaugagcuguccuauuggugaaguucccucuccauacaacucaagauuugagucagucgcuuggucagcaagugcuugucaugacggcaucaauuggcuaacaauuggaauuucuggcccagacaauggggcaguggcuguguuaaaguacaacggcauaauaacagacacuaucaagaguuggagaaacaauauauugagaacacaagagucugaaugugcauguguaaaugguucuugcuuuacuguaaugaccgauggaccaagugauggacaggccucauacaagaucuucagaauagaaaagggaaagauagucaaaucagucgaaaugaaugccccuaauuaucacuaugaggaaugcuccuguuauccugauucuagugaaaucacaugugugugcagggauaacuggcauggcucgaaucgaccgugggugucuuucaaccagaaucuggaauaucagauaggauacauaugcagugggauuuucggagacaauccacgcccuaaugauaagacaggcaguugugguccaguaucgucuaauggagcaaauggaguaaaaggauuuucauucaaauacggcaaugguguuuggauagggagaacuaaaagcauuaguucaagaaacgguuuugagaugauuugggauccgaacggauggacugggacagacaauaacuucucaauaaagcaagauaucguaggaauaaaugaguggucaggauauagcggaaguuuuguucagcauccagaacuaacagggcuggauuguauaagaccuugcuucuggguugaacuaaucagagggcgacccaaagagaacacaaucuggacuagcgggagcagcauauccuuuugugguguaaacagugacacuguggguuggucuuggccagacggugcugaguugccauuuaccauugacaaguaa

SEQ ID NO: 51104 - RNA, 1410 nt, Artificial Sequence; identical to SEQ ID NO: 50176
  derived and/or modified CDS sequence (wt) from neuraminidase__InfluenzaA__ADK33694

SEQ ID NO: 51105 - RNA, 1410 nt, Artificial Sequence; identical to SEQ ID NO: 49794
  derived and/or modified CDS sequence (wt) from neuraminidase__InfluenzaA__ADK33704

SEQ ID NO: 51106 - RNA, 1410 nt, Artificial Sequence; identical to SEQ ID NO: 50305
  derived and/or modified CDS sequence (wt) from neuraminidase__InfluenzaA__ADK33714

SEQ ID NO: 51107 - RNA, 1410 nt, Artificial Sequence
  derived and/or modified CDS sequence (wt) from neuraminidase__InfluenzaA__ADK33744
augaauccaaaccaaaagauaauaaccauugguucggucuguaugacaauuggaauggcuaacuuaauauuacaaauuggaaacauaaucucaauauggauuagccacucaauucaacuugggaaucaaaaucagauugaaacaugcaaucaaagcgucauuacuuaugaaaacaacacuuggguaaaucagacauauguuaacaucagcaacaccaacuuugcugcuggacagucagugguuuccgugaaauuagcgggcaauuccucucucugcccuguuaguggaugggcuauauauaguaaagacaacaguauaagaaucgguuccaagggggauguguuugucauaagggaaccauucauaucaugcucccccuuggaaugcagaaccuucuucuugacucaaggggccuugcuaaaugacaaacauuccaauggaaccauuaaagacaggagcccauaucgaacccuaaugagcuguccuauuggugaaguucccucuccauacaacucaagauuugagucagucgcuuggucagcaagugcuugucaugauggcaucaauuggcuaacaauuggaauuucuggcccagacaauggggcaguggcuguguuaaaguacaacggcauaauaacagacacuaucaagaguuggagaaacaauauauugagaacacaagagucugaaugugcauguguaaaugguucuugcuuuacuguaaugaccgauggaccaagugauggacaggccucauacaagaucuucagaauagaaaagggaaagauagucaaaucagucgaaaugaaugccccuaauuaucacuaugaggaaugcuccuguuauccugauucuagugaaaucacaugugugugcagggauaacuggcauggcucgaaucgaccgugggugucuuucaaccagaaucuggaauaucagauaggauacauaugcagugggauuuucggagacaauccacgcccuaaugauaagacaggcaguugugguccaguaucgucuaauggagcaaauggaguaaaaggauuuucauucaaauacggcaaugguguuuggauagggagaacuaaaagcauuaguucaagaaacgguuuugagaugauuugggauccgaacggauggacugggacagacaauaacuucucaauaaagcaagauaucguaggaauaaaugaguggucaggauauagcgggaguuuuguccagcauccagaacuaacagggcuggauuguauaagaccuugcuucuggguugaacuaaucagagggcgacccaaagagaacacaaucuggacuagcgggagcagcauauccuuuugugguguaaacagugacacuguggguuggucuuggccagacggugcugaguugccauuuaccauugacaaguaa

SEQ ID NO: 51108 - RNA, 1410 nt, Artificial Sequence
  derived and/or modified CDS sequence (wt) from neuraminidase__InfluenzaA__ADK33754
augaauccaaaccaaaagauaauaaccauugguucggucuguaugacaauuggaauggcuaacuucauacuacaaauuggaaacauaaucucaauauggauuagccacucaauucaacuugggaaucaaaaucagauugaaacaugcaaucaaagcgucauuacuuaugaaaacaacacuuggguaaaucagacauauguuaacaucagcaacaccaacuuugcugcuggacagucagugguuuccgugaaauuagcgggcaauuccucucucugcccuguuaguggaugggcuauauacaguaaagacaacaguauaagaaucgguuccaagggggauguguuugucauaagggaaccauucauaucaugcucccccuuggaaugcagaaccuucuucuugacucaaggggccuugcuaaaugacaaacauuccaauggaaccauuaaagacaggagcccauaucgaacccuaaugagcuguccuauuggugaaguucccucuccauacaacucaagauuugagucagucgcuuggucagcaagugcuugucaugauggcaucaauuggcuaacaauuggaauuucuggcccagacaauggggcaguggcuguguuaaaguacaacggcauaauaacagacacuaucaagaguuggagaaacaauauauugagaacacaagagucugaaugugcauguguaaaugguucuugcuuuacuguaaugaccgauggaccaagugauggacaggccucauacaagaucuucagaauagaaaagggaaagauagucaaaucagucgaaaugaaugccccuaauuaucacuaugaggaaugcuccuguuauccugauucuagugaaaucacaugugugugcagggauaacuggcauggcucgaaucgaccgugggugucuuucaaccagaaucuggaauaucagauaggauacauaugcagugggauuuucggagacaauccacgcccuaaugauaagacaggcaguugugguccaguaucgucuaauggagcaaauggaguaaaaggauuuucauucaaauacggcaaugguguuuggauagggagaacuaaaagcauuaguucaagaaacgguuuugagaugauuugggauccgaacggauggacugggacagacaacaacuucucaauaaagcaagauaucguaggaauaaaugaguggucaggauauagcgggaguuuuguccagcauccagaacuaacagggcuggauuguauaagaccuugcuucuggguugaacuaaucagagggcgacccaaagagaacacaaucuggacuagcgggagcagcauauccuuuugugguguaaacagugacacuguggguuggucuuggccagacggugcugaguugccauuuaccauugacaaguaa

SEQ ID NO: 51109 - RNA, 1410 nt, Artificial Sequence
  derived and/or modified CDS sequence (wt) from neuraminidase__InfluenzaA__ADK33764
augaauccaaaccaaaagauaauaaccauugguucggucuguaugacaauuggaauggcuaacuucauacuacaaauuggaaacauaaucucaauauggauuagccacucaauucaacuugggaaucaaaaucagauugaaacaugcaaucaaagcgucauuacuuaugaaaacaacacuuggguaaaucagacauauguuaacaucagcaacaccaacuuugcugcuggacagucagugguuuccgugaaauuagcgggcaauuccucucucugcccuguuaguggaugggcuauauacaguaaagacaacaguauaagaaucgguuccaagggggauguguuugucauaagggaaccauucauaucaugcucccccuuggaaugcagaaccuucuucuugacucaaggggccuugcuaaaugacaaacauuccaauggaaccauuaaagacaggagcccauaucgaacccuaaugagcuguccuauuggugaaguucccucuccauacaacucaagauuugagucagucgcuuggucagcaagugcuugucaugauggcaucaauuggcuaacaauuggaauuucuggcccagacaauggggcaguggcuguguuaaaguacaacggcauaauaacagacacuaucaagaguuggagaaacaauauauugagaacacaagagucugaaugugcauguguaaaugguucuugcuuuacuguaaugaccgauggaccaagugauggacaggccucauacaagaucuucagaauagaaaagggaaagauagucaaaucagucgaaaugaaugccccuaauuaucacuaugaggaaugcuccuguuauccugauucuagugaaaucacaugugugugcagggauaacuggcauggcucgaaucgaccgugggugucuuucaaccagaaucuggaauaucagaugggauacauaugcagugggauuuucggagacaauccacgcccuaaugauaagacaggcaguugugguccaguaucgucuaauggagcaaauggaguaaaaggauuuucauucaaauacggcaaugguguuuggauagggagaacuaaaagcauuaguucaagaaacgguuuugagaugauuugggauccgaacggauggacugggacagacaacaacuucucaauaaagcaagauaucguaggaauaaaugaguggucaggauauagcgggaguuuuguccagcauccagaacuaacagggcuggauuguauaagaccuugcuucuggguugaacuaaucagagggcgacccaaagagaacacaaucuggacuagcgggagcagcauauccuuuugugguguaaacagugacacuguggguuggucuuggccagacggugcugaguugccauuuaccauugacaaguaa

SEQ ID NO: 51110 - RNA, 1410 nt, Artificial Sequence
  derived and/or modified CDS sequence (wt) from neuraminidase__InfluenzaA__ADK33774
augaauccaaaccaaaagauaauaaccauugguucggucuguaugacaauuggaauggcuaacuuaauauuacaaauuggaaacauaaucucaauauggauuagccacucaauucaacuugggaaucaaaaucagauugaaacaugcaaucaaagcgucauuacuuaugaaaacaacacuuggguaaaucagacauauguuaacaucagcaacaccaacuuugcugcuggacagucagugguuuccgugaaauuagugggcaauuccucucucugcccuguuaguggaugggcuauauacaguaaagacaacaguauaagaaucgguuccaagggggauguguuugucauaagggaaccauucauaucaugcucccccuuggaaugcagaaccuucuucuugacucaaggggccuugcuaaaugacaaacauuccaauggaaccauuaaagacaggagcccauaucgaacccuaaugagcuguccuauuggugaaguucccucuccauacaacucaagauuugagucagucgcuuggucagcaagugcuugucaugauggcaucaauuggcuaacaauuggaauuucuggcccagacaauggggcaguggcuguguuaaaguacaacggcauaauaacagacacuaucaagaguuggagaaacaauauauugagaacacaagagucugaaugugcauguguaaaugguucuugcuuuacugugaugaccgauggaccaagugauggacaggccucauacaagaucuucagaauagaaaagggaaagauagucaaaucagucgaaaugaaugccccuaauuaucacuaugaggaaugcuccuguuauccugauucuagugaaaucacaugugugugcagggauaacuggcauggcucgaaucgaccguggguaucuuucaaccagaaucuggaauaucagaugggauacauaugcagugggauuuucggagacaauccacgcccuaaugauaagacaggcaguugugguccaguaucgucuaauggagcaaauggaguaaaaggauuuucauucaaauacggcaaugguguuuggauagggagaacuaaaagcauuaguucaagaaacgguuuugagaugauuugggauccgaacggauggacugggacagacaauaacuucucaauaaagcaagauaucguaggaauaaaugaguggucaggauauagcgggaguuuuguucagcauccagaacuaacagggcuggauuguauaagaccuugcuucuggguugaacuaaucagagggcgacccaaagagaacacaaucuggacuagcgggagcagcauauccuuuugugguguaaacagugacacuguggguuggucuuggccggacggugcugaguugccauuuaccauugacaaguaa

SEQ ID NO: 51111 - RNA, 1410 nt, Artificial Sequence
  derived and/or modified CDS sequence (wt) from neuraminidase__InfluenzaA__ADK33784
augaauccaaaccaaaagauaauaaccauugguucggucuguaugacaauuggaauggcuaacuuaauauuacaaauuggaaacauaaucucaauauggauuagccacucaauucaacuugggaaucaaaaucagauugaaacaugcaaucaaagcgucauuacuuaugaaaacaacacuuggguaaaucagacauauguuaacaucagcaacaccaacuuugcugcuggacagucagugguuuccgugaaauuagcgggcaauuccucucucugcccuguuaauggaugggcuauauacaguaaagacaacaguauaagaaucgguuccaagggggauguguuugucauaagggaaccauucauaucaugcucccccuuggaaugcagaaccuucuucuugacucaaggggccuugcuaaaugacaaacauuccaauggaaccauuaaagacaggagcccauaucgaacccuaaugagcuguccuauuggugaaguucccucuccauacaacucaagauuugagucagucgcuuggucagcaagugcuugucaugauggcaucaauuggcuaacaauuggaauuucuggcccagacaauggggcaguggcuguguuaaaguacaacggcauaauaacagacacuaucaagaguuggagaaacaauauauugagaacacaagagucugaaugugcauguguaaaugguucuugcuuuacuguaaugaccgauggaccaagugauggacaggccucauacaagaucuucagaauagaaaagggaaagauagucaaaucagucgaaaugaaugccccuaauuaucacuaugaggaaugcuccuguuauccugauucuagugaaaucacaugugugugcagggauaacuggcauggcucgaaucgaccgugggugucuuucaaccagaaucuggaauaucagauaggauacauaugcagugggauuuucggagacaauccacgcccuaaugauaagacaggcaguugugguccaguaucgucuaauggagcaaauggaguaaaaggauuuucauucaaauacggcaaugguguuuggauagggagaacuaaaagcauuaguucaagaaacgguuuugagaugauuugggauccgaacggauggacugggacagacaauaacuucucaauaaagcaagauaucguaggaauaaaugaauggucaggauauagcgggaguuuuguucagcauccagaacuaacagggcuggauuguauaagaccuugcuucuggguugaacuaaucagagggcgacccaaagagaacacaaucuggacuagcgggagcagcauauccuuuugugguguaaacagugacacuguggguuggucuuggccagacggugcugaguugccauuuaccauugacaaguaa

SEQ ID NO: 51112 - RNA, 1410 nt, Artificial Sequence
  derived and/or modified CDS sequence (wt) from neuraminidase__InfluenzaA__ADK33794
augaauccaaaccaaaagauaauaaccauugguucggucuguaugacaauuggaauggcuaacuuaauauuacaaauuggaaacauaaucucaauauggauuagccacucaauucaacuugggaaucaaaaucagauugaaacaugcaaucaaagcgucauuacuuaugaaaacaacacuuggguaaaucagacauauguuaacaucagcaacaccaacuuugcugcuggacagucagugguuuccgugaaauuagcgggcaauuccucucucugcccuguuaguggaugggcuauauacaguaaagacaacaguauaagaaucgguuccaagggggauguguuugucauaagggaaccauucauaucaugcucccccuuggaaugcagaaccuucuucuugacucaaggggccuugcuaaaugacaaacauuccaauggaaccauuaaagacaggagcccauaucgaacccuaaugagcuguccuauuggugaaguucccucuccauacaacucaagauuugagucagucgcuuggucagcaagugcuugucaugauggcaucaauuggcuaacaauuggaauuucuggcccagacaauggggcaguggcuguguuaaaguacaacggcauaauaacagacacuaucaagaguuggagaaacaauauauugagaacacaagagucugaaugugcauguguaaaugguucuugcuuuacuguaaugaccgauggaccaagugauggacaggccucauacaagaucuucagaauagaaaagggaaagauagucaaaucagucgaaaugaaugccccuaauuaucacuaugaggaaugcuccuguuauccugauucuagugaaaucacaugugugugcagggauaacuggcauggcucgaaucgaccgugggugucuuucaaccagaaucuggaauaucagauaggauacauaugcagugggauuuucggagacaauccacgcccuaaugauaaaacaggcaguugugguccaguaucgucuaauggagcaaauggaguaaaaggauuuucauucaaauacggcaauggaguuuggauagggagaacuaaaagcauuaguucaagaaacgguuuugagaugauuugggauccgaacggauggacugggacagacaauaacuucucaauaaagcaagauaucguaggaauaaaugaguggucaggauauagcgggaguuuuguccagcauccagaacuaacagggcuggauuguauaagaccuugcuucuggguugaacuaaucagagggcgacccaaagagaacacaaucuggacuagcgggagcagcauauccuuuugugguguaaacagugacacuguggguuggucuuggccagacggugcugaguugccauuuaccauugacaaauaa

SEQ ID NO: 51113 - RNA, 1410 nt, Artificial Sequence; identical to SEQ ID NO: 49794
  derived and/or modified CDS sequence (wt) from neuraminidase__InfluenzaA__ADK33804

SEQ ID NO: 51114 - RNA, 1410 nt, Artificial Sequence
  derived and/or modified CDS sequence (wt) from neuraminidase__InfluenzaA__ADK33814
augaauccaaaccaaaagauaauaaccauugguucggucuguaugacaauuggaauggcuaacuuaauauuacaaauuggaaacauaaucucaauauggauuagccacucaauucaacuugggaaucaaaaucagauugaaacaugcaaucaaagcgucauuacuuaugaaaacaacacuuggguaaauaagacauauguuaacaucagcaacaccaacuuugcugcuggacagucagugguuuccgugaaauuagcgggcaauuccucucucugcccuguuaguggaugggcuauauacaguaaagacaacaguauaagaaucgguuccaagggggauguguuugucauaagggaaccauucauaucaugcucccccuuggaaugcagaaccuucuucuugacucaaggggccuugcuaaaugacaaacauuccaauggaaccauuaaagacaggagcccauaucgaacccuaaugagcuguccuauuggugaaguucccucuccauacaacucaagauuugagucagucgcuuggucagcaagugcuugucaugauggcaucaauuggcuaacaauuggaauuucuggcccagacaauggggcaguggcuguguuaaaguacaacggcauaauaacagacacuaucaagaguuggagaaacaauauauugagaacacaagagucugaaugugcauguguaaaugguucuugcuuuacuguaaugaccgauggaccaagugauggacaggccucauacaagaucuucagaauagaaaagggaaagauagucaaaucagucgaaaugaaugccccuaauuaucacuaugaggaaugcuccuguuauccugauucuagugaaaucacaugugugugcagggauaacuggcauggcucgaaucgaccguggguaucuuucaaccagaaucuggaauaucagaugggauacauaugcagugggauuuucggagacaauccacgcccuaaugauaagacaggcaguugugguccaguaucgucuaauggagcaaauggaguaaaaggauuuucauucaaauacggcaaugguguuuggauagggagaacuaaaagcauuaguucaagaaacgguuuugagaugauuugggauccgaacggauggacugggacagacaauaacuucucaauaaagcaagauaucguaggaauaaaugaguggucaggauauagcgggaguuuuguucagcauccagaacuaacagggcuggauuguauaagaccuugcuucuggguugaacuaaucagagggcgacccaaagagaacacaaucuggacuagcgggagcagcauauccuuuugugguguaaacagugacacuguggguuggucuuggccggacggugcugaguugccauuuaccauugacaaguaa

SEQ ID NO: 51115 - RNA, 1410 nt, Artificial Sequence
  derived and/or modified CDS sequence (wt) from neuraminidase__InfluenzaA__ADK33824
augaauccaaaccaaaagauaauaaccauugguucagucuguaugacaauuggaauggcuaacuuaauauuacaaauuggaaacauaaucucaauauggauuagccacucaauucaacuugggaaucaaaaucagauugaaacaugcaaucaaagcgucauuacuuaugaaaacaacacuuggguaaaucagacauauauuaacaucagcaacaccaacuuugcugcuggacagucagugguuuccgugaaauuagcgggcaauuccucucucugcccuguuaguggaugggcuauauacaguaaagacaacaguauaagaaucgguuccaagggggauguguuugucauaagggaaccauucauaucaugcucccccuuggaaugcagaaccuucuucuugacucaaggggccuugcuaaaugacaaacauuccaauggaaccauuaaagacaggagcccauaucgaacccuaaugagcuguccuauuggugaaguucccucuccauacaacucaagauuugagucagucgcuuggucagcaagugcuugucaugauggcaucaauuggcuaacaauuggaauuucuggcccagacaauggggcaguggcuguguuaaaguacaacggcauaauaacagacacuaucaagaguuggagaaacaauauauugagaacacaagagucugaaugugcauguguaaaugguucuugcuuuacuguaaugaccgauggaccaagugauggacaggccucauacaagaucuucagaauagaaaagggaaagauagucaaaucagucgaaaugaaugccccuaauuaucacuaugaggaaugcuccuguuauccugauucuagugaaaucacaugugugugcagggauaacuggcauggcucgaaucgaccgugggugucuuucaaccagaaucuggaauaucagauaggauacauaugcagugggauuuucggagacaauccacgcccuaaugauaaaacaggcaguugugguccaguaucgucuaauggagcaaauggaguaaaaggauuuucauucaaauacggcaaugguguuuggauagggagaacuaaaagcauuaguucaagaaacgguuuugagaugauuugggauccgaacggauggacugggacagacaauaacuucucaauaaagcaagauaucguaggaauaaaugaguggucaggauauagcgggaguuuuguccagcauccagaacuaacagggcuggauuguauaagaccuugcuucuggguugaacuaaucagagggcgacccaaagagaacacaaucuggacuagcgggagcagcauauccuuuugugguguaaacagugacacuguggguuggucuuggccagacggugcugaguugccauuuaccauugacaaguaa

SEQ ID NO: 51116 - RNA, 1410 nt, Artificial Sequence; identical to SEQ ID NO: 50844
  derived and/or modified CDS sequence (wt) from neuraminidase__InfluenzaA__ADK33834

SEQ ID NO: 51117 - RNA, 1410 nt, Artificial Sequence
  derived and/or modified CDS sequence (wt) from neuraminidase__InfluenzaA__ADK33844
augaauccaaaccaaaagauaauaaccauugguucggucuguaugacaauuggaauggcuaacuuaauauuacaaauuggaaacauaaucucaauauggauuagccacucaauucaacuugggaaucaaaaucagauugaaacaugcaaucaaagcgucauuacuuaugaaaacaacacuuggguaaaucagacauauguuaacaucagcaacaccaacuuugcugcuggacagucagugguuuccgcgaaauuagcgggcaauuccccucucugcccuguuaguggaugggcuauauacaguaaagacaacaguauaagaaucgguuccaagggggauguguuugucauaagggaaccauucauaucaugcucccccuuggaaugcagaaccuucuucuugacucaaggggccuugcuaaaugacaaacauuccaauggaaccauuaaagacaggagcccauaucgaacccuaaugagcuguccuauuggugaaguucccucuccauacaacucaagauuugagucagucgcuuggucagcaagugcuugucaugauggcaucaauuggcuaacaauuggaauuucuggcccagacaauggggcaguggcuguguuaaaguacaacggcauaauaacagacacuaucaagaguuggagaaacaauauauugagaacacaagagucugaaugugcauguguaaaugguucuugcuuuacuguaaugaccgauggaccaagugauggacaggccucauacaagaucuucagaauagaaaagggaaagauagucaaaucagucgaaaugaaugccccuaauuaucacuaugaggaaugcuccuguuauccugauucuagugaaaucacaugugugugcagggauaacuggcauggcucgaaucgaccguggguaucuuucaaccagaaucuggaauaucagauaggauacauaugcagugggauuuucggagacaauccacgcccuaaugauaagacaggcaguugugguccaguaucgucuaauggagcaaauggaguaaaaggauuuucauucaaauacggcaaugguguuuggauagggagaacuaaaagcauuaguucaagaaacgguuuugagaugauuugggauccgaacggauggacugggacagacaauaacuucucaauaaagcaagauaucguaggaauaaaugaguggucaggauauagcgggaguuuuguucagcauccagaacuaacagggcuggauuguauaagaccuugcuucuggguugaacuaaucagagggcgacccaaagagaacacaaucuggacuagcgggagcagcauauccuuuugugguguaaacagugacacuguggguuggucuuggccggacggugcugaguugccauuuaccauugacaaguaa

SEQ ID NO: 51118 - RNA, 1410 nt, Artificial Sequence
  derived and/or modified CDS sequence (wt) from neuraminidase__InfluenzaA__ADK33854
augaauccaaaccaaaagauaauaaccauugguucggucuguaugacaauuggaauggcuaacuuaauauuacaaauuggaaacauaaucucaauauggauuagccacucaauucaacuugggaaucaaaaucagauugaaacaugcaaucaaagcgucauuacuuaugaaaacaacacuuggguaaaucagacauauguuaacaucagcaacaccaacuuugcugcuggacagucagugguuuccgugaaauuagcgggcaauuccucucucugcccuguuaguggaugggcuauauacaguaaagacaacaguauaagaaucgguuccaagggggauguguuugucauaagggaaccauucauaucaugcucccccuuggaaugcagaaccuucuucuugacucaaggggccuugcuaaaugacaaacauuccaauggaaccauuaaagacaggagcccauaucgaacccuaaugagcuguccuauuggugaaguucccucuccauacaacucaagauuugagucagucgcuuggucagcaagugcuugucaugauggcaucaauuggcuaacaauuggaauuucuggcccagacaauggggcaguggcuguguuaaaguacaacggcauaauaacagacacuaucaagaguuggagaaacaauauauugagaacacaagagucugaaugugcauguguaaaugguucuugcuuuacuguaaugaccgauggaccaagugauggacaggccucauacaagaucuucagaauagaaaagggaaagauagucaaaucagucgaaaugaaugccccuaauuaucacuaugaggaaugcuccuguuauccugauucuagugaaaucacaugugugugcagggauaacuggcauggcucgaaucgaccguggguaucuuucaaccagaaucuggaauaucagauaggauacauaugcagugggauuuucggagacaauccacgcccuaaugauaagacaggcaguugugguccaguaucgucuaauggagcaaauggaguaaaaggauuuucauucaaauacggcaaugguguuuggauagggagaacuaaaagcauuaguucaagaaacgguuuugagaugauuugggauccgaacggauggacugggacagacaauaaauucucaauaaagcaagauaucguaggaauaaaugaguggucaggauauagcgggaguuuuguucagcauccagaacuaacagggcuggauuguauaagaccuugcuucuggguugaacuaaucagagggcgacccaaagagaacacaaucuggacuagcgggagcagcauauccuuuugugguguaaacagugacacuguggguuggucuuggccagacggugcugaguugccauuuaccauugacaaguaa

SEQ ID NO: 51119 - RNA, 1410 nt, Artificial Sequence
  derived and/or modified CDS sequence (wt) from neuraminidase__InfluenzaA__ADK33864
augaauccaaaccaaaagauaauaaccauugguucggucuguaugacaauuggaauggcuaacuuaauauuacaaauuggaaacauaaucucaauauggauuagccacucaauucaacuugggaaucaaaaucagauugaaacaugcaaucaaagcgucauuacuuaugaaaacaacacuuggguaaaucagacauauguuaacaucagcaacaccaacuuugcugcugaacagucagugguuuccgugaaauuagcgggcaauuccucucucugcccuguuaguggaugggcuauauacaguaaagacaacaguauaagaaucgguuccaagggggauguguuugucauaagggaaccauucauaucaugcucccccuuggaaugcagaaccuucuucuugacucaaggggccuugcuaaaugacaaacauuccaauggaaccauuaaagacaggagcccauaucgaacccuaaugagcuguccuauuggugaaguucccucuccauacaacucaagauuugagucagucgcuuggucagcaagugcuugucaugauggcaucaauuggcuaacaauuggaauuucuggcccagacaauggggcaguggcuguguuaaaguacaacggcauaauaacagacacuaucaagaguuggagaaacaauauauugagaacacaagagucugaaugugcauguguaaaugguucuugcuuuacuguaaugaccgauggaccaagugauggacaggccucauacaagaucuucagaauagaaaagggaaagauagucaaaucagucgaaaugaaugccccuaauuaucacuaugaggaaugcuccuguuauccugauucuagugaaaucacaugugugugcagggauaacuggcauggcucgaaucgaccgugggugucuuucaaccagaaucuggaauaucagauaggauacauaugcagugggauuuucggagacaauccacgcccuaaugauaagacaggcaguugugguccaguaucgucuaauggagcaaauggaguaaaaggauuuucauucaaauacggcaaugguguuuggauaggaagaacuaaaagcauuaguucaagaaacgguuuugagaugauuugggauccgaacggauggacugggacagacaauaacuucucaauaaagcaagauaucguaggaauaaaugaguggucaggauauagcgggaguuuuguucagcauccagaacuaacagggcuggauuguauaagaccuugcuucuggguugaacugaucagagggcgacccaaagagaacacaaucuggacuagcgggagcagcauauccuuuugugguguaaacagugacacuguggguuggucuuggccagacggugcugaguugccauuuaccauugacaaguaa

SEQ ID NO: 51120 - RNA, 1410 nt, Artificial Sequence
  derived and/or modified CDS sequence (wt) from neuraminidase__InfluenzaA__ADK33874
augaauccaaaccaaaagauaauaaccauugguucggucuguaugacaauuggaauggcuaacuuaauauuacaaauuggaaacauaaucucaauauggauuagccacucaauucaacuugggaaucaaaaucagauugaaacaugcaaucaaagcgucauuacuuaugaaaacaacacuuggguaaaucagacauauguuaacaucagcaacaccaacuuugcugcuggacaaucagugguuuccgugaaauuagcgggcaauuccucucucugcccuguuaguggaugggcuauauacaguaaagacaacaguauaagaaucgguuccaagggggacguguuugucauaagggaaccauucauaucaugcucccccuuggaaugcagaaccuucuucuugacucaaggggccuugcuaaaugacaaacauuccaauggaaccauuaaagacaggagcccauaucgaacccuaaugagcuguccuauuggugaaguucccucuccauacaacucaagauuugagucagucgcuuggucagcaagugcuugucaugauggcaucaauuggcuaacaauuggaauuucuggcccagacaauggggcaguggcuguguuaaaguacaacggcauaauaacagacacuaucaagaguuggagaaacaauauauugagaacacaagagucugaaugugcauguguaaaugguucuugcuuuacuguaaugaccgauggaccaagugauggacaggccucauacaagaucuucagaauagaaaagggaaagauagucaaaucagucgaaaugaaugccccuaauuaucacuaugaggaaugcuccuguuauccugauucuagugaaaucacauguguaugcagggauaacuggcauggcucgaaucgaccgugggugucuuucaaccagaaucuggaauaucagauaggauacuuaugcagugggauuuucggagacaauccacgcccuaaugauaagacaggcaguugugguccaguaucgucuaauggagcaaauggaguaaaaggauuuucauucaaauacggcaaugguguuuggauagggagaacuaaaagcauuaguucaagaaacgguuuugagaugauuugggauccgaacggauggacugggacagacaauaacuucucaauaaagcaagauaucguaggaauaaaugaguggucaggauauagcgggaguuuuguucagcauccagaacuaacagggcuggauuguauaagaccuugcuucuggguugaacuaaucagagggcgacccaaagagaacacaaucuggacuagcgggagcagcauauccuuuugugguguaaacagugacacuguggguuggucuuggccagacggugcugaguugccauuuaccauugacaaguaa

SEQ ID NO: 51121 - RNA, 1410 nt, Artificial Sequence
  derived and/or modified CDS sequence (wt) from neuraminidase__InfluenzaA__ADK33884
augaauccaaaccaaaagauaauaaccauugguucggucuguaugacaauuggaauggcuaacuuaauauuacaaauuggaaacauaaucucaauauggauuagucacucaauucaacuugggaaucaaaaucagauugaaacaugcaaucaaagcgucauuacuuaugaaaacaacacuuggguaaaucagacauauguuaacaucagcaacaccaacuuugcugcuggacagucagugguuuccgugaaauuagcgggcaauuccucucucugccccguuaguggaugggcuauauacaguaaagacaacaguauaagaaucgguuccaagggggauguguuugucauaagggaaccauucauaucaugcucccccuuggaaugcagaaccuucuucuugacucaaggggccuugcuaaaugacaaacauuccaauggaaccauuaaagacaggagcccauaucgaacccuaaugagcuguccuauuggugaaguucccucuccauacaacucaagauuugagucagucgcuuggucagcaagugcuugucaugauggcaucaauuggcuaacaauuggaauuucuggcccagacaauggggcaguggcuguguuaaaguacaacggcauaauaacagacacuaucaagaguuggagaaacaauauauugagaacacaagagucugaaugugcauguguaaaugguucuugcuucacuguaaugaccgauggaccaagugauggacaggccucauacaagaucuucagaauagaaaagggaaagauagucaaaucagucgaaaugaaugccccuaauuaucacuaugaggaaugcuccuguuauccugauucuagugaaaucacaugugugugcagggauaacuggcauggcucgaaucgaccguggguaucuuucaaccagaaucuggaauaucagauaggauacauaugcagugggauuuucggagacaauccacgcccuaaugauaagacaggcaguugugguccaguaucgucuaauggagcaaauggaguaaaaggauuuucauucaaauacggcaaugguguuuggauagggagaacuaaaagcauuaguucaagaaacgguuuugagaugauuugggauccgaacggauggacugggacagacaauaacuucucaauaaagcaagauaucguaggaauaaaugaguggucaggauauagcgggaguuuuguucagcauccagaacuaacagggcuggauuguauaagaccuugcuucuggguugaacuaaucagagggcgacccaaagagaacacaaucuggacuagcgggagcagcauauccuuuugugguguaaacagugacacuguggguuggucuuggccggacggugcugaguugccauuuaccauugacaaguaa

SEQ ID NO: 51122 - RNA, 1410 nt, Artificial Sequence
  derived and/or modified CDS sequence (wt) from neuraminidase__InfluenzaA__ADK33894
augaauccaaaccaaaagauaauaaccauugguucggucuguaugacaauuggaauggcuaacuuaauauuacaaauuggaaacauaaucucaauauggauuagccacucaauucaacuugggaaucaaaaucagauugaaacaugcaaucaaagcgucauuacuuaugaaaacaacacuuggguaaaucaaacauauguuaacaucagcaacaccaacuuugcugcuggacagucagugguuuccgugaaauuagcgggcaauuccucucucugcccuguuaguggaugggcuauauacaguaaagacaacaguauaagaaucggcuccaagggggauguguuugucauaagggaaccauucauaucaugcucccccuuggaaugcagaaccuucuucuugacucaaggggccuugcuaaaugacaaacauuccaauggaaccauuaaagacaggagcccauaucgaacccuaaugagcuguccuauuggugaaguucccucuccauacaacucaagauuugagucagucgcuuggucagcaagugcuugucaugauggcaucaauuggcuaacaauuggaauuucuggcccagacaauggggcaguggcuguguuaaaguacaacggcauaauaacagacacuaucaagaguuggagaaacaauauauugagaacacaagagucugaaugugcauguguaaaugguucuugcuuuacuguaaugaccgauggaccaagugauggacaggccucguacaagaucuucagaauagaaaagggaaagauagucaaaucagucgaaaugaaugccccuaauuaucacuaugaggaaugcuccuguuauccugauucuagugaaaucacaugugugugcagggauaacuggcauggcucgaaucgaccguggguaucuuucaaccagaaucuggaauaucagauaggauacauaugcagugggauuuucggagacaauccacgcccuaaugauaagacaggcaguugugguccaguaucgucuaauggagcaaauggaguaaaaggauuuucauucaaauacggcaaugguguuuggauagggagaacuaaaagcauuaguucaagaaacgguuuugagaugauuugggauccgaacggauggacugggacagacaauaaauucucaauaaagcaagauauuguaggaauaaaugaguggucaggauauagcgggaguuuuguucagcauccagaacuaacagggcuggauuguauaagaccuugcuucuggguugaacuaaucagagggcgacccaaagagaacacaaucuggacuagcgggagcagcauauccuuuugugguguaaacagugacacuguggguuggucuuggccagacggugcugaguugccauuuaccauugacaaguaa

SEQ ID NO: 51123 - RNA, 1410 nt, Artificial Sequence; identical to SEQ ID NO: 51118
  derived and/or modified CDS sequence (wt) from neuraminidase__InfluenzaA__ADK33904

SEQ ID NO: 51124 - RNA, 1410 nt, Artificial Sequence; identical to SEQ ID NO: 50707
  derived and/or modified CDS sequence (wt) from neuraminidase__InfluenzaA__ADK33914

SEQ ID NO: 51125 - RNA, 1410 nt, Artificial Sequence
  derived and/or modified CDS sequence (wt) from neuraminidase__InfluenzaA__ADK33924
augaauccaaaccaaaagauaauaaccauugguucggucuguaugacaauuggaauggcuaacuuaauauuacaaauuggaaacauaaucucaauauggauuagccacucaauucaacuugggaaucaaaaucagauugaaacaugcaaucaaagcgucauuacuuaugaaaacaacacuuggguaaaucagacauauguuaacaucagcaacaccaacuuugcugcuggacagucagugguuuccgugaaauuagcgggcaauuccucucucugcccuguuaguggaugggcuauauacaguaaagacaacaguauaagaaucgguuccaagggggauguguuugucauaagggaaccauucauaucaugcucccccuuggaaugcagaaccuucuucuugacucaaggggccuugcuaaaugacaaacauuccaauggaaccauuaaagacaggagcccauaucgaacccuaaugagcuguccuauuggugaaguucccucuccauacaacucaagauuugagucagucgcuuggucagcaagugcuugucaugauggcaucaauuggcuaacaauuggaauuucuggcccagacaauggggcaguggcuguguuaaaguacaacggcauaauaacagacacuaucaagaguuggagaaacaauauauugagaacacaagagucugaaugugcauguguaaaugguucuugcuuuacuguaaugaccgauggaccaagugauggacaggccucauacaagaucuucagaauagaaaagggaaagauagucaaaucagucgaaaugaaugccccuaauuaucacuaugaggaaugcuccuguuauccugauucuagugaaaucacaugugugugcagggauaacuggcauggcucgaaucgaccguggguaucuuucaaccagaaucuggaauaucagauaggauacauaugcagugggauuuucggagacaauccacgcccuaaugauaagacaggcaguugugguccaguaucgucuaauggagcaaauggaguaaaaggauuuucauucaaauacggcaaugguguuuggauagggagaacuaaaagcauuaguucaagaaacgguuuugagaugauuugggauccgaacggauggacugggacagacaauaacuucucaauaaagcaagauaucguaggaauaaaugaguggucaggauauagcgggaguuuuguucagcauccagaacuaacagggcuggauuguauaagaccuugcuucuggguugaacuaaucagagggcgacccaaagagaacacaaucuggacuagcgggagcagcauauccuuuugugguguaaacaguaacacuguggguuggucuuggccggacggugcugaguugccauuuaccauugacaaguaa

SEQ ID NO: 51126 - RNA, 1410 nt, Artificial Sequence
  derived and/or modified CDS sequence (wt) from neuraminidase__InfluenzaA__ADK33934
augaauccaaaccaaaagauaauaaccauugguucggucuguaugacaauuggaauggcuaacuuaauauuacaaauuggaaacauaaucucaauauggauuagccacucaauucaacuugggaaucaaaaucagauugaaacaugcaaucaaagcgucauuacuuaugaaaacaacacuuggguaaaucagacauauguuaacaucagcaacaccaacuuugcugcuggacaaucagugguuuccgugaaauuagcgggcaauuccucucucugcccuguuaguggaugggcuauauacaguaaagacaacaguauaagaaucgguuccaagggggacguguuugucauaagggaaccauucauaucaugcucccccuuggaaugcagaaccuucuucuugacucaaggggccuugcuaaaugacaaacauuccaauggaaccauuaaagacaggagcccauaucgaacccuaaugagcuguccuauuggugaaguucccucuccauacaacucaagauuugagucagucgcuuggucagcaagugcuugucaugauggcaucaauuggcuaacaauuggaauuucuggcccagacaauggggcaguggcuguguuaaaguacaacggcauaauaacagacacuaucaagaguuggagaaacaauauauugagaacacaagagucugaaugugcauguguaaaugguucuugcuuuacuguaaugaccgauggaccaagugauggacaggccucauacaagaucuucagaauagaaaagggaaagauagucaaaucagucgaaaugaaugccccuaauuaucacuaugaggaaugcuccuguuauccugauucuagugaaaucacauguguaugcagggauaacuggcauggcucgaaucgaccgugggugucuuucaaccagaaucuggaauaucagauaggauacauaugcagugggauuuucggagacaauccacgcccuaaugauaagacaggcaguugugguccaguaucgucuaauggagcaaauggaguaaaaggauuuucauucaaauacggcaaugguguuuggauagggagaacuaaaagcauuaguucaagaaacgguuuugagaugauuugggauccgaacggauggacugggacagacaauaacuucucaauaaagcaagauaucguaggaauaaaugaguggucaggauauagcgggaguuuuguucagcauccagaacuaacagggcuggauuguauaagaccuugcuucuggguugaacuaaucagagggcgacccaaagagaacacaaucuggacuagugggagcagcauauccuuuugugguguaaacagugacacuguggguuggucuuggccagacggugcugaguugccauuuaccauugacaaguaa

SEQ ID NO: 51127 - RNA, 1410 nt, Artificial Sequence; identical to SEQ ID NO: 48947
  derived and/or modified CDS sequence (wt) from neuraminidase__InfluenzaA__ADK33944

SEQ ID NO: 51128 - RNA, 1410 nt, Artificial Sequence
  derived and/or modified CDS sequence (wt) from neuraminidase__InfluenzaA__ADK33954
augaauccaaaccaaaagauaauaaccauugguucggucuguaugacaauuggaauggcuaacuuaauauuacaaauuggaaacauaaucucaauauggauuagccacucaauucaacuugggaaucaaaaucagauugaaacaugcaaucaaagcgucauuacuuaugaaaacaacacuuggguaaaucagacauauguuaacaucagcaacaccaacuuugcugcuggacagucagugguuuccgugaaauuagcgggcaauuccucucucugcccuguuaguggaugggcuauauacaguaaagacaacaguauaagaaucgguuccaagggggauguguuugucauaagggaaccauucauaucaugcucccccuuggaaugcagaaccuucuucuugacucaaggggccuugcuaaaugacaaacauuccaauggaaccauuaaagacaggagcccauaucgaacccuaaugagcuguccuauuggugaaguucccucuccauacaacucaagauuugagucagucgcuuggucagcaagugcuugucaugauggcaucaauuggcuaacaauuggaauuucuggcccagacaauggggcaguggcuguguuaaaguacaacggcauaauaacagacacuaucaagaguuggagaaacaauauauugagaacacaagagucugaaugugcauguguaaaugguucuugcuuuacuguaaugaccgauggaccaagugauggacaggccucauauaagaucuucagaauagaaaagggaaagauagucaaaucagucgaaaugaaugccccuaauuaucacuaugaggaaugcuccuguuauccugauucuaguaaaaucacaugugugugcagggauaacuggcauggcucgaaucgaccgugggugucuuucaaccagaaucuggaauaucagauaggauacauaugcagugggauuuucggagacaauccacgcccuaaugauaagacaggcaguugugguccaguaucgucuaauggagcaaauggaguaaaaggauuuucauucaaauacggcaaugguguuuggauagggagaacuaaaagcauuaguucaagaaacgguuuugaaaugauuugggauccgaacggauggacugggacagacaauaacuucucaauaaagcaagauaucguaggaauaaaugaguggucaggauauagcgggaguuuuguccagcauccagaacuaacagggcuggauuguauaagaccaugcuucuggguugaacuaaucagagggcgacccaaagagaacacaaucuggacuagcgggagcagcauauccuuuugugguguaaacagugacacuguggguuggucuuggccagacggugcugaguugccauuuaccauugacaaguaa

SEQ ID NO: 51129 - RNA, 1410 nt, Artificial Sequence; identical to SEQ ID NO: 49794
  derived and/or modified CDS sequence (wt) from neuraminidase__InfluenzaA__ADK33964

SEQ ID NO: 51130 - RNA, 1410 nt, Artificial Sequence
  derived and/or modified CDS sequence (wt) from neuraminidase__InfluenzaA__ADK33974
augaauccaaaccaaaagauaauaaccauugguucggucuguaugacaauuggaauggcuaacuuaauauuacaaauuggaaacauaaucucaauauggauuagccacucaauucaacuugggaaucaaaaucagauugaaacaugcaaucaaagcgucauuacuuaugaaaacaacacuuggguaaaucagacauauguuaacaucagcaacaccaacuuugcugcuggacagucagugguuuccaugaaauuagcgggcaauuccucucucugcccuguuaguggaugggcuauauacaguaaagacaacaguauaagaaucgguuccaagggggauguguuugucauaagggaaccauucauaucaugcucccccuuggaaugcagaaccuucuucuugacucaaggggccuugcuaaaugacaaacauuccaauggaaccauuaaagacaggagcccauaucgaacccuaaugagcuguccuauuggugaaguucccucuccauacaacucaagauuugagucagucgcuuggucagcaagugcuugucaugauggcaucaauuggcuaacaauuggaauuucuggcccagacaauggggcaguggcuguguuaaaguacaacggcauaauaacagacacuaucaagaguuggagaaacaauauauugagaacacaagagucugaaugugcauguguaaaugguucuugcuucacuguaaugaccgauggaccaagugauggacaggccucauacaagaucuucagaauagaaaagggaaagauagucaaaucagucgaaaugaaugccccuaauuaucauuaugaggaaugcuccuguuauccugauucuagugaaaucacaugugugugcagggauaacuggcauggcucgaaucgaccguggguaucuuucaaccagaaucuggaauaucagauaggauacauaugcagugggauuuucggagacaauccacgcccuaaugauaagacaggcaguugugguccaguaucgucuaauggagcaaauggaguaaaaggauuuucauucaaauacggcaaugguguuuggauagggagaacuaaaagcauuaguucaagaaacgguuuugagaugauuugggauccgaacggauggacugggacagacaauaacuucucaauaaagcaagauaucguaggaauaaaugaguggucaggauauagcgggaguuuuguucagcauccagaacuaacagggcuggauuguauaagaccuugcuucuggguugaacuaaucagagggcgacccaaagagaacacaaucuggacuagcgggagcagcauauccuuuugugguguaaacagugacacuguggguuggucuuggccggacggugcugaguugccauuuaccauugacaaguaa

SEQ ID NO: 51131 - RNA, 1410 nt, Artificial Sequence; identical to SEQ ID NO: 48814
  derived and/or modified CDS sequence (wt) from neuraminidase__InfluenzaA__ADK33984

SEQ ID NO: 51132 - RNA, 1410 nt, Artificial Sequence
  derived and/or modified CDS sequence (wt) from neuraminidase__InfluenzaA__ADK39016
augaauccaaaccaaaagauaauaaccauugguucggucuguauaacaauuggaauggcuaacuuaauauuacaaauuggaaacauaaucucaauauggauuagccacucaauucaacuugggaaucaaaaucagauugaaacaugcaaucaaagcgucauuacuuaugaaaacaacacuuggguaaaucagacauauguuaacaucagcaacaccaacuuugcugcuggacagucagugguuuccgugaaauuagcgggcaauuccucucucugcccuguuaguggaugggcuauauacaguaaagacaacaguauaagaaucgguuccaagggggauguguuugucauaagggaaccauucauaucaugcucccccuuggaaugcagaaccuucuucuugacucaaggggccuugcuaaaugacaaacauuccaauggaaccauuaaagacaggagcccauaucgaacccuaaugagcuguccuauuggugaaguucccucuccauacaacucaagauuugagucagucgcuuggucagcaagugcuugucaugauggcaucaguuggcuaacaauuggaauuucuggcccagacaauggggcaguggcuguguuaaaguacaacggcauaauaacagacacuaucaagaguuggagaaacaauauauugagaacacaagagucugaaugugcauguguaaaugguucuuguuuuacuguaaugaccgauggaccaagugauggacaggccucauacaagaucuucagaauagaaaagggaaagauagucaaaucagucgaaaugaaugccccuaauuaucacuaugaggaaugcuccuguuauccugauucuagugaaaucacaugugugugcagggauaacuggcauggcucgaaucgaccgugggugucuuucaaccagaaucuggaauaucagauaggauacauaugcagugggauuuucggagacaauccacgcccuaaugauaagacaggcaguugugguccaguaucgucuaauggagcaaauggaguaaaaggauuuucauucaaauacggcaaugguguuuggauagggagaacuaaaagcauuaguucaagaaacgguuuugagaugauuugggauccggacggauggacugggacagacaauaacuucucaauaaagcaagauaucguaggaauaaaugaguggucaggauauagcgggaguuuuguucagcauccagaacuaacagggcuggauuguauaagaccuugcuucuggguugaacuaaucagagggcgacccaaagagaacacaaucuggacuagcgggagcagcauauccuuuugugguguaaacagugacacuguggguuggucuuggccagacggugcugaguugccauucaccauugacaaguaa

SEQ ID NO: 51133 - RNA, 1410 nt, Artificial Sequence
  derived and/or modified CDS sequence (wt) from neuraminidase__InfluenzaA__ADK45315
augaauccaaaucaaaagauaauaacgauuggcucuguuucucucaccauuuccacaauaugcuucuucaugcaaauugccaucuugauaacuacuguaacauugcauuucaagcaauaugaauucaacucccccccaaacaaccaagugaugcugugugaaccaacaauaauagaaagaaacauaacagagauaguguaucugaccaacaccaccauagagaaggaaauaugccccaaacuagcagaauacagaaauuggucaaagccgcaaugugacauuacaggguuugcaccuuuuucuaaggacaauucgauuaggcuuuccgcugguggggacaucugggugacaagagaaccuuaugugucaugcgauccugauaaguguuaucaauuugcccuuggacagggaacaacacuaaacaacguacauucaaauaacacaguacgugauaggaccccuuaucggacccuauugaugaaugaguuagguguuccuuuucaucuggggaccaagcaagugugcauagcaugguccagcucaaguugucacgauggaaaagcauggcugcauguuuguauaacgggggaugauaaaaaugcaacugcuagcuucauuuacaaugggaggcuuguagauaguguuguuucaugguccaaagaaauccucaggacccaggagucagaaugcguuuguaucaauggaacuuguacaguaguaaugacugaugggagugcuucaggaaaagcugauacuaaaauauuauucauugaggaggggaaaaucguucauacuagcacauugucaggaagugcucagcaugucgaggagugcuccugcuauccucgauauccuggugucagaugugucugcagagacaacuggaaaggauccaauaggcccaucguagauauaaacauaaaggaucauagcauugucuccaguuauguguguucaggacuuguuggagacacacccagaaaaaacgacagcuccagcaguagccauuguuuggauccuaacaaugaggaagguggucauggggugaaaggcugggccuuugaugauggaaaugacguguggaugggaagaacgaucagcgagaagucacgcuuaggguaugaaaccuucaaagucauugaaggcugguccaacccuaaguccaaauugcagauaaauaggcaagucauaguugacagagguaauagguccgguuauucugguauuuucucuguugaaggcaaaagcugcaucaaucggugcuuuuauguggaguugauaaggggaagaaaagaggaaacugaagucuuguggaccucaaacaguauuguuguguuuuguggcaccucagguacauauggaacaggcucauggccugauggggcggacaucaaucucaugccuauauaa

SEQ ID NO: 51134 - RNA, 1410 nt, Artificial Sequence
  derived and/or modified CDS sequence (wt) from neuraminidase__InfluenzaA__ADK45413
augaauccaaaucaaaagauaauaacgauuggcucuguuucucucaccauuuccacaauaugcuucuucaugcaaauugccaucuugauaacuacuguaacauugcauuucaagcaauaugaauucaacucccccccaaacaaccaagugaugcuguaugaaccaacaauaauagaaagaaacauaacagagauaguguaucugaccaacaccaccauagagaaggaaauaugccccaaacuagcagaauacagaaauuggucaaagccgcaaugugacauuacaggauuugcaccuuuuucuaaggacaauucgauuaggcuuuccgcugguggggacaucugggugacaagagaaccuuaugugucaugcgauccugacaaguguuaucaauuugcccuuggacagggaacaacacuaaacaacgugcauucaaauaacacaguacgugauaggaccccuuaucggacucuauugaugaaugaguuagguguuccuuuucaucuggggaccaagcaagugugcauagcaugguccagcucaaguugucacgauggaaaagcauggcugcauguuuguauaacgggggaugauaaaaaugcaacugcuagcuucauuuacaaugggaggcuuguagauaguguuguuucaugguccaaagacauccucaggacccaggagucagaaugcguuuguaucaauggaacuuguacaguaguaaugacugaugggagugcuucaggaaaagcugauacuaaaauacuauucauugaggaggggaaaaucguucauacuagcacauugucaggaagugcucagcaugucgaggagugcuccugcuauccucgauauccuggugucagaugugucugcagagacaacuggaaaggcuccaauaggcccaucguagauauaaacauaaaggaucauagcauugcuuccaguuauguguguucaggacuuguuggagacacacccagaaaaaacgacagcuccagcaguagccauuguuuggauccuaacaaugaagaagguggucauggagugaaaggcugggccuuugaugauggaaaugacguguggaugggaagaacgaucagcgagaagucacgcuuaggguaugaaaccuucaaagucauugaaggcugguccaacccuaaguccaaauugcagauaaauaggcaagucauaguugacagagguaauagguccgguuauucugguauuuucucuguugaaggcaaaagcugcaucaaucggugcuuuuauguggaguugauaaggggaagaaaagaggaaacugaagucuuguggaccucaaacaguauuguuguguuuuguggcaccucagguacauauggaacaggcucauggccugauggggcgaacaucaaucucaugccuauauaa

SEQ ID NO: 51135 - RNA, 1410 nt, Artificial Sequence
  derived and/or modified CDS sequence (wt) from neuraminidase__InfluenzaA__ADK45424
augaauccaaaucaaaagauaauaacgauuggcucuguuucucucaccauuuccacaauaugcuucuucaugcaaauugccaucuugauaacuacuguaacauugcauuucaagcaauaugaauucaacucccccccaaacaaccaagugaugcugugugaaccaacaauaauagaaagaaacauaacagagauaguguaucugaccaacaccaccauagagaaggaaauaugccccaaacuagcagaauacagaaauuggucaaagccgcaaugugacauuacaggguuugcaccuuuuucuaaggacaauucgauuaggcuuuccgcugguggggacaucugggugacaagagaaccuuaugugucaugcgauccugacaaguguuaucaauuugcccuuggacagggaacaacacuaaacaacguacauucaaauaacacaguacgugauaggaccccuuaucggacccuauugaugaaugaguuagguguuccuuuucaucuggggaccaagcaagugugcauagcaugguccagcucaaguugucacgauggaaaagcauggcugcauguuuguauaacgggggaugauaaaaaugcaacugcuagcuucauuuacaaugggaggcuuguagauaguguuguuucaugguccaaagaaauccucaggacccaggagucagaaugcguuuguaucaauggaacuuguacaguaguaaugacugaugggagugcuucaggaaaagcugauacuaaaauacuauucauugaggaggggaaaaucguucauacuagcacauugucaggaagugcucaacaugucgaggagugcuccugcuauccucgauauccuggugucagaugugucugcagagacaacuggaaaggauccaauaggcccaucguagauauaaacauaaaggaucauagcauuguuuccaguuauuuguguucaggacuuguuggagacacacccagaaaaaacgacagcuccagcaguagccauuguuuggauccuaacaaugaggaagguggucauggggugaaaggcugggccuuugaugauggaaaugacguguggaugggaagaacgaucagcgagaagucacgcuuaggguaugaaaccuucaaagucaucgaaggcugguccaacccuaaguccaaauugcagauaaauaggcaagucauaguugacagagguaauagguccgguuauucugguauuuucucuguugaaggcaaaagcugcaucaaucggugcuuuuauguggaguugauaaggggaagaaaagaggaaacugaagucuuguggaccucaaacaguauuguuguguuuuguggcaccucagguacauauggaacaggcucauggccugauggggcggacaucaaucucaugccuauauaa

SEQ ID NO: 51136 - RNA, 1410 nt, Artificial Sequence; identical to SEQ ID NO: 50944
  derived and/or modified CDS sequence (wt) from neuraminidase__InfluenzaA__ADK45446

SEQ ID NO: 51137 - RNA, 1410 nt, Artificial Sequence
  derived and/or modified CDS sequence (wt) from neuraminidase__InfluenzaA__ADK45457
augaauccaaaucaaaagauaauaacgauuggcucuguuucucucaccauuuccacaauaugcuucuucaugcaaauugccaucuugauaacuacuguaacauugcauuucaagcaauaugaauucaacucccccccaaacaaccaagugaugcugugugaaccaacaauaauagaaagaaacauaacagagauaguguaucugaccaacaccaccauagagaaggaaauaugccccaaacuagcagaauacagaaauuggucaaagccgcaaugugacauuacaggguuugcaccuuuuucuaaggacaauucgauuaggcuuuccgcugguggggacaucugggugacaagagaaccuuaugugucaugcgauccugacaaguguuaucaauuugcccuuggacagggaacaacacuaaacaacguacauucaaauaacacaguacgugauaggacccccuaucggacccuauugaugaaugaguuagguguuccuuuucaucuggggaccaagcaagugugcauagcaugguccagcucaaguugucacgauggaaaagcauggcugcauguuuguauaacgggggaugauaaaaaugcaacugcuagcuucauuuacaaugggaggcuuguagauaguguuguuucaugguccaaagaaauccucaggacccaggagucagaaugcguuuguaucaauggaacuuguacaguaguaaugacugaugggagugcuucaggaaaagcugauacuaaaauacuauucauugaggaggggaaaaucguucauacuagcacauugucaggaagugcucagcaugucgaggagugcuccugcuauccucgauauccuggugucagaugugucugcagagacaacuggaaaggauccaauaggcccaucguagauauaaacauaaaggaucauagcauugucuccaguuauguguguucaggacuuguuggagacacacccagaaaaaacgacagcuccggcaguagccauuguuuggauccuaacaaugaggaagguggucauggggugaaaggcugggccuuugaugauggaaaugacguguggaugggaagaacgaucagcgagaagucacgcuuaggguaugaaaccuucaaagucauugaaggcugguccaacccuaaguccaaauugcagauaaauaggcaagucauaguugacagagguaauagguccgguuauucugguauuuucucuguugaaggcaaaagcugcaucaaucggugcuuuuauguggaguugauaaggggaagaaaagaggaaacugaagucuuguggaccucaaacaguauuguuguguuuuguggcaccucagguacauauggaacaggcucauggccugauggggcggacaucaaucucaugccuauauaa

SEQ ID NO: 51138 - RNA, 1410 nt, Artificial Sequence
  derived and/or modified CDS sequence (wt) from neuraminidase__InfluenzaA__ADK45479
augaauccaaaucaaaagauaauaacgauuggcucuguuucucucaccauuuccacaauaugcuucuucaugcaaauugccaucuugauaacuacuguaacauugcauuucaagcaauaugaauucaacucccccccaaacaaccaagugaugcugugugaaccaacaauaauagaaagaaacauaacagagauaguguaucugaccaacaccaccauagagaaggaaauaugccccaaacuagcagaauacagaaauuggucaaagccgcaaugugacauuacaggauuugcaccuuuuucuaaggacaauucgauuaggcucuccgcugguggggacaucugggugacaagagaaccuuaugugucaugcgauccugacaaguguuaucaauuugcccuuggacagggaacaacacuaaacaacgugcauucaaauaacacaguacgugauaggaccccuuaucggacccuauugaugaaugaguuagguguuccuuuucaucuggggaccaagcaagugugcauagcaugguccagcucaaguugucacgauggaaaagcauggcugcauguuuguauaacgggggaugauaaaaaugcaacugcuagcuucauuuacaaugggaggcuuguagauaguguuguuucaugguccaaagacauccucaggacccaggagucagaaugcgucuguaucaauggaacuuguacaguaguaaugacugaugggagugcuucaggaaaagcugauacuaaaauacuauucauugaggaggggaaagucguucauacuagcacauugucaggaagugcucagcaugucgaggagugcucuugcuauccucgauauccuggugucagaugugucugcagagacaacuggaaaggcuccaauaggcccaucguagauauaaacauaaaggaucauagcauuguuuccaguuauguguguucaggacuuguuggagacacacccagaaaaaacgacagcuccagcaguagccauuguuuggauccuaacaaugaagaagguggucauggagugaaaggcugggccuuugaugauggaaaugacguguggaugggaagaacgaucagcgagaagucacgcuuaggguaugaaaccuucaaagucauugaaggcugguccaaccauaaguccaaauugcagauaaauaggcaagucauaguugacagagguaauagguccgguuauucugguauuuucucuguugaaggcaaaagcugcaucaaucggugcuuuuauguggaguugauuaggggaagaaaagaggaagcugaagucuuguggaccucaaacaguauuguuguguuuuguggcaccucagguacauauggaacaggcucauggccugauggggcggaccucaaucucaugccuauauaa

SEQ ID NO: 51139 - RNA, 1410 nt, Artificial Sequence; identical to SEQ ID NO: 50104
  derived and/or modified CDS sequence (wt) from neuraminidase__InfluenzaA__ADK48799

SEQ ID NO: 51140 - RNA, 1410 nt, Artificial Sequence; identical to SEQ ID NO: 51087
  derived and/or modified CDS sequence (wt) from neuraminidase__InfluenzaA__ADK62686

SEQ ID NO: 51141 - RNA, 1410 nt, Artificial Sequence; identical to SEQ ID NO: 50709
  derived and/or modified CDS sequence (wt) from neuraminidase__InfluenzaA__ADK62696

SEQ ID NO: 51142 - RNA, 1410 nt, Artificial Sequence
  derived and/or modified CDS sequence (wt) from neuraminidase__InfluenzaA__ADK64994
augaauccaaaccaaaagauaauaaccauugguucggucuguaugacaauuggaauggcuaacuuaauauuacaaauuggaaacauaaucucaauauggauuagccacucaauucaacuugggaaucaaaaucagauugaaacaugcaaucaaagcgucauuacuuaugaaaacaacacuuggguaaaucagacauauguuaacaucagcaacaccaacuuugcugcuggacagucagugguuuccgugaaauuagcgggcaauuccucucucugcccuguuaguggaugggcuauauacaguaaagacaacaguguaagaaucgguuccaagggggauguguuugucauaagggaaccauucauaucaugcucccccuuggaaugcagaaccuucuucuugacucaaggggccuugcuaaaugacaaacauuccaauggaaccauuaaagacaggagcccauaucgaacccuaaugagcuguccuauuggugaaguucccucuccauacaacucaagauuugagucagucgcuuggucagcaagugcuugucaugauggcaucaauuggcuaacaauuggaauuucuggcccagacaauggggcaguggcuguguuaaaguacaacggcauaauaacagacacuaucaagaguuggagaaacaauauauugagaacacaagagucugaaugugcauguguaaaugguucuugcuuuacuguaaugaccgauggaccaagugauggacaggccucauacaagaucuucagaauagaaaagggaaagauagucaaaucagucgaaaugaaugccccuaauuaucacuaugaggaaugcuccuguuauccugauucuagugaaaucacaugugugugcagggauaacuggcauggcucgaaucgaccgugggugucuuucaaccagaaucuggaauaucagauaggauacauaugcagugggauuuucggagacaauccacgcccuaaugauaagacaggcaguugugguccaguaucgucuaauggagcaaauggaguaaaaggauuuucauucaaauacggcaaugguguuuggauagggagaacuaaaagcauuaguucaagaaacgguuuugagaugauuugggauccgaacggauggacugggacagacaauaacuucucaauaaagcaagauaucguaggaauaaaugaguggucaggauauagcgggaguuuuguucagcauccggaacuaacagggcuggauuguauaagaccuugcuucuggguugaacuaaucagagggcgacccaaagagaacacaaucuggacuagcgggagcagcauauccuuuugugguguaaacagugacacuguggguuggucuuggccagacggugcugaguugccauuuaccauugacaaguaa

SEQ ID NO: 51143 - RNA, 1410 nt, Artificial Sequence
  derived and/or modified CDS sequence (wt) from neuraminidase__InfluenzaA__ADK65002
augaauccaaaccaaaagauaauaaccauugguucggucuguaugacaauuggaauggcuaacuuaauauuacaaauuggaaacauaaucucaauauggauuagccacucaauucaacuugggaaucaaaaucagauugaaacaugcaaucaaagcgucauuacuuaugaaaacaacacuuggguaaaucagacauauguuaacaucagcaacaccaacuuugcugcuggacagucagugguuuccgugaaauuagcgggcaauuccucucucugcccuguuaguggaugggcuauauacaguaaagacaacaguauaagaaccgguuccaagggggauguguuugucauaagggaaccauucauaucaugcucccccuuggaaugcagaaccuucuucuugacucaaggggccuugcuaaaugacaaacauuccaauggaaccauuaaagacaggagcccauaucgaacccuaaugagcuguccuauuggugaaguucccucuccauacaacucaagauuugagucagucgcuuggucagcaagugcuugucaugauggcaucaauuggcuaacaauuggaauuucuggcccagacaauggggcaguggcuggguuaaaguacaacggcauaauaacagacacuaucaagaguuggagaaacaauauauugagaacacaagagucugaaugugcauguguaaaugguucuugcuuuacuguaaugaccgauggaccaagugauggacaggccucauacaagaucuucagaauagaaaagggaaagauagucaaaucagucgaaaugaaugccccuaauuaucacuaugaggaaugcuccuguuauccugauucuagugaaaucacaugugugugcagggauaacuggcauggcucgaaucgaccgugggugucuuucaaccagaaucuggaauaucagauaggauacauaugcagugggauuuucggagacaauccacgcccuaaugauaagacaggcaguugugguccaguaucgucuaauggagcaaauggaguaaaaggauuuucauucaaauacggcaaugguguuuggauagggagaacuaaaagcauuaguucaagaaacgguuuugagaugauuugggauccgaacggauggacugggacagacaauaacuucucaauaaagcaagauaucguaggaauaaaugaguggucaggauauagcgggaguuuuguucagcauccagaacuaacagggcuggauuguauaagaccuugcuucuggguugaacuaaucagagggcgacccaaagagaacacaaucuggacuagcgggagcagcauauccuuuugugguguaaacagugacacuguggguuggucuuggccagacggugcugaguugccauuuaccauugacaaguaa

SEQ ID NO: 51144 - RNA, 1410 nt, Artificial Sequence; identical to SEQ ID NO: 48750
  derived and/or modified CDS sequence (wt) from neuraminidase__InfluenzaA__ADK65010

SEQ ID NO: 51145 - RNA, 1410 nt, Artificial Sequence
  derived and/or modified CDS sequence (wt) from neuraminidase__InfluenzaA__ADK65018
augaauccaaaccaaaagauaauaaccauugguucggucuguaugacaauuggaauggcuaacuuaauauuacaaauuggaaacauaaucucaauauggauuagccacucaauucaacuugggaaucaaaaucagauugaaacaugcaaucaaagcgucauuacuuaugaaaacaacacuuggguaaaucagacauauguuaacaucagcaacaccaacuuugcugcuggacaaucagugguuuccgugaaauuagcgggcaauuccucucucugcccuguuaguggaugggcuauauacaguaaagacaacaguauaagaaucgguuccaagggggauguguuugucauaagggaaccauucauaucaugcucccccuuggaaugcagaaccuucuucuugacucaaggggccuugcuaaaugacaaacauuccaauggaaccauuaaagacaggagcccauaucgaacccuaaugagcuguccuauuggugaaguucccucuccauacaacucaagauuugagucagucgcuuggccagcaagugcuugucaugauggcaucaauuggcuaacaauuggaauuucuggcccagacaauggggcaguggcuguguuaaaguacaacggcauaauaacagacacuaucaagaguuggagaaacaauauauugagaacacaagagucugaaugugcauguguaaaugguucuugcuuuacuauaaugaccgauggaccaagugauggacaggccucauacaagaucuucagaauagaaaagggaaagauagucaaaucaaucgaaaugaaugccccuaauuaucacuaugaggaaugcucauguuauccugauucuagugaaaucacaugugugugcagggauaacuggcauggcucgaaucgaccgugggugucuuucaaccagaaucuggaauaucagauaggguacauaugcagugggauuuucggagacaauccacgcccuaaugauaagacaggcaguugugguccaguaucgucuaauggagcaaauggaguaaaaggauuuucauucaaauacggcaaugguguuuggauagggagaacuaaaagcauuaguucaagaaacgguuuugagaugauuugggauccgaacggauggacugggacagacaauaacuucucaauaaagcaagauaucguaggaauaaaugaguggucaggauauagcgggaguuuuguucagcauccagaacuaacagggcuggauuguauaagaccuugcuucuggguugaacuaaucagagggcgacccaaagagaacacaaucuggacuagcgggagcagcauauccuuuugugguguaaacagugacacuguggguuggucuuggccagacggugcugaguugccauuuaccauugacaaguaa

SEQ ID NO: 51146 - RNA, 1410 nt, Artificial Sequence
  derived and/or modified CDS sequence (wt) from neuraminidase__InfluenzaA__ADK87290
augaauccaaaucaaaagauaauaacgauuggcucuguuucucucaccauuuccacaauaugcuucuucaugcaaauugccaucuugauaacuacuguaacauugcauuucaagcaauacgaauucaacucccccccaaacaaccaagugaugcugugugaaccaacaauaauagaaagaaacauaacagagauaguguaucugaccaacaccaccauagagaaggaaauaugccccaaacuagcagaauacagaaauuggucaaagccgcaaugugacauuacaggguuugcaccuuuuucuaaggacaauucgauuaggcuuuccgcugguggggacaucugggugacaagagaaccuuaugugucaugcgauccugacaaguguuaucaauuugcccuuggacagggaacaacacuaaacaacguacauucaaauaacacaguacgugauaggaccccuuaucggacccuauugaugaaugaguuagguguuccuuuucaucuggggaccaagcaagugugcauagcaugguccagcucaaguugucacgauggaaaagcauggcugcauguuuguauaacgggggaugauaaaaaugcaacugcuagcuucauuuacaaugggaggcuuguagauaguguuguuucaugguccaaagaaauccucaggacccaggagucagaaugcguuuguaucaauggaacuuguacaguaguaaugacugaugggagugcuucaggaaaagcuuauacuaaaauauuauucauugaggagggaaaaaucguucauacuagcacauugucaggaagugcucagcaugucgaggagugcuccugcuauccucgauauccuggugucagaugugucugcagagacaacuggaaaggauccaauaggcccaucguagauauaaacauaaaggaucauagcauugucuccaguuauguguguucaggacuuguuggagacacacccagaaaaaacgacagcuccagcaguagccauuguuuggauccuaacaaugaggaagguggucauggggugaaaggcugggccuuugaugauggaaaugacguguggaugggaagaacgaucagcgagaagucacgcuuaggguaugaaaccuucaaagucauugaaggcugguccaacccuaaguccaaauugcagauaaauaggcaagucauaguugauagagguaauagguccgguuauucugguauuuucucuguugaaggcaaaagcugcaucaaucggugcuuuuauguggaguugauaaggggaagaaaagaggaaacugaagucuuguggaccucaaacaguauuguuguguuuuguggcaccucagguacauauggaacaggcucauggccugauggggcggacaucaaucucaugccuguauaa

SEQ ID NO: 51147 - RNA, 1410 nt, Artificial Sequence
  derived and/or modified CDS sequence (wt) from neuraminidase__InfluenzaA__ADK87292
augaauccaaaucaaaagauaauaacgauuggcucuguuucucucaccauuuccacaauaugcuucuucaugcaaauugccaucuugauaacuacuguaacacugcauuucaagcaauaugaauucaacucccccccaaacaaccaagugaugcugugugaaccaacaauaauagaaagaaacauaacagagauaguguaucugaccaacaccaccauagagaaggaaauaugccccaaacuagcagaauacagaaauuggucaaagccgcaaugugacauuacaggguuugcaccuuuuucuaaggacaauucgauuaggcuuuccgcugguggggacaucugggugacaagagaaccuuaugugucaugcgauccugacaaguguuaucaauuugcccuuggacagggaacaacacuaaacaacguacauucaaauaacacaguacgugauaggaccccuuaucggacccuauugaugaaugaguuagguguuccuuuucaucuggggaccaagcaagugugcauagcaugguccagcucaaguugucacgauggaaaagcauggcugcauguuuguauaacgggggaugauaaaaaugcaacugcuagcuucauuuacaaugggaggcuuguagauaguguugucucaugguccaaagaaauccucaggacccaggagucagaaugcguuuguaucaauggaacuuguacaguaguaaugacugaugggagugcuucaggaaaagcugauacuaaaauauuauucauugaggagggaaaaaucguucauacuagcacauugucaggaagugcucagcaugucgaggagugcuccugcuauccucgauauccuggugucagaugugucugcagagacaacuggaaaggguccaauaggcccaucguagauauaaacauaaaggaucauagcauugucuccaguuaugcguguucaggacuuguuggagacacacccagaaaaaacgacagcuccagcaguagccauuguuuggauccuaacaaugaagaagguggucauggggugaaaggcugggccuuugaugauggaaaugacguguggaugggaagaacgaucagcgagaagucacgcuuaggguaugaaaccuucaaagucauugaaggcugguccaacccuaaguccaaacugcagauaaauaggcaagucauaguugacagagguaauagguccgguuauucugguauuuucucuguugaaggcaaaagcugcaucaaucggugcuuuuauguggaguugauaaggggaagaaaagaggaaacugaagucuuguggaccucaaacaguauuguuguguuuuguggcaccucagguacauauggaacaggcucauggccugauggggcggacaucaaucucaugccuguauaa

SEQ ID NO: 51148 - RNA, 1410 nt, Artificial Sequence
  derived and/or modified CDS sequence (wt) from neuraminidase__InfluenzaA__ADK87294
augaauccaaaucaaaagauaauagcgauuggcucuguuucucucaccauuuccacaauaugcuucuuccugcaaauugccaucuugauaacuacuguaacauugcauuucaagcaauaugaauucaacucccccccaaacaaccaagugaugcugugugaaccaacaauaauagaaagaaacauaacagagauaguguaucugaccaacaccaccauagagaaggaaauaugccccaaacuagcagaauacagaaauuggucaaagccgcaaugugacauuacaggguuugcaccuuuuucuaaggacaauucgauuaggcuuuccgcugguggggacaucugggugacaagagaaccuuaugugucaugcgauccugacaaguguuaucaauuugcccuuggacagggaacaacacuaaacaacguacauucaaauaacacaguacgugauaggaccccuuaucggacccuauugaugaaugaguuagguguuccuuuucaucuggggaccaagcaagugugcauagcaugguccagcucaaguugucgcgauggaaaagcauggcugcauguuuguauaacgggggaugauaaaaaugcaacugcuagcuucauuuacaaugggaggcuuguagauaguguuguuucaugguccaaagaaauccucaggacccaggagucagaaugcguuuguaucaauggaacuuguacaguaguaaugacugaugggagugcuucaggaaaagcugauacuaaaauauuauucauugaggagggaaaaaucguucauacuagcacauugucaggaagugcucagcaugucgaggagugcuccugcuauccucgauauccuggugucagaugugucugcagagacacugggaaaggauccaauaggcccaucguagauauaaacauaaaggaucauagcauugucuccaguuauguguguucaggacuuguuggagacacacccagaaaaaacgacagcuccagcaguagccauuguuuggauccuaacaaugaggaagguggucauggggugaaaggcugggccuuugaugauggaaaugacguguggaugggaagaacgaucagcgagaagucacgcuuaggguaugaaaccuucaaagucauugaaggcugguccaacccuaaguccaaauugcagauaaauaggcaagucauaguugacagagguaauagguccgguuauucugguauuuucucuguugaaggcaaaagcugcaucaaucggugcuuuuauguggaguugauaaggggaagaaaagaggaaacugaagucuuguggaccucaaacaauauuguuguguuuuguggcaccucagguacauauggaacaggcucauggccugauggggcggacaucaaucucaugccuguauaa

SEQ ID NO: 51149 - RNA, 1410 nt, Artificial Sequence
  derived and/or modified CDS sequence (wt) from neuraminidase__InfluenzaA__ADK87297
augaauccaaaccaaaagauaauaaccauugguucggucuguaugacaauuggaauggcuaacuuaauauuacaaauuggaaacauaaucucaauauggauuagccacucaauucaacuugggaaucaaaaucagauugaaacaugcaaucaaagcgucauuacuuaugaaaacaacacuuggguaaaucagacauauguuaacaucagcaacaccaacuuugcugcuggacagucagugguuuccgugaaauuagcgggcaauuccucucucugcccuguuaguggaugggcuauauacaguaaagacaacaguauaagaaucgguuccaagggggauguguuugucauaagggaaccauucauaucaugcucccccuuggaaugcagaaccuucuucuugacucaaggggccuugcuaaaugacaaacauuccaauggaaccauuaaaaacaggagcccauaucgaacccuaaugagcuguccuauuggugaaguucccucuccauacaacucaagauuugagucagucgcuuggucagcaagugcuugucaugauggcaucaauuggcuaacaauuggaauuucuggcccagacaauggggcaguggcuguguuaaaguacaacggcauaauaacagacacuaucaagaguuggagaaacaauauauugagaacacaagagucugaaugugcauguguaaaugguucuugcuuuacuguaaugaccgauggaccaagugauggacaggccucauacaagaucuucagaauagaaaagggaaagauagucaaaucagucgaaaugaaugccccuaauuaucacuaugaggaaugcuccuguuauccugauucuagugaaaucacaugugugugcagggauaacuggcauggcucgaaucgaccgugggugucuuucaaccagaaucuggaauaucagauaggguacauaugcagugggauuuucggagacaauccacgcccuaaugauaagacaggcaguugugguccaguaucgucuaauggagcaaauggaguaaaaggauuuucauucaaauacggcaaugguguuuggauagggagaacuaaaagcauuaguucaagaaacgguuuugagaugauuugggauccgaacggauggacugggacagacaauaacuucucaauaaagcaagauaucguaggaauaaaugaguggucaggauauagcgggaguuuuguucagcauccagaacuaacagggcuggauuguauaagaccuugcuucuggguugaacuaaucagagggcgacccaaagagaacacaaucuggacuagcgggagcagcauauccuuuugugguguaaacagugacacuguggguuggucuuggccagacggugcugaguugccauuuaccauugacaaguaa

SEQ ID NO: 51150 - RNA, 1410 nt, Artificial Sequence
  derived and/or modified CDS sequence (wt) from neuraminidase__InfluenzaA__ADK87299
augaauccaaaccaaaagauaauaaccauugguucggucuguaugacaauuggaauggcuaacuuaauauuacaaauuggaaacauaaucucaauauggauuagccacucaauucaacuugggaaucaaaaucagauugaaacaugcaaucaaagcgucauuacuuaugaaaacaacacuuggguaaaucagacauauguuaacaucagcaacaccaacuuugcugcuggacagucagugguuuccgugaaauuagcgggcaauuccucucucugcccuguuaguggaugggcuauauacaguaaagacaacaguauaagaaucgguuccaagggggauguguuugucauaagggaaccauucauaucaugcucccccuuggaaugcagaaccuucuucuugacucaaggggccuugcuaaaugacaaacauuccaauggaaccauuaaagacaggagcccauaucgaacccuaaugagcuguccuauuggugaaguucccucuccauacaacucaagauuugagucagucgcuuggucagcaagugcuugucaugauggcaucaauuggcuaacaauuggaauuucuggcccagacaauggggcaguggcuguguuaaaguacaacggcauaauaacagacacuaucaagaguuggagaaacaauauauugagaacacaagagucugaaugugcauguguaaaugguucuugcuuuacuguaaugaccgauggaccaagugauggacaggccucauucaagaucuucagaauagaaaagggaaagauagucaaaucagucgaaaugaaugccccuaauuaucacuaugaggaaugcuccuguuauccugauucuagugaaaucacaugugugugcagggauaacuggcauggcucgaaucgaccgugggugucuuucaaccagaaucuggaauaucagauaggguacauaugcagugggauuuucggagacaauccacgcccuaaugauaagacaggcaguugugguccaguaucgucuaauggagcaaauggaguaaaaggauuuucauucaaauacggcaaugguguuuggauagggagaacuaaaagcauuaguucaagaaacgguuuugagaugauuugggauccgaacggauggacugggacagacaauaacuucucaauaaagcaagauaucguaggaauaaaugaguggucaggauauagcgggaguuuuguucagcauccagaacuaacagggcuggauuguauaagaccuugcuucuggguugaacuaaucagagggcgacccaaagagaacacaaucuggacuagcgggagcagcauauccuuuugugguguaaacagugacacuguggguuggucuuggccagacggugcugaguugccauuuaccauugacaaguaa

SEQ ID NO: 51151 - RNA, 1410 nt, Artificial Sequence
  derived and/or modified CDS sequence (wt) from neuraminidase__InfluenzaA__ADK87301
augaauccaaaucaaaagauaauaacgauuggcucuguuucucucaccauuuccacaauaugcuucuucaugcaaauugccaucuugauaacuacuguaacauugcauuucaagcaauaugaauucaacucccccccaaacaaccaagugaugcugugugaaccaacaauaauagaaagaaacauaacagagauaguguaucugaccaacaccaccauagagaaggaaauaugccccaaacuagcagaauacagaaauuggucaaagccgcaaugugacauuacaggguuugcaccuuuuucuaaggacaauucgauuaggcuuuccgcugguggggacaucugggugacaagagaaccuuaugugucaugcgauccugacaaguguuaucaauuugcccuuggacagggaacaacacuaaacaacguacauucaaauaacacaguacgugauaggaccccuuaucggacccuauugaugaaugaguuagguguuccuuuucaucuggggaccaagcaagugugcauagcaugguccagcucaaguugucacgauggaaaagcauggcugcauguuuguauaacgggggaugauaaaaaugcaacugcuagcuucauuuacaaugggaggcuuguagauaguguuguuucaugguccaaagaaauccucaggacccaggagucagaaugcguuuguaucaauggaacuuguacaguagcaaugacugaugggagugcuucaggaaaagcugauacuaaaauauuauucauugaggaggggaaaaucguucauacuagcacauugucaggaagugcucagcaugucgaggagugcuccugcuauccucgauauccuggugucagaugugucugcagagacaacuggaaaggauccaauaggcccaucguagauauaaacauaaaggaucauagcauugucuccaguuauguguguucaggacuuguuggagacacacccagaaaaaacgacagcuccagcaguagccauuguuuggauccuaacaaugaggaagguggucauggggugaaaggcugggccuuugaugauggaaaugacguguggaugggaagaacgaucagcgagaagucacgcuuaggguaugaaaccuucaaagucauugaaggcugguccaauccuaaguccaaauugcagauaaauaggcaagucauaguugacagagguaauagguccgguuauucugguauuuucucuguugaaggcaaaagcugcaucaaucggugcuuuuauguggaguugauaaggggaagaaaagaggaaacugaagucuuguggaccucaaacaguauuguuguguuuuguggcaccucagguacauauggaacaggcucauggccugauggggcggacaucaaucucaugccuauauaa

SEQ ID NO: 51152 - RNA, 1410 nt, Artificial Sequence
  derived and/or modified CDS sequence (wt) from neuraminidase__InfluenzaA__ADK87303
augaauccaaaucaaaagauaauaacgauuggcucuguuucucucaccauuuccacaauaugcuucuucaugcaaauugccaucuugauaacuacuguaacauugcauuucaagcaauaugaauucaacucccccccaaacaaccaagugaugcugugugaaccaacaauaauagaaagaaacauaacagagauaguguaucugaccaacaccaccauagagaaggaaauaugccccaaacuagcagaauacagaaauuggucaaagccgcaaugugacauuacaggguuugcaccuuuuucuaaggacaauucgauuaggcuuuccgcugguggggacaucugggugacaagagaaccuuaugugucaugcgauccugacaaguguuaucaauuugcccuuggacagggaacaacacuaaacaacguacauucaaauaacacaguacgugauaggaccccuuaucggacccuauugaugaaugaguuagguguuccuuuucaucuggggaccaagcaagugugcauagcaugguccagcucaaguugucacgauggaaaagcauggcugcauguuuguauaacgggggaugauaaaaaugcaacugcuagcuucauuuacaaugggaggcuuguagauaguguuguuucaugguccaaagaaauccucaggacccaggagucagaaugcguuuguaucaauggaacuuguacaguaguaaugacugaugggagugcuucaggaaaagcugauacuaaaauauuauucauugaggaggggaaaaucguucauacuagcacauugucaggaagugcucagcaugucgaggagugcuccugcuauccucgauauccuggugucagaugugucugcagagacaacuggaaaggauccaauaggcccaucguagauauaaacauaaaggaucauagcauugucuccaguuauguguguucaggacuuguuggagacacacccagaaaaaacgacagcuccagcaguagccauuguuuggauccuaacaaugaggaagguggucauggggugaaaggcugggccuuugaugauggaaaugacguguggaugggaagaacgaucagcgagaagucacgcuuaggguaugaaaccuucaaagucauugaaggcugguccaauccuaaguccaaauugcagauaaauaggcaagucauaguugacagagguaauagguccgguuauucugguauuuucucuguugaaggcaaaagcugcaucaaucggugcuuuuauguggaguugauaaggggaagaaaagaggaaacugaagucuuguggaccucaaacaguauuguuguguuuuguggcaccucagguacauauggaacaggcucauggccugauggggcggacaucaaucucaugccuauauaa

SEQ ID NO: 51153 - RNA, 1410 nt, Artificial Sequence
  derived and/or modified CDS sequence (wt) from neuraminidase__InfluenzaA__ADK87305
augaauccaaaucaaaagauaauaacgauuggcucuguuucucucaccauuuccacaauaugcuucuucaugcaaauugccaucuugauaacuacuguaacauugcauuucaagcaauaugaauucaacucccccccaaacaaccaagugaugcugugugaaccaacaauaauagaaagaaacauaacagagauaguguaucugaccaacaccaccauagagaaggaaauaugccccaaacuagcagaauacagaaauuggucaaagccucaaugugacauuacaggguuugcaccuuuuucuaaggacaauucgauuaggcuuuccgcugguggggacaucugggugacaagagaaccuuaugugucaugcgauccugacaaguguuaucaauuugcccuuggacagggaacaacacuaaacaacguacauucaaauaacacaguacgugauaggaccccuuaucggacccuauugaugaaugaguuagguguuccuuuucaucuggggaccaagcaagugugcauagcaugguccagcucaaguugucacgauggaaaagcauggcugcauguuuguauaacgggggaugauaaaaaugcaacugcuagcuucauuuacaaugggaggcuuguagauaguguuguuucaugguccaaagaaauccucaggacccaggagucagaaugcguuuguaucaauggaacuuguacaguaguaaugacugaugggagugcuucaggaaaagcugauacuaaaauauuauucauugaggagggaaaaaucguucauacuagcacauugucaggaagugcucagcaugucgaggagugcuccugcuauccucgauauccuggugucagaugugucugcagagacaacuggaaaggauccaauaggcccaucguagauauaaacauaaaggaucauagcauugucuccaguuauguguguucaggacuuguuggagacacacccagaaaaaacgacagcuccagcaguagccauuguuuggauccuaacaaugaggaagguggucauggggugaaaggcugggccuuugaugauggaaaugacguguggaugggaagaacgaucagcgaaaagucacgcuuaggguaugaaaccuucaaagucauugaaggcugguccaacccuaaguccaaauugcagauaaauaggcaagucauaguuggcagagguaauagguccgguuauucugguauuuucucuguugaaggcaaaagcugcaucaaucggugcuuuuauguggaguugauaaggggaagaaaagaggaaacugaagucuuguggaccucaaacaguauuguuguguuuuguggcaccucagguacauauggaacaggcucauggccugauggggcggacaucaaucucaugccuguauaa

SEQ ID NO: 51154 - RNA, 1410 nt, Artificial Sequence
  derived and/or modified CDS sequence (wt) from neuraminidase__InfluenzaA__ADK87307
augaauccaaaucaaaagguaauaacgauuggcucuguuucucucaccauuuccacaauaugcuucuucaugcaaauugccaucuugauaacuacuguaacauugcauuucaagcaauaugaauucaacucccccccaaacaaccaagugaugcugugugaaccaacaauaauagaaagaaacauaacagagauaguguaucugaccaacaccaccauagagaaggaaauaugccccaaacuagcagaauacagaaauuggucaaagccgcaaugugacauuacaggguuugcaccuuuuucuaaggacaauucgauuaggcuuuccgcugguggggacaucugggugacaagagaaccuuaugugucaugcgauccugacaaguguuaucaauuugcccuuggacagggaacaacacuaaacaacguacauucaaauaacacaguacgugauaggaccccuuaucggacccuauugaugaaugaguuagguguuccuuuucaucuggggaccaagcaagugugcauagcaugguccagcucaaguugucacgauggaaaagcauggcugcauguuuguauaacgggggaugauaaaaaugcaacugcuagcuucauuuacaaugggaggcuuguagauaguguuguuucaugguccaaagaaauccucaggacccaggagucagaaugcguuuguaucaauggaacuuguacaguaguaaugacugaugggagugcuucaggaaaagcugauacuaaaauauuauucauugaggagggaaaaaucguucauacuagcacauugucaggaagugcucagcaugucgaggagugcuccugcuauccucgauauccuggugucagaugugucugcagagacaacuggaaaggauccaauaggcccaucguagauauaaacauaaaggaucauagcauugucuccaguuauguguguucaggacuuguuggagacacacccagaaaaaacgacagcuccagcaguagccauuguuuggauccuaacaaugaggaagguggucauggggugaaaggcugggccuuugaugauggaaaugacguguggaugggaagaacgaucagcgagaagucacgcuuaggguaugaaaccuucaaagucauugaaggcugguccaacccuaaguccaaauugcagauaaauaggcaagucauaguuggcagagguaauagguccgguuauucugguauuuucucuguugaaggcaaaagcugcaucaaucggugcuuuuauguggaguugauagggggaagaaaagaggaaacugaagucuuguggaccucaaacaguauuguuguguuuuguggcaccucagguacauauggaacaggcucauggccugauggggcggacaucaaucucaugccuguauag

SEQ ID NO: 51155 - RNA, 1410 nt, Artificial Sequence
  derived and/or modified CDS sequence (wt) from neuraminidase__InfluenzaA__ADK87312
augaauccaaaccaaacgauaauaaccauugguucggucuguaugacaauuggaauggcuaacuugauauuacaaauuggaaacauaaucucaauauggauuagccacucaauucaacuugggaaucaaaaucagauugaaacaugcaaucaaagcgucauuacuuaugaaaacaacacuuggguaaaucagacauauguuaacaucagcaacaccaacuuugcugcuggacagucagugauuuccgugaaauuagcgggcaauuccucucucugcccuguuaguggaugggcuauauacaguaaagacaacaauauaagaaucgguuccaagggggauguguuugucauaagggaaccauucauaucaugcucccccuuggaaugcagaaccuucuucuugacucaaggggccuugcuaaaugacaaacauuccaauggaaccauuaaagacaggagcccauaucgaacccuaaugagcuguccuauuggugaaguucccucuccauacaacucaagauuugagucagucgcuuggucagcaagugcuugucaugauggcaucaauuggcuaacaauuggaauuucuggcccagacaauggggcaguggcuguguuaaaguacaacggcauaauaacagacacuaucaagaguuggagaaacaauauauugagaacacaagagucugaaugugcauguguaaaugguucuugcuuuacuguaaugaccgauggaccaagugauggacaggccucauacaagaucuucagaauagaaaagggaaagauagucaaaucagucgaaaugaaugccccuaauuaucacuaugaggaaugcuccuguuauccugauucuagugaaaucacaugugugugcagggauaacuggcauggcucgaaucgaccgugggugucuuucaaccagaaucuggaauaucagauaggauacauaugcagugggauuuucggagacaauccacgcccuaaugauaagacaggcaguugugguccaguaucgucuaauggagcaaauggaguaaaaggauuuucauucaaauacggcaaugguguuuggauagggagaacuaaaagcauuaguucaagaaacgguuuugagaugauuugggauccgaacggauggacugggacagacaauaacuucucaauaaagcaagauaucguaggaauaaaugaguggucaggauauagcgggaguuuuguucagcauccagaacuaacagggcuggauuguauaagaccuugcuucuggguugaacuaaucagagggcgacccaaagagaacacaaucuggacuagcgggagcagcauaucuuuuugugguguaaacagugacacuguggguuggucuuggccagacggugcugaguugccauuuaccauugacaaguaa

SEQ ID NO: 51156 - RNA, 1410 nt, Artificial Sequence
  derived and/or modified CDS sequence (wt) from neuraminidase__InfluenzaA__ADK87314
augaauccaaaucaaaagauaauaacgauuggcucuguuucucucaccauuuccacaauaugcuucuucaugcaaauugccaucuugauaacuacuguaacauugcauuucaagcaauaugaauucaacucccccccaaacaaccaagugaugcugugugaaccaacaauaauagaaggaaacauaacagagauaguguaucugaccaacaccaccauagagaaggaaaugugccccaaacuagcagaauacagaaauuggucaaagccgcaaugugacauuacaggguuugcaccuuuuucuaaggacaauucgauuaggcuuuccgcugguggggacaucugggugacaagagaaccuuaugugucaugcgauccugacaaguguuaucaauuugcccuuggacagggaacaacacuaaacaacguacauucaaauaacacaguacgugauaggaccccuuaucggacccuauugaugaaugaguuagguguuccuuuucaucuggggaccaagcaagugugcauagcaugguccagcucaaguugucacgauggaaaagcauggcugcauguuuguauaacgggggaugauaaaaaugcaacugcuagcuucauuuacaaugggaggcuuguagauaguguuguuucaugguccaaagaaauccucaggacccaggagucagaaugcguuuguaucaauggaacuuguacaguaguaaugacugaugggagugcuucaggaaaagcugauacuaaaauauuauucauugaggagggaaaaaucguucauacuagcacaucgucaggaagugcucagcaugucgaggagugcuccugcuauccucgauauccuggugucagaugugucugcagagacaacuggaaaggauccaauaggcccaucguagauauaaacauaaaggaucauagcauugucuccaguuauguguguucaggacuuguuggagacacacccagaaaaaacgacagcuccagcaguagccauuguuuggauccuaacaaugaggaagguggucauggggugaaaggcugggccuuugaugauggaaaugacguguggaugggaagaacgaucagcgaaaagucacgcuuaggguaugaaaccuucaaagucauugaaggcugguccaacccuaaguccaaauugcagauaaauaggcaagucauaguugacagagguaauagguccgguuauucugguauuuucucuguugaaggcaaaagcugcaucaaucggugcuuuuauguggaguugauaaggggaagaaaagaggaaacugaagucuuguggaccucaaacaguauuguuguguuuuguggcaccucagguacauauggaacaggcucauggccugauggggcggacaucaaucucaugccuguauaa

SEQ ID NO: 51157 - RNA, 1410 nt, Artificial Sequence
  derived and/or modified CDS sequence (wt) from neuraminidase__InfluenzaA__ADK87316
augaauccaaaccaaaagauaauaaccauugguucggucuguaugacaauuggaauggcuaacuuaauauuacaaauuggaaacauaaucucaauauggauuagccacucaauucaacuugggaaucaaaaucagauugaaacaugcaaucaaagcgucauuacuuaugaaaacaacacuuggguaaaucagacauauguuaacaucagcaacacuaacuuugcugcuggacagucagugguuuccgugaaauuagcgggcaauuccucucucugcccuguuaguggaugggcuauauacaguaaagacaacaguauaagaaucgguuccaagggggauguguuugucauaagggaaccauucauaucaugcucccccuuggaaugcagaaccuucuucuugacucaaggggccuugcuaaaugacaaacauuccaauggaaccauuaaagacaggagcccauaucgaacccuaaugagcuguccuauuggugaaguucccucuccauacaacucaagauuugagucagucgcuuggucagcaagugcuugucaugauggcaucaauuggcuaacaauuggaauuucuggcccagacaauggggcaguggcuguguuaaaguacaacggcauaauaacagacacuaucaagaguuggagaaacaauauauugagaacacaagagucugaaugugcauguguaaaugguucuugcuuuacuguaaugaccgauggaccaagugauggacaggccucauacaagaucuucagaauagaaaagggaaagauagucaaaucagucgaaaugaaugccccuaauuaucacuaugaggaaugcuccuguuauccugauucuagugaaaucacaugugugugcagggauaacuggcauggcucgaaucgaccgugggugucuuucaaccagaaucuggaauaucagauaggguacauaugcagugggauuuucggagacaauccacgcccuaaugauaagacaggcaguugugguccaguaucgucuaauggagcaaauggaguaaaaggauuuucauucaaauacggcaaugguguuuggauagggagaacuaaaagcauuaguucaagaaacgguuuugagaugauuugggauccgaacggauggacugggacagacaauaacuucucaauaaagcaagauaucguaggaauaaaugaguggucaggauauagcgggaguuuuguucagcauccagaaauaacagggcuggauuguauaagaccuugcuucuggguugaacuaaucagagggcgacccaaagagaacacaaucuggacuagcgggagcagcauauccuuuugugguguaaacagugacacuguggguuggucuuggccagacggugcugaguugccauuuaccauugacaaguaa

SEQ ID NO: 51158 - RNA, 1410 nt, Artificial Sequence
  derived and/or modified CDS sequence (wt) from neuraminidase__InfluenzaA__ADK87318
augaauccaaaccaaaagauaauaaccauugguucggucuguaugacaauuggaauggcuaacuuaauauuacaaauuggaaacauaaucucaauauggauuagccacucaauucaacuugggaaucaaaaucagauugaaacaugcaaucaaagcgucauuacuuaugaaaacaacacuuggguaaaucagacauauguuaacaucagcaacaccaacuuugcugcuggacagucagugguuuccgugaaauuagcgggcaauuccucucucugcccuguuaguggaugggcuauauacaguaaagacaacaguauaagaaucgguuccaagggggauguguuugucauaagggaaccauucauaucaugcucccccuuggaaugcagaaccuucuucuugacucaaggggccuugcuaaaugacaaacauuccaauggaaccauuaaagacaggagcccauaucgaacccuaaugagcuguccuauuggugaaguucccucuccauacaacucaagauuugagucagucgcuuggucagcaagugcuugucaugauggcaucaauuggcuaacaauuggaauuucuggcccagacaauggggcaguggcuguguuaaaguacaacggcauaauaacagacacuaucaagaguuggagaaacaauauauugagaacacaagagucugaaugugcauguguaaaugguucuugcuuuacuguaaugaccgauggaccaagugauggacaggccucguacaagaucuucagaauagaaaagggaaagauagucaaaucagucgaaaugaaugccccuaauuaucacuaugaggaaugcuccuguuauccugauucuagugaaaucacaugugugugcagggauaacuggcauggcucgaaucgaccgugggugucuuucaaccagaaucuggaauaucagauaggguacauaugcagugggauuuucggagacaauccacgcccuaaugauaagacaggcaguugugguccaguaucgucuaauggagcaaauggaguaaaaggauuuucauucaaauacggcaaugguguuuggauagggagaacuaaaagcauuaguucaagaaacgguuuugagaugauuugggauccgaacggauggacugggacagacaauaacuucucaauaaagcaagauaucguaggaauaaaugaguggucaggauauagcgggaguuuuguucagcauccagaacuaacagggcuggauuguauaagaccuugcuccuggguugaacuaaucagagggcgacccaaagagaacacaaucuggacuagcgggagcagcacauccuuuugugguguaaacagugacacuguggguuggucuuggccagacggugcugaguugccauuuaccauugacaaguaa

SEQ ID NO: 51159 - RNA, 1410 nt, Artificial Sequence
  derived and/or modified CDS sequence (wt) from neuraminidase__InfluenzaA__ADK87320
augaauccaaaccaaaagauaauaaccauugguucggucuguaugacaauuggaauggcuaacuuaauauuacaaauuggaaacauaaucucaauauggauuagccacucaauucaacuugggaaucaaaaucagauugaaacaugcaaucaaagcgucauuacuuaugaaaacaacacuuggguacaucagacauauguuaacaucagcaacaccaacuuugcugcuggacagucagugguuuccgugaaauuagcgggcaauuccucucucugcccuguuaguggaugggcuauauacaguaaagacaacaguauaagaaucgguuccaagggggauguguuugucauaagggaaccauucauaucaugcucccccuuggaaugcagaaccuucuucuugacucaaggggccuugcuaaaugacaaacauuccaauggaaccauuaaagacaggagcccauaucgaacccuaaugagcuguccuauuggugaaguucccucuccauacaacucaagauuugagucagucgcuuggucagcaagugcuugucaugauggcaucaauuggcuaacaauuggaauuucuggcccagacaauggggcaguggcuguguuaaaguacaacggcauaauaacagacacuaucaagaguuggagaaacaauauauugagaacacaagagucugaaugugcauguguaaaugguucuugcuuuacuguaaugaccgauggaccaagugauggacaggccucauacaagaucuucagaauagaaaagggaaagauagucaaaucagucgaaaugaaugccccuaauuaucacuaugaggaaugcuccuguuauccugauucuagugaaaucacaugugugugcagggauaacuggcauggcucgaaucgaccgugggugucuuucaaccagaaucuggaauaucagauaggguacauaugcagugggauuuucggagacaauccacgcccuaaugauaagacaggcaguugugguccaguaucgucuaauggagcaaauggaguaaaaggauuuucauucaaauacggcaaugguguuuggauagggagaacuaaaagcauuaguucaagaaacgguuuugagaugauuugggauccgaacggauggacugggacagacaauaacuucucaauaaagcaagauaucguaggaauaaaugaguggucaggauauagcgggaguuuuguucagcauccagaacuaacagggcugaauuguauaagaccuugcuucuggguugaacuaaucagagggcgacccaaagagaacacaaucuggacuagcgggagcagcauauccuuuugugguguaaacagugacacuguggguuggucuuggccagacggugcugaguugccauuuaccauugacaaguaa

SEQ ID NO: 51160 - RNA, 1410 nt, Artificial Sequence
  derived and/or modified CDS sequence (wt) from neuraminidase__InfluenzaA__ADK87324
augaauccaaaucaaaagauaauaacgauuggcucuguuucucucaccauuuccacaauaugcuuccucaugcaaauugccaucuugauaacuacuguaacauugcauuucaagcaauaugaauucaacucccccccaaacaaccaagugaugcugugugaaccaacaauaauagaaagaaacauaacagagauaguguaucugaccaacaccaccauagagaaggaaauaugccccaagcuagcagaauacagaaauuggucaaagccgcaaugugacauuacaggguuugcaccuuuuucuaaggacaauucgauuaggcuuuccgcugguggggacaucugggugacaagagaaccuuaugugucaugcgauccuggcaaguguuaucaauuugcccuuggacagggaacaacacuaaacaacguacauucaaauaacacaguacgugauaggaccccuuaucggacccuauugaugaaugaguuagguguuccuuuucaucuggggaccaagcaagugugcauagcaugguccagcucaaguugucacgauggaaaagcauggcugcauguuuguauaacgggggaugaugaaaaugcaacugcuagcuucauuuacaaugggaggcuuguagauaguguuguuucaugguccaaagaaauccucaggacccaggagucagaaugcguuuguaucaauggaacuuguacaguaguaaugacugaugggagugcuucaggaaaagcugauacuaaaauauuauucauugaggagggaaaaaucguucauacuagcacauugucaggaagugcucagcaugucgaggagugcuccugcuauccucgauauccuggugucagaugugucugcagagacaacuggaaaggauccaauaggcccaucguagauauaaacauaaaggaucauagcauugucuccaguuauguguguucaggacuuguuggagacacacccagaaaaaacgacagcuccagcaguagccauuguuuggauccuaacaaugaggaagguggucauggggugaaaggcugggccuuugaugauggaaaugacguguggaugggaagaacgaucagcgagaagucacgcuuaggguaugaaaccuucaaagucauugaaggcugguccaacccuaaguccaaauugcagauaaauaggcaagucauaguugacagagguaauagguccgguuauuccgguauuuucucuguugaaggcaaaagcugcaucaaucggugcuuuuauguggaguugauaaggggaagaaaagaggaaacugaagucuuguggaccucaaacaguauuguuguguuuuguggcaccucagguacauauggaacaggcucauggccugauggggcggacaucaaucucaugccuguauaa

SEQ ID NO: 51161 - RNA, 1410 nt, Artificial Sequence
  derived and/or modified CDS sequence (wt) from neuraminidase__InfluenzaA__ADK87327
augaauccaaaucaaaagauaaugacgauuggcucuguuucucucaccauuuccacaauaugcuucuucaugcaaauugccaucuugauaacuacuguaacauugcauuucaagcaauaugaauucaacucccccccaaacaaccaagugaugcugugugaaccaacaauaauagaaagaaacauaacagagauaguguaucugaccaacaccaccauagagaaggaaauaugccccaaacuagcagaauacagaaauuggucaaagccgcaaugugacauuacaggguuugcaccuuuuucuaaggacaauucgauuaggcuuuccgcugguggggacaucugggugacaagagaaccuuaugugucaugcgauccugacaaguguuaucaauuugcccuuggacagggaacaacacuaaacaacguacauucaaauaacacaguacgugauaggaccccuuaucggacccuauugaugaaugaguuagguguuccuuuucaucuggggaccaagcaagugugcauagcaugguccagcucaaguugucacgauggaaaagcauggcugcauguuuguauaacgggggaugauaaaaaugcaacugcuagcuucauuuacaaugggaggcuuguagauaguguuguuucaugguccaaagaaauccucaggacccaggagucagaaugcguuuguaucaauggaacuuguacagugguaaugacugaugggagugcuucaggaaaagcugauacuaaaauauuauucauugaggagggaaaaaucguucauacuagcacauugucaggaagugcucagcaugucgaggagugcuccugcuauccucgauauccuggugucagaugugucugcagagacaacuggaaaggauccaauaggcccaucguagauauaaacauaaaggaucauagcauugucuccaguuauguguguucagggcuuguuggagacacacccagaaaaaacgacagcuccagcaguagccauuguuuggauccuaacaaugaggaagguggucauggggugaaaggcugggccuuugaugauggaaaugacguguggaugggaagaacgaucagcgagaggucacgcuuaggguaugaaaccuucaaagucauugaaggcugguccaacccuaaguccaaauugcagauaaauaggcaagucauaguugacagagguaauagguccgguuauucugguauuuucucuguugaaggcaaaagcugcaucaaucggugcuuuuauguggaguugauaaggggaagaaaagaggaaacugaagucuuguggaccucaaacagcauuguuguguuuuguggcaccucagguacauauggaacaggcucauggccugauggggcggacaucaaucucaugccuguauaa

SEQ ID NO: 51162 - RNA, 1410 nt, Artificial Sequence
  derived and/or modified CDS sequence (wt) from neuraminidase__InfluenzaA__ADK87329
augaauccaaaccaaaagauaauaaccauugguucggucuguaugacaauuggaauggcuaacuuaauauuacaaauuggaaacauaaucucaauauggauuagccacucaauucaacuugggaaucaaaaucagauugaaacaugcaaucaaagcgucauuacuuaugaaaacaacacuuggguaaaucagacauauguuaacaucagcaacaccaacuuugcugcuggacagucagugguuuccgugaaauuagcgggcaauuccucucucugcccuguuaguggaugggcuauauacaguaaagacaacaguauaagaaucgguuccaagggggauguguuugucauaagggaaccauucauaucaugcucccccuuggaaugcagaaccuucuucuugacucaaggggccuugcuaaaugacaaacauuccaauggaaccauuaaagacaggagcccauaucgaacccuaaugagcuguccuauuggugaaguucccucuccauacaacucaagauuugagucagucgcuuggucagcgagugcuugucaugauggcaucaauuggcuaacaauuggaauuucuggcccagacaauggggcaguggcuguguuaaaguacaacggcauaauaacagacacuaucaagaguuggagaaacaauauauugagaacacaagagucugaaugugcauguguaaaugguucuugcuuuacuguaaugaccgauggaccaagugauggacaggccucauacaagaucuucagaauagaaaagggaaagauagucaaaucagucgaaaugaaugccccuaauuaucacuaugaggaaugcuccuguuauccugauucuagugaaaucacaugugugugcagggauaacuggcauggcucgaaucgaccgugggugucuuucaaccagaaucuggaauaucagauaggguacauaugcagugggauuuucggagacaauccacgcccuaaugauaagacaggcaguugugguccaguaucgucuaauggagcaaauggaguaaaaggauuuucauucaaauacggcaaugguguuuggauagggagaacuaaaagcauuaguucaagaaacgguuuugagaugauuugggauccgaacggauggacugggacagacaauaacuucucaauaaagcaagauaucguaggaauaaaugaguggucaggauauagcgggaguuuuguucagcauccagaacuaacagggcuggauuguauaagaccuugcuucuggguugaacuaaucagagggcgacccaaagagaacacaaucuggacuagcgggagcagcauauccuuuugugguguaaacagugacacuguggguuggucuuggccagacggugcugaguugccauuuaccauugacaaguaa

SEQ ID NO: 51163 - RNA, 1410 nt, Artificial Sequence
  derived and/or modified CDS sequence (wt) from neuraminidase__InfluenzaA__ADK87330
augaauccaaaccaaaagauaauaaccauugguucggucuguaugacaauuggaauggcuaacuuaauauuacaaauuggaaacauaaucucaauauggauuagccacucaauucaacuugggaaucaaaaucagauugaaacaugcaaucaaagcgucauuacuuaugaaaacaacacuuggguaaaucagacauauguuaacaucagcaacaccaacuuugcugcuggacagucagugguuuccgugaaauuagcgggcaauuccucucucugcccuguuaguggaugggcuauauacaguaaagacaacaguauaagaaucgguuccaagggggauguguuugucauaagggaaccauucauaucaugcucccccuuggaaugcagaaccuucuucuugacucaaggggccuugcuaaaugacaaacauuccaauggaaccauuaaagacaggagcccauaucgaacccuaaugagcuguccuauuggugaaguucccucuccauacaacucaagauuugagucagucgcuuggucagcaagugcuugucaugauggcaucaauuggcuaacaauuggaauuucuggcccagacaauggggcaguggcuguguuaaaguacaacggcauaauaacagacacuaucaagaguuggagaaacaauauauugagaacacaagagucugaaugugcauguguaaaugguucuugcuuuacuguaaugaccgauggaccaagugauggacaggccucauacaagaucuucagaauagaaaagggaaagauagucaaaucagucgaaaugaaugccccuaauuaucacuaugaggaaugcuccuguuauccugauucuagugaaaucacaugugugugcagggauaacuggcauggcucgaaucgaccgugggugucuuucaaccagaaucuggaauaucagauaggguacauaugcagugggauuuucggagacaauccacgcccuaaugauaagacaggcaguugugguccaguaucgucuaauggagcaaauggaguaaaaggauuuucauucaaauacggcaaugguguuuggauagggagaacuaaaagcauuaguucaagaaacgguuuugagaugauuugggauccgaacggauggacugggacagacaauaacuucucaauaaagcaagauaucguaggaauaaaugaguggucaggauauagcgggaguuuuguucagcauccagaacuaacagggcuggauuguauaagaccuugcuucuggguugaacuaaucagagggcgacccaaagagaacacaaucugggcuagcgggagcagcauauccuuuugcgguguaaacagugacacuguggguuggucuuggccagacggugcugaguugccauuuaccauugacaaguaa

SEQ ID NO: 51164 - RNA, 1410 nt, Artificial Sequence
  derived and/or modified CDS sequence (wt) from neuraminidase__InfluenzaA__ADK87331
augaauccaaaccaaaagauaauaaccauugguucggucuguaugacaauuggaauggcuaacuuaauauuacaaauuggaaacauaaucucaauauggauuagccacucaauucaacuugggaaucaaaaucagauugaaacaugcaaucaaagcgucauuacuuaugaaaacaacacuuggguaaaucagacauauguuaacaucagcaacaccaacuuugcugcuggacagucagugguuuccgugaaauuagcgggcaauuccucucucugcccuguuaguggaugggcuauauacaguaaagacaacaguauaagaaucgguuccaagggggauguguuugucauaagggaaccauucauaucaugcucccccuuggaaugcagaaccuucuucuugacucaaggggccuugcuaaaugacaaacauuccaauggaaccauuaaagacaggagcccauaucgaacccuaaugagcuguccuauuggugaaguucccucuccauacaacucaagauuugagucagucgcuuggucagcaagugcuugucaugauggcaucaauuggcuaacaauuggaauuucuggcccagacaauggggcaguggcuguguuaaaguacaacggcauaauaacagacacuaucaagaguuggagaaacaauauauugagaacacaagagucugaaugugcauguguaaaugguucuugcuuuacuguaaugaccgauggaccaagugauggacaggccucauacaagaucuucagaauagaaaagggaaagauagucaaaucagucgaaaugaaugccccuaauuaucacuaugaggaaugcuccuguuauccugauucuagugaaaucacaugugugugcagggauaacuggcauggcucgaaucgaccgugggugucuuucaaccagaaucuggaauaucagauaggguacauaugcagugggauuuucggagacaauccacgcccuaaugauaagacaggcaguugugguccaguaucgucuaauggagcaaauggaguaaaaggauuuucauucaaauacggcaaugguguuuggauagggagaacuaaaagcauuaguucaagaaacgguuuugagaugauuugggauccgaacggauggacugggacagacaauaacuucucaauaaagcaagauaucguaggaauaaaugaguggucaggauauagcgggaguuuuguucagcauccagaacuaacagggcuggauuguauaagaccuugcuucuggguugaacugaucagagggcgacccaaagagaacacaaucuggacuagcgggagcagcauauccuuuugugguguaaacagugacacuguggguuggucuuggccagacggugcugaguugccauuuaccauugacaaguaa

SEQ ID NO: 51165 - RNA, 1410 nt, Artificial Sequence
  derived and/or modified CDS sequence (wt) from neuraminidase__InfluenzaA__ADK87332
augaauccaaaccaaaagauaauaaccauugguucggucuguaugacaauuggaauggcuaacuuaauauuacaaauuggaaacauaaucucaauauggauuagccacucaauucaacuugggaaucaaaaucagauugaaacaugcaaucaaagcgucauuacuuaugaaaacaacacuuggguaaaucagacauauguuaacaucagcaacaccaacuuugcugcuggacagucagugguuuccgugaaauuagcgggcaauuccucucucugcccuguuaguggaugggcuauauacaguaaagacaacaguauaagaaucgguuccaagggggauguguuugucauaagggaaccauucauaucaugcucccccuuggaaugcagaaccuucuucuugacucaaggggccuugcuaaaugacaaacauuccaauggaaccauuaaagacaggagcccauaucgaacccuaaugagcuguccuauuggugaaguucccucuccauacaacucaagauuugagucagucgcuuggucagcaagugcuugucaugauggcaucaauuggcuaacaauuggaauuucuggcccagacaauggggcaguggcuguguuaaagcacaacggcauaauaacagacacuaucaagaguuggagaaauaauauauugagaacacaagagucugaaugugcauguguaaaugguucuugcuuuacuguaaugaccgauggaccaagugauggacaggccucauacaagaucuucagaauagaaaagggaaagauagucaaaucagucgaaaugaaugccccuaauuaucacuaugaggaaugcuccuguuauccugauucuagugaaaucacaugugugugcagggauaacuggcauggcucgaaucgaccgugggugucuuucaaccagaaucuggaauaucagauaggguacauaugcagugggauuuucggagacaauccacgcccuaaugauaagacaggaaguugugguccaguaucgucuaauggagcaaauggaguaaaaggauuuucauucaaauacggcaaugguguuuggauagggagaacuaaaagcauuaguucaagaaacgguuuugagaugauuugggauccgaacggauggacugggacagacaauaacuucucaauaaagcaagauaucguaggaauaaaugaguggucaggauauagcgggaguuuuguucagcauccagaacuaacagggcuggauuguauaagaccuugcuucuggguugaacuaaucagagggcgacccaaagagaacacaaucuggacuagcgggagcagcauauccuuuugugguguaaacagugacacuguggguuggucuuggccagacggugcugaguugccauuuaccauugacaaguaa

SEQ ID NO: 51166 - RNA, 1410 nt, Artificial Sequence
  derived and/or modified CDS sequence (wt) from neuraminidase__InfluenzaA__ADK87333
augaauccaaaccaaaagauaauaaccauugguucggucuguaugacaauuggaauggcuaacuuaauauuacaaauuggaaacauaaucucaauauggauuagccacucaauucaacuugggaaucaaaaucagauugaaacaugcaaucaaagcgucauuacuuaugaaaacaacacuuggguaaaucagacauauguuaacaucagcaacaccaacuuugcugcuggacagucagugguuuccgugaaauuagcgggcaauuccucucucugcccuguuaguggaugggcuauauacaguaaagacaacaguauaagaaucgguuccaagggggauguguuugucauaagggaaccauucauaucaugcucccccuuggaaugcagaaccuucuucuugacucaaggggccuugcuaaaugacaaacauuccaauggaaccauuaaagacaggagcccauaucgaacccuaaugagcuguccuauuggugaaguucccucuccauacaacucaagauuugagucagucgcuuggucagcaagugcuugucaugauggcaucaauuggcuaacaauuggaauuucuggcccagacaauggggcaguggcuguguuaaaguacaacggcauaauaacagacacuaucaagaguuggagaaauaauauauugagaacacaagagucugaaugugcauguguaaaugguucuugcuuuacuguaaugaccgauggaccaagugauggacaggccucauacaagaucuucagaauagaaaagggaaagauagucaaaucagucgaaaugaaugccccuaauuaucacuaugaggaaugcuccuguuaucccuauucuagugaaaucacaugugugugcagggauaacuggcauggcucgaaucgaccgugggugucuuucaaccagaaucuggaauaucagauaggguacauaugcagugggauuuucggagacaauccacgcccuaaugauaagacaggaaguugugguccaguaucgucuaauggagcaaauggaguaaaaggauuuucauucaaauacggcaaugguguuuggauagggagaacuaaaagcauuaguucaagaaacgguuuugagaugauuugggauccgaacggauggacugggacagacaauaacuucucaauaaagcaagauaucguaggaauaaaugaguggucaggauauagcgggaguuuuguucagcauccagaacuaacagggcuggauuguauaagaccuugcuucuggguugaacuaaucagagggcgacccaaagagaacacaaucuggacuagcgggagcagcauauccuuuugugguguaaacagugacacuguggguuggucuuggccagacggugcugaguugccauuuaccauugacaaguaa

SEQ ID NO: 51167 - RNA, 1410 nt, Artificial Sequence
  derived and/or modified CDS sequence (wt) from neuraminidase__InfluenzaA__ADK87335
augaauccaaaucaaaagauaauaacgauugguucuguuucucucaccauuuccacaauaugcuucuucaugcaaauugccaucuugauaacuacuguaacauugcauuucaagcaauaugaauucaacucccccccaaacaaccaagugaugcugugugagccaacaauaauagaaagaaacauaacagagauaguguaucugaccaacaccaccauagagaaggaaauaugccccaaacuagcagaauacagaaauuggucaaagccgcaaugugacauuacaggguuugcaccuuuuucuaaggacaauucgauuaggcuuuccgcugguggggacaucugggugacaagagaaccuuaugugucaugcgauccugacaggcguuaucaauuugcccuuggacagggaacaacacuaaacaacguacauucagauaacacaguacgugauaggaccccuuaucggacccuauugaugaaugaguuagguguuccuuuucaucuggggaccaagcaagugugcauagcaugguccagcucaaguugucacgauggaaaagcauggcugcauguuuguauaacgggggaugauaaaaaugcaacugcuagcuucauuuacaaugggaggcuuguagauaguguuguuucaugguccaaagaaauccucaggacccaggagucagaaugcguuuguaucaauggaacuuguacaguaguaaugacugaugggagugcuucaggaaaagcugauacuaaaauacuauucauugaggaggggaaaaucguucauacuagcacauugucaggaaaugcucagcaugucgaggagugcuccugcuauccucgauauccuggugucagaugugucugcagagacaacuggaaaggauccaauaggcccaucguagauauaaacauaaaggaucauagcauugucuccaguuauguguguucaggacuuguuggagacacacccagaaaaaacgacagcuccagcaguagccauuguuuggauccuaacaaugaggaagguggucauggggugaaaggcugggccuuugaugauggaaaugacguguggaugggaagaacgaucagcgagaagucacgcuuaggguaugaaaccuucaaagucauugaaggcugguccaacccuaaguccaaauugcagauaaauaggcaagucauagucgacagagguaauagguccgguuauucugguauuuucucuguugaaggcaaaagcugcaucaaucggugcuuuuauguggaguugauaaggggaagaaaagaggaaacugaagucuuguggaccucaaacaguauuguuguguuuuguggcaccucagguacauauggaacaggcucauggccugauggggcggacaucaaucucaugccuauauaa

SEQ ID NO: 51168 - RNA, 1410 nt, Artificial Sequence
  derived and/or modified CDS sequence (wt) from neuraminidase__InfluenzaA__ADK87337
augaauccaaaucaaaagauaauaacgauugguucuguuucucucaccauuuccacaauaugcuucuucaugcaaauugccaucuugauaacuacuguaacauugcauuucaagcaauaugaauucaacucccccccaaacaaccaagugaugcugugugagccaacaauaauagaaagaaacauaacagagauaguguaucugaccaacaccaccauagagaaggaaauaugccccaaacuagcagaauacagaaauuggucaaagccgcaaugugacauuacaggguuugcaccuuuuucuaaggacaauucgauuaggcuuuccgcugguggggacaucugggugacaagagaaccuuaugugucaugcgauccugacaaguguuaucaauuugcccuuggacagggaacaacacuaaacaacguacauucaaauaacgcaguacgugauaggaccccuuaucggacccuauugaugaaugaguuagguguuccuuuucaucuggggaccaagcaagugugcauagcaugguccagcucaaguugucacgauggaaaagcauggcugcauguuuguauaacgggggaugauaaaaaugcaacugcuagcuucauuuacaaugggaggcuuguagauaguguuguuucaugguccaaagaaauccucaggacccaggagucagaaugcguuuguaucaauggaacuuguacaguaguaaugacugaugggagugcuucaggaaaagcugauacuaaaauacuauucauugaggaggggaaaaucguucauacuagcacauugucaggaaaugcucagcaugucgaggagugcuccugcuauccucgauauccuggugucagaugugucugcagagacaacuggaaaggauccaauaggcccaucguagauauaaacauaaaggaucauagcauugucuccaguuauguguguucaggacuuguuggagacacacccagaaaaaacgacagcuccagcaguagccauuguuuggauccuaacaaugaggaagguggucauggggugaaaggcugggccuuugaugauggaaaugacguguggaugggaagaacgaucagcgagaagucacgcuuaggguaugaaaccuucaaagucauugaaggcugguccaacccuaaguccaaauugcagauaaauaggcaagucauaguugauagagguaauagguccgguuauucugguauuuucucuguugaaggcaaaagcugcaucaaucggugcuuuuauguggaguugauaaggggaagaaaagaggaaacugaagucuuguggaccucaaacaguauuguuguguuuuguggcaccucagguacauauggaacaggcucauggccugauggggcggacaucaaucucaugccuauauaa

SEQ ID NO: 51169 - RNA, 1410 nt, Artificial Sequence
  derived and/or modified CDS sequence (wt) from neuraminidase__InfluenzaA__ADK87339
augaauccaaaccaaaagauaauaaccauugguucgaucuguaugacaauuggaauggcuaauuuaauauuacaaauuggaaacauaaucucaauauggauuagccacucaauucaacuugggaaucaaaaucagauugaaacaugcaaucaaagcgucauuacuuaugaaaacaacacuuggguaaaucagacauauguuaacaucagcaacaccaacuuugcugcuggacagucagugguuuccgugaaauuagcgggcaauuccucucucugcccuguuaguggaugggcuauauacaguaaagacaacaguauaagaaucgguuccaagggggauguguuugucauaagggaaccauucauaucaugcucccccuuggaaugcagaaccuucuucuugacucaaggggccuugcuaaaugacaaacauuccaauggaaccauuaaagacaggagcccauaucgaacccuaaugagcuguccuauuggugaaguucccucuccauacaacucaagauuugagucagucgcuuggucagcaagcgcuugucaugauggcaucaauuggcuaacaauuggaauuucuggcccagacaauggggcaguggcuguguuaaaguacaacggcauaauaacagacacuaucaagaguuggagaaacaauauauugagaacacaagagucugaaugugcauguguaaaugguucuugcuuuacuguaaugaccgauggaccaagugauggacaggccucauacaagaucuucagaauagaaaagggaaagauagucaaaucagucgaaaugaaugccccuaauuaucacuaugaggaaugcuccuguuauccugauucuagugaaaucacaugugugugcagggauaacuggcauggcucgaaucgaccgugggugucuuucaaccagaaucuggaauaucagauaggauacauaugcagugggauuuucggagacaauccacgcccuaaugauaagacagguaguugugguccaguaucgucuaauggagcaaauggaguaaaaggauuuucauucaaauacggcaaugguguuuggauagggagaacuaaaagcauuaguucaagaaacgguuuugagaugauuugggauccgaacggauggacugggacagacaauaacuucucaauaaagcaagauaucguaggaauaaaugaguggucaggauauagcgggaguuuuguucagcauccagaacuaacagggcuggauuguauaagaccuugcuucuggguugaacuaaucagagggcgacccaaagagaacacaaucuggacuagcgggagcagcauauccuuuugugguguaaacagugacacuguggguuggucuuggccagacggugcugaguugccauuuaccauugacaaguaa

SEQ ID NO: 51170 - RNA, 1410 nt, Artificial Sequence; identical to SEQ ID NO: 48750
  derived and/or modified CDS sequence (wt) from neuraminidase__InfluenzaA__ADK90209

SEQ ID NO: 51171 - RNA, 1410 nt, Artificial Sequence
  derived and/or modified CDS sequence (wt) from neuraminidase__InfluenzaA__ADK90213
augaauccaaaccaaaagauaauaaccauugguucggucuguaugacaauuggaauggcuaacuuaauauuacaaauuggaaacauaaucucaauauggauuagccacucaauucaacuugggaaucaaaaucagauugaaacaugcaaucaaagcgucauuacuuaugaaaacaacacuuggguaaaucagacauauguuaacaucagcaacaccaacuuugcugcuggacagucagugguuuccgugaaauuagcgggcaauuccucucucugcccuguuaguggaugggcuauauacaguaaagacaacaguauaagaaucgguuccaaaggggauguguuugucauaagggaaccauucauaucaugcucccccuuggaaugcagaaccuucuucuugacucaaggggccuugcuaaaugacaaacauuccaauggaaccauuaaagacaggagcccauaucgaacccuaaugagcuguccuauuggugaaguucccucuccauacaacucaagauuugagucagucgcuuggucagcaagugcuugucaugauggcaucaauuggcuaacaauuggaauuucuggcccagacaauggggcaguggcuguguuaaaguacaacggcauaauaacagacacuaucaagaguuggagaaacaauauauugagaacacaagagucugaaugugcauguguaaaugguucuugcuuuacuguaaugaccgauggaccaagugauggacaggccucauacaagaucuucagaauagaaaagggaaagauagucaaaucagucgaaaugaaugccccuaauuaucacuaugaggaaugcuccuguuauccugauucuagugaaaucacaugugugugcagggauaacuggcauggcucgaaucgaccgugggugucuuucaaccagaaucuggaauaucagauaggauacauaugcagugggauuuucggagacaauccacgcccuaaugauaagacaggcaguugugguccaguaucgucuaauggagcaaauggaguaaaaggauuuucauucaaauacggcaaugguguuuggauagggagaacuaaaagcauuaguucaagaaacgguuuugagaugauuugggauccgaacggauggacugggacagacaauaacuucucaauaaagcaagauaucguaggaauaaaugaguggucaggauauagcgggaguuuuguucagcauccagaacuaacagggcuggauuguauaagaccuugcuucuggguugaacuaaucagagggcgacccaaagagaacacaaucuggacuagcgggagcagcauauccuuuugugguguaaacagugacacuguggguuggucuuggccagacggugcugaguugccauuuaccauugacaaguaa

SEQ ID NO: 51172 - RNA, 1410 nt, Artificial Sequence; identical to SEQ ID NO: 51171
  derived and/or modified CDS sequence (wt) from neuraminidase__InfluenzaA__ADK90217

SEQ ID NO: 51173 - RNA, 1410 nt, Artificial Sequence
  derived and/or modified CDS sequence (wt) from neuraminidase__InfluenzaA__ADK90221
augaauccaaaccaaaagauaauaaccauugguucggucuguaugacaauuggaauggcuaacuuaauauuacaaauuggaaacauaaucucaauauggauuagccacucaauucaacuugggaaucaaaaucagauugaaacaugcaaucaaagcgucauuacuuaugaaaacaacacuuggguaaaucagacauauguuaacaucagcaacaccaacuuugcugcuggacagucagugguuuccgugaaauuagcgggcaauuccucucucugcccuguuaguggaugggcuauauacaguaaagacaacaguauaagaaucgguuccaagggggauguguuugucauaagggaaccauucauaucaugcucccccuuggaaugcagaaccuucuucuugacucaaggggccuugcuaaaugacaaacauuccaauggaaccauuaaagacaggagcccacaucgaacccuaaugagcuguccuauuggugaaguucccucuccauacaacucaagauuugagucagucgcuuggucagcaagugcuugucaugauggcaucaauuggcuaacaauuggaauuucuggcccagacaauggggcaguggcuguguuaaaguacaacggcauaauaacagacacuaucaagaguuggagaaacaauauauugagaacacaagagucugaaugugcauguguaaaugguucuugcuuuacuguaaugaccgauggaccaagugauggacaggccucauacaagaucuucagaauagaaaaggggaagauagucaaaucagucgaaaugaaugccccuaauuaccacuaugaggaaugcuccuguuauccugauucuagugaaaucacauguguaugcagggauaacuggcauggcucgaaucgaccgugggugucuuucaaccagaaucuggaauaucagauaggauacauaugcagugggauuuucggagacaauccacgcccuaaugauaagacaggcaguugugguccaguaucgucuaauggagcaaauggaguaaaaggauuuucauucaaauacggcaaugguguuuggauagggagaacuaaaagcauuaguucaagaaacgguuuugagaugauuugggauccgaacggauggacugggacagacaauaacuucucaauaaagcaagauaucguaggaauaaaugaguggucaggauauagcgggaguuuuguucagcauccagaacuaacagggcuggauuguauaagaccuugcuucuggguugaacuaaucagagggcgacccaaagagaacacaaucuggacuagcgggagcagcauauccuuuugugguguaaacagugacacuguggguuggucuuggccagacggugcugaguugccauuuaccauugacaaguaa

SEQ ID NO: 51174 - RNA, 1410 nt, Artificial Sequence
  derived and/or modified CDS sequence (wt) from neuraminidase__InfluenzaA__ADK90225
augaauccaaaccaaaagauaauaaccauugguucggucuguaugacaauuggaauggcuaacuuaauauuacaaauuggaaacauaaucucaauauggauuagccacucaauucaacuugggaaucaaaaucagauugaaacaugcaaucaaagcgucauuacuuaugaaaacaacacuuggguaaaucagacauauguuaacaucagcaacaccaacuuugcugcuggacagucagugguuuccgugaaauuagcgggcaauuccucucucugcccuguuaguggaugggcuauauacaguaaagacaacaguauaagaaucgguuccaagggggauguguuugucauaagggaaccauucauaucaugcucccccuuggaaugcagaaccuucuucuugacucaaggggccuugcuaaaugacaaacauuccaauggaaccauuaaagacaggagcccacaucgaacucuaaugagcuguccuauuggugaaguucccucuccauacaacucaagauuugagucagucgcuuggucagcaagugcuugucaugauggcaucaauuggcuaacaauuggaauuucuggcccagacaauggggcaguggcuguguuaaaguacaacggcauaauaacagacacuaucaagaguuggagaaacaauauauugagaacacaagagucugaaugugcauguguaaaugguucuugcuuuacuguaaugaccgauggaccaagugauggacaggccucauacaagaucuucagaauagaaaaggggaagauagucaaaucagucgaaaugaaugccccuaauuaccacuaugaggaaugcuccuguuauccugauucuagugaaaucacauguguaugcagggauaacuggcauggcucgaaucgaccgugggugucuuucaaccagaaucuggaauaucagauaggauacauaugcagugggauuuucggagacaauccacgcccuaaugauaagacaggcaguugugguccaguaucgucuaauggagcaaauggaguaaaaggauuuucauucaaauacggcaaugguguuuggauagggagaacuaaaagcauuaguucaagaaacgguuuugagaugauuugggauccgaacggauggacugggacagacaauaacuucucaauaaagcaagauaucguaggaauaaaugaguggucaggauauagcgggaguuuuguucagcauccagaacuaacagggcuggauuguauaagaccuugcuucuggguugaacuaaucagagggcgacccaaagagaacacaaucuggacuagcgggagcagcauauccuuuugugguguaaacagugacacuguggguuggucuuggccagacggugcugaguugccauuuaccauugacaaguaa

SEQ ID NO: 51175 - RNA, 1410 nt, Artificial Sequence
  derived and/or modified CDS sequence (wt) from neuraminidase__InfluenzaA__ADK90229
augaauccaaaccaaaagauaauaaccauugguucggucuguaugacaauuggaauggcuaacuuaauauuacaaauuggaaacauaaucucaauauggauuagccacucaauucaacuugggaaucaaaaucagauugaaacaugcaaucaaagcgucauuacuuaugaaaacaacacuuggguaaaucagacauauguuaacaucagcaacaccaacuuugcugcuggacagucagugguuuccgugaaauuagcgggcaauuccucucucugcccuguuaguggaugggcuauauacaguaaagacaacaguauaagaaucgguuccaagggggauguguuugucauaagggaaccauucauaucaugcucccccuuggaaugcagaaccuucuucuugacucaaggggccuugcuaaaugacaaacauuccaauggaaccauuaaagacaggagcccauaucgaacccuaaugagcuguccuauuggugaaguucccucuccauacaacucaagauuugagucagucgcuuggucagcaagugcuugucaugauggcaucaauuggcuaacaauuggaauuucuggcccagacaauggggcaguggcuguguuaaaguacaacggcauaauaacagacacuaucaagaguuggagaaacaauauauugagaacacaagagucugaaugugcauguguaaaugguucuugcuuuacuguaaugaccgauggaccaagugauggacaggccucauacaagaucuucagaauagaaaagggaaagauagucaaaucagucgaaaugaaugccccuaauuaucacuaugaggaaugcuccuguuauccugauucuagugaaaucacaugugugugcagggauaacuggcauggcucgaaucgaccgugggugucuuucaaccagaaucuggaauaucaaauaggauacauaugcagugggauuuucggagacaauccacgcccuaaugauaagacaggcaguugugguccaguaucgucuaauggagcaaauggagugaaaggauuuucauucaaauacggcaaugguguuuggauagggagaacuaaaagcauuaguucaagaaacgguuuugagaugauuugggauccgaacggauggacugggacagacaauaacuucucaauaaagcaagauaucguaggaauaaaugaguggucaggauauagcgggaguuuuguucagcauccagaacuaacagggcuggauuguauaagaccuugcuucuggguugaacuaaucagagggcgacccaaagagaacacaaucuggacuagcgggagcagcauauccuuuugugguguaaacagugacacuguggguuggucuuggccagacggugcugaguugccauuuaccauugacaaguaa

SEQ ID NO: 51176 - RNA, 1410 nt, Artificial Sequence; identical to SEQ ID NO: 48947
  derived and/or modified CDS sequence (wt) from neuraminidase__InfluenzaA__ADK90233

SEQ ID NO: 51177 - RNA, 1410 nt, Artificial Sequence
  derived and/or modified CDS sequence (wt) from neuraminidase__InfluenzaA__ADK90241
augaauccaaaccaaaagauaauaaccauugguucggucuguaugacaaucggaauggcuaacuuaauauuacaaauuggaaacauaaucucaauauggauuagccacucaauucaacuugggaaucaaaaccagauugaaacaugcaaucaaagcgucauuacuuaugaaaacaacaccuggguaaaucagacauauguuaacaucagcaacgccaacuuugcugcuggacagucagugguuuccgugaaauuagcgggcaauuccucucucugcccuguuaguggaugggcuauauacaguaaagacaacaguauaagaaucgguuccaagggggauguguuugucauaagggaaccauucauaucaugcucccccuuggaaugcagaaccuucuucuugacucaaggggccuugcuaaaugacaaacauuccaauggaaccauuaaagacaggagcccacaucgaacccuaaugagcuguccuauuggugaaguucccucuccauacaacucaagauuugagucagucgcuuggucagcaagugcuugucaugauggcaucaauuggcuaacaauuggaauuucuggcccagacaauggggcaguggcuguguuaaaguacaacggcauaauaacagacaccaucaagaguuggagaaacaauauauugagaacacaagagucugaaugugcauguguaaaugguucuugcuuuacuguaaugaccgauggaccaagugauggacaggccucauacaagaucuucagaauagaaaagggaaagauagucaaaucagucgaaaugaaugccccuaauuaccacuaugaggaaugcuccuguuauccugauucuagugaaaucacauguguaugcagggauaacuggcauggcucgaaucgaccgugggugucuuucaaccagaaucuggaauaucagauaggauacauaugcagugggauuuucggagacaauccacgcccuaaugauaagacaggcaguugugguccaguaucgucuaauggagcaaauggaguaaaaggauuuucauucaaauacggcaaugguguuuggauagggagaacuaaaagcauuaguucaagaaacgguuuugagaugauuugggauccgaacggauggacugggacagacaauaacuucucaauaaagcaagauaucguaggaauaaaugaguggucaggauauagcgggaguuuuguucagcauccagaacuaacagggcuggauuguauaagaccuugcuucuggguugaacuaaucagagggcgacccaaagagaacacaaucuggacuagcgggagcagcauauccuuuugugguguaaacagugacacuguggguuggucuuggccagacggugcugaguugccauuuaccauugacaaguaa

SEQ ID NO: 51178 - RNA, 1410 nt, Artificial Sequence
  derived and/or modified CDS sequence (wt) from neuraminidase__InfluenzaA__ADK90245
augaauccaaaccaaaagauaauaaccauugguucggucuguaugacaauuggaauggcuaacuuaauauuacaaauuggaaacauaaucucaauauggauuagccacucaauucaacuugggaaucaaaaucagauugaaacaugcaaucaaagcgucauuacuuaugaaaacaacacuuggguaaaucagacauauguuaacaucagcaacaccaacuuugcugcuggacagucagugguuuccgugaaauuagcgggcaauuccucucucugcccuguuaguggaugggcuauauacaguaaagacaacaguauaagaaucgguuccaagggggauguguuugucauaagggaaccauucauaucaugcucccccuuggaaugcagaaccuucuucuugacucaaggggccuugcuaaaugacaaacauuccaauggaaccauuaaagacaggagcccacaucgaacucuaaugagcuguccuauuggugaaguucccucuccauacaacucaagauuugagucagucgcuuggucagcaagugcuugucaugauggcaucaauuggcuaacaauuggaauuucuggcccagacaauggggcaguggcuguguuaaaguacaacggcauaauaacagacacuaucaagaguuggagaaacaauauauugagaacacaagagucugaaugugcauguguaaaugguucuugcuuuacuguaaugaccgauggaccaagugauggacaggccucauacaagaucuucagaauagaaaaggggaagauagucaaaucagucgaaaugaaugccccuaauuaccacuaugaggaaugcuccuguuauccugauucuagugaaaucacauguguaugcagggauaacuggcauggcucgaaucgaccgugggugucuuucaaccagaaucuggaauaucagauaggauacauaugcagugggauuuucggagacaauccacgcccuaaugauaagacaggcaguugugguccaguaucgucuaauggagcaaauggaguaaaaggauuuucauucaaauacggcaaugguguuuggauagggagaacuaaaagcauuaguucaagaaacgguuuugagaugauuugggauccgaacggauggacugggacagacaauaacuucucaauaaagcaagauaucguaggaauaaaugaguggucaggauauagcggaaguuuuguucagcauccagaacuaacagggcuggauuguauaagaccuugcuucuggguugaacuaaucagagggcgacccaaagagaacacaaucuggacuagcgggagcagcauauccuuuugugguguaaacagugacacuguggguuggucuuggccagacggugcugaguugccauuuaccauugacaaguaa

SEQ ID NO: 51179 - RNA, 1410 nt, Artificial Sequence
  derived and/or modified CDS sequence (wt) from neuraminidase__InfluenzaA__ADK90249
augaauccaaaccaaaagauaauaaccauugguucggucuguaugacaauuggaauggcuaacuuaauauuacaaauuggaaacauaaucucaauauggauuagccacucaauucaacuugggaaucaaaaucagauugaaacaugcaaucaaagcgucauuacuuaugaaaacaacacuuggguaaaucagacauauguuaacaucagcaacaccaacuuugcugcuggacagucagugguuuccgugaaauuagcgggcaauuccucucucugcccuguuaguggaugggcuauauacaguaaagacaacaguauaagaaucgguuccaagggggauguguuugucauaagggaaccauucauaucaugcucccccuuggaaugcagaaccuucuucuugacucaaggggccuugcuaaaugacaaacauuccaauggaaccauuaaagacaggagcccauaucgaacccuaaugagcuguccuauuggugaaguucccucuccauacaacucaagauuugagucagucgcuuggucagcaagugcuugucaugauggcaucaauuggcuaacaauuggaauuucuggcccagacaauggggcaguggcuguguuaaaguacaacggcauaauaacagacacuaucaagaguuggagaaacaauauauugagaacacaagaaucugaaugugcauguguaaaugguucuugcuuuacuguaaugaccgauggaccaagugauggacaggccucauacaagaucuucagaauagaaaagggaaagauagucaaaucagucgaaaugaaugccccuaauuaucacuaugaggaaugcuccuguuauccugauucuagugaaaucacaugugugugcagggauaacuggcauggcucgaaucgaccgugggugucuuucaaccagaaucuggaauaucagauaggauacauaugcagugggauuuucggagacaauccacgcccuaaugauaagacaggcaguugugguccaguaucgucuaauggagcaaaugggguaaaaggauuuucauucaaauacggcaaugguguuuggauagggagaacuaaaagcauuaguucaagaaacgguuuugagaugauuugggauccgaacggauggacugggacagacaauaacuucucaaugaagcaagauaucguaggaauaaaugaguggucaggauauagcgggaguuuuguucagcauccagaacuaacagggcuggauuguauaagaccuugcuucuggguugaacuaaucagagggcgacccaaagagaacacaaucuggacuagcgggagcagcauauccuuuugugguguaaacagugacacuguggguuggucuuggccagacggugcugaguugccauuuaccauugacaaguaa

SEQ ID NO: 51180 - RNA, 1410 nt, Artificial Sequence; identical to SEQ ID NO: 51179
  derived and/or modified CDS sequence (wt) from neuraminidase__InfluenzaA__ADK90253

SEQ ID NO: 51181 - RNA, 1410 nt, Artificial Sequence
  derived and/or modified CDS sequence (wt) from neuraminidase__InfluenzaA__ADK90257
augaauccaaaccaaaagauaauaaucauugguucggucuguaugacaauuggaauggcuaacuuaauauuacaaauuggaaacauaaucucaauauggauuagccacucaauucaacuugggaaucaaaaucagauugaaacaugcaaucaaagcgucauuacuuaugaaaacaacacuuggguaaaucagacauauguuaacaucagcaacaccaacuuugcugcuggacagucagugguuuccgugaaauuagcgggcaauuccucucucugcccuguuaguggaugggcuauauacaguaaagacaacaguauaagaaucgguuccaagggggauguguuugucauaagggaaccauucauaucaugcucccccuuggaaugcagaaccuucuucuugacucaaggggccuugcuaaaugacaaacauuccaauggaaccauuaaagacaggagcccacaucgaacccuaaugagcuguccuauuggugaaguucccucuccauacaacucaagauuugagucagucgcuuggucagcaagugcuugucaugauggcaucaauuggcuaacaauuggaauuucuggcccagacaauggggcaguggcuguguuaaaguacaacggcauaauaacagacacuaucaagaguuggagaaacaauauauugagaacacaagagucugaaugugcauguguaaaugguucuugcuuuacuguaaugaccgauggaccaagugauggacaggccucauacaagaucuucagaauagaaaaggggaagauagucaaaucagucgaaaugaaugccccuaauuaccacuaugaggaaugcuccuguuauccugauucuagugaaaucacauguguaugcagggauaacuggcauggcucgaaucgaccgugggugucuuucaaccagaaucuggaauaucagauaggauacauaugcagugggauuuucggagacaauccacgcccuaaugauaagacaggcaguugugguccaguaucgucuaauggagcaaauggaguaaaaggauuuucauucaaauacggcaaugguguuuggauagggagaacuaaaagcauuaguucaagaaacgguuuugagaugauuugggauccgaacggauggacugggacagacaauaacuucucaauaaagcaagauaucguaggaauaaaugaguggucaggauauagcgggaguuuuguucagcauccagaacuaacagggcuggauuguauaagaccuugcuucuggguugaacuaaucagagggcgacccaaagagaacacaaucuggacuagcgggagcagcauauccuuuugugguguaaacagugacacuguggguuggucuuggccagacggugcugaguugccauuuaccauugacaaguaa

SEQ ID NO: 51182 - RNA, 1410 nt, Artificial Sequence
  derived and/or modified CDS sequence (wt) from neuraminidase__InfluenzaA__ADK90261
augaauccaaaccaaaagauaauaaccauugguucggucuguaugacaauuggaauggcuaacuuaauauuacaaauuggaaacauaaucucaauauggauuagccacucaauucaacuugggaaucaaaaucagauugaaacaugcaaucaaagcgucauuacuuaugaaaacaacacuuggguaaaucagacauauguuaacaucagcaacaccaacuuugcugcuggacagucagugguuuccgugaaauuagcgggcaauuccucucucugcccuguuaguggaugggcuauauacaguaaagacaacaguauaagaaucgguuccaagggggauguguuugucauaagggaaccauucauaucaugcucccccuuggaaugcagaaccuucuucuugacucaaggggccuugcuaaaugacaaacauuccaauggaaccauuaaagacaggagcccauaucgaacccuaaugagcuguccuauuggugaaguucccucuccauacaacucaagauuugagucagucgcuuggucagcaagugcuugucaugauggcaucaauuggcuaacaauuggaauuucuggcccagacaauggggcaguggcuguguuaaaguacaacggcauaauaacagacacuaucaagaguuggagaaacaauauauugagaacacaagagucugaaugugcauguguaaaugguucuugcuuuacuguaaugaccgauggaccaagugauggacaggccucauacaagaucuucagaauagaaaagggaaagauagucaaaucagucgaaaugaaugccccuaauuauuacuaugaggaaugcuccuguuauccugauucuagugaaaucacaugugugugcagggauaacuggcauggcucgaaucgaccguggguaucuuucaaccagaaucuggaauaucagauaggauacauaugcagugggauuuucggagacaauccacgcccuaaugauaagacaggcaguugugguccaguaucgucuaauggagcaaauggaguaaaaggauuuucauucaaauacggcaaugguguuuggauagggagaacuaaaagcauuaguucaagaaacgguuuugagaugauuugggauccgaacggauggacugggacagacaauaacuucucaauaaagcaagauaucguaggaauaaaugaguggucaggauauagcgggaguuuuguccagcauccagaacuaacagggcuggauuguauaagaccuugcuucuggguugaacuaaucagagggcgacccaaagagaacacaaucuggacuagcgggagcagcauauccuuuugugguguaaacagugacacuguggguuggucuuggccggacggugcugaguugccauuuaccauugacaaguaa

SEQ ID NO: 51183 - RNA, 1410 nt, Artificial Sequence
  derived and/or modified CDS sequence (wt) from neuraminidase__InfluenzaA__ADK90265
augaauccaaaccaaaagauaauaaccauugguucggucuguaugacaauuggaauggcuaacuuaauauuacaaauuggaaacauaaucucaauauggauuagccacucaauucaacuugggaaucaaaaucagauugaaacaugcaaucaaagcgucauuacuuaugaaaacaacacuuggguaaaucagacauauguuaacaucagcaacaccaacuuugcugcuggacagucagugguuuccgugaaauuagcgggcaauuccucucucugcccuguuaguggaugggcuauauacaguaaagacaacaguauaagaaucgguuccaagggggauguguuugucauaagggaaccauucauaucaugcucccccuuggaaugcagaaccuucuucuugacucaaggggccuugcuaaaugacaaacauuccaauggaaccauuaaagacaggagcccauaucgaacccuaaugagcuguccuauuggugaaguucccucuccauacaacucaagauuugagucagucgcuuggucagcaagugcuugucaugauggcaucaauuggcuaacaauuggaauuucuggcccagacaauggggcaguggcuguguuaaaguacaacggcauaauaacagacacuaucaagaguuggagaaacaauauauugagaacacaagagucugaaugugcauguguaaaugguucuugcuuuacuguaaugaccgauggaccaagugauggacaggccucauacaagaucuucagaauagaaaagggaaagauagucaaaucagucgaaaugaaugccccuaauuaucacuaugaggaaugcuccuguuauccugauucuagugaaaucacaugugugugcagggauaacuggcauggcucgaaucgaccgugggugucuuucaaccagaaucuggaauaucagaugggauacauaugcagugggauuuucggagacaauccacgcccuaaugauaagacaggcaguugugguccaguaucgucuaauggagcaaauggaguaaaaggauuuucauucaaauacggcaaugguguuuggauagggagaacuaaaagcauuaguucaagaaacgguuuugagaugauuugggauccgaacggauggacugggacagacaauaacuucucaauaaagcaagauaucguaggaauaaaugaguggucaggauauagcgggaguuuuguucagcauccagaacuaacagggcuggauuguauaagaccuugcuucuggguugaacuaaucagagggcgacccaaagagaacacaaucuggacuagcgggagcagcauauccuuuugugguguaaacagugacacuguggguuggucuuggccagacggugcugaguugccauuuaccauugacaaguaa

SEQ ID NO: 51184 - RNA, 1410 nt, Artificial Sequence
  derived and/or modified CDS sequence (wt) from neuraminidase__InfluenzaA__ADK90269
augaauccaaaccaaaagauaauaaccauugguucggucuguaugacaauuggaauggcuaacuuaauauuacaaauuggaaacauaaucucaauauggauuagccacucaauucaacuugggaaucaaaaucagauugaaaaaugcaaucaaagcgucauuacuuaugaaaacaacacuuggguaaaucagacauauguuaacaucagcaacaccaacuuugcugcuggacagucagugguuuccgugaaauuagcgggcaauuccucucucugcccuguuaguggaugggcuauauacaguaaagacaacaguauaagaaucgguuccaagggggauguguuugucauaagggaaccauucauaucaugcucccccuuggaaugcagaaccuucuucuugacucaaggggccuugcuaaaugacaaacauuccaauggaaccauuaaagacaggagcccauaucgaacccuaaugagcuguccuauuggugaaguucccucuccauacaacucaagauuugagucagucgcuuggucagcaagugcuugucaugauggcaucaauuggcuaacaauuggaauuucuggcccagacaauggggcaguggcuguguuaaaguacaacggcauaauaacagacacuaucaagaguuggagaaacaauauauugagaacacaagagucugaaugugcauguguaaaugguucuugcuuuacuguaaugaccgauggaccaagugauggacaggccucauacaagaucuucagaauagaaaagggaaagauagucaaaucaaucgaaaugaaugcccccaauuaucacuaugaggaaugcuccuguuauccugauucuagugaaaucacaugugugugcagggauaacuggcauggcucgaaucgaccguggguaucuuucaaccagaaucuggaauaucagauaggauacauaugcagugggauuuucggagacaauccacgcccuaaugauaagacaggcaguugugguccaguaucgucuaauggagcaaauggaguaaaaggauuuucauucaaauacggcaaugguguuuggauagggagaacuaaaagcauuaguucaagaaacgguuuugagaugauuugggauccgaacggauggacugggacagacaauaacuucucaauaaagcaagauaucguaggaauaaaugaguggucaggauauagcgggaguuuuguucagcauccagaacuaacagggcuggauuguauaagaccuugcuucuggguugagcuaaucagagggcgacccaaagagaacacaaucuggacuagcgggagcaucauauccuuuugugguguaaacagugacacuguggguuggucuuggccggacggugcugaguugccauuuaccauugacaaguaa

SEQ ID NO: 51185 - RNA, 1410 nt, Artificial Sequence; identical to SEQ ID NO: 48750
  derived and/or modified CDS sequence (wt) from neuraminidase__InfluenzaA__ADK90273

SEQ ID NO: 51186 - RNA, 1410 nt, Artificial Sequence; identical to SEQ ID NO: 49794
  derived and/or modified CDS sequence (wt) from neuraminidase__InfluenzaA__ADK90277

SEQ ID NO: 51187 - RNA, 1410 nt, Artificial Sequence; identical to SEQ ID NO: 49215
  derived and/or modified CDS sequence (wt) from neuraminidase__InfluenzaA__ADK90281

SEQ ID NO: 51188 - RNA, 1410 nt, Artificial Sequence
  derived and/or modified CDS sequence (wt) from neuraminidase__InfluenzaA__ADK90289
augaauccaaaccaaaagauaauaaccauugguucggucuguaugacaauuggaauggcuaacuuaauauuacaaauuggaaacauaaucucaauauggauuagccacucaauucaacuugggaaucaaaaucugauugaaacaugcaaucaaagcgucauuacuuaugaaaacaacacuuggguaaaucagacauauguuaacaucagcaacaccaacuuugcugcuggacagucagugguuuccgugaaauuagcgggcaauuccucucucugcccuguuaguggaugggcuauauacaguaaagacaacaguauaagaaucgguuccaagggggauguguuugucauaagggaaccauucauaucaugcucccccuuggaaugcagaaccuucuucuugacucaaggggccuugcuaaaugacaaacauuccaauggaaccauuaaagacaggagcccauaucgaacccuaaugagcuguccuauuggugaaguucccucuccauacaacucaagauuugagucagucgcuuggucagcaagugcuugucaugauggcaucaauuggcuaacaauuggaauuucuggcccagacaauggggcaguggcuguguuaaaguacaacggcauaauaacagacacuaucaagaguuggagaaacaauauauugagaacacaagagucugaaugugcauguguaaaugguucuugcuuuacuguaaugaccgauggaccaagugauggacaggccucauacaagaucuucagaauagaaaagggaaagauagucaaaucagucgaaaugaaugccccuaauuaucacuaugaggaaugcuccuguuauccugauucuagugaaaucacaugugugugcagggauaacuggcauggcucgaaucgaccgugggugucuuucaaccagaaucuggaauaucagauaggauacauaugcagugggauuuucggagacaauccacgcccuaaugauaagacaggcaguugugguccaguaucuucuaauggagcaaauggaguaaaaggauuuucauucaaauacggcaaugguguuuggauagggagaacuaaaagcauuaguucaagaaacgguuuugagaugauuugggauccgaacggauggacugggacagacaauaacuucucaauaaagcaagauaucguaggaauaaaugaguggucaggauauagcgggaguuuuguucagcauccagaacuaacagggcuggauuguauaagaccuugcuucuggguugaacuaaucagagggcgacccaaagagaacacaauauggacuagcgggagcagcauauccuuuugugguguaaacagugacacuguggguuggucuuggccagacggugcugaguugccauuuaccauugacaaguaa

SEQ ID NO: 51189 - RNA, 1410 nt, Artificial Sequence
  derived and/or modified CDS sequence (wt) from neuraminidase__InfluenzaA__ADK90293
augaauccaaaccaaaagauaauaaccauugguucggucuguaugacaauuggaauggcuaacuuaauauuacaaauuggaaacauaaucucaauauggauuagccacucaauucaacuugggaaucaaaaucagauugaaacaugcaaucaaagcgucauuacuuaugaaaacaacacuuggguaaaucagacauauguuaacaucagcaacaccaacuuugcugcuggacagucagugguuuccgugaaauuagcgggcaauuccucucucugcccuguuaguggaugggcuauauacaguaaagacaacaguauaagaaucgguuccaagggggauguguuugucauaagagaaccauucauaucaugcucccccuuggaaugcagaaccuucuucuugacucaaggggccuugcuaaaugacaaacauuccaauggaaccauuaaagacaggagcccacaucgaacucuaaugagcuguccuauuggugaaguucccucuccauacaacucaagauuugagucagucgcuuggucagcaagugcuugucaugauggcaucaauuggcuaacaauuggaauuucuggcccagacaauggggcaguggcuguguuaaaguacaacggcauaauaacagacacuaucaagaguuggagaaacaauauauugagaacacaagagucugaaugugcauguguaaaugguucuugcuuuacuguaaugaccgauggaccuagugauggacaggccucauacaagaucuucagaauagaaaaggggaagauagucaaaucagucgaaaugaaugccccuaauuaccacuaugaggaaugcuccuguuauccugauucuagugaaaucacauguguaugcagggauaacuggcauggcucgaaucgaccgugggugucuuucaaccagaaucuggaauaucagauaggauacauaugcagugggauuuucggagacaauccacgcccuaaugauaagacaggcaguugugguccaguaucgucuaauggagcaaauggaguaaaaggauuuucauucaaauacggcaaugguguuuggauagggagaacuaaaagcauuaguucaagaaacgguuuugagaugauuugggauccgaacggauggacugggacagacaauaacuucucaauaaagcaagauaucguaggaauaaaugaguggucaggauauagcgggaguuuuguucagcauccagaacuaacagggcuggauuguauaagaccuugcuucuggguugaacuaaucagagggcgacccaaagagaacacaaucuggacuagcgggagcagcauauccuuuugugguguaaacagugacacuguggguuggucuuggccagacggugcugaguugccauuuaccauugacaaguaa

SEQ ID NO: 51190 - RNA, 1410 nt, Artificial Sequence
  derived and/or modified CDS sequence (wt) from neuraminidase__InfluenzaA__ADK90297
augaauccaaaccaaaagauaauaaccauugguucggucuguaugacaauuggaauggcuaacuuaauauuacaaauuggaaacauaaucucaauauggauuagccacucaauucaacuugggaaucaaaaucagauugaaacaugcaaucaaagcgucauuacuuaugaaaacaacacuuggguaaaucagacauauguuaacaucagcaacaccaacuuugcugcugaacagucagugguuuccgugaaauuagcgggcaauuccucucucugcccuguuaguggaugggcuauauacaguaaagacaacaguauaagaaucgguuccaagggggauguguuugucauaagggaaccauucauaucaugcuccccauuggaaugcagaaccuucuucuugacucaaggggccuugcuaaaugacaaacauuccaauggaaccauuaaagacaggagcccauaucgaacccuaaugagcuguccuauuggugaaguucccucuccauacaacucaagauuugagucagucgcuuggucagcaagugcuugucaugauggcaucaauuggcuaacaauuggaauuucuggcccagacaauggggcaguggcuguguuaaaguacaacggcauaauaacagacacuaucaagaguuggagaaacaauauauugagaacacaagagucugaaugugcauguguaaaugguucuugcuuuacuguaaugaccgauggaccaagugauggacaggccucauacaagaucuucagaauagaaaagggaaagauagucaaaucagucgaaaugaaugccccuaauuaucacuaugaggaaugcuccuguuauccugauucuagugaaaucacaugugugugcagggauaacuggcauggcucgaaucgaccgugggugucuuucaaccagaaucuggaauaucagauaggauacauaugcagugggauuuucggagacaauccacgcccuaaugauaagacaggcaguugugguccaguaucgucuaauggagcaaauggaguaaaaggauuuucauucaaauacggcaaugguguuuggauagggagaacuaaaagcauuaguucaagaaacgguuuugagaugauuugggauccgaacggauggacugggacagacaauaacuucucaauaaagcaagauaucguaggaauaaaugaguggucaggauauagcgggaguuuuguucagcauccagaacuaacagggcuggauuguauaagaccuugcuucuggguugaacuaaucagagggcgacccaaagagaacacaaucuggacuagcgggagcagcauauccuuuugugguguaaacagugacacuguggguuggucuuggccagacggugcugaguugccauuuaccauugacaaguaa

SEQ ID NO: 51191 - RNA, 1410 nt, Artificial Sequence
  derived and/or modified CDS sequence (wt) from neuraminidase__InfluenzaA__ADK90301
augaauccaaaccaaaagauaauaaccauugguucggucuguaugacaauuggaauggcuaacuuaauauuacaaauuggaaacauaaucucaauauggauuagccacucaauucaacuugggaaucaaaaucagauugaaacaugcaaucaaagcgucauuacuuaugaaaacaacacuuggguaaaucagacauauguuaacaucagcaacaccaacuuugcugcuggacagucagugguuuccgugaaauuagcgggcaauuccucucucugcccuguuaguggaugggcuauauacaguaaagacaacaguauaagaaucgguuccaagggggauguguuugucauaagggaaccauucauaucaugcucccccuuggaaugcagaaccuucuucuugacucaaggggccuugcuaaaugacaaacauuccaauggaaccauuaaagacaggagcccauaucgaacccuaaugagcuguccuauuggugaaguucccucuccauacaacucaagauuugagucagucgcuuggucagcaagugcuugucaugauggcaucaauuggcuaacaauuggaauuucuggcccagacaauggggcaguggcuguguuaaaguacaacggcauaauaacagacacuaucaagaguuggagaaacaauauauugagaacacaagagucugaaugugcauguguaaaugguucuugcuuuacuguaaugaccgauggaccaagugauggacaggccucauacaagaucuucagaauagaaaagggaaagauagucaaaucagucgaaaugaaugccccuaauuaucacuaugaggaaugcuccuguuauccugauucuagugaaaucacaugugugugcagggauaacuggcauggcucgaaucgaccguggguguccuucaaccagaaucuggaauaucagauaggauauauaugcagugggauuuucggagacaauccacgcccuaaugauaagacaggcaguugugguccaguaucgucuaauggagcaaauggaguaaaaggauuuucauucaaauacggcaaugguguuuggauagggagaacuaaaagcauuaguucaagaaacgguuuugagaugauuugggauccgaacggauggacugggacagacaauaacuucucaauaaagcaagauaucguaggaauaaaugaguggucaggauauagcgggaguuuuguccagcauccagaacuaacagggcuggauuguauaagaccuugcuucuggguugaacuaaucagagggcgacccaaagagaacacaaucuggacuagcgggagcagcauauccuuuugugguguaaacagugacacuguggguuggucuuggccagacggugcugaguugccauuuaccauugacaaguaa

SEQ ID NO: 51192 - RNA, 1410 nt, Artificial Sequence; identical to SEQ ID NO: 51190
  derived and/or modified CDS sequence (wt) from neuraminidase__InfluenzaA__ADK90305

SEQ ID NO: 51193 - RNA, 1410 nt, Artificial Sequence; identical to SEQ ID NO: 48750
  derived and/or modified CDS sequence (wt) from neuraminidase__InfluenzaA__ADK90309

SEQ ID NO: 51194 - RNA, 1410 nt, Artificial Sequence
  derived and/or modified CDS sequence (wt) from neuraminidase__InfluenzaA__ADK90313
augaauccaaaccacaaaauaauaaccauugguucggucuguaugacaaucggaauggcuaacuuaauauuacaaauuggaaacauaaucucaauauggauuagccacucaauucaacuugggaaucaaaaccagauugaaacaugcaaucaaagcgucauuacuuaugaaaacaacacuuggguaaaucagacauauguuaacaucagcaacaccaacuuugcugcuggacagucagugguuuccgugaaauuagcgggcaauuccucucucugcccuguuaguggaugggcuauauacaguaaagacaacaguauaagaaucgguuccaagggggauguguuugucauaagggaaccauucauaucaugcucccccuuggaaugcagaaccuucuucuugacucaaggggccuugcuaaaugacaaacauuccaauggaaccauuaaagacaggagcccacaucgaacccuaaugagcuguccuauuggugaaguucccucuccauacaacucaagauuugagucagucgcuuggucagcaagugcuugucaugauggcaucaauuggcuaacaauuggaauuucuggcccagacaauggggcaguggcuguguuaaaguacaacggcauaauaacagacaccaucaagaguuggagaaacaauauauugagaacacaagagucugaaugugcauguguaaaugguucuugcuuuacuguaaugaccgauggaccaagugauggacaggccucauacaagaucuucagaauagaaaagggaaagauagucaaaucagucgaaaugaaugccccuaauuaccacuaugaggaaugcuccuguuauccugauucuagugaaaucacauguguaugcagggauaacuggcauggcucgaaucgaccgugggugucuuucaaccagaaucuggaauaucagauaggauacauaugcagugggauuuucggagacaauccacgcccuaaugauaagacaggcaguugugguccaguaucgucuaauggagcaaauggaguaaaaggauuuucauucaaauacggcaaugguguuuggauagggagaacuaaaagcauuaguucaagaaacgguuuugagaugauuugggauccgaacggauggacugggacagacaauaacuucucaauaaagcaagauaucguaggaauaaaugaguggucaggauauagcgggaguuuuguucagcauccagaacuaacagggcuggauuguauaagaccuugcuucuggguugaacuaaucagagggcgacccaaagagaacacaaucuggacuagcgggagcagcauauccuuuugugguguaaacagugacacuguggguuggucuuggccagacggugcugaguugccauuuaccauugacaaguaa

SEQ ID NO: 51195 - RNA, 1410 nt, Artificial Sequence
  derived and/or modified CDS sequence (wt) from neuraminidase__InfluenzaA__ADK90317
augaauccaaaccaaaagauaauaaccaucgguucggucuguaugacaauuggaauggcuaacuuaauauuacaaauuggaaacauaaucucaauauggauuagccacucaauucaacuggggaaucaaaaucagauugaaacaugcaaucaaagcgucauuacuuaugaaaacaacacuuggguaaaucagacauauguuaacaucagcaacaccaacuuugcugcuggacagucagugguuuccgugaaauuagcgggcaauuccucucucugcccuguuaguggaugggcuauauacaguaaagacaacaguauaagaaucgguuccaagggggauguguuugucauaagggaaccauucauaucaugcucccccuuggaaugcagaaccuucuucuugacucaaggggccuugcuaaaugacaaacauuccaauggaaccauuaaagacaggagcccauaucgaacccuaaugagcuguccuauuggugaaguucccucuccauacaacucaagauuugagucagucgcuuggucagcaagugcuugucaugauggcaucaauuggcuaacaauuggaauuucuggcccagacaauggggcaguggcuguguuaaaguacaacggcauaauaacagacacuaucaagaguuggagaaacaauauauugagaacacaagagucugaaugugcauguguaaaugguucuugcuuuacuguaaugaccgauggaccaagugauggacaggccucauacaagaucuucagaauagaaaagggaaagauagucaaaucagucgaaaugaaugccccuaacuaucacuaugaggaaugcuccuguuauccugauucuagugaaaucacaugugugugcagggauaacuggcauggcucgaaucgaccguggguaucuuucaaccagaaucuggaauaucagauaggauacauaugcagugggauuuucggagacaauccacgcccuaaugauaagacaggcaguugugguccaguaucgucuaauggagcaaauggaguaaaaggauuuucauucaaauacggcaaugguguuuggauagggagaacuaaaagcauuaguucaagaaacgguuuugagaugauuugggauccgaacggauggacugggacagacaauaacuucucaauaaagcaagauaucguaggaauaaaugaguggucaggauauagcgggaguuuuguucagcauccagaacuaacagggcuggauuguauaagaccuugcuucuggguugaacuaaucagagggcgacccaaagagaacacaaucuggacuagcgggagcagcauauccuuuugugguguaaacagugacacuguggguuggucuuggccggacggugcugaguugccauuuaccauugacaaguaa

SEQ ID NO: 51196 - RNA, 1410 nt, Artificial Sequence
  derived and/or modified CDS sequence (wt) from neuraminidase__InfluenzaA__ADK90321
augaauccaaaccaaaagauaauaaccauugguucggucuguaugacaaucggaauggcuaacuuaauauuacaaauuggaaacauaaucucaauauggauuagccacucaauucaacuugggaaucaaaaccagauugaaacaugcaaucaaagcgucauuacuuaugaaaacaacacuuggguaaaucagacauauguuaacaucagcaacaccaacuuugcugcuggacagucagugguuuccgugaaauuagcgggcaauuccucucucugcccuguuaguggaugggcuauauacaguaaagacaacaguauaagaaucgguuccaagggggauguguuugucauaagggaaccauucauaucaugcucccccuuggaaugcagaaccuucuucuugacucaaggggccuugcuaaaugacaaacauuccaauggaaccauuaaagacaggagcccacaucgaacccuaaugagcuguccuauuggugaaguucccucuccauacaacucaagauuugagucagucgcuuggucagcaagugcuugucaugauggcaucaauuggcuaacaauuggaauuucuggcccagacaauggggcaguggcuguguuaaaguacaacggcauaauaacagacaccaucaagaguuggagaaacaauauauugagaacacaagagucugaaugugcauguguaaaugguucuugcuuuacuguaaugaccgauggaccaagugauggacaggccucauacaagaucuucagaauagaaaagggaaagauagucaaaucagucgaaaugaaugccccuaauuaccacuaugaggaaugcuccuguuauccugauucuagugaaaucacauguguaugcagggauaacuggcauggcucgaaucgaccgugggugucuuucaaccagaaucuggaauaucagauaggauacauaugcagugggauuuucggagacaauccacgcccuaaugauaagacaggcaguugugguccaguaucgucuaauggagcaaauggaguaaaaggauuuucauucaaauacggcaaugguguuuggauagggagaacuaaaagcauuaguucaagaaacgguuuugagaugauuugggauccgaacggauggacugggacagacaauaacuucucaauaaagcaagauaucguaggaauaaaugaguggucaggauauagcgggaguuuuguucagcauccagaacuaacagggcuggauuguauaagaccuugcuucuggguugaacuaaucagagggcgacccaaagagaacacaaucuggacuagcgggagcagcauauccuuuugugguguaaacagugacacuguggguuggucuuggccagacggugcugaguugccauuuaccauugacaaguaa

SEQ ID NO: 51197 - RNA, 1410 nt, Artificial Sequence
  derived and/or modified CDS sequence (wt) from neuraminidase__InfluenzaA__ADK90325
augaauccaaaccaaaagauaauaaccauugguucggucuguaugacaauuggaauggcuaacuuaauauuacaaauuggaaacauaaucucaauauggauuagccacucaauucaacuugggaaucaaaaucagauugaaacaugcaaucaaagcgucauuacuuaugaaaacaacacuuggguaaaucagacauauguuaacaucagcaacaccaacuuugcugcuggacagucagugguuuccgugaaauuagcgggcaauuccucucucugcccuguuaguggaugggcuauauacaguaaagacaacaguauaagaaucgguuccaagggggauguguuugucauaagggaaccauucauaucaugcucccccuuggaaugcagaaccuucuucuugacucaaggggccuugcuaaaugacaaacauuccaauggaaccauuaaagacaggagcccauaucgaacccuaaugagcuguccuauuggugagguucccucuccauacaacucaagauuugagucagucgcuuggucagcaagugcuugucaugauggcaucaauuggcuaacaauuggaauuucuggcccagacaauggggcaguggcuguguuaaaguacaacggcauaauaacagacacuaucaagaguuggagaaacaauauauugagaacacaagagucugaaugugcauguguaaaugguucuugcuuuacuguaaugaccgauggaccaagugauggacaggccucauacaagaucuucagaauagaaaagggaaagauagucaaaucagucgaaaugaaugccccuaauuaucacuaugaggaaugcuccuguuauccugauucuagugaaaucacauguguaugcagggauaacuggcauggcucgaaucgaccgugggugucuuucaaccagaaucuggaauaucagauaggauacauaugcagugggauuuucggagacaauccacgcccuaaugauaagacaggcaguugugguccaguaucgucuaauggagcaaauggaguaaaaggauuuucauucaaauacggcaaugguguuuggauagggagaacuaaaagcauuaguucaagaaacgguuuugagaugauuugggauccgaacggauggacugggacagacaauaacuucucaauaaagcaagauaucguaggaauaaaugaguggucaggauauagcgggaguuuuguucagcauccagaacuaacagggcuggauuguauaagaccuugcuucuggguugaacuaaucagagggcgacccaaagagaacacaaucuggacuagcgggagcagcauauccuuuugugguguaaacagugacacuguggguuggucuuggccagacggugcugaguugccauuuaccauugacaaguaa

SEQ ID NO: 51198 - RNA, 1410 nt, Artificial Sequence
  derived and/or modified CDS sequence (wt) from neuraminidase__InfluenzaA__ADK90329
augaauccaaaccaaaagauaauaaccauugguucggucuguaugacaauuggaauggcuaacuuaauauuacaaauuggaaacauaaucucaauauggauuagccacucaauucaacuugggaaucaaaaucagauugaaacaugcaaucgaagcgucauuacuuaugaaaacaacacuuggguaaaucagacauauguuaacaucagcaacaccaacuuugcugcuggacagucagugguuuccgugaaauuagcgggcaauuccucucucugcccuguuaguggaugggcuauauacaguaaagacaacaguauaagaaucgguuccaagggggauguguuugucauaagggaaccauucauaucaugcucccccuuggaaugcagaaccuucuucuugacucaaggggccuugcuaaaugacaaacauuccaauggaaccauuaaagacaggagcccauaucgaacccuaaugagcuguccuauuggugaaguucccucuccauacaacucaagauuugagucagucgcuuggucagcaagugcuugucaugauggcaucaauuggcuaacaauuggaauuucuggcccagacaaugaggcaguggcuguguuaaaguacaacggcauaauaacagacacuaucaagaguuggagaaacaauauauugagaacacaagagucugaaugugcauguguaaaugguucuugcuuuacuguaaugaccgauggaccaagugauggacaggccucauacaagaucuucagaauagaaaagggaaagauagucaaaucagucgaaaugaaugccccuaauuaucacuaugaggaaugcuccuguuauccugauucuagugaaaucacaugugugugcagggauaacuggcauggcucgaaucgaccgugggugucuuucaaccagaaucuggaauaucagauaggauacauaugcagugggauuuucggagacaauccacgcccuaaugauaaaacaggcaguugugguccaguaucgucuaauggagcaaauggaguaaaaggauuuucauucaaauacggcaaugguguuuggauagggagaacuaaaagcauuaguucaagaaacgguuuugagaugauuugggauccgaacggauggacugggacagacaauaacuucucaauaaagcaagauaucguaggaauaaaugaguggucaggauauagcgggaguuuuguccagcauccagaacuaacagggcuggauuguauaagaccuugcuucuggguugaacuaaucagagggcgacccaaagagaacacaaucuggacuagcgggagcagcauauccuuuugugguguaaacagugacacuguggguuggucuuggccagacggugcugaguugccauuuaccauugacaaguaa

SEQ ID NO: 51199 - RNA, 1410 nt, Artificial Sequence
  derived and/or modified CDS sequence (wt) from neuraminidase__InfluenzaA__ADK90333
augaauccaaaccaaaagauaauaaccauugguucggucuguaugacaauuggaauggcuaacuuaauauuacaaauuggaaacauaaucucaauauggauuagccacucaauucaacuugggaauaaaaaucagauugaaacaugcaaucaaagcgucauuacuuaugaaaacaacacuuggguaaaucagacauauguuaacaucagcaacaccaacuuugcugcuggacagucagugguuuccgugaaauuagcgggcaauuccucucucugcccuguuaguggaugggcuauauacaguaaagacaacaguauaagaaucgguuccaagggggauguguuugucauaagggaaccauucauaucaugcucccccuuggaaugcagaaccuucuucuugacucaaggagccuugcuaaaugacaaacauuccaauggaaccauuaaagacaggagcccauaucgaacccuaaugagcuguccuauuggugaaguucccucuccauacaacucaagauuugagucagucgcuuggucagcaagugcuugucaugauggcaucaauuggcuaacaauuggaauuucuggcccagacaauggggcaguggcuguguuaaaguacaacggcauaauaacagacacuaucaagaguuggagaaacaauauauugagaacacaagagucugaaugugcauguguaaaugguucuugcuuuacuguaaugaccgauggaccaagugauggacaggccucauacaagaucuucagaauagaaaagggaaagauagucaaaucagucgaaaugaaugccccuaauuaucacuaugaggaaugcuccuguuauccugauucuagugaaaucacaugugugugcagggauaacuggcauggcucgaaucgaccgugggugucuuucaaccagaaucuggaauaucagauaggauacauaugcagugggauuuucggagacaauccacgcccuaaugauaagacaggcaguugugguccaguaucgucuaauggagcaaauggaguaaaaggauuuucauucaaauacggcaaugguguuuggauagggagaacuaaaagcauuaguucaagaaacgguuuugagaugauuugggauccgaacggauggacugggacagacaauaacuucucaauaaagcaagauaucguaggaauaaaugaguggucaggauauagcgggaguuuuguucagcauccagaacuaacagggcuggauuguauaagaccuugcuucuggguugaacuaaucagagggcgacccaaagagaacacaaucuggacuagcgggagcagcauauccuuuugugguguaaacagugacacuguggguuggucuuggccagacggugcugaguugccauuuaccauugacaaguaa

SEQ ID NO: 51200 - RNA, 1410 nt, Artificial Sequence; identical to SEQ ID NO: 51196
  derived and/or modified CDS sequence (wt) from neuraminidase__InfluenzaA__ADK90337

SEQ ID NO: 51201 - RNA, 1410 nt, Artificial Sequence
  derived and/or modified CDS sequence (wt) from neuraminidase__InfluenzaA__ADK90341
augaauccaaaccaaaagauaauaaccauugguucggucuguaugacaauuggaauggcuaacuuaauauuacaaauuggaaacauaaucucaauauggauuagccacucaauucaacuugggaaucaaaaucagauugaaacaugcaaucaaagcgucauuacuuaugaaaacaacacuuggguaaaucagacauauguuaacaucagcaacaccaacuuugcugcuggacagucagugguuuccgugaaauuaacgggcaauuccucucucugcccuguuaguggaugggcuauauacaguaaagacaacaguauaagaaucgguuccaagggggauguguuugucauaagggaaccauucauaucaugcucccccuuggaaugcagaaccuucuucuugacucaaggggccuugcuaaaugacaaacauuccaauggaaccauuaaagacaggagcccauaucgaacccuaaugagcuguccuauuggugaaguucccucuccauacaacucaagauuugagucagucgcuuggucagcaagugcuugucaugauggcaucaauuggcuaacaauuggaauuucuggcccagacaauggggcaguggcuguguuaaaguacaacggcauaauaacagacacuaucaagaguuggagaaacaauauauugagaacacaagagucugaaugugcauguguaaaugguucuugcuuuacuguaaugaccgauggaccaagugauggacaggccucauacaagaucuucagaauagaaaagggaaagauagucaaaucagucgaaaugaaugccccuaauuaucacuaugaggaaugcuccuguuauccugauucuagugaaaucacauguguaugcagggauaacuggcauggcucgaaucgaccgugggugucuuucaaccagaaucuggaauaucagauaggauacauaugcagugggauuuucggagacaauccacgcccuaaugauaagacaggcaguugugguccaguaucguccaauggagcaaauggaguaaaaggauuuucauucaaauacggcaaugguguuuggauagggagaacuaaaagcauuaguucaagaaacgguuuugagaugauuugggauccgaacggauggacugggacagacaauaacuucucaauaaagcaagauaucguaggaauaaaugaguggucaggauauagcgggaguuuuguucagcauccagaacuaacagggcuggauuguauaagaccuugcuucuggguugaacuaaucagagggcgacccaaagagaacacaaucuggacuagcgggagcagcauauccuuuugugguguaaacagugacacuguggguuggucuuggccagacggugcugaguugccauuuaccauugacaaguaa

SEQ ID NO: 51202 - RNA, 1410 nt, Artificial Sequence; identical to SEQ ID NO: 51201
  derived and/or modified CDS sequence (wt) from neuraminidase__InfluenzaA__ADK90345

SEQ ID NO: 51203 - RNA, 1410 nt, Artificial Sequence; identical to SEQ ID NO: 51201
  derived and/or modified CDS sequence (wt) from neuraminidase__InfluenzaA__ADK90349

SEQ ID NO: 51204 - RNA, 1410 nt, Artificial Sequence; identical to SEQ ID NO: 51196
  derived and/or modified CDS sequence (wt) from neuraminidase__InfluenzaA__ADK90353

SEQ ID NO: 51205 - RNA, 1410 nt, Artificial Sequence; identical to SEQ ID NO: 49938
  derived and/or modified CDS sequence (wt) from neuraminidase__InfluenzaA__ADK90357

SEQ ID NO: 51206 - RNA, 1410 nt, Artificial Sequence; identical to SEQ ID NO: 51196
  derived and/or modified CDS sequence (wt) from neuraminidase__InfluenzaA__ADK90361

SEQ ID NO: 51207 - RNA, 1410 nt, Artificial Sequence
  derived and/or modified CDS sequence (wt) from neuraminidase__InfluenzaA__ADK90365
augaauccaaaccaaaagauaauaaccauugguucggucuguaugacaauuggaauggcuaacuuaauauuacaaauuggaaacauaaucucaauauggauuagccacucaauucaacuugggaaucaaaaucagauugaaacaugcaaucaaagcgucauuacuuaugaaaacaacacuuggguaaaucagacauauguuaacaucagcaacaccaacuuugcugcuggacagucagugguuuccgugaaauuagcgggcaauuccucucucugcccuguuaauggaugggcuauauacaguaaagacaacaguauaagaaucgguuccaagggggauguguuugucauaagggaaccauucauaucaugcucccccuuggaaugcagaaccuucuucuugacucaaggggccuugcuaaaugacaaacauuccaauggaaccauuaaagacaggagcccauaucgaacccuaaugagcuguccuauuggugaaguucccucuccauacaacucaagauuugagucagucgcuuggucagcaagugcuugucaugauggcaucaauuggcuaacaauuggaauuucuggcccagacaauggggcaguggcuguguuaaaguacaacggcauaauaacagacacuaucaagaguuggagaaacaauauauugagaacacaagagucugaaugugcauguguaaaugguucuugcuuuacuguaaugaccgauggaccaagugauggacaggccucauacaagaucuucagaauagaaaagggaaagauagucaaaucagucgaaaugaaugccccuaauuaucacuaugaggaaugcuccuguuauccugauucuagugaaaucacaugugugugcagggauaacuggcauggcucgaaucgaccgugggugucuuucaaccagaaucuggaauaucagauaggauacauaugcagugggauuuucggagacaauccacgcccuaaugauaagacaggcaguugugguccaguaucgucuaauggagcaaauggaguaaaaggauuuucauucaaauacggcaaugguguuuggauagggagaacuaaaagcauuaguucaagaaacgguuuugagaugauuugggauccgaacggauggacugggacagacaauaacuucucaauaaagcaagauaucguaggaauaaaugaguggucaggauauagcgggaguuuuguucagcauccagaacuaacagggcuggauuguauaagaccuugcuucuggguugaacuaaucagagggcgacccaaagagaacacaaucuggacuagcgggagcagcauauccuuuugugguguaaacagugacacuguggguuggucuuggccagacggugcugaguugccauuuaccauugacaaguaa

SEQ ID NO: 51208 - RNA, 1410 nt, Artificial Sequence; identical to SEQ ID NO: 50214
  derived and/or modified CDS sequence (wt) from neuraminidase__InfluenzaA__ADK90369

SEQ ID NO: 51209 - RNA, 1410 nt, Artificial Sequence
  derived and/or modified CDS sequence (wt) from neuraminidase__InfluenzaA__ADK90373
augaauccaaaccaaaagauaauaaccauugguucggucuguaugacaauuggaauggcuaacuuaauauuacaaauuggaaacauaaucucaauauggauuagccacucaauucaacuugggaaucaaaaucagauugaaacaugcaaucaaagcgucauuacuuaugaaaacaacacuuggguaaaucagacauauguuaacaucagcaacaccaacuuugcugcuggacagucagugguuuccgugaaauuagcgggcaauuccucucucugcccuguuaguggaugggcuauauacaguaaagacaacaguauaagaaucgguuccaagggggauguguuugucauaagggaaccauucauaucaugcucccccuuggaaugcagaacauucuucuugacucaaggggccuugcuaaaugacaaacauuccaauggaaccauuaaagacaggagcccauaucgaacccuaaugagcuguccuauuggugaaguucccucuccauacaacucaagauuugagucagucgcuuggucagcaagugcuugucaugauggcaucaauuggcuaacaauuggaauuucuggcccagacaauggggcaguggcuguguuaaaguacaacggcauaauaacagacacuaucaagaguuggagaaacaauauauugagaacacaagagucugaaugugcauguguaaaugguucuugcuuuacuguaaugaccgauggaccaagugauggacaggccucauacaagaucuucagaauagaaaagggaaagauagucaaaucagucgaaaugaaugccccuaauuaucacuaugaggaaugcuccuguuauccugauucuagugaaaucacaugugugugcagggauaacuggcauggcucgaaucgaccgugggugucuuucaaccagaaucuggaauaucagauaggauacauaugcagugggauuuucggagacaauccacgcccuaaugauaagacaggcaguugugguccaguaucgucuaauggagcaaauggaguaaaaggauuuucauucaaauacggcaaugguguuuggauagggagaacuaaaagcauuaguucaagaaacgguuuugagaugauuugggauccgaacggauggacugggacagacaauaacuucucaauaaagcaagauaucguaggaauaaaugaguggucaggauauagcgggaguuuuguucagcauccagaacuaacagggcuggauuguauaagaccuugcuucuggguugaacuaaucagagggcgacccaaagagaacacaaucuggacuagcgggagcagcauauccuuuugugguguaaacagugacacuguggguuggucuuggccagacggugcugaguugccauuuaccauugacaaguaa

SEQ ID NO: 51210 - RNA, 1410 nt, Artificial Sequence
  derived and/or modified CDS sequence (wt) from neuraminidase__InfluenzaA__ADK90377
augaauccaaaccaaaagauaauaaccauugguucggucuguaugacaaucggaaugacuaacuuaauauuacaaauuggaaacauaaucucaauauggauuagccacucaauucaacuugggaaucaaaaccagauugaaacaugcaaucaaagcgucauuacuuaugaaaacaacacuuggguaaaucagacauauguuaacaucagcaacaccaacuuugcugcuggacagucagugguuuccgugaaauuagcgggcaauuccucucucugcccuguuaguggaugggcuauauacaguaaagacaacaguauaagaaucgguuccaagggggauguguuugucauaagggaaccauucauaucaugcucccccuuggaaugcagaaccuucuucuugacucaaggggccuugcuaaaugacaaacauuccaauggaaccauuaaagacaggagcccacaucgaacccuaaugagcuguccuauuggugaaguucccucuccauacaacucaagauuugagucagucgcuuggucagcaagugcuugucaugauggcaucaauuggcuaacaauuggaauuucuggcccagacaauggggcaguggcuguguuaaaguacaacggcauaauaacagacaccaucaagaguuggagaaacaauauauugagaacacaagagucugaaugugcauguguaaaugguucuugcuuuacuguaaugaccgauggaccaagugauggacaggccucauacaagaucuucagaauagaaaagggaaagauagucaaaucagucgaaauggaugccccuaauuaccacuaugaggaaugcuccuguuauccugauucuagugaaaucauauguguaugcagggauaacuggcauggcucgaaucgaccgugggugucuuucaaccagaaucuggaauaucagauaggauacauaugcagugggauuuucggagacaauccacgcccuaaugauaagacaggcaguugugguccaguaucgucuaauggagcaaauggaguaaaaggauuuucauucaaauacggcaaugguguuuggauagggagaacuaaaagcauuaguucaagaaacgguuuugagaugauuugggauccgaacggauggacugggacagacaauaacuucucaauaaagcaagauaucguaggaauaaaugaguggucaggauauagcgggaguuuuguucagcauccagaacuaacagggcuggauuguauaagaccuugcuucuggguugaacuaaucagagggcgacccaaagagaacacaaucuggacuagcgggagcagcauauccuuuugugguguaaacagugacacuguggguuggucuuggccagacggugcugaguugccauuuaccauugacaaguaa

SEQ ID NO: 51211 - RNA, 1410 nt, Artificial Sequence
  derived and/or modified CDS sequence (wt) from neuraminidase__InfluenzaA__ADK90381
augaauccaaaccaaaagauaauaaccauugguucggucuguaugacaaucggaauggcuaacuuaauauuacaaauuggaaacauaaucucaauauggauuagccacucaauucaacuugggaaucaaaaccagauugaaacaugcaaucaaagcgucauuacuuaugaaaacaacacuuggguaaaucagacauauguuaacaucagcaacaccaacuuugcugcuggacagucagugguuuccgugaaauuagcgggcaauuccucucucugcccuguuaguggaugggcuauauacaguaaagacaacaguauaagaaucgguuccaagggggauguguuugucauaagggaaccauucauaucaugcucccccuuggaaugcagaaccuucuucuugacucaaggggccuugcuaaaugacaaacauuccaauggaaccauuaaagacaggagcccacaucgaacccuaaugagcuguccuauuggugaaguucccuccccauauaacucaagauuugagucagucgcuuggucagcaagugcuugucaugauggcaucaauuggcuaacaauuggaauuucuggcccagacaauggggcaguggcuguguuaaaguacaacggcauaauaacagacaccaucaagaguuggagaaacaauauauugagaacacaagagucugaaugugcauguguaaaugguucuugcuuuacuguaaugaccgauggaccaagugauggacaggccucauacaagaucuucagaauagaaaagggaaagauagucaaaucagucgaaaugaaugccccuaauuaccacuaugaggaaugcuccuguuauccugauucuagugaaaucacauguguaugcagggauaacuggcauggcucgaaucgaccgugggugucuuucaaccagaaucuggaauaucagauaggauacauaugcagugggauuuucggagacaauccacgcccuaaugauaagacaggcaguugugguccaguaucgucuaauggagcaaauggaguaaaaggauuuucauucaaauacggcaaugguguuuggauagggagaacuaaaagcauuaguucaagaaacgguuuugagaugauuugggauccgaacggauggacugggacagacaauaacuucucaauaaagcaagauaucguaggaauaaaugaguggucaggauauagcgggaguuuuguucagcauccagaacuaacagggcuggauuguauaagaccuugcuucuggguugaacuaaucagagggcgacccaaagagaacacaaucuggacuagcgggagcagcauauccuuuugugguguaaacagugacacuguggguuggucuuggccagacggugcugaguugccauuuaccauugacaaguaa

SEQ ID NO: 51212 - RNA, 1410 nt, Artificial Sequence
  derived and/or modified CDS sequence (wt) from neuraminidase__InfluenzaA__ADK90385
augaauccaaaccaaaagauaauaaccauugguucggucuguaugacaauuggaauggcuaacuuaauauuacaaauuggaaacauaaucucaauauggauuagccacucaauucaacuugggaaucaaaaucagauugaaacaugcaaucaaagcgucauuacuuaugaaaacaacacuuggguaaaucagacauauguuaacaucagcaacaccaacuuugcugcuggacagucagugguuuccgugaaauuaucgggcaauuccucucucugcccuguuaguggaugggcuauauacaguaaagacaacaguauaagaaucgguuccaaaggggauguguuugucauaagggaaccauucauaucaugcucccccuuggaaugcagaaccuucuucuugacucaaggggccuugcuaaaugacaaacauuccaauggaaccauuaaagacaggagcccacaucgaacccuaaugagcuguccuauuggugaaguucccucuccauacaacucaagauuugagucagucgcuuggucagcaagugcuugucaugauggcaucaauuggcuaacaauuggaauuucuggcccagacaauggggcaguggcuguguuaaaguacaacggcauaauaacagacacuaucaagaguuggagaaacaauauauugagaacacaagagucugaauguacauguguaaaugguucuugcuuuacuguaaugaccgauggaccaagugauggacaggccucauacaagaucuucagaauagaaaagggaaagauagucaaaucagucgaaaugaaugccccuaauuaccacuaugaggaaugcuccuguuauccugauucuagugaaaucacauguguaugcagggauaacuggcauggcucgaaucgaccgugggugucuuucaaccagaaucuggaauaucagauaggauacauaugcagugggauuuucggagacaauccacgcccuaaugauaagacaggcaguugugguccaguaucgucuaauggagcaaauggaguaaaaggauuuucauucaaauacggcaaugguguuuggauagggagaacuaaaagcauuaguucaagaaacgguuuugagaugauuugggauccgaacggauggacugggacagacaauaacuucucaauaaagcaagauaucguaggaauaaaugaguggucaggauauagcgggaguuuuguucagcauccagaacuaacagggcuggauuguauaagaccuugcuucuggguugaacuaaucagagggcgacccaaagagaacacaaucuggacuagcgggagcagcauauccuuuugugguguaaacagugacacuguggguuggucuuggccagacggugcugaguugccauuuaccauugacaaguaa

SEQ ID NO: 51213 - RNA, 1410 nt, Artificial Sequence; identical to SEQ ID NO: 48750
  derived and/or modified CDS sequence (wt) from neuraminidase__InfluenzaA__ADK90389

SEQ ID NO: 51214 - RNA, 1410 nt, Artificial Sequence
  derived and/or modified CDS sequence (wt) from neuraminidase__InfluenzaA__ADK90393
augaauccaaaccaaaagauaauaaccauugguucggucuguaugacaaucggaauggcuaacuuaauauuacaaauuggaaacauaaucucaauauggauuagccacucaauucaacuugggaaucaaaaccagauugaaacaugcaaucaaagcgucauuacuuaugaaaacaacacuuggguaaaucagacauauguuaacaucagcaacaccaacuuugcugcuggacagucagugguuuccgugaaauuagcgggcaauuccucucucugcccuguuaguggaugggcuauauacaguaaagacaacaguauaagaaucgguuccaagggagauguguuugucauaagggaaccauucauaucaugcucccccuuggaaugcagaaccuucuucuugacucaaggggccuugcuaaaugacaaacauuccaauggaaccauuaaagacaggagcccacaucgaacccuaaugagcuguccuauuggugaaguucccucuccauacaacucaagauuugagucagucgcuuggucagcaagugcuugucaugauggcaucaauuggcuaacaauuggaauuucuggcccagacaauggggcaguggcuguguuaaaguacaacggcauaauaacagacaccaucaagaguuggagaaacaauauauugagaacacaagagucugaaugugcauguguaaaugguucuugcuuuacuguaaugaccgauggaccaagugauggacaggccucauacaagaucuucagaauagaaaagggaaagauagucaaaucagucgaaaugaaugccccuaauuaccacuaugaggaaugcuccuguuauccugauucuagugaaaucacauguguaugcagggauaacuggcauggcucgaaucgaccgugggugucuuucaaccagaaucuggaauaucagauaggauacauaugcagugggauuuucggagacaauccacgcccuaaugauaagacaggcaguugugguccaguaucgucuaauggagcaaauggaguaaaaggauuuucauucaaauacggcaaugguguuuggauagggagaacuaaaagcauuaguucaagaaacgguuuugagaugauuugggauccgaacggauggacugggacagacaauaacuucucaauaaagcaagauaucguaggaauaaaugaguggucaggauauagcgggaguuuuguucagcauccagaacuaacagggcuggauuguauaagaccuugcuucuggguugaacuaaucagagggcgacccaaagagaacacaaucuggacuagcgggagcagcauauccuuuugugguguaaacagugacacuguggguuggucuuggccagacggugcugaguugccauuuaccauugacaaguaa

SEQ ID NO: 51215 - RNA, 1410 nt, Artificial Sequence; identical to SEQ ID NO: 51190
  derived and/or modified CDS sequence (wt) from neuraminidase__InfluenzaA__ADK90397

SEQ ID NO: 51216 - RNA, 1410 nt, Artificial Sequence; identical to SEQ ID NO: 51175
  derived and/or modified CDS sequence (wt) from neuraminidase__InfluenzaA__ADK90401

SEQ ID NO: 51217 - RNA, 1410 nt, Artificial Sequence
  derived and/or modified CDS sequence (wt) from neuraminidase__InfluenzaA__ADK90405
augaauccaaaccaaaagauaauaaccauugguucggucuguaugacaauuggaauggcuaacuuaauauuacaaauuggaaacauaaucucaauauggauuagccacucaauucaacuugggaaucaaaaucagauugaaacaugcaaucaaagcgucauuacuuaugaaaacaacacuuggguaaaucagacauauguuaacaucagcaacaccaacuuugcugcuggacagucagugguuuccgugaaauuagcgggcaauuccucucucugcccuguuaguggaugggcuauauacaguaaagacaacaguauaagaaucgguuccaagggggauguguuugucauaagggaaccauucauaucaugcucccccuuggaaugcagaaccuucuucuugacucaaggggccuugcuaaaugacaaacauuccaauggaaccauuaaagacaggagcccacaucgaacccuaaugagcuguccuauuggugaaguucccucuccauacaacucaagauuugagucagucgcuuggucagcaagugcuugucaugauggcaucaauuggcuaacaauuggaauuucuggcccagacaauggggcaguggcuguguuaaaguacaacggcauaauaacagacacuaucaagaguuggagaaacaauauauugagaacacaagagucugaauguacauguguaaaugguucuugcuuuacuguaaugaccgauggaccaagugauggacaggccucauacaagaucuucagaauagaaaagggaaagauagucaaaucagucgaaaugaaugccccuaauuaccacuaugaggaaugcuccuguuauccugauucuagugaaaucacauguguaugcagggauaacuggcauggcucgaaucgaccgugggugucuuucaaccagaaucuggaauaucagauaggauacauaugcagugggauuuucggagacaauccacgcccuaaugauaagacaggcaguugugguccaguaucgucuaauggagcaaauggaguaaaaggauuuucauucaaauacggcaaugguguuuggauagggagaacuaaaagcauuaguucaagaaacgguuuugagaugauuugggauccgaacggauggacugggacagacaauaacuucucaauaaagcaagauaucguaggaauaaaugaguggucaggauauagcgggaguuuuguucagcauccagaacuaacagggcuggauuguauaagaccuugcuucuggguugaacuaaucagagggcgacccaaagagaacacaaucuggacuagcgggagcagcauauccuuuugugguguaaacagugacacuguggguuggucuuggccagacggugcugaguugccauuuaccauugacaaguaa

SEQ ID NO: 51218 - RNA, 1410 nt, Artificial Sequence; identical to SEQ ID NO: 49215
  derived and/or modified CDS sequence (wt) from neuraminidase__InfluenzaA__ADK90409

SEQ ID NO: 51219 - RNA, 1410 nt, Artificial Sequence
  derived and/or modified CDS sequence (wt) from neuraminidase__InfluenzaA__ADK90413
augaauccaaaccaaaagauaauaaccauugguucggucuguaugacaauuggaauggcuaacuuaauauuacaaauuggaaacauaaucucaauauggauuagccacucaauucaacuugggaaucaaaaucagauugaaacaugcaaucaaagcgucauuaccuaugaaaacaacacuuggguaaaucagacauauguuaacaucagcaacaccaacuuugcugcuggacagucagugguuuccgugaaauuagcgggcaauuccucucucugcccuguuaguggaugggcuauauacaguaaagacaacaguauaagaaucgguuccaagggggauguguuugucauaagggaaccauucauaucaugcucccccuuggaaugcagaaccuucuucuugacucaaggggccuugcuaaaugacaaacauuccaauggaaccauuaaagacaggagcccacaucgaacccuaaugagcuguccuauuggugaaguucccucuccauacaacucaagauuugagucagucgcuuggucagcaagugcuugucaugauggcaucaauuggcuaacaauuggaauuucuggcccagacaauggggcaauggcuguguuaaaguacaacggcauaauaacagacacuaucaagaguuggagaaacaauauauugagaacacaagagucugaaugugcauguguaaaugguucuugcuuuacuguaaugaccgauggaccaagugauggacaggccucauacaagaucuucagaauagaaaagggaaagauagucaaaucagucgaaaugaaugccccuaauuaccacuaugaggaaugcuccuguuauccugauucuagugaaaucacauguguaugcagggauaacuggcauggcucgaaucgaccgugggugucuuucaaccagaaucuggaauaucagauaggauacauaugcagugggauuuucggagacaauccacgcccuaaugauaagacaggcaguugugguccaguaucgucuaauggagcaaauggaguaaaaggauuuucauucaaauacggcaaugguguuuggauagggagaacuaaaagcauuaguucaagaaacgguuuugagaugauuugggauccgaacggauggacugggacagacaauaacuucucaauaaagcaagauaucguaggaauaaaugaguggucaggauauagcgggaguuuuguucagcauccagaacuaacagggcuggauuguauaagaccuugcuucuggguugaacuaaucagagggcgacccaaagagaacacaaucuggacuagcgggagcagcauauccuuuugugguguaaacagugacacuguggguuggucuuggccagacggugcugaguugccauuuaccauugacaaguaa

SEQ ID NO: 51220 - RNA, 1410 nt, Artificial Sequence
  derived and/or modified CDS sequence (wt) from neuraminidase__InfluenzaA__ADK90417
augaauccaaaccaaaagauaauaaccauugguucggucuguaugacaauuggaauggcuaacuuaauauuacaaauuggaaacauaaucucaauauggauuagccacucaauucaacuugggaaucaaaaucagauugaaacaugcaaucaaagcgucauuacuuaugaaaacaacacuuggguaaaucagacauauguuaacaucagcaacaccaacuuugcugcuggacagucagugguuuccgugaaauuagcgggcaauuccucucucugcccuguuaguggaugggcuauauacaguaaagacaacaguauaagaaucgguuccaagggggauguguuugucauaagggaaccauucauaucaugcucccccuuggaaugcagaaccuucuucuugacucaaggggccuugcuaaaugacaaacauuccaauggaaccauuaaagacaggagcccauaucgaacccuaaugagcuguccuauuggugaaguucccucuccauacaacucaagauuugagucagucgcuuggucagcaagugcuugucaugauggcaucaauuggcuaacaauuggaauuucuggcccagacaauggggcaguggcuguguuaaaguacaacggcauaauaacagacacuaucaagaguuggagaaacaauauauugagaacacaagagucugaaugugcauguguaaaugguucuugcuuuacuguaaugaccgauggaccaagugauggacaggccucauacaagaucuucagaauagaaaagggaaagauagucaaaucagucgaaaugaaugccccgaauuaucacuaugaggaaugcuccuguuauccugauucuagugaaaucacaugugugugcagggauaacuggcauggcucgaaucgaccgugggugucuuucaaccagaaucuggaauaucagauaggauacauaugcagugggauuuucggagacaauccacgcccuaaugauaagacaggcaguugugguccaguaucgucuaauggagcaaauggaguaaaaggauuuucauucaaauacggcaaugguguuuggauagggagaacuaaaagcauuaguucaagaaacgguuuugagaugauuugggauccgaacggauggacugggacagacaauaacuucucaauaaagcaagauaucguaggaauaaaugaguggucaggauauagcgggaguuuuguucagcauccagaacuaacagggcuggauuguauaagaccuugcuucuggguugaacuaaucagagggcgacccaaagagaacacaaucuggacuagcgggagcagcauauccuuuugugguguaaacagugacacuguggguuggucuuggccagacggugcugaguugccauuuaccauugacaaguaa

SEQ ID NO: 51221 - RNA, 1410 nt, Artificial Sequence
  derived and/or modified CDS sequence (wt) from neuraminidase__InfluenzaA__ADK90421
augaauccaaaccaaaagauaauaaccauugguucggucuguaugacaauuggaauggcuaacuuaauauuacaaauuggaaacauaaucucaauauggauuagccacucaauucaacuugggaaucaaaaucagauugaaacaugcaaucaaagcgucauuacuuaugaaaacaacacuuggguaaaucagacauauguuaacaucagcaacaccaacuuugcugcuggacagucagugguuuccgugaaauuagcgggcaauuccucucucugcccuguuaguggaugggcuauauacaguaaagacaacaguauaagaaucgguuccaagggggauguguuugucauaagggaaccauucauaucaugcucccccuuggaaugcagaaccuucuucuugacucaaggggccuugcuaaaugacaaacauuccaauggaaccauuaaagacaggagcccauaucgaacccuaaugagcuguccuauuggugagguucccucuccauacaacucaagauuugagucagucgcuuggucagcaagugcuugucaugauggcaucaauuggcuaacaauuggaauuucuggcccagacaauggggcaguggcuguguuaaaguacaacggcauaauaacagacacuaucaagaguuggagaaacaauauauugagaacacaagagucugaaugugcauguguaaaugguucuugcuuuacuguaaugaccgauggaccaagugauggacaggccucauauaagaucuucagaauagaaaagggaaagauagucaaaucagucgaaaugaaugccccuaauuaucacuaugaggaaugcuccuguuauccugauucuagugaaaucacauguguaugcagggauaacuggcauggcucgaaucgaccgugggugucuuucaaccagaaucuggaauaucagauaggauacauaugcagugggauuuucggagacaauccacgcccuaaugauaagacaggcaguugugguccaguaucgucuaauggagcaaauggaguaaaaggauuuucauucaaauacggcaaugguguuuggauagggagaacuaaaagcauuaguucaagaaacgguuuugagaugauuugggauccgaacggauggacugggacagacaauaacuucucaauaaagcaagauaucguaggaauaaaugaguggucaggauauagcgggaguuuuguucagcauccagaacuaacagggcuggauuguauaagaccuugcuucuggguugaacuaaucagagggcgacccaaagagaacacaaucuggacuagcgggagcagcauauccuuuugugguguaaacagugacacuguggguuggucuuggccagacggugcugaguugccauuuaccauugacaaguaa

SEQ ID NO: 51222 - RNA, 1410 nt, Artificial Sequence; identical to SEQ ID NO: 48750
  derived and/or modified CDS sequence (wt) from neuraminidase__InfluenzaA__ADK90425

SEQ ID NO: 51223 - RNA, 1410 nt, Artificial Sequence; identical to SEQ ID NO: 48750
  derived and/or modified CDS sequence (wt) from neuraminidase__InfluenzaA__ADK90429

SEQ ID NO: 51224 - RNA, 1410 nt, Artificial Sequence
  derived and/or modified CDS sequence (wt) from neuraminidase__InfluenzaA__ADK94194
augaauccaaaucaaaagauaauaacgauuggcucuguuucucucaccauuuccacaauaugcuucuucaugcaaauugccaucuugauaacuacuguaacauugcauuucaagcaauaugaauucaacucccccccaaacaaccaagugaugcugugugaaccaacaauaauagaaagaaacauaacagagauaguguaucugaccaacaccaccauagagaaggaaauaugccccaaacuagcagaauacagaaauuggucaaagccgcaaugugacauuacaggguuugcaccuuuuucuaaggacaauucgauuaggcuuuccgcugguggggacaucugggugacaagagaaccuuaugugucaugcgauccugacaaguguuaucaauuugcccuuggacagggaacaacacuaaacaacguacauucaaauaacacaguacgugauaggacccccuaucggacccuauugaugaaugaguuagguguuccuuuucaucuggggaccaagcaagugugcauagcaugguccagcucaaguugucacgauggaaaagcauggcugcauguuuguauaacgggggaugauaaaaaugcaacugcuagcuucauuuacaaugggaggcuuguagauaguguuguuucaugguccaaagaaauccucaggacccaggagucagaaugcguuuguaucaauggaacuuguacaguaguaaugacugaugggagugcuucaggaaaagcugauacuaaaauacuauucauugaggaggggaaaaucguucauacuagcacauugucaggaagugcucagcaugucgaggagugcuccugcuauccucgauauccuggugucagaugugucugcagagacaacuggaaaggauccaauaggcccaucguagauauaaacauaaaggaucauagcauugucuccaguuauguguguucaggacuuguuggagacacacccagaaaaaacgacagcuccagcaguagccauuguuuggauccuaacaaugaggaagguggucauggggugaaaggcugggccuuugaugauggaaaugacguguggaugggaagaacgaucagcgagaagucacgcuuaggguaugaaaccuucaaagucauugaaggcugguccaacccuaaguccaaauugcagauaaauaggcaagucauaguugacagagguaauagguccgguuauucugguauuuucucuguugaaggcaaaagcugcaucaaucggugcuuuuauguggaguugauaaggggaagaaaagaggaaacugaagucuuguggaccucaaacaguauuguuguguuuuguggcaccucagguacauauggaacaggcucauggccugauggggcggacaucaaucucaugccuauauaa

SEQ ID NO: 51225 - RNA, 1410 nt, Artificial Sequence
  derived and/or modified CDS sequence (wt) from neuraminidase__InfluenzaA__ADK94205
augaauccaaaucaaaagauaauaacgauuggcucuguuucucucaccauuuccacaauaugcuucuucaugcaaauugccaucuugauaacuacuguaacauugcauuucaagcaauaugaauucaacucccccccaaacaaccaagugaugcugugugaaccaacaauaauagaaagaaacauaacagagauaguguaucugaccaacaccaccauagagaaggaaauaugccccaaacuagcugaauacagaaauuggucaaagccgcaaugugacauuacaggauuugcaccuuuuucuaaggacaauucgauuaggcuuuccgcugguggggacaucugggugacaagagaaccuuaugugucaugcgauccugacaaguguuaucaauuugcccuuggacagggaacaacacuaaacaacgugcauucaaauaacacaguacgugauaggaccccuuaucggacccuauugaugaaugaguuagguguuccuuuucaucuggggaccaagcaagugugcauagcaugguccagcucaaguugucacgauggaaaagcauggcugcauguuuguauaacgggggaugauaaaaaugcaacugcuagcuucauuuacaaugggaggcuuguagauaguguuguuucaugguccaaagaaauccucaggacccaggagucagaaugcguuuguaucaauggaacuuguacaguaguaaugacugaugggagugcuucaggaaaagcugauacuaaaauacuauucauugaggaggggaaaaucguucauacuagcacauugucaggaagugcucagcaugucgaggagugcuccugcuauccucgauauccuggugucagaugugucugcagagacaacuggaaaggcuccaauaggcccaucguagauauaaacauaaaggaucauagcauuguuuccaguuauguguguucaggacuuguuggagacacacccagaaaaaacgacagcuccagcaguagccauuguuuggauccuaacaaugaagaagguggucauggagugaaaggcugggccuuugaugauggaaaugacguguggaugggaagaacgaucagcgagaagucacgcuuaggguaugaaaccuucaaagucauugaaggcugguccaacccuaaguccaaauugcagauaaauaggcaagucauaguugacagagguaauagguccgguuauucugguauuuucucuguugaaggcaaaagcugcaucaaucggugcuuuuauguggaguugauaaggggaagaaaagaggaaacugaagucuuguggaccucaaacaguauuguuguguuuuguggcaccucagguacauauggaacaggcucauggccugauggggcggacaucaaucucaugccuauauaa

SEQ ID NO: 51226 - RNA, 1410 nt, Artificial Sequence
  derived and/or modified CDS sequence (wt) from neuraminidase__InfluenzaA__ADK94216
augaauccaaaucaaaagauaauaacgauuggcucuguuucucucaccauuuccacaauaugcuucuucaugcaaauugccaucuugauaacuacuguaacauugcauuucaagcaauaugaauucaacucccccccaaacaaccaagugaugcugugugaaccaacaauaauagaaagaaacauaacagagauaguguaucugaccaacaccaccauagagaaggaaauaugccccaaacuagcagaauacagaaauuggucaaagccgcaaugugacauuacaggauuugcaccuuuuucuaaggacaauucgauuaggcuuuccgcugguggggacaucugggugacaagagaaccuuaugugucaugcgauccugacaaguguuaucaauuugcccuuggacagggaacaacacuaaacaacgugcauucaaauaacacaguacgugauaggaccccuuaucggacccuauugaugaaugaguuagguguuccuuuucaucuggggaccaagcaagugugcauagcaugguccagcucaaguugucacgauggaaaagcauggcugcauguuuguauaacgggggaugauaaaaaugcaacugcuagcuucauuuacaaugggaggcuuguagauaguguuguuucaugguccaaagaaauccucaggacccaggagucagaaugcgucuguaucaauggaacuuguacaguaguaaugacugaugggagugcuucaggaaaagcugauacuaaaauacuauucauugaggaggggaaaaucguucauacuagcacauugucaggaagugcucagcaugucgaggagugcucuugcuauccucgauauccuggugucagaugugucugcagagacaacuggaaaggcuccaauaggcccaucguagauauaaacauaaaggaucauagcauuguuuccaguuauguguguucaggacuuguuggagacacacccagaaaaaacgacagcuccagcaguagccauuguuuggauccuaacaaugaagaagguggucauggagugaaaggcugggccuuugaugauggaaaugacguguggaugggaagaacgaucagcgagaagucacgcuuaggguaugaaaccuucaaagucauugaaggcugguccaaccauaaguccaaauugcagauaaauaggcaagucauaguugacagagguaauagguccgguuauucugguauuuucucuguugaaggcaaaagcugcaucaaucggugcuuuuauguggaguugauuaggggaagaaaagaggaaacugaagucuuguggaccucaaacaguauuguuguguuuuguggcaccucagguacauauggaacaggcucauggccugauggggcggaccucaaucucaugccuauauaa

SEQ ID NO: 51227 - RNA, 1410 nt, Artificial Sequence
  derived and/or modified CDS sequence (wt) from neuraminidase__InfluenzaA__ADK94227
augaauccaaaucaaaagauaauaacgauuggcucuguuucucucaccauuuccacaauaugcuucuucaugcaaauugccaucuugauaacuacuguaacauugcauuucaagcaauaugaauucaacucccccccaaacaaccaagugaugcugugugaaccaacaauaauagaaagaaauauaacagagauaguguaucugaccaacaccaccauagagaaggaaauaugccccaaacuagcagaauacagaaauuggucaaagccgcaaugugacauuacaggguuugcaccuuuuucuaaggacaauucgauuaggcuuuccgcugguggggacaucugggugacaagagaaccuuaugugucaugcgauccugacaaguguuaucaauuugcccuuggacagggaacaacacuaaacaacguacauucaaauaacacaguacgugauaggaccccuuaucggacccuauugaugaaugaguuagguguuccuuuucaucuggggaccaagcaagugugcauagcaugguccagcucaaguugucacgauggaaaagcauggcugcauguuuguauaacgggggaugauaaaaaugcaacugcuagcuucauuuacaaugggaggcuuguagauaguguuguuucaugguccaaagaaauccucaggacccaggagucagaaugcguuuguaucaauggaacuuguacaguaguaaugacugaugggagugcuucaggaaaagcugauacuaaaauacuauucauugaggaggggaaaaucguucauacuagcacauugucaggaagugcucagcaugucgaggagugcuccugcuauccucgauauccuggugucagaugugucugcagagacaacuggaaaggauccaauaggcccaucguagauauaaacauaaaggaucauagcauugucuccaguuauguguguucaggacuuguuggagacacacccagaaaaaacgacagcuccagcaguagccauuguuuggauccuaacaaugaggaagguggucauggggugaaaggcugggccuuugaugauggaaaugacguguggaugggaagaacgaucagcgagaagucacgcuuaggguaugaaaccuucaaagucauugaaggcugguccaacccuaaguccaaauugcagauaaauaggcaagucauaguugacagagguaauagguccgguuauucugguauuuucucuguugaaggcaaaagcugcaucaaucggugcuuuuauguggaguugauaaggggaagaaaagaggaaacugaagucuuguggaccucaaacaguauuguuguguuuuguggcaccucagguacauauggaacaggcucauggccugauggggcggacaucaaucucaugccuauauaa

SEQ ID NO: 51228 - RNA, 1410 nt, Artificial Sequence; identical to SEQ ID NO: 49470
  derived and/or modified CDS sequence (wt) from neuraminidase__InfluenzaA__ADK94238

SEQ ID NO: 51229 - RNA, 1410 nt, Artificial Sequence
  derived and/or modified CDS sequence (wt) from neuraminidase__InfluenzaA__ADK94260
augaauccaaaucaaaagauaauaacgauuggcucuguuucucucaccauuuccacaauaugcuucuucaugcaaauugccaucuugauaacuacuguaacauugcauuucaagcaauaugaauucaacucccccccaaacaaccaagugaugcugugugaaccaacaauaauagaaagaaacauaacagagauaguguaucugaccaacaccaccauagagaaggaaauaugccccaaacuagcagaauacagaaauuggucaaagccgcaaugugacauuacaggguuugcaccuuuuucuaaggacaauucgauuaggcuuuccgcugguggggacaucugggugacaagagaaccuuaugugucaugcgauccugacaaguguuaucaauuugcccuuggacagggaacaacacuaaacaacguacauucaaauaacacaguacgugauaggaccccuuaucggacccuauugaugaaugaguuagguguuccuuuucaucuggggaccaagcaagugugcauagcaugguccagcucaaguugucacgauggaaaagcauggcugcauguuuguauaacgggggaugauaaaaaugcaacugcuagcuucauuuacaaugggaggcuuguagauaguguuguuucaugguccaaagaaauccucaggacccaggagucagaaugcguuuguaucaauggaacuuguacaguaguaaugacugaugggagugcuucaggaaaagcugauacuaaaauacuauucauugaggaggggaaaaucguucauacuagcacauugucaggaagugcucaacaugucgaggagugcuccugcuauccucgauauccuggugucagaugugucugcagagacaacuggaaaggauccaauaggcccaucguagauauaaacauaaaggaucauagcauuguuuccaguuauuuguguucaggacuuguuggagacacacccagaaaaaacgacagcuccagcaguagccauuguuuggauccuaacaaugaggaagguggucauggggugaaaggcugggccuuugaugauggaaaugacguguggaugggaagaacgaucagcgagaagucacgcuuaggguaugaaaccuucaaagucauugaaggcugguccaacccuaaguccaaauugcagauaaauaggcaagucauaguugacagagguaauagguccgguuauucugguauuuucucuguugaaggcaaaagcugcaucaaucggugcuuuuauguggaguugauaaggggaagaaaagaggaaacugaagucuuguggaccucaaacaguauuguuguguuuuguggcaccucagguacauauggaacaggcucauggccugauggggcggacaucaaucucaugccuauauaa

SEQ ID NO: 51230 - RNA, 1410 nt, Artificial Sequence; identical to SEQ ID NO: 51229
  derived and/or modified CDS sequence (wt) from neuraminidase__InfluenzaA__ADK94271

SEQ ID NO: 51231 - RNA, 1410 nt, Artificial Sequence; identical to SEQ ID NO: 51227
  derived and/or modified CDS sequence (wt) from neuraminidase__InfluenzaA__ADK94293

SEQ ID NO: 51232 - RNA, 1410 nt, Artificial Sequence; identical to SEQ ID NO: 51227
  derived and/or modified CDS sequence (wt) from neuraminidase__InfluenzaA__ADK94304

SEQ ID NO: 51233 - RNA, 1410 nt, Artificial Sequence
  derived and/or modified CDS sequence (wt) from neuraminidase__InfluenzaA__ADK94326
augaauccaaaucaaaagauaauaacgauuggcucuguuucucucaccauuuccacaauaugcuucuucaugcaaauugccaucuugauaacuacuguaacauugcauuucaagcaauaugaauucaacucccccccaaacaaccaagugaugcugugugaaccaacaauaauagaaagaaacauaacagagauaguguaucugaccaacaccaccauagagaaggaaauaugccccaaacuagcagaauacagaaauuggucaaagccgcaaugugacauuacaggguuugcaccuuuuucuaaggacaauucgauuaggcuuuccgcugguggggacaucugggugacaagagaaccuuaugugucaugcgauccugacaaguguuaucaauuugcccuuggacagggaacaacacuaaacaacauacauucaaauaacacaguacgugauaggaccccuuaucggacccuauugaugaaugaguuagguguuccuuuucaucuggggaccaagcaagugugcauagcaugguccagcucaaguugucacgauggaaaagcauggcugcauguuuguauaacgggggaugauaaaaaugcaacugcuagcuucauuuacaaugggaggcuuguagauaguguuguuucaugguccaaagaaauccucaggacccaggagucagaaugcguuuguaucaauggaacuuguacaguaguaaugacugaugggagugcuucaggaaaagcugauacuaaaauacuauucauugaggaggggaaaaucguucauacuagcacauugucaggaagugcucagcaugucgaggagugcuccugcuauccucgauauccuggugucagaugugucugcagagacaacuggaaaggauccaauaggcccaucguagauauaaacauaaaggaucauagcauugucuccaguuauguguguucaggacuuguuggagacacacccagaaaaaacgacagcuccagcaguagccauuguuuggauccuaacaaugaggaagguggucauggggugaaaggcugggccuuugaugauggaaaugacguguggaugggaagaacgaucagcgagaagucacgcuuaggguaugaaaccuucaaagucauugaaggcugguccaacccuaaguccaaauugcagauaaauaggcaagucauaguugacagagguaauagguccgguuauucugguauuuucucuguugaaggcaaaagcugcaucaaucggugcuuuuauguggaguugauaaggggaagaaaagaggaaacugaagucuuguggaccucaaacaguauuguuguguuuuguggcaccucagguacauauggaacaggcucauggccugauggggcggacaucaaucucaugccuauauaa

SEQ ID NO: 51234 - RNA, 1410 nt, Artificial Sequence; identical to SEQ ID NO: 51226
  derived and/or modified CDS sequence (wt) from neuraminidase__InfluenzaA__ADK94337

SEQ ID NO: 51235 - RNA, 1410 nt, Artificial Sequence; identical to SEQ ID NO: 51224
  derived and/or modified CDS sequence (wt) from neuraminidase__InfluenzaA__ADK94444

SEQ ID NO: 51236 - RNA, 1410 nt, Artificial Sequence
  derived and/or modified CDS sequence (wt) from neuraminidase__InfluenzaA__ADK94479
augaauccaaaucaaaagauaauaacgauuggcucuguuucucucaccauuuccacaauaugcuuccucaugcaaauugccauccugacaacuacuguaacauugcauuucaagcaauaugaauucaacucccccccaaacaaccaagugaugcugugugaaccaacaacaauagaaagaaacauaacagagauaguguaucugaccaacaccaccauagagaaggaaauaugccccaaacuagcagaauacagaaauuggucaaagccgcaaugugacauuacaggguuugcaccuuuuucuaaggacaauucgauuaggcuuuccgcugguggggacaucugggugacaagagaaccuuaugugucaugcgauccugacaaguguuaucaauuugcccuuggacagggaacaacacuaaacaacguacauucaaauaacacaguacgugauaggaccccuuaucggacccuauugaugaaugaguuagguguucccuuucaucuggggaccaagcaagugugcauagcaugguccagcucaaguugucacgauggaaaagcauggcugcauguuuguauaacgggggaugauaaaaaugcaacugcuagcuucauuuacaaugggaagcuuguagauaguguuguuucaugguccaaagaaauccucaggacccaggagucagaaugcguuuguaucaauggaacuuguacaguaguaaugacugaugggagugcuucaggaaaagcugauacuaaaauacuauucauugaggaggggaaaaucguucauacuagcacauugucaggaagugcucaacaugucgaggagugcuccugcuauccucgauauccuggugucagaugugucugcagagacaacuggaaaggauccaauaggcccaucguagauauaaacauaaaggaucauagcauuguuuccaguuauuuguguucaggacuuguuggagacacacccagaaaaaacgacagcuccagcaguagccauuguuuggauccuaacaaugaggaagguggucauggggugaaaggcugggccuuugaugauggaaaugacguguggaugggaagaacgaucagcgagaagucacgcuuaggguaugaaaccuucaaagucauugaaggcugguccaacccuaaguccaaauugcagauaaauaggcaagucauaguugacagagguaauagguccgguuauucugguauuuucucuguugaaggcaaaagcugcaucaaucggugcuuuuauguggaguugauaaggggaagaaaagaggaaacuggagucuuguggaccucaaacaguauuguuguguuuuguggcaccucagguacauauggaacaggcucauggccugauggggcggacaucaaucucaugccuauauaa

SEQ ID NO: 51237 - RNA, 1410 nt, Artificial Sequence; identical to SEQ ID NO: 51227
  derived and/or modified CDS sequence (wt) from neuraminidase__InfluenzaA__ADK94490

SEQ ID NO: 51238 - RNA, 1410 nt, Artificial Sequence; identical to SEQ ID NO: 49470
  derived and/or modified CDS sequence (wt) from neuraminidase__InfluenzaA__ADK94501

SEQ ID NO: 51239 - RNA, 1410 nt, Artificial Sequence
  derived and/or modified CDS sequence (wt) from neuraminidase__InfluenzaA__ADK94512
augaauccaaaucaaaagauaauaacgauuggcucuguuucucucaccauuuccacaauaugcuucuucaugcaaauugccaucuugauaacuacuguaacauugcauuucaagcaauaugaauucaacucccccccaaacaaccaagugaugcugugugaaccaacaauaauagaaagaaauauaacagagauaguguaucugaccaacaccaccauagagaaggaaauaugccccaaacuagcagaauacagaaauuggucaaagccgcaaugugacauuacaggguuugcaccuuuuucuaaggacaauucgauuaggcuuuccgcugguggggacaucugggugacaagagaaccuuaugugucaugcgauccugacaaguguuaucaauuugcccuuggacagggaacaacacuaaacaacguacauucaaauaacacaguacgugauaggaccccuuaucggacccuauugaugaaugaguuagguguuccuuuucaucuggggaccaagcaagugugcauagcaugguccagcucaaguugucacgauggaaaagcauggcugcauguuuguauaacgggggaugauaaaaaugcaacugcuagcuucauuuacaaugggaggcuuguagauaguguuguuucaugguccaaagaaauccucaggacccaggagucagaaugcguuuguaucaauggaacuuguacaguaguaaugacugaugggagugcuucaggaaaagcugauacuaaaauacuauucauugaggaggggagaaucguucauacuagcacauugucaggaagugcucagcaugucgaggagugcuccugcuauccucgauauccuggugucagaugugucugcagagacaacuggaaaggauccaauaggcccaucguagauauaaacauaaaggaucauagcauugucuccaguuauguguguucaggacuuguuggagacacacccagaaaaaacgacagcuccagcaguagccauuguuuggauccuaacaaugaggaagguggucauggggugaaaggcugggccuuugaugauggaaaugacguguggaugggaagaacgaucagcgagaagucacgcuuaggguaugaaaccuucaaagucauugaaggcugguccaacccuaaguccaaauugcagauaaauaggcaagucauaguugacagagguaauagguccgguuauucugguauuuucucuguugaaggcaaaagcugcaucaaucggugcuuuuauguggaguugauaaggggaagaaaagaggaaacugaagucuuguggaccucaaacaguauuguuguguuuuguggcaccucagguacauauggaacaggcucauggccugauggggcggacaucaaucucaugccuauauaa

SEQ ID NO: 51240 - RNA, 1410 nt, Artificial Sequence
  derived and/or modified CDS sequence (wt) from neuraminidase__InfluenzaA__ADK94534
augaauccaaaucaaaagauaauaacgauuggcucuguuucucucaccauuuccacaauaugcuucuucaugcaaauugccaucuugauaacuacuguaacauugcauuucaagcaauaugaauucaacucccccccaaacaaccaagugaugcugugugaaccaacaauaauagaaagaaacauaacagagauaguguaucugaccaacaccaccauagagaaggaaauaugccccaaacuagcagaauacagaaauuggucaaagccgcaaugugacauuacaggguuugcaccuuuuucuaaggacaauucgauuaggcuuuccgcugguggggacaucugggugacaagagaaccuuaugugucaugcgauccugacaaguguuaucaauuugcccuuggacagggaacaacacuaaacaacguacauucaaauaacacaguacgugauaggaccccuuaucggacccuauugaugaaugaguuagguguuccuuuucaucuggggaccaagcaagugugcauagcaugguccagcucaaguugucacgauggaaaagcauggcugcauguuuguauaacgggggaugauaaaaaugcaacugcuagcuucauuuacaaugggaggcuuguagauaguguuguuucaugguccaaagaaauccucaggacccaggagucagaaugcguuuguaucaauggaacuuguacaguaguaaugacugaugggagugcuucaggaaaagcugauacuaaaauauuauucauugaggaggggaaaaucguucauacuagcacauugucaggaagugcucagcaugucgaggagugcuccugcuauccucgauauccuggugucagaugugucugcagagacaacuggaaaggauccaauaggcccaucguagauauaaacauaaaggaucauaguauugucuccaguuauguguguucaggacuuguuggagacacacccagaaaaaacgacagcuccagcaguagccauuguuuggauccuaacaaugaggaagguggucauggggugaaaggcugggccuuugaugauggaaaugacguguggaugggaagaacgaucagcgagaagucacgcuuaggguaugaaaccuucaaagucauugaaggcugguccaacccuaaguccaaauugcagauaaauaggcaagucauaguugacagagguaauagguccgguuauucugguauuuucucuguugaaggcaaaagcugcaucaaucggugcuuuuauguggaguugauaaggggaagaaaagaggaaacugaagucuuguggaccucaaacaguauuguuguguuuuguggcaccucagguacauauggaacaggcucauggccugauggggcggacaucaaucucaugccuauauaa

SEQ ID NO: 51241 - RNA, 1410 nt, Artificial Sequence; identical to SEQ ID NO: 51229
  derived and/or modified CDS sequence (wt) from neuraminidase__InfluenzaA__ADK94556

SEQ ID NO: 51242 - RNA, 1410 nt, Artificial Sequence; identical to SEQ ID NO: 51240
  derived and/or modified CDS sequence (wt) from neuraminidase__InfluenzaA__ADK94567

SEQ ID NO: 51243 - RNA, 1410 nt, Artificial Sequence
  derived and/or modified CDS sequence (wt) from neuraminidase__InfluenzaA__ADK94578
augaauccaaaucaaaagauaauaacgauuggcucuguuucucucaccauuuccacaauaugcuucuucaugcaaauugccaucuugauaacuacuguaacauugcauuucaagcaauaugaauucaacucccccccaaacaaccaagugaugcugugugagccaacaauaauagaaagaaacauaacagagauaguuuaucugaccaacaccaccauagagaaggaaauaugccccaaacuagcagaauacagaaauuggucaaagccgcaaugugacauuacaggguuugcaccuuuuucuaaggacaauucgauuaggcuuuccgcugguggggacaucugggugacaagagaaccuuaugugucaugcgauccugacaaguguuaucaauuugcccuuggacagggaacaacacuaaacaacguacauucaaauaacacaguacgugauaggaccccuuaucggacccuauugaugaaugaguuagguguuccuuuucaucuggggaccaagcaagugugcauagcaugguccagcucaaguugucacgauggaaaagcauggcugcauguuuguauaacgggggaugauaaaaaugcaacugcuagcuucauuuacaaugggaggcuuguagauaguguuguuucaugguccaaagaaauccucaggacccaggagucagaaugcguuuguaucaauggaacuuguacaguaguaaugacugaugggagugcuucaggaaaagcugauacuaaaauacuauucauugaggaggggaaaaucguucauacuagcacauugucaggaagugcucagcaugucgaggagugcuccugcuauccucgauauccuggugucagaugugucugcagagacaacuggaaaggauccaauaggcccaucguagauauaaacauaaaggaucauagcauugucuccaguuauguguguucaggacuuguuggagacacacccagaaaaaacgacagcuccagcaguagccauuguuuggauccuaacaaugaggaagguggucauggggugaaaggcugggccuuugaugauggaaaugacguguggaugggaagaacgaucagcgagaagucacgcuuaggguaugaaaccuucaaagucauugaaggcugguccaacccuaaguccaaauugcagauaaauaggcaagucauaguugacagagguaauagguccgguuauucugguauuuucucuguugaaggcaaaagcugcaucaaucggugcuuuuauguggaguugauaaggggaagaaaagaggaaacugaagucuuguggaccucaaacaguauuguuguguuuuguggcaccucagguacauauggaacaggcucauggccugauggggcggacaucaaucucaugccuauauaa

SEQ ID NO: 51244 - RNA, 1410 nt, Artificial Sequence
  derived and/or modified CDS sequence (wt) from neuraminidase__InfluenzaA__ADK94589
augaauccaaaucaaaagauaauaacgauuggcucuguuucucucaccauuuccacaauaugcuucuucaugcaaauugccaucuugauaacuacuguaacauugcauuucaagcaauaugaauucaacucccccccaaacaaccaagugaugcugugugaaccaacaauaauagaaagaaacauaacagagauaguguaucugaccaacaccaccauagagaaggaaauaugccccaaacuagcagaauacagaaauuggucaaagccgcaaugugacauuacaggguuugcaccuuuuucuaaggacaauucgauuaggcuuuccgcugguggggacaucugggugacaagagaaccuuaugugucaugcgauccugacaaguguuaucaauuugcccuuggacagggaacaacacuaaacaacguacauucaaauaacacaguacgugauaggaccccuuaucggacccuauugaugaaugaguuagguguuccuuuucaucuggggaccaagcaagugugcauagcaugguccagcucaaguugucacgauggaaaagcauggcugcauguuuguauaacgggggaugauaaaaaugcaacugcuagcuucauuuacaaugggaggcuuguagauaguguuguuucaugguccaaagaaauccucaggacccaggagucagaaugcguuuguaucaauggaacuuguacaguaguaaugacugaugggagugcuucaggaaaagcugauacuaaaauacuauucauugaggaggggaaaaucguucauacuagcacauugucaggaagugcucagcaugucgaggagugcuccugcuauccucgauauccuggugucagaugugucugcagagacaacuggaaaggauccaauaggcccaucguagauauaaacauaaaggaucauagcauugucuccaguuauguguguucaggacuuguuggagacacacccagaaaaaacgacagcuccagcaguagccauuguuuggauccuaacaaugaggaagguggucauggggugaaaggcugggccuuugaugauggaaaugacguguggaugggaagaacgaucagcgagaagucacgcuuaggguaugaaaccuucaaagucauugaaggcugguccaacccuaaguccaaauugcagauaaauaggcaagucauaguugacagagguaauaggucugguuauucugguauuuucucuguugaaggcaaaagcugcaucaaucggugcuuuuauguggaguugauaaggggaagaaaagaggaaacugaagucuuguggaccucaaacaguauuguuguguuuuguggcaccucagguacauauggaacaggcucauggccugauggggcggacaucaaucucaugccuauauaa

SEQ ID NO: 51245 - RNA, 1410 nt, Artificial Sequence
  derived and/or modified CDS sequence (wt) from neuraminidase__InfluenzaA__ADK98504
augaauccaaaccaaaagauaauaaccauugguucggucuguaugacaauuggaauggcuaacuuaauauuacaaauuggaaacauaaucucaauauggauuagccacucaauucaacuugggaaucaaaaucagauugaaacaugcaaucaaagcgucauuacuuaugaaaacaacacuuggguaaaucagacauauguuaacaucagcaacaccaacuuugcugcuggacagucagugguuuccgugaaauuagcgggcaauuccucucucugcccuguuaguggaugggcuauauacaguaaagacaacaguauaagaaucgguuccaagggggauguguuugucauaagggaaccauucauaucaugcucccccuuggaaugcagaaccuucuucuugacucaaggggccuugcuaaaugacaaacauuccaauggaaccauuaaagacaggagcccauaucgaacccuaaugaguuguccuauuggugaaguucccucuccauacaacucaagauuugagucagucgcuuggucagcaagugcuugucaugauggcaucaauuggcuaacaauuggaauuucuggcccagacaauggggcaguggcuguguuaaaguacaacggcauaauaacagacacuaucaagaguuggagaaacaauauauugagaacacaagagucugaaugugcauguguaaaugguucuugcuuuacuguaaugaccgauggaccaagugauggacaggccucauacaagaucuucagaauagaaaagggaaagauagucaaaucagucgaaaugaaugccccuaauuaucacuaugaggaaugcuccuguuauccugauucuagugaaaucacaugugugugcagggauaacuggcauggcucgaaucgaccgugggugucuuucaaccagaaucuggaauaucagauaggauacauaugcagugggauuuucggagacaauccacgcccuaaugacaagacaggcaguugugauccaguaucgucuaauggagcaaauggaguaaaaggauuuucauucaaauacggcaaugguguuuggauagggagaacuaaaagcauuaguucaagaaacgguuuugagaugauuugggauccgaacggauggacugggacagacaauaacuucucaauaaagcaagauaucguaggaauaaaugaguggucaggauauagcgggaguuuuguucagcauccagaacuaacagggcuggauuguauaagaccuugcuucuggguugaacuaaucagagggcgacccaaagagaacacaaucuggacuagcgggagcagcauauccuuuugugguguaaacagugacacuguggguuggucuuggccagacggugcugaguugccauuuaccauugacaaguaa

SEQ ID NO: 51246 - RNA, 1410 nt, Artificial Sequence
  derived and/or modified CDS sequence (wt) from neuraminidase__InfluenzaA__ADK98506
augaauccaaaccaaaagauaauaaccauugguucggucuguaugacaauuggaauggcuaacuuaauauuacaaauuggaaacauaaucucaauauggauuagccacucaauucaacuugggaaucaaaaucagauugaaacaugcaaucaaaacgucauuacuuaugaaaacaacacuuggguaaaucagacauauguuaacaucagcaacaccaacuuugcugcuggacagucagugguuuccgugaaauuagcgggcaauuccucucucugcccuguuaguggaugggcuauauacaguaaagacaacaguauaagaaucgguuccaagggggauguguuugucauaagggaaccauucauaucaugcucccccuuggaaugcagaaccuucuucuugacucaaggggccuugcuaaaugacaaacauuccaauggaaccauuaaagacaggagcccauaucgaacccuaaugagcuguccuauuggugaaguucccucuccauacaacucaagauuugagucagucgcuuggucagcaagugcuugucaugauggcaucaauuggcuaacaauuggaauuucuggcccagacaauggggcaguggcuguguuaaaguacaacggcauaauaacagacacuaucaagaguuggagaaacaauauauugagaacacaagagucugaaugugcauguguaaaugguucuugcuuuacuguaaugaccgauggaccaagugauggacaggccucauacaagaucuucagaauagaaaagggaaagauagucaaaucagucgaaaugaaugccccuaauuaucacuaugaggaaugcuccuguuauccugauucuagugaaaucacaugugugugcagggauaacuggcauggcucgaaucgaccgugggugucuuucaaccagaaucuggaauaucagauaggguacauaugcagugggauuuucggagacaauccacgcccuaaugauaagacaggcaguugugguccaguaucgucuaauggagcaaauggaguaaaaggauuuucauucaaauacggcaaugguguuuggauagggagaacuaaaagcauuaguucaagaaacgguuuugagaugauuugggauccgaacggauggacugggacagacaauaacuucucaauaaagcaagauaucguaggaauaaaugaguggucaggauauagcgggaguuuuguucagcauccagaacuaacagggcuggauuguauaagaccuugcuucuggguugaacuaaucagagggcgacccaaagagaacacaaucuggacuagcgggagcagcauauccuuuugugguguaaacagugacacuguggguuggucuuggccagacggugcugaguugccauuuaccauugacaaguaa

SEQ ID NO: 51247 - RNA, 1410 nt, Artificial Sequence
  derived and/or modified CDS sequence (wt) from neuraminidase__InfluenzaA__ADK98626
augaauccaaaucaaaagauaauaacgauuggcucuguuucucucaccauuuccacaauaugcuucuucaugcaaauugccaucuugauaacuacuguaacauugcauuucaagcaauaugaauucaacucccccccaaacaaccaagugaugcugugugaaccaacaaugauagaaagaaacauaacagagauaguguaucugaccaacaccaccauagagaaggaaauaugccccaaacuagcagaauacagaaauuggucaaagccgcaaugugacauuacaggguuugcaccuuuuucuaaggacaauucgauuaggcuuuccgcugguggggacaucugggugacaagagaaccuuaugugucaugcgauccugacaaguguuaucaauuugcccuuggacagggaacaacacuaaacaacguacauucaaauaacacaguacgugauaggaccccuuaucggacccuauugaugaaugaguuagguguuccuuuucaucuggggaccaagcaagugugcauagcaugguccagcucaaguugucacgauggaaaagcauggcugcauguuuguauaacgggggaugauaaaaaugcaacugcuagcuucauuuacaaugggaggcuuguagauaguguuguuucaugguccaaagaaauccucaggacccaggagucagaaugcguuuguaucaauggaacuuguacaguaguaaugacugaugggagugcuucaggaaaagcugauacuaaaauacuauucauugaggaggggaaaaucguucauacuagcacauugucaggaagugcucaacaugucgaggagugcuccugcuauccucgauauccuggugucagaugugucugcagagacaacuggaaaggauccaauaggcccaucguagauauaaacauaaaggaucauagcauuguuuccaguuauuuguguucaggacuuguuggagacacacccagaaaaaacgacagcuccagcaguagccauuguuuggauccuaacaaugaggaagguggucauggggugaaaggcugggccuuugaugauggaaaugacguguggaugggaagaacgaucagcgagaagucacgcuuaggguaugaaaccuucaaagucaucgaaggcugguccaacccuaaguccaaauugcagauaaauaggcaagucauaguugacagagguaauagguccgguuauucugguauuuucucuguugaaggcaaaagcugcaucaaucggugcuuuuauguggaguugauaaggggaagaaaagaggaaacugaagucuuguggaccucaaacaguauuguuguguuuuguggcaccucagguacauauggaacaggcucauggccugauggggcggacaucaaucucaugccuauauaa

SEQ ID NO: 51248 - RNA, 1410 nt, Artificial Sequence
  derived and/or modified CDS sequence (wt) from neuraminidase__InfluenzaA__ADK98637
augaauccaaaucaaaagauaauaacgauuggcucuguuucucucaccauuuccacaauaugcuucuucaugcaaauugccaucuugauaacuacuguaacauugcauuucaagcaauaugaauucaacucccccccaaacaaccaagugaugcugugugaaccaacaauaauagaaagaaacauaacagagauaguguaucugaccaacaccaccauagagaaggaaauaugccccaaacuagcagaauacagaaauuggucaaagccgcaaugugacauuacaggauuugcaccuuuuucuaaggacaauucgauuaggcuuuccgcugguggggacaucugggugacaagagaaccuuaugugucaugcgauccugacaaguguuaucaauuugcccuuggacagggaacaacacuaaacaacgugcauucaaauaacacaguacgugauaggaccccuuaucggacccuauuaaugaaugaguuagguguuccuuuucaucuggggaccaagcaagugugcauagcaugguccagcucaaguugucacgauggaaaagcauggcugcauguuuguauaacgggggaugauaaaaaugcaacugcuagcuucauuuacaaugggaggcuuguagauaguguuguuucaugguccaaagaaauccucaggacccaggagucagaaugcgucuguaucaauggaacuuguacaguaguaaugacugaugggagugcuucaggaaaagcugauacuaaaauacuauucauugaggaggggaaaaucguucauacuagcacauugucaggaagugcucagcaugucgaggagugcucuugcuauccucgauauccuggugucagaugugucugcagagacaacuggaaaggcuccaauaggcccaucguagauauaaacauaaaggaucauagcauuguuuccaguuauguguguucaggacuuguuggagacacacccagaaaaaacgacagcuccagcaguagccauuguuuggauccuaacaaugaagaagguggucauggagugaaaggcugggccuuugaugauggaaaugacguguggaugggaagaacgaucagcgagaagucacgcuuaggguaugaaaccuucaaagucauugaaggcugguccaaccauaaguccaaauugcagauaaauaggcaagucauaguugacagagguaauagguccgguuauucugguauuuucucuguugaaggcaaaagcugcaucaaucggugcuuuuauguggaguugauuaggggaagaaaagaggaaacugaagucuuguggaccucaaacaguauuguuguguuuuguggcaccucagguacauauggaacaggcucauggccugauggggcggaccucaaucucaugccuauauaa

SEQ ID NO: 51249 - RNA, 1410 nt, Artificial Sequence
  derived and/or modified CDS sequence (wt) from neuraminidase__InfluenzaA__ADK98648
augaauccaaaucaaaagauaauaacgauuggcucuguuucucucaccauuuccacaauaugcuucuucaugcaaauugccaucuugguaacuacuguaacauugcauuucaagcaauaugaauucaacucccccccaaacaaccaagugaugcugugugaaccaacaauaauagaaagaaacauaacagagauaguguaucugaccaacaccaccauagagaaggaaauaugccccaaacuagcagaauacagaaauuggucaaagccgcaaugugacauuacaggauuugcaccuuuuucuaaggacaauucgauuaggcuuuccgcugguggggacaucugggugacaagagaaccuuaugugucaugcgauccugacaaguguuaucaauuugcccuuggacagggaacaacacuaaacaacgugcauucaaauaacacaguacgugauaggaccccuuaucggacccuauugaugaaugaguuagguguuccuuuucaucuggggaccaagcaagugugcauagcuugguccagcucaaguugucacgauggaaaagcauggcugcauguuuguauaacgggggaugauaaaaaugcaacugcuagcuucauuuacaaugggaggcuuguagauaguguuguuucaugguccaaagacauccucaggacccaggagucagaaugcguuuguaucaauggaacuuguacaguaguaaugacugaugggagugcuucaggaaaagcugauacuaaaauacuauucauugaggaggggaaaaucguucauacuagcacauugucaggaagugcucagcaugucgaggagugcuccugcuauccucgauauccuggugucagaugugucugcagagacaacuggaaaggcuccaauaggcccaucguagauauaaacauaaaggaucauagcauuguuuccaguuauguguguucaggacuuguuggagacacacccagaaaaaacgacagcuccagcaguagccauuguuuggauccuaacaaugaagaagguggucguggagugaaaggcugggccuuugaugauggaaaugacguguggaugggaagaacgaucagcgagaagucacgcuuaggguaugaaaccuucaaagucauugaaggcugguccaacccuaaguccaaauugcagauaaauaggcaagucauaguugacagagguaauagguccgguuauucugguauuuucucuguugaaggcaaaagcugcaucaaucggugcuuuuauguggaguugauaaggggaagaaaagaggaaacugaagucuuguggaccucaaacaguauuguuguguuuuguggcaccucagguacauauggaacaggcucauggccugauggggcgaacaucaaucucaugccuauauaa

SEQ ID NO: 51250 - RNA, 1410 nt, Artificial Sequence
  derived and/or modified CDS sequence (wt) from neuraminidase__InfluenzaA__ADK98659
augaauccaaaucaaaagauaauaacgauuggcucuguuucucucaccauuuccacaauaugcuucuucaugcaaauugccaucuugauaacuacuguaacauugcauuucaagcaauaugaauucaacucccccccaaacaaccaagugaugcugugugaaccaacaauaauagaaagaaacauaacagagauaguguaucugaccaacaccaccauagagaaggaaauaugccccaaacuagcagaauauagaaauuggucaaaaccgcaaugugacauuacaggauuugcaccuuuuucuaaggacaauucgauuaggcuuuccgcugguggggacaucugggugacaagagaaccuuaugugucaugcgauccugacaaguguuaucaauuugcccuuggacagggaacaacacuaaacaacgugcauucaaauaacacaguacgugauaggaccccuuaucggacccuauugaugaaugaguuagguguuccuuuucaucuggggaccaagcaagugugcauagcaugguccagcucaaguugucacgauggaaaagcauggcugcauguuuguauaacgggggaugauaaaaaugcaacugcuagcuucauuuacaaugggaggcuuguagauaguguuguuucaugguccaaagaaauccucaggacccaggagucagaaugcgucuguaucaauggaacuuguacaguaguaaugacugaugggagugcuucaggaaaagcugauacuaaaauacuauucauugaggaggggaaaaucguucauaccagcacauugucaggaagugcucagcaugucgaggagugcucuugcuauccucgauauccuggugucagaugugucugcagagacaacuggaaaggcuccaauaggcccaucguagauauaaacauaaaggaucauagcauuguuuccaguuauguguguucaggacuuguuggagacacacccagaaaaaacgacagcuccagcaguggccauuguuuggauccuaacaaugaagaagguggucauggagugaaaggcugggccuuugaugauggaaaugacguguggaugggaagaacgaucagcgagaagucacgcuuaggguaugaaaccuucaaagucauugaaggcuggucaaaccauaaguccaaauugcagauaaauaggcaagucauaguugacagagguaauagguccgguuauucugguauuuucucuguugaaggcaaaagcugcaucaaucggugcuuuuauguggaguugauuaggggaagaaaagaggaaacugaagucuuguggaccucaaacaguauuguuguguuuuguggcaccucagguacauauggaacaggcucauggccugauggggcggaccucaaucucaugccuauauaa

SEQ ID NO: 51251 - RNA, 1410 nt, Artificial Sequence; identical to SEQ ID NO: 51229
  derived and/or modified CDS sequence (wt) from neuraminidase__InfluenzaA__ADK98670

SEQ ID NO: 51252 - RNA, 1410 nt, Artificial Sequence
  derived and/or modified CDS sequence (wt) from neuraminidase__InfluenzaA__ADK98681
augaauccaaaucaaaagauaauaacgauuggcucuguuucucucaccauuuccacaauaugcuucuucaugcagauugccaucuugauaacuacuguaacauugcauuucaagcaauaugaauucaacucccccccaaacaaccaagugaugcugugugaaccaacaauaauagaaagaaacauaacagagauaguguaucugaccaacaccaccauagagaaggaaauaugccccaaacuagcagaauacagaaauuggucaaagccgcaaugugacauuacaggauuugcaccuuuuucuaaggacaauucgauuaggcuuuccgcugguggggacaucugggugacaagagaaccuuaugugucaugcgauccugacaaguguuaucaauuugcccuugggcagggaacaacacuaaacaacgugcauucaaauaacacaguacgugauaggaccccuuaucggacccuauugaugaaugaguuagguguuccuuuucaucuggggaccaagcaagugugcauagcaugguccagcucaaguugucacgauggaaaagcauggcugcauguuuguauaacgggggaugauaaaaaugcaacugcuagcuucauuuacaaugggaggcuuguagauaguguuguuucaugguccaaagaaauccucaggacccaggagucagaaugcguuuguaucaauggaacuuguacaguaguaaugacugaugggagugcuucaggagaagcugauacuaaaauacuauucauugaggaggggaagaucguucauacuagcacauugucaggaagugcucagcaugucgaggagugcuccugcuauccucgauauccuggugucagaugugucugcagagacaacuggaaaggcuccaauaggcccaucguagauauaaacauaaaggaucauagcauuguuuccaguuauguguguucaggacuuguuggggacacacccagaaaaaacgacagcuccagcaguagccauuguuuggauccuaacaaugaagaagguggucauggagugaaaggcugggccuuugaugauggaaaugacguguggaugggaagaacgaucagcgagaagucacgcuuaggguaugaaaccuucaaagucauugaaggcugguccaacccuaaguccaaauugcagacaaauaggcaagucauaguugacagagguaauagguccgguuauucugguauuuucucuguugaaggcaaaaacugcaucaaucggugcuuuuauguggaguugauaaggggaagaaaagaggaaacugaagucuuguggaccucaaacaguauuguuguguuuuguggcaccucagguacauauggaacaggcucauggccugauggggcggacaucaaucucaugccuauauaa

SEQ ID NO: 51253 - RNA, 1410 nt, Artificial Sequence
  derived and/or modified CDS sequence (wt) from neuraminidase__InfluenzaA__ADK98703
augaauccaaaucaaaagauaauaacgauuggcucuguuucucucaccauuuccacaauaugcuucuucaugcagacugccaucuugauaacuacuguaacauugcauuucaagcaauaugaauucaacucccccccaaacaaccaagugaugcugugugaaccaacaauaauagaaagaaacauaacagagauaguguaucugaccaacaccaccauagagaaggaaauaugccccaaacuagcagaauacagaaauuggucaaagccgcaaugugacauuacaggauuugcaccuuuuucuaaggacaauucgauuaggcuuuccgcugguggggacaucugggugacaagagaaccuuaugugucaugcgauccugacaaguguuaucaauuugcccuugggcagggaacaacacuaaacaacgugcauucaaauaacacaguacgugauaggaccccuuaucggacccuauugaugaaugaguuagguguuccuuuucaucuggggaccaagcaagugugcauagcaugguccagcucaaguugucacgauggaaaagcauggcugcauguuuguauaacgggggaugauaaaaaugcaacugcuagcuucauuuacaaugggaggcuuguagauaguguuguuucaugguccaaagaaauccucaggacccaggagucagaaugcguuuguaucaauggaacuuguacaguaguaaugacugaugggagugcuucaggagaagcugauacuaaaauacuauucauugaggaggggaagaucguucauacuagcacauugucaggaagugcucagcaugucgaggagugcuccugcuauccucgauauccuggugucagaugugucugcagagacaacuggaaaggcuccaauaggcccaucguagauauaaacauaaaggaucauagcauuguuuccaguuauguguguucaggacuuguuggggacacacccagaaaaaacgacagcuccagcaguagccauuguuuggauccuaacaaugaagaagguggucauggagugaaaggcugggccuuugaugauggaaaugacguguggaugggaagaacgaucagcgagaagucacgcuuaggguaugaaaccuucaaagucauugaaggcugguccaacccuaaguccaaauugcagacaaauaggcaagucauaguugacagagguaauagguccgguuauucugguauuuucucuguugaaggcaaaaacugcaucaaucggugcuuuuauguggaguugauaaggggaagaaaagaggaaacugaagucuuguggaccucaaacaguauuguuguguuuuguggcaccucagguacauauggaacaggcucauggccugauggggcggacaucaaucucaugccuauauaa

SEQ ID NO: 51254 - RNA, 1410 nt, Artificial Sequence
  derived and/or modified CDS sequence (wt) from neuraminidase__InfluenzaA__ADK98725
augaauccaaaucaaaagauaauaacgauuggcucuguuucucucaccauuuccacaauaugcuucuucaugcaaauugccaucuugguaacuacuguaacauugcauuucaagcaauaugaauucaacucccccccaaacaaccaagugaugcugugugaaccaacaauaauagaaagaaacauaacagagauaguguaucugaccaacaccaccauagagaaggaaauaugccccaaacuagcagaauacagaaauuggucaaagccgcaaugugacauuacaggauuugcaccuuuuucuaaggacaauucgauuaggcuuuccgcugguggggacaucugggugacaagagaaccuuaugugucaugcgauccugacaaguguuaucaauuugcccuuggacagggaacaacacuaaacaacgugcauucaaauaacacaguacgugauaggaccccuuaucggacccuauugaugaaugaguuagguguuccuuuucaucuggggaccaagcaagugugcauagcaugguccagcucaaguugucacgauggaaaagcauggcugcauguuuguauaacgggggaugauaaaaaugcaacugcuagcuucauuuacaaugggaggcuuguagauaguguuguuucaugguccaaagacauccucaggacccaggagucagaaugcguuuguaucaauggaacuuguacaguaguaaugacugaugggagugcuucaggaaaagcugauacuaaaauacuauucauugaggaggggaaaaucguucauacuagcacauugucaggaagugcucagcaugucgaggagugcuccugcuauccucgauauccuggugucagaugugucugcagagacaacuggaaaggcuccaauaggcccaucguagauauaaacauaaaggaucauagcauuguuuccaguuauguguguucaggacuuguuggagacacacccagaaaaaacgacagcuccagcaguagccauuguuuggauccuaacaaugaagaagguggucauggagugaaaggcugggccuuugaugauggaaaugacguguggaugggaagaacgaucagcgagaagucacgcuuaggguaugaaaccuucaaagucauugaaggcugguccaacccuaaguccaaauugcagauaaauaggcaagucauaguugacagagguaauagguccgguuauucugguauuuucucuguugaaggcaaaagcugcaucaaucggugcuuuuauguggaguugauaaggggaagaaaagaggaaacugaagucuuguggaccucaaacaguauuguuguguuuuguggcaccucagguacauauggaacaggcucauggccugauggggcgaacaucaaucucaugccuauauaa

SEQ ID NO: 51255 - RNA, 1410 nt, Artificial Sequence; identical to SEQ ID NO: 51135
  derived and/or modified CDS sequence (wt) from neuraminidase__InfluenzaA__ADK98736

SEQ ID NO: 51256 - RNA, 1410 nt, Artificial Sequence
  derived and/or modified CDS sequence (wt) from neuraminidase__InfluenzaA__ADK98747
augaauccaaaucaaaagauaauaacgauuggcucuguuucucucaccauuuccacaauaugcuucuucaugcaaauugccaucuugguaacuacuguaacauugcauuucaagcaauaugaauucaacucccccccaaacaaccaagugaugcugugugaaccaacaauaauagaaagaaacauaacagagauaguguaucugaccaacaccaccauagagaaggaaauaugccccaaacuagcagaauacagaaauuggucaaagccgcaaugugacauuacaggauuugcaccuuuuucuaaggacaauucgauuaggcuuuccgcugguggggacaucugggugacaagagaaccuuaugugucaugcgauccugacaaguguuaucaauuugcccuuggacagggaacaacacuaaacaacgugcauucaaauaacacaguacgugauaggaccccuuaucggacccuauugaugaaugaguuagguguuccuuuucaucuggggaccaagcaagugugcauagcuugguccagcucaaguugucacgauggaaaagcauggcugcauguuuguauaacgggggaugauaaaaaugcaacugcuagcuucauuuacaaugggaggcuuguagauaguguuguuucaugguccaaagacauccucaggacccaggagucagaaugcguuuguaucaauggaacuuguacaguaguaaugacugaugggagugcuucaggaaaagcugauacuaaaauacuauucauugaggaggggaaaaucguucauacuagcacauugucaggaagugcucagcaugucgaggagugcuccugcuauccucgauauccuggugucagaugugucugcagagacaacuggaaaggcuccaauaggcccaucguagauauaaacaugaaggaucauagcauuguuuccaguuauguguguucaggacuuguuggagacacacccagaaaaaacgacagcuccagcaguagccauuguuuggauccuaacaaugaagaagguggucauggagugaaaggcugggccuuugaugauggaaaugacguguggaugggaagaacgaucagcgagaagucacgcuuaggguaugaaaccuucaaagucauugaaggcugguccaacccuaaguccaaauugcagauaaauaggcaagucauaguugacagagguaauagguccgguuauucugguauuuucucuguugaaggcaaaagcugcaucaaucggugcuuuuauguggaguugauaaggggaagaaaagaggaaacugaagucuuguggaccucaaacaguauuguuguguuuuguggcaccucagguacauauggaacaggcucauggccugauggggcgaacaucaaucucaugccuauauaa

SEQ ID NO: 51257 - RNA, 1410 nt, Artificial Sequence
  derived and/or modified CDS sequence (wt) from neuraminidase__InfluenzaA__ADK98758
augaauccaaaucaaaagauaauaacgauuggcucuguuucucucaccauuuccacaauaugcuucuucaugcaaauugccaucuugguaacuacuguaacauugcauuucaagcaauaugaauucaacucccccccaaacaaccaagugaugcugugugaaccaacaauaauagaaagaaacauaacagagauaguguaucugaccaacaccaccauagagaaggaaauaugccccaaacuagcagaauacagaaauuggucaaagccgcaaugugacauuacaggauuugcaccuuuuucuaaggacaauucgauuaggcuuuccgcugguggggacaucugggugacaagagaaccuuaugugucaugcgauccugacaaguguuaucaauuugcccuuggacagggaacaacacuaaacaacgugcauucaaauaacacaguacgugauaggaccccuuaucggacccuauugaugaaugaguuagguguuccuuuucaucuggggaccaagcaagugugcauagcuugguccagcucaaguugucacgauggaaaagcauggcugcauguuuguauaacgggggaugauaaaaaugcaacugcuagcuucauuuacaaugggaggcuuguagauaguguuguuucaugguccaaagacauccucaggacccaggagucagaaugcguuuguaucaauggaacuuguacaguaguaaugacugaugggagugcuucaggaaaagcuaauacuaaaauacuauucauugaggaggggaaaaucguucauacuagcacauugucaggaagugcucagcaugucgaggagugcuccugcuauccucgauauccuggugucagaugugucugcagagacaacuggaagggcuccaauaggcccaucguagauauaaacauaaaggaucauagcauuguuuccaguuauguguguucaggacuuguuggagacacacccagaaaaaacgacagcuccagcaguagccauuguuuggauccuaacaaugaagaagguggucauggagugaaaggcugggccuuugaugauggaaaugacguguggaugggaagaacgaucagcgagaagucacgcuuaggguaugaaaccuucaaagucauugaaggcugguccaacccuaaguccaaauugcagauaaauaggcaagucauaguugacagagguaauagguccgguuauucuggcauuuucucuguugaaggcaaaagcugcaucaaucggugcuuuuauguggaguugauaaggggaagaaaagaggaaacugaagucuuguggaccucaaacaguauuguuguguuuuguggcaccucagguacauauggaacaggcucauggccugauggggcgaacaucaaucucaugccuauauaa

SEQ ID NO: 51258 - RNA, 1410 nt, Artificial Sequence; identical to SEQ ID NO: 51254
  derived and/or modified CDS sequence (wt) from neuraminidase__InfluenzaA__ADK98769

SEQ ID NO: 51259 - RNA, 1410 nt, Artificial Sequence; identical to SEQ ID NO: 51050
  derived and/or modified CDS sequence (wt) from neuraminidase__InfluenzaA__ADK98780

SEQ ID NO: 51260 - RNA, 1410 nt, Artificial Sequence
  derived and/or modified CDS sequence (wt) from neuraminidase__InfluenzaA__ADK98791
augaauccaaaucaaaagauaauaacgauuggcucuguuucucucaccauuuccacaauaugcuucuucaugcaaauugccaucuugguaacuacuguaacauugcauuucaagcaauaugaauucaacucccccccaaacaaccaagugaugcugugugaaccaacaauaauagaaagaaacauaacagagauaguguaucugaccaacaccaccauagagaaggaaauaugccccaaacuagcagaauacagaaauuggucaaagccgcaaugugacauuacaggauuugcaccuuuuucuaaggacaauucgauuaggcuuuccgcugguggggacaucugggugacaagagaaccuuaugugucaugcgauccugacaaguguuaucaauuugcccuuggacagggaacaacacuaaacaacgugcauucaaauaacacaguacgugauaggaccccuuaucggacccuauugaugaaugaguuggguguuccuuuucaucuggggaccaagcaagugugcauagcaugguccagcucaaguugucacgauggaaaagcauggcugcauguuuguauaacgggggaugauaaaaaugcaacugcuagcuucauuuacaaugggaggcuuguagauaguguuguuucaugguccaaagacauccucaggacccaggagucagaaugcguuuguaucaauggaacuuguacaguaguaaugacugaugggagugcuucaggaaaagcugauacuaaaauacuauucauugaggaggggaaaaucguucauacuagcacauugucaggaagugcucagcaugucgaggagugcuccugcuauccucgauauccuggugucagaugugucugcagagacaacuggaaaggcuccaauaggcccaucguagauauaaacauaaaggaucauagcauuguuuccaguuauguguguucaggacuuguuggagacacacccagaaaaaacgacagcuccagcaguagccauuguuuggauccuaacaaugaagaagguggucauggagugaaaggcugggccuuugaugauggaaaugacguguggaugggaagaacgaucagcgagaagucacgcuuaggguaugaaaccuucaaagucauugaaggcugguccaacccuaaguccaaauugcagauaaauaggcaagucauaguugacagagguaauagguccgguuauucugguauuuucucuguugaaggcaaaagcugcaucaaucggugcuuuuauguggaguugauaaggggaagaaaagaggaaacugaagucuuguggaccucaaacaguauuguuguguuuuguggcaccucagguacauauggaacaggcucauggccugauggggcgaacaucaaucucaugccuauauaa

SEQ ID NO: 51261 - RNA, 1410 nt, Artificial Sequence; identical to SEQ ID NO: 51133
  derived and/or modified CDS sequence (wt) from neuraminidase__InfluenzaA__ADK98802

SEQ ID NO: 51262 - RNA, 1410 nt, Artificial Sequence
  derived and/or modified CDS sequence (wt) from neuraminidase__InfluenzaA__ADK98813
augaauccaaaucaaaagauaauaacgauuggcucuguuucucucaccauuuccacaauaugcuucuucaugcaaauugccaucuugauaacuacuguaacauugcauuucaagcaauaugaauucaacucccccccaaacaaccaagugaugcugugugaaccagcaauaauagaaagaaacauaacagagauaguguaucugaccaacaccaccauagagaaggaaauaugccccaaacuagcagaauacagaaauuggucaaagccgcaaugugacauuacaggauuugcaccuuuuucuaaggacaauucgauuaggcuuuccgcugguggggacaucugggugacaagagaaccuuaugugucaugcgauccugacaaguguuaucaauuugcccuuggacagggaacaacacuaaacaacgugcauucaaauaacacaguacgugauaggaccccuuaucggacccuauugaugaaugagcuagguguuccuuuucaucuggggaccaagcaagugugcauagcaugguccagcucaaguugucacgauggaaaagcauggcugcauguuuguauaacgggggaugauaaaaaugcaacugcuagcuucauuuacaaugggaggcuuguagauaguguuguuucaugguccaaagaaauccucaggacccaggagucagaaugcgucuguaucaauggaacuuguacaguaguaaugacugaugggagugcuucaggaaaagcugauacuaaaauacuauucauugaggaggggaaaaucguucauacuagcacauugucaggaagugcucagcaugucgaggagugcucuugcuauccucgauauccuggugucagaugugucugcagagacaacuggaaaggcuccaauaggcccaucguagauauaaacauaaaggaucauagcauuguuuccaguuauguguguucaggacuuguuggagacacacccagaaaaaacgacagcuccagcaguagccauuguuuggauccuaacaaugaagaagguggucauggagugaaaggcugggccuuugaugauggaaaugacguguggaugggaagaacgaucagcgagaagucacgcuuaggguaugaaaccuucaaagucauugaaggcugguccaaccauaaguccaaauugcagauaaauaggcaagucauaguugacagagguaauagguccgguuauucugguauuuucucuguugaaggcaaaagcugcaucaaucggugcuuuuauguggaguugauuaggggaagaaaagaggaaacugaagucuuguggaccucaaacaguauuguuguguuuuguggcaccucagguacauauggaacaggcucauggccugauggggcggaccucaaucucaugccuauauaa

SEQ ID NO: 51263 - RNA, 1410 nt, Artificial Sequence
  derived and/or modified CDS sequence (wt) from neuraminidase__InfluenzaA__ADK98824
augaauccaaaucaaaagauaauaacgauuggcucuguuucucucaccauuuccacaauaugcuucuucaugcaaauugccaucuugauaacuacuguaacauugcauuucaagcaauaugaauucaacucccccccaaacaaccaagugaugcugugugaaccaacaauaauagaaagaaacauaacagagauaguguaucugaccaacaccaccauagagaaggaaauaugccccaaacuagcagaauacagaaauuggucaaagccgcaaugugacauuacaggguuugcaccuuuuucuaaggacaauucgauuaggcuuuccgcugguggggacaucugggugacaagagaaccuuaugugucaugcgauccugacaaguguuaucaauuugcccuuggacagggaacaacacuaaacaacguacauucaaauaacacaguacgugauaggaccccuuaucggacccuauugaugaaugaguuagguguuccuuuucaucuggggaccaagcaagugugcauagcaugguccagcucaaguugucacgauggaaaagcauggcugcauguuuguauaacgggggaugauaaaaaugcaacugcuagcuucauuuacaaugggaggcuuguagauaguguuguuucaugguccaaagaaauccucaggacccaggagucagaaugcguuuguaucaauggaacuuguacaguaguaaugacugaugggagugcuucaggaaaagcugauacuaaaauauuauucauugaggaggggaaaaucguucauacuagcacauugucaggaagugcucagcaugucgaggagugcuccugcuauccucgauauccuggugucagaugugucugcagagacaacuggaaaggauccaauaggcccaucguagauauaaacauaaaggaucauagcauugucuccaguuauguguguucaggacuuguuggagacacacccagaaaaaacgacagcuccagcaguagccauuguuuggauccuaacaaugaggaagguggucauggggugaaaggcugggccuuugaugauggaaaugacguguggaugggaagaacgaucagcgagaagucacgcuuaggguaugaaaccuucaaagucauugaaggcugguccaacccuaaguccaaauugcagauaaauaggcaagucauaguugacagagguaauagguccgguuauucugguauuuucucuguugaaggcaaaagcugcaucaaucggugcuuuuauguggaguugauaaggggaagaaaagaggaaacugaagucuuguggaccucaaacaguauuguuguguuuuguggcaccucagguacauauggaacaggcucauggccugauggggcggacaucaaucucaugccuauauaa

SEQ ID NO: 51264 - RNA, 1410 nt, Artificial Sequence; identical to SEQ ID NO: 51254
  derived and/or modified CDS sequence (wt) from neuraminidase__InfluenzaA__ADK98835

SEQ ID NO: 51265 - RNA, 1410 nt, Artificial Sequence; identical to SEQ ID NO: 51229
  derived and/or modified CDS sequence (wt) from neuraminidase__InfluenzaA__ADK98846

SEQ ID NO: 51266 - RNA, 1410 nt, Artificial Sequence
  derived and/or modified CDS sequence (wt) from neuraminidase__InfluenzaA__ADK98857
augaauccaaaucaaaagauaauaacgauuggcucuguuucucucaccauuuccacaauaugcuucuucaugcaaauugccaucuugguaacuacuguaacauugcauuucaagcaauaugaauucaacucccccccaaacaaccaagugaugcugugugaaccaacaauaauagaaagaaacauaacagagauaguguaucugaccaacaccaccauagagaaggaaauaugccccaaacuagcagaauacagaaauuggucaaagccgcaaugugacauuacaggauuugcaccuuuuucuaaggacaauucgauuaggcuuuccgcugguggggacaucugggugacaagagaaccuuaugugucaugcgauccugacaaguguuaucaauuugcccuuggacagggaacaacacuaaacaacgugcauucaaauaacacaguacgugauaggaccccuuaucggacccuauugaugaaugaguuagguguuccuuuucaucuggggaccaagcaagugugcauagcaugguccagcucaaguugucacgauggaaaagcauggcugcauguuuguauaacgggggaugauaaaaaugcaacugcuagcuucauuuacaaugggaggcuuguagauaguguuguuucaugguccaaagacauccucaggacccaggagucagaaugcguuuguaucaauggaacuuguacaguaguaaugacugaugggagugcuucaggaaaagcugauacuaaaauacuauucauugaggaggggaaaaucguucauacuagcacauugucaggaagugcucagcaugucgaggagugcuccugcuauccucgauauccuggugucagaugugucugcagagacaacuggaaaggcuccaauaggcccaucguagauauaaacauaaaggaucauagcauuguuuccaguuauguguguucaggacuuguuggagacacacccagaaaaaacgacagcuccagcaguagccauuguuuggauccuaacaaugaagaagguggucauggagugaaaggcugggccuuugaugauggaaaugacguguggaugggaagaacgaucagcgagaagucacgcuuaggguaugaaaccuucaaagucauugaaggcugguccaaccauaaguccaaauugcagauaaauaggcaagucauaguugacagagguaauagguccgguuauucugguauuuuuucuguugaaggcaaaagcugcaucaaucggugcuuuuauguggaguugauaaggggaagaaaagaggaaacugaagucuuguggaccucaaacaguauuguuguguuuuguggcaccucagguacauauggaacaggcucauggccugauggggcgaacaucaaucucaugccuauauaa

SEQ ID NO: 51267 - RNA, 1410 nt, Artificial Sequence
  derived and/or modified CDS sequence (wt) from neuraminidase__InfluenzaA__ADK98868
augaauccaaaucaaaagauaauaacgauuggcucuguuucucucaccauuuccacaauaugcuucuucaugcaaauugccaucuugauaacuacuguaacauugcauuucaagcaauaugaauucaacucccccccaaacaaccaagugaugcugugugaaccaacaauaauagaaagaaacauaacagagauaguguaucugaccaacaccaccauagagaaggaaauaugccccaaacuagcagaauacagaaauuggucaaagccgcaaugugacauuacaggauuugcaccuuuuucuaaggacaauucgauuaggcuuuccgcugguggggacaucugggugacaagagaaccuuaugugucaugcgauccugacaaguguuaucaauuugcccuuggacagggaacaacacuaaacaacgugcauucaaauaacacaguacgugauaggaccccuuaucggacccuauugaugaaugaguuagguguuccuuuucaucuggggaccaagcaagugugcauagcaugguccagcucaaguugucacgauggaaaagcauggcugcauguuuguauaacgggggaugauaaaaaugcaacugcuagcuucauuuacaaugggaggcuuguagauaguguuguuucaugguccaaagaaauccucaggacccaggagucagaaugcguuuguaucaauggaacuuguacaguaguaaugacugaugggagugcuucaggaaaagcugauacuaaaauacuauucauugaggaggggaaaaucguucauacuagcacauugucaggaagugcucagcaugucgaggagugcuccugcuauccucgauauccuggugucagaugugucugcagagacaacuggaaaggcuccaauaggcccaucguagauauaaacauaaaggaucauagcauuguuuccaguuauguguguucaggacuuguuggagacacacccagaaaaaacgacagcuccagcaguagccauugucuggauccuaacaaugaagaagguggucauggagugaaaggcugggccuuugaugauggaaaugacguguggaugggaagaacgaucagcgagaagucacgcuuaggguaugaaaccuucaaagucauugaaggcugguccaacccuaaguccaaauugcagauaaauaggcaagucauaguugacagagguaauagguccgguuauucugguauuuucucuguugaaggcaaaagcugcaucaaucggugcuuuuauguggaguugauaaggggaagaaaagaggaaaaugaagucuuguggaccucaaacaguauuguuguguuuuguggcaccucagguacauauggaacaggcucauggccugauggggcggacaucaaucucaugccuauauaa

SEQ ID NO: 51268 - RNA, 1410 nt, Artificial Sequence
  derived and/or modified CDS sequence (wt) from neuraminidase__InfluenzaA__ADK98879
augaauccaaaucaaaagauaauaacgauuggcucuguuucucucaccauuuccacaauaugcuucuucaugcaaauugccaucuugauaacuacuguaacauugcauuucaagcaauaugaauucaacucccccccaaacaaccaagcgaugcugugugaaccaacaauaauagaaagaaacauaacagagauaguguaucugaccaacaccaccauagagaaggaaauaugccccaaacuagcagaauacagaaauuggucaaagccgcaaugugacauuacaggguuugcaccuuuuucuaaggacaauucgauuaggcuuuccgcugguggggacaucugggugacaagagaaccuuaugugucaugcgauccugacaaguguuaucaauuugcccuuggacagggaacaacacuaaacaacguacauucaaauaacacaguacgugauaggaccccuuaucggacccuauugaugaaugaguuagguguuccuuuucaucuggggaccaagcaagugugcauagcaugguccagcucaaguugucacgauggaaaagcauggcugcauguuuguauaacgggggaugauaaaaaugcaacugcuagcuucauuuacaaugggaggcuuguagauaguguuguuucaugguccaaagaaauccucaggacccaggagucagaaugcguuuguaucaauggaacuugcacaguaguaaugacugaugggagugcuucaggaaaagcugauacuaaaauacuauucauugaggaggggaaaaucguucauacuagcacauugucaggaagugcucagcaugucgaggagugcuccugcuauccucgauauccuggugucagaugugucugcagagacaacuggaaaggauccaauaggcccaucguagauauaaacauaaaggaucauagcauuguuuccaguuauguguguucaggacuuguuggagacacacccagaaaaaacgacagcuccagcaguagccauuguuuggauccuaacaaugaggaagguggucauggggugaaaggcugggccuuugaugauggaaaugacguguggaugggaagaacgaucagcgagaagucacgcuuaggguaugaaaccuucaaagucauugaaggcugguccaacccuaaguccaaauugcagauaaauaggcaagucauaguugacagagguaauagguccgguuauucugguauuuucucuguugaaggcaaaagcugcaucaaucggugcuuuuauguggaguugauaaggggaagaaaagaggaaacugaagucuuguggaccucaaacaguauuguuguguuuuguggcaccucagguacauauggaacaggcucauggccugauggggcggacaucaaucucaugccuauauaa

SEQ ID NO: 51269 - RNA, 1410 nt, Artificial Sequence; identical to SEQ ID NO: 51229
  derived and/or modified CDS sequence (wt) from neuraminidase__InfluenzaA__ADK98890

SEQ ID NO: 51270 - RNA, 1410 nt, Artificial Sequence
  derived and/or modified CDS sequence (wt) from neuraminidase__InfluenzaA__ADK98901
augaauccaaaucaaaagauaauaacgauuggcucuguuucucucaccauuuccacaauaugcuucuucaugcaaauugccaucuugguaacuacuguaacauugcauuucaagcaauaugaauucaacucccccccaaacaaccaagugaugcugugugaaccaacaauaauagaaagaaacauaacagagauaguguaucugaccaacaccaccauagagaaggaaauaugccccaaacuagcagaauacagaaauuggucaaagccgcaaugugacauuacaggauuugcaccuuuuucuaaggacaauucgauuaggcuuuccgcugguggggacaucugggugacaagagaaccuuaugugucaugcgauccugacaaauguuaucaauuugcccuuggacagggaacaacacuaaacaacgugcauucaaauaacacaguacgugauaggaccccuuaucggacccuauugaugaaugaguuagguguuccuuuucaucuggggaccaagcaagugugcauagcuugguccagcucaaguugucacgauggaaaagcauggcugcauguuuguauaacgggggaugauaaaaaugcaacugcuagcuucauuuacaaugggaggcuuguagauaguguuguuucaugguccaaagacauccucaggacccaggagucagaaugcguuuguaucaauggaacuuguacaguaguaaugacugaugggagugcuucaggaaaagcugauacuaaaauacuauucauugaggaggggaaaaucguucauacuagcacauugucaggaagugcucagcaugucgaggagugcuccugcuauccucgguauccuggugucagaugugucugcagagacaacuggaaaggcuccaauaggcccaucguagauauaaacauaaaggaucauagcauuguuuccaguuauguguguucaggacuuguuggagacacacccagaaaaaacgacagcuccagcaguagccauuguuuggauccuaacaaugaagaagguggucauggagugaaaggcugggccuuugaugauggaaaugacguguggaugggaagaacgaucagcgagaagucacgcuuaggguaugaaaccuucaaagucauugaaggcugguccaacccuaaguccaaauugcagauaaauaggcaagucauaguugacagagguaauagguccgguuauucugguauuuucucuguugaaggcaaaagcugcaucaaucggugcuuuuauguggaguugauaaggggaagaaaagaggaaacugaagucuuguggaccucaaacaguauuguuguguuuuguggcaccucagguacauauggaacaggcucauggccugauggggcgaacaucaaucucaugccuauauaa

SEQ ID NO: 51271 - RNA, 1410 nt, Artificial Sequence; identical to SEQ ID NO: 51050
  derived and/or modified CDS sequence (wt) from neuraminidase__InfluenzaA__ADK98912

SEQ ID NO: 51272 - RNA, 1410 nt, Artificial Sequence
  derived and/or modified CDS sequence (wt) from neuraminidase__InfluenzaA__ADK98923
augaauccaaaucaaaagauaauaacgauuggcucuguuucucucaccauuuccacaauaugcuucuucaugcaaauugccaucuugauaacuacuguaacauugcauuucaagcaauaugaauucaacucccccccaaacaaccaagugaugcugugugaaccaacaauaauagaaagaaacauaacagagauaguguaucugaccaacaccaccauagagaaggaaauaugccccaaacuagcagaauacagaaauuggucaaagccgcaaugugacauuacaggguuugcaccuuuuucuaaggacaauucgauuaggcuuuccgcugguggggacaucugggugacaagagaaccuuaugugucaugcgauccugacaaguguuaucaauuugcccuuggacagggaacaacacuaaacaacguacauucaaauaacacaguacgugauaggaccccuuaucggacccuauugaugaaugaguuagguguuccuuuucaucuggggaccaagcaagugugcauagcaugguccagcucaaguugucacgauggaaaagcauggcugcauguuuguauaacgggggaugauaaaaaugcaacugcuagcuucauuuacaaugggaggcuuguagauaguguuguuucaugguccaaagaaauccucaggacccaggagucagaaugcguuuguaucaauggaacuuguacaguaguaaugacugaugggagugcuucaggaaaagcugauacuaaaauacuauucauugaggaggggaaaaucguucauacuagcacauugucaggaagugcucaacaugucgaggaaugcuccugcuauccucgauauccuggugucagaugugucugcagagacaacuggaaaggauccaauaggcccaucguagauauaaacauaaaggaucauagcauuguuuccaguuauuuguguucaggacuuguuggagacacacccagaaaaaacgacagcuccagcaguagccauuguuuggauccuaacaaugaggaagguggucauggggugaaaggcugggccuuugaugauggaaaugacguguggaugggaagaacgaucagcgagaagucacgcuuaggguaugaaaccuucaaagucaucgaaggcugguccaacccuaaguccaaauugcagauaaauaggcaagucauaguugacagagguaauagguccgguuauucugguauuuucucuguugaaggcaaaagcugcaucaaucggugcuuuuauguggaguugauaaggggaagaaaagaggaaacugaagucuuguggaccucaaacaguauuguuguguuuuguggcaccucagguacauauggaacaggcucauggccugauggggcggacaucaaucucaugccuauauaa

SEQ ID NO: 51273 - RNA, 1410 nt, Artificial Sequence
  derived and/or modified CDS sequence (wt) from neuraminidase__InfluenzaA__ADK98945
augaauccaaaucaaaagauaauaacgauuggcucuguuucucucaccauuuccacaauaugcuucuucaugcaaauugccaucuugauaacuacuguaacauugcauuucaagcaauaugaauucaacucccccccaaacaaccaagugaugcugugugaaccaacaauaauagaaagaaacauaacagagauaguguaucugaccaacaccaccauagagaaggaaauaugccccaaacuagcagaauacagaaauuggucaaagccgcaaugugacauuacaggauuugcaccuuuuucuaaggacaauucgauuaggcuuuccgcugguggggacaucugggugacaagagaaccuuaugugucaugcgauccugacaaguguuaucaauuugcccuuggacagggaacaacacuaaacaacgugcauucaaauaacacaguacgugauaggaccccuuaucggacccuauugaugaaugaguuagguguuccuuuucaucuggggaccaagcaagugugcauagcaugguccagcucaaguugucacgauggaaaagcauggcugcauguuuguauaacgggggaugauaaaaaugcaacugcuagcuucauuuacaaugggaggcuuguagauaguguuguuucaugguccaaagaaauccucaggacccaggagucagaaugcgucuguaucaauggaacuuguacaguaguaaugacugaugggagugcuucaggaaaagcugauacuaaaauacuauucauugaggaggggaaaaucguucauacuagcacauugucaggaagugcucagcaugucgaggagugcucuugcuauccucgauauccuggugucagaugugucugcagagacaacuggaaaggcuccaauaggcccaucguagauauaaacauaaaggaucauagcauuguuuccaguuauguguguucaggacuuguuggagacacacccagaaaaaacgacagcuccagcaguagccauuguuuggauccuaacaaugaagaagguggucauggagugaaaggcugggccuuugaugauggaaaugacguguggaugggaagaacgaucagcgagaagucacgcuuaggguaugaaaccuucaaagucauugaaggcugguccaaccauaaguccaaauugcagauaaauaggcaagucauaguugacagagguaauagguccgguuauucugguauuuucucuguugaaggcaaaagcugcaucaaucggugcuuuuauguggaguugauuaggggaagaaaagaggaaacugaagucuuguggaccucaaacaguauuguuguguuuuguggcaccucagguacguauggaacaggcucauggccugauggggcggaccucaaucucaugccuauauaa

SEQ ID NO: 51274 - RNA, 1410 nt, Artificial Sequence
  derived and/or modified CDS sequence (wt) from neuraminidase__InfluenzaA__ADK98956
augaauccaaaucaaaagauaauaacgauuggcucuguuucucucaccauuuccacaauaugcuucuucaugcaaauugccaucuugauaacuacuguaacauugcauuucaagcaauaugaauucaacucccccccaaacaaccaagugaugcugugugaaccaacaauaauagaaagaaacauaacagagauaguguaucugaccaacaccaccauagagaaggaaauaugccccaaacuagcagaauacagaaauuggucaaagccgcaaugugacauuacaggauuugcaccuuuuucuaaggacaauucgauuaggcuuuccgcugguggggacaucugggugacaagagaaccuuaugugucaugcgauccugacaaguguuaucaauuugcccuuggacagggaacaacacuaaacaacgugcauucaaauaacacaguacgugauaggaccccuuaucggacccuauugaugaaugaguuagguguuccuuuucaucuggggaccaagcaagugugcauagcaugguccagcucaaguugucacgauggaaaagcauggcugcauguuuguauaacgggggaugauaaaaaugcaacugcuagcuucauuuacaaugggaggcuuguagauaguguuguuucaugguccaaagaaauccucaggacccaggagucagaaugcgucuguaucaauggaacuuguacaguaguaaugacugaugggagugcuucaggaaaagcugauacuaaaauacuauucauugaggaggggaaaaucguucauacuagcacauugucaggaagugcucagcaugucgaggagugcucuugcuauccucgauauccuggugucagaugugucugcagagacaacuggaaaggcuccaauaggcccaucguagauauaaacauaaaggaucauagcguuguuuccaguuauguguguucaggacuuguuggagacacacccagaaaaagcgacagcuccagcaguagccauuguuuggauccuaacaaugaagaagguggucauggagugaaaggcugggccuuugaugauggaaaugacguguggaugggaagaacgaucagcgagaagucacgcuuaggguaugaaaccuucaaagucauugaaggcugguccaaccauaaguccaaauugcagauaaauaggcaagucauaguugacagagguaauagguccgguuauucugguauuuucucuguugaaggcaaaagcugcaucaaucggugcuuuuauguggaguugauuaggggaagaaaagaggaaacugaagucuuguggaccucaaacaguauuguuguguuuuguggcaccucagguacauauggaacaggcucauggccugauggggcggaccucaaucucaugccuauauaa

SEQ ID NO: 51275 - RNA, 1410 nt, Artificial Sequence; identical to SEQ ID NO: 51254
  derived and/or modified CDS sequence (wt) from neuraminidase__InfluenzaA__ADK98967

SEQ ID NO: 51276 - RNA, 1410 nt, Artificial Sequence; identical to SEQ ID NO: 51229
  derived and/or modified CDS sequence (wt) from neuraminidase__InfluenzaA__ADK98978

SEQ ID NO: 51277 - RNA, 1410 nt, Artificial Sequence; identical to SEQ ID NO: 51274
  derived and/or modified CDS sequence (wt) from neuraminidase__InfluenzaA__ADK98989

SEQ ID NO: 51278 - RNA, 1410 nt, Artificial Sequence
  derived and/or modified CDS sequence (wt) from neuraminidase__InfluenzaA__ADK99000
augaauccaaaucaaaagauaauaacgauuggcucuguuucucucaccauuuccacaauaugcuucuucaugcaaauugccaucuugauaacuacuguaacauugcauuucaagcaauaugaauucaacucccccccaaacaaccaagugaugcugugugaaccaacaauaauagaaagaaauauaacagagauaguguaucugaccaacaccaccauagagaaggaaauaugccccaaacuagcagaauacagaaauuggucaaagccgcaaugugacauuacaggguuugcaccuuuuucuaaggacaauucgauuaggcuuuccgcugguggggacaucugggugacaagagaaccuuaugugucaugcgauccugacaaguguuaucaauuugcccuuggacagggaacaacacuaaacaacgugcauucaaauaacacaguacgugauaggaccccuuaucgaacccuauugaugaaugaguuagguguuccuuuucaucuggggaccaagcaagugugcauagcaugguccagcucaaguugucacgauggaaaagcauggcugcauguuuguauaacgggggaugauaaaaaugcaacugcuagcuucauuuacaaugggaggcuuguagauaguguuguuucaugguccaaagaaauccucaggacccaggagucagaaugcguuuguaucaauggaacuuguacaguaguaaugacugaugggagugcuucaggaaaagcugauacuaaaauacuauucauugaggaggggaaaaucguucauacuagcacauugucaggaagugcucagcaugucgaggagugcuccugcuauccucgauauccuggugucagaugugucugcagagacaacuggaaaggauccaauaggcccaucguagauauaaacauaaaggaucauagcauugucuccaguuauguguguucaggacuuguuggagacacacccagaaaaaacgacagcuccagcaguagccauuguuuggauccuaacaaugaggaagguggucauggggugaaaggcugggccuuugaugauggaaaugacguguggaugggaagaacgaucagcgagaagucacgcuuaggguaugaaaccuucaaagucauugaaggcugguccaacccuaaguccaaauugcagauaaauaggcaagucauaguugacagagguaauagguccgguuauucugguauuuucucuguugaaggcaaaagcugcaucaaucggugcuuuuauguggaguugauaaggggaagaaaagaggaaacugaagucuuguggaccucaaacaguauuguuguguuuuguggcaccucagguacauauggaacaggcucauggccugauggggcggacaucaaucucaugccuauauaa

SEQ ID NO: 51279 - RNA, 1410 nt, Artificial Sequence; identical to SEQ ID NO: 51274
  derived and/or modified CDS sequence (wt) from neuraminidase__InfluenzaA__ADK99011

SEQ ID NO: 51280 - RNA, 1410 nt, Artificial Sequence
  derived and/or modified CDS sequence (wt) from neuraminidase__InfluenzaA__ADK99022
augaauccaaaucaaaagauaauaacgauuggcucuguuucucucaccauuuccacaauaugcuucuucaugcaaauugccaucuugguaaccacuguaacauugcauuucaagcaauaugaauucaacucccccccaaacaaccaagugaugcugugugacccaacaauaauagaaagaaacauaacagagauaguguaucugaccaacaccaccauagagaaggaaauaugccccaaacuagcagaauacagaaauuggucaaagccgcaaugugacauuacaggauuugcaccuuuuucuaaggacaauucgauuaggcuuuccgcugguggggacaucugggugacaagagaaccuuaugugucaugcgauccugacaaguguuaucaauuugcccuuggacagggaacaacacuaaacaacgugcauucaaauaacacaguacgugauaggaccccuuaucggacccuauugaugaaugaguuagguguuccuuuucaucuggggaccaagcaagugugcauagcaugguccagcucaaguugucacgauggaaaagcauggcugcauguuuguauaacgggggaugauaaaaaugcaacugcuagcuucauuuacaaugggaggcuuguagauaguguuguuucaugguccaaagacauccucaggacccaggagucagaaugcguuuguaucaauggaacuuguacaguaguaaugacugaugggagugcuucaggaaaagcugauacuaaaauacuauucauugaggaggggaaaaucguucauacuagcacauugucaggaagugcucagcaugucgaggagugcuccugcuauccucgauauccuggugucagaugugucugcagagacaacuggaaaggcuccaauaggcccaucguagauauaaacauaaaggaucauagcauuguuuccaguuauguguguucaggacuuguuggagacacacccagaaaaaacgacagcuccagcaguagccauuguuuggauccuaacaaugaagaagguggucauggagugaaaggcugggccuuugaugauggaaaugacguguggaugggaagaacgaucagcgagaagucacgcuuaggguaugaaaccuucaaagucauugaaggcugguccaacccuaaguccaaauugcagauaaauaggcaagucauaguugacagagguaauagguccgguuauucugguauuuucucuguugaaggcaaaagcugcaucaaucggugcuuuuauguggaguugauaaggggaagaaaagaggaaacugaagucuuguggaccucaaacaguauuguuguguuuuguggcaccucagguacauauggaacaggcucauggccugauggggcgaacaucaaucucaugccuauauaa

SEQ ID NO: 51281 - RNA, 1410 nt, Artificial Sequence
  derived and/or modified CDS sequence (wt) from neuraminidase__InfluenzaA__ADK99033
augaauccaaaucaaaagauaauaacuauuggcucuguuucucucaccauuuccacaauaugcuucuucaugcaaauugccaucuugauaacuacuguaacauugcauuucaagcaauaugaauucaacucccccccaaacaaccaagugaugcugugugaaccaacaauaauagaaagaaacauaacagagauaguguaucugaccaacaccaccauagagaaggagauaugccccaaacuagcagaauacagaaauuggucaaagccgcaaugugacauuacaggguuugcaccuuuuucuaaggacaauucgauuaggcuuuccgcugguggggacaucugggugacaagagaaccuuaugugucaugcgauccugacaaguguuaucaauuugcccuuggacagggaacaacacuaaacaacguacauucaaauaacacaguacgugauaggaccccuuaucggacccuauugaugaaugaguuagguguuccuuuucaucuggggaccaagcaagugugcauagcaugguccagcucaaguugucacgauggaaaagcauggcugcauguuuguauaacgggggaugauaaaaaugcaacugcuagcuucauuuacaaugggaggcuuguagauaguguuguuucaugguccaaagaaauccucaggacccaggagucagaaugcguuuguaucaauggaacuugcacaguaguaaugacugaugggagugcuucaggaaaagcugauacuaaaauacuauucauugaggaggggaaaaucguucauacuagcacauugucaggaagugcucagcaugucgaggagugcuccugcuauccucgauauccuggugucagaugugucugcagagacaacuggaaaggauccaauaggcccaucguagauauaaacauaaaggaccauagcauuguuuccaguuauguguguucaggacuuguuggagacacacccagaaaaaacgacagcuccagcaguagccauuguuuggauccuaacaaugaggaagguggucauggggugaaaggcugggccuuugaugauggaaaugacguguggaugggaagaacgaucagcgagaagucacgcuuaggguaugaaaccuucaaagucauugaaggcugguccaacccuaaguccaaauugcagauaaauaggcaagucauaguugacagagguaauagguccgguuauucugguauuuucucuguugaaggcaaaagcugcaucaaucggugcuuuuauguggaguugauaaggggaagaaaagaggaaacugaagucuuguggaccucaaacaguauuguuguguuuuguggcaccucagguacauauggaacaggcucauggccugauggggcggacaucaaucucaugccuauauaa

SEQ ID NO: 51282 - RNA, 1410 nt, Artificial Sequence
  derived and/or modified CDS sequence (wt) from neuraminidase__InfluenzaA__ADK99044
augaauccaaaucaaaagauaauaacgauuggcucuguuucucucaccauuuccacaauaugcuucuucaugcaaauugccaucuugauaacuacuguaacauugcauuucaagcaauaugaauucaacucccccccaaacaaccaagugaugcugugugaaccaacaauaauagaaagaaacaaaacagagauaguguaucugaccaacaccaccauagagaaggaaauaugccccaaacuagcagaauacagaaauuggucaaagccgcaaugugacauuacaggauuugcaccuuuuucuaaggacaauucgauuaggcuuuccgcugguggggacaucugggugacaagagaaccuuaugugucaugcgauccugacaaguguuaucaauuugcccuuggacagggaacaacacuaaacaacgggcauucaaauaacacaguacgugauaggaccccuuaucggacccuauugaugaaugaguuagguguuccuuuucaucuggggaccaagcaagugugcauagcaugguccagcucaaguugucacgauggaaaagcauggcugcauguuuguauaacgggggaugauaaaaaugcaacugcuagcuucauuuacaaugggaagcuuguagauaguguuguuucaugguccaaagaaauccucaggacccaggagucagaaugcgucuguaucaauggaacuuguacaguaguaaugacugaugggagugcuucaggaaaagcugauacuaaaauacuauucauugaggaggggaaaaucguucauacuagcacauugucaggaagugcccagcaugucgaggagugcucuugcuauccucgauauccuggugucagaugugucugcagagacaacuggaaaggcuccaauaggcccaucguagauauaaacauaaaggaucauagcauuguuuccaguuauguguguucaggacuuguuggagacacacccagaaaaaacgacagcuccagcaguagccauuguuuggauccuaacaaugaagaagguggucauggagugaaaggcugggccuuugaugauggaaaugacguguggaugggaagaacgaucagcgagaagucacgcuuaggguaugaaacuuucaaagucauugaaggcugguccaaccauaaguccaaauugcagauaaauaggcaagucauaguugacagagguaauagguccgguuauucugguauuuucucuguugaaggcaaaagcugcaucaaucggugcuuuuauguggaguugauuaggggaagaaaagaggaaacugaagucuuguggaccucaaacaguauuguuguguuuuguggcaccucagguacauauggaacaggcucauggccugauggggcggaccucaaucucaugccuauauaa

SEQ ID NO: 51283 - RNA, 1410 nt, Artificial Sequence
  derived and/or modified CDS sequence (wt) from neuraminidase__InfluenzaA__ADK99055
augaauccaaaucaaaagauaauaacgauuggcucuguuucucucaccauuuccacaauaugcuucuucaugcaaauugccaucuugauaacuacuguaacauugcauuucaagcaauaugaauucaacucccccccaaacaaccaagugaugcugugugaaccaacaauaauagaaagaaacauaacagagauaguguaucugaccaacaccaccauagagaaggaaauaugccccaaacuagcagaauacagaaauuggucaaagccgcaaugugacauuacaggguuugcaccuuuuucuaaggacaauucgauuaggcuuuccgcugguggggacaucugggugacaagagaaccuuaugugucaugcgauccugacaaguguuaucaauuugcccuuggacagggaacaacacuaaacaacguacauucaaauaacacaguacgugauaggaccccuuaucggacccuauugaugaaugaguuagguguuccuuuucaucuggggaccaagcaagugugcauagcaugguccagcucaaguugucacgauggaaaagcauggcugcauguuuguauaacgggggaugauaaaaaugcaacugcuagcuucauuuacaaugggaggcuuguagauaguguuguuucaugguccaaagaaauccucaggacccaggagucagaaugcguuuguaucaauggaacuuguacaguaguaaugacugaugggagugcuucaggaaaagcugauacuaaaauacuauucauugaggaggggaaaaucguucauacuagcacauugucaggaagugcucagcaugucgaggagugcucuugcuauccucgauauccuggugucagaugugucugcagagacaacuggaaaggauccaauaggcccaucguagauauaaacaugaaggaucauagcauuguuuccaguuauguguguucaggacuuguuggagacacacccagaaaaaacgacagcuccagcaguagccauuguuuggauccuaacaaugaagaagguggucauggagugaaaggcugggccuuugaugauggaaaugacguguggaugggaagaacgaucagcgagaagucacgcuuaggguaugaaaccuucaaagucauugaaggcugguccaacccuaaguccaaauugcagauaaauaggcaagucauaguugacagagguaauagguccgguuauucugguauuuucucuguugaaggcaaaagcugcaucaaucggugcuuuuauguggaguugauaaggggaagaaaagaggaaacugaagucuuguggaccucaaacaguauuguuguguuuuguggcaccucagguacauauggaacaggcucauggccugauggggcggacaucaaucucaugccuauauaa

SEQ ID NO: 51284 - RNA, 1410 nt, Artificial Sequence
  derived and/or modified CDS sequence (wt) from neuraminidase__InfluenzaA__ADK99066
augaauccaaaucaaaagauaauaacgauuggcucuguuucucucaccauuuccacaauaugcuucuucaugcaaauugccaucuugauaacuacuguaacauugcauuucaagcaaugugaauucaacucccccccaaacaaccaagugaugcugugugaaccaacaauaauagaaagaaacauaacagagauaguguaucugaccaacaccaccauagagaagaaaauaugccccaaacuagcagaauacagaaauuggucaaagccgcaaugugacauuacaggguuugcaccuuuuucuaaggacaauucgauuaggcuuuccgcugguggggacaucugggugacaagagaaccuuaugugucaugcgauccugacaaguguuaucaauuugcccuuggacagggaacaacacuaaacaacguacauucaaauaacacaguacgugauaggaccccuuaucggacccuauugaugaaugaguuagguguuccuuuucaucuggggaccaagcaagugugcauagcaugguccagcucaaguugucacgauggaaaagcauggcugcauguuuguauaacgggggaugauaaaaaugcaacugcuagcuucauuuacaaugggaggcuuguagauaguguuguuucaugguccaaagaaauccucaggacccaggagucagaaugcguuuguaucaauggaacuuguacaguaguaaugacugaugggagugcuucaggaaaagcugauacuaaaauacuauucauugaggaggggaaaaucguucauacuagcacauugucaggaagugcucaacaugucgaggagugcuccugcuauccucgauauccuggugucagaugugucugcagagacaacuggaaaggauccaauaggcccaucguagauauaaacauaaaggaucauagcauuguuuccaguuauuuguguucaggacuuguuggagacacacccagaaaaaacgacagcuccagcaguagccauuguuuggauccuaacaaugaggaagguggucauggggugaaaggcugggccuuugaugauggaaaugacguguggaugggaagaacgaucagcgagaagucacgcuuaggguaugaaaccuucaaagucaucgaaggcugguccaacccuaaguccaaauugcagauaaauaggcaagucauaguugacagagguaauagguccgguuauucugguauuuucucuguugaaggcaaaagcugcaucaaucggugcuuuuauguggaguugauaaggggaagaaaagaggaaacugaagucuuguggaccucaaacaguauuguuguguuuuguggcaccucagguacauauggaacaggcucauggccugauggggcgaacaucaaucucaugccuauauaa

SEQ ID NO: 51285 - RNA, 1410 nt, Artificial Sequence
  derived and/or modified CDS sequence (wt) from neuraminidase__InfluenzaA__ADK99077
augaauccaaaucaaaagauaauaacgauuggcucuguuucucucaccauuuccacaauaugcuucuucaugcaaauugccaucuugauaacuacuguaacauugcauuucaagcaauaugaauucaacucccccccaaacaaccaagugaugcugugugaaccaacaauaauagaaagaaacauaacagagauaguguaucugaccaacaccaccauagagaaggaaauaugccccaaacuagcagaauacagaaauuggucaaagccgcaaugugacauuacaggauuugcaccuuuuucuaaggacaauucgauuaggcucuccgcugguggggacaucugggugacaagagaaccuuaugugucaugcgauccugacaaguguuaucaauuugcccuuggacagggaacaacacuaaacaacgugcauucaaauaacacaguacgugauaggaccccuuaucggacccuauugaugaaugaguuagguguuccuuuucaucuggggaccaagcaagugugcauagcaugguccagcucaaguugucaugauggaaaagcauggcugcauguuuguauaacgggggaugauaaaaaugcaacugcuagcuucauuuacaaugggaggcuuguagauaguguuguuucaugguccaaagacauccucaggacccaggagucagaaugcgucuguaucaauggaacuuguacaguaguaaugacugaugggagugcuucaggaaaagcugauacuaaaauacuauucauugaggaggggaaagucguucauacuagcacauugucaggaagugcucagcaugucgaggagugcucuugcuauccucgauauccuggugucagaugugucugcagagacaacuggaaaggcuccaauaggcccaucguagauauaaacauaaaggaucauagcauuguuuccaguuauguguguucaggacuuguuggagacacacccagaaaaaacgacagcuccagcaguagccauuguuuggauccuaacaaugaagaagguggucauggagugaaaggcugggccuuugaugauggaaaugacguguggaugggaagaacgaucagcgagaagucacgcuuaggguaugaaaccuucaaagucauugaaggcugguccaaccauaaguccaaauugcagauaaauaggcaagucauaguugacagagguaauagguccgguuauucugguauuuucucuguugaaggcaaaagcugcaucaaucggugcuuuuauguggaguugauuaggggaagaaaagaggaaacugaagucuuguggaccucaaacaguauuguuguguuuuguggcaccucagguacauauggaacaggcucauggccugauggggcggaccucaaucucaugccuauauaa

SEQ ID NO: 51286 - RNA, 1410 nt, Artificial Sequence; identical to SEQ ID NO: 51050
  derived and/or modified CDS sequence (wt) from neuraminidase__InfluenzaA__ADK99088

SEQ ID NO: 51287 - RNA, 1410 nt, Artificial Sequence
  derived and/or modified CDS sequence (wt) from neuraminidase__InfluenzaA__ADK99099
augaauccaaaucaaaagauaauaacgauuggcucuguuucucucaccauuuccacaauaugcuucuucaugcaaauugccaucuugguaacuacuguaacauugcauuucaagcaauaugaauucaacucccccccaaacaaccaagugaugcugugugaaccaacaauaauagaaagaaacauaacagagauaguguaucugaccaacaccaccauagagaaggaaauaugccccaaacuagcagaauacagaaauuggucaaagccgcaaugugacauuacaggauuugcaccuuuuucuaaggacaauucgauuaggcuuuccgcugguggggacaucugggugacaagagaaccuuaugugucaugcgauccugacaaguguuaucaauuugcccuuggacagggaacaacacuaaacaacgugcauucaaauaacacaguacgugauaggaccccuuaucggacccuauugaugaaugaguuagguguuccuuuucaucuggggaccaagcaagugugcauagcuugguccagcucaaguugucacgauggaaaagcauggcugcauguuuguauaacgggggaugauaaaaaugcaacugcuagcuucauuuacaaugggaggcuuguagauaguguuguuucaugguccaaagacauccucaggacccaggagucagaaugcguuuguaucaauggaacuuguacaguaguaaugacugaugggagugcuucaggaaaagcugauacuaaaauacuauucauugaggaggggaaaaucguucauacuagcacauugucaggaagugcucagcaugucgaggagugcuccugcuauccucgauauccuggugucagaugugucugcagagacaacuggaaaggcuccaauaggcccaucguagauauaaacauaaaggaucauagcauuguuuccaguuauguguguucaggacuuguuggagacacacccagaaaaaacgacagcuccagcaguagccauuguuuggauccuaacaaugaagaagguggucauggagugaaaggcugggccuuugaugauggaaaugacguguggaugggaagaacgaucagcgagaagucacgcuuaggguaugaaaccuucaaagucauugaaggcugguccaacccuaaguccaaauugcagauaaauaggcaagucauaguugacagagguaauagguccgguuauucugguauuuucucuguugaaggcaaaagcugcaucaaucggugcuuuuauguggaguugauaaggggaagaaaagaggaaacugaagucuuguggaccucaaacaguauuguuguguuuuguggcaccucagguacauauggaacaggcucauggccugauggggcgaacaucaaucucaugccuauauaa

SEQ ID NO: 51288 - RNA, 1410 nt, Artificial Sequence
  derived and/or modified CDS sequence (wt) from neuraminidase__InfluenzaA__ADK99110
augaauccaaaucaaaagauaauaacgauuggcucuguuucucucaccauuuccacaauaugcuucuucaugcaaauugccaucuugguaacuacuguaacauugcauuucaagcaauaugaauucaacccccccccaaacaaccaagugaugcugugugaaccaacaauaauagaaagaaacauaacagagauaguguaucugaccaacaccaccauagagaaggaaauaugccccaaacuagcagaauacagaaauuggucaaagccgcaaugugacauuacaggauuugcaccuuuuucuaaggacaauucgauuaggcuuuccgcugguggggacaucugggugacaagagaaccuuaugugucaugcgauccugacaaguguuaucaauuugcccuuggacagggaacaacacuaaacaacgugcauucaaauaacacaguacgugauaggaccccuuaucggacccuauugaugaaugaguuagguguuccuuuucaucuggggaccaagcaagugugcauagcaugguccagcucaaguugucacgauggaaaagcauggcugcauguuuguauaacgggggaugauaaaaaugcaacugcuagcuucauuuacaaugggaggcuuguagauaguguuguuucaugguccaaagacauccucaggacccaggagucagaaugcguuuguaucaauggaacuuguacaguaguaaugacugaugggagugcuucaggaaaagcugauacuaaaauacuauucauugaggaggggaaaaucguucauacuagcacauugucaggaagugcucagcaugucgaggagugcuccugcuauccucgauauccuggugucagaugugucugcagagacaacuggaaaggcuccaauaggcccaucguagauauaaacauaaaggaucauagcauuguuuccaguuauguguguucaggacuuguuggagacacacccagaaaaaacgacagcuccagcaguagccauuguuuggauccuaacaaugaagaagguggucauggagugaaaggcugggccuuugaugauggaaaugacguguggaugggaagaacgaucagcgagaagucacgcuuaggguaugaaaccuucaaagucauugaaggcugguccaacccuaaguccaaauugcagauaaauaggcaagucauaguugacagagguaauagguccgguuauucugguauuuucucuguugaaggcaaaagcugcaucaaucggugcuuuuauguggaguugauaaggggaagaaaagaggaaacugaagucuuguggaccucaaacaguauuguuguguuuuguggcaccucagguacauauggaacaggcucauggccugauggggcgaacaucaaucucaugccuauauaa

SEQ ID NO: 51289 - RNA, 1410 nt, Artificial Sequence; identical to SEQ ID NO: 51229
  derived and/or modified CDS sequence (wt) from neuraminidase__InfluenzaA__ADK99121

SEQ ID NO: 51290 - RNA, 1410 nt, Artificial Sequence
  derived and/or modified CDS sequence (wt) from neuraminidase__InfluenzaA__ADK99132
augaauccaaaucaaaagauaauaacgauuggcucuguuucucucaccauuuccacaauaugcuucuucaugcaaauugccaucuugauaacuacuguaacauugcauuucaagcaauaugaauucaacucccccccaaacaaccaagugaugcugugugaaccaacaauaauagaaagaaacauaacagagauaguguaucugaccaacaccaccguagagaaggaaauaugccccaaacuagcagaauacagaaauuggucaaagccgcaaugugacauuacaggguuugcaccuuuuucuaaggacaauucgauuaggcuuuccgcugguggggacaucugggugacaagagaaccuuaugugucaugcgauccugacaaguguuaucaauuugcccuuggacagggaacaacacuaaacaacguacauucaaauaacacaguacgugauaggaccccuuaucggacccuauugaugaaugaguuagguguuccuuuucaucuggggaccaagcaagugugcauagcaugguccagcucaaguugucacgauggaaaagcauggcugcauguuuguauaacgggggaugauaaaaaugcaacugcuagcuucauuuacaaugggaggcuuguagauaguguuguuucaugguccaaagaaauccucaggacccaggagucagaaugcguuuguaucaauggaacuuguacaguaguaaugacugaugggagugcuucaggaaaagcugauacuaaaauacuauucauugaggaggggaaaaucguucauacuagcacauugucaggaagugcucaacaugucgaggagugcuccugcuauccucgauauccuggugucagaugugucugcagagacaacuggaaaggauccaauaggcccaucguagauauaaacauaaaggaucauagcauuguuuccaguuauuuguguucaggacuuguuggagacacacccagaaaaaacgacagcuccagcaguagccauuguuuggauccuaacaaugaggaagguggucauggggugaaaggcugggccuuugaugauggaaaugacguguggaugggaagaacgaucagcgagaagucacgcuuaggguaugaaaccuucaaagucauugaaggcugguccaacccuaaguccaaauugcagauaaauaggcaagucauaguugacagagguaauagguccgguuauucugguauuuucucuguugaaggcaaaagcugcaucaaucggugcuuuuauguggaguugauaaggggaagaaaagaggaaacugaagucuuguggaccucaaacaguauuguuguguuuuguggcaccucagguacauauggaacaggcucauggccugauggggcggacaucaaucucaugccuauauaa

SEQ ID NO: 51291 - RNA, 1410 nt, Artificial Sequence; identical to SEQ ID NO: 51229
  derived and/or modified CDS sequence (wt) from neuraminidase__InfluenzaA__ADK99143

SEQ ID NO: 51292 - RNA, 1410 nt, Artificial Sequence; identical to SEQ ID NO: 51227
  derived and/or modified CDS sequence (wt) from neuraminidase__InfluenzaA__ADK99154

SEQ ID NO: 51293 - RNA, 1410 nt, Artificial Sequence
  derived and/or modified CDS sequence (wt) from neuraminidase__InfluenzaA__ADK99176
augaauccaaaucaaaagauaauaacgauuggcucuguuucucucaccauuuccacaauaugcuucuucaugcaaauugccaucuugguaacuacuguaacauugcauuucaagcaauaugaauucaacucccccccaaacaaccaagugaugcugugugaaccaacaauaauagaaagaaacauaacagagauaguguaucugaccaacaccaccauagagaaggaaauaugccucaaacuagcagaauacagaaauuggucaaagccgcaaugugacauuacaggauuugcaccuuuuucuaaggacaauucgauuaggcuuuccgcugguggggacaucugggugacaagagaaccuuaugugucaugcgauccugacaaguguuaucaauuugcccuuggacagggaacaacacuaaacaacgugcauucaaauaacacaguacgugauaggaccccuuaucggacccuauugaugaaugaguuagguguuccuuuucaucuggggaccaagcaagugugcauagcuugguccagcucaaguugucacgauggaaaagcauggcugcauguuuguauaacgggggaugauaaaaaugcaacugcuagcuucauuuacaaugggaggcuuguagauaguguuguuucaugguccaaagacauccucaggacccaggagucagaaugcguuuguaucaauggaacuuguacaguaguaaugacugaugggagugcuucaggaaaagcugauacuaaaauacuauucauugaggaggggaaaaucguucauacuagcacauugucaggaagugcucagcaugucgaggagugcuccugcuauccucgauauccuggugucagaugugucugcagagacaacuggaaaggcuccaauaggcccaucguagauauaaacauaaaggaucauagcauuguuuccaguuauguguguucaggacuuguuggagacacacccagaaaaaacgacagcuccagcaguagccauuguuuggauccuaacaaugaagaagguggucauggagugaaaggcugggccuuugaugauggaaaugacguguggaugggaagaacgaucagcgagaagucacgcuuaggguaugaaaccuucaaagucauugaaggcugguccaacccuaaguccaaauugcagauaaauaggcaagucauaguugacagagguaauagguccgguuauucugguauuuucucuguugaaggcaaaagcugcaucaaucggugcuuuuauguggaguugauaaggggaagaaaagaggaaacugaagucuuguggaccucaaacaguauuguuguguuuuguggcaccucagguacauauggaacaggcucauggccugauggggcgaacaucaaucucaugccuauauaa

SEQ ID NO: 51294 - RNA, 1410 nt, Artificial Sequence; identical to SEQ ID NO: 51285
  derived and/or modified CDS sequence (wt) from neuraminidase__InfluenzaA__ADK99187

SEQ ID NO: 51295 - RNA, 1410 nt, Artificial Sequence; identical to SEQ ID NO: 51260
  derived and/or modified CDS sequence (wt) from neuraminidase__InfluenzaA__ADK99198

SEQ ID NO: 51296 - RNA, 1410 nt, Artificial Sequence; identical to SEQ ID NO: 51229
  derived and/or modified CDS sequence (wt) from neuraminidase__InfluenzaA__ADK99220

SEQ ID NO: 51297 - RNA, 1410 nt, Artificial Sequence
  derived and/or modified CDS sequence (wt) from neuraminidase__InfluenzaA__ADK99231
augaauccaaaucaaaagauaauaacgauuggcucuguuucucucaccauuuccacaauaugcuucuucaugcaaauugccaucuugauaacuacuguaacauugcauuucaagcaauaugaauucaacucccccccaaacaaccaagugaugcugugugaaccaacaauaauagaaagaaacauaacagagauaguguaucugaccaacaccaccauagagaaggaaauaugccccaaacuagcagaauacagaaauuggucaaagccgcaaugugacauuacaggguuugcaccuuuuucuaaggacaauucgauuaggcuuuccgcugguggggacaucugggugacaagagaaccuuaugugucaugcgauccugacaauuguuaucaauuugcccuuggacagggaacaacacuaaacaacguacauucaaauaacacaguacgugauaggaccccuuaucggacccuauugaugaaugaguuagguguuccuuuucaucuggggaccaagcaagugugcauagcaugguccagcucaaguugucacgauggaaaagcauggcugcauguuuguauaacgggggaugauaaaaaugcaacugcuagcuucauuuacaaugggaggcuuguagauaguguuguuucaugguccaaagaaauccucaggacccaggagucagaaugcguuuguaucaauggaacuuguacaguaguaaugacugaugggagugcuucaggaaaagcugauacuaaaauacuauucauugaggaggggaaaaucguucauacuagcacauugucaggaagugcucaacaugucgaggagugcuccugcuauccucgauauccuggugucagaugugucugcagagacaacuggaaaggauccaauaggcccaucguagauauaaacauaaaggaucauagcauuguuuccaguuauuuguguucaggacuuguuggagacacacccagaaaaaacgacagcuccagcaguagccauuguuuggauccuaacaaugaggaagguggucauggggugaaaggcugggccuuugaugauggaaaugacguguggaugggaagaacgaucagcgagaagucacgcuuaggguaugaaaccuucaaagucaucgaaggcugguccaacccuaaguccaaauugcagauaaauaggcaagucauaguugacagagguaauagguccgguuauucugguauuuucucuguugaaggcaaaagcugcaucaaucggugcuuuuauguggaguugauaaggggaagaaaagaggaaacugaagucuuguggaccucaaacaguauuguuguguuuuguggcaccucagguacauauggaacaggcucauggccugauggggcggacaucaaucucaugccuauauaa

SEQ ID NO: 51298 - RNA, 1410 nt, Artificial Sequence
  derived and/or modified CDS sequence (wt) from neuraminidase__InfluenzaA__ADK99242
augaauccaaaucaaaagauaauaacgauuggcucuguuucucucaccauuuccacaauaugcuucuucaugcaaauugccaucuugauaacuacuguaacauugcauuucaagcaauaugaauucaacucccccccaaacaaccaagugaugcugugugaaccaacaauaauagaaagaaacauaacagagauaguguaucugaccaacaccaccauagagaaggaaauaugccccaaacuagcagaauacagaaauuggucaaagccgcaaugugacauuacaggguuugcaccuuuuucuaaggacaauucgauuaggcuuuccgcugguggggacaucugggugacaagagaaccuuaugugucaugcgauccugacaaguguuaucaauuugcccuuggacagggaacaacacuaaacaacguacauucaaauaacacaguacgugauaggaccccuuaucggacccuauugaugaaugaguuagguguuccuuuucaucuggggaccaagcaagugugcauagcaugguccagcucaaguugucacgauggaaaagcauggcugcauguuuguauaacgggggaugauaaaaaugcaacugcuagcuucauuuacaaugggaggcuuguagauaguguuguuucaugguccaaagacauccucaggacccaggagucagaaugcguuuguaucaauggaacuuguacaguaguaaugacugaugggagugcuucaggaaaagcugauacuaaaauacuauucauugaggaggggaaaaucguucauacuagcacauugucaggaagugcucagcaugucgaggagugcuccugcuauccucgauauccuggugucagaugugucugcagagacaacuggaaaggauccaauaggcccaucguagauauaaacauaaaggaucauagcauugucuccaguuauguguguucaggacuuguuggagacacacccagaaaaaacgacagcuccagcaguagccauuguuuggauccuaacaaugaggaagguggucauggggugaaaggcugggccuuugaugauggaaaugacguguggauggggagaacgaucagcgagaagucacgcuuaggguaugaaaccuucaaagucauugaagguugguccaacccuaaguccaaauugcagauaaauaggcaagucauaguugacagagguaauagguccgguuauucugguauuuucucuguugaaggcaaaagcugcaucaaucggugcuuuuauguggaguugauaaggggaagaaaagaggaaacugaagucuuguggaccucaaacaguauuauuguguuuuguggcaccucagguacauauggaacaggcucauggccugauggggcggacaucaaucucaugccuauauaa

SEQ ID NO: 51299 - RNA, 1410 nt, Artificial Sequence
  derived and/or modified CDS sequence (wt) from neuraminidase__InfluenzaA__ADK99253
augaauccaaaucaaaagauaauaacgauuggcucuguuucucucaccauuuccacaauaugcuucuucaugcaaauugccaucuugauaacuacuguaacauugcauuucaagcaauaugaauucaacucccccccaaacaaccaagugaugcugugugaaccaacaauaauagaaagaaacauaacagagauaguguaucugaccaacaccaccauagagaaggaaauaugccccaaacuagcagaauacagaaauuggucaaagccgcaaugugacauuacaggauuugcaccuuuuucuaaggacaauucgauuaggcuuuccgcugguggggacaucugggugacaagagaaccuuaugugucaugcgauccugacaaguguuaucaauuugcccuuggacagggaacaacacuaaacaacgugcauucaaauaacacaguacgugauaggaccccuuaucggacccuauugaugaaugaguuagguguuccuuuucaucuggggaccaagcaagugugcauagcaugguccagcucaaguugucacgauggaaaagcuuggcugcauguuuguauaacgggggaugauaaaaaugcaacugcuagcuucauuuacaaugggaggcuuguagauaguguuguuucaugguccaaagaaauccucaggacccaggagucagaaugcguuuguaucaauggaacuuguacaguaguaaugacugaugggagugcuucaggaaaagcugauacuaaaauacuauucauugaggaggggaaaaucguucauacuagcacauugucaggaagugcucagcaugucgaggagugcucuugcuauccucgauauccuggugucagaugugucugcagagacaacuggaaaggcuccaauaggcccaucguagauauaaacauaaaggaucauagcauuguuuccaguuauguguguucaggacuuguuggagacacacccagaaaaaacgacagcuccagcaguagccauuguuuggauccuaacaaugaagaagguggucauggagugaaaggcugggcauuugaugauggaaaugacguguggaugggaagaacgaucagcgagaagucacgcuuaggguaugaaaccuucaaagucauugaaggcugguccaaccauaaguccaaauugcagauaaauaggcaagucauaguugacagaggucauagguccgguuauucugguauuuucucuguugaaggcaaaagcugcaucaaucgaugcuuuuauguggaguugauuaggggaagaaaagaggaaacugaagucuuguggaccucaaacaguauuguuguguuuuguggcaccucagguacauauggaacaggcucauggccugauggggcggaccucacucucaugccuauauaa

SEQ ID NO: 51300 - RNA, 1410 nt, Artificial Sequence
  derived and/or modified CDS sequence (wt) from neuraminidase__InfluenzaA__ADK99264
augaauccaaaucaaaagauaauaacgauuggcucuguuucucucaccauuuccacaauaugcuucuucaugcaaauugccaucuugauaacuacuguaacauugcauuucaagcaauaugaauucaacucccccccaaacaaccaagugaugcugugugaaccaacaauaauagaaagaaacauaacagagauaguguaucugaccaacaccaccauagagaaggaaauaugccccaaacuagcagaauacagaaauuggucaaagccgcaaugugacauuacaggguuugcaccuuuuucuaaggacaauucgauuaggcuuuccgcugguggggacaucugggugacaagagaaccuuaugugucaugcgauccugacaaguguuaucaauuugcccuuggacagggaacaacacuaaacaacguacauucaaauaacacaguacgugauaggaccccuuaucggacccuauugaugaaugaguuagguguuccuuuucaucuggggaccaagcaagugugcauagcaugguccagcucaaguugucacgauggaaaagcauggcugcauguuuguauaacgggggaugauaaaaaugcaacugcuagcuucauuuacaaugggaggcuuguagauaguguuguuucaugguccaaagaaauccucaggacccaggagucagaaugcguuuguaucaauggaacuuguacaguaguaaugacugaugggagugcuucaggaaaagcugauacuaaaauacuauucauugaggaggggaaaaucguucauacuagcacauugucaggaagugcucaacaugucgaggagugcuccugcuauccucgauauccuggugucagaugugucugcagagacaacuggaaaggauccaauaggcccaucguagauauaaacauaaaggaucauagcauuguuuccaguuauuuguguucaggacuuguuggagacacacccagaaaaaacgacagcuccagcaguagccauuguuuggauccuaacaaugaggaagguggucauggggugaaaggcugggccuuugaugauggaaaugacguguggaugggaagaacgaucagcgagaagucacgcuuaggguaugaaaccuucaaagucauugaaggcugguccaacccuaaguccaaauugcauauaaauaggcaagucauaguugacagagguaauagguccgguuauucugguauuuucucuguugaaggcaaaagcugcaucaaucggugcuuuuauguggaguugauaaggggaagaaaagaggaaacugaagucuuguggaccucaaacaguauuguuguguuuuguggcaccucagguacauauggaacaggcucauggccugauggggcggacaucaaucucaugccuauauaa

SEQ ID NO: 51301 - RNA, 1410 nt, Artificial Sequence
  derived and/or modified CDS sequence (wt) from neuraminidase__InfluenzaA__ADK99275
augaauccaaaucaaaagauaauaacgauuggcucuguuucucucaccauuuccacaauaugcuucuuuaugcaaauugccgucuugauaacuacuguaacauugcauuucaagcaauaugaauucaacucccccccaaacaaccaagugaugcugugugaaccaacaauaauagaaagaaacauaacagagauaguguaucugaccaacaccaccauagagaaggaaauaugccccaaacuagcaggauacagaaauuggucaaagccgcaaugugacauuacaggauuugcaccuuuuucuaaggacaauucgauuaggcuuuccgcugguggggacaucugggugacaagagaaccuuaugugucaugcgauccugacaaguguuaucaauuugcccuuggacagggaacaacacuaaacaacgugcauucaaaugacacaguacgugauaggaccccuuaucggacccuauugaugaaugaguuagguguuccuuuucaucuggggaccaagcaaguaugcauagcaugguccagcucaaguugucacgauggaaaagcauggcugcauguuuguauaacgggggaugauaaaaaugcaacugcuagcuuuauuuacaaugggaggcuuguagauaguguuguuucaugguccaaagaaauccucaggacccaggagucagaaugcguuuguaucaauggaacuuguacaguaguaaugacugaugggagugcuucaggaaaagcugauacuaaaauauuauucauugaggaggggaaaaucguucauacuagcacauugucaggaagugcucagcaugucgaggagugcucuugcuauccucgauauccuggugucagaugugucugcagagacaacuggaaaggcuccaauaggcccaucguagauauaaacauaaaggaucauagcauuguuuccaguuauguguguucaggacuuguuggagacacacccagaaaaaacgacagcuccagcaguagccauuguuuggauccuaacaaugaagaagguggucauggagugaaaggcugggccuuugaugauggaaaugacguguggaugggaagaacgaucaacgagacgucacgcuuaggguaugaaaccuucaaagucauugaaggcugguccaacccuaaguccaaauugcagauaaauaggcaagucauaguugacagagguaauagguccgguuauucugguauuuucucuguugaaggcaaaagcugcaucaaucgaugcuuuuauguggaguugauuaggggaagaaaagaggaaacugaagucuuguggaccucaaacaguauuguuguguuuuguggcaccucagguacauauggaacaggcucauggccugauggggcggaccucaaucucaugccuauauaa

SEQ ID NO: 51302 - RNA, 1410 nt, Artificial Sequence
  derived and/or modified CDS sequence (wt) from neuraminidase__InfluenzaA__ADK99286
augaauccaaaucaaaagauaauaacgauuggcucuguuucucucaccauuuccacaauaugcuucuucaugcaaauugccaucuugauaacuacuguaacauugcauuucaagcaauaugaauucaacccccccccaaacaaccaagugacgccgcgugaaccaacaauaauagaaagaaacauaacagagauaguguaucugaccaacaccaccauagagaaggaaauaugccccaaacuagcagaauacagaaauuggucaaagccgcaaugugacauuacaggguuugcaccuuuuucuaaggacaauucgauuaggcuuuccgcugguggggacaucugggugacaagagaaccuuaugugucaugcgauccugacaaguguuaucaauuugcccuuggacagggaacaacacuaaacaacauacauucaaauaacacaguacgugauaggaccccuuaucggacccuauugaugaaugaguuagguguuccuuuucaucuggggaccaagcaagugugcauagcaugguccagcucaaguugucacgauggaaaagcauggcugcauguuuguauaacgggggaugauaaaaaugcaacugcuagcuucauuuacaaugggaggcuuguagauaguguuguuucaugguccaaagaaauccucaggacccaggagucagaaugcguuuguaucaauggaacuuguacaguaguaaugacugaugggagugcuucaggaaaagcugauacuaaaauacuauucauugaggaggggaaaaucguucauacuagcacauugucaggaagugcucagcaugucgaggagugcuccugcuauccucgauauccuggugucagaugugucugcagagacaacuggaaaggauccaauaggcccaucguagauauaaacauaaaggaucauagcauugucuccaguuauguguguucaggacuuguuggagacacacccagaaaaaacgacagcuccagcaguagccauuguuuggauccuaacaaugaagaagguggucauggggugaaaggcugggccuuugaugauggaaaugacguguggaugggaagaacgaucagcgagaagucacgcuuaggguaugaaaccuucaaagucauugaaggcugguccaacccuaaguccaaauugcagauaaauaggcaagucauaguugacagagguaauagguccgguuauucugguauuuucucuguugaaggcaaaagcugcaucaaucggugcuuuuauguggaguugauaaggggaagaaaagaggaaacugaagucuuguggaccucaaacaguauuguuguguuuuguggcaccucagguacauauggaacaggcucauggccugauggggcggacaucaaucucaugccuauauaa

SEQ ID NO: 51303 - RNA, 1410 nt, Artificial Sequence
  derived and/or modified CDS sequence (wt) from neuraminidase__InfluenzaA__ADK99297
augaauccaaaucaaaagauaauaacgauuggcucuguuucucucaccauuuccacaauaugcuucuucaugcaaaccgccauccugauaacuacuguaacauugcauuucaagcaaugugaauucaacucccccccaaacaaccaagugaugcugugugaaccaacaauaauagaaagaaacauaacagagauaguguaucugaccaacaccaccauagagaaggaaauaugccccaaacuagcagaauacagaaauuggucaaagccgcaaugugacauuacaggauuugcaccuuuuucuaaggacaauucgauuaggcuuuccgcugguggggacaucugggugacaagagaaccuuaugugucaugcgauccugacaaguguuaucaauuugcccuuggacagggaacaacacuaaacaacgugcauucaaauaacacaguacgugauaggaccccuuaucggacucuauugaugaaugaguuagguguuccuuuucaucuggggaccaagcaagugugcauagcaugguccagcucaaguugucacgauggaaaagcauggcugcauguuuguauaacgggggaugauaaaaaugcaacugcuagcuucauuuacaaugggaggcuuguagauaguguuguuucaugguccaaagaaauccucaggacccaggagucagaaugcguuuguaucaauggaacuuguacaguaguaaugacugaugggagugcuucaggaaaagcugauacuaaaauacuauucauugaggaggggaaaaucguucauacuagcacauugucaggaagugcucagcaugucgaggagugcuccugcuauccucgauauccuggugucagaugugucugcagagacaacuggaaaggcuccaauaggcccaucguagauauaaacauaaaggaucauagcauuguuuccaguuauguguguucaggacuuguuggagacacacccagaaaaaacgacagcuccagcaguagccauuguuuggauccuaacaaugaagaagguggucauggagugaaaggcugggccuuugaugauggaaaugacguguggaugggaagaacgaucagcgagaaaucacgcuuaggguaugaaaccuucaaagucauugaaggcugguccaacccuaaguccaaauugcagauaaauaggcaagucauaguugacagagguaauagguccgguuauucugguauuuucucuguugaaggcaaaagcugcaucaaucggugcuuuuauguggaguugauaaggggaaggaaagaggaaacugaagucuuguggaccucaaacaguauuguuguguuuuguggcaccucagguacauauggaacaggcucauggccugauggggcggacaucaaucucaugccuauauaa

SEQ ID NO: 51304 - RNA, 1410 nt, Artificial Sequence
  derived and/or modified CDS sequence (wt) from neuraminidase__InfluenzaA__ADK99308
augaauccaaaucaaaagauaauaacgauuggcucuguuucucucaccauuuccacaauaugcuucuucaugcaaauugccaucuugguaacuacuguaacauugcauuucaagcaauaugaauucaacucccccccaaacaaccaagugaugcugugugaaccaacaauaauagaaagaaacauaacagagauaguguaucugaccaacaccaccauagagaaggaaauaugccccaaacuagcagaauacagaaauuggucaaagccgcaaugugacauuacaggauuugcaccuuuuucuaaggacaauucgauuaggcuuuccgcugguggggacaucugggugacaagagaaccuuaugugucaugcgauccugacaaguguuaucaauuugcccuuggacagggaacaacacuaaacaacgugcauucaaauaacacaguacgugauaggaccccuuaucggacccuauugaugaaugaguuagguauuccuuuucaucuggggaccaagcaagugugcauagcaugguccagcucaaguugucacgauggaaaagcauggcugcauguuuguauaacgggggaugauaaaaaugcaacugcuagcuucauuuacaaugggaggcuuguagauaguguuguuucaugguccaaagacauccucaggacccaggagucagaaugcguuuguaucaauggaacuuguacaguaguaaugacugaugggagugcuucaggaaaagcugauacuaaaauacuauucauugaggaggggaaaaucguucauacuagcacauugucaggaagugcucagcaugucgaggagugcuccugcuauccucgauauccuggugucagaugugucugcagagacaacuggaaaggcuccaauaggcccaucguagauauaaacauaaaggaucauagcauuguuuccaguuauguguguucaggacuuguuggagacacacccagaaaaaacgacagcuccagcaguagucauuguuuggauccuaacaaugaagaagguggucauggagugaaaggcugggccuuugaugauggaaaugacguguggaugggaagaacgaucagcgagaagucacgcuuaggguaugaaaccuucaaagucauugaaggcugguccaacccuaaguccaaauugcagauaaauaggcaagucauaguugacagagguaauagguccgguuauucugguauuuucucuguugaaggcaaaagcugcaucaaucggugcuuuuauguggaguugauaaggggaagaaaagaggaaacugaagucuuguggaccucaaacaguauuguuguguuuuguggcaccucagguacauauggaacaggcucauggccugauggggcgaacaucaaucucaugccuauauaa

SEQ ID NO: 51305 - RNA, 1413 nt, Artificial Sequence
  derived and/or modified CDS sequence (wt) from neuraminidase__InfluenzaA__ADL14590
augaacccaaaucaaaagauaauaaccauuggaucaaucaguauagcaaucggaauaauuagucuaauguugcaaauaggaaauauuauuucaauaugggcuagucacucaauccaaacugggagucaaaacaacacuggaauaugcaaccaaagaaucaucacauaugaaaacagcaccugggugaaucacacauauguuaauauuaacaacacuaauguuguugcuggagaggacaagacaucagugacauuggccggcaauucaucucuuuguucuaucaguggaugggcuauauacacaaaagacaacagcauaagaauuggcuccaaaggagauguuuuugucauaagagaaccuuucauaucauguucucacuuggaaugcagaaccuuuuuucugacccaaggcgcucuauuaaaugacaaacauucaaaugggaccguaaaggacagaaguccuuauagggccuuaaugagcuguccucuaggugaagcuccguccccauacaauucaaaguucgaaucaguugcauggucagcaagcgcaugccaugauggcaugggcugguuaacaaucggaauuucugguccagacaauggagcuguggcuguacuaaaauacaacggaauaauaacuggaaccauaaaaaguuggaaaaagcaaauauuaagaacacaagagucugaaugugucuguaugaacgggucauguuucaccauaaugaccgauggcccgaguaauaaggccgccucguacaaaauuuucaagaucgaaaaggggaagguuacuaaaucaauagaguugaaugcacccaauuuuuauuaugaggaaugcuccuguuacccagauacuggcauagugauguguguaugcagggacaacuggcaugguucaaaucgaccuugggugucuuuuaaucaaaacuuggauuaucaaauaggauacaucugcaguggaguguuuggugacaauccgcgucccgaagauggagagggcagcugcaauccagugacuguugauggagcaaacggaguaaaaggguuuucauacaaauaugguaaugguguuuggauagggaggaccaaaaguaacagacuuagaaagggguuugagaugauuugggauccuaauggauggacaaauaccgacagugauuucucagugaaacaggauguuguagcaauaacugauuggucaggguacagcggaaguuucguccaacauccugaguuaacaggauuggacuguauaagaccuugcuucuggguugaguuagucagagggcugccuagagaaaauacaacaaucuggacuagugggagcagcauuucuuuuuguggcguuaauagugauacugcaaacuggucuuggccagacggugcugaguugccguucaccauugacaaguag

SEQ ID NO: 51306 - RNA, 1410 nt, Artificial Sequence; identical to SEQ ID NO: 51260
  derived and/or modified CDS sequence (wt) from neuraminidase__InfluenzaA__ADL27992

SEQ ID NO: 51307 - RNA, 1410 nt, Artificial Sequence; identical to SEQ ID NO: 51135
  derived and/or modified CDS sequence (wt) from neuraminidase__InfluenzaA__ADL28003

SEQ ID NO: 51308 - RNA, 1410 nt, Artificial Sequence; identical to SEQ ID NO: 51280
  derived and/or modified CDS sequence (wt) from neuraminidase__InfluenzaA__ADL28014

SEQ ID NO: 51309 - RNA, 1410 nt, Artificial Sequence
  derived and/or modified CDS sequence (wt) from neuraminidase__InfluenzaA__ADL28025
augaauccaaaucaaaagauaauaacgauuggcucuguuucucucaccauuuccacaauaugcuucuucaugcaaauugccaucuugauaacuacuguaacauugcauuucaagcaauaugaauucaacucccccccaaacaaccaagugaugcugugugaaccaacaauaauagaaagaaacauaacagagauaguguaucugaccaacaccaccauagagaagaaaauaugccccaaacuagcagaauacagaaauuggucaaagccgcaaugugacauuacaggguuugcaccuuuuucuaaggacaauucgauuaggcuuuccgcugguggggacaucugggugacaagagaaccuuaugugucaugcgauccugacaaguguuaucaauuugcccuuggacagggaacaacacuaaacaacguacauucaaauaacacaguacgugauaggaccccuuaucggacccuauugaugaaugaguuagguguuccuuuucaucuggggaccaagcaagugugcauagcaugguccagcucaaguugucacgauggaaaagcauggcugcauguuuguauaacgggggaugauaaaaaugcaacugcuagcuucauuuacaaugggaggcuuguagauaguguuguuucaugguccaaagaaauccucaggacccaggagucagaaugcguuuguaucaauggaacuuguacaguaguaaugacugaugggagugcuucaggaaaagcugauacuaaaauacuauucauugaggaggggaaaaucguucauacuagcacauugucaggaagugcucaacaugucgaggagugcuccugcuauccucgauauccuggugucagaugugucugcagagacaacuggaaaggauccaauaggcccaucguagauauaaacauaaaggaucauagcauuguuuccaguuauuuguguucaggacuuguuggagacacacccagaaaaaacgacagcuccagcaguagccauuguuuggauccuaacaaugaggaagguggucauggggugaaaggcugggccuuugaugauggaaaugacguguggaugggaagaacgaucagcgagaagucacgcuuaggguaugaaaccuucaaagucauugaaggcugguccaacccuaaguccaaauugcagauaaauaggcaagucauaguugacagagguaauagguccgguuauucugguauuuucucuguugaaggcaaaagcugcaucaaucggugcuuuuauguggaguugauaaggggaagaaaagaggaaacugaagucuuguggaccucaaacaguauuguuguguuuuguggcaccucagguacauauggaacaggcucauggccugauggggcggacaucaaucucaugccuauauaa

SEQ ID NO: 51310 - RNA, 1410 nt, Artificial Sequence; identical to SEQ ID NO: 51270
  derived and/or modified CDS sequence (wt) from neuraminidase__InfluenzaA__ADL28036

SEQ ID NO: 51311 - RNA, 1410 nt, Artificial Sequence; identical to SEQ ID NO: 51133
  derived and/or modified CDS sequence (wt) from neuraminidase__InfluenzaA__ADL28047

SEQ ID NO: 51312 - RNA, 1410 nt, Artificial Sequence
  derived and/or modified CDS sequence (wt) from neuraminidase__InfluenzaA__ADL28058
augaauccaaaucaaaagauaauaacgauuggcucuguuucucucaccauuuccacaauaugcuucuucaugcaaauugccaucuuaauaacuacuguaacauugcauuucaagcaauaugaauucaacucccccccaaacaaccaagugaugcugugugaaccaacaauaauagaaagaaacauaacagagauaguguaucugaccaacaccaccauagagaaggaaauaugccccaaacuagcagaauacagaaauuggucaaagccucaaugugacauuacaggauuugcaccuuuuucuaaggacaauucgauuaggcuuuccgcugguggggacaucugggugacaagagaaccuuaugugucaugcgauccugacaaguguuaucaauuugcccuuggacagggaacaacacuaaacaacgugcauucaaauaacacaguacgugauaggaccccuuaucggacccuauugaugaaugaguuagguguuccuuuucaucuggggaccaagcaagugugcauagcaugguccagcucaaguugucacgauggaaaagcauggcugcauguuuguauaacgggggaugauaaaaaugcaacugcuagcuucauuuacaaugggaggcuuguagauaguguuguuucaugguccaaagaaauccucaggacccaggagucagaaugcgucuguaucaauggaacuuguacaguaguaaugacugaugggagugcuucaggaaaagcugauacuaaaauacuauucauugaggaggggaaaaucguucauacuagcacauugucaggaagugcucagcaugucgaggagugcucuugcuauccucgauauccuggugucagaugugucugcagagacaacuggaaaggcuccaauaggcccaucguagauauaaacauaaaggaucauagcauuguuuccaguuauguguguucaggacuuguuggagacacacccagaaaaaacgacagcuccagcaguagccauuguuuggauccuaacaaugaagaagguggucauggagugaaaggcugggccuuugaugauggaaaugacguguggaugggaagaacgaucagugagaagucacgcuuaggguaugaaacuuucaaagucauugaaggcugguccaaccauaaguccaaauugcagauaaauaggcaagucauaguugacagagguaauagguccgguuauucugguauuuucucuguugaaggcaaaagcugcaucaaucggugcuuuuauguggaguugauuaggggaagaaaagaggaaacugaaguccuguggaccucaaacaguauuguuguguuuuguggcaccucagguacauauggaacaggcucauggccugauggggcggaucucaaucucaugccuauauaa

SEQ ID NO: 51313 - RNA, 1410 nt, Artificial Sequence; identical to SEQ ID NO: 51288
  derived and/or modified CDS sequence (wt) from neuraminidase__InfluenzaA__ADL28069

SEQ ID NO: 51314 - RNA, 1410 nt, Artificial Sequence; identical to SEQ ID NO: 51229
  derived and/or modified CDS sequence (wt) from neuraminidase__InfluenzaA__ADL28080

SEQ ID NO: 51315 - RNA, 1410 nt, Artificial Sequence; identical to SEQ ID NO: 51254
  derived and/or modified CDS sequence (wt) from neuraminidase__InfluenzaA__ADL28091

SEQ ID NO: 51316 - RNA, 1410 nt, Artificial Sequence
  derived and/or modified CDS sequence (wt) from neuraminidase__InfluenzaA__ADL28102
augaauccaaaucaaaagauaauaacgauuggcucuguuucucucaccauuuccacaauaugcuucuucaugcaaauugccaucuugauaacuacuguaacauugcauuucaagcaauaugaauucaacucccccccaaacaaccaagugaugcugugugaaccaacaauaauagaaagaaacauaacagagauaguguaucugaccaacaccaccauagagaaggaaauaugucccaaacuagcagaauacagaaauuggucaaagccgcaaugugacauuacaggauuugcaccuuuuucuaaggacaauucgauuaggcuuuccgcugguggggacaucugggugacaagagaaccuuaugugucaugcgauccugacaaguguuaucaauuugcccuuggacagggaacaacacuaaacaacgugcauucaaauaacacaguacgugauaggaccccuuaucggacccuauugaugaaugaguuagguguuccuuuucaucuggggaccaagcaagugugcauagcaugguccagcucaaguugucacgauggaaaagcauggcugcauguuuguauaacgggggaugauaaaaaugcaacugcuagcuucauuuacaaugggaggcuuguagauaguguuguuucaugguccaaagacauccucaggacccaggagucagaaugcguuuguaucaauggaacuuguacaguaguaaugacugaugggagugcuucaggaaaagcugauacuaaaauacuauucauugaggaggggaaaaucguucauacuagcacacugucaggaagugcucagcaugucgaggagugcuccugcuauccucgauauccuggugucagaugugucugcagagacaacuggaaaggcuccaauaggcccaucguagauauaaacauaaaggaucauagcauuguuuccaguuauguguguucaggacuuguuggagacacacccagaaaaaacgacagcuccagcaguagccauuguuuggauccuaacaaugaagaagguggucauggagugaaaggcugggccuuugaugauggaaaugacguguggaugggaagaacgaucagcgagaagucacgcuuaggguaugaaaccuucaaagucauugaaggcugguccaacccuaaguccaaauugcagauaaauaggcaagucauaguugacagagguaauagguccgguuauucugguauuuucucuguugaaggcaaaagcugcaucaaucggugcuuuuauguggaguugauaaggggaagaaaagaggaaacugaagucuuguggaccucaaacaguauuguuguguuuuguggcaccucagguacauauggaacaggcucauggccugauggggcggacaucaaucucaugccuauauaa

SEQ ID NO: 51317 - RNA, 1410 nt, Artificial Sequence; identical to SEQ ID NO: 49470
  derived and/or modified CDS sequence (wt) from neuraminidase__InfluenzaA__ADL28113

SEQ ID NO: 51318 - RNA, 1410 nt, Artificial Sequence
  derived and/or modified CDS sequence (wt) from neuraminidase__InfluenzaA__ADL28129
augaauccaaaucaaaagauaauaacgauuggcucuguuucucucaccauuuccacaauaugcuucuucaugcaaauugccaucuugguaacuacuguaacauugcauuucaagcaauaugaauucaacucccccccaaacaaccaagugaugcugugugaaccaacaauaauagaaagaaacauaacagagauaguguaucugaccaacaccaccauagagaaggaaauaugccccaaacuagcagaauacagaaauuggucaaagccgcaaugugacauuacaggauuugcaccuuuuucuaaggacaauucgauuaggcuuuccgcugguggggacaucugggugacaagagaaccuuaugugucaugcgauccugacaaguguuaucaauuugcccuuggacagggaacaacacuaaacaacgugcauucaaauaacacaguacgugauaggaccccuuaucggacccuauugaugaaugaguuagguguuccuuuucaucuggggaccaagcaagugugcauagcuugguccagcucaaguugucacgauggaaaagcauggcugcauguuuguauaacgggggaugauaaaaaugcaacugcuagcuucauuuacaaugggaggcuuguagauaguguuguuucaugguccaaagacauccucaggacccaggagucagaaugcguuuguaucaauggaacuuguacaguaguaaugacugaugggagugcuucaggaaaagcugauacuaaaauacuauucauugaggaggggaaaaucguucauacuagcacauugucaggaagugcucagcaugucgaggagugcuccugcuauccucgauauccuggugucagaugugucugcagagacaacuggaaaggcuccaauaggcccaucguagauauaaacauaaaggaucauagcauuguuuccaguuauguguguucaggacuuguuggagacacacccagaaaaaacgacagcuccagcaguagccauuguuuggauccuaacaaugaagaagguggucauggagugaaaggcugggccuuugaugauggaaaugacguguggaugggaagaacgaucagcgagaagucacgcuuaggguaugaaaccuucaaagucauugaaggcugguccaacccuaaguccaaauugcagauaaauaggcaagucauaguugacagagguaauagguccgguuauucugguauuuucucuguugaaggcaaaagcugcaucaaucggugcuuuuauguggaguugauaaggggaagaaaagaggaaacugaaaucuuguggaccucaaacaguauuguuguguuuuguggcaccucagguacauauggaacaggcucauggccugauggggcgaacaucaaucucaugccuauauaa

SEQ ID NO: 51319 - RNA, 1410 nt, Artificial Sequence
  derived and/or modified CDS sequence (wt) from neuraminidase__InfluenzaA__ADL28140
augaauccaaaucaaaagauaauaacgauuggcucuguuucucucaccauuuccacaauaugcuucuucaugcaaauugccaucuugauaacuacuguaacauugcauuucaagcaauaugaauucaacucccccccaaacaaccaagugaugcugugugaaccaacaauaauagaaagaaacauaacagagauaguguaucugaccaacaccaccauagagaaggaaauaugccccaaacuagcagaauacagaaauuggucaaagccgcaaugugacauuacaggauuugcacccuuuucuaaggacaauucaauuaggcuuuccgcugguggggacaucugggugacaagagaaccuuaugugucaugcgauccugacaaguguuaucaauuugcccuuggacagggaacaacacuaaacaacgugcauucaaauaacacaguacgugauaggaccccuuaucggacccuauugaugaaugaguuagguguuccuuuucaucuggggaccaagcaagugugcauagcaugguccagcucaaguugucacgaugggaaagcauggcugcauguuuguauaacgggggaugauaaaaaugcaacugcuagcuucauuuacaaugggaagcuuguagauaguguuguuucaugguccaaagaaauccucaggacccaggagucagaaugcguuuguaucaauggaacuuguacaguaguaaugacugaugggagugcuucaggaaaagcugauacuaaaauacuauucauugaagaggggaaaaucguucauacuagcacauuaucaggaagugcucagcaugucgaggagugcuccuguuauccucgauauccuggugucagaugugucugcagagacaacuggaaaggcuccaauaggcccaucguagauauaaacauaaaggaucauagcauuguuuccaguuauguguguucaggacuuguuggagacacacccagaaaaaacgacagcuccagcaguagccauuguuuggauccuaacaaugaagaagguggucauggagugaaaggcugggccuuugaugauggaaaugacguguggaugggaagaacgaucagcgagaagucacgcuuaggguaugaaaccuucaaagucauugaaggcugguccaacccuaaauccaaauugcagauaaauaggcaagucauaguugacagagguaauagguccgguuauucugguauuuucucuguugaaggcaaaagcugcaucaaucggugcuuuuauguggaguugauaaggggaagaaaagaggaaacugaagucuuguggaccucaaacaguauuguuguguuuuguggcaccucagguacauauggaacaggcucauggccugauggggcgaacaucaaucucaugccuauauaa

SEQ ID NO: 51320 - RNA, 1410 nt, Artificial Sequence; identical to SEQ ID NO: 51260
  derived and/or modified CDS sequence (wt) from neuraminidase__InfluenzaA__ADL28151

SEQ ID NO: 51321 - RNA, 1410 nt, Artificial Sequence; identical to SEQ ID NO: 51226
  derived and/or modified CDS sequence (wt) from neuraminidase__InfluenzaA__ADL28162

SEQ ID NO: 51322 - RNA, 1410 nt, Artificial Sequence
  derived and/or modified CDS sequence (wt) from neuraminidase__InfluenzaA__ADL28173
augaauccaaaucaaaagauaauaacgauuggcucuguuucucucaccauuuccacaauaugcuucuucaugcaaauugccaucuugauaacuacuguaacauugcauuucaagcaauaugaauucaacucccccccaaacaaccaagugaugcugugugaaccaacaauaauagaaagaaacauaacagagauaguguaucugaccaacaccaccauagagaaggaaauaugccccaagcuagcagaauacagaaauuggucaaagccgcaaugugacauuacaggguuugcaccuuuuucuaaggacaauucgauuaggcuuuccgcugguggggacaucugggugacaagagaaccuuaugugucaugcgauccugacaaguguuaucaauuugcccuuggacagggaacaacacuaaacaacguacauucaaauaacacaguacgugauaggaccccuuaucggacccuauugaugaaugaguuagguguuccuuuucaucuggggaccaagcaagugugcauagcaugguccagcucaaguugucacgauggaaaagcauggcugcauguuuguauaacgggggaugauaaaaaugcaacugcuagcuucauuuacaaugggaggcuuguagauaguguuguuucaugguccaaagaaauccucaggacccaggagucagaaugcguuuguaucaauggaacuuguacaguaguaaugacugaugggagugcuucaggaaaagcugauacuaaaauacuauucauugaggaggggaaaaucguucauacuagcacauugucaggaagugcucaacaugucgaggagugcuccugcuauccucgauauccuggugucagaugugucugcagagacaacuggaaaggauccaauaggcccaucguagauauaaacauaaaggaucauagcauuguuuccaguuauuuguguucaggacuuguuggagacacacccagaaaaaacgacagcuccagcaguagccauuguuuggauccuaacaaugaggaagguggucauggggugaaaggcugggccuuugaugauggaaaugacguguggaugggaagaacgaucagcgagaagucacgcuuaggguaugaaaccuucaaagucaucgaaggcugguccaacccuaaguccaaauugcagauaaauaggcaagucauaguugacagagguaauagguccgguuauucugguauuuucucuguugaaggcaaaagcugcaucaaucggugcuuuuauguggaguugauaaggggaagaaaagaggaaacugaagucuuguggaccucaaacaguauuguuguguuuuguggcaccucagguacauauggaacaggcucauggccugauggggcggacaucaaucucaugccuauauaa

SEQ ID NO: 51323 - RNA, 1410 nt, Artificial Sequence; identical to SEQ ID NO: 51287
  derived and/or modified CDS sequence (wt) from neuraminidase__InfluenzaA__ADL28184

SEQ ID NO: 51324 - RNA, 1410 nt, Artificial Sequence
  derived and/or modified CDS sequence (wt) from neuraminidase__InfluenzaA__ADL28195
augaauccaaaucaaaagauaauaacgauuggcucuguuucucucaccauuuccacaauaugcuucuucaugcaaauugccaucuugauaacuacuguaacauugcauuucaagcaauaugaauucaacucccccccaaacaaccaagugaugcugugugaaccaacaauaauagaaagaaacauaacagagauaguguaucugaccaacaccaccauagagaaggaaauaugccccaaacuagcagaauacagaaauuggucaaagccgcaaugugacauuacaggguuugcaccuuuuucuaaggacaauucgauuaggcuuuccgcugguggggacaucugggugacaagagaaccuuaugugucaugcgauccugacaaguguuaucaauuugcccuuggacagggaacaacacuaaacaacguacauucaaauaacacaguacgugauaggacccccuaucggacccuauugaugaaugaguuagguguuccuuuucaucuggggaccaagcaagugugcauagcaugguccagcucaaguugucacgauggaaaagcauggcugcauguuuguauaacgggggaugauaaaaaugcaacugcuagcuucauuuacaaugggaggcuuguagauaguguuguuucaugguccaaagaaauccucaggacccaggagucagaaugcguuugugucaauggaacuuguacaguaguaaugacugaugggagugcuucaggaaaagcugauacuaaaauacuauucauugaggaggggaaaaucguucauacuagcacauugucaggaagugcucagcaugucgaggagugcuccugcuauccucgauauccuggugucagaugugucugcagagacaacuggaaaggauccaauaggcccaucguagauauaaacauaaaggaucauagcauugucuccaguuauguguguucgggacuuguuggagacacacccagaaaaaacgacagcuccagcaguagccauuguuuggauccuaacaaugaggaagguggucauggggugaaaggcugggccuuugaugauggaaaugacguguggaugggaagaacgaucagcgagaagucacgcuuaggguaugaaaccuucaaagucauugaaggcugguccaacccuaaguccaaauugcagauaaauaggcaagucauaguugacagagguaauagguccgguuauucugguauuuucucuguugaaggcaaaagcugcaucaaucggugcuuuuauguggaguugauaaggggaagaaaagaggaaacugaagucuuguggaccucaaacaguauuguuguguuuuguggcaccucagguacauauggaacaggcucauggccugauggggcggacaucaaucucaugccuauauaa

SEQ ID NO: 51325 - RNA, 1410 nt, Artificial Sequence; identical to SEQ ID NO: 51285
  derived and/or modified CDS sequence (wt) from neuraminidase__InfluenzaA__ADL28206

SEQ ID NO: 51326 - RNA, 1410 nt, Artificial Sequence; identical to SEQ ID NO: 49604
  derived and/or modified CDS sequence (wt) from neuraminidase__InfluenzaA__ADL28217

SEQ ID NO: 51327 - RNA, 1410 nt, Artificial Sequence; identical to SEQ ID NO: 51254
  derived and/or modified CDS sequence (wt) from neuraminidase__InfluenzaA__ADL28228

SEQ ID NO: 51328 - RNA, 1410 nt, Artificial Sequence; identical to SEQ ID NO: 51272
  derived and/or modified CDS sequence (wt) from neuraminidase__InfluenzaA__ADL28239

SEQ ID NO: 51329 - RNA, 1410 nt, Artificial Sequence; identical to SEQ ID NO: 50944
  derived and/or modified CDS sequence (wt) from neuraminidase__InfluenzaA__ADL28250

SEQ ID NO: 51330 - RNA, 1410 nt, Artificial Sequence; identical to SEQ ID NO: 51229
  derived and/or modified CDS sequence (wt) from neuraminidase__InfluenzaA__ADL28261

SEQ ID NO: 51331 - RNA, 1410 nt, Artificial Sequence
  derived and/or modified CDS sequence (wt) from neuraminidase__InfluenzaA__ADL28373
augaauccaaaucaaaagauaauaacgauuggcucuguuucucucaccauuuccacaauaugcuucuucaugcaaauugccaucuugguaacuacuguaacauugcauuucaagcaauaugaauucaacucccccccaaacaaccaagugaugcugugugaaccaacaauaauagaaagaaacauaacagagauaguguaucugaccaacaccaccauagagaaggaaauaugccccaaacuagcagaauacagaaauuggucaaagccgcaaugugacauuacaggauuugcaccuuuuucuaaggacaauucgauuaggcuuuccgcugguggggacaucugggugacaagagaaccuuaugugucaugcgauccugacaaauguuaucaauuugcccuuggacagggaacaacacuaaacaacgugcauucaaauaacacaguacgugauaggaccccuuaucggacccuauugaugaaugaguuagguguuccuuuucaucuggggaccaagcaagugugcauagcaugguccagcucaaguugucacgauggaaaagcauggcugcauguuuguauaacgggggaugauaaaaaugcaacugcuagcuucauuuacaaugggaggcuuguagauaguguuguuucaugguccaaagacauccucaggacccaggagucagaaugcguuuguaucaauggaacuuguacaguaguaaugacugaugggagugcuucaggaaaagcugauacuaaaauacuauucauugaggaggggaaaaucguucauacuagcacauugucaggaagugcucagcaugucgaggagugcuccugcuauccucgauauccuggugucagaugugucugcagagacaacuggaaaggcuccaauaggcccaucguagauauaaacauaaaggaucauagcauuguuuccaguuauguguguucaggacuuguuggagacacacccagaaaaaacgacagcuccagcaguagccauuguuuggauccuaacaaugaagaagguggucauggagugaaaggcugggccuuugaugauggaaaugacguguggaugggaagaacgaucagcgagaagucacgcuuaggguaugaaaccuucaaagucauugaaggcugguccaacccuaaguccaaauugcagauaaauaggcaagucauaguugacagagguaauagguccgguuauucugguauuuucucuguugaaggcaaaagcugcaucaaucggugcuuuuauguggaguugauaaggggaagaaaagaggaaacugaagucuuguggaccucaaacaguauuguuguguuuuguggcaccucagguacauauggaacaggcucauggccugauggggcgaacaucaaucucaugccuauauaa

SEQ ID NO: 51332 - RNA, 1410 nt, Artificial Sequence
  derived and/or modified CDS sequence (wt) from neuraminidase__InfluenzaA__ADL28387
augaauccaaaucaaaagauaauaacgauuggcucuguuucucucaccauuuccacaauaugcuucuucaugcaaauugccaucuugauaacuacuguaacauugcauuucaagcaauaugaauucaacuccuccccaaacaaccaagugaugcugugugaaccaacaauaauagaaagaaacauaacagagauaguguaucugaccaacaccaccauagagaaggaaauaugccccaaacuagcagaauacagaaauuggucaaagccgcaaugugacauuacaggauuugcaccuuuuucuaaggacaauucgauuaggcuuuccgcugguggggacaucugggugacaagagaaccuuaugugucaugcgauccugacaaguguuaucaauuugcccuuggacagggaacaacacuaaacaacgugcauucaaauaacacaguacgugauaggaccccuuaucggacccuauugaugaaugaguuagguguuccuuuucaucuggggaccaagcaagucugcauagcaugguccagcucaaguugucacgauggaaaagcauggcugcauguuuguauaacgggggaugauaaaaaugcaacugcuagcuucauuuacaaugggaggcuuguagauaguauuguuucaugguccaaagaaauccucaggacccaggagucagaaugcguuuguaucaauggaacuuguacaguaguaaugacugacgggagugcuucaggaaaagcugauacuaaaauacuauucauugaggaggggaaaaucguucauacuagcacauugucaggaagugcucagcaugucgaggagugcuccugcuauccucgauauccuggugucagaugugucugcagagacaacuggaaaggcuccaauaggcccaucguagauauaaacauaaaggaucauagcauuguuuccaguuauguguguucaggacuuguuggagacacacccagaaaaaacgacagcuccagcaguagccauuguuuggauccuaacaaugaagaagguggucauggagugaaaggcugggccuuugaugauggaaaugacguguggaugggaagaacgaucagcgagaagucacgcuuaggguaugaaaccuucaaagucauugaaggcugguccaacccuaaguccaaauugcagauaaauaggcaagucauaguugacagagguaauagguccgguuauucugguauuuucucuguugaaggcaaaagcugcaucaaucggugcuuuuauguggaguugauaaggggaagaaaagaggaaacugaagucuuguggaccucaaacaguauuguuguguuuuguggcaccucagguacauauggaacaggcucauggccugauggggcggacaucaaucucaugccuauauaa

SEQ ID NO: 51333 - RNA, 1410 nt, Artificial Sequence
  derived and/or modified CDS sequence (wt) from neuraminidase__InfluenzaA__ADL28391
augaauccaaaucaaaagauaauaacgauuggcucuguuucucucaccauuuccacaauaugcuucuucaugcaaauugccaucuugauaacuacuguaacauugcauuucaagcaauaugaauucaacuccuccccaaacaaccaagugaugcugugugaaccaacaauaauagaaagaaacauaacagagauaguguaucugaccaacaccaccauagagaaggaaauaugccccaaacuagcagaauacagaaauuggucaaagccgcaaugugacauuacaggauuugcaccuuuuucuaaggacaauucgauuaggcuuuccgcugguggggacaucugggugacaagaguaccuuaugugucaugcgauccugacaaguguuaucaauuugcccuuggacagggaacaacacuaaacaacgugcauucaaauaacacaguacgugauaggaccccuuaucggacccuauugaugaaugaguuagguguuccuuuucaucuggggaccaagcaagucugcauagcaugguccagcucaaguugucacgauggaaaagcauggcugcauguuuguauaacgggggaugauaaaaaugcaacugcuagcuucauuuacaaugggaggcuuguagauaguauuguuucaugguccaaagaaauccucaggacccaggagucagaaugcguuuguaucaauggaacuuguacaguaguaaugacugacgggagugcuucaggaaaagcugauacuaaaauacuauucauugaggaggggaaaaucguucauacuagcacauugucaggaagugcucagcaugucgaggagugcuccugcuauccucgauauccuggugucagaugugucugcagagacaacuggaaaggcuccaauaggcccaucguagauauaaacauaaaggaucauagcauuguuuccaguuauguguguucaggacuuguuggagacacacccagaaaaaacgacagcuccagcaguagccauuguuuggauccuaacaaugaagaagguggucauggagugaaaggcugggccuuugaugauggaaaugacguguggaugggaagaacgaucagcgagaagucacgcuuaggguaugaaaccuucaaagucauugaaggcugguccaacccuaaguccaaauugcagauaaauaggcaagucauaguugacagagguaauagguccgguuauucugguauuuucucuguugaaggcaaaagcugcaucaaucggugcuuuuauguggaguugauaaggggaagaaaagaggaaacugaagucuuguggaccucaaacaguauuguuguguuuuguggcaccucagguacauauggaacaggcucauggccugauggggcggacaucaaucucaugccuauauaa

SEQ ID NO: 51334 - RNA, 1410 nt, Artificial Sequence
  derived and/or modified CDS sequence (wt) from neuraminidase__InfluenzaA__ADL28395
augaauccaaaucaaaagauaauaacaauuggcucuguuucucucaccauugccacaauaugcuuccuuaugcaaauugccauccugguaacuacuguaacauugcauuucaagcaguaugaaugcaacucccccccaaacaaccaaguaaugcugugugaaccagcaauaauagaaagaaacauaacagagauaguguaucugaccaacaccaccauagagaaggaaauaugccccaaauuagcagaauacagaaauuggucaaagccgcaauguaacauuacaggauuugcaccuuuuuccaaggacaauucgauucggcuuuccgcugguggggacaucugggugacaagaguaccuuaugugucaugcgauccugacaaguguuaucaauuugcccuuggacagggaacaacacuaaacaacgggcauucaaaugacacaguacaugauaggaccccuuaccggacccuauugaugaaugaauuggguguuccauuucauuugggaaccaggcaagugugcauagcaugguccagcucaaguugucacgauggaaaagcauggcugcauguuuguguaacuggggaugaugaaaaugcaacugcuagcuucauuuacaaugggaggcuuguagauaguauugguucaugguccaaaaaaauacucagaacccaggagucggaaugcguuuguaucaauggaacuuguacaguaguaaugacugaugggagcgcuucaggaaaagcugauacuaaaauacuauucauugaggaggggaaaaucguuaauauuagcacauugucaggaagugcucagcaugucgaggagugcuccuguuauccucgauauccuggugucagaugugucugcagagacaacuggaaaggcuccaauaggcccaucguagauauaaauguaaaggauuauagcauuguuuccaguuaugugugcucaggacuuguuggagacacacccagaaaaaacgacagcuucagcaguagccauugccuagauccuaacaaugaggaagguggucauggagugaaaggcugggccuuugaugauggaaaugacguguggaugggaagaacgaucagcgagaaguuucgcucagguuaugaaaccuucaaagucaucgaaggcugguccaaaccuaacuccaaauuacagauaaauaggcaagucauaguugaaagagguaacagguccgguuauucugguauuuucuccguugaaggcaaaagcugcaucaaucggugcuuuuauguggaguugauaaggggaaggaaagaggaaacugaaguuugguggaccucaaacaguauuguuguguuuuguggcaccucagguacauauggaacaggcucauggccugauggggcggauaucaaucucaugccuauauaa

SEQ ID NO: 51335 - RNA, 1410 nt, Artificial Sequence; identical to SEQ ID NO: 48750
  derived and/or modified CDS sequence (wt) from neuraminidase__InfluenzaA__ADL29675

SEQ ID NO: 51336 - RNA, 1410 nt, Artificial Sequence; identical to SEQ ID NO: 48750
  derived and/or modified CDS sequence (wt) from neuraminidase__InfluenzaA__ADL29685

SEQ ID NO: 51337 - RNA, 1410 nt, Artificial Sequence
  derived and/or modified CDS sequence (wt) from neuraminidase__InfluenzaA__ADL29695
augaauccaaaccaaaagauaauaaccauugguucggucuguaugacaauuggaauggcuaacuuaauauuacaaauuggaaacauaaucucaauauggauuagccacucaauucaacuugggaaucaaaaucagauugaaacaugcaaucaaagcgucauuacuuaugaaaacaacacuuggguaaaucagacauauguuaacaucagcaacaccaacuuugcugcuggacagucagugguuuccgugaaauuagcgggcaauuccucucucugcccuguuaguggaugggcuauauacaguaaagacaacaguauaagaaucgguuccaagggggauguguuugucauaagggaaccauucauaucaugcucccccuuggaaugcagaaccuucuucuugacucaaggggccuugcuaaaugacaaacauuccaauggaaccauuaaagacaggagcccauaucgaacccuaaugagcuguccuauuggugaaguucccucuccauacaacucaagauuugagucagucgcuuggucagcaagugcuugucaugauggcaucaauuggcuaacaauuggaauuucuggcccagacaauggggcaguggcuguguuaaaguacaacggcauaauaacagacacuaucaagaguuggagaaacaauauauugagaacacaagagucugaaugugcauguguaaaugguucuugcuuuacuguaaugaccgauggaccaagugauggacaggccucauacaagaucuucagaauagaaaagggaaagauagucaaaucagucgaaaugaaugccccuaauuaucacuaugaggaaugcuccuguuauccugauucuagugaaaucacaugugugugcagggauaacuggcauggcucgaaucgaccgugggugucuuucaaccagaaucuggaauaucagauaggauacauaugcagugggauuuucggagacaauccacgcccuaaugauaagacaggcaguugugguccaguaucgucuaauggagcaaauggaguaaaaggauuuucauucaaauacggcaaugguguuuggauagggagaacuaaaagcauuaguucaagaaacgguuuugagaugauuugggauccgaacggauggacugggacagacaauaacuucucaauaaagcaagauaucguaggaauaaaugaguggucaggauauagcgggaguuuuguucagcauccagaacuaacagggcuggauuguauaagaccuugcuucuggguugaacuaaucagagggcgacccaaagagaacacaaucuggacuagcgggagcagcauauccuuuugugguguaaacagugacauuguggguuggucuuggccagacggugcugaguugccauuuaccauugacaaguaa

SEQ ID NO: 51338 - RNA, 1410 nt, Artificial Sequence; identical to SEQ ID NO: 50116
  derived and/or modified CDS sequence (wt) from neuraminidase__InfluenzaA__ADL29705

SEQ ID NO: 51339 - RNA, 1410 nt, Artificial Sequence; identical to SEQ ID NO: 51337
  derived and/or modified CDS sequence (wt) from neuraminidase__InfluenzaA__ADL29733

SEQ ID NO: 51340 - RNA, 1410 nt, Artificial Sequence; identical to SEQ ID NO: 51004
  derived and/or modified CDS sequence (wt) from neuraminidase__InfluenzaA__ADL29743

SEQ ID NO: 51341 - RNA, 1410 nt, Artificial Sequence
  derived and/or modified CDS sequence (wt) from neuraminidase__InfluenzaA__ADL29753
augaauccaaaccaaaagauaauaaccauugguucggucuguauggcaauuggaauggcuaacuuaauauuacaaauuggaaacauaaucucaauauggauuagccacucaauucaacuugggaaucaaaaucagauugaaacaugcaaucaaagcgucauuacuuaugaaaacaacacuuggguaaaucagacauauguuaacaucagcaacaccaacuuugcugcuggacagucagugguuuccgugaaauuagcgggcaauuccucucucugcccuguuaguggaugggcuauauacaguaaagacaacaguauaagaaucgguuccaagggggauguguuugucauaagggaaccauucauaucaugcucccccuuggaaugcagaaccuucuucuugacucaaggggccuugcuaaaugacaaacauuccaauggaaccauuaaagacaggagcccauaucgaacccuaaugagcuguccuauuggugaaguucccucuccauacaacucaagauuugagucagucgcuuggucagcaagugcuugucaugauggcaucaauuggcuaacaauuggaauuucuggcccagacaauggggcaguggcuguguuaaaguacaacggcauaauaacagacacuaucaagaguuggagaaacaauauauugagaacacaagagucugaaugugcauguguaaaugguucuugcuuuacuguaaugaccgauggaccaagugauggacaggccucauacaagaucuucagaauagaaaagggaaagauagucaaaucagucgaaaugaaugccccuaauuaucacuaugaggaaugcuccuguuauccugauucuagugaaaucacaugugugugcagggauaacuggcauggcucgaaucgaccgugggugucuuucaaccagaaucuggaauaucagauaggauacauaugcagugggauuuucggagacaauccacgcccuaaugauaagacaggcaguugugguccaguaucgucuaauggagcaaauggaguaaaaggauuuucauucaaauacggcaaugguguuuggauagggagaacuaaaagcauuaguucaagaaacgguuuugagaugauuugggauccgaacggauggacugggacagacaauaacuucucaauaaagcaagauaucguaggaauaaaugaguggucaggauauagcgggaguuuuguucagcauccagaacuaacagggcuggauuguauaagaccuugcuucuggguugaacuaaucagagggcgacccaaagagaacacaaucuggacuagcgggagcagcauauccuuuugugguguaaacagugacauuguggguuggucuuggccagacggugcugaguugccauuuaccauugacaaguaa

SEQ ID NO: 51342 - RNA, 1410 nt, Artificial Sequence; identical to SEQ ID NO: 50275
  derived and/or modified CDS sequence (wt) from neuraminidase__InfluenzaA__ADL29763

SEQ ID NO: 51343 - RNA, 1410 nt, Artificial Sequence; identical to SEQ ID NO: 51337
  derived and/or modified CDS sequence (wt) from neuraminidase__InfluenzaA__ADL29773

SEQ ID NO: 51344 - RNA, 1410 nt, Artificial Sequence; identical to SEQ ID NO: 50116
  derived and/or modified CDS sequence (wt) from neuraminidase__InfluenzaA__ADL29783

SEQ ID NO: 51345 - RNA, 1410 nt, Artificial Sequence; identical to SEQ ID NO: 51337
  derived and/or modified CDS sequence (wt) from neuraminidase__InfluenzaA__ADL29882

SEQ ID NO: 51346 - RNA, 1410 nt, Artificial Sequence
  derived and/or modified CDS sequence (wt) from neuraminidase__InfluenzaA__ADL32020
augaauccaaaccaaaagauaauaaccauugguucggucuguaugacaauuggaauggcuaacuuaauauuacaaauuggaaacauaaucucaacauggauuagccacucaauucaacuugggaaucaaaaucagauugaaacaugcaaucaaagcgucauuacuuaugaaaacaacacuuggguaaaucagacauauguuaacaucagcaacaccaacuuugcugcugggcagucagugguuuccgugaaauuagcgggcaauuccucucucugcccuguuaguggaugggcuauauacaguaaagacaacaguauaagaaucgguuccaagggggauguguuugucauaagggaaccauucauaucaugcucccccuuggaaugcagaaccuucuucuugacucaaggggccuugcuaaaugacaaacauuccaauggaaccauuaaagacaggagcccauaucgaacucuaaugagcuguccuauuggugaaguucccucuccauacaacucaagauuugagucagucgcuuggucagcaagugcuugucaugauggcaucaauuggcuaacaauuggaauuucuggcccagacaauggggcaguggcuguguuaaaguacaacggcauaauaacagacacuaucaagaguuggagaaacaauauauugagaacacaagagucugaaugugcauguguaaaugguucuugcuuuacuguaaugaccgauggaccaagugauggacaggccucauacaagaucuucagaauagaaaagggaaagauagucaaaucagucgaaaugaaugccccuaauuaucacuaugaggaaugcuccuguuauccugauucuagugaaaucacaugugugugcagggauaacuggcauggcucgaaucgaccgugggugucuuucaaccagaaucuggaauaucagauaggauacauaugcagugggauuuucggagacaauccacgcccuaaugauaagacaggcaguugugguccaguaucgucuaauggagcaaauggaguaaaaggauuuucauucaaauacggcaaugguguuuggauagggagaacuaaaagcauuaguucaagaaacgguuuugagaugauuugggauccgaacggauggacugggacagacaauaacuucucaauaaagcaagauaucguaggaauaaaugaguggucaggauauagcgggaguuuuguucagcauccagaacuaacagggcuggauuguauaagaccuugcuucuggguugaacuaaucagagggcgacccaaagagaacacaaucuggacuagcgggagcagcauauccuuuugugguguaaacagugacacuguggguuggucuuggccagacggugcugaguugccauuuaccauugacaaguaa

SEQ ID NO: 51347 - RNA, 1410 nt, Artificial Sequence; identical to SEQ ID NO: 51337
  derived and/or modified CDS sequence (wt) from neuraminidase__InfluenzaA__ADL32030

SEQ ID NO: 51348 - RNA, 1410 nt, Artificial Sequence; identical to SEQ ID NO: 51004
  derived and/or modified CDS sequence (wt) from neuraminidase__InfluenzaA__ADL32040

SEQ ID NO: 51349 - RNA, 1410 nt, Artificial Sequence; identical to SEQ ID NO: 48750
  derived and/or modified CDS sequence (wt) from neuraminidase__InfluenzaA__ADL32050

SEQ ID NO: 51350 - RNA, 1410 nt, Artificial Sequence
  derived and/or modified CDS sequence (wt) from neuraminidase__InfluenzaA__ADL32060
augaauccaaaccaaaagauaauaaccauugguucggucuguaugacaauuggaauggcuaacuuaauauuacaaauuggaaacauaaucucaauauggauuagccacucaauucaacuugggaaucaaaaucagauugaaacaugcaaucaaagcgucauuacuuaugaaaacaacacuuggguaaaucagacauauguuaacaucagcaacaccaacuuugcugcuggacagucagugguuuccgugaaauuagcaggcaauuccucucucugcccuguuaguggaugggcuauauacaguaaagacaacaguauaagaaucgguuccaagggggauguguuugucauaagggaaccauucauaucaugcucccccuuggaaugcagaaccuucuucuugacucaaggggccuugcuaaaugacaaacauuccaauggaaccauuaaagacaggagcccauaucgaacccuaaugagcuguccuauuggugaaguucccucuccauacaacucaagauuugagucagucgcuuggucagcaagugcuugucaugauggcaucaauuggcuaacaauuggaauuucuggcccagacaauggggcaguggcuguguuaaaguacaacggcauaauaacagacacuaucaagaguuggagaaacaauauauugagaacacaagagucugaaugugcauguguaaaugguucuugcuuuacuguaaugaccgauggaccaagugauggacaggccucauacaagaucuucagaauagaaaagggaaagauagucaaaucagucgaaaugaaugccccuaauuaucacuaugaggaaugcuccuguuauccugauucuagugaaaucacaugugugugcagggauaacuggcauggcucgaaucgaccgugggugucuuucaaccagaaucuggaauaucagauaggauacauaugcagugggauuuucggagacaauccacgcccuaaugauaagacaggcaguugugguccaguaucgucuaauggagcaaauggaguaaaaggauuuucauucaaauacggcaaugguguuuggauagggagaacuaaaagcauuaguucaagaaacgguuuugagaugauuugggauccgaacggauggacugggacagacaauaacuucucaauaaagcaagauaucguaggaauaaaugaguggucaggauauagcgggaguuuuguucagcauccagaacuaacagggcuggauuguauaagaccuugcuucuggguugaacuaaucagagggcgacccaaagagaacacaaucuggacuagcgggagcagcauauccuuuugugguguaaacagugacacuguggguuggucuuggccagacggugcugaguugccauuuaccauugacaaguaa

SEQ ID NO: 51351 - RNA, 1410 nt, Artificial Sequence; identical to SEQ ID NO: 48750
  derived and/or modified CDS sequence (wt) from neuraminidase__InfluenzaA__ADL32093

SEQ ID NO: 51352 - RNA, 1410 nt, Artificial Sequence; identical to SEQ ID NO: 51004
  derived and/or modified CDS sequence (wt) from neuraminidase__InfluenzaA__ADL32117

SEQ ID NO: 51353 - RNA, 1410 nt, Artificial Sequence
  derived and/or modified CDS sequence (wt) from neuraminidase__InfluenzaA__ADL32347
augaauccaaaccaaaagauaauaaccauugguucggucuguaugacaauuggaauggcuaacuuaauauuacaaauuggaaacauaaucucaauauggauuagccacucaauucaacuugggaaucaaaaucagauugaaacaugcaaucaaagcgucauuacuuaugaaaacaacacuuggguaaaucagacauauguuaacaucagcaacaccaacuuugcugcuggacagucagugguuuccgugaaauuagcgggcaauuccucucucugcccuguuaguggaugggcuauauacaguaaagacaacaguauaagaaucgguuccaagggggauguguuugucauaagggaaccauucauaucaugcucccccuuggaaugcagaaccuucuucuugacucaaggggccuugcuaaaugacaaacauuccaauggaaccauuaaagacaggagcccauaucgaacccuaaugagcuguccuauuggugaaguuccuucuccauacaacucaagauuugagucagucgcuuggucagcaagugcuugucaugauggcaucaauuggcuaacaauuggaauuucuggcccagacaauggggcaguggcuguguuaaaguacaacggcauaauaacagacacuaucaagaguuggagaaacaauauauugagaacacaagagucugaaugugcauguguaaaugguucuugcuuuacuguaaugaccgauggaccaagugauggacaggccucauacaagaucuucagaauagaaaagggaaagauagucaaaucagucgaaaugaaugccccuaauuaucacuaugaggaaugcuccuguuauccugauucuagugaaaucacaugugugugcagggauaacuggcauggcucgaaucgaccgugggugucuuucaaccagaaucuggaauaucagauaggauacauaugcagugggauuuucggagacaauccacgcccuaaugauaagacaggcaguugugguccaguaucgucuaauggagcaaauggaguaaaaggauuuucauucaaauacggcaaugguguuuggauagggagaacuaaaagcauuaguucaagaaacgguuuugagaugauuugggauccgaacggauggacugggacagacaauaacuucucaauaaagcaagauaucguaggaauaaaugaguggucaggauauagcgggaguuuuguucagcauccagaacuaacagggcuggauuguauaagaccuugcuucuggguugaacuaaucagagggcgacccaaagagaacacaaucuggacuagcgggagcagcauauccuuuugugguguaaacagugacacuguggguuggucuuggccagacggugcugaguugccauuuaccauugacaaguaa

SEQ ID NO: 51354 - RNA, 1410 nt, Artificial Sequence
  derived and/or modified CDS sequence (wt) from neuraminidase__InfluenzaA__ADL32357
augaauccaaaccaaaagauaauaaccauugguucggucuguaugacaauuggaauggcuaacuuaauauuacaaauuggaaacauaaucucaauauggauuagccacucaauucaacuugggaaucaaaaucagauugaaacaugcaaucaaagcgucauuacuuaugaaaacaacacuuggguaaaucagacauauguuaacaucagcaacaccaacuuugcugcuggacagucagugguuuccgugaaauuagcgggcaauuccucucucugcccuguuaguggaugggcuauauacaguaaagacaacaguauaagaaucgguuccaagggggauguguuugucauaagggaaccauucauaucaugcucccccuuggaaugcagaaccuucuucuugacucaaggggccuugcuaaaugacaaacauuccaauggaaccauuaaagacaggagcccauaucgaacccuaaugagcuguccuauuggugaaguucccucuccauacaacucaagauuugagucagucgccuggucagcaagugcuugucaugauggcaucaauuggcuaacaauuggaauuucuggcccagacaauggggcaguggcuguguuaaaguacaacggcauaauaacagacacuaucaagaguuggagaaacaauauauugagaacacaagagucugaaugugcauguguaaaugguucuugcuuuacuguaaugaccgauggaccaagugauggacaggccucauacaagaucuucagaauagaaaagggaaagauagucaaaucagucgaaaugaaugccccuaauuaucacuaugaggaaugcuccuguuauccugauucuagugaaaucacauguguaugcagggauaacuggcauggcucgaaucgaccgugggugucuuucaaccagaaucuggaauaucagauaggauacauaugcagugggauuuucggagacaauccacgcccuaaugauaagacaggcaguugugguccaguaucgucuaauggagcaaauggaguaaaaggauuuucauucaaauacggcaaugguguuuggauagggagaacuaaaagcauuaguucaagaaacgguuuugagaugauuugggauccgaacggauggacugggacagacaauaacuucucaauaaagcaagauaucguaggaauaaaugaguggucaggauauagcgggaguuuuguucagcauccagaacuaacagggcuggauuguauaagaccuugcuucuggguugaacuaaucagagggcgacccaaagagaacacaaucuggacuagcgggagcagcauauccuuuugugguguaaacagugacacuguggguuggucuuggccagacggugcugaguugccauuuaccguugacaaguaa

SEQ ID NO: 51355 - RNA, 1410 nt, Artificial Sequence; identical to SEQ ID NO: 50116
  derived and/or modified CDS sequence (wt) from neuraminidase__InfluenzaA__ADL32367

SEQ ID NO: 51356 - RNA, 1410 nt, Artificial Sequence; identical to SEQ ID NO: 50236
  derived and/or modified CDS sequence (wt) from neuraminidase__InfluenzaA__ADL32377

SEQ ID NO: 51357 - RNA, 1410 nt, Artificial Sequence; identical to SEQ ID NO: 48750
  derived and/or modified CDS sequence (wt) from neuraminidase__InfluenzaA__ADL32387

SEQ ID NO: 51358 - RNA, 1410 nt, Artificial Sequence; identical to SEQ ID NO: 50116
  derived and/or modified CDS sequence (wt) from neuraminidase__InfluenzaA__ADL32397

SEQ ID NO: 51359 - RNA, 1410 nt, Artificial Sequence; identical to SEQ ID NO: 50236
  derived and/or modified CDS sequence (wt) from neuraminidase__InfluenzaA__ADL32407

SEQ ID NO: 51360 - RNA, 1410 nt, Artificial Sequence; identical to SEQ ID NO: 49215
  derived and/or modified CDS sequence (wt) from neuraminidase__InfluenzaA__ADL32417

SEQ ID NO: 51361 - RNA, 1410 nt, Artificial Sequence
  derived and/or modified CDS sequence (wt) from neuraminidase__InfluenzaA__ADL32427
augaauccaaaccaaaagauaauaaccauugguucggucuguaugacaauuggaauggcuaacuuaauauuacaaauuggaaacauaaucucaauauggauuagccacucaauucaacuugggaaucaaaaucagauugaaacaugcaaucaaagcgucauuacuuaugaaaacaacacuuggguaaaucagacauauguuaacaucagcaacaccaacuuugcugcuggacagucagugguuuccgugaaauuagcgggcaauuccucucucugcccuguuaguggaugggcuauauacaguaaagacaacaguauaagaaucgguuccaagggggauguguuugucauaagggaaccauucauaucaugcucccccuuggaaugcagaaccuucuucuugacucaaggggccuugcuaaaugacaaacauuccaauggaaccauuaaagacaggagcccauaucgaacccuaaugagcuguccuauuggugaaguucccucuccauacaacucaagauuugagucagucgcuuggucagcaagugcuugucaugauggcaucaauuggcuaacaauuggaauuucuggcccagacaauggggcaguggcuguguuaaaguacaacggcauaauaacagacacuaucaagaguuggagaaacaauauauugagaacacaagagucugaaugugcauguguaaaugguucuugcuuuacuguaaugaccgauggaccaagugauggacaggccucauacaagaucuucagaauagaaaagggaaagauagucaaaucagucgaaaugaaugccccuaauuaucacuaugaggaaugcuccuguuauccugauucuagugaaaucacaugugugugcagggauaacuggcauggcucgaaucgaccguggguaucuuucaaccagaaucuggaauaucagauaggauacauaugcagugggauuuucggagacaauccacgcccuaaugauaagacaggcaguugugguccaguaucgucuaauggagcaaauggaguaaaaggauuuucauucaaauacggcaaugguguuuggauagggagaacuaaaagcauuaguucaagaaacgguuuugagaugauuugggauccgaacggauggacugggacagacaauaacuucucaauaaagcaagauaucguaggaauaaaugaguggucaggauauagcgggaguuuuguucagcauccagaacuaacagggcuggauuguauaagaccuugcuucuggguugaacuaaucagagggcgacccaaagagaaaacaaucuggacuagcgggagcaucauauccuuuugugguguaaacagugacacuguggguuggucuuggccggacggugcugaguugccauuuaccauugacaaguaa

SEQ ID NO: 51362 - RNA, 1410 nt, Artificial Sequence
  derived and/or modified CDS sequence (wt) from neuraminidase__InfluenzaA__ADL32447
augaauccaaaccaaaagauaauaaccauugguucggucuguaugacaauuggaauggcuaacuuaauauuacaaauuggaaacauaaucucaauauggauuagccacucaauucaacuugggaaucaaaaucagauugaaacaugcaaucaaagcgucauuacuuaugaaaacaacacuuggguaaaucagacauauguuaacaucagcaacaccaacuuugcugcuggacagucagugguuuccgugaaauuagcgggcaauuccucucucugcccuguuaguggaugggcuauauacaguaaagacaacaguauaagaaucgguuccaagggggauguguuugucauaagggaaccauucauaucaugcucccccuuggaaugcagaaccuucuucuugacucaaggggccuugcuaaaugacaaacauuccaauggaaccauuaaagacaggagcccauaucgaacccuaaugagcuguccuauuggugaaguucccucuccauacaacucaagauuugagucagucgcuuggucagcaagugcuugucaugauggcaucaauuggcuaacaauuggaauuucuggcccagacaauggggcaguggcuguguuaaaguacaacggcauaauaacagacacuaucaagaguuggagaaacaauauauugagaacacaagagucugaaugugcauguguaaaugguucuugcuuuacuguaaugaccgauggaccaagugauggacaggccucauacaagaucuucagaauagaaaagggaaagauagucaaaucagucgaaaugaaugccccuaauuaucacuaugaggaaugcuccuguuauccugauucuagugaaaucacaugugugugcagggauaacuggcauggcucgaaucgaccguggguaucuuucaaccagaaucuggaauaucagauaggauacauaugcagugggauuuucggagacaauccacgcccuaaugauaagacaggcaguugugguccagugucgucuaauggagcaaauggaguaaaaggauuuucauucaaauacggcaaugguguuuggauagggagaacuaaaagcauuaguucaagaaacgguuuugagaugauuugggauccgaacggauggacugggacagacaauaacuucucaauaaagcaagauaucguaggaauaaaugaguggucaggauauagcgggaguuuuguucagcauccagaacuaacagggcuggauuguauaagaccuugcuucuggguugaacuaaucagagggcgacccaaagagaacacaaucuggacuagcgggagcagcauauccuuuugugguguaaacagugacacuguggguuggucuuggccggacggugcugaguugccauuuaccauugacaaguaa

SEQ ID NO: 51363 - RNA, 1410 nt, Artificial Sequence
  derived and/or modified CDS sequence (wt) from neuraminidase__InfluenzaA__ADL32457
augaauccaaaccaaaagauaauaaccauugguucggucuguaugacaauuggaauggcuaacuuaauauuacaaauuggaaacauaaucucaauauggauuagccacucaauucaacuugggaaucaaaaucagauugaaacaugcaaucaaagcgucauuacuuaugaaaacaacacuuggguaaaucagacauauguuaacaucagcaacaccaacuuugcugcuggacagucagugguuuccgugaaauuagcgggcaauuccucucucugcccuguuaguggaugggcuauauacaguaaagacaagaguauaagaaucgguuccaagggggauguguuugucauaagggaaccauucauaucaugcucccccuuggaaugcagaaccuucuucuugacucaaggggccuugcuaaaugacaaacauuccaauggaaccauuaaagacaggagcccauaucgaacccuaaugagcuguccuauuggugaaguucccucuccauacaacucaagauuugagucagucgcuuggucagcaagugcuugucaugauggcaucaguuggcuaacaauuggaauuucuggcccagacaauggggcaguggcuguguuaaaguacaacggcauaauaacagacacuaucaagaguuggagaaacaauauauugagaacacaagagucugaaugugcauguguaaaugguucuugcuuuacuguaaugaccgauggaccaagugauggacaggccucauacaagaucuucagaauagaaaagggcaagauagucaaaucagucgaaaugaaugccccuaauuaucacuaugaggaaugcuccuguuauccugauucuagugaaaucacaugugugugcagggauaacuggcauggcucgaaucgaccgugggugucuuucaaccagaaucuggaauaucagauaggauacauaugcagugggauuuucggagacaauccacgcccuaaugauaagacaggcaguugugguccaguaucgucuaauggagcaaauggaguaaaaggauuuucauucaaauacggcaaugguguuuggauagggagaacuaaaagcauuaguucaagaaacgguuuugagaugauuugggauccgaacggauggacugggacagacaauaacuucucaauaaagcaagauaucguaggaauaaaugaguggucaggauauagcgggaguuuuguucagcauccagaacuaacagggcuggauuguauaagaccuugcuucuggguugaacuaaucagagggcgacccaaagagaacacaaucuggacuagcgggagcagcauauccuuuugugguguaagcagugacacuguggguuggucuuggccagacggugcugaguugccauuuaccauugacaaguaa

SEQ ID NO: 51364 - RNA, 1410 nt, Artificial Sequence; identical to SEQ ID NO: 51118
  derived and/or modified CDS sequence (wt) from neuraminidase__InfluenzaA__ADL32487

SEQ ID NO: 51365 - RNA, 1410 nt, Artificial Sequence
  derived and/or modified CDS sequence (wt) from neuraminidase__InfluenzaA__ADL32497
augaauccaaaccaaaagauaauaaccauugguucggucuguaugacaauuggaauggcuaacuuaauauuacaaauuggaaacauaaucucaauauggauuagccacucaauucaacuugggaaucaaaaucagauugaaacaugcaaucaaagcgucauuacuuaugaaaacaacacuuggguaaaucagacauauguuaacaucagcaacaccaacuuugcugcuggacaaucagugguuuccgugaaauuagcgggcaauuccucucucugcccuguuaguggaugggcuauauacaguaaagacaacaguauaagaaucgguuccaagggggacguguuugucauaagggaaccauucauaucaugcucccccuuggaaugcagaaccuucuucuugacucaaggggccuugcuaaaugacaaacauuccaauggaaccauuaaagacaggagcccauaucgaacccuaaugagcuguccuauuggugaaguucccucuccauacaacucaagauuugagucagucgcuuggucagcaagugcuugucaugauggcaucaauuggcuaacaauuggaauuucuggcccagacaauggggcaguggcuguguuaaaguacaacggcauaauaacagacacuaucaagaguuggagaaacaauauauugagaacacaagagucugaaugugcauguguaaaugguucuugcuuuacuguaaugaccgauggaccaagugauggacaggccucauacaagaucuucagaauagaaaagggaaagauagucaaaucagucgaaaugaaugccccuaauuaucacuaugaggaaugcuccuguuauccugauucuagugaaaucacauguguaugcagggauaacuggcauggcucgaaucgaccgugggugucuuucaaccagaaucuggaauaucagauaggauacauaugcagugggauuuucggagacaauccacgcccuaaugauaagacaggcaguugugguccaguaucgucuaauggagcaaauggaguaaaaggauuuucauucaaauacggcaaugguguuuggauagggagaacuaaaagcauuaguucaagaaacgguuuugagaugauuugggauccgaacggauggacugggacagacaauaacuucucaauaaagcaagauaucguaggaauaaaugaguggucaggauauagcgggaguuuuguucagcauccagaacuaacagggcuggauuguauaagaccuugcuucuggguugaacuaaucagagggcgacccaaagagaacacaaucuggacuagcgggagcagcauauccuuuugugguguaaacagugacacuguggguuggucuuggccagacggugcugaguugccauuuaccauugacaaguaa

SEQ ID NO: 51366 - RNA, 1410 nt, Artificial Sequence
  derived and/or modified CDS sequence (wt) from neuraminidase__InfluenzaA__ADL32507
augaauccaaaccaaaagauaauaaccauugguucggucuguaugacaauuggaauggcuaacuuaauauuacaaauuggaaacauaaucucaauauggauuagccacucaauucaacuugggaaucaaaaucagauugaaacaugcaaucaaagcgucauuacuuaugaaaacaacacuuggguaaaucagacauauguuaacaucagcaacaccaacuuugcugcuggacagucagugguuuccgugaaauuagcgggcaauuccucucucugcccuguuaguggaugggcuauauacaguaaagacaacaguauaagaaucgguuccaagggggauguguuugucauaagggaaccauucauaucaugcucccccuuggaaugcagaaccuucuucuugacucaaggggccuugcuaaaugacaaacauuccaauggaaccauuaaagacaggagcccauaucgaacccuaaugagcuguccuauuggugaaguucccucuccauacaacucaagauuugagucagucgcuuggucagcaagugcuugucaugauggcaucaauuggcuaacaauuggaauuucuggcccagacaauggggcaguggcuguguuaaaguacaacggcauaauaacagacacuaucaagaguuggagaaacaauauauugagaacacaagagucugaaugugcauguguaaaugguucuugcuuuacuguaaugaccgauggaccaagugauggacaggccucauacaagaucuucagaauagaaaagggaaagauagucaaaucagucgaaaugaaugccccuaauuaucacuaugaggaaugcuccuguuauccugauucuagugaaaucacaugugugugcagggauaacuggcauggcucgaaucgaccguggguaucuuucaaccagaaucuggaauaucagauaggauacauaugcagugggauuuucggagacaauccacgcccuaaugauaaaacaggcaguugugguccaguaucgucuaauggagcaaauggaguaaaaggauuuucauucaaauacggcaaugguguuuggauagggagaacuaaaagcauuaguucaagaaacgguuuugagaugauuugggauccgaacggauggacugggacagacaauaacuucucaauaaagcaagauaucguaggaauaaaugaguggucaggauauagcgggaguuuuguucagcauccagaacuaacagggcuggauuguauaagaccuugcuucuggguugaacuaaucagagggcgacccaaagagaacacaaucuggacuagcgggagcagcauauccuuuugugguguaaacagugacacuguggguuggucuuggccggacggugcugaguugccauuuaccauugacaaguaa

SEQ ID NO: 51367 - RNA, 1410 nt, Artificial Sequence; identical to SEQ ID NO: 50719
  derived and/or modified CDS sequence (wt) from neuraminidase__InfluenzaA__ADL32517

SEQ ID NO: 51368 - RNA, 1410 nt, Artificial Sequence
  derived and/or modified CDS sequence (wt) from neuraminidase__InfluenzaA__ADL32527
augaauccaaaccaaaagauaauaaccauugguucggucuguaugacaauuggaauggcuaacuuaauauuacaaauuggaaacauaaucucaauauggauuagccacucaauucaacuugggaaucaaaaucagauugaaacaugcaaucaaagcgucauuacuuaugaaaacaacacuuggguaaaucagacauauguuaacaucagcaacaccaacuuugcugcuggacagucagugguuuccgugaaauuagcgggcaauuccucucucugcccuguuaguggaugggcuauauacaguaaagacaacaguauaagaaucggcuccaagggggauguguuugucauaagggaaccauucauaucaugcucccccuuggaaugcagaaccuucuucuugacucaaggggccuugcuaaaugacaaacauuccaauggaaccauuaaagacaggagcccauaucgaacccuaaugagcuguccuauuggugaaguucccucuccauacaacucaagauuugagucagucgcuuggucagcaagugcuugucaugauggcaucaauuggcuaacaauuggaauuucuggcccagacaauggggcaguggcuguguuaaaguacaacggcauaauaacagacacuaucaagaguuggagaaacaauauauugagaacacaagagucugaaugugcauguguaaaugguucuugcuuuacuguaaugaccgauggaccaagugauggacaggccucauacaagaucuucagaauagaaaagggaaagauagucaaaucagucgaaaugaaugccccuaauuaucacuaugaggaaugcuccuguuauccugauucuagugaaaucacaugugugugcagggauaacuggcauggcucgaaucgaccguggguaucuuucaaccagaaucuggaauaucagauaggauacauaugcagugggauuuucggagacaauccacgcccuaaugauaagacaggcaguugugguccaguaucgucuaauggagcaaauggaguaaaaggauuuucauucaaauacggcaaugguguuuggauagggagaacuaaaagcauuaguucaagaaacgguuuugagaugauuugggauccgaacggauggacugggacagacaauaaauucucaauaaagcaagauaucguaggaauaaaugaguggucaggguauagcgggaguuuuguucagcauccagaacuaacagggcuggauuguauaagaccuugcuucuggguugaacuaaucagagggcgacccaaagagaacacaaucuggacuagcgggagcagcauauccuuuugugguguaaacagugacacuguggguuggucuuggccagacggugcugaguugccauuuaccauugacaaguaa

SEQ ID NO: 51369 - RNA, 1410 nt, Artificial Sequence
  derived and/or modified CDS sequence (wt) from neuraminidase__InfluenzaA__ADL32537
augaauccaaaccaaaagauaauaaccauugguucggucuguaugacuauuggaauggcuaacuuaauauuacaaauuggaaacauaaucucaauauggauuagccacucaauucaacuugggaaucaaaaucagauugaaacaugcaaucaaagcgucauuacuuaugaaaacaacacuuggguaaaucagacauauguuaacaucagcaacaccaacuuugcugcuggacagucagugguuuccgugaaauuagcgggcaauuccucucucugcccuguuaguggaugggcuauauacaguaaagacaacaguauaagaaucgguuccaagggggauguguuugucauaagggaaccauucauaucaugcucccccuuggaaugcagaaccuucuucuugacucaaggggccuugcuaaaugacaaacauuccaauggaaccauuaaagacaggagcccauaucgaacccuaaugagcuguccuauuggugaaguucccucuccauacaacucaagauuugagucagucgcuuggucagcaagugcuugucaugauggcaucaauuggcuaacaauuggaauuucuggcccagacaauggggcaguggcuguguuaaaguacaacggcauaauaacagacacuaucaagaguuggagaaacaauauauugagaacacaagagucugaaugugcauguguaaaugguucuugcuuuacuguaaugaccgauggaccaagugauggacaggccucauacaagaucuucagaauagaaaagggaaagauagucaaaucagucgaaaugaaugccccuaauuaucacuaugaggaaugcuccuguuauccugauucuagugaaaucacauguguaugcagggauaacuggcauggcucgaaucgaccgugggugucuuucaaucagaaucuggaauaucagauaggauacauaugcagugggauuuucggagacaauccacgcccuaaugauaaaacaggcaguugugguccaguaucgucuaauggagcaaauggaguaaaaggauuuucauucaaauacggcaaugguguuuggauagggagaacuaaaagcauuaguucaagaaacgguuuugagaugauuugggauccgaacggauggacugggacagacaauaacuucucaauaaagcaagauaucguaggaauaaaugaguggucaggauauagcgggaguuuuguucagcauccagaacuaacagggcuggauuguauaagaccuugcuucuggguugaacuaaucagagggcgacccaaagagaacacaaucuggacuagcgggagcagcauauccuuuugugguguaaacagugacacuguggguuggucuuggccagacggugcugaguugccauuuaccauugacaaguaa

SEQ ID NO: 51370 - RNA, 1410 nt, Artificial Sequence
  derived and/or modified CDS sequence (wt) from neuraminidase__InfluenzaA__ADL32547
augaauccaaaccaaaagauaauaaccauugguucggucuguaugacaauuggaauggcuaacuuaauauuacaaauuggaaacauaaucucaauauggauuagccacucaauucaacuugggaaucaaaaucagauugaaacaugcaaucaaagcgucauuacuuaugaaaacaacacuuggguaaaucagacauauguuaacaucagcaacaccaacuuugcugcuggacagucagugguuuccgugaaauuagcgggcaauuccucucucugcccuguuaguggaugggcuauauacaguaaagacaacaguauaagaaucgguuccaagggggauguguuugucauaagggaaccauucauaucaugcucccccuuggaaugcagaaccuucuucuugacucaaggggccuugcuaaaugacaaacauuccaauggaaccauuaaagacaggagcccauaucgaacccuaaugagcuguccuauuggugaaguucccucuccauacaacucaagauuugagucagucgcuuggucagcaagugcuugucaugauggcaucaauuggcuaacaauuggaauuucuggcccagacaauggggcaguggcuguguuaaaguacaacggcauaauaacagacacuaucaagaguuggagaaacaauauauugagaacacaagagucugaaugugcauguguaaaugguucuugcuuuacuauaaugaccgauggaccaagugauggacaggccucauacaagaucuucagaauagaaaagggaaagauagucaaaucagucgaaaugaaugccccuaauuaucacuaugaggaaugcuccuguuauccugauucuagugaaaucacaugugugugcagggauaacuggcauggcucgaaucgaccguggguaucuuucaaccagaaucuggaauaucagauaggauacauaugcagugggauuuucggagacaauccacgcccuaaugauaagacaggcaguugugguccaguaucgucuaauggagcaaauggaguaaaaggauuuucauucaaauacggcaaugguguuuggauagggagaacuaaaagcauuaguucaagaaacgguuuugagaugauuugggauccgaacggauggacugggacagacaauaacuucucaauaaagcaagauaucguaggaauaaaugaguggucaggauauagcgggaguuuuguucagcauccagaacuaacagggcuggauuguauaagaccuugcuucuggguugaacuaaucagagggcgacccaaagagaacacaaucuggacuagcgggagcagcauauccuuuugugguguaaacagugacacuguggguuggucuuggccggacggugcugaguugccauuuaccauugacaaguaa

SEQ ID NO: 51371 - RNA, 1410 nt, Artificial Sequence; identical to SEQ ID NO: 50176
  derived and/or modified CDS sequence (wt) from neuraminidase__InfluenzaA__ADL32673

SEQ ID NO: 51372 - RNA, 1410 nt, Artificial Sequence
  derived and/or modified CDS sequence (wt) from neuraminidase__InfluenzaA__ADL32683
augaauccaaaccaaaagauaauaaccauugguucggucuguaugacaauuggaauggcuaacuuaauauuacaaauuggaaacauaaucucaauauggauuagccacucaauucaacuugggaaucaaaaucagauugaaacaugcaaucaaagcgucauuaccuaugaaaacaacacuuggguaaaucagacauauguuaacaucagcaacaccaacuuugcugcuggacagucagugguuuccgugaaauuagcgggcaauuccucucucugcccuguuaguggaugggcuauauacaguaaagacaacaguauaagaaucgguuccaagggggauguguuugucauaagggaaccauucauaucaugcucccccuuggaaugcagaaccuucuucuugacucaaggggccuugcuaaaugacaaacauuccaauggaaccauuaaagacaggagcccauaucgaacccuaaugagcuguccuauuggugaaguucccucuccauacaacucaagauuugagucagucgcuuggucagcaagugcuugucaugauggcaucaauuggcuaacaauuggaauuucuggcccagacaauggagcaguggcuguguuaaaguacaacggcauaauaacagacacuaucaagaguuggagaaacaauauauugagaacacaagagucugaaugugcauguguaaaugguucuugcuuuacuguaaugaccgauggaccaagugauggacaggccucauacaagaucuucagaauagaaaagggaaagauagucaaaucagucgaaaugaaugccccuaauuaucacuaugaggaaugcuccuguuauccugauucuagugaaaucacaugugugugcagggauaacuggcauggcucgaaucgaccgugggugucuuucaaccagaaucuggaauaucagauaggauacauaugcagugggauuuucggagacaauccacgcccuaaugauaagacaggcaguugugguccaguaucgucuaauggagcaaauggaguaaaaggauuuucauucaaauacggcaaugguguuuggauagggagaacuaaaagcauuaguucaagaaacgguuuugagaugauuugggauccgaacggauggacugggacagacaauaacuucucaauaaagcaagauaucguaggaauaaaugaguggucaggauauagcgggaguuuuguucagcauccagaacuaacagggcuggauuguauaagaccuugcuucuggguugaacuaaucagaggacgacccaaagagaacacaaucuggacuagcgggagcagcauauccuuuugugguguaaacagugacacuguggguuggucuuggccagacggugcugaguugccauuuaccauugacaaguaa

SEQ ID NO: 51373 - RNA, 1410 nt, Artificial Sequence; identical to SEQ ID NO: 48749
  derived and/or modified CDS sequence (wt) from neuraminidase__InfluenzaA__ADL32693

SEQ ID NO: 51374 - RNA, 1410 nt, Artificial Sequence
  derived and/or modified CDS sequence (wt) from neuraminidase__InfluenzaA__ADL32703
augaauccaaaccaaaagauaauaaccauugguucggucuguaugacaauuggaauggcuaacuuaauauuacaaauuggaaacauaaucucaauauggauuagccacucaauucaacuugggaaucaaaaucagauugaaacaugcaaucaaagcgucauuacuuaugaaaacaacacuuggguaaaucagacauauguuaacaucagcaacaccaacuuugcugcuggacagucagugguuuccgugaaauuagugggcaauuccucucucugcccuguuaguggaugggcuauauacaguaaagacaacaguguaagaaucgguuccaagggggauguguuugucauaagggaaccauucauaucaugcucccccuuggaaugcagaaccuucuucuugacucaaggggccuugcuaaaugacaaacauuccaauggaaccauuaaagacaggagcccauaucgaacccuaaugagcuguccuauuggugaaguucccucuccauacaacucaagauuugagucagucgcuuggucagcaagugcuugucaugauggcaucaauuggcuaacaauuggaauuucuggcccagacaauggggcaguggcuguguuaaaguacaacggcauaauaacagacacuaucaagaguuggagaaacaauauauugagaacacaagagucugaaugugcauguguaaaugguucuugcuuuacuguaaugaccgauggaccaaguaauggacaggccucauacaagaucuucagaauagaaaagggaaagauagucaaaucagucgaaaugaaugccccuaauuaucacuaugaggaaugcuccuguuauccugauucuagugaaaucacaugugugugcagggauaacuggcauggcucgaaucgaccgugggugucuuucaaccagaaucuggaauaucagauaggauacauaugcagugggauuuucggagacaauccacgcccuaaugauaagacaggcaguugugguccaguaucgucuaauggagcaaauggaguaaaaggauuuucauucaaauacggcaaugguguuuggauagggaggacuaaaagcauuaguucaagaaacgguuuugagaugauuugggauccgaacggauggacugggacagacaauaacuucucaauaaagcaagauaucguaggaauaaaugaguggucaggauauagcgggaguuuuguucagcauccagaacuaacagggcuggauuguauaagaccuugcuucuggguugaacuaaucagagggcgacccaaagagaacacaaucuggacuagcgggagcagcauauccuuuugugguguaaacagugacacuguggguuggucuuggccagacggugcugaguugccauuuaccauugacaaguaa

SEQ ID NO: 51375 - RNA, 1410 nt, Artificial Sequence; identical to SEQ ID NO: 48749
  derived and/or modified CDS sequence (wt) from neuraminidase__InfluenzaA__ADL32713

SEQ ID NO: 51376 - RNA, 1410 nt, Artificial Sequence
  derived and/or modified CDS sequence (wt) from neuraminidase__InfluenzaA__ADL32723
augaauccaaaccaaaagauaauaaccauugguucggucuguaugacaauuggaauggcuaacuuaauauuacaaauuggaaacauaaucucaauauggauuagccacucaauucaacuugggaaucaaaaucagauugaaacaugcaaucaaagcgucauuacuuaugaaaacaacacuuggguaaaucagacauauguuaacaucagcaacaccaacuuugcugcuggacagucagugguuuccgugaaauuagcgggcaauuccucucucugcccuguuaguggaugggcuauauacaguaaagacaacaguauaagaaucgguuccaagggggauguguuugucauaagggaaccauucauaucaugcucccccuuggaaugcagaaccuucuucuugacucaaggggccuugcuaaaugacaaacauuccaauggaaccauuaaagacaggagcccauaucgaacccuaaugagcuguccuauuggugaaguucccucuccauacaacucaagauuugagucagucgcuuggucagcaagugcuugucaugauggcaucaauuggcuaacaauuggaauuucuggcccagacaauggggcaguggcuguguuaaaguacaacggcauaauaacagacacuaucaagaguuggagaaacaauauauugagaacacaagagucugaaugugcauguguaaaugguucuugcuuuacuguaaugaccgauggaccaagugauggacaggccucauacaagaucuucagaauagaaaagggaaagauagucaaaucagucgaaaugaaugccccuaauuaucacuaugaggaaugcuccuguuauccugauucuagugaaaucacauguguuugcagggauaacuggcauggcucgaaucggccgugggugucuuucaaccagaaucuggaauaucagauaggauacauaugcagugggauuuucggagacaauccacgcccuaaugauaagacaggcaguugugguccaguaucgucuaauggagcaaauggaguaaaaggauuuucauucaaauacggcaaugguguuuggauagggagaacuaaaagcauuaguucaagaaacgguuuugagaugauuugggauccgaacggauggacugggacagacaauaacuucucaauaaagcaagauaucguaggaauaaaugaguggucaggauauagcgggaguuuuguucagcauccagaacuaacagggcuggauuguauaagaccuugcuucuggguugaacuaaucagagggcgacccaaagagaacacaaucuggacuagcgggagcagcauauccuuuugugguguaaacagugacacuguggguuggucuuggccagacggugcugaguugccauuuaccauugacaaguaa

SEQ ID NO: 51377 - RNA, 1410 nt, Artificial Sequence; identical to SEQ ID NO: 50431
  derived and/or modified CDS sequence (wt) from neuraminidase__InfluenzaA__ADL32733

SEQ ID NO: 51378 - RNA, 1410 nt, Artificial Sequence
  derived and/or modified CDS sequence (wt) from neuraminidase__InfluenzaA__ADL32743
augaauccaaaccaaaagauaauaaccauugguucggucuguaugacaauuggaauggcuaacuuaauauuacaaauuggaaacauaaucucaauauggauuagccacucaauucaacuugggaaucaaaaucagauugaaacaugcaaucaaagcgucauuacuuaugaaaacaacacuuggguaaaucagacauauguuaacaucagcaacaccaacuuugcugcuggacagucagugguuuccgugaaauuagcgggcaauuccucucucugcccuguuaguggaugggcuauauacaguaaagacaacaguguaagaaucgguuccaagggggauguguuugucauaagggaaccauucauaucaugcucccccuuggaaugcagaaccuucuucuugacucaaggggccuugcuaaaugacaaacauuccaauggaaccauuaaagacaggagcccauaucgaacccuaaugagcuguccuauuggugaaguucccucuccauacaacucaagauuugagucagucgcuuggucagcaagugcuugucaugauggcaucaauuggcuaacaauuggaauuucuggcccagacaauggggcaguggcuguguuaaaguacaacggcguaauaacagacacuaucaagaguuggagaaacaauauauugagaacacaagagucugaaugugcauguguaaaugguucuugcuuuacuguaaugaccgauggaccaaguaauggacaggccucauacaagaucuucagaauagaaaagggaaagauagucaaaucagucgaaaugaaugccccuaauuaucacuaugaggaaugcuccuguuauccugauucuagugaaaucacaugugugugcagggauaacuggcauggcucgaaucgaccgugggugucuuucaaccagaaucuggaauaucagauaggauacauaugcagugggauuuucggagacaauccacgcccuaaugauaagacaggcaguugugguccaguaucgucuaauggagcaaauggaguaaaaggauuuucauucaaauacggcaaugguguuuggauagggagaacuaaaagcauuaguucaagaaacgguuuugagaugauuugggauccuaacggauggacugggacagacaauaacuucucaauaaagcaagauaucguaggaauaaaugaguggucaggauauagcgggaguuuuguucagcauccagaacuaacagggcuggauuguauaagaccuugcuucuggguugaacuaaucagagggcgacccaaagagaacacaaucuggacuagcgggagcagcauauccuuuugugguguaaacagugacacuguggguuggucuuggccagacggugcugaguugccauuuaccauugacaaguaa

SEQ ID NO: 51379 - RNA, 1410 nt, Artificial Sequence
  derived and/or modified CDS sequence (wt) from neuraminidase__InfluenzaA__ADL39139
augaauccaaaucaaaagauaauaacgauuggcucuguuucucucaccauuuccacaauaugcuucuucaugcaaauugccaucuugauaacuacuguaacauugcauuucaagcaauaugaauucaacucccccccaaacaaccaagugaugcugagugaaccaacaauaauagaaagaaacauaacagagauaguguaucugaccaacaccaccauagagaaggaaauaugccccaaacuagcagaauacagaaauuggucaaagccgcaaugugacauuacaggguuugcaccuuuuucuaaggacaauucgauuaggcuuuccgcugguggggacaucugggugacaagagaaccuuaugugucaugcgauccugacaaguguuaucaauuugcccuuggacagggaacaacacuaaacaacguacauucaaauaacacaguacgugagaggaccccuuaucggacccuauugaugaaugaguuagguguuccuuuucaucuggggaccaagcaagugugcauagcaugguccagcucaaguugucacgauggaaaagcauggcugcauguuuguauaacuggggaugauaaaaaugcaacugcuagcuucauuuacaaugggaggcuuguagauaguguuguuucaugguccaaagaaauccucaggacccaggagucagaaugcguuuguaucaauggaacuuguacaguaguaaugacugaugggagugcuucaggaaaagcugauacuaaaauacuauucauugaggaggggaaaaucguucauacuagcacauugucaggaagugcucagcaugucgaagagugcuccugcuauccucgauauccuggugucagaugugucugcagagacaacuggaaaggauccaauaggcccaucguagauauaaacauaaaggaucauagcauugucuccaguuauguguguucaggacuuguuggagacacacccagaaaaaacgacagcuccagcaguagccauuguuuggauccuaacaaugaggaagguggucauggggugaaaggcugggccuuugaugauggaaaugacguguggaugggaagaacgaucagcgagaagucacgcuuaggguaugaaaccuucaaagucauugaaggcugguccaacccuaaguccaaauugcagauaaauaggcaagucauaguugacagagguaauagguccgguuauucugguauuuucucuguugaaggcaaaagcugcaucaaucgaugcuuuuauguggaguugauaaggggaagaaaagaggaaacugaagucuuguggaccucaaacaguauuguuguguuuuguggcaccucagguacauauggaacaggcucauggccugauggggcggacaucaaucucaugccuauauaa

SEQ ID NO: 51380 - RNA, 1413 nt, Artificial Sequence
  derived and/or modified CDS sequence (wt) from neuraminidase__InfluenzaA__ADL39150
augaacccaaaucaaaagauaauaaccauuggaucaaucaguauagcaaucggaauaauuagucuaauguugcaaauaggaaauauuauuucaauaugggcuagucacucaauccaaacuggaagucaaaacaacacuggaauaugcaaccaaagaaucaucacauaugaaaacagcaccugggugaaucacacauauguuaauauuaacaacacuaauguuguugcuggagaggacaaaacgucagugacauuggccggcaauucaucucuuuguucuaucaguggaugggcuauauacacaaaagacaacagcauaagaauuggcuccaaaggagauguuuuugucauaagagaaccuuucauaucauguucucacuuggaaugcagaaccuuuuuucugacccaaggcgcucuauuaaaugacaaacauucaaaugggaccguaaaggacagaaguccuuauagggccuuaaugagcuguccucuaggugaagcuccguccccauacaauucaaaguucgaaucaguugcauggucagcaagcgcaugccaugauggcaugggcugguuaacaaucggaauuucugguccagacaauggagcuguggcuguacuaaaauacaacggaauaauaacugaaaccauaaaaaguuggaaaaagcaaauauuaagaacacaagagucugaaugugucuguaugaacgggucauguuucaccauaaugaccgauggcccgaguaauaaagccgccucguacaaaauuuucaagaucgaaaaggggaagguuacuaaaucaauagaguugaaugcacccaauuuuuauuaugaggaaugcuccuguuacccagacacuggcauagugauguguguaugcagggacaacuggcaugguucgaaucgaccuugggugucuuuuaaucaaaauuuggauuaucaaauaggauacaucugcaguggaguguuuggugacaauccgcgucccgaagauggagagggcagcugcaauccagugacuguugauggagcaaacggaguaaaaggguuuucauacaaauaugguaaugguguuuggauaggaaggaccaaaaguaacagacuuagaaagggguuugagaugauuugggauccuaauggauggacaaauaccgacagugauuucucagugaaacaggauguuguagcaauaacugauuggucaggguacagcggaaguuucguccaacauccugaguugacaggauuggacuguauaagaccuugcuucuggguugaguuagucagagggcugccuagagaaaauacaacaaucuggacuagugggagcagcauuucuuuuuguggcguuaauagugauacugcaaacuggucuuggccagacggugcugaguugccguucacuauugacaaguag

SEQ ID NO: 51381 - RNA, 1410 nt, Artificial Sequence
  derived and/or modified CDS sequence (wt) from neuraminidase__InfluenzaA__ADL39172
augaauccaaaucaaaagauaauaacuauuggcucuguuucucucaccauuuccacaauaugcuucuucaugcaaauugccaucuugauaacuacuguaacauugcauuucaagcaauaugaauucaacucccccccaaacaaccaagugaugcugugugaaccaacaauaauagaaagaaacauaacagagauaguguaucugaccaacaccaccauagagaaggaaauaugccccaaacuagcagaauacagaaauuggucaaagccgcaaugugacauuacaggguuugcaccuuuuucuaaggacaauucgauuaggcuuuccgcugguggggacaucugggugacaagagaaccuuaugugucaugcgauccugacaaguguuaucaauuugcccuuggacagggaacaacacuaaacaacguacauucaaauaacacaguacgugauaggaccccuuaucggacccuauugaugaaugaguuagguguuccuuuucaucuggggaccaagcaagugugcauagcaugguccagcucaaguugucacgauggaaaagcauggcugcauguuuguauaacgggggaugauaaaaaugcaacugcuagcuucauuuacaaugggaggcuuguagauaguguuguuucaugguccaaagaaauccucaggacccaggagucagaaugcguuuguaucaauggaacuuguacaguaguaaugacugaugggagugcuucaggagaagcugauacuaaaauacuauucauugaggaggggaaaaucguucauacuagcacauugucaggaagugcucagcaugucgaggagugcuccugcuauccucgauauccuggugucagaugugucugcagagacaacuggaaaggauccaauaggcccaucguagauauaaacauaaaggaucauagcauuguuuccaguuauguguguucaggacuuguuggagacacacccagaaaaaacgacagcuccagcaguagccauuguuuggauccuaacaaugaggaagguggucauggggugaaaggcugggccuuugaugauggaaaugacguguggaugggaagaacgaucagcgagaagucacgcuuaggguaugaaaccuucaaagucauugaaggcugguccaacccuaaguccaaauugcagauaaauaggcaagucauaguugacagagguaauagguccgguuauucugguauuuucucuguugaaggcaaaagcugcaucaaucggugcuuuuauguggaguugauaaggggaagaaaagaggaaacugaagucuuguggaccucaaacaguauuguuguguuuuguggcaccucaggcacauauggaacaggcucauggccugauggggcggacaucaaucucaugccuauauaa

SEQ ID NO: 51382 - RNA, 1410 nt, Artificial Sequence
  derived and/or modified CDS sequence (wt) from neuraminidase__InfluenzaA__ADL39183
augaauccaaaucaaaagauaauaacgauuggcucuguuucucucaccauuuccacaauaugcuucuucaugcaaauugccaucuugauaacuacuguaacauugcauuucaagcaauaugaauucaacuccccuccaaacaaccaagugaugcugugugaaccaacaauaauagaaagaaacauaacagagauaguguaucugaccaacaccaccauagagaaggaaauaugccccaaacuagcagaauacagaaauuggucaaagccgcaaugugacauuacaggauuugcaccguuuuccaaggacaauucgauuaggcuuuccgcugguggggacaucuggguaacaagagaaccuuaugugucaugcgauccugacaaguguuaucaauuugcccuuggacagggaacaacacuaaacaacgugcauucaaauaacacaguacgugauaggaccccuuaucggacccuauugaugaaugaguuagguguuccuuuucaucuggggaccaagcaagugugcauagcaugguccagcucaaguugucacgauggaaaagcauggcugcauguuuguauaacgggggaugauaaaaaugcaacugcuagcuucauuuacaaugggaggcuuguagauaguguuguuucaugguccaaagaaauccucaggacccaggagucagaaugcguuuguaucaauggaacuuguacaguaguaaugacugaugggagugcuucaggaaaagcugauacuaaaauacuauucauugaggaggggaaaaucguucauacuagcacauugucaggaagugcucagcaugucgaggagugcuccugcuauccucgauauccuggugucagaugugucugcagagacaacuggaaaggcuccaauaggcccaucguagauauaaacauaaaggaucauagcauuguuuccaguuauguguguucaggacuuguuggagacacacccagaaaaaacgacagcuccagcaguagccauuguuuggauccuaacaaugaagaagguggucauggagugaaaggcugggccuuugaugauggaaaugacguguggaugggaagaacgaucagcgagaagucacgcuugggguaugaaaccuucaaagucauugaaggcugguccaacccuaaguccaaauugcagauaaauaggcaagucauaguugacagagguaauagguccgguuauucugguauuuucucuguugaaggcaaaagcugcaucaaucggugcuuuuauguggaguugauaaggggaagaaaagaggaaacugaagucuuguggaccucaaacaguauuguuguguuuuguggcaccucagguacauauggaacaggcucauggccugauggggcggacaucaaucucaugccuauauaa

SEQ ID NO: 51383 - RNA, 1413 nt, Artificial Sequence
  derived and/or modified CDS sequence (wt) from neuraminidase__InfluenzaA__ADL39194
augaacccaaaucaaaagauaauaaccauuggaucaaucaguauagcaaucggaauaauuagucuaauguugcaaauaggaaguauuauuucaauaugggcuagucacucaauccaaacuggaagucaaaacaacacuggaauaugcaaccaaagaaucaucacauaugaaaacagcaccugggugaaucacacauauguuaauauuaacaacacuaauguuguugcuggagaggacaaaacgucagugacauuggccggcaauucaucucuuuguucuaucaguggaugggcuauauacacaaaagacaacagcauaagaauuggcuccaaaggagauguuuuugucauaagagaaccuuucauaucauguucucacuuggaaugcagaaccuuuuuucugacccaaggcgcucuauuaaaugacaaacauucaaaugggaccguaaaggacagaaguccuuauagggccuuaaugagcuguccucuaggugaagcuccguccccauacaauucaaaguucgaaucaguugcauggucagcaagcgcaugccaugauggcaugggcugguuaacaaucggaauuucugguccagacaauggagcuguggcuguacuaaaauacaacggaauaauaacuggaaccauaaaaaguuggaaaaagcaaauauuaagaacacaagagucugaaugugucuguaugaacgggucauguuucaccauaaugaccgauggcccgaguaauaaagccgccucguacaaaauuuucaagaucgaaaaggggaagguuacuaaaucaauagaguugaaugcacccaauuuuuauuaugaggaaugcuccuguuacccagacacuggcauagugauguguguaugcagggacaacuggcaugguucaaaucgaccuugggugucuuuuaaucaaaauuuggauuaucaaauaggauacaucugcaguggaguguuuggugacaauccgcgucccgaagauggagagggcagcugcaauccagugacuguagauggagcaaacggaguaaaaggguuuucauacaaauaugguaaugguguuuggauaggaaggaccaaaaguaacagacuuagaaagggguuugagaugauuugggauccuaauggauggacaaauaccgacagugauuucucagugaaacaggauguuguggcaauaacugauuggucaggguacagcggaaguuucguccaacauccugaauugacaggauuggacuguauaagaccuugcuucuggguugaguuagucagagggcugccuagagaaaauacaacaaucuggacuagugggagcaguauuucuuuuuguggcguuaauagugauacugcaaacuggucuuggccagacggugcugaguugccguucaccauugacaaguag

SEQ ID NO: 51384 - RNA, 1410 nt, Artificial Sequence; identical to SEQ ID NO: 51227
  derived and/or modified CDS sequence (wt) from neuraminidase__InfluenzaA__ADL39205

SEQ ID NO: 51385 - RNA, 1413 nt, Artificial Sequence; identical to SEQ ID NO: 49924
  derived and/or modified CDS sequence (wt) from neuraminidase__InfluenzaA__ADL39227

SEQ ID NO: 51386 - RNA, 1413 nt, Artificial Sequence
  derived and/or modified CDS sequence (wt) from neuraminidase__InfluenzaA__ADL39238
augaacccaaaucaaaagauaauaaccauuggaucaaucaguauagcaaucggaauaauuagucuaauguugcaaauaggaaguauuauuucaauaugggcuagucacucaauccaaacuggaagucaaaacaacacuggaauaugcaaccaaagaaucaucacauaugaaaacagcaccugggugaaucacacauauguuaauauuaacaacacuaauguuguugcuggagaggacaaaacgucagugacauuggccggcaauucaucucuuuguucuaucaguggaugggcuauauacacaaaagacaacagcauaagaauuggcuccaaaggagauguuuuugucauaagagaaccuuucauaucauguucucacuuggaaugcagaaccuuuuuucugacccaaggcgcucuauuaaaugacaaacauucaaaugggaccguaaaggacagaaguccuuauagggccuuaaugagcuguccucuaggugaagcuccguccccauacaauucaaaauucgaaucaguugcauggucagcaagcgcaugccaugauggcaugggcugguuaacaaucggaauuucugguccagacaauggagcuguggcuguacuaaaauacaacggaauaauaacuggaaccauaaaaaguuggaaaaagcaaauauuaagaacacaagagucugaaugugucuguaugaacgggucauguuucaccauaaugaccgauggcccgaguaauaaagccgccucguacaaaauuuucaagaucgaaaaggggaagguuacuaaaucaauagaguugaaugcacccaauuuuuauuaugaggaaugcuccuguuacccagacacuggcauagugauguguguaugcagggacaacuggcaugguucaaaucgaccuugggugucuuuuaaucaaaauuuggauuaucaaauaggauacaucugcaguggaguguuuggugacaauccgcgucccgaagauggagagggcagcugcaauccagugacuguagauggagcaaacggaguaaaaggguuuucauacaaauaugguaaugguguuuggauaggaaggaccaaaaguaacagacuuagaaagggguuugagaugauuugggauccuaauggauggacaaauaccgacagugauuucucagugaaacaggauguuguagcaauaacugauuggucaggguacagcggaaguuucguccaacauccugaauugacaggauuggacuguauaagaccuugcuucuggguugaguuagucagagggcugccuagagaaaauacaacaaucuggacuagugggagcagcauuucuuuuuguggcguuaauagugauacugcaaacuggucuuggccagacggugcugaguugccguucaccauugacaaguag

SEQ ID NO: 51387 - RNA, 1413 nt, Artificial Sequence
  derived and/or modified CDS sequence (wt) from neuraminidase__InfluenzaA__ADL39249
augaacccaaaucaaaagauaauaaccauuggaucaaucaguauagcaaucggaauaauuagucuaauguugcaaauaggaaguauuauuucaauaugggcuagucacucaauccaaacuggaagucaaaacaacacuggaauaugcaaccaaagaaucaucacauaugaaaacagcaccugggugaaucacacauauguuaauauuaacaacacuaauguuguugcuggagaggacaaaacgucagugacauuggccggcaauucaucucuuuguucuaucaguggaugggcuauauacacaaaagacaacagcauaagaauuggcuccaaaggagauguuuuugucauaagagaaccuuucauaucauguucucacuuggaaugcagaaccuuuuuucugacccaaggcgcucuauuaaaugacaaacauucaaaugggaccguaaaggacagaaguccuuauagggccuuaaugagcuguccucuaggugaagcuccguccccauacaauucaaaguucgaaucaguugcauggucagcaagcgcaugccaugauggcaugggcugguuaacaaucggaauuucugguccagacaauggagcuguggcuguacuaaaauacaacggaauaauaacuggaaccauaaaaaguuggaaaaagcaaauauuaagaacacaagagucugaaugugucuguaugaacgggucauguuucaccauaaugaccgauggcccgaguaauaaagccgccucguacaaaauuuucaagaucgaaaaggggaagguuacuaaaucaauagaguugaaugcacccaauuuuuauuaugaggaaugcuccuguuacccagacacuggcauagugauguguguaugcagggacaacuggcaugguucaaaucgaccuugggugucuuuuaaucaaaauuuggauuaucaaauaggauacaucugcaguggaguguuuggugacaauccgcgucccgaagauggagagggcagcugcaauccagugacuguagauggagcaaacggagugaaaggguuuucauacaaauaugguaaugguguuuggauaggaaggaccaaaaguaacagacuuagaaagggguuugagaugauuugggauccuaauggauggacaaauaccgacagugauuucucagugaaacaggauguuguagcaauaacugauuggucaggguacagcggaaguuucguccaacauccugaauugacaggauuggacuguauaagaccuugcuucuggguugaguuagucagagggcugccuagagaaaauacaacaaucuggacuagugggagcagcauuucuuuuuguggcguuaauagugauacugcaaacuggucuuggccagacggugcugaguugccguucaccauugacaaguag

SEQ ID NO: 51388 - RNA, 1413 nt, Artificial Sequence
  derived and/or modified CDS sequence (wt) from neuraminidase__InfluenzaA__ADL39260
augaacccaaaucaaaagauaauaaccauuggaucaaucaguauagcaaucggaauaauuagucuaauguugcaaauaggaaauauuauuucaauaugggcuagucacucaauccaaacuggaagucaaaacaacacuggaauaugcaaccaaagaaucaucacauaugaaaacagcaccugggugaaucacacauauguuaauauuaacaacacuaauguuguugcuggagaggacaaaacuucagugacauuggccggcaauucaucucuuuguucuaucaguggaugggcuauauacacaaaagacaacagcauaagaauuggcuccaaaggagauguuuuugucauaagagaaccuuucauaucauguucucacuuggaaugcagaaccuuuuuucugacccaaggcgcucuauuaaaugacaaacauucaaaugggaccguaaaggacagaaguccuuauagggccuuaaugagcuguccucuaggugaagcuccguccccauacaauucaaaguucgaaucaguugcauggucagcaagcgcaugccaugauggcaugggcugguuaacaaucggaauuucugguccagacaauggagcuguggcuguacuaaaauacaacggaauaauaacuggaaccauaaaaaguuggaaaaagcaaauauuaagaacacaagagucugaaugugucugcaugaacgggucauguuucaccauaaugaccgauggcccgaguaauaaggccgccucguacaaaauuuucaagauugaaaaggggaagguuacuaaaucaauagaguugaaugcacccaauuuuuauuaugaggaaugcuccuguuacccagacacuggcauagugauguguguaugcagggacaacuggcaugguucaaaucgaccuugggugucuuuuaaucaaaacuuggauuaucaaauaggauacaucugcaguggaguauuuggugacaauccgcgucccgaagauggagagggcagcugcaauccagugacuguugauggagcaaacggaguaaaaggguuuucauacaaauaugguaaugguguuuggauaggaaggaccaaaaguaacagacuuagaaagggguuugagaugauuugggauccuaauggauggacaaauaccgacagugauuucucagugaaacaggauguuguagcaauaacugauuggucaggguacagcggaaguuucguccaacauccugaguuaacaggauuggacuguauaagaccuugcuucuggguugaguuagucagagggcugccuagagaaaauacaacaaucuggacuagugggagcagcauuucuuuuuguggcguuaauagugauacugcaaacuggucuuggccagacggugcugaguugccguucaccaucgacaaguag

SEQ ID NO: 51389 - RNA, 1410 nt, Artificial Sequence
  derived and/or modified CDS sequence (wt) from neuraminidase__InfluenzaA__ADL39282
augaauccaaaucaaaagauaauaacgauuggcucuguuucucucaccauuuccacaauaugcuucuucaugcaaauugccaucuugauaacuacuguaacauugcauuucaagcaauaugaauucaacuccccuccaaacaaccaagugaugcugugugaaccaacaauaauagaaaaaaacauaacagagauaguguaucugaccaacaccaccauagagaaggaaauaugccccagacuagcagaauacagaaauuggucaaagccgcaaugugacauuacaggauuugcaccuuuuucuaaggacaauucgauuaggcuuuccgcugguggggacaucugggugacaagagaaccuuaugugucaugcgauccugacaaguguuaucaauuugcccuuggacagggaacaacacuaaacaacgugcauucaaauaacaaaguacgugauaggaccccuuaucggacccuauugaugaaugaguuagguguuccuuuucaucuggggaccaagcaagugugcauagcaugguccagcucaaguugucacgauggaaaagcauggcugcauguuuguauaacgggggaugauaaaaaugcaacugcuagcuucauuuacaaugggaggcuuguagauaguguuguuucaugguccaaagaaauccucaggacccaggagucagaaugcguuuguaucaauggaacuuguacaguaguaaugacugaugggagugcuucaggaaaagcugauacuaaaauacuauucauugaggaggggaaaaucguucauacuagcacauugucaggaagugcucagcaugucgaggagugcuccugcuauccucgauauccuggugucagaugugucugcagagacaacuggaaaggcuccaauaggcccaucguagauauaaacauaaaggaucauagcauuguuuccaguuauguguguucaggacuuguuggagacacacccagaaaaaacgacagcuccagcaguagccauuguuuggauccuaacaaugaagaagguggucauggagugaaaggcugggccuuugaugauggaaaugacguguggaugggaagaacgaucagcgagaagucacgcuugggguaugaaaccuucaaagucauugaaggcugguccaacccuaaguccaaauugcagauaaauaggcaagucauaguugacagagguaauagguccgguuauucugguauuuucucuguugaaggcaaaagcugcaucaaucggugcuuuuauguggaguugauaaggggaagaaaagaggaaacugaagucuuguggaccucaaacaguauuguuguguuuuguggcaccucagguacauauggaacaggcucauggccugauggggcggacaucaaucucaugccuauauaa

SEQ ID NO: 51390 - RNA, 1413 nt, Artificial Sequence
  derived and/or modified CDS sequence (wt) from neuraminidase__InfluenzaA__ADL39293
augaacccaaaucaaaagauaauaaccauuggaucaaucaguauagcaaucggaauaauuagucuaauguugcaaauaggaaauauuauuucaauaugggcuagucacucaauccaaacuggaagucaaaacaacacuggaauaugcaaccaaagaaucaucacauaugaaaacagcaccugggugaaucacacauauguuaauauuaacaacacuaauguuguugcuggagaggacaaaacgucagugacauuggccggcaauucaucucuuuguucuaucaguggaugggcuauauacacaaaagacaacagcauaagaauuggcuccaaaggagauguuuuugucauaagagaaccuuucauaucauguucucacuuggaaugcagaaccuuuuuucugacccaaggcgcucuauuaaaugacaaacauucaaaugggaccguaaaggacagaaguccuuauagggccuuaaugagcuguccucuaggugaagcuccguccccauacaauucaaaguucgaaucaguugcauggucagcaagcgcaugccaugauggcaugggcugguuaacaaucggaauuucugguccagacaauggagcuguggcuguacuaaaauacaacggaauaauaacuggaaccauaaaaaguuggaaaaagcaaauauuaagaacacaagagucugaaugugucuguaugaacgggucauguuucaccauaaugaccgauggcccgaguaauaaagccgccucguacaaaauuuucaagaucgaaaaggggaagguuacuaaaucaauagaguugaaugcacccaauuuuuauuaugaggaaugcuccuguuacccagacacuggcauagugauguguguaugcagggacaacuggcaugguucaaaucgacccugggugucuuuuaaucaaaacuuggauuaucaaauaggauacaucugcaguggaguguuuggugacaauccgcgucccgaagauggagagggcagcugcaauccagugacuguugauggagcaaacggaguaaaaggguuuucauacaaauaugguaaugguguuuggauaggaaggaccaaaaguaacagacuuagaaagggguuugagaugauuugggauccuaauggauggacaaauaccgacagugauuucucagugaaacaggauguuguagcaauaacugauuggucaggguacagcggaaguuucguccaacauccugaguuaacaggauuggacuguauaagaccuuguuucuggguugaguuagucagagggcugccuagagaaaauacaacaaucuggacuagugggagcagcauuucuuuuuguggcguuaauagugauacugcaaacuggucuuggccagacggugcugaguugccguucaccauugacaaguag

SEQ ID NO: 51391 - RNA, 1410 nt, Artificial Sequence
  derived and/or modified CDS sequence (wt) from neuraminidase__InfluenzaA__ADL39304
augaauccaaaucaaaagauaauaacgauuggcucuguuucucucaccauuuccacaauaugcuucuucaugcaaauugccaucuugauaacuacuguaacauugcauuucaagcaauaugaauuuaacuuccccccaaacaaccaagugaugcugugugaaccaacaauaauagaaagaaacauaacagagauaguguaucugaccaacaccaccauagagaaggaaauaugccccaaacuagcagaauacagaaauuggucaaagccgcaaugugacauuacaggauuugcaccuuuuucuaaggacaauucgauuaggcuuuccgcugguggggacaucugggugacaagagaaccuuaugugucaugcgauccugacaaguguuaucaauuugcccuuggacagggaacaacacuaaacaacgugcauucaaauaacacaguacgugauaggaccccuuaucggacccuauugaugaaugaguuagguguuccuuuucaucuggggaccaagcaagugugcauagcaugguccagcucaaguugucacgauggaaaagcauggcugcauguuuguauaacgggggaugauaaaaaugcaacugcuagcuucauuuacaaugggaggcuuguagauaguguuguuucaugguccaaggaaauccucaggacccaggagucagaaugcguuuguaucaauggaacuuguacaguaguaaugacugaugggagugcuucaggaaaagcugauacuaaaauacuauucauugaggaggggaaaaucguucauaccagcacauugucaggaagugcucagcaugucgaggagugcuccugcuauccucgauauccuggugucagaugugucugcagagacaacuggaaaggcuccaauaggcccaucguagauauaaacauaaaggaucauagcauuguuuccaguuauguguguucaggacuuguuggagacacacccagaaaaaacgacagcuccagcaguagccauuguuuggauccuaacaaugaagaagguggucauggagugaaaggcugggccuuugaugaugggaaugacguguggaugggaagaacgaucagcgagaagucacgcuuaggguaugaaaccuucaaagucauugaaggcugguccaacccuaaguccaaauugcagauaaauaggcaagucauaguugacagagguaauagguccgguuauucugguauuuucucuguugaaggcaaaagcugcaucaaucggugcuuuuauguggaguugauaaggggaagaaaagaggaaacugaagucuuguggaccucaaacaguauuguuguguuuuguggcaccucagguacauauggaacaggcucauggccugauggggcggacaucaaucucaugccuauauaa

SEQ ID NO: 51392 - RNA, 1410 nt, Artificial Sequence
  derived and/or modified CDS sequence (wt) from neuraminidase__InfluenzaA__ADL39326
augaauccaaaucaaaagauaauaacgauuggcucuguuucucucaccauuuccacaauaugcuucuucaugcaaauugccaucuugauaacuacugugacauugcauuucaagcaauaugaauucaacucccccccaaacaaccaagugaugcugugugaaccaacaauaauagaaagaaacauaacagagauaguguaucugaccaacaccaccauagagaaggaaauaugccccaaacuagcagaauacagaaauuggucaaagccgcaaugugacauuacaggauuugcaccguuuuccaaggacaauucgauuaggcuuuccgcugguggggacaucuggguaacaagagaaccuuaugugucaugcgauccugacaaguguuaucaauuugcccuuggacagggaacaacacuaaacaacgugcauucaaauaacacaguacgugauaggaccccuuaucggacccuauugaugaaugaguuagguguuccuuuucaucuggggaccaagcaagugugcauagcaugguccagcucaaguugucacgauggaaaagcauggcugcauguuuguauaacgggggaugauaaaaaugcaacugcuagcuucauuuacaaugggaggcuuguagauaguguuguuucaugguccaaagaaauccucaggacccaggagucagaaugcguuuguaucaauggaacuuguacaguaguaaugacugaugggagugcuucaggaaaagcugauacuaaaauacuauucauugaggaggggaaaaucguucauacuagcacauugucaggaagugcucagcaugucgaggagugcuccugcuauccucgauauccuggugucagaugugucugcagagacaacuggaaaggcuccaauaggcccaucguagauauaaacauaaaggaucauagcauuguuuccaguuauguguguucaggacuuguuggagacacacccagaaaaaacgacagcuccagcaguagccauuguuuggauccuaacaaugaagaagguggucauggagugaaaggcugggccuuugaugauggaaaugacguguggaugggaagaacgaucagcgagaagucacgcuuaggguaugaaaccuucaaagucauugaaggcugguccaacccuaaguccaaauugcagauaaauaggcaagucauaguugacagagguaauagguccgguuauucugguauuuucucuguugaaggcaaaagcugcaucaaucggugcuuuuauguggaguugauaaggggaagaaaagaggaaacugaagucuuguggaccucaaacaguauuguuguguuuuguggcaccucagguacauauggaacaggcucauggccugauggggcggacaucaaucucaugccuauauaa

SEQ ID NO: 51393 - RNA, 1413 nt, Artificial Sequence
  derived and/or modified CDS sequence (wt) from neuraminidase__InfluenzaA__ADL39392
augaacccaaaucaaaagauaauaaccauuggaucaaucaguauagcaaucggaauaauuagucuaauguugcaaauaggaaguauuauuucaauaugggcuagucacucaauccaaacuggaagucaaaacaacacuggaauaugcaaccaaagaaucaucacauaugaaaacagcaccugggugaaucacacauauguuaauauuaacaacacuaauguuguugcuggagaggacaaaacgucagugacauuagccggcaauucaucucuuuguucuaucaguggaugggcuauauacacaaaagacaacagcauaagaauuggcuccaaaggagauguuuuugucauaagagaaccuuucauaucauguucucacuuggaaugcagaaccuuuuuucugacccaaggcgcucuauuaaaugacaaacauucaaaugggaccguaaaggacagaaguccuuauagggccuuaaugagcuguccucuaggugaagcuccguccccauacaauucaaaguucgaaucaguugcauggucagcaagcgcaugccaugauggcaugggcugguuaacaaucggaauuucugguccagacaauggagcuguggcuguacuaaaauacaacggaauaauaacuggaaccauaaaaaguuggaaaaagcaaauauuaagaacacaagagucugaaugugucuguaugaacgggucauguuucaccauaaugaccgauggcccgaguaauaaagccgccucguacaaaauuuucaagaucgaaaaggggaagguuacuaaaucaauagaguugaaugcacccaauuuuuauuaugaggaaugcuccuguuacccagacacuggcauagugauguguguaugcagggacaacuggcaugguucaaaucgaccuugggugucuuuuaaucaaaauuuggauuaucaaauaggauacaucugcaguggaguguuuggugacaauccgcgucccgaagauggagagggcagcugcaauccagugacuguagauggagcaaacggaguaaaaggguuuucauacaaauaugguaaugguguuuggauaggaaggaccaaaaguaacagacuuagaaagggguuugagaugauuugggauccuaauggauggacaaauaccgacagugauuucucagugaaacaggauguuguagcaauaacugauuggucaggguacagcggaaguuucguccaacauccugaauugacaggauuggacuguauaagaccuugcuucuggguugaguuagucagagggcugccuagagaaaauacaacaaucuggacuagugggagcagcauuucuuuuuguggcguuaauagugauacugcaaacuggucuuggccagacggugcugaguugccguucaccauugacaaguag

SEQ ID NO: 51394 - RNA, 1410 nt, Artificial Sequence
  derived and/or modified CDS sequence (wt) from neuraminidase__InfluenzaA__ADL39403
augaauccaaaucaaaagauaauaacgauuggcucuguuucucucaccauuuccacaauaugcuucuucaugcaaauugccaucuugauaacuacuguaacauugcauuucaagcaauaugaauucaacccccccccaaacaaccaagugaugcugugugaaccaacaauaauagaaagaaacauaacagagauaguguaucugaccaacaccaccauagagaaggaaauaugccccaaacuagcagaauacagaaauuggucaaagccgcaaugugacauuacaggauuugcaccuuuuucuaaggacaauucgauuaggcuuuccgcugguggggacaucugggugacaagagaaccuuaugugucaugcgauccugacaaguguuaucaauuugcccuuggacagggaacaacacuaaacaacgugcauucaaauaacacaguacgugauaggaccccuuaucggacccuauugaugaaugaguuagguguuccuuuucaucuggggaccaagcaagugugcauagcaugguccagcucaaguugucacgauggaaaagcauggcugcauguuuguauaacgggggaugauaaaaaugcaacugcuagcuucauuuacaaugggaggcuuguagauaguguuguuucaugguccaaagaaauccucaggacccaggagucagaaugcgucuguaucaauggaacuuguacaguaguaaugacugaugggagugcuucaggaaaagcugauacuaaaauacuauucauugaggaggggaaaaucguucauacuagcacauugucaggaagugcucagcaugucgaggagugcucuugcuauccucgauauccuggugucagaugugucugcagagacaacuggaaaggcuccaauaggcccaucguagauauaaacauaaaggaucauagcauuguuuccaguuauguguguucaggacuuguuggagacacacccagaaaaaacgacagcuccagcaguagccauuguuuggauccuaacaaugaagaagguggucauggagugaaaggcugggccuuugaugauggaaaugacguguggaugggaagaacgaucagcgagaagucacgcuuaggguaugaaaccuucaaagucauugaaggcugguccaaccauaaguccaaauugcagauaaauaggcaagucauaguugacagagguaauagguccgguuauucugguauuuucucuguugaaggcaaaagcugcaucaaucggugcuuuuauguggaguugauuaggggaagaaaagaggaaacugaagucuuguggaccucaaacaguauuguuguguuuuguggcaccucagguacauauggaacaggcucauggccugauggggcggaccucaaucucaugccuauauaa

SEQ ID NO: 51395 - RNA, 1413 nt, Artificial Sequence
  derived and/or modified CDS sequence (wt) from neuraminidase__InfluenzaA__ADL39425
augaacccaaaucaaaagauaauaaccauuggaucaaucaguauagcaaucggaauaauuagucuaauguugcaaauaggaaauauuauuucaauaugggcuagucacucaauccaaacugggagucaaaacaacacuggaauaugcaaccaaagaaucaucacauaugaaaacagcaccugggugaaucacacauauguuaauauuaacaacacuaauguuguugcuggagaggacaaaacaucagugacauuggccggcaauucaucucuuuguucuaucaguggaugggcuauauacacaaaagacaacagcauaagaauuggcuccaaaggagauguuuuugucauaagagaaccuuucauaucauguucucacuuggaaugcagaaccuuuuuucugacccaaggcgcucuauuaaaugacaaacauucaaaugggaccguaaaggacagaaguccuuauagggccuuaaugagcuguccucuaggugaagcuccguccccauacaauucaaaguucgaaucaguugcauggucagcaagcgcaugccaugauggcaugggcugguuaacaaucggaauuucugguccagacaauggagcuguggcuguacuaaaauacaauggaauaauaaccggaaccauaaaaaguuggaaaaagcaaauauuaagaacacaagagucugaaugugucuguaugaacgggucauguuucaccauaaugaccgauggcccgaguaauaaggccgccucguacaaaauuuucaagaucgaaaaggggaagguuacuaaaucaauagaguugaaugcacccaauuuuuauuaugaggaaugcuccuguuacccagauacuggcauagugauguguguaugcagggacaacuggcaugguucaaaucgaccuugggugucuuuuaaucaaaacuuggauuaucaaauaggauacaucugcaguggaguguuuggugacaauccgcgucccgaagauggagagggcagcugcaauccagugacuguugauggagcaaacggaguaaaaggguuuucauacaaauaugguaaugguguuuggauagggagaaccaaaaguaacagacuuagaaagggguuugagaugauuugggauccuaauggauggacaaauaccgacagugauuucucagugaaacaggauguuguagcaauaacugauuggucaggguacagcggaaguuucguccaacauccugaguuaacaggauuggacuguauaagaccuugcuucuggguugaguuagucagagggcugccuagagaaaauacaacaaucuggacuagugggagcagcauuucuuuuuguggcguuaauagugauacugcaaacuggucuuggccagacggugcugaguugccguucaccauugacaaguag

SEQ ID NO: 51396 - RNA, 1413 nt, Artificial Sequence
  derived and/or modified CDS sequence (wt) from neuraminidase__InfluenzaA__ADL39447
augaacccaaaucaaaagauaauaaccauuggaucaaucaguauagcaaucggaauaauuagucuaauguugcaaauaggaaguauuauuucaauaugggcuagucacucaauccaaacuggaagucaaaacaacacuggaauaugcaaccaaagaaucaucacauaugaaaacagcaccugggugaaucacacauauguuaauauuaacaacacuaauguuguugcuggagaggacaaaacgucagugacauugaccggcaauucaucucuuuguucuaucaguggaugggcuauauacacaaaagacaacagcauaagaauuggcuccaaaggagauguuuuugucauaagagaaccuuucauaucauguucucacuuggaaugcagaaccuuuuuucugacccaaggcgcucuauuaaaugacaaacauucaaaugggaccguaaaggacagaaguccuuauagggccuuaaugagcuguccucuaggugaagcuccguccccauacaauucaaaguucgaaucaguugcauggucagcaagcgcaugccaugauggcaugggcugguuaacaaucggaauuucugguccagacaauggagcuguggcuguacuaaaauacaacggaauaauaacuggaaccauaaaaaguuggaaaaagcaaauauuaagaacacaagagucugaaugugucuguaugaacgggucauguuucaccauaaugaccgauggcccgaguaauaaagccgccucguacaaaauuuucaagaucgaaaaggggaagguuacuaaaucaauagaguugaaugcacccaauuuuuauuaugaggaaugcuccuguuacccagacacuggcauagugauguguguaugcagggacaacuggcaugguucaaaucgaccuugggugucuuuuaaucaaaauuuggauuaucaaauaggauacaucugcaguggaguguuuggugacaauccgcgucccgaagauggagagggcagcugcaauccagugacuguugauggagcaaacggaguaaaaggguuuucauacaaauaugguaaugguguuuggauaggaaggaccaaaaguaacagacuuagaaagggguuugagaugauuugggauccuaauggauggacaaauaccgacagugauuucucagugaaacaggauguuguagcaauaacugauuggucaggguacagcggaaguuucguccaacauccugaguugacaggauuggacuguauaagaccuugcuucuggguugaguuagucagagggcugccuagagaaaauacaacaaucuggacuagugggagcagcauuucuuuuuguggcguuaauagugauacugcaaacuggucuuggccagacggugcugaguugccguucaccauugacaaguag

SEQ ID NO: 51397 - RNA, 1413 nt, Artificial Sequence
  derived and/or modified CDS sequence (wt) from neuraminidase__InfluenzaA__ADL39458
augaacccaaaucaaaagauaauaaccauuggaucaaucaguauagcaaucggaauaauuagucuaauguugcaaauaggaaauauuauuucaauaugggcuagucacucaauccaaacugggagucaaaacaacacuggaauaugcaaccaaagaaucaucacauaugaaaacagcaccugggugaaucacacauauguuaauauuaacaacacuaauguuguugcuggagaggacaaaacaucagugacauuggccggcaauucaucucuuuguucuaucaguggaugggcuauauacacaaaagacaacagcauaagaauuggcuccaaaggagauguuuuugucauaagagaaccuuucauaucauguucucacuuggaaugcagaaccuuuuuucugacccaaggcgcucuauuaaaugacaaacauucaaaugggaccguaaaggacagaaguccuuauagggccuuaaugagcuguccucuaggugaagcuccguccccauacaauucaaaguucgaaucaguugcauggucagcaagcgcaugccaugauggcaugggcugguuaacaaucggaauuucugguccagacaauggagcuguggcuguacuaaaauacaacggaauaauaacuggaaccauaaaaaguuggaaaaagcaaauauuaagaacacaagagucugaaugugucuguaugaacgggucauguuucaccauaaugaccgauggcccgaguaauaaggccgccucguacaaaauuuucaagaucgaaaaggggaagguuacuaaaucaauagaguugaaugcacccaauuuuuauuaugaggaaugcuccuguuacccagauacuggcauagugauguguguaugcagggacaacuggcaugguucaaaucgaccuugggugucuuuuaaucaaaacuuggauuaucaaauaggauacaucugcaguggaguguuuggugacaauccacgucccgaagauggagagggcagcugcaauccagugacuguugauggagcaaacggaguaaaaggguuuucauacaaauaugguaaugguguuuggauagggagaaccaaaaguaacagacuuagaaagggguuugagaugauuugggauccuaauggauggacaaauaccgacagugauuucucagugaaacaggauguuguagcaauaacugauuggucaggguacagcggaaguuucguccaacauccugaguuaacaggauuggacuguauaagaccuugcuucuggguugaguuagucagagggcugccuagagaaaauacaacaaucuggacuagugggagcagcauuucuuuuuguggcguuaauagugauacugcaaacuggucuuggccagacggugcugaguugccguucaccauugacaaguag

SEQ ID NO: 51398 - RNA, 1413 nt, Artificial Sequence
  derived and/or modified CDS sequence (wt) from neuraminidase__InfluenzaA__ADL39469
augaacccaaaucaaaagauaauaaccauuggaucaaucaguauagcaaucggaauaauuagucuaauguugcaaauaggaaguauuauuucaauaugggcuagucacucaauccaaacuggaagucaaaacaacacuggaauaugcaaccaaagaaucaucacauaugaaaacagcaccugggugaaucacacauauguuaauauuaacaacacuaauguuguugcuggagaggacaaaacgucagugacauuggccggcaauucaucucuuuguucuaucaguggaugggcuauauacacaaaagacaacagcauaagaauuggcuccaaaggagauguuuuugucauaagagaaccuuucauaucauguucucacuuggaaugcagaaccuuuuuucugacccaaggcgcucuauuaaaugacaaacauucaaaugggaccguaaaggacagaaguccuuauagggccuuaaugagcuguccucuaggugaagcuccguccccauacaauucaaaguucgaaucaguugcauggucagcaagcgcaugccaugauggcaugggcugguuaacaaucggaauuucugguccagacaauggagcuguggcuguacuaaaauacaacggaauaauaacuggaaccauaaaaaguuggaaaaagcaaauauuaagaacacaagagucugaaugugucuguaugaacgggucauguuucaccauaaugaccgauggcccgaguaauaaagccgccucguacaaaauuuucaagaucgaaaaggggaagguuacuaaaucaauagaguuggaugcacccaauuuuuauuaugaggaaugcuccuguuacccagacacuggcauagugauguguguaugcagggacaacuggcaugguucaaaucgaccuugggugucuuuuaaucaaaauuuggauuaucaaauaggauacaucugcaguggaguguuuggugacaauccgcgucccgaagauggagagggcagcugcaauccagugacuguagauggagcaaacggaguaaaaggguuuucauacaaauaugguaaugguguuuggauaggaaggaccaaaaguaacagacuuagaaagggguuugagaugauuugggauccuaauggauggacaaauaccgacagugauuucucugugaaacaggauguuguagcaauaacugauuggucaggguacagcggaaguuucguccaacauccugaauugacaggauuggacuguauaagaccuugcuucuggguugaguuagucagagggcugccuagagaaaauacaacaaucuggacuagugggagcagcauuucuuuuuguggcguuaauagugauacugcaaacuggucuuggccagacggugcugaguugccguucaccauugacaaguag

SEQ ID NO: 51399 - RNA, 1413 nt, Artificial Sequence
  derived and/or modified CDS sequence (wt) from neuraminidase__InfluenzaA__ADL39480
augaacccaaaucaaaagauaauaaccauuggaucaaucaguauagcaaucggaauaauuagucuaauguugcaaauaggaaguauuauuucaauaugggcuagucacucaauccaaacuggaagucaaaacaacacuggaauaugcaaccaaagaaucaucacauaugaaaacagcaccugggugaaucacacauauguuaauauuaacaacacuaauguuguugcuggagaggacaaaacgucagugacauuggccggcaauucaucucuuuguucuaucaguggaugggcuauauacacaaaagacaacagcauaagaauuggcuccaaaggagauguuuuugucauaagagaaccuuucauaucauguucucacuuggaaugcagaaccuuuuuucugacccaaggcgcucuauuaaaugacaaacauucaaaugggaccguaaaggacagaaguccuuauagggccuuaaugagcuguccucuaggugaagcuccguccccauacaauucaaaguucgaaucaguugcauggucagcaagcgcaugccaugauggcaugggcugguuaacaaucggaauuucugguccagacaauggagcuguggcuguacuaaaauacaacggaauaauaacuggaaccauaaaaaguuggaaaaagcaaauauuaagaacacaagagucugaaugugucuguaugaacgggucauguuucaccauaaugaccgauggcccgaguaauaaagccgccucguacaaaauuuucaagaucgaaaaggggaagguuacuaaaucaauagaguugaaugcacccaauuuuuauuaugaggaaugcuccuguuacccagacacuggcauagugauguguguaugcagggacaacuggcaugguucaaaucgaccuugggugucuuuuaaucaaaauuuggauuaucaaauaggguacaucugcaguggaguguuuggugacaauccgcgucccgaagauggagagggcagcugcaauccagugacuguagauggagcaaacggaguaaaaggguuuucauacaaauaugguaaugguguuuggauaggaaggaccaaaaguaacagacuuagaaagggguuugagaugguuugggauccuaauggauggacaaauaccgacagugauuucucagugaaacaggauguuguagcaauaacugauuggucaggguacagcggaaguuucguccaacauccugaauugacaggauuggacuguauaagaccuugcuucuggguugaguuagucagagggcugccuagagaaaauacaacaaucuggacuagugggagcagcauuucuuuuuguggcguuaauagugauacugcaaacuggucuuggccagacggugcugaguugccguucaccauugacaaguag

SEQ ID NO: 51400 - RNA, 1410 nt, Artificial Sequence
  derived and/or modified CDS sequence (wt) from neuraminidase__InfluenzaA__ADL39491
augaauccaaaucaaaagauaauaacgauuggcucuguuucucucaccauuuccacaauaugcuucuucaugcaaauugccaucuugauaacuacuguaacauugcauuucaagcaauaugaguucaacuccuccccaaacaaccaagugaugcugugugaaccaacaauaauagaaagaaacauaacagagauaguguaucugaccaacaccaccauagagaaggaaauaugccccaaacuagcagaauacagaaauuggucaaagccgcaaugugacauuacaggauuugcaccuuuuucuaaggacaauucgauuaggcuuuccgcugguggggacaucugggugacaagagaaccuuaugugucaugcgauccugacaaguguuaucaauuugcccuuggacagggaacaacacuaaacaacgugcauucaaauaacauaguacgugauaggaccccuuaucggacccuauugaugaaugaguuagguguuccuuuucaucuggggaccaagcaagugugcauagcaugguccagcucaaguugucacgauggaaaagcauggcugcauguuuguauaacgggggaugauaaaaaugcaacugcuagcuucauuuacaaugggaggcuuguagauaguauuguuucaugguccaaagaaauccucaggacccaggagucagaaugcguuuguaucaauggaacuuguacaguaguaaugacugaugggagugcuucaggaaaagcugauacuaaaauacuauucauugaggaggggaaaaucguucauacuagcacauugucaggaagugcucagcaugucgaggaguguuccugcuauccucgauauccuggugucagaugugucugcagagacaacuggaaaggcuccaauaggcccaucguagauauaaacauaaaggaucauagcauuguuuccaguuauguguguucaggacuuguuggagacacacccagaaaaaacgacagcuccagcaguagccauuguuuggauccuaacaaugaagaagguggucauggagugaaaggcugggccuuugaugauggaaaugacguguggaugggaaggacgauaagcgagaagucacgcuuaggguaugaaacuuucaaagucauugaaggcugguccaauccuaaauccaaauugcagauaaauaggcaagucauaguugacagagguaauagguccgguuauucugguauuuucucuguugaaggcaaaagcugcaucaaucggugcuuuuauguggaguugauaaggggaagaaaagaggaaacugaagucuuguggaccucaagcaguauuguuguguuuuguggcaccucagguacauauggaacaggcucauggccugauggggcggacaucaaucuuaugccuauauaa

SEQ ID NO: 51401 - RNA, 1410 nt, Artificial Sequence; identical to SEQ ID NO: 48947
  derived and/or modified CDS sequence (wt) from neuraminidase__InfluenzaA__ADL41165

SEQ ID NO: 51402 - RNA, 1410 nt, Artificial Sequence
  derived and/or modified CDS sequence (wt) from neuraminidase__InfluenzaA__ADL41175
augaauccaaaccaaaagauaauaaccauugguucggucuguaugacaauuggaauggcuaacuuaauauuacaaauuggaaacauaaucucaacauggauuagccacucaauucaacuugggaaucaaaaucagauugaaacaugcaaucaaagcgucauuacuuaugaaaacaacacuuggguaaaucagacauauguuaacaucagcaacaccaacuuugcugcuggacagucagugguuuccgugaaauuagcgggcaauuccucucucugcccuguuaguggaugggcuauauacaguaaagacaacagcguaagaaucgguuccaagggggauguguuugucauaagggaaccauucauaucaugcucccccuuggaaugcagaaccuucuucuugacucaaggggccuugcuaaaugacaaacauuccaauggaaccauuaaagacaggagcccauaucgaacccuaaugagcuguccuauuggugaaguucccucuccauacaacucaagauuugagucagucgcuuggucagcaagugcuugucaugauggcaucaauuggcuaacaauuggaauuucuggcccagacaauggggcaguggcuguguuaaaguacaacggcauaauaacagacacuaucaagaguuggagaaacaauauauugagaacacaagagucugaaugugcauguguaaaugguucuugcuuuacuguaaugaccgauggaccaaguaauggacaggccucauacaagaucuucagaauagaaaagggaaaaauagucaaaucagucgaaaugaaugccccuaauuaucacuaugaggaaugcuccuguuauccugauucuagugaaaucacaugugugugcagggauaacuggcauggcucgaaucgaccgugggugucuuucaaccagaaucuggaauaucagauaggauacauaugcagugggauuuucggagacaauccacgcccuaaugauaagacaggcaguugugguccaguaucgucuaauggagcaaauggaguaaaaggauuuucauucaaauacggcaaugguguuuggauagggagaacuaaaagcauuaguucaagaaacgguuuugagaugauuugggauccgaacggauggacugggacagacaauaacuucucaauaaagcaagauaucguaggaauaaaugaguggucaggauauagcgggaguuuuguucagcauccagaacuaacagggcuggauuguauaagaccuugcuucuggguugaacuaaucagagggcgacccaaagagaacacaaucuggacuagcgggagcagcauauccuuuugugguguaaacagugacacuguggguuggucuuggccagacggugcugaguugccauuuaccauugacaaguaa

SEQ ID NO: 51403 - RNA, 1413 nt, Artificial Sequence
  derived and/or modified CDS sequence (wt) from neuraminidase__InfluenzaA__ADL60255
augaacccaaaucaaaagauaauaaccauuggaucaaucaguauagcaaucggaauaauuagucuaauguugcaaauaggaaauauuauuucaauaugggcuagucacucaauccaaacuggaagucaaaacaacacuggaauaugcaaccaaagaaucaucacauaugaaaacagcaccugggugaauuacacauauguuaauauuaacaacacuaauguuguugcuggagaggacaaaacuucagugacauuggccggcaauucaucucuuuguucuaucaguggaugggcuauauacacaaaagacaacagcauaagaauuggcuccaaaggagauguuuuugucauaagagaaccuuucauaucauguucucacuuggaaugcagaaccuuuuuucugacccaaggcgcucuauuaaaugacaaacauucaaaugggaccguaaaggacagaaguccuuauagggccuuaaugagcuguccucuaggugaagcuccguccccauacaauucaaaguucgaaucaguugcauggucagcaagcgcaugccaugauggcaugggcugguuaacaaucggaauuucugguccagacaauggagcuguggcuguacuaaaauacaacggaauaauaacuggaaccauaaaaaguuggaaaaagcaaauauuaagaacacaagagucugaaugugucuguaugaacgggucauguuucaccauaaugaccgauggcccgaguaauaaggccgccucguacaaaauuuucaagaucgaaaaggggaagguuacuaaaucaauagaguugaaugcacccaauuuucauuaugaggaauguuccuguuacccagacacuggcauagugauguguguaugcagggacaacuggcaugguucaaaucgaccuugggugucuuuuaaucaaaacuuggauuaucaaauaggauacaucugcaguggaguguuuggugacaauccgcgucccaaagauggaaggggcagcugcaauccagugacuguugauggagcaaacggaguaaaaggguuuucauacaaauaugauaaugguguuuggauaggaaggaccaaaaguaacagacuuagaaagggguuugagaugauuugggauccuaauggauggacgaauaccgacagugauuucucagugaaacaggauguuguagcaauaacugauuggucaggguacagcggaaguuucguccaacauccugaguuaacaggauuggacuguauaagaccuugcuucuggguugaguuagucagagggcugccuagagaaaauacaacaaucuggacuagugggagcagcauuucuuuuuguggcguuaauagugauacugcaaacuggucuuggccagacggugcugaguugccguucaccauugacaaguag

SEQ ID NO: 51404 - RNA, 1413 nt, Artificial Sequence
  derived and/or modified CDS sequence (wt) from neuraminidase__InfluenzaA__ADL60277
augaacccaaaucaaaggauaauaaccauuggaucaaucaguauagcaaucggaauaauuagucuaauguugcaaauaggaaauauuauuucaauaugggcuagucacucaauccaaauuggaagucaaaacaacacuggaauaugcaaccaaagaaucaucacauaugaaaacagcaccugggugaaucauacauauguuaauauuaacaacacuaauguuguugcuggagaggacaaaacgccagugacauuggccggcaauucaucucuuuguucuaucaguggaugggcuauauacacaaaagacaacagcauaagaauuggcuccaaaggagauguuuuugucauaagagaaccuuucauaucauguucucacuuggaaugcagaaccuuuuuucugacccaaggcgcucuauuaaaugacaaacauucaaaugggaccgcaaaggacagaaguccuuauagggccuuaaugagcuguccucuaggugaagcuccguccccauacaauucaaaguucgaaucaguugcauggucagcaagcgcaugccaugauggcaugggcugguuaacaaucggaauuucugguccagacaauggagcuguggcuguacuaaaauacaacggaauaauaacuggaaccauaaaaaguuggaaaaagcaaauauuaagaacacaagagucugaaugugucuguaugaacgggucauguuucaccauaaugaccgauggcccgaguaauaaggccgccucguacaaaauuuucaagaucgaaaaggggaagguuacuaaaucaauagaguugaaugcacccaauuuuuauuaugaggaaugcuccuguuauccagacacuggcauagugauguguguaugcagggacaacuggcaugguucaaaucgaccuugggugucuuuuaaucaaaacuuggauuaucaaauaggauacaucugcaguggaguguuuggugacaauccgcgucccgaagauggagagggcagcugcaauccagugacuguugauggagcaaacggaguaaaaggguuuucauacaaauaugguaaugguguuuggauaggaaggaccaaaaguaacagacuuagaaagggguuugagaugauuugggauccuaauggauggacaaauaccgacagugauuucucagugaaacaggauguuguagcaauaacugauuggucaggguacagcggaaguuucguccaacauccugaguuaacaggauuggacuguauaagaccuugcuucuggguugaguuagucagagggcugccuagagaaaauacaacaaucuggacuagugggagcagcauuucuuuuuguggcguuaauagugauacugcaaacuggucuuggccagacggugcugaguugccguucaccauugacaaguag

SEQ ID NO: 51405 - RNA, 1413 nt, Artificial Sequence
  derived and/or modified CDS sequence (wt) from neuraminidase__InfluenzaA__ADL60288
augaacccaaaucaaaagauaauaaccauuggaucaaucaguauagcaaucggaauaauuagucuaauguugcaaauaggaaauauuauuucaauaugggcuagucacucaauccaaacuggaagucaaaacaacacuggaauaugcaaccaaagaaucaucacauaugaaaacagcaccugggugaaucacacauauguuaauauuaacaacacuaauguuguugcuggagaggacaaaacuucagugacauuggccggcaauucaucucuuuguucuaucaguggaugggcuauauacacaaaagacaacagcauaagaauuggcuccaaaggagauguuuuugucauaagagaaccuuucauaucauguucucacuuggaaugcagaaccuuuuuucugacccaaggcgcucuauuaaaugacaaacauucaaaugggaccguaaaggacagaaguccuuauagggccuuaaugagcuguccucuaggugaagcuccguccccauacaauucaaaguucgaaucaguugcauggucagcaagcgcaugccaugauggcaugggcugguuaacaaucggaauuucugguccagacaauggagcuguggcuguacuaaaauacaacggaauaauaacuggaaccauaaaaaguuggaaaaagcaaauauuaagaacacaagagucugaaugugucuguaugaacgggucauguuucaccauaaugaccgauggcccgaguaauaaggccgccucguacaaaauuuucaagaucgaaaaggggaagguuacuaaaucaauagaguugaaugcacccaauuuuuauuaugaggaaugcuccuguuacccagacacuggcauagugauguguguaugcagggacaacuggcaugguucaaaucgaccuugggugucuuuuaaucaaaacuuggauuaucaaauaggauacaucugcaguggaguguuuggugacaauccgcgucccaaagauggaaagggcagcugcaauccagugacuguugauggagcaaacggaguaaaaggguuuucauacaaauaugguaaugggguuuggauaggaaggaccaaaaguaacagacuuagaaagggguuugagaugauuugggauccuaauggauggacaaauaccgacagugauuucucagugaaacaggauguuguagcaauaacugauuggucaggguacagcggaaguuucguccaacauccugaguuaacaggauuggacuguauaagaccuugcuucuggguugaguuagucagagggcugccuagagaaaauacaacaaucuggacuagugggagcagcauuucuuuuuguggcguuaauagugauacugcaaacuggucuuggccagacggugcugaguugccguucaccaucgacaaguag

SEQ ID NO: 51406 - RNA, 1413 nt, Artificial Sequence
  derived and/or modified CDS sequence (wt) from neuraminidase__InfluenzaA__ADL60299
augaacccaaaucaaaagauaauaaccauuggaucaaucaguauagcaaucggaauaauuagucuaauguugcaaauaggaaauauuauuucaauaugggcuagucacucaauccaaacuggaagucaaaacaacacuggaauaugcaaccaaagaaucaucacauaugaaaacagcaccugggugaaucacacauauguuaguauuaacaacacuaauguuguugcuggaaaggacaaaacgucagugacauuggccggcaauucaucucuuuguucuaucaguggaugggcuauauacacaaaagacaacagcauaagaauuggcuccaaaggagauguuuuugucauaagagaaccuuucauaucauguucucacuuggaaugcagaaccuuuuuucugacccaaggcgcucuauuaaaugacaaacauucaaaugggaccguaaaggacagaaguccuuauagggccuuaaugagcuguccucuaggugaagcuccguccccauacaauucaaaguucgaaucaguugcauggucagcaagcgcaugccaugauggcaugggcugguuaacaaucggaauuucugguccagacaauggagcuguggcuguacuaaaauacaacggaauaauaacuggaaccauaaaaaguuggaaaaagcaaauauuaagaacacaagagucugaaugugucuguaugaacgggucauguuucaccauaaugaccgauggcccgaguaauaaggccgccucguacaaaauuuucaagaucgaaaaggggaagguuacuaaaucaauagaguugaaugcacccaauuuuuauuaugaggaaugcuccuguuacccagacacuggcauagugauguguguaugcagggacaacuggcaugguucaaaucgaccuugggugucuuuuaaucaagacuuggauuaucaaauaggauacaucugcaguggaguguuuggugacaauccccgucccaaagauggaaagggcagcugcaauccagugacuguugauggagcaaacggaguaaaaggguuuucauacaaauaugguaaugguguuuggauaggaaggaccaaaaguaacagacuuagaaagggguuugagaugauuugggauccuaauggauggacaaauaccgacagugauuucucagugaaacaggauguuguagcaauaacugauuggucaggguacagcggaaguuucguccaacauccugaguuaacaggauuggacuguauaagaccuugcuucuggguugaguuagucagagggcugccuagagaaaauacaacaaucuggacuagugggagcagcauuucuuuuuguggcguuaauagugauacugcaaacuggucuuggccagacggugcugaguugccguucaccauugacaaguag

SEQ ID NO: 51407 - RNA, 1413 nt, Artificial Sequence
  derived and/or modified CDS sequence (wt) from neuraminidase__InfluenzaA__ADL60310
augaacccaaaucaaaagauaauaaccauuggaucaaucaguauagcaaucggaauaauuagucuaauguugcaaauaggaaauauuauuucaauaugggcuagucacucaauccaaacuggaagucaaaacaacacuggaauaugcaaccaaagaaucaucacauaugaaaacagcaccugggugaaucacacauauguuaauauuaacaacacuaauguuguugcuggagaggacaaaacuucagugacauuggcuggcaauucaucucuuuguucuaucaguggaugggcuauauacacaaaagacaacagcauaagaauuggcuccaaaggagauguuuuugucauaagagaaccuuucauaucauguucucacuuggaaugcagaaccuuuuuucugacccaaggugcucuauuaaaugacaaacauucaaaugggaccguaaaggacagaaguccuuauagggccuuaaugagcuguccucuaggugaagcuccguccccauacaauucaaaguucgaaucaguugcauggucagcaagcgcaugccaugauggcaugggcugguuaacaaucggaauuucugguccagacaauggagcuguggcuguacuaaaauacaacggaauaauaacuggaaccauaaaaaguuggaaaaagcaaauauuaagaacacaagagucugaaugugucuguaugaacgggucauguuucaccauaaugaccgauggcccgaguaauaaggccgccucguacaaaauuuucaagaucgaaaaggggaagguuacuaaaucaauagaguugaaugcacccaauuuucauuaugaggaauguuccuguuacccagacacuggcauagugauguguguaugcagggacaacuggcaugguucaaaucgaccuugggugucuuucaaucaaaacuuggauuaucaaauaggauacaucugcaguggaguguucggugacaauccgcgucccgaagauggagagggcagcugcaauccagugacuguugauggagcaaacggaguaaaaggguuuucauacaaauaugauaaugguguuuggauaggaaggaccaaaaguaacagacuuagaaagggguuugagaugauuugggauccuaauggauggacaaauaccgacagugauuucucagugaaacaggauguuguagcaauaacugauuggucaggguacagcggaaguuucguccaacauccugaguuaacaggauuggacuguauaagaccuugcuucuggguugaguuagucagagggcugccuagagaaaauacaacaaucuggacuagugggagcagcauuucuuuuuguggcguuaauagugauacugcaaacuggucuuggccagacggugcugaguugccauucaccauugacaaguag

SEQ ID NO: 51408 - RNA, 1413 nt, Artificial Sequence
  derived and/or modified CDS sequence (wt) from neuraminidase__InfluenzaA__ADL60321
augaacccaaaucaaaagauaauaaccauuggaucaaucaguauagcaaucggaauaauuagucuaauguugcaaauaggaaauauuauuucaauaugggcuagucacucaauccaaacuggaagucaaaacaacacuggaauaugcaaccaaagaaucaucacauaugaaaacagcaccugggugaaucacacauauguuaauauuaacaacacuaauguuguugcuggagaggacaaaacuucagugacauuggccggcaauucaucucuuuguucuaucaguggaugggcuauauacacaaaagacaacagcauaagaauuggcuccaaaggagauguuuuugucauaagagaaccuuucauaucauguucucacuuggaaugcagaaccuuuuuucugacccaaggcgcucuauuaaaugacaaacauucaaaugggaccguaaaggacagaaguccuuauagggccuuaaugagcuguccucuaggugaagcuccguccccauacaauucaaaguucgaaucaguugcauggucagcaagcgcaugccaugauggcaugggcugguuaacaaucggaauuucugguccagacaauggagcuguggcuguacuaaaauacaacggaauaauaacuggaaccauaaaaaguuggaaaaagcaaauauuaagaacacaagagucugaaugugucuguaugaacgggucauguuucaccauaaugaccgauggcccgaguaauaaggccgccucguacaaaauuuucaagaucgaaaaggggaagguuacuaaaucaauagaguugaaugcacccaauuuucauuaugaggaauguuccuguuacccagacacuggcauggugauguguguaugcagggacaacuggcaugguucaaaucgaccuugggugucuuuuaaucaaaacuuggauuaucaaauaggauacaucugcaguggaguguucggugacaauccgcgucccgaagauggagagggcagcugcaauccagugacuguugauggagcaaacggaguaaaaggguuuucauacaaauaugauaaugguguuuggauaggaaggaccaaaaguaacagacuuagaaagggguuugagaugaucugggauccuaauggauggacaaauaccgacagugauuucucagugaaacaggauguuguagcaauaacugauuggucaggauacagcggaaguuucguccaacauccugaguuaacaggauuggacuguauaagaccuugcuucuggguugaguuagucagagggcugccuagagaaaauacaacaaucuggacuagugggagcagcauuuccuuuuguggcguuaauagugauacugcaaacuggucuuggccagacggugcugaguugccguucaccauugacaaguag

SEQ ID NO: 51409 - RNA, 1413 nt, Artificial Sequence
  derived and/or modified CDS sequence (wt) from neuraminidase__InfluenzaA__ADL60332
augaacccaaaucaaaagauaauaaccauuggaucaaucaguauagcaaucggaauaauuagucuaauguugcaaauaggaaauauuauuucaauaugggcuagucacucaauccaaacuggaagucaaaacaacacuggaauaugcaaccaaagaaucaucacauaugaaaacagcaccugggugaaucacacauauguuaauauuaacaacacuaauguuguugcuggagaggacaaaacuucagugacauuggccggcaauucaucucuuuguucuaucaguggaugggcuauauacacaaaagacaacagcauaagaauuggcuccaaaggagauguuuuugucauaagagaaccuuucauaucauguucucacuuggaaugcagaaccuuuuuucugacccaaggcgcucuauuaaaugacaaacauucaaaugggaccguaaaggacagaaguccuuauagggccuuaaugagcuguccucuaggugaagcuccguccccauacaauucaaaguucgaaucaguugcauggucagcaagcgcaugccaugauggcaugggcugguuaacaaucggaauuucugguccagacaauggagcuguggcuguacuaaaauacaacggaauaauaacuggaaccauaaaaaguuggaaaaagcaaauauuaagaacacaagagucugaaugugucuguaugaacgggucauguuucaccauaaugaccgauggcccgaguaauaaggccgccucguacaaaauuuucaagaucgaaaaggggaagguuacuaaaucaauagaguugaaugcacccaauuuucauuaugaggaauguuccuguuacccagacacuggcauagugauguguguaugcagggacaacuggcaugguucaaaucgaccuugggugucuuuuaaucaaaacuuggauuaucaaauaggauacaucugcaguggaguguucggugacaauccgcgucccaaagauggaaggggcagcugcaauccagugacuguugauggagcaaacggaguaaaaggguuuucauacaaauaugauaaugguguuuggauaggaaggaccaaaaguaacagacuuagaaagggguuugagaugaucugggauccuaauggauggacaaauaccgacagugauuucucagugaaacaggauguuguagcaauaacugauuggucaggauacagcggaaguuucguccaacauccugaguuaacaggauuggacuguauaagaccuugcuucuggguugaguuagucagagggcugccuagagaaaauacaacaaucuggacuagugggagcagcauuucuuuuuguggcguuaauagugauacugcaaacuggucuuggccagacggugcugaguugccguucaccauugacaaguag

SEQ ID NO: 51410 - RNA, 1413 nt, Artificial Sequence
  derived and/or modified CDS sequence (wt) from neuraminidase__InfluenzaA__ADL60343
augaacccaaaucaaaagauaauaaccauuggaucaaucaguauagcaaucggaauaauuagucuaauguugcaaauaggaaauauuauuucaauaugggcuagucacucaauccaaacuggaagucaaaacaacacuggaauaugcaaccaaagaaucaucacguaugaaaacagcaccugggugaaucacacauauguuaauauuaacaacacuaauguuguugcuggagaggacaaaacuucagugacauuggccggcaauucaucucuuuguucuaucaguggaugggcuauauacacaaaagacaacagcauaagaauuggcuccaaaggagauguuuuugucauaagagaaccuuucauaucauguucucacuuggaaugcagaaccuuuuuucugacccaaggcgcucuauuaaaugacaaacauucaaaugggaccguaaaggacagaaguccuuauagggccuuaaugagcuguccucuaggugaagcuccguccccauacaauucaaaguucgaaucaguugcauggucagcaagcgcaugccaugauggcaugggcugguuaacaaucggaauuucugguccagacaauggagcuguggcuguacuaaaauacaacggaauaauaacuggaacaauaaaaaguuggaaaaagcaaauauuaagaacacaagagucugaaugugucuguaugaacgggucauguuucaccauaaugaccgauggcccgaguaauaaggccgccucguacaaaauuuucaagaucgaaaaggggaagguuacuaaaucaauagaguugaaugcacccaauuuucauuaugaggaauguuccuguuacccagacacuggcauagugauguguguaugcagggacaacuggcaugguucaaaucgaccuugggugucuuuuaaucaaaacuuggauuaucaaauaggauacaucugcaguggaguguucggugacaauccgcgucccgaagauggagagggcagcugcaauccagugacuguugauggagcaaacggaguaaaaggguuuucauauaaauaugauaaugguguuuggauaggaaggaccaaaaguaacagacuuagaaagggguuugagaugaucugggauccuaauggauggacaaauaccgacagugauuucucagugaaacaggauguuguagcaauaacugauuggucaggauacagcggaaguuucguccaacauccugaguuaacaggauuggacuguauaagaccuugcuucuggguugaguuagucagagggcugccuagagaaaauacaacaaucuggacuagugggagcagcauuucuuuuuguggcguuaauagugauacugcaaacuggucuuggccagacggugcugaguugccguucaccauugacaaguag

SEQ ID NO: 51411 - RNA, 1413 nt, Artificial Sequence
  derived and/or modified CDS sequence (wt) from neuraminidase__InfluenzaA__ADL60354
augaacccaaaucaaaggauaauaaccauuggaucaaucaguauagcaaucggaauaauuagucuaauguugcaaauaggaaauauuauuucaauaugggcuagucacucaauccaaauuggaagucaaaacaacacuggaauaugcaaccaaagaaucaucacauaugaaaacagcaccugggugaaucauacauauguuaauauuaacaacacuaauguuguugcuggagaggacaaaacgucagugacauuggccggcaauucaucucuuuguucuaucaguggaugggcuauauacacaaaagacaacagcauaagaauuggcuccaaaggagauguuuuugucauaagagaaccuuucauaucauguucucacuuggaaugcagaaccuuuuuucugacccaaggcgcucuauuaaaugacaaacauucaaaugggaccgcaaaggacagaaguccuuauagggccuuaaugagcuguccucuaggugaagcuccguccccauacaauucaaaguucgaaucaguugcauggucagcaagcgcaugccaugauggcaugggcugguuaacaaucggaauuucugguccagacaauggagcuguggcuguacuaaaauacaacggaauaauaacuggaaccauaaaaaguuggaaaaagcaaauauuaagaacacaagagucugaaugugucuguaugaacgggucauguuucaccauaaugaccgauggcccgaguaauaaggccgccucguacaaaauuuucaagaucgaaaaggggaagguuacuaaaucaauagaguugaaugcacccaauuuuuauuaugaggaaugcuccuguuacccagacacuggcauagugauguguguaugcagggacaacuggcaugguucaaaucgaccuugggugucuuuuaaucaaaacuuggauuaucaaauaggauacaucugcaguggaguguuuggugacaauccgcgucccaaagauggaaagggcagcugcaauccagugacuguugauggagcaaacggaguaaaaggguuuucauacaaauaugguaaugguguuuggauaggaaggaccaaaaguaacagacuuagaaagggguuugagaugauuugggauccuaauggauggacaaauaccgacagugauuucucagugaaacaggauguuguagcaauaacugauuggucaggguacagcggaaguuucguccaacauccugaauuaacaggauuggacuguauaagaccuugcuucuggguugaguuagucagagggcugccuagagaaaauacaacaaucuggacuagugggagcagcauuucuuuuuguggcguuaauagugauacugcaaacuggucuuggccagacggugcugaguugccguucaccauugacaaguag

SEQ ID NO: 51412 - RNA, 1410 nt, Artificial Sequence
  derived and/or modified CDS sequence (wt) from neuraminidase__InfluenzaA__ADL60365
augaauccaaaucaaaagauaauaacgauuggcucuguuucucucaccauuuccacaauaugcuucuucaugcaaauugccaucuugauaacuacuguaacauugcauuucaagcaauaugaauucaacuccuccccaaacaaccaagugaugcugugugaaccaacaauaauagaaagaaacauaacagagauaguguaucugaccaacaccaccauagagaaggaaauaagccccaaacuagcagaauacagaaauuggucaaagccgcaaugugacauuacaggauuugcaccuuuuucuaaggacaauucgauuaggcuuuccgcugguggggacaucugggugacaagagaaccuuaugugucaugcgauccugacaaguguuaucaauuugcccuuggacagggaacaacacuaaacaacgugcauucaaauaacauaguacgugauaggaccccuuaucggacccuauugaugaaugaguuagguguuccuuuucaucuggggaccaagcaagucugcauagcaugguccagcucaaguugucacgauggaaaagcauggcugcauguuuguauaacgggggaugauaaaaaugcaacugcuagcuucauuuacaaugggaggcuuguagauaguauuguuucaugguccaaagaaauccucaggacccaggagucagaaugcguuuguaucaauggaacuuguacaguaguaaugacugaugggagugcuucaggaaaagcugauacuaaaauacuauucauugaggaggggaaaaucguucauacuagcacauugucaggaagugcucagcaugucgaggagugcuccugcuauccucgauauccuggugucagaugugucugcagagacaacuggaaaggcuccaauaggcccaucguagauauaaacauaaaggaucauagcacuguuuccaguuauguguguucaggacuuguuggagacacacccagaaaaaacgacagcuccagcaguagccauuguuuggauccuaacaaugaagaagguggucauggggugaaaggcugggccuuugaugauggaaaugacguguggaugggaagaacgaucagcgagaagucacgcuuaggguaugaaaccuucaaagucauugaaggcugguccaacccuaaguccaaauugcagauaaauaggcaagucauaguugacagagguaauagguccgguuauucugguauuuucucuguugaaggcaaaagcugcaucaaucggugcuuuuauguggaguugauaaggggaagaaaagaggaaacugaagucuuguggaccucaaacaguauuguuguguuuuguggcaccucagguacauauggaacaggcucauggccugauggggcggacaucaaucucaugccuauauaa

SEQ ID NO: 51413 - RNA, 1413 nt, Artificial Sequence
  derived and/or modified CDS sequence (wt) from neuraminidase__InfluenzaA__ADL60376
augaacccaaaucaaaagauaauaaccauuggaucaaucaguauagcaaucggaauaauuagucuaauguugcaaauaggaaauauuauuucaauaugggcuagucacucaauccaaacuggaagucaaaacaacacuggaauaugcaaccaaagaaucaucacauaugaaaacagcaccugggugaaucacacauauguuaauauuaacaacacuaauguuguugcuggagaggacaaaacuucagugacauuggccggcaauucaucucuuuguucuaucaguggaugggcuauauacacaaaagacaacagcauaagaauuggcuccaaaggagauguuuuugucauaagagaaccuuucauaucauguucucacuuggaaugcagaaccuuuuuucugacccaaggcgcucuauuaaaugacaaacauucaaaugggaccggaaaggacagaaguccuuauagggccuuaaugagcuguccucuaggugaagcuccguccccauacaauucaaaguucgaaucgguugcauggucagcaagcgcaugccaugauggcaugggcugguuaacaaucggaauuucugguccagacaauggagcuguggcugugcuaaaauacaacggaauaauaacuggaaccauaaaaaguuggaaaaagcaaauauuaagaacacaagagucugaaugugucuguaugaacgggucauguuucaccauaaugaccgauggcccgaguaauaaggccgccucguacaaaauuuucaagaucgaaaaggggaagguuacuaaaucaauagaguugaaugcacccaauuuucauuaugaggaaugcuccuguuacccagacacuggcauagugauguguguaugcagggacaacuggcaugguucaaaucgaccuugggugucuuuuaaucaaaacuuggauuaucaaauaggauacaucugcaguggaguguuuggugacaauccgcgucccaaagauggaaagggcagcugcaauccagugacuguugauggagcaaacggaguaaaaggguuuucauacaaauaugauaaugguguuuggauaggaaggaccaaaaguaacagacuuagaaagggguuugagaugauuugggauccuaauggauggacaaauaccgacagugauuucucagugaaacaggauguuguagcaauaacugauuggucaggguacagcggaaguuucguccaacauccugaguuaacaggauuggacuguauaagaccuugcuucuggguugaguuagucagagggcugccuagagaaaauacaacaaucuggacuagugggagcagcauuucuuuuuguggcguuaauagugauacugcaaacuggucuuggccagacggugcugaguugccguucaccauugacaaguag

SEQ ID NO: 51414 - RNA, 1410 nt, Artificial Sequence; identical to SEQ ID NO: 48750
  derived and/or modified CDS sequence (wt) from neuraminidase__InfluenzaA__ADM07137

SEQ ID NO: 51415 - RNA, 1410 nt, Artificial Sequence; identical to SEQ ID NO: 48750
  derived and/or modified CDS sequence (wt) from neuraminidase__InfluenzaA__ADM07146

SEQ ID NO: 51416 - RNA, 1410 nt, Artificial Sequence; identical to SEQ ID NO: 48750
  derived and/or modified CDS sequence (wt) from neuraminidase__InfluenzaA__ADM07156

SEQ ID NO: 51417 - RNA, 1410 nt, Artificial Sequence; identical to SEQ ID NO: 48750
  derived and/or modified CDS sequence (wt) from neuraminidase__InfluenzaA__ADM07165

SEQ ID NO: 51418 - RNA, 1413 nt, Artificial Sequence
  derived and/or modified CDS sequence (wt) from neuraminidase__InfluenzaA__ADM07474
augaacccaaaucaaaagauaauaaccauuggaucaaucaguauagcaaucggaauaauuagucuaauguuacaaauaggaaauauuauuucaauaugggcuagucacucaauccaaacuggaagucaaaacaacacuggaauaugcaaccaaagaaucaucacauaugaaaacagcaccugggugaaucacacauauguuaauauuaacaacacuaauguuguugcuggagaggacaaaacuucagugacauuggccggcaauucaucucuuuguucuaucaguggaugggcuauauacacaaaagacaacagcauaagaauuggcuccaaaggagauguuuuugucauaagagaaccuuucauaucauguucucacuuggaaugcagaaccuuuuuucugacccaaggcgcucuauuaaaugacaaacauucaaaugggaccguaaaggacagaaguccuuauagggccuugaugagcuguccucuaggugaagcuccguccccauacaauucaaaguucgaaucaguugcauggucagcaagcgcaugccaugauggcaugggcugguuaacaauaggaauuucugguccagacaauggagcuguggcuguacuaaaauacaacggaauaauaacugggaccauaaaaaguuggaaaaagcaaauauuaagaacacaagagucugaaugugucuguaugaacgggucauguuucaccauaaugaccgauggcccgaguaauaaggccgccucguacaaaauuuucaagaucgaaaaggggaagguuacuaaaucaauagaguugaaugcacccaauuuuuauuaugaggaaugcuccuguuacccagacacuggcauagugauguguguaugcagggacaacuggcaugguucaaaucgaccuugggugucuuuuaaucaaaacuuggauuaucaaauaggauacaucugcaguggaguguuuggugacaauccgcgucccgaagauggagagggcagcugcaauccagugacuguugauggagcaaacggaguaaaaggguuuucauacaaauaugguaaugguguuuggauaggaaggaccaaaaguaacagacuuagaaagggguuugagaugauuugggauccuaauggauggacaaauaccgacagugauuucucagugaaacaggauguuguagcaauaacugauuggucaggguacagcggaaguuucguccaacauccugaguuaacaggauuggacuguauaagaccuugcuucuggguugaguuagucagagggcugccuagagaaaauacaacaaucuggacuagugggagcagcauuucuuuuuguggcguuaauagugauacugcaaacuggucuuggccagacggugcugaguugccguucaccaucgacaaguag

SEQ ID NO: 51419 - RNA, 1413 nt, Artificial Sequence
  derived and/or modified CDS sequence (wt) from neuraminidase__InfluenzaA__ADM07485
augaacccaaaucaaaagauaauaaccauuggaucaaucaguauagcaaucggaauaauuagucuaauguugcaaauaggaaauauuauuucaauaugggcuagucacucaauccaaacuggaagucaaaacaacacuggaauaugcaaccaaagaaucaucacauaugaaaacagcaccugggugaaucacacauauguuaauauuaacaacacuaauguuguugcuggagaggacaaaacuucagugacauuggccggcaauucaucucuuuguucuaucaguggaugggcuauauacacaaaagacaacagcaucagaauuggcuccaaaggagauguuuuugucauaagagaaccuuucauaucauguucucacuuggaaugcagaaccuuuuuucugacccaaggcgcucuauuaaaugacaaacauucaaaugggaccguaaaggacagaaguccuuauagggccuuaaugagcuguccucuaggugaagcuccguccccauacaauucaaaguucgaaucaguugcauggucagcaagcgcaugccaugauggcaugggcugguuaacaaucggaauuucugguccagacaauggagcuguggcuguacuaaaauacaacggaauaauaacuggaaccauaaaaaguuggaaaaagcaaauauuaagaacacaagagucugaaugugucuguaugaacgggucauguuucaccauuaugacugauggcccgaguaauaaggccgccucguacaaaauuuucaagaucgaaaaggggaagguuacuaaaucaauagaguugaaugcacccaauuuuuauuaugaggaaugcuccuguuacccagacacuggcauagugauguguguaugcagggacaacuggcaugguucaaaucgaccuugggugucuuuuaaucaaaacuuggacuaucagauaggauacaucugcaguggaguguuuggugacaauccgcgucccgaagauggagagggcagcugcaauccagugacuguugauggagcaaauggaguaaaaggguuuucauacaaauaugguaaugguguuuggauaggaaggaccaaaaguaacagacuuagaaagggguuugagaugauuugggauccuaauggauggacaaauaccgacagugauuucucagugaaacaggauguuguagcaauaacugauuggucaggguacagcggaaguuucguccaacauccugaguuaacaggauuggacuguauaagaccuugcuucuggguugaguuagucagagggcugccuagagaaaauacaacaaucuggacuagugggagcagcauuucuuuuuguggcguuaauagugauacugcaaacuggucuuggccagacggugcugaguugccguucaccaucgacaaguag

SEQ ID NO: 51420 - RNA, 1410 nt, Artificial Sequence
  derived and/or modified CDS sequence (wt) from neuraminidase__InfluenzaA__ADM07496
augaauccaaaucaaaagauaauaacgauuggcucuguuucucucaccauuuccacaauaugcuucuucaugcaaauugccaucuugauaacuacuguaacauugcauuucaagcaauaugaauucaacucccccccaaacaaccaagugaugcugugugaaccaacaauaauagaaagaaauauaacagagauaguguaucugaccaacaccaccauagagaaggaaauaugccccaaacuagcagaauacagaaauuggucaaagccgcaaugugacauuacaggguuugcaccuuuuucuaaggacaauucgauuaggcuuuccgcugguggggacaucugggugacaagagaaccuuaugugucaugcgauccugacaaguguuaucaauuugcccuuggacagggaacaacacuaaacaacguacauucaaauaacacaguacgugauaggaccccuuaucggacccuauugaugaaugaguuagguguuccuuuucaucuggggaccaagcaagugugcauagcaugguccagcucaaguugucacgauggaaaagcauggcugcauguuuguauaacgggggaugauaaaaaugcaacugcuagcuuuauuuacaaugggaggcuuguagauaguguuguuucaugguccaaagaaauccucaggacccaggagucagaaugcguuuguaucaauggaacuuguacaguaguaaugacugaugggagugcuucaggaaaagcugauacuaaaauacuauucauugaggaggggaaaaucguucauacuagcacauugucaggaagugcucagcaugucgaggagugcuccugcuauccucgauauccuggugucagaugugucugcagagacaacuggaaaggauccaauaggcccaucguagauauaaacauaaaggaucauagcauugucuccaguuauguguguucaggacuuguuggagacacacccagaaaaaacgacagcuccagcaguagccauuguuuggauccuaacaaugaggaagguggucauggggugaaaggcugggccuuugaugauggaaaugacguguggaugggaagaacgaucagcgagaagucacgcuuaggguaugaaaccuucaaagucauugaaggcugguccaacccuaaguccaaauugcagauaaauaggcaagucauaguugacagagguaauagguccgguuauucugguauuuucucuguugaaggcaaaagcugcaucaaucggugcuuuuauguggaguugauaaggggaagaaaagaggaaacugaagucuuguggaccucaaacaguauuguuguguuuuguggcaccucagguacauauggaacaggcucauggccugauggggcggacaucaauaucaugccuauauaa

SEQ ID NO: 51421 - RNA, 1410 nt, Artificial Sequence
  derived and/or modified CDS sequence (wt) from neuraminidase__InfluenzaA__ADM07507
augaauccaaaucaaaagauaauaacgauuggcucuguuucucucaccauuuccacaauaugcuucuuuaugcaaaccgccauccugauaacuacuguaacauugcauuucaagcaauuugaauucaacucccccccaaacaaccaagugaugcugugugaaccagcaauaauagaaagaaacauaacagagauaguguaucugaccaacaccaccauagagaaggaaauaugccccaaacuagcagaauacagaaauuggucaaagccgcaaugugacauuacaggauuugcaccuuuuucuaaggacaauucgauuaggcuuuccgcugguggggacaucugggugacaagagaaccuuaugugucuugcgauccagacaaguguuaucaauuugcccuuggacagggaacaacacuaaacaacgugcauucaaauaacacaguacgugauaggaccccuuaucggacucuauugaugaaugaguuagguguuccuuuucaucuggggaccaagcaagugugcauagcaugguccagcucaaguugucacgauggaaaagcauggcugcauguuuguauaacgggggaugauaaaaaugcaacugcuagcuucauuuacaaugggaggcuuguagauaguguuguuucaugguccaaagaaauccucaggacccaggagucagaaugcguuuguaucaauggaacuuguacaguaguaaugacugaugggagugcuucaggaaaagcugauacuaaaauacuauucauugaggaggggaaaaucguucauacuagcacauugucaggaagugcucagcaugucgaggagugcuccugcuauccucgauauccuggugucagaugugucugcagagacaacuggaaaggcuccaauaggcccaucguagauauaaacauaaaggaucauagcauuguuuccaguuauguguguucaggacuuguuggagacacacccagaaaaaacgacagcuccagcaguagccauuguuuggauccuaacaaugaagaagguggucauggagugaaaggcugggccuuugaugauggaaaugacguguggaugggaagaacgaucagcgagaaaucacgcuuaggguaugaaaccuucaaagucauugaaggcugguccaacccuaaguccaaauugcagauaaauaggcaagucauaguugacagagguaauagguccgguuauucugguauuuucucuguugaaggcaaaagcugcaucaaucggugcuuuuauguggaguugauaaggggaaggaaagaggaaaccgaagucuuguggaccucaaacaguauuguuguguuuuguggcaccucagguacauauggaacaggcucauggccugauggggcggacaucaaucucaugccuauauaa

SEQ ID NO: 51422 - RNA, 1410 nt, Artificial Sequence
  derived and/or modified CDS sequence (wt) from neuraminidase__InfluenzaA__ADM12820
augaauccaaaucaaaagauaauaacgauuggcucuguuucucucaccauuuccacaauaugcuucuucaugcaaauugccaucuugauaacuacuguaacauugcauuucaagcaauauaaauucaacucccccccaaacaaccaagugaugcugugugaaccaacaauaauagaaagaaacauaacagagauaguguaucugaccaacaccaccauagagaaggaaauaugccccaaacuagcagaauacagaaauuggucaaaaccgcaaugugacauuacgggauuugcaccuuuuucuaaggacaauucgauuaggcuuuccgcugguggggacaucugggugacaagagaaccuuaugugucaugcgauccugacaaguguuaucaauuugcccuuggacagggaacaacacuaaacaacgugcauucaaauaacacaguacgugauaggaccccuuaucggacccuauugaugaaugaguuagguguuccuuuucaucuggggaccaagcaagugugcauagcaugguccagcucgaguugucacgauggaaaagcauggcugcauguuuguauaacgggggaugauaaaaaugcaacugcuagcuucauuuacaaugggaggcuuguagauaguguuguuucaugguccaaagaaauucucaggacccaggagucagaaugcguuuguaucaauggaacuuguacaguaguaaugacugauggaagugcuucaggaaaagcugauacuaaaauacuauucauugaggaggggaaaauuguucauacuagcacauugucaggaagugcucagcaugucgaggagugcucuugcuauccucgauauccuggugucagaugugucugcagagacaacuggaaaggcuccaauaggcccaucguagauauaaacauaaaggaucauagcauuguuuccaguuauguguguucaggacuuguuggagacacacccagaaaaaacgacagcuccagcaguagccauuguuuggauccuaacaaugaagaagguggucauggagugaaaggcugggccuuugaugauggaaaugacguguggaugggaagaacaaucaacgagacgucacgcuuaggguaugaaaccuucaaagucauugaaggcugguccaacccuaaguccaaauugcagauaaauaggcaagucauaguugacagagguaauagguccgguuauucugguauuuucucuguugaaggcaaaagcugcaucaaucggugcuuuuauguggaguugauuaggggaagaaaagaggaaacugaagucuuguggaccucaaacaguauuguuguguuuuguggcaccucagguacauauggaacaggcucauggccugauggggcggaccucaaucucaugccuauauaa

SEQ ID NO: 51423 - RNA, 1410 nt, Artificial Sequence; identical to SEQ ID NO: 51422
  derived and/or modified CDS sequence (wt) from neuraminidase__InfluenzaA__ADM12831

SEQ ID NO: 51424 - RNA, 1410 nt, Artificial Sequence
  derived and/or modified CDS sequence (wt) from neuraminidase__InfluenzaA__ADM12842
augaauccaaaucaaaagauaauaacgauuggcucuguuucucucaccauuuccacaauaugcuucuucaugcaaauugccaucuugauaacuacuguaacauugcauuucaagcaauauaaauucaacucccccccaaacaaccaagugaugcugugugaaccaacaauaauagaaagaaacauaacagagauaguguaucugaccaauaccaccauagagaaggaaauaugccccaaacuagcagaauacagaaauuggucaaaaccgcaaugugacauuacgggauuugcaccuuuuucuaaggacaauucgauuaggcuuuccgcugguggggacaucugggugacaagagaaccuuaugugucaugcgauccugacaaguguuaucaauuugcccuuggacagggaacaacacuaaacaacgugcauucaaauaacacaguacgugauaggaccccuuaucggacccuauugaugaaugaguuagguguuccuuuucaucuggggaccaagcaagugugcauagcaugguccagcucgaguugucacgauggaaaagcauggcugcauguuuguauaacgggggaugauaaaaaugcaacugcuagcuucauuuacaaugggaggcuuguagauaguguuguuucaugguccaaagaaauucucaggacccaggagucagaaugcguuuguaucaauggaacuuguacaguaguaaugacugauggaagugcuucaggaaaagcugauacuaaaauacuauucauugaggaggggaaaauuguucauacuagcacauugucaggaagugcucagcaugucgaggagugcucuugcuauccucgauauccuggugucagaugugucugcagagacaacuggaaaggcuccaauaggcccaucguagauauaaacauaaaggaucauagcauuguuuccaguuauguguguucaggacuuguuggagacacacccagaaaaaacgacagcuccagcaguagccauuguuuggauccuaacaaugaagaagguggucauggagugaaaggcugggccuuugaugauggaaaugacguguggaugggaagaacaaucaacgagacgucacgcuuaggguaugaaaccuucaaagucauugaaggcugguccaacccuaaguccaaauugcagauaaauaggcaagucauaguugacagagguaauagguccgguuauucugguauuuucucuguugaaggcaaaagcugcaucaaucggugcuuuuauguggaguugauuaggggaagaaaagaggaaacugaagucuuguggaccucaaacaguauuguuguguuuuguggcaccucagguacauauggaacaggcucauggccugauggggcggaccucaaucucaugccuauauaa

SEQ ID NO: 51425 - RNA, 1410 nt, Artificial Sequence
  derived and/or modified CDS sequence (wt) from neuraminidase__InfluenzaA__ADM12853
augaauccaaaucaaaagauaauaacgauuggcucuguuucucucaccauuuccacaauaugcuucuucaugcaaauugccaucuugauaacuacuguaacauugcauuucaagcaauauaaauucaacucccccccaaacaaccaagugaugcugugugaaccaacaauaauagagagaaacauaacagagauaguguaucugaccaacaccaccauagagaaggaaauaugccccaaacuagcagaauacagaaauuggucaaaaccgcaaugugacauuacgggauuugcaccuuuuucuaaggacaauucgauuaggcuuuccgcugguggggacaucugggugacaagagaaccuuaugugucaugcgauccugacaaguguuaucaauuugcccuuggacagggaacaacacuaaacaacgugcauucaaauaacacaguacgugauaggaccccuuaucggacccuauugaugaaugaguuagguguuccuuuucaucuggggaccaagcaagugugcauagcaugguccagcucgaguugucacgauggaaaagcauggcugcauguuuguauaacgggggaugauaaaaaugcaacugcuagcuucauuuacaaugggaggcuuguagauaguguuguuucaugguccaaagaaauucucaggacccaggagucagaaugcguuuguaucaauggaacuuguacaguaguaaugacugauggaagugcuucaggaaaagcugauacuaaaauacuauucauugaggaggggaaaauuguucauacuagcacauugucaggaagugcucagcaugucgaggagugcucuugcuauccucgauauccuggugucagaugugucugcagagacaacuggaaaggcuccaauaggcccaucguagauauaaacauaaaggaucauagcauuguuuccaguuauguguguucaggacuuguuggagacacacccagaaaaaacgacagcuccagcaguagccauuguuuggauccuaacaaugaagaagguggucauggagugaaaggcugggccuuugaugauggaaaugacguguggaugggaagaacaaucaacgagacgucacgcuuaggguaugaaaccuucaaagucauugaaggcugguccaacccuaaguccaaauugcagauaaauaggcaagucauaguugacagagguaauagguccgguuauucugguauuuucucuguugaaggcaaaagcugcaucaaucggugcuuuuauguggaguugauuaggggaagaaaagaggaaacugaagucuuguggaccucaaacaguauuguuguguuuuguggcaccucagguacauauggaacaggcucauggccugauggggcggaccucaaucucaugccuauauaa

SEQ ID NO: 51426 - RNA, 1410 nt, Artificial Sequence
  derived and/or modified CDS sequence (wt) from neuraminidase__InfluenzaA__ADM12864
augaauccaaaccaaaagauaauaaccauugguucggucuguaugacaauuggaauggcuaacuuaauauuacaaauuggaaacauaaucucaauauggauuagccacucaauucaacuugggaaucaaaaucagauugaaacaugcaaucaaagcgucauuacuuaugaaaacaacacuuggguaaaucagacauauguuaacaucagcaacaccaacuuugcugcuggacagucagugguuuccgugaaauuagcgggcaauuccucucucugcccuguuaguggaugggcuauauacaguaaagacaacaguauaagaaucgguuccaagggggauguguuugucauaagggaaccauucauaucaugcucccccuuggaaugcagaaccuucuucuugacucaaggggccuugcuaaaugacaaacauucuaauggaaccauuaaagacaggagcccauaucgaacccuaaugagcuguccuauuggugaaguucccucuccauacaacucaagauuugagucagucgcuuggucagcaagugcuugucaugauggcaucaauuggcuaacaauuggaauuucuggcccagacaauggggcaguggcuguguuaaaguacaauggcauaauaacagacacuaucaagaguuggagaaacaauauauugagaacacaagagucugaaugugcauguguaaaugguucuugcuuuacuguaaugaccgauggaccaagugauggacaggccucauacaagaucuucagaauagaaaagggaaagauagucaaaucagucgaaaugaaugccccuaauuaucacuaugaggaaugcuccuguuauccugauucuagugaaaucacaugugugugcagggauaacuggcauggcucgaaucgaccgugggugucuuucaaccagaaucuggaauaucagauaggauacauaugcagugggauuuucggagacaauccacgcccuaaugauaagacaggcaguugugguccaguaucgucuaauggagcaaauggaguaaaaggauuuucauucaaauacggcaaugguguuuggauagggagaacuaaaagcauuaguucaagaaacgguuuugagaugauuugggauccgaacggauggacugggacagacaauaacuucucaauaaagcaagauaucguaggaauaaaugaguggucaggauauagcgggaguuuuguucagcauccagaacuaacagggcuggauuguauaagaccuugcuucuggguugaacuaaucagagggcgacccaaagagaacacaaucuggacuagcgggagcagcauauccuuuugugguguaaacagugacacuguggguuggucuuggccagacggugcugaguugccauuuaccauugacaaguaa

SEQ ID NO: 51427 - RNA, 1410 nt, Artificial Sequence; identical to SEQ ID NO: 51004
  derived and/or modified CDS sequence (wt) from neuraminidase__InfluenzaA__ADM12874

SEQ ID NO: 51428 - RNA, 1410 nt, Artificial Sequence
  derived and/or modified CDS sequence (wt) from neuraminidase__InfluenzaA__ADM12884
augaauccaaaccaaaagauaauaaccauugguucggucuguaugacaauuggaauggcuaacuuaauauuacaaauuggaaacauaaucucaauauggauuagccacucaauucaacuugggaaucaaaaucagauugaaacaugcaaucaaagcgucauuacuuaugaaaacaacacuuggguaaaucagacauauguuaacaucagcaacaccaacuuugcugcuggacagucagugguuuccgugaaauuagcgggcaauuccucucucugcccuguuaguggaugggcuauauacaguaaagacaacaguauaagaaucgguuccaagggggauguguuugucauaagggaaccauucauaucaugcucccccuuggaaugcagaaccuucuucuugacucaaggggccuugcuaaaugacaaacauucuaauggaaccauuaaagacaggagcccauaucgaacccuaaugagcuguccuauuggugaaguucccucuccauacaacucaagauuugagucagucgcuuggucagcaagugcuugucaugauggcaucaauuggcuaacaauuggaauuucuggcccagacaauggggcaguggcuguguuaaaguacaacggcauaauaacagacacuaucaagaguuggagaaacaauauauugagaacacaagagucugaaugugcauguguaaaugguucuugcuuuacuguaaugaccgauggaccaagugauggacaggccucauacaagaucuucagaauagaaaagggaaagauagucaaaucagucgaaaugaaugccccuaauuaucacuaugaggaaugcuccuguuauccugauucuagugaaaucacaugugugugcagggauaacuggcauggcucgaaucgaccgugggugucuuucaaccagaaucuggaauaucagauaggauacauaugcagugggaucuucggagacaauccacgcccuaaugauaagacaggcaguugugguccaguaucgucuaauggagcaaauggaguaaaaggauuuucauucaaauacggcaaugguguuuggauaggaagaacuaaaagcauuaguucaagaaacgguuuugagaugauuugggauccgaacggauggacugggacagacaauaacuucucaauaaagcaagauaucguaggaauaaaugaguggucaggauauagcgggaguuuuguucagcauccagaacuaacagggcuggauuguauaagaccuugcuucuggguugaacuaaucagagggcgacccaaagagaacacaaucuggacuagcgggagcagcauauccuuuugugguguaaacagugacacuguggguuggucuuggccagacggugcugaguugccauuuaccauugacaaguaa

SEQ ID NO: 51429 - RNA, 1410 nt, Artificial Sequence
  derived and/or modified CDS sequence (wt) from neuraminidase__InfluenzaA__ADM12894
augaauccaaaccaaaagauaauaaccauugguucggucuguaugacaauuggaauggcuaacuuaauauuacaaauuggaaacauaaucucaauauggauuagccacucaauucaacuugggaaucaaaaucagauugaaacaugcaaucaaagcgucauuacuuaugaaaacaacacuuggguaaaucagacauauguuaacaucagcaacaccaacuuugcugcuggacagucagugguuuccgugaaauuagcgggcaauuccucucucugcccuguuaguggaugggcuauauacaguaaagacaacaguauaagaaucgguuccaagggggauguguuugucauaagggaaccauucauaucaugcucccccuuggaaugcagaaccuucuucuugacucaaggggccuugcuaaaugacaaacauuccaauggaaccauuaaagacaggagcccauaucgaacccuaaugagcuguccuauuggugaaguucccucuccauacaacucaagauuugagucagucgcuuggucagcaagugcuugucaugauggcaucaauuggcuaacaauuggaauuucuggcccagacaauggggcaguggcuguguuaaaguacaacggcauaauaacagacacuaucaagaguuggagaaacaauauauugagaacacaagagucugaaugugcauguguaaaugguucuugcuuuacuguaaugaccgauggaccaagugauggacaguccucauacaagaucuucagaauagaaaagggaaagauagucaaaucagucgaaaugaaugccccuaauuaucacuaugaggaaugcuccuguuauccugauucuagugaaaucacaugugugugcagggauaacuggcauggcucgaaucgaccgugggugucuuucaaccagaaucuggaauaucagauaggauacauaugcagugggauuuucggagacaauccacgcccuaaugauaagacaggcaguugugguccaguaucgucuaauggagcaaauggaguaaaaggauuuucauucaaauacggcaaugguguuuggauagggagaacuaaaagcauuaguucaagaaacgguuuugagaugauuugggauccgaacggauggacugggacagacaauaacuucucaauaaagcaagauaucguaggaauaaaugaguggucaggauauagcgggaguuuuguucagcauccagaacuaacagggcuggauuguauaagaccuugcuucuggguugaacuaaucagagggcgacccaaagagaacacaaucuggacuagcgggagcagcauauccuuuugugguguaaacagugacacuguggguuggucuuggccagacggugcugaguugccauuuaccauugacaaguaa

SEQ ID NO: 51430 - RNA, 1410 nt, Artificial Sequence; identical to SEQ ID NO: 48750
  derived and/or modified CDS sequence (wt) from neuraminidase__InfluenzaA__ADM12904

SEQ ID NO: 51431 - RNA, 1410 nt, Artificial Sequence
  derived and/or modified CDS sequence (wt) from neuraminidase__InfluenzaA__ADM12914
augaauccaaaccaaaagauaauaaccauugguucggucuguaugacaauuggaauggcuaacuuaauauuacaaauuggaaacauaaucucaauauggauuagccacucaauucaacuugggaaucaaaaucagauugaaacaugcaaucaaagcgucauuacuuaugaaaacaacacuuggguaaaucagacauauguuaacaucagcaacaccaacuuugcugcuggacagucagugguuuccgugaaauuagcgggcaauuccucucucugcccuguuaguggaugggcuauauacaguaaagacaacaguauaagaaucgguuccaagggggauguguuugucauaagggaaccauucauaucaugcucccccuuggaaugcagaaccuucuucuugacucaaggggccuugcuaaaugacaaacauuccaauggaaccauuaaagacaggagcccauaucgaacccuaaugagcuguccuauuggugaaguucccucuccauacaacucaagauuugagucagucgcuuggucagcaagugcuugucaugauggcaucaauuggcuaacaauuggaauuucuggcccagacaauggggcaguggcuguguuaaaguacaacggcauaauaacagacacuaucaagaguuggagaaacaauauauugagaacacaagagucugaaugugcauguguaaaugguucuugcuuuacuguaaugaccgauggaccaagugauggacaggccucauacaagaucuucagaauagaaaagggaaagauagucaaaucagucgaaaugaaugccccuaauuaucacuaugaggaaugcuccuguuauccugauucuagugaaaucacaugugugugcagggauaacuggcauggcucgaaucgaccgugggugucuuucaaccagaaucuggaauaucagauaggauacauaugcagugggauuuucggagacaauccacgcccuaaugacaagacaggcaguugugguccaguaucgucuuauggagcaaauggaguaaaaggauuuucauucaaauacggcaaugguguuuggauagggagaacuaaaagcauuaguucaagaaacgguuuugagaugauuugggauccgaacggauggacugggacagacaauaacuucucaauaaagcaggauaucguaggaauaaaugaguggucaggauauagcgggaguuuuguucagcauccagaacuaacagggcuggauuguauaagaccuugcuucuggguugaacuaaucagagggcgacccaaagagaacacaaucuggacuagcggaagcagcauauccuuuugugguguaaacagugacacuguggguuggucuuggccagacggugcugaguugccauuuaccauugacaaguaa

SEQ ID NO: 51432 - RNA, 1410 nt, Artificial Sequence; identical to SEQ ID NO: 48750
  derived and/or modified CDS sequence (wt) from neuraminidase__InfluenzaA__ADM12924

SEQ ID NO: 51433 - RNA, 1410 nt, Artificial Sequence; identical to SEQ ID NO: 48750
  derived and/or modified CDS sequence (wt) from neuraminidase__InfluenzaA__ADM12934

SEQ ID NO: 51434 - RNA, 1410 nt, Artificial Sequence; identical to SEQ ID NO: 48750
  derived and/or modified CDS sequence (wt) from neuraminidase__InfluenzaA__ADM12944

SEQ ID NO: 51435 - RNA, 1410 nt, Artificial Sequence; identical to SEQ ID NO: 48750
  derived and/or modified CDS sequence (wt) from neuraminidase__InfluenzaA__ADM12954

SEQ ID NO: 51436 - RNA, 1410 nt, Artificial Sequence; identical to SEQ ID NO: 50304
  derived and/or modified CDS sequence (wt) from neuraminidase__InfluenzaA__ADM12964

SEQ ID NO: 51437 - RNA, 1410 nt, Artificial Sequence
  derived and/or modified CDS sequence (wt) from neuraminidase__InfluenzaA__ADM12974
augaauccaaaccaaaagauaauaaccauugguucggucuguaugacaauuggaauggcuaacuuaauauuacaaauuggaaacauaaucucaauauggauuagccacucaauucaacuugggaaucaaaaucagauugaaacaugcaaucaaagcgucauuacuuaugaaaacaacacuuggguaaaucagacauauguuaacaucaguaacaccaacuuugcugcuggacagucagugguuuccgugaaauuagcgggcaauuccucucucugcccuguuaguggaugggcuauauacaguaaagacaacaguauaagaaucgguuccaagggggauguguuugucauaagggaaccauucauaucaugcucccccuuggaaugcagaaccuucuucuugacucaaggggccuugcuaaaugacaaacauuccaauggaaccauuaaagacaggagcccauaucgaacccuaaugagcuguccuauuggugaaguucccucuccauacaacucaagauuugagucagucgcuuggucagcaagugcuugucaugauggcaucaauuggcuaacaauuggaauuucuggcccagacaauggggcaguggcuguguuaaaguacaacggcauaauaacagacacuaucaagaguuggagaaacaauauauugagaacacaagagucugaaugugcauguguaaaugguucuugcuuuacuguaaugaccgauggaccaagugauggacaggccucauacaagaucuucagaauagaaaagggaaagauagucaaaucagucgaaaugaaugccccuaauuaucacuaugaggaaugcuccuguuauccugauucuagugaaaucacaugugugugcagggauaacuggcauggcucgaaucgaccgugggugucuuucaaccagaaucuggaauaucagauaggauacauaugcagugggauuuucggagacaauccacgcccuaaugauaagaaaggcaguugugguccaguaucgucuaauggagcaaauggaguaaaaggauuuucauucaaauacggcaaugguguuuggauagggagaacuaaaagcauuaguucaagaaacgguuuugagaugauuugggauccgaacggauggacugggacagacaauaacuucucaauaaagcaagauaucguaggaauaaaugaauggucaggauauagcgggaguuuuguucagcauccagaacuaacagggcuggauuguauaagaccuugcuucuggguugaacuaaucagagggcgacccaaagagaacacaaucuggacuagcgggagcagcauauccuuuugugguguaaacagugacacuguggguuggucuuggccagacggugcugaguugccauuuaccauugacaaguaa

SEQ ID NO: 51438 - RNA, 1410 nt, Artificial Sequence
  derived and/or modified CDS sequence (wt) from neuraminidase__InfluenzaA__ADM12984
augaauccaaaccaaaagauaauaaccauugguucggucuguaugacaauuggaauggcuaacuuaauauuacaaauuggaaacauaaucucaauauggauuagccacucaauucaacuugggaaucaaaaucagauugaaacaugcaaucaaagcgucauuacuuaugaaaacaacacuuggguaaaucagacauauguuaacaucagcaacaccaacuuugcugcuggacagucagugguuuccgugaaauuagcgggcaauuccucucucugcccuguuaguggaugggcuauauacaguaaagacaacaguauaagaaucgguuccaagggggauguguuugucauacgggaaccauucauaucaugcucccccuuggaaugcagaaccuucuucuugacucaaggggccuugcuaaaugacaaacauuccaauggaaccauuaaagacaggagcccauaucgaacccuaaugagcuguccuauuggugaaguucccucuccauacaacucaagauuugagucagucgcuuggucagcaagugcuugucaugauggcaucaauuggcuaacaauuggaauuucuggcccagacaauggggcaguggcuguguuaaaguacaacggcauaauaacagacacuaucaggaguuggagaaacaauauauugagaacacaagagucugaaugugcauguguaaaugguucuugcuuuacuguaaugaccgauggaccaagugauggacaggccucauacaagaucuucagaauagaaaagggaaagauagucaaaucagucgaaaugaaugccccuaauuaucacuaugaggaaugcuccuguuauccugauucuagugaaaucacaugugugugcagggauaacuggcauggcucgaaucgaccgugggugucuuucaaccagaaucuggaauaucagauaggauacauaugcagugggauuuucggagacaauccacgcccuaaugauaagacaggcaguugugguccaguaucgucuaauggagcaaauggaguaaaaggauuuucauucaaauacggcaaugguguuuggauagggagaacuaaaagcauuaguucaagaaacgguuuugagaugauuugggauccgaacggauggacugggacagacaauaacuucucaauaaagcaagauaucguaggaauaaaugaguggucaggauauagcgggaguuuuguccagcauccagaacuaacagggcuggauuguauaagaccuugcuucuggguugaacuaaucagagggcgacccaaagagaacacaaucuggacuagcgggagcagcauauccuuuugugguguaaacagugacacuguggguuggucuuggccagacggugcugaguugccauuuaccauugacaaguaa

SEQ ID NO: 51439 - RNA, 1410 nt, Artificial Sequence; identical to SEQ ID NO: 49215
  derived and/or modified CDS sequence (wt) from neuraminidase__InfluenzaA__ADM12994

SEQ ID NO: 51440 - RNA, 1410 nt, Artificial Sequence; identical to SEQ ID NO: 49215
  derived and/or modified CDS sequence (wt) from neuraminidase__InfluenzaA__ADM13004

SEQ ID NO: 51441 - RNA, 1410 nt, Artificial Sequence
  derived and/or modified CDS sequence (wt) from neuraminidase__InfluenzaA__ADM13014
augaauccaaaccaaaagauaauaaccauugguucggucuguaugacaauuggaauggcuaacuuaauauuacaaauuggaaacauaaucucaauauggauuagccacucaauucaacuugggaaucaaaaucagauugaaacaugcaaucaaagcgucauuacuuaugaaaacaacacuuggguaaaucagacauauguuaacaucagcaacaccaacuuugcugcuggacagucagugguuuccgugaaauuagcgggcaauuccucucucugcccuguuaguggaugggcuauauacaguaaagacaacaguauaagaaucgguuccaagggggauguguuugucauaagggaaccauucauaucaugcucccccuuggaaugcagaaccuucuucuugacucaaggggccuugcuaaaugacaaacauuccaauggaaccauuaaagacaggagcccauaucgaacccuaaugagcuguccuauuggugaaguucccucuccauacaacucaagauuugagucagucgcuuggucagcaagugcuugucaugaugguaucaauuggcuaacaauuggaauuucuggcccagacaauggggcaguggcuguguuaaaguacaacggcauaauaacagacacuaucaagaguuggagaaacaauauauugagaacacaagagucugaaugugcauguguaaaugguucuugcuuuacuguaaugaccgauggaccaagugauggacaggccucauacaagaucuucagaauagaaaagggaaagauagucaaaucagucgaaaugaaugccccuaauuaucacuaugaggaaugcuccuguuauccugauucuagugaaaucacaugugugugcagggauaacuggcauggcucgaaucgaccgugggugucuuucaaccagaaucuggaauaucagauaggauacauaugcagugggauuuucggagacaauccacgcccuaaugauaagacaggcaguugugguccaguaucgucuaauggagcaaauggaguaaaaggauuuucauucaaauacggcaaugguguuuggauagggagaacuaaaagcauuaguucaagaaacgguuuugagaugauuugggauccgaacggauggacugggacagacaauaacuucucaauaaagcaagauaucguaggaauaaaugaauggucaggauauagcgggaguuuuguucagcauccagaacuaacagggcuggauuguauaagaccuugcuucuggguugaacuaaucagagggcgacccaaagagaacacaaucuggacuagcgggagcagcauauccuuuugugguguaaacagugacacuguggguuggucuuggccagacggugcugaguugccauuuaccauugacaaguaa

SEQ ID NO: 51442 - RNA, 1410 nt, Artificial Sequence
  derived and/or modified CDS sequence (wt) from neuraminidase__InfluenzaA__ADM13034
augaauccaaaccaaaagauaauaaccauugguucggucuguaugacaauuggaauggcuaacuuaauauuacaaauuggaaacauaaucucaauauggauuagccacucaauucaacuugggaaucaaaaucagauugaaacaugcaaucaaagcgucauuacuuaugaaaacaacacuuggguaaaucagacauauguuaacaucagcaacaccaacuuugcugcuggacagucagugguuuccgugaaauuagcgggcaauuccucucucugcccuguuaguggaugggcuauauacaguaaagacaacaguauaagaaucgguuccaagggggauguguuugucauaagggaaccauucauaucaugcucccccuuggaaugcagaaccuucuucuugacucaaggggccuugcuaaaugacaaacauuccaauggaaccaucaaagacaggagcccauaucgaacccuaaugagcuguccuauuggugaaguucccucuccauacaacucaagauuugagucagucgcuuggucagcaagugcuugucaugauggcaucaauuggcuaacaauuggaauuucuggcccagacaauggggcaguggcuguguuaaaguacaacggcauaauaacagacacuaucaagaguuggagaaacaauauauugagaacacaagagucugaaugugcauguguaaaugguucuugcuuuacuguaaugaccgauggaccaagugauggacaggccucauacaagaucuucagaauagaaaagggaaagauagucaaaucagucgaaaugaaugccccuaauuaucacuaugaggaaugcuccuguuauccugauucuagugaaaucacaugugugugcagggauaacuggcauggcucgaaucgaccgugggugucuuucaaccagaaucuggaauaucagauaggauacauaugcagugggauuuucggagacaauccacgcccuaaugauaagacaggcaauugugguccaguaucgucuaauggagcaaauggaguaaaaggauuuucauucaaauacggcaaugguguuuggauagggagaacuaaaagcauuaguucaagaaacgguuuugagaugauuugggauccgaacggauggacugggacagacaauaacuucucaauaaagcaagauaucguaggaauaaaugaguggucaggauauagcgggaguuuuguccagcauccagaacuaacagggcuggauuguauaagaccuugcuucuggguugaacuaaucagagggcgacccaaagagaacacaaucuggacuagcgggagcagcauauccuuuugugguguaaacagugacacuguggguuggucuuggccagacggugcugaguugccauuuaccauugacaaguaa

SEQ ID NO: 51443 - RNA, 1410 nt, Artificial Sequence
  derived and/or modified CDS sequence (wt) from neuraminidase__InfluenzaA__ADM13044
augaauccaaaccaaaagauaauaaccauugguucggucuguaugacaauuggaauggcuaacuuaauauuacaaauuggaaacauaaucucaauauggauuagccacucaauucaacuugggaaucaaaaucagauugaaacaugcaaucaaagcaucauuacuuaugaaaacaacacuuggguaaaucagacauauguuaacaucagcaacaccaacuuugcugcuggacagucagugguuuccgugaaauuagcgggcaauuccucucucugcccuguuaguggaugggcuauauacaguaaagacaacaguauaagaaucgguuccaagggggauguguuugucauaagggaaccauucauaucaugcucccccuuggaaugcagaaccuucuucuugacucaaggggccuugcuaaaugacaaacauuccaauggaaccauuaaagacaggagcccauaucgaacccuaaugagcuguccuauuggugaaguucccucuccauacaacucaagauuugagucagucgcuuggucagcaagugcuugucaugauggcaucaauuggcuaacaauuggaauuucuggcccagacaauggggcaguggcuguguuaaaguacaacggcauaauaacagacacuaucaagaguuggagaaacaauauauugagaacacaagagucugaaugugcauguguaaaugguucuugcuuuaccguaaugaccgauggaccaagugauggacaggccucauacaagaucuucagaauagaaaagggaaagauagucaaaucagucgaaaugaaugccccuaauuaucacuaugaggaaugcuccuguuauccugauucuagugaaaucacauguguaugcagggauaacuggcauggcucgaaucgaccgugggugucuuucaaccagaaucuggaauaucagauaggauacauaugcagugggauuuucggagacaauccacgcccuaaugauaagacaggcaguugugguccaguaucguccaauggagcaaauggaguaaaaggauuuucauucaaauacggcaaugguguuuggauagggagaacuaaaagcauuaguucaagaaacgguuuugagaugauuugggauccgaauggauggacugggacagacaauaacuucucaauaaagcaagauaucguaggaauaaaugaguggucaggauauagcgggaguuuuguucagcauccagaacuaacagggcuggauuguauaagaccuugcuucuggguugaacuaaucagagggcgacccaaagagaacacaaucuggacuagcgggagcagcauauccuuuugugguguaaacagugacacuguggguuggucuuggccagacggugcugaguugccauuuaccauugacaaguaa

SEQ ID NO: 51444 - RNA, 1410 nt, Artificial Sequence
  derived and/or modified CDS sequence (wt) from neuraminidase__InfluenzaA__ADM13054
augaauccaaaccaaaagauaauaaccauugguucggucuguaugacaauuggaauggcuaacuuaauauuacaaauuggaaacauaaucucaauauggauuagccacucaauucaacuugggaaucaaaaucagauugaaacaugcaaucaaagcgucauuacuuaugaaaacaacacuuggguaaaucagacauauguuaacaucagcaacaccaacuuugcugcuggacagucagugguuuccgugaaauuagcgggcaauuccucucucugcccuguuaguggaugggcuauauacaguaaagacaacaguauaagaaucgguuccaagggggauguguuugucauaagggaaccauucauaucaugcucccccuuggaaugcagaaccuucuucuugacucaaggggccuugcuaaaugacaaacauuccaauggaaccauuaaagacaggagcccauaucgaacccuaaugagcuguccuauuggugaaguucccucuccauacaacucaagauuugagucagucgcuuggucagcaagugcuugucaugauggcaucaauuggcuaacaauuggaauuucuggcccaaacaauggggcaguggcuguguuaaaguacaacggcauaauaacagacacuaucaagaguuggagaaacaauauauugagaacacaagagucugaaugugcauguguaaaugguucuugcuuuacuguaaugaccgauggaccaagugauggacaggccucauacaagaucuucagaauagaaaagggaaagauagucaaaucagucgaaaugaaugccccuaauuaucacuaugaggaaugcuccuguuauccugauucuagugaaaucacaugugugugcagggauaacuggcauggcucgaaucgaccgugggugucuuucaaccagaaucuggaauaucagauaggauacauaugcagugggauuuucggagacaauccacgcccuaaugauaagacaggcaguugugguccaguaucgucuaauggagcaaauggaguaaaaggauuuucauucaaauacggcaaugguguuuggauagggagaacuaaaagcauuaguucaagaaacgguuuugagaugauuugggauccgaacggauggacugggacagacaauaacuucucaauaaagcaagauaucguaggaauaaaugaauggucaggauauagcgggaguuuuguucagcauccagaacuaacagggcuggauuguauaagaccuugcuucuggguugaacuaaucagagggcgacccaaagagaacacaaucuggacuagcgggagcagcauauccuuuugugguguaaacagugacacuguggguuggucuuggccagacggugcugaguugccauuuaccauugacaaguaa

SEQ ID NO: 51445 - RNA, 1410 nt, Artificial Sequence; identical to SEQ ID NO: 51118
  derived and/or modified CDS sequence (wt) from neuraminidase__InfluenzaA__ADM13064

SEQ ID NO: 51446 - RNA, 1410 nt, Artificial Sequence
  derived and/or modified CDS sequence (wt) from neuraminidase__InfluenzaA__ADM13074
augaauccaaaccaaaagauaauaaccauugguucggucuguaugacaauuggaauggcuaacuuaauauuacaaauuggaaacauaaucucaauauggauuagccacucaauucaacuugggaaucaaaaucagauugaaacaugcaaucaaagcgucauuacuuaugaaaacaacacuuggguaaaucagacauauguuaacaucagcaacaccaacuuagcugcuggacagucagugguuuccgugaaauuagcgggcaauuccucucucugcccuguuaguggaugggcuauauacaguaaagacaacaguauaagaaucggcuccaagggggauguguuugucauaagggaaccauucauaucaugcucccccuuggaaugcagaaccuucuucuugacucaaggggccuugcuaaaugacaaacauuccaauggaaccauuaaagacaggagcccauaucgaacccuaaugagcuguccuauuggugaaguucccucuccauacaacucaagauuugagucagucgcuuggucagcaagugcuugucaugauggcaucaauuggcuaacaauuggaauuucuggcccagacaauggggcaguggcuguguuaaaguacaacggcauaauaacagacacuaucaagaguuggagaaacaauauauugagaacacaagagucugaaugugcauguguaaaugguucuugcuuuacuguaaugaccgauggaccaagugauggacaggccucauacaagaucuucagaauagaaaagggaaagauagucaaaucagucgaaaugaaugccccuaauuaucacuaugaggaaugcuccuguuauccugauucuagugaaaucacaugugugugcagggauaacuggcauggcucgaaucgaccguggguaucuuucaaccagaaucuggaauaucagauaggauacauaugcagugggauuuucggagacaauccacgcccuaaugauaagacaggcaguugugguccaguaucgucuaauggagcaaauggaguaaaaggauuuucauucaaauacggcaaugguguuuggauagggagaacuaaaagcauuaguucaagaaacgguuuugagaugauuugggauccgaacggauggacugggacagacaauaaauucucaauaaagcaagauaucguaggaauaaaugaguggucaggauauagcgggaguuuuguucagcauccagaacuaacagggcuggauuguauaagaccuugcuucuggguugaacuaaucagagggcgacccaaagagaacacaaucuggacuagcgggagcagcauauccuuuugugguguaaacagugacacuguggguuggucuuggccagacggugcugaguugccauuuaccauugacaaguaa

SEQ ID NO: 51447 - RNA, 1410 nt, Artificial Sequence
  derived and/or modified CDS sequence (wt) from neuraminidase__InfluenzaA__ADM13084
augaauccaaaccaaaagauaauaaccauugguucggucuguaugacaauuggaauggcuaacuuaauauuacaaauuggaaacauaaucucaauauggauuagccacucaauucaacuugggaaucaaaaucagauugaaacaugcaaucaaagcgucauuacuuaugaaaacaacacuuggguaaaucagacauauguuaacaucagcaacaccaacuuugcugcuggacagucagugguuuccgugaaauuagcgggcaauuccucucucugcccuguuaguggaugggcuauauacaguaaagacaacaguauaagaaucggcuccaagggggauguguuugucauaagggaaccauucauaucaugcucccccuuggaaugcagaaccuucuucuugacucaaggggccuugcuaaaugacaaacauuccaauggaaccauuaaagacaggagcccauaucgaacccuaaugagcuguccuauuggugaaguucccucuccauacaacucaagauuugagucagucgcuuggucagcaagugcuugucaugauggcaucaauuggcuaacaauuggaauuucuggcccagacaauggggcaguggcuguguuaaaguacaacggcauaauaacagacacuaucaagaguuggagaaacaauauauugagaacacaagagucugaaugugcauguguaaaugguucuugcuuuacugugaugaccgauggaccaagugauggacaggccucauacaagaucuucagaauagaaaagggaaagauagucaaaucagucgaaaugaaugccccuaauuaucacuaugaggaaugcuccuguuauccugauucuagugaaaucacaugugugugcagggauaacuggcauggcucgaaucgaccguggguaucuuucaaccagaaucuggaauaucagauaggauacauaugcagugggauuuucggagacaauccacgcccuaaugauaagacaggcaguugugguccaguaucgucuaauggagcaaauggaguaaaaggauuuucauucaaauacggcaaugguguuuggauagggagaacuaaaagcauuaguucaagaaacgguuuugagaugauuugggauccgaacggauggacugggacagacaauaaauucucaauaaagcaagauaucguaggaauaaaugaguggucaggauauagcgggaguuuuguucagcauccagaacuaacagggcuggauuguauaagaccuugcuucuggguugaacuaaucagagggcgacccaaagagaacacaaucuggacuagcgggagcagcauaucauuuugugguguaaacagugacacuguggguuggucuuggccagacggugcugaguugccauuuaccauugacaaguaa

SEQ ID NO: 51448 - RNA, 1410 nt, Artificial Sequence
  derived and/or modified CDS sequence (wt) from neuraminidase__InfluenzaA__ADM13094
augaauccaaaccaaaagauaauaaccauugguucggucuguaugacaauuggaauggcuaacuuaauauuacaaauuggaaacacaaucucaauauggauuagccacucaauucaacuugggaaucaaaaucagauugaaacaugcaaucaaagcgucauuacuuaugaaaacaacacuuggguaaaucagacauauguuaacaucagcaacaccaacuuugcugcuggacagucagugguuuccgcgaaauuagcgggcaauuccucucucugcccuguuaguggaugggcuauauacaguaaagacaacaguauaagaaucgguuccaagggggauguguuugucauaagggaaccauucauaucaugcucccccuuggaaugcagaaccuucuucuugacucaaggggccuugcuaaaugacaaacauuccaauggaaccauuaaagacaggagcccauaucgaacccuaaugagcuguccuauuggugaaguucccucuccauacaacucaagauuugagucagucgcuuggucagcaagugcuugucaugauggcaucaauuggcuaacaauuggaauuucuggcccagacaauggggcaguggcuguguuaaaguacaacggcauaauaacagacacuaucaagaguuggagaaacaauauauugagaacacaagagucugaaugugcauguguaaaugguucuugcuuuacuguaaugaccgauggaccaagugauggacaggccucauacaagaucuucagaauagaaaagggaaagauagucaaaucagucgaaaugaaugccccuaauuaucacuaugaggaaugcuccuguuauccugauucuagugaaaucacaugugugugcagggauaacuggcauggcucgaaucgaccguggguaucuuucaaccagaaucuggaauaucagauaggauacauaugcagugggauuuucggagacaauccacgcccuaaugauaagacaggcaguugugguccaguaucgucuaauggagcaaauggaguaaaaggauuuucauucaaauacggcaaugguguuuggauagggagaacuaaaagcauuaguucaagaaacgguuuugagaugauuugggauccgaacggauggacugggacagacaauaacuucucaauaaagcaagauaucguaggaauaaaugaguggucaggauauagcgggaguuuuguucagcauccagaacuaacagggcuggauuguauaagaccuugcuucuggguugaacuaaucagagggcgacccaaagagaacacaaucuggacuagcgggagcagcauauccuuuugugguguaaacagugacacuguggguuggucuuggccggacggugcugaguugccauuuaccauugacaaguaa

SEQ ID NO: 51449 - RNA, 1410 nt, Artificial Sequence; identical to SEQ ID NO: 50720
  derived and/or modified CDS sequence (wt) from neuraminidase__InfluenzaA__ADM13104

SEQ ID NO: 51450 - RNA, 1410 nt, Artificial Sequence
  derived and/or modified CDS sequence (wt) from neuraminidase__InfluenzaA__ADM13124
augaauccaaaccaaaagauaauaaccauugguucggucuguaugacaauuggaauggcuaacuuaauauuacaaauuggaaacauaaucucaauauggauuagccacucaauucaacuugggaaucaaaaucagauugaaacaugcaaucaaagcgucauuacuuaugaaaacaacacuuggguaaaucagacauauguuaacaucagcaacaccaacuuugcugcuggacagucagugguuuccgugaaauuagcgggcaauuccucucucugcccuguuaguggaugggcuauauacaguaaagacaacaguauaagaaucgguuccaagggggauguguuugucauaagggagccauucauaucaugcucccccuuggaaugcagaaccuucuucuugacucaaggggccuugcuaaaugacaaacauuccaauggaaccauuaaagacaggagcccauaucgaacccuaaugagcuguccuauuggugaaguucccucuccauacaacucaagauuugagucagucgcuuggucagcaagugcuugucaugauggcaucaauuggcuaacaauuggaauuucuggcccagacaauggggcaguggcuguguuaaaguacaacggcauaauaacagacacuaucaagaguuggagaaacaauauauugagaacacaagagucugaaugugcauguguaaaugguucuugcuuuacuguaaugaccgauggaccaagugauggacaggccucauacaagaucuucaaaauagaaaagggaaagauagucaaaucagucgaaaugaaugccccuaauuaucacuaugaggaaugcuccuguuauccugauucuagugaaaucacaugugugugcagggauaacuggcauggcucgaaucgaccguggguaucuuucaaccagaaucuggaauaucagauaggauacauaugcagugggauuuucggagacaauccacgcccuaaugauaagacaggcaguugugguccaguaucgucuaauggagcaaauggaguaaaaggauuuucauucaaauacggcaaugguguuuggauagggagaacuaaaagcauuaguucaagaaaugguuuugagaugauuugggauccgaacggauggacugggacagacaauaacuucucaauaaagcaagauaucguaggaauaaaugaguggucaggauauagcgggaguuuuguucagcauccagaacuaacagggcuggauuguauaagaccuugcuucuggguugaacuaaucagagggcgacccaaagagaacacaaucuggacuagcgggagcagcauauccuuuugugguguaaacagugacacuguggguuggucuuggccggacggugcugaguugccauuuaccauugacaaguaa

SEQ ID NO: 51451 - RNA, 1410 nt, Artificial Sequence
  derived and/or modified CDS sequence (wt) from neuraminidase__InfluenzaA__ADM13134
augaauccaaaccaaaagauaauaaccauugguucggucuguaugacaauuggaauggcuaacuuaauauuacaaauuggaaacauaaucucaauauggauuagccacucaauucaacuugggaaucaaaaucagauugaaacaugcaaucaaagcgucauuacuuaugaaaacaacacuuggguaaaucagacauauguuaacaucaguaacaccaacuuugcugcuggacagucagugguuuccgugaaauuagcgggcaauuccucucucugcccuguuaguggaugggcuauauacaguaaagacaacaguauaagaaucgguuccaagggggauguguuugucauaagagaaccauucauaucaugcucccccuuggaaugcagaaccuucuucuugacucaaggggccuugcuaaaugacaaacauuccaauggaaccauuaaagacaggagcccauaucgaacccuaaugagcuguccuauuggugaaguucccucuccauacaacucaagauuugagucagucgcuuggucagcaagugcuugucaugauggcaucaauuggcuaacaauuggaauuucuggcccagacaauggggcaguggcuguguuaaaguacaacggcauaauaacagacacuaucaagaguuggagaaacaauacauugagaacacaagagucugaaugugcauguguaaaugguucuugcuuuacuguaaugaccgauggaccaagugauggacaggccucauacaagaucuucagaauagaaaagggaaagauagucaaaucagucgaaaugaaugccccuaauuaucacuaugaggaaugcuccuguuauccugauucuagugaaaucacaugugugugcagggauaacuggcauggcucgaaucgaccgugggugucuuucaaccagaaucuggaauaucagauaggauacauaugcagugggauuuucggagacaauccacgcccuaaugauaagaaaggcaguugugguccaguaucgucuaauggagcaaauggaguaaaaggauuuucauucaaauacggcaaugguguuuggauagggagaacuaaaagcauuaguucaagaaacgguuuugagaugauuugggauccgaacggauggacugggacagacaauaacuucucaauaaagcaagauaucguaggaauaaaugaauggucaggauauagcgggaguuuuguucagcauccagaacuaacagggcuggauuguauaagaccuugcuucuggguugaacuaaucagagggcgacccaaagagaacacaaucuggacuagcgggagcagcauauccuuuugugguguaaacagugacacuguggguuggucuuggccagacggugcugaguugccauuuaccauugacaaguaa

SEQ ID NO: 51452 - RNA, 1410 nt, Artificial Sequence
  derived and/or modified CDS sequence (wt) from neuraminidase__InfluenzaA__ADM13154
augaauccaaaccaaaagauaauaaccauugguucggucuguaugacaauuggaauggcuaacuuaauauuacaaauuggaaacauaaucucaauauggauuagccacucaauucaacuugggaaucaaaagcagauugaaacaugcaaucaaagcgucuuuacuuaugaaaacaacacuuggguaaaucagacauauguuaacaucagcaacaccaacuuugcugcuggacagucagugguuuccgugaaauuagcgggcaauuccucucucugcccuguuaguggaugggcuauauacaguaaagacaacaguauaagaaucgguuccaagggggauguguuugucauaagggaaccauucauaucaugcucccccuuggaaugcagaaccuucuucuugacucaaggggccuugcuaaaugacaaacauuccaauggaaccauuaaagacaggagcccauaucgaacccuaaugagcuguccuauuggugaaguucccucuccauacaacucaagauuugagucagucgcuuggucagcaagugcuugucaugauggcaucaauuggcuaacaauuggaauuucuggcccagacaauggggcaguggcuguguuaaaguacaacggcauaauaacagacacuaucaagaguuggagaaacaauauauugagaacacaagagucugaaugugcauguguaaaugguucuugcuuuacuguaaugaccgauggaccaagugauggacaggccucauacaagaucuucaaaauagaaaagggaaagauagucaaaucagucgaaaugaaugccccuaauuaucacuaugaggaaugcuccuguuauccugauucuagugaaaucacaugugugugcagggauaacuggcauggcucgaaucgaccgugggugucuuucaaccagaaucuggaauaucagauaggauacauaugcagugggauuuucggagacaauccacgcccuaaugauaagacaggcaguugugguccaguaucgucuaauggagcaaauggaguaaaaggauuuucauucaaauacggcaaugguguuuggauagggagaacuaaaagcauuaguucaagaaacgguuuugagaugauuugggauccgaacggauggacuggaacagacaauaacuucucaauaaagcaagauaucguaggaauaaaugaguggucaggauauagcgggaguuuuguucagcauccagaacuaacagggcuggauuguauaagaccuugcuucuggguugaacuaaucagagggcgacccaaagagaacacaaucuggacuagcgggagcagcauauccuuuugugguguaaacagugacacuguggguuggucuuggccagacggugcugaguugccauuuaccauugacaaguaa

SEQ ID NO: 51453 - RNA, 1410 nt, Artificial Sequence
  derived and/or modified CDS sequence (wt) from neuraminidase__InfluenzaA__ADM13164
augaauccaaaccaaaagauaauaaccauugguucggucuguaugacaauuggaauggcuaacuuaauauuacaaauuggaaacauaaucucaauauggauuagccacucaauucaacuugggaaucaaaaucagauugaaacaugcaaucaaagcgucauuacuuaugaaaacaacacuuggguaaaucagacauauguuaacaucagcaacaccaacuuugcugcuggacagucagugguuuccgugaaauuagcgggcaauuccucucucugcccuguuaguggaugggcuauauacaguaaagacaacaguauaagaaucgguuccaagggggauguguuugucauaagggaaccauucauaucaugcucccccuuggaaugcagaaccuucuucuugacucaaggggccuugcuaaaugacaaacauuccaauggaaccauuaaagacaggagcccauaucgaacccuaaugagcuguccuauuggugaaguucccucuccauacaacucaagauuugagucagucgcuuggucagcaagugcuugucaugauggcaucaauuggcuaacaauuggaauuucuggcccagacaauggggcaguggcuguguuaaaguacaacggcauaauaacagacacuaucaagaguuggagaaacaauauauugagaacacaagagucugaaugugcauguguaaaugguucuugcuuuacuguaaugaccgauggaccaagugauggacaggccucauacaagaucuucagaauagaaaagggaaagauagucaaaucagucgaaaugaaugccccuaauuaucacuaugaggaaugcuccuguuauccugauucuagugaaaucacaugugugugcagggauaacuggcauggcucgaaucgaccgugggugucuuucaaccaggaucuggaauaucagauaggauacauaugcagugggauuuucggagacaauccacgcccuaaugauaagacaggcaguuguggcccaguaucgucuaauggagcaaauggaguaaaaggauuuucauucaaauacggcaaugguguuuggauagggagaacuaaaagcauuaguucaagaaacgguuuugagaugauuugggauccgaacggauggacugggacagacaauaacuucucaauaaagcaagauaucguaggaauaaaugaguggucaggauauagcgggaguuuuguccagcauccagaacuaacagggcuggauuguauaagaccuugcuucuggguugaacuaaucagagggcgacccaaagagaacacaaucuggacuagcgggagcagcauauccuuuugugguguaaacagugacacuguggguuggucuuggccagacggugcugaguugccauuuaccauugacaaguaa

SEQ ID NO: 51454 - RNA, 1410 nt, Artificial Sequence; identical to SEQ ID NO: 48947
  derived and/or modified CDS sequence (wt) from neuraminidase__InfluenzaA__ADM13174

SEQ ID NO: 51455 - RNA, 1410 nt, Artificial Sequence; identical to SEQ ID NO: 48947
  derived and/or modified CDS sequence (wt) from neuraminidase__InfluenzaA__ADM13184

SEQ ID NO: 51456 - RNA, 1410 nt, Artificial Sequence
  derived and/or modified CDS sequence (wt) from neuraminidase__InfluenzaA__ADM13194
augaauccaaaccaaaagauaauaaccauugguucggucuguaugacaauuggaauggcuaacuuaauauuacaaauuggaaacauaaucucaauauggauuagccacucaauucaacuugggaaucaaaaucaaauugaaacaugcaaucaaagcgucauuacuuaugaaaacaacacuuggguaaaucagacauauguuaacaucagcaacaccaacuuugcugcuggacagucagugguuuccgugaaauuagcgggcaauuccucucucugcccuguuaguggaugggcuauauacaguaaagacaacaguauaagaaucgguuccaagggggauguguuugucauaagggaaccauucauaucaugcucccccuuggaaugcagaaccuucuucuugacucaaggggccuugcuaaaugacaaacauuccaauggaaccauuaaagacaggagcccauaucgaacccuaaugagcuguccuauuggugaaguucccucuccauacaacucaagauuugagucagucgcuuggucagcaagugcuugucaugauggcaucaauuggcuaacaauuggaauuucuggcccagacaauggggcaguggcuguguuaaaguacaacggcauaauaacagacacuaucaagaguuggagaaacaauauauugagaacacaagagucugaaugugcauguguaaaugguucuugcuuuacuguaaugaccgauggaccaagugauggacaggccucauacaagaucuucagaauagaaaagggaaagauagucaaaucagucgaaaugaaugccccuaauuaucacuaugaggaaugcuccuguuauccugauucuagugaaaucacaugugugugcagggauaacuggcauggcucgaaucgaccguggguaucuuucaaccagaaucuggaauaucagauaggauacauaugcagugggauuuucggagacaauccacgcccuaaugauaagacaggcaguugugguccaguaucgucuaauggagcaaauggaguaaaaggauuuucauucaaauacggcaaugguguuuggauagggagaacuaaaagcauuaguucaagaaacgguuuugagaugauuugggauccgaacggauggacugggacagacaauaacuucucaauaaagcaagauaucguaggaauaaaugaguggucaggauauagcgggaguuuuguucagcauccagaacuaacagggcuggauuguauaagaccuugcuucuggguugaacuaaucagagggcgacccaaagagaacacaaucuggacuagcgggagcagcauauccuuuugugguguaaacagugacacuguggguuggucuuggccggacggugcugaguugccauuuaccauugacaaguaa

SEQ ID NO: 51457 - RNA, 1410 nt, Artificial Sequence
  derived and/or modified CDS sequence (wt) from neuraminidase__InfluenzaA__ADM13204
augaauccaaaccaaaagauaauaaccauugguucggucuguaugacaauuggaauggcuaacuuaauauuacaaauuggaaacauaaucucaauauggauuagccacucaauucaacuugggaaucaaaaucagauugaaacaugcaaucaaagcgucauuacuuaugaaaacaacacuuggguaaaucagacauauguuaacaucagcaacaccaacuuugcugcuggacagucagugguuuccgugaaauuagcgggcaauuccucucucugcccuguuaguggaugggcuauauacaguaaagacaacaguauaagaaucgguuccaagggggauguuuuugucauaagggaaccauucauaucaugcucccccuuggaaugcagaaccuucuucuugacucaaggggccuugcuaaaugacaaacauuccaauggaaccauuaaagacaggagcccauaucgaacccuaaugagcuguccuauuggugaaguucccucuccauacaacucaagauuugagucagucgcuuggucagcaagugcuugucaugauggcaucaauuggcuaacaauuggaauuucuggcccagacaauggggcaguggcuguguuaaaguacaacggcauaauaacagacacuaucaagaguuggagaaacaauauauugagaacacaagagucugaaugugcauguguaaaugguucuugcuuuacuguaaugaccgauggaccaagugauggacaggccucauacaagaucuucagaauagaaaagggaaagauagucaaaucagucgaaaugaaugccccuaauuaucacuaugaggaaugcuccuguuauccugauucuagugaaaucacaugugugugcagggacaacuggcauggcucgaaucgaccguggguaucuuucaaccagaaucuggaauaucagauaggauacauaugcagugggauuuucggagacaauccacgcccuaaugauaagacaggcaguugugguccaguaucgucuaauggagcaaauggaguaaaaggauuuucauucaaauacggcaaugguguuuggauagggagaacuaaaagcauuaguucaagaaacgguuuugagaugauuugggauccgaacggauggacugggacagacaauaacuucucaauaaagcaagauaucguaggaauaaaugaguggucaggauauagcgggaguuuuguucagcauccagaacuaacagggcuggauuguauaagaccuugcuucuggguugaacuaaucagagggcgacccaaagagaacacaaucuggacuagcgggagcagcauauccuuuugugguguaaacagugacacuguggguuggucuuggccggacggugcugaguugccauuuaccauugacaaguaa

SEQ ID NO: 51458 - RNA, 1410 nt, Artificial Sequence
  derived and/or modified CDS sequence (wt) from neuraminidase__InfluenzaA__ADM13214
augaauccaaaccaaaagauaauaaccauugguucggucuguaugacaauuggaauggcuaacuuaauauuacaaauuggaaacauaaucucaauauggauuagccacucaauucaacuugggaaucaaaaucagauugaaacaugcaaucaaagcgucauuacuuaugaaaacaacacuuggguaaaucagacauauguuaacaucagcaacaccaacuuugcugcuggacagucagugguuuccgugaaauuagcgggcaauuccucucucugcccuguuaguggaugggcuauauacaguaaagacaacaguauaagaaucggcuccaagggggauguguuugucauaagggaaccauucauaucaugcucccccuuggaaugcagaaccuucuucuugacucaaggggccuugcuaaaugacaaacauuccaauggaaccauuaaagacaggagcccauaucgaacccuaaugagcuguccuauuggugaaguucccucuccauacaacucaagauuugagucagucgcuuggucagcaagugcuugucaugauggcaucaauuggcuaacaauuggaauuucuggcccagacaauggggcaguggcuguguuaaaguacaacggcauaauaacagacacuaucaagaguuggagaaacaauauauugagaacacaagagucugaaugugcauguguaaaugguucuugcuuuacuguaaugaccgauggaccaagugauggacaggccucauacaagaucuucagaauagaaaagggaaagauagucaaaucagucgaaaugaaugccccuaauuaucacuaugaggaaugcuccuguuauccugauucuagugaaaucacaugugugugcagggauaacuggcauggcucgaaucgaccguggguaucuuucaaccagaaucuggaauaucagauaggauacauaugcagugggauuuucggagacaauccacgcccuaaugauaagacaggcaguugugguccaguaucgucuaauggagcaaauggaguaaaaggauuuucauucaaauacggcaaugguguuuggauagggagaacuaaaagcauuaguucaagaaacgguuuugagaugauuugggauccgaacggauggacugggacagacaauaaauucucaauaaagcaagauaucguaggaauaaaugaguggucaggauauagcgggaguuuuguucagcauccagaacuaacagggcuggauuguauaagaccuugcuucuggguugaacuaaucagggggcgacccaaagagaacacaaucuggacuagcgggagcagcauauccuuuugugguguaaacagugacacuguggguuggucuuggccagacggugcugaguugccauuuaccauugacaaguaa

SEQ ID NO: 51459 - RNA, 1410 nt, Artificial Sequence
  derived and/or modified CDS sequence (wt) from neuraminidase__InfluenzaA__ADM13224
augaauccaaaccaaaagauaauaaccauugguucggucuguaugacaauuggaauggcuaacuuaauauuacaaauuggaaacauaaucucaauauggauuagccacucaauucaacuugggaaucaaaaucagauugaaacaugcaaucaaagcgucauuacuuaugaaaacaacacuuggguaaaucagacauauguuaacaucagcaacaccaacuuugcugcuggacagucagugguuuccgugaaauuagcgggcaauuccucucucugcccuguuaguggaugggcuauauacaguaaagacaacaguauaagaaucgguuccaagggggauguguuugucauaagggaaccauucauaucaugcucccccuuggaaugcagaaccuucuucuugacucaaggggccuugcuaaaugacaaacauuccaauggaaccauuaaagacaggagcccauaucgaacccuaaugagcuguccuauuggugaaguucccucuccauacaacucaagauuugagucagucgcuuggucagcaagugcuugucaugauggcaucaauuggcuaacaauuggaauuucuggcccagacaauggggcaguggcuguguuaaaguacaacggcauaauaacugacacuaucaggaguuggagaaacaauauauugagaacacaagagucugaaugugcauguguaaaugguucuugcuuuacuguaaugaccgauggaccaagugauggacaggccucauacaagaucuucagaauagaaaagggaaagauagucaaaucagucgaaaugaaugccccuaauuaucacuaugaggaaugcuccuguuauccugauucuaguaaaaucacaugugugugcagggauaacuggcauggcucgaaucgaccgugggugucuuucaaccagaaucuggaauaucagauaggauacauaugcagugggauuuucggagacaauccacgcccuaaugauaagacaggcaguugugguccaguaucgucuaauggagcaaauggaguaaaaggauuuucauucaaauacggcaaugguguuuggauagggagaacuaaaagcauuaguucaagaaacgguuuugagaugauuugggauccgaacggauggacugggacagacaauaacuucucaauaaagcaagauaucguaggaauaaaugaguggucaggauauagcgggaguuuuguccagcauccagaacuaacagggcuggauuguauaagaccuugcuucuggguugaacuaaucagagggcgaccaaaagagaacacaaucuggacuagcgggagcagcauauccuuuugugguguaaacagugacacuguggguuggucuuggccagacggugcugaguugccauuuaccauugacaaguaa

SEQ ID NO: 51460 - RNA, 1410 nt, Artificial Sequence; identical to SEQ ID NO: 50727
  derived and/or modified CDS sequence (wt) from neuraminidase__InfluenzaA__ADM13234

SEQ ID NO: 51461 - RNA, 1410 nt, Artificial Sequence
  derived and/or modified CDS sequence (wt) from neuraminidase__InfluenzaA__ADM13244
augaauccaaaccaaaagauaauaaccauugguucggucuguaugacaauuggaauggcuaacuuaauauuacaaauuggaaacauaaucucaauauggauuagccacucaauucaacuugggaaucaaaaucagauugaaacaugcaaucaaagcgucauuacuuaugaaaacaacacuuggguaaaucagacauauguuaacaucaguaacaccaacuuugcugcuggacagucagugguuuccgugaaauuagcgggcaauuccucucucugcccuguuaguggaugggcuauauacaguaaagacaacaguauaagaaucgguuccaagggggauguguuugucauaagggaaccauucauaucaugcucccccuuggaaugcagaaccuucuucuugacucaaggggccuugcuaaaugacaaacauuccaauggaaccauuaaagacaggagcccauaucgaacccuaaugagcuguccuauuggugaaguucccucuccauacaacucaagauuugagucagucgcuuggucagcaagugcuugucaugauggcaucaauuggcuaacaauuggaauuucuggcccagacaauggggcaguggcuguguuaaaguacaacggcauaauaacagacacuaucaagaguuggagaaacaauauauugagaacacaagagucugaaugugcauguguaaaugguucuugcuuuacuguaaugaccgauggaccaagugauggacaggccucauacaagaucuucagaauagaaaagggaaagauagucaaaucagucgaaaugaaugccccuaauuaucacuaugaggaaugcuccuguuauccugauucuagugaaaucacaugugugugcagggauaacuggcauggcucgaaucgaccgugggugucuuucaaccagaaucuggaauaucagauaggauacauaugcagugggauuuucggagacaauccacgcccuaaugauaagaaaggcaguugugguccaguaucgucuaauggagcaaauggaguaaaaggauuuucauucaaauacggcaaugguguuuggauagggagaacuaaaagcauuaguucaagaaacgguuuugagaugauuugggauccgaacggauggacuggaacagacaauaacuucucaauaaagcaagauaucguaggaauaaaugaauggucaggauauagcgggaguuuuguucagcauccagaacuaacagggcuggauuguauaagaccuugcuucuggguugaacuaaucagagggcgacccaaagagaacacaaucuggacuagcgggagcagcauauccuuuugugguguaaacagugacacuguggguuggucuuggccagacggugcugaguugccauuuaccauugacaaguaa

SEQ ID NO: 51462 - RNA, 1410 nt, Artificial Sequence; identical to SEQ ID NO: 50025
  derived and/or modified CDS sequence (wt) from neuraminidase__InfluenzaA__ADM13254

SEQ ID NO: 51463 - RNA, 1410 nt, Artificial Sequence
  derived and/or modified CDS sequence (wt) from neuraminidase__InfluenzaA__ADM13264
augaauccaaaccaaaagauaauaaccauugguucggucuguaugacaauuggaauggcuaacuuaauauuacaaauuggaaacauaaucucaauauggauuagccacucaauucaacuugggaaucaaaaucagauugaaacaugcaaucaaagcgucauuacuuaugaaaacaacacuuggguaaaucagacauauguuaacaucagcaacaccaacuuugcugcuggacagucagugguuuccgugaaauuagcgggcaauuccucucucugcccuguuaguggaugggcuauauacaguaaagacaacaguauaagaaucggcuccaagggggauguguuugucauaagggaaccauucauaucaugcucccccuuggaaugcagaaccuucuucuugacucaaggggccuugcuaaaugacaaacauuccaauggaaccauuaaagacaggagcccauaucgaacccuaaugagcuguccuauuggugaaguucccucuccauacaacucaagauuugagucagucgcuuggucagcaagugcuugucaugauggcaucaauuggcuaacaauuggaauuucuggcccagacaauggggcaguggcuguguuaaaguacaacggcauaauaacagacacuaucaagaguuggagaaacaauauauugagaacacaagagucugaaugugcauguguaaaugguucuugcuuuacugugaugaccgauggaccaagugauggacaggccucauacaagaucuucagaauagaaaagggaaagauagucaaaucagucgaaaugaaugccccuaauuaucacuaugaggaaugcuccuguuauccugauucuagugaaaucacaugugugugcagggauaacuggcauggcucgaaucgaccguggguaucuuucaaccagaaucuggaauaucagauaggauacauaugcagugggauuuucggagacaauccacgcccuaaugauaagacaggcaguugugguccaguaucgucuaauggagcaaauggaguaaaaggauuuucauucaaauacggcaaugguguuuggauagggagaacuaaaagcauuaguucaagaaacgguuuugagaugauuugggauccgaacggauggacugggacagacaauaaauucucaauaaagcaagauaucguaggaauaaaugaguggucaggauauagcgggaguuuuguucagcauccagaacuaacagggcuggauuguauaagaccuugcuucuggguugaacuaaucagagggcgacccaaagagaacacaaucuggacuagcgggagcagcauauccuuuugugguguaaacagugacacuguggguuggucuuggccagacggugcugaguugccauuuaccauugacaaguaa

SEQ ID NO: 51464 - RNA, 1410 nt, Artificial Sequence; identical to SEQ ID NO: 49794
  derived and/or modified CDS sequence (wt) from neuraminidase__InfluenzaA__ADM13274

SEQ ID NO: 51465 - RNA, 1410 nt, Artificial Sequence; identical to SEQ ID NO: 50727
  derived and/or modified CDS sequence (wt) from neuraminidase__InfluenzaA__ADM13284

SEQ ID NO: 51466 - RNA, 1410 nt, Artificial Sequence
  derived and/or modified CDS sequence (wt) from neuraminidase__InfluenzaA__ADM13294
augaauccaaaccaaaagauaauaaccauugguucggucuguaugacaauuggaauggcuaacuuaauauuacaaauuggaaacauaaucucaauauggauuagccacucaauucaacuugggaaucaaaaucagauugaaacaugcaaucaaagcgucauuacuuaugaaaacaacacuuggguaaaucagacauauguuaacaucagcaacaccaacuuugcugcuggacagucagugguuuccgugaaauuagcgggcaauuccucucucugcccuguuaguggaugggcuauauacaguaaagacaacaguauaagaaucgguuccaagggggauguguuugucauaagggaaccauucauaucaugcucccccuuggaaugcagaaccuucuucuugacucaaggggccuugcuaaaugacaaacauuccaauggaaccauuaaagacaggagcccauaucgagcccuaaugagcuguccuauuggugaaguucccucuccauacaacucaagauuugagucagucgcuuggucagcaagugcuugucaugauggcaucaauuggcuaacaauuggaauuucuggcccagacaauggggcaguggcuguguuaaaguacaacggcauaauaacagacacuaucaagaguuggagaaacaauauauugagaacacaagagucugaaugugcauguguaaaugguucuugcuuuacuguaaugaccgauggaccaagugauggacaggccucauacaagaucuucagaauagaaaagggaaagauagucaaaucagucgaaaugaaugccccuaauuaucacuaugaggaauguuccuguuauccugauucuagugaaaucacaugugugugcagggauaacuggcauggcucgaaucgaccgugggugucuuucaaccagaaucuggaauaucagauaggguacauaugcagugggauuuucggagacaauccacgcccuaaugauaagacaggcaguugugguccaguaucgucuaauggagcaaauggaguaaaaggauuuucauucaaauacggcaaugguguuuggauagggagaacuaaaagcauuaguucaagaaacgguuuugagaugauuugggauccgaacggauggacugggacagacaauagcuucucaauaaaacaagauaucguaggaauaaaugaguggucaggauauagcgggaguuuuguucagcauccagaacuaacagggcuggacuguauaagaccuugcuucuggguugaacuaaucagagggcgacccaaagagaacacaaucuggacuagcgggagcagcauauccuuuugugguguaaacagugacacuguggguuggucuuggccagacggugcugaguugccauuuaccauugacaaguaa

SEQ ID NO: 51467 - RNA, 1410 nt, Artificial Sequence; identical to SEQ ID NO: 49543
  derived and/or modified CDS sequence (wt) from neuraminidase__InfluenzaA__ADM13304

SEQ ID NO: 51468 - RNA, 1410 nt, Artificial Sequence
  derived and/or modified CDS sequence (wt) from neuraminidase__InfluenzaA__ADM13314
augaauccaaaccaaaagauaauaaccauugguucggucuguaugacaauuggaauggcuaacuuaauauuacaaaucggaaacauaaucucaauauggauuagccacucaauucaacuugggaaucaaaaucagauugaaacaugcaaucaaagcgucauuacuuaugaaaacaacacuuggguaaaucagacauauguuaacaucagcaacaccaacuuugcugcuggacagucagugguucccgugaaauuagcgggcaauuccucucucugcccuguuaguggaugggcuauauacaguaaagacaacaguauaagaaucgguuccaagggggauguguuugucauaagggaaccauucauaucaugcucccccuuggaaugcagaaccuucuucuugacucaaggggccuugcuaaaugacaaacauuccaauggaaccauuaaagacaggagcccauaucgaacccuaaugagcuguccuauuggugaaguucccucuccauacaacucaagauuugagucagucgcuuggucagcaagugcuugucaugauggcaucaauuggcuaacaauuggaauuucuggcccagacaauggggcaguggcuguguuaaaguacaacggcauaauaacagacacuaucaagaguuggagaaacaauauauugagaacacaagagucugaaugugcauguguaaaugguucuugcuuuacuguaaugaccgauggaccaagugauggacaggccucauacaagaucuucagaauagaaaagggaaagauagucaaaucagucgaaaugaaugccccuaauuaucacuaugaggaaugcuccuguuauccugauucuagugaaaucacaugugugugcagggacaacuggcauggcucgaaucgaccgugggugucuuucaaccagaaucuggaauaucagauaggauacauaugcagugggauuuucggagacaauccacgcccuaaugauaagacaggcaguugugguccaguaucgucuaauggagcaaauggaguaaaaggauuuucauucaaauacggcaaugguguuuggauagggagaacuaaaagcauuaguucaagaaacgguuuugagaugauuugggauccgaacggauggacugggacagacaauaacuucucaauaaagcaagauaucguaggaauaaaugaguggucaggauauagcgggaguuuuguucagcauccagaacuaacagggcuggauuguauaagaccuugcuucuggguugaacuaaucagagggcgacccaaagagaacacaaucuggacuagcgggagcagcauauccuuuugugguguaaacagugacacuguggguuggucuuggccagacggugcugaguugccauuuaccauugacaaguaa

SEQ ID NO: 51469 - RNA, 1410 nt, Artificial Sequence
  derived and/or modified CDS sequence (wt) from neuraminidase__InfluenzaA__ADM13324
augaauccaaaccaaaagauaauaaccauugguucggucuguaugacaauuggaauggcuaacuuaauauuacaaauuggaaacauaaucucaauauggauuagccacucaauucaacuugggaaucaaaaucagauugaaacaugcaaucaaagcgucauuacuuaugaaaacaacacuuggguaaaucagacauauguuaacaucagcaacaccaacuuugcugcuggacagucagugguuuccgugaaauuagcgggcaauuccucucucugcccuguuaguggaugggcuauauacaguaaagacaacaguauaagaaucgguuccaagggggauguguuugucauaagggaaccauucauaucaugcucccccuuggaaugcagaaccuucuucuugacucaaggggccuugcuaaaugacaaacauuccaauggaaccauuaaagacaggagcccauaucgaacccuaaugagcuguccuauuggugaaguucccucuccauacaacucaagauuugagucagucgcuuggucagcaagugcuugucaugauggcaucaauuggcuaacaauuggaauuucuggcccagacaauggggcaguggcuguguuaaaguacaacggcauaauaacagacacuaucaagaguuggagaaacaauauauugagaacacaagagucugaaugugcauguguaaaugguucuugcuuuacuguaaugaccgauggaccaagugauggacaggccucauacaagaucuucagaauagaaaagggaaagauagucaaaucagucgaaaugaaugccccuaauuaucacuaugaggaaugcuccuguuauccugauucuagugaaaucacaugugugugcagggauaacuggcauggcucgaaucgaccgugggugucuuucaaccagaaucuggaauaucagauaggauacauaugcagugggauuuucggagacaauccacgcccuaaugauaagacaggcaguugugguccaguaucgucuaauggagcaaauggaguaaaaggauuuucauucaaauacggcaaugguguuuggauagggagaacuaaaagcauuaguucaagaaacgguuuugagaugauuugggauccgaacggauggacuggaacagacaauaacuucucaauaaagcaagauaucguaggaauaaaugaguggucaggauauagcgggaguuuuguucagcauccagaacuaacagggcuggauuguauaagaccuugcuucuggguugaacuaaucagagggcgacccaaagagaacacaaucuggacuagcgggagcagcauauccuuuugugguguaaacagugacacuguggguuggucuuggccagacggugcugaguugccauuuaccauugacaaguaa

SEQ ID NO: 51470 - RNA, 1410 nt, Artificial Sequence
  derived and/or modified CDS sequence (wt) from neuraminidase__InfluenzaA__ADM13344
augaauccaaaccaaaagauaauaaucauugguucggucuguaugacaauuggaauggcuaacuuaauauuacaaauuggaaacauaaucucaauauggauucuccacucaauucaacuugggaaucaaaaucagauugaaacaugcaaucaaagcgucauuacuuaugaaaacaacacuuggguaaaucaaacauauguuaacaucagcaacaccaacuuugcugcuggacagucagugguuuccgugaaauuagcaggcaauuccucucucugcccuguuaguggaugggcuauauacaguaaagacaacaguauaagaaucgguuccaagggggauguguuugucauaagggaaccauucauaucaugcucccccuuggaaugcagaaccuucuucuugacucaaggggccuugcuaaaugacaaacauuccaauggaaccauuaaagacaggagcccauaucgaacccuaaugagcuguccuauuggugaaguucccucuccauacaacucaagauuugagucagucgcuuggucagcaagugcuugucaugauggcaucaauuggcuaacaauuggaauuucuggcccagacaauggggcaguggcuguguuaaaguacaacggcauaauaacagacacuaucaagaguuggagaaacaauauauugagaacacaagagucugaaugugcauguguaaaugguucuugcuuuacuguaaugaccgauggaccaagugauggacaggccucauacaagaucuucagaauagaaaagggaaagauagucaaaucagucgaaaugaaugccccuaauuaucacuaugaggaaugcuccuguuauccugauucuagugaaaucacaugugugugcagggauaacuggcauggcucgaaucgaccgugggugucuuucaaccagaaucuggaauaucagauaggauacauaugcagugggauuuucggagacaauccacgcccuaaugauaagacaggcaguugugguccaguaucgucuaauggagcaaauggaguaaaaggauuuucauucaaauacggcaaugguguuuggauagggagaacuaaaagcauuaguucaagaaacgguuuugagaugauuugggauccgaacggauggacugggacagacaauaacuucgcaauaaagcaagauaucguaggaauaaaugaguggucaggauauagcgggaguuuuguucagcauccagaacuaacagggcuggauuguauaagaccuugcuucuggguugaacuaaucagagggcgacccaaagagaacacaaucuggacuagcgggagcagcauauccuuuugugguguaaacagugacacuguggguuggucuuggccagacggugcugaguugccauuuaccauugacaaguaa

SEQ ID NO: 51471 - RNA, 1410 nt, Artificial Sequence
  derived and/or modified CDS sequence (wt) from neuraminidase__InfluenzaA__ADM13354
augaauccaaaccaaaagauaauaaccauugguucggucuguaugacaauuggaauggcuaacuuaauauuacaaauugggaacauaaucucaauauggauuagccacucaauucaacuugggaaucaaaaucagauugaaacaugcaaucaaagcgucauuacuuaugaaaacaacacuuggguaaaucagacauauguuaacaucagcaacaccaacuuugcugcuggacagucagugguuuccgugaaauuagcgggcaauuccucucucugcccuguuaguggaugggcuauauacaguaaagacaacaguauaagaaucgguuccaagggggauguguuugucauaagggagccauucauaucaugcucccccuuggaaugcagaaccuucuucuugacucaaggggccuugcuaaaugacaaacauuccaauggaaccauuaaagacaggagcccauaucgaacccuaaugagcuguccuauuggugaaguucccucuccauacaacucaagauuugagucagucgcuuggucagcaagugcuugucaugauggcaucaauuggcuaacaauuggaauuucuggcccagacaauggggcaguggcuguguuaaaguacaacggcauaauaacagacacuaucaagaguuggagaaacaauauauugagaacacaagagucugaaugugcauguguaaaugguucuugcuuuacuguaaugaccgauggaccaagugauggacaggccucauacaagaucuucaaaauagaaaagggaaagauagucaaaucagucgaaaugaaugcuccuaauuaucacuaugaggaaugcuccuguuauccugauucuagugaaaucacaugugugugcagggauaacuggcauggcucgaaucgaccguggguaucuuucaaccagaaucuggaauaucagauaggauacauaugcagugggauuuucggagacaauccacgcccuaaugauaagacaggcaguugugguccaguaucgucuaauggagcaaauggaguaaaaggauuuucauucaaauacggcaaugguguuuggauagggagaacuaaaagcauuaguucaagaaaugguuuugagaugauuugggauccgaacggauggacugggacagacaauaacuucucaauaaagcaagauaucguaggaauaaaugaguggucaggauauagcgggaguuuuguucagcauccagaacuaacagggcuggauuguauaagaccuugcuucuggguugaacuaaucagagggagacccaaagagaacacaaucuggacuagcgggagcagcauauccuuuugugguguaaacagugacacuguggguuggucuuggccggacggugcugaguugccauuuaccauugacaaguaa

SEQ ID NO: 51472 - RNA, 1410 nt, Artificial Sequence; identical to SEQ ID NO: 50720
  derived and/or modified CDS sequence (wt) from neuraminidase__InfluenzaA__ADM13363

SEQ ID NO: 51473 - RNA, 1410 nt, Artificial Sequence
  derived and/or modified CDS sequence (wt) from neuraminidase__InfluenzaA__ADM13464
augaauccaaaucaaaagauaauaacaauuggcucugucucucucaccauugcaacaguaugcuuccucaugcagauugccauccugguaacuacuguaacauugcauuuuaagcaauaugagugcgacucccccgcgagcaaccaaguaaugccgugugaaccaauaauaauagaaaggaacauaacagagauaguguauuugaauaacaccaccauagagaaagagauaugccccaaaguaguggaauacagaaauuggucaaagccgcaaugucaaauuacaggauuugcaccuuuuucuaaggacaauucaauccggcuuucugcugguggggacauuugggugacgagagaaccuuaugugucaugcgaucauggcaaguguuaucaauuugcacucgggcaggggaccacacuagacaacaaacauucaaaugacacaauacaugauagaaucccucaucgaacccuauuaaugaaugaguuggguguuccauuucauuuaggaaccaggcaaguguguauagcaugguccagcucaaguugucacgauggaaaagcauggcugcauguuuguaucacugggaaugacaaaaaugcaacugcuagcuucauuuaugacgggaggcuuguggacaguauugguucauggucucaaaauauccucagaacccaggagucggaaugcguuuguaucaaugggacuugcacaguaguaaugacugauggaagugcuucaggaagagccgauacuagaauacuauucauugaagaggggaaaauuguccauauuagcccauugucaggaagugcucagcauguagaagaguguuccuguuauccuagauauccuggcgucagauguaucugcagagacaacuggaaaggcucuaauaggcccgucguagacauaaauauggaagauuauagcauugauuccaguuaugugugcucagggcuuguuggcgacacaccuagaaacgacgacagaucuagcaauagcaauugcaggaauccuaacaaugagagagggaaucaaggagugaaaggcugggccuuugacaauggagaugacguguggaugggaagaacgaucagcaaggauuuacgcucagguuaugaaacuuucaaagucauuggugguugguccacaccuaauuccaaaucgcagaucaauagacaagucauaguugacagcgauaaucggucagguuacucugguauuuucucuguugagggcaaaagcugcaucaauaggugcuuuuauguggaguugauaaggggaagggaacaggagacuagagugugguggaccucaaacaguauuguuguguuuuguggcacuucagguaccuauggaacaggcucauggccugauggggcgaacaucaauuucaugccuauauaa

SEQ ID NO: 51474 - RNA, 1410 nt, Artificial Sequence
  derived and/or modified CDS sequence (wt) from neuraminidase__InfluenzaA__ADM13465
augaauccaaaucaaaagauaauaacaauuggcucugucucucucaccauugcaacaguaugcuuccucaugcagauugccauccugguaacuacuguaacauugcauuuuaagcaauaugagugcgacucccccgcgagcaaccaaguaaugccgugugaaccaauaauaauagaaaggaacauaacagagauaguguauuugaauaacaccaccauagagaaagagauaugccccaaaguaguggaauacagaaauuggucaaagccgcaaugucaaauuacaggauuugcaccuuuuucuaaggacaauucaauccggcuuucugcugguggggacauuugggugacgagagaaccuuaugugucaugcgaucauggcaaguguuaucaauuugcacucgggcaggggaccacacuagacaacaaacauucaaaugacacaauacaugauagaaucccucaucgaacccuauuaaugaaugaguuggguguuccauuucauuuaggaaccaggcaaguguguauagcaugguccagcucaaguugucacgauggaaaagcauggcugcauguuuguaucacuggggaugacaaaaaugcaacugcuagcuucauuuaugacgggaggcuuguggacaguauugguucauggucucaaaauauccucagaacccaggagucggaaugcguuuguaucaaugggacuugcacaguaguaaugacugauggaagugcuucaggaagagccgauacuagaauacuauucauugaagaggggaaaauuguccauauuagcccauugucaggaagugcucagcauguagaagaguguuccuguuauccuagauauccuggcgucagauguaucugcagagacaacuggaaaggcucuaauaggcccgucguagacauaaauauggaagauuauagcauugauuccaguuaugugugcucagggcuuguuggcgacacaccuagaaacgacgacagaucuagcaauagcaauugcaggaauccuaacaaugagagagggaaucaaggagugaaaggcugggccuuugacaauggagaugacguguggaugggaagaacgaucagcaaggauuuacgcucagguuaugaaacuuucaaagucauuggugguugguccacaccuaauuccaaaucgcagaucaauagacaagucauaguugacagcgauaaucggucagguuacucugguauuuucucuguugagggcaaaagcugcaucaauaggugcuuuuauguggaguugaugaggggaaggaaacaggagacuagagugugguggaccucaaacaguauuguuguguuuuguggcacuucagguaccuauggaacaggcucauggccugauggggcgaacaucaauuucaugccuauauaa

SEQ ID NO: 51475 - RNA, 1410 nt, Artificial Sequence; identical to SEQ ID NO: 49218
  derived and/or modified CDS sequence (wt) from neuraminidase__InfluenzaA__ADM13466

SEQ ID NO: 51476 - RNA, 1410 nt, Artificial Sequence
  derived and/or modified CDS sequence (wt) from neuraminidase__InfluenzaA__ADM13467
augaauccaaaucaaaagauaauaacaauuggcucugucucucucaccauugcaacaguaugcuuccucaugcagauugccauccugguaacuacuguaacauugcauuuuaagcaauaugagugcgacucccccgcgagcaaccaaguaaugccgugugaaccaauaauaauagaaaggaacauaacagagauaguguauuugaauaacaccaccauagagaaagagauaugccccaaaguaguggaauacagaaauuggucaaagccgcaaugucaaauuacaggauuugcaccuuuuucuaaggacaauucaauccggcuuucuucugguggggacauuugggugacgagagaaccuuaugugucaugcgaucauggcaaguguuaucaauuugcacucgggcaggggaccacacuagacaacaaacauucaaaugacacaauacaugauagaaucccucaucgaacccuauuaaugaaugaguuggguguuccauuucauuuaggaaccaggcaaguguguauagcaugguccagcucaaguugucacgauggaaaagcauggcugcauguuuguaucacuggggaugacaaaaaugcaacugcuagcuucauuuaugacgggaggcuuguggacaguauugguucauggucucaaaauauccucagaacccaggagucggaaugcguuuguaucaaugggacuugcacaguaguaaugacugauggaagugcuucaggaagagccgauacuagaauacuauucauugaagaggggaaaauuguccauauuagcccauugucaggaagugcucagcauguagaagaguguuccuguuauccuagauauccuggcgucagauguaucugcagagacaacuggaaaggcucuaauaggcccgucguagacauaaauauggaagauuauagcauugauuccaguuaugugugcucagggcuuguuggcgacacaccuagaaacgacgacagaucuagcaauagcaauugcaggaauccuaacaaugagagagggaaucaaggagugaaaggcugggccuuugacaauggagaugacguguggaugggaagaacgaucagcaaggauuuacgcucagguuaugaaacuuucaaagucauuggugguugguccacaccuaauuccaaaucgcagaucaauagacaagucauaguugacagcgauaaucggucagguuacucugguauuuucucuguugagggcaaaagcugcaucaauaggugcuuuuauguggaguugauaaggggaaggaaacaggagacuagagugugguggaccucaaacaguauuguuguguuuuguggcacuucagguaccuauggaacaggcucauggccugauggggcgaacaucaauuucaugccuauauaa

SEQ ID NO: 51477 - RNA, 1410 nt, Artificial Sequence; identical to SEQ ID NO: 46107
  derived and/or modified CDS sequence (wt) from neuraminidase__InfluenzaA__ADM13468

SEQ ID NO: 51478 - RNA, 1410 nt, Artificial Sequence
  derived and/or modified CDS sequence (wt) from neuraminidase__InfluenzaA__ADM13469
augaauccaaaucaaaagauaauaacaauuggcucugucucucucaccauugcaacagcaugcuuccucaugcagauugccauccugguaacuacuguaacauugcauuuuaagcaauaugagugcgacucccccgcgagcaaccaaguaaugccgugugaaccaauaauaauagaaaggaacauaacagagauaguguauuugaauaacaccaccauagagaaagagauaugccccaaaguaguggaauacagaaauuggucaaagccgcaaugucaaauuacaggauuugcaccuuucucuaaggacaauucaauccggcuuucugcugguggggacauuugggugacgagagaaccuuaugugucaugcgaucauggcaaguguuaucaauuugcacucgggcaggggaccacacuagacaacaaacauucaaaugacacaauacaugauagaaucccucaucgaacccuauuaaugaaugaguuggguguuccauuucauuuaggaaccaggcaaguguguauagcaugguccagcucaaguugucacgauggaaaagcauggcugcauguuuguaucacuggggaugacaaaaaugcaacugcuagcuucauuuaugacgggaggcuuguggacaguauugguucauggucucaaaauauccucagaacccaggagucggaaugcguuuguaucaaugggacuugcacaguaguaaugacugauggaagugcuucaggaagagccgauacuagaauacuauucauugaagaggggaaaauuguccauauuagcccauugucaggaagugcucagcauguagaagaguguuccuguuauccuagauauccuggcgucagauguaucugcagagacaacuggaaaggcucuaauaggcccgucguagacauaaauauggaagauuauagcauugauuccaguuaugugugcucagggcuuguuggcgacacaccuagaaacgacgacagaucuagcaauagcaauugcaggaauccuaacaaugagagagggaaucaaggagugaaaggcugggccuuugacaauggagaugacguguggaugggaagaacgaucagcaaggauuuacgcucagguuaugaaacuuucaaagucauuggugguugguccacaccuaauuccaaaucgcagaucaauagacaagucauaguugacagcgauaaucggucagguuacucugguauuuucucuguugagggcaaaagcugcaucaauaggugcuuuuauguggaguugauaaggggaaggaaacaggagacuagagugugguggaccucaaacaguauuguuguguuuuguggcacuucagguaccuauggaacaggcucauggccugauggggcgaacaucaauuucaugccuauauaa

SEQ ID NO: 51479 - RNA, 1410 nt, Artificial Sequence
  derived and/or modified CDS sequence (wt) from neuraminidase__InfluenzaA__ADM13470
augaauccaaaucaaaagauaauaacaauuggcucugucucucucaccauugcaacaguaugcuuccucaugcagauugccauccugguaacuacuguaacauugcauuuuaagcaauaugagugcgacucccccgcgagcaaccaaguaaugccgugugaaccaauaauaauagaaaggaacauaacagagauaguguauuugaauaacaccaccauagagaaagagauaugccccaaaguaguggaauacagaaauuggucaaagccgcaaugucaaauuacaggauuugcaccuuuuucuaaggacaauucaauccggcuuucugcugguggggacauuugggugacgagagaaccuuaugugucaugcgaucauggcaaguguuaucaauuugcacucgggcaggggaccacacuagacaacaaacauucaaaugacacaauacaugauagaaucccucaucgaacccuauuaaugaaugaguuggguguuccauuucauuuaggaaccaggcaaguguguauagcaugguccagcucaaguugucacgauggaaaagcauggcugcauguuuguaucacuggggaugacaaaaaugcaacugcuagcuucauuuaugacgggaggcuuguggacaguauugguucauggucucaaaauauccucagaacccaggagucggaaugcguuuguaucaaugggacuugcacaguaguaaugacugauggaagugcuucaggaagagccgauacuagaauacuauucauugaagaggggaaaauuguccauauuagcccauugucaggaagugcucagcauguagaagaguguuccuguuauccuagauauccuggcgucagauguaucugcagagacaacuggaaaggcucuaauaggcccgucguagacauaaauauggaagauuauagcauugauuccaguuaugugugcucagggcuuguuggcgacacaccuagaaacgacgacagaucuagcaauagcaauugcaggaauccuaacaaugagagagggaaucaaggagugaaaggcugggccuuugacaauggagaugacguguggaugggaagaacgaucagcaaggauuuacgcucagguuaugaaacuuucaaagucauuggugguugguccacaccuaauuccaaaucgcagaucaauagacaagucauaauugacagcgauaaucggucagguuacucugguauuuucucuguugagggcaaaagcugcaucaauaggugcuuuuauguggaguugauaaggggaaggaaacaggagacuagagugugguggaccucaaacaguauuguuguguuuuguggcacuucagguaccuauggaacaggcucauggccugauggggcgaacaucaauuucaugccuauauaa

SEQ ID NO: 51480 - RNA, 1410 nt, Artificial Sequence
  derived and/or modified CDS sequence (wt) from neuraminidase__InfluenzaA__ADM13471
augaauccaaaucaaaagauaauaacaauuggcucugucucucucaccauugcaacaguaugcuuccucaugcagauugccauccugguaacuacuguaacauugcauuuuaagcaauaugagugcgacucccccgcgagcaaccaaguaaugccgugugaaccaauaauaauagaaaggaacauaacagagauaguguauuugaauaacaccaccauagagaaagagauaugccccaaaguaguggaauacagaaauuggucaaagccgcaaugucaaauuacaggauuugcaccuuuuucuaaggacaauucaauccggauuucugcugguggggacauuugggugacgagagaaccuuaugugucaugcgaucauggcaaguguuaucaauuugcacucgggcaggggaccacacuagacaacaaacauucaaaugacacaauacaugauagaaucccucaucgaacccuauuaaugaaugaguuggguguuccauuucauuuaggaaccaggcaaguguguauagcaugguccagcucaaguugucacgauggaaaagcauggcugcauguuuguaucacuggggaugacaaaaaugcaacugcuagcuucauuuaugacgggaggcuuguggacaguauugguucauggucucaaaauauccucagaacccaggagucggaaugcguuuguaucaaugggacuugcacaguaguaaugacugauggaagugcuucaggaagagccgauacuagaauacuauucauugaagaggggaaaauuguccauauuagcccauugucaggaagugcucagcauguagaagaguguuccuguuauccuagauauccuggcgucagauguaucugcagagacaacuggaaaggcucuaauaggcccgucguagacauaaauauggaagauuauagcauugauuccaguuaugugugcucagggcuuguuggcgacacaccuagaaacgacgacagaucuagcaauagcaauugcaggaauccuaacaaugagagagggaaucaaggagugaaaggcugggccuuugacaauggagaugacguguggaugggaagaacgaucagcaaggauuuacgcucagguuaugaaacuuucaaagucauuggugguugguccacaccuaauuccaaaucgcagaucaauagacaagucauaguugacagcgauaaucggucagguuacucugguauuuucucuguugagggcaaaagcugcaucaauaggugcuuuuauguggaguugauaaggggaaggaaacaggagacuagagugugguggaccucaaacaguauuguuguguuuuguggcacuucagguaccuauggaacaggcucauggccugauggggcgaacaucaauuucaugccuauauaa

SEQ ID NO: 51481 - RNA, 1410 nt, Artificial Sequence; identical to SEQ ID NO: 48520
  derived and/or modified CDS sequence (wt) from neuraminidase__InfluenzaA__ADM13472

SEQ ID NO: 51482 - RNA, 1410 nt, Artificial Sequence; identical to SEQ ID NO: 46107
  derived and/or modified CDS sequence (wt) from neuraminidase__InfluenzaA__ADM13473

SEQ ID NO: 51483 - RNA, 1410 nt, Artificial Sequence; identical to SEQ ID NO: 48516
  derived and/or modified CDS sequence (wt) from neuraminidase__InfluenzaA__ADM13474

SEQ ID NO: 51484 - RNA, 1410 nt, Artificial Sequence
  derived and/or modified CDS sequence (wt) from neuraminidase__InfluenzaA__ADM14469
augaauccaaaccaaaagauaauaaccauugguucggucuguaugacaauuggaauggcuaacuuaauauuacaaauuggaaacauaaucucaauauggauuagccacucaauucaacuugggaaucaaaaucagauugaaacaugcaaucaaagcgucauuacuuaugaaaacaacacuuggguaaaucagacauauguuaacaucagcaacaccaacuuugcugcuggacagucagugguuuccgugaaauuagcgggcaauuccucucucugcccuguuaguggaugggcuauauacaguaaagacaacaguaugagaaucgguuccaagggggauguguuugucauaagggaaccauucauaucaugcucccccuuggaaugcagaaccuucuucuugacucaaggggccuugcuaaaugacaaacauuccaauggaaccauuaaagacaggagcccauaucgaacccuaaugagcuguccuauuggugaaguucccucuccauacaacucaagauuugagucagucgcuuggucagcaagugcuugucaugauggcaucaauuggcuaacaauuggaauuucuggcccagacaauggggcaguggcuguguuaaaguacaacggcauaauaacagacacuaucaagaguuggagaaacaauauauugagaacacaagagucugaaugugcauguguaaaugguucuugcuuuacuguaaugaccgauggaccaagugauggacaggccucauacaagaucuucagaauagaaaagggaaagauagucaaaucagucgaaaugaaugccccuaauuaucacuaugaggaaugcuccuguuauccugauucuagugaaaucacaugugugugcagggauaacuggcauggcucgaaucgaccgugggugucuuucaaccagaaucuggaauaucagauaggauacauaugcagugggauuuucggagacaauccacgcccuaaugauaagacaggcaguugcgguccaguaucgucuaauggagcaaauggaguaaaaggauuuucauucaaauacggcaaugguguuuggauagggagaacuaaaagcauuaguucaagaaccgguuuugagaugauuugggauccgaacggauggacugggacagacaauaacuucucaauaaagcaagauaucguaggaauaaaugaguggucaggauauagcgggaguuuuguccagcauccagaacuaacagggcuggauuguauaagaccuugcuucuggguugaacuaaucagagggcgacccaaagagaacacaaucuggacuagcgggagcagcauauccuuuugugguguaaacagugacacuguggguuggucuuggccagacggugcugaguugccauuuaccauugacaaguaa

SEQ ID NO: 51485 - RNA, 1410 nt, Artificial Sequence; identical to SEQ ID NO: 48750
  derived and/or modified CDS sequence (wt) from neuraminidase__InfluenzaA__ADM14479

SEQ ID NO: 51486 - RNA, 1410 nt, Artificial Sequence; identical to SEQ ID NO: 48750
  derived and/or modified CDS sequence (wt) from neuraminidase__InfluenzaA__ADM14499

SEQ ID NO: 51487 - RNA, 1410 nt, Artificial Sequence; identical to SEQ ID NO: 50263
  derived and/or modified CDS sequence (wt) from neuraminidase__InfluenzaA__ADM14518

SEQ ID NO: 51488 - RNA, 1410 nt, Artificial Sequence
  derived and/or modified CDS sequence (wt) from neuraminidase__InfluenzaA__ADM14527
augaauccaaaccaaaagauaauaaccauugguucggucuguaugacaauuggaauggcuaacuuaauauuacaaauuggaaacauaaucucaauauggauuagccacucaauucaacuugggaaucaaaaucagauugaaacaugcaaucaaagcgucauuacuuaugaaaacaacacuuggguaaaucagacauauguuaacaucagcaacaccaacuuugcugcuggacagucaguggccuccgugaaauuagcgggcaauuccucucucugcccuguuaguggaugggcuauauacaguaaagacaacaguauaagaaucgguuccaagggggauguguuugucauaagggaaccauucauaucaugcucccccuuggaaugcagaaccuucuucuugacucaaggggccuugcuaaaugacaaacauuccaauggaaccauuaaagacaggagcccauaucgaacccuaaugagcuguccuauuggugaaguucccucuccauacaacucaagauuugagucagucgcuuggucagcaagugcuugucaugauggcaucaauuggcuaacaauuggaauuucuggcccagacaauggggcaguggcuguguuaaaguacaacggcauaauaacagacacuaucaagaguuggagaaacaauauauugagaacacaagagucugaaugugcauguguaaaugguucuugcuuuacuguaaugaccgauggaccaagugauggacaggccucauacaagaucuucagaauagaaaagggaaagauagucaaaucagucgaaaugaaugccccuaauuaucacuaugaggaaugcuccuguuauccugauucuagugaaaucacaugugugugcagggauaacuggcauggcucgaaccgaccgugggugucuuucaaccagaaucuggaauaucagauaggauacauaugcagugggauuuucggagacaauccacgcccuaaugauaagacaggcaguugugguccaguaucgucuaauggagcaaauggaguaaaaggauuuucauucaaauacggcaaugguguuuggauagggagaacuaaaagcauuaguucaagaaacgguuuugagaugauuugggauccgaacggauggacugggacagacaauaacuucucaauaaagcaagauaucguaggaauaaaugaguggucaggauauagcgggaguuuuguucagcauccagaacuaacagggcuggauuguauaagaccuugcuucuggguugaacuaaucagagggcgacccaaagagaacacaaucuggacuagcgggagcagcauauccuuuugugguguaaacagugacacuguggguuggucuuggccagacggugcugaguugccauuuaccauugacaaguaa

SEQ ID NO: 51489 - RNA, 1410 nt, Artificial Sequence
  derived and/or modified CDS sequence (wt) from neuraminidase__InfluenzaA__ADM14537
augaauccaaaccaaaagauaauaaccauugguucggucuguaugacaauuggaauggcuaacuuaauauuacaaauuggaaacauaaucucaauauggauuagccacucaauucaacuugggaaucaaaaucagauugaaacaugcaaucaaagcgucauuacuuaugaaaacaacacuuggguaaaucagacauauguuaacaucagcaacaccaacuuugcugcuggacagucagugguuuccgugaaauuagcgggcaauuccucucucugcccuguuaguggaugggcuauauacaguaaagacaacaguauaagaaucgguuccaagggggauguguuugucauaagggaaccauucauaucaugcucccccuuggaaugcagaaccuucuucuugacucaaggggccuugcuaaaugacaaacauuccaauggaaccauuaaagacaggagcccauaucgaacccuaaugagcuguccuauuggugaaguucccucuccauacaacucaagauuugagucagucgcuuggucagcaagugcuugucaugauggcaucaauuggcuaacaauuggaauuucuggcccagacaauggggcaguggcuguguuaaaguacaacggcauaauaacagacacuaucaagaguuggagaaacaauauauugagaacacaagagucugaaugugcauguguaaaugguucuugcuuuacuguaaugaccgauggaccaagugauggacaggccucauacaagaucuucagaauagaaaagggaaagauagucaaaucagucgaaaugaaugccccuaauuaucacuaugaggaaugcuccuguuauccugauucuagugaaaucacaugugugugcagggauaacuggcauggcucgaaucgaccgugggugucuuucaaccagaaucuggaauaucagauaggauacauaugcagugggauuuucggagacaauccacgcccuaaugauaagacaggcaguugugguccaguaucgucuaauggagcaaauggaguaaaaggauuuucauucaaauacggcaaugguguuuggauagggagaacuaaaagcauuaguucaagaaacgguuuugagaugauuugggauccgaacggauggacugggacagacaauagcuucucaauaaagcaagauaucguaggaauaaaugaguggucaggauauagcgggagcuuuguucagcauccagaacuaacagggcuggacuguauaagaccuugcuucuggguugaacuaaucagagggcgacccaaagagaacacaaucuggacuagcgggagcagcauauccuuuugugguguaaacagugacacuguggguuggucuuggccagacggugcugaguugccauuuaccauugacaaguaa

SEQ ID NO: 51490 - RNA, 1410 nt, Artificial Sequence; identical to SEQ ID NO: 49128
  derived and/or modified CDS sequence (wt) from neuraminidase__InfluenzaA__ADM14546

SEQ ID NO: 51491 - RNA, 1410 nt, Artificial Sequence
  derived and/or modified CDS sequence (wt) from neuraminidase__InfluenzaA__ADM14555
augaauccaaaccaaaagauaauaaccauugguucggucuguaugacaauuggaauggcuaacuuaauauuacaaauuggaaacauaaucucaauauggauuagccacucaauucaacuugggaaucaaaaucagauugaaacaugcaaucaaagcgucauuacuuaugaaaacaacacuuggguaaaucagacauauguuaacaucagcaacaccaacuuugcugcuggacagucagugguuuccgugaaauuagcgggcaauuccucucucugcccuguuaguggaugggcuauauacaguaaagacaacaguauaagaaucgguuccaagggggauguguuugucauaagggaaccauucauaucaugcucccccuuggaaugcagaaccuucuucuugacucaaggggccuugcuaaaugacaaacauuccaauggaaccauuaaagacaggagcccauaucgaacccuaaugagcuguccuauuggugaaguucccucuccauacaacucaagauuugagucagucgcuuggucagcaagugcuugucaugauggcaucaauuggcuaacaauuggaauuucuggcccagacaauggggcaguggcuguguuaaaguacaacggcauaauaacagacacuaucaagaguuggagaaacaauauauugagaacacaagagucugaaugugcauguguaaaugguucuugcuuuacuguaaugaccgauggaccaagugauggacaggccucauacaagaucuucagaauagaaaagggaaagauagucaaaucagucgaaaugaaugccccuaauuaucacuaugaggaaugcuccuguuauccugauucuagugaaaucacaugugugugcagggauaacuggcauggcucgaaucgaccgugggugucuuucaaccagaaucuggaauaucagauaggauacauaugcagugggauuuucggagacaauccacgcccuaaugauaagacaggcaguugugguccaguaucgucuaauggagcaaauggaguaaaaggauuuucauucagauacggcaaugguguuuggauagggagaacuaaaagcauuaguucaagaaacgguuuugagaugauuugggauccgaacggauggacugggacagacaauaacuucucaauaaagcaagauaucguaggaauaaaugaguggucaggauauagcgggaguuuuguucagcauccagaacuaacagggcuggauuguauaagaccuugcuucuggguugaacuaaucagagggcgacccaaagagaacacaaucuggacuagcgggagcagcauauccuuuugugguguaaacagugacacuguggguuggucuuggccagacggugcugaguugccauuuaccauugacaaguaa

SEQ ID NO: 51492 - RNA, 1410 nt, Artificial Sequence; identical to SEQ ID NO: 48750
  derived and/or modified CDS sequence (wt) from neuraminidase__InfluenzaA__ADM14573

SEQ ID NO: 51493 - RNA, 1410 nt, Artificial Sequence
  derived and/or modified CDS sequence (wt) from neuraminidase__InfluenzaA__ADM14582
augaauccaaaccaaaagauaauaaccauugguucggucuguaugacaauuggaauggcuaacuuaauauuacaaauuggaaacauaaucucaauauggauuagccacucaauucaacuugggaaucaaaaucagauugaaacaugcaaucaaagcgucauuacuuaugaaaacaacacuuggguaaaucagacauauguuaacaucagcaacaccaacuuugcugcuggacagucagugguuuccgugaaauuagcgggcaauuccucucucugcccuguuaguggaugggcuauauacaguaaagacaacaguauaagaaucgguuccaagggggauguguuugucauaagggaaccauucauaucaugcucccccuuggaaugcagaaccuucuucuugacucaaggggccuugcugaaugacaaacauuccaauggaaccauuaaagacaggagcccauaucgaacccuaaugagcuguccuauuggugaaguucccucuccauacaacucaagauuugagucagucgcuuggucagcaagugcuugucaugauggcaucaauuggcuaacaauuggaauuucuggcccagacaauggggcaguggcuguguuaaaguacaacggcauaauaacagacacuaucaagaguuggagaaacaauauauugagaacacaagagucugaaugugcauguguaaaugguucuugcuuuacuguaaugaccgauggaccaagugauggacaggccucauacaagaucuucagaauagaaaagggaaagauagucaaaucagucgaaaugaaugccccuaauuaucacuaugaggaaugcuccuguuauccugauucuagugaaaucacaugugugugcagggauaacuggcauggcucgaaucgaccgugggugucuuucaaccagaaucuggaauaucagauaggauacauaugcagugggauuuucggagacaauccacgcccuaaugauaagacaggcaguugugguccaguaucgucuaauggagcaaauggaguaaaaggauuuucauucaaauacggcaaugguguuuggauagggagaacuaaaagcauuaguucaagaaacgguuuugagaugauuugggauccgaacggauggacugggacagacaauaacuucucaauaaagcaagacaucguaggaauaaaugaguggucaggauauagcgggaguuuuguucagcauccagaacuaacagggcuggauuguauaagaccuugcuucuggguugaacuaaucagagggcgacccaaagagaacacaaucuggacuagcgggagcagcauauccuuuugugguguaaacagugacacuguggguuggucuuggccagacggugcugaguugccauuuaccauugacaaguag

SEQ ID NO: 51494 - RNA, 1410 nt, Artificial Sequence
  derived and/or modified CDS sequence (wt) from neuraminidase__InfluenzaA__ADM14591
augaauccaaaccaaaagauaauaaccauugguucggucuguaugacaauuggaauggcuaacuuaauauuacaaauuggaaacauaaucucaauauggauuagccacucaauucaacuugggaaucaaaaucagauugaaacaugcaaucaaagcgucauuacuuaugaaaacaacacuuggguaaaucagacauauguuaacaucagcaacaccaacuuugcugcuggacagucagugguuuccgugaaauuagcgggcaauuccucucucugcccuguuaguggaugggcuauauacaguaaagacaacaguauaagaaucgguuccaagggggauguguuugucauaagggaaccauucauaucaugcucccccuuggaaugcagaaccuucuucuugacucaaggggccuugcugaaugacaaacauuccaauggaaccauuaaagacaggagcccauaucgaacccuaaugagcuguccuauuggugaaguucccucuccauacaacucaagauuugagucagucgcuuggucagcaagugcuugucaugauggcaucaauuggcuaacaauuggaauuucuggcccagacaauggggcaguggcuguguuaaaguacaacggcauaauaacagacacuaucaagaguuggagaaacaauauauugagaacacaagagucugaaugugcauguguaaaugguucuugcuuuacuguaaugaccgauggaccaagugauggacaggccucauacaagaucuucagaauagaaaagggaaagauagucaaaucagucgaaaugaaugccccuaauuaucacuaugaggaaugcuccuguuauccugauucuagugaaaucacaugugugugcagggauaacuggcauggcucgaaucgaccgugggugucuuucaaccagaaucuggaauaucagauaggauacauaugcagugggauuuucggagacaauccacgcccuaaugauaagacaggcaguugugguccaguaucgucuaauggagcaaauggaguaaaaggauuuucauucaaauacggcaaugguguuuggauagggagaacuaaaagcauuaguucaagaaacgguuuugagaugauuugggauccgaacggauggacugggacagacaauaacuucucaauaaagcaagauaucguaggaauaaaugaguggucaggauauagcgggaguuuuguucagcauccagaacuaacagggcuggauuguauaagaccuugcuucuggguugaacuaaucagagggcgacccaaagagaacacaaucuggacuagcgggagcagcauauccuuuugugguguaaacagugacacuguggguuggucuuggccagacggugcugaguugccauuuaccauugacaaguaa

SEQ ID NO: 51495 - RNA, 1410 nt, Artificial Sequence
  derived and/or modified CDS sequence (wt) from neuraminidase__InfluenzaA__ADM14601
augaauccaaaccaaaagauaauaaccauugguucggucuguaugacaauuggaauggcuaacuuaauauuacaaauuggaaacauaaucucaauauggauuagccacucaauucaacuugggaaucaaaaucagauugaaacaugcaaucaaagcgucauuacuuaugaaaacaacacuuggguaaaucagacauauguuaacaucagcaacaccaacuuugcugcuggacagucagugguuuccgugaaauuagcgggcaauuccucucucugcccuguuaauggaugggcuauauacaguaaagacaacaguguaagaaucgguuccaagggggauguguuugucauaagggaaccauucauaucaugcucccccuuggaaugcagaaccuucuucuugacucaaggggccuugcuaaaugacaaacauuccaauggaaccauuaaagacaggagcccauaucgaacccuaaugagcuguccuauuggugaaguucccucuccauacaacucaagauuugagucagucgcuuggucagcaagugcuugucaugauggcaucaauuggcuaacaauuggaauuucuggcccagacaauggggcaguggcuguguuaaaguacaacggcauaauaacagacacuaucaagaguuggagaaacaauauauugagaacacaagagucugaaugugcauguguaaaugguucuugcuuuacuguaaugaccgauggaccaagugauggacaggccucauacaagaucuucagaauagaaaagggaaagauagucaaaucagucgaaaugaaugccccuaauuaucacuaugaggaaugcuccuguuauccugauucuagugaaaucacaugugugugcagggauaacuggcauggcucgaaucgaccgugggugucuuucaaccagaaucuggaauaucagauaggauacauaugcagugggauuuucggagacaauccacgcccuaaugauaagacaggcaguugugguccaguaucgucuaauggagcaaauggaguaaaaggauuuucauucaaauacggcaaugguguuuggauagggagaacuaaaagcauuaguucaagaaacgguuuugagaugauuugggauccgaacggauggacugggacagacaauaacuucucaauaaagcaagauaucguaggaauaaaugaguggucaggauauagcgggaguuuuguucagcauccagaacuaacagggcuggauuguauaagaccuugcuucuggguugaacuaaucagagggcgacccaaagagaacacaaucuggacuagcgggagcagcauauccuuuugugguguaaacagugacacuguggguuggucuuggccagacggugcugaguugccauuuaccauugacaaguaa

SEQ ID NO: 51496 - RNA, 1410 nt, Artificial Sequence
  derived and/or modified CDS sequence (wt) from neuraminidase__InfluenzaA__ADM14611
augaauccaaaccaaaagauaauaaccauugguucggucuguaugacaauuggaauggcuaacuuaauauuacaaauuggaaacauaaucucaauauggauuagccacucaauucaacuugggaaucaaaaucagauugaaacaugcaaucaaagcgucauuacuuaugaaaacaacacuuggguaaaucagacauauguuaacaucagcaacaccaacuuugcugcuggacagucagugguuuccgugaaauuaucgggcaauuccucucucugcccuguuaguggaugggcuauauacaguaaagacaacaguauaagaaucgguuccaagggggauguguuugucauaagggaaccauucauaucaugcucccccuuggaaugcagaaccuucuucuugacucaaggggccuugcuaaaugacaaacauuccaauggaaccauuaaagacaggagcccauaucgaacccuaaugagcuguccuauuggugaaguucccucuccauacaacucaagauuugagucagucgcuuggucagcaagugcuugucaugauggcaucaauuggcuaacaauuggaauuucuggcccagacaauggggcaguggcuguguuaaaguacaacggcauaauaacagacacuaucaagaguuggagaaacaauauauugagaacacaagagucugaaugugcauguguaaaugguucuugcuuuacuguaaugaccgauggaccaagugauggacaggccucauacaagaucuucagaauagaaaagggaaagauagucaaaucagucgaaaugaaugccccuaauuaucacuaugaggaaugcuccugcuauccugauucuagugaaaucacaugugugugcagggauaacuggcauggcucgaaucgaccgugggugucuuucaaccagaaucuggaauaucagauaggauacauaugcagugggauuuucggagacaauccacgcccuaaugauaagacaggcaguugugguccaguaucgucuaauggagcaaauggaguaaaaggauuuucauucaaauacggcaaugguguuuggauagggagaacuaaaagcauuaguucaagaaacgguuuugagaugauuugggauccgaacggauggacugggacagacaauaacuucucaauaaagcaagauaucguaggaauaaaugaguggucaggauauagcgggaguuuuguucagcauccagaacuaacagggcuggauuguauaagaccuugcuucuggguugaacuaaucagagggcgacccaaagagaacacaaucuggacuagcgggagcagcauauccuuuugugguguaaacagugacacuguggguuggucuuggccagacggugcugaguugccauuuaccauugacaaguaa

SEQ ID NO: 51497 - RNA, 1410 nt, Artificial Sequence; identical to SEQ ID NO: 48750
  derived and/or modified CDS sequence (wt) from neuraminidase__InfluenzaA__ADM14620

SEQ ID NO: 51498 - RNA, 1410 nt, Artificial Sequence; identical to SEQ ID NO: 49794
  derived and/or modified CDS sequence (wt) from neuraminidase__InfluenzaA__ADM14629

SEQ ID NO: 51499 - RNA, 1410 nt, Artificial Sequence; identical to SEQ ID NO: 48750
  derived and/or modified CDS sequence (wt) from neuraminidase__InfluenzaA__ADM14639

SEQ ID NO: 51500 - RNA, 1410 nt, Artificial Sequence
  derived and/or modified CDS sequence (wt) from neuraminidase__InfluenzaA__ADM14657
augaauccaaaccaaaagauaauaaccauugguucggucuguaugacaauuggaauggcuaacuuaauauuacaaauuggaaacauaaucucaauauggauuagccacucaauucaacuugggaaucaaaaucagauugaaacaugcaaucaaagcgucauuacuuaugaaaacaacacuuggguaaaucagacauauguuaacaucagcaacaccaacuuugcugcuggacagucagugguuuccgugaaauuagcgggcaauuccucucucugcccuguuaguggaugggcuauauacaguaaagacaacaguauaagaaucgguuccaagggggauguguuugucauaagggaaccauucauaucaugcucccccuuggaaugcagaaccuucuucuugacucaaggggccuugcuaaaugacaaacauuccaauggaaccauuaaagacaggagcccauaucgaacccuaaugagcuguccuauuggugaaguucccucuccauacaacucaagauuugagucagucgcuuggucagcaagugcuugucaugauggcaucaauuggcuaacaauuggaauuucuggcccagacaauggggcaguggcuguguuaaaguacaacggcauaauaacagacacuaucaagaguuggagaaacaauauauugagaacacaagagucugaaugugcauguguaaaugguucuugcuuuacuguaaugaccgauggaccaagugauggacaggccucauacaagaucuucagaauagaaaagggaaagauagucaagucagucgaaaugaaugccccuaauuaucacuaugaggaaugcuccuguuauccugauucuagugaaaucacaugugugugcagggauaacuggcauggcucgaaucgaccgugggugucuuucaaccagaaucuggaauaucagauaggauacauaugcagugggauuuucggagacaauccacgcccuaaugauaagacaggcaguugugguccaguaucgucuaauggagcaaauggaguaaaaggauuuucauucaaauacggcaaugguguuuggauagggagaacuaaaagcauuaguucaagaaacgguuuugagaugauuugggauccgaacggauggacugggacagacaauaacuucucaauaaagcaagauaucguaggaauaaaugaguggucaggauauagcgggaguuuuguucagcauccagaacuaacagggcuggauuguauaagaccuugcuucuggguugaacuaaucagagggcgacccaaagagaacacaaucuggacuagcgggagcagcauauccuuuugugguguaaacagugacacuguggguuggucuuggccagacggugcugaguugccauuuaccauugacaaguaa

SEQ ID NO: 51501 - RNA, 1410 nt, Artificial Sequence
  derived and/or modified CDS sequence (wt) from neuraminidase__InfluenzaA__ADM14666
augaauccaaaccaaaagauaauaaccauugguucggucuguaugacaauuggaauggcuaacuuaauauuacaaauuggaaacauaaucucaauauggauuagccacucaauucaacuugggaaucaaaaucagauugaaacaugcaaucaaagcgucauuacuuaugaaaacaacacuuggguaaaucagacauauguuaacaucagcaacaccaacuuugcugcuggacagucagugguuuccgugaaauuagcgggcaauuccucucucugcccuguuaguggaugggcuauauacaguaaagacaacaguauaagaaucgguuccaagggggauguguuugucauaagggaaccauucauaucaugcucccccuuggaaugcagaaccuucuucuugacucaaggggccuugcuaaaugacaaacauuccaauggaaccauuaaagacaggagcccauaucgaacccuaaugagcuguccuauuggugaaguucccucuccauacaacucaagauuugagucagucgcuuggucagcaagugcuugucaugauggcaucaauuggcuaacaauuggaauuucuggcccagacaauggggcaguggcuguguuaaaguacaacggcauaauaacagacacuaucaagaguuggagaaacaauauauugagaacacaagagucugaaugugcauguguaaaugguucuugcuuuacuguaaugaccgauggaccaagugauggacaggccucuuacaagaucuucagaauagaaaagggaaagauagucaaaucagucgaaaugaaugccccuaauuaucacuaugaggaaugcuccuguuauccugauucuagugaaaucacaugugugugcagggauaacuggcauggcucgaaucgaccgugggugucuuucaaccagaaucuggaauaucagauaggauacauaugcagugggauuuucggagacaauccacgcccuaaugauaagacaggcaguugugguccaguaucgucuaauggagcaaauggaguaaaaggauuuucauucaaauacggcaaugguguuuggauagggagaacuaaaagcauuaguucaagaaacgguuuugagaugauuugggauccgaacggauggacugggacagacaauaacuucucaauaaagcaagauaucguaggaauaaaugaguggucaggauauagcgggaguuuuguucagcauccagaacuaacagggcuggacuguauaagaccuugcuucuggguugaacuaaucagagggcgacccaaagagaacacaaucuggacuagcgggagcagcauauccuuuugugguguaaacagugacacuguggguuggucuuggccagacggugcugaguugccauuuaccauugacaaguaa

SEQ ID NO: 51502 - RNA, 1410 nt, Artificial Sequence; identical to SEQ ID NO: 48750
  derived and/or modified CDS sequence (wt) from neuraminidase__InfluenzaA__ADM14684

SEQ ID NO: 51503 - RNA, 1410 nt, Artificial Sequence
  derived and/or modified CDS sequence (wt) from neuraminidase__InfluenzaA__ADM14693
augaauccaaaccaaaagaugauaaccauugguucggucuguaugacaauuggaauggcuaacuuaauauuacaaauuggaaacauaaucucaauauggauuagccacucaauucaacuugggaaucaaaaucagauugaaacaugcaaucaaagcgucauuacuuaugaaaacaacacuuggguaaaucagacauauguuaacaucagcaacaccaacuuugcugcuggacagucagugguuuccgugaaauuagcgggcaauuccucucucugcccuguuaguggaugggcuauauacaguaaagacaacaguauaagaaucgguuccaagggggauguguuugucauaagggaaccauucauaucaugcucccccuuggaaugcagaaccuucuucuugacucaaggggccuugcuaaaugacaaacauuccaauggaaccauuaaagacaggagcccauaucgaacccuaaugagcuguccuauuggugaaguucccucuccauacaacucaagauuugagucagucgcuuggucagcaagugcuugucaugauggcaucaauuggcuaacaauuggaauuucuggcccagacaauggggcaguggcuguguuaaaguacaacggcauaauaacagacacuaucaagaguuggagaaacaauauauugagaacacaagagucugaaugugcauguguaaaugguucuugcuuuacuguaaugaccgauggaccaagugauggacaggccucauacaagaucuucagaauagaaaagggaaagauagucaaaucagucgaaaugaaugccccuaauuaucacuaugaggaaugcuccuguuauccugauucuagugaaaucacaugugugugcagggauaacuggcauggcucgaaucgaccgugggugucuuucaaccagaaucuggaauaucagauaggauacauaugcagugggauuuucggagacaauccacgcccuaaugauaagacaggcaguugugguccaguaucgucuaauggagcaaauggaguaaaaggauuuucauucaaauacggcaaugguguuuggauagggagaacuaaaagcauuaguucaagaaacgguuuugagaugauuugggauccgaacggauggacugggacagacaauaacuucucaauaaagcaagauaucguaggaauaaaugaguggucaggauauagcgggaguuuuguucagcauccagaacuaacagggcuggauuguauaagaccuugcuucuggguugaacuaaucagagggcgacccaaagagaacacaaucuggacuagcgggagcagcauauccuuuugugguguaaacagugacacuguggguuggucuuggccagacggugcugaguugccauuuaccauugacaaguaa

SEQ ID NO: 51504 - RNA, 1410 nt, Artificial Sequence
  derived and/or modified CDS sequence (wt) from neuraminidase__InfluenzaA__ADM14702
augaauccaaaccaaaagauaauaaccauugguucggucuguaugacaauuggaauggcuaacuuaauauuacaaauuggaaacauaaucucaauauggauuagccacucaauucaacuugggaaucaaaaucagauugaaacaugcaaucaaagcgucauuacuuaugaaaacaacacuuggguaaaucagacauauguuaacaucagcaacaccaacuuugcugcuggacagucagugguuuccgugaaauuagcgggcaauuccucucucugcccuguuaguggaugggcuauauacaguaaagacaacaguauaagaaucgguuccaagggggauguguuugucauaagggaaccauucauaucaugcucccacuuggaaugcagaaccuucuucuugacucaaggggccuugcuaaaugacaaacauuccaauggaaccauuaaagacaggagcccauaucgaacccuaaugagcuguccuauuggugaaguucccucuccauacaacucaagauuugagucagucgcuuggucagcaagugcuugucaugauggcaucaauuggcuaacaauuggaauuucuggcccagacaauggggcaguggcuguguuaaaguacaacggcauaauaacagacacuaucaagaguuggagaaacaauauauugagaacacaagagucugaaugugcauguguaaaugguucuugcuuuacuguaaugaccgauggaccaagugauggacaggccucauacaagaucuucagaauagaaaagggaaaaauagucaaaucagucgaaaugaaugccccuaauuaucacuaugaggaaugcuccuguuauccugauucuagugaaaucacaugugugugcagggauaacuggcauggcucgaaucgaccgugggugucuuucaaccagaaucuggaauaucagauaggauacauaugcagugggauuuucggagacaauccacgcccuaaugauaagacaggcaguugugguccaguaucgucuaauggagcaaauggaguaaaaggauuuucauucaaauacggcaauggugcuuggauagggagaacuaaaagcacuaguucaagaaacgguuuugagaugauuugggauccgaacggauggacugggacagacaauaacuucucaauaaagcaagauaucguaggaauaaaugaguggucaggauauagcgggaguuuuguucagcauccagaacuaacagggcuggauuguauaagaccuugcuucuggguugaacuaaucagagggcgacccaaagagaacacaaucuggacuagcgggagcagcauauccuuuugugguguaaacagugacacuguggguuggucuuggccagacggugcugaguugccauuuaccauugacaaguaa

SEQ ID NO: 51505 - RNA, 1410 nt, Artificial Sequence
  derived and/or modified CDS sequence (wt) from neuraminidase__InfluenzaA__ADM14711
augaauccaaaccaaaagauaauaaccauugguucggucuguaugacaauuggaauggcuaacuuaauauuacaaauuggaaacauaaucucaauauggauuagccacucaauucaacuugggaaucaaaaucagauugaaacaugcaaucaaagcgucauuacuuaugaaaacaacacuuggguaaaucagacauauguuaacaucagcaacaccaacuuugcugcuggacagucagugguuuccgugaaauuagcgggcaauuccucucucugcccuguuaguggaugggcuauauacaguaaagacaacaguauaagaaucgguuccaagggggauguguuugucauaagggaaccauucauaucaugcucccccuuggaaugcagaaccuucuucuugacucaaggggccuugcuaaaugacaaacauuccaauggaaccauuaaagacaggagcccauaucgaacccuaaugagcuguccuauuggugaaguucccucuccauacaacucaagauuugagucagucgcuuggucagcaagugcuugucaugauggcaucaauuggcuaacaauuggaauuucuggcccagacaauggggcaguggcuguguuaaaguacaacggcauaauaacagacacuaucaagaguuggagaaacaauauauugagaacacaagagucugaaugugcauguguaaaugguucuugcuuuacuguaaugaccgauggaccaagugauggacaggccucauacaagaucuucaaaauagaaaagggaaagauagucaaaucagucgaaaugaaugccccuaauuaucacuaugaggaaugcuccuguuauccugauucuagugaaaucacaugugugugcagggauaacuggcauggcucgaaucgaccgugggugucuuucaaccagaaucuggaauaucagauaggauacauaugcagugggauuuucggggacaauccacgcccuaaugauaagacaggcaguugugguccaguaucgucuaauggagcaaauggaguaaaaggauuuucauucaaauacggcaaugguguuuggauagggagaacuaaaagcauuaguucaagaaacgguuuugagaugauuugggauccgaacggauggacugggacagacaauaacuucucaauaaagcaagauaucguaggaauaaaugaguggucaggauauagcgggaguuuuguucagcauccagaacuaacagggcuggauuguauaagaccuugcuucuggguugaacuaaucagagggcgacccaaagagaacacaaucuggacuagcgggagcagcauauccuuuugugguguaaacagugacacuguggguuggucuuggccagacggugcugaguugccauuuaccauugacaaguaa

SEQ ID NO: 51506 - RNA, 1410 nt, Artificial Sequence
  derived and/or modified CDS sequence (wt) from neuraminidase__InfluenzaA__ADM14720
augaauccaaaccaaaagauaauaaccauugguucggucuguaugacaauuggaauggcuaacuuaauauuacaaauuggaaacauaaucucaauauggauuagccacucaauucaacuugggaaucaaaaucagauugaaacaugcaaucaaagcgucauuacuuaugaaaacaacacuuggguaaaucagacauauguuaacaucagcaacaccaacuuugcugcuggacagucagugguuuccgugaaauuagcgggcaauuccucucucugcccuguuaguggaugggcuauauacaguaaagacaacaguauaagaaucgguuccaagggggauguguuugucauaagggaaccauucauaucaugcucccccuuggaaugcagaaccuucuucuugacucaaggggccuugcuaaaugacaaacauuccaauggaaccauuaaagacaggagcccauaucgaacccuaaugagcuguccuauuggugaaguucccucuccauacaacucaagauuugagucagucgcuuggucagcaagugcuugucaugauggcaucaauuggcuaacaauuggaauuucuggcccagacaauggggcaguggcuguguuaaaguacaacggcauaauaacagacacuaucaagaguuggagaaacaauauauugagaacacaagagucugaaugugcauguguaaaugguucuugcuuuacuguaaugaccgauggaccaagugauggacaggccucauacaagaucuucagaauagaaaagggaaagauagucaaaucagucgaaaugaaugccccuaauuaucacuaugaggaaugcuccuguuauccugauucuagugaaaucacaugugugugcagggauaacuggcauggcucgaaucgaccgugggugucuuucaaccagaaucuggaauaucagauaggauacauaugcagugggguuuucggagacaauccacgcccuaaugauaagacaggcaguugugguccaguaucgucuaauggagcaaauggaguaaaaggauuuucauucaaauacggcaaugguguuuggauagggagaacuaaaagcauuaguucaagaaacgguuuugagaugauuugggauccgaacggauggacugggacagacaauaacuucucaauaaagcaagauaucguaggaauaaaugaauggucaggauauagcgggaguuuuguucagcauccagaacuaacagggcuggauuguauaagaccuugcuucuggguugaacuaaucagagggcgacccaaagagaacacaaucuggacuagcgggagcagcauauccuuuugugguguaaacagugacacuguggguuggucuuggccagacggugcugaguugccauuuaccauugacaaguaa

SEQ ID NO: 51507 - RNA, 1410 nt, Artificial Sequence
  derived and/or modified CDS sequence (wt) from neuraminidase__InfluenzaA__ADM14730
augaauccaaaccaaaagauaauaaccauugguucggucuguaugacaauuggaauggcuaacuuaauauuacaaauuggaaacauaaucucaauauggauuagccacucaauucaacuugggaaucaaaaucagauugaaacaugcaaucaaagcaucauuacuuaugaaaacaacacuuggguaaaucagacauauguuaacaucagcaacaccaacuuugcugcuggacagucagugguuuccgugaaauuagcgggcaauuccucucucugcccuguuaguggaugggcuguauacaguaaagacaacaguauaagaaucgguuccaagggggaugugcuugucauaagggaaccauucauaucaugcucccccuuggaaugcagaaccuucuucuugacucagggggccuugcuaaaugacaaacauuccaauggaaccauuaaagacaggagcccauaucgaacccuaaugagcuguccuauuggugaaguucccucuccauacaacucaagauuugagucagucgcuuggucagcaagugcuugucaugauggcaucaauuggcuaacaauuggaauuucuggcccagacaauggggcaguggcuguguuaaaguacaacggcauaauaacagacacuaucaagaguuggagaaacaauauauugagaacacaagaaucugaaugugcauguguaaaugguucuugcuuuacuguaaugaccgauggaccaagugauggacaggccucauacaagaucuucagaauagaaaagggaaagauagucaaaucagucgaaaugaaugccccuaauuaucacuaugaggaaugcuccuguuauccugauucuagugaaaucacaugugugugcagggauaacuggcauggcucgaaucgaccgugggugucuuucaaccagaaucuggaauaucagauaggauacauaugcagugggauuuucggagacaauccacgcccuaaugauaagacaggcaguugugguccaguaucgucuaauggagcaaauggaguaaaaggauuuucauucaaauacggcaaugguguuuggauagggagaacuaaaagcauuaguucaagaagcgguuuugagaugauuugggauccgaacggauggacugggacagacaauaacuucucaauaaagcaagauaucguaggaauaaaugaguggucaggauauagcgggaguuuuguucagcauccagaacuaacagggcuggauuguauaagaccuugcuucuggguugaacuaaucagagggcgacccaaagagaacacaaucuggacuagcgggagcagcauauccuuuugugguguaaacagugacacuguggguuggucuuggccagacggugcugaguugccauuuaccauugacaaguaa

SEQ ID NO: 51508 - RNA, 1350 nt, Artificial Sequence
  derived and/or modified CDS sequence (wt) from neuraminidase__InfluenzaA__ADM14748
augaauccaaaccaaaagauaauaaccauugguucgguuuguaugacaauuggaauggcuaacuuaauauuacaaauuggaaacauaaucucaauauggauuagccacucaauucaacuugggaaucaaaaucagauugaaacaugcaaucaaagcgucauuacuuaugaaaacaacacuuggguaaaucagacauauguuaacaucagcaacaccaacuuugcugcuggucagucagugguuuccgugaaauuagcgggcaauuccucucucugcccugucaguggaugggcuauauacaguaaagacaacaguauaagaauaugcagaaccuucuucuugacucaaggggccuugcuaaaugacaaacauuccaauggaaccauuaaagacaggagcccauaucgaacccuaaugagcuguccuauuggugaaguucccucuccauacaacucaagauuugagucagucgcuuggucagcaagugcuugucaugauggcaucaauuggcuaacaauuggaauuucuggcccagacaauggggcaguggcuguguuaaaguacaacggcauaauaacagacacuaucaagaguuggagaaacaauauauugagaacacaagagucugaaugugcauguguaaaugguucuugcuuuacuguaaugaccgauggaccaagugauggacaggccucauacaagaucuucagaauagaaaagggaaagauagucaaaucagucgaaaugaaugccccuaauuaucacuaugaggaaugcuccuguuauccugauucuagugaaaucacaugugugugcagggauaacuggcauggcucgaaucgaccgugggugucuuucaaccagaaucuggaauaucagauaggauacauaugcagugggauuuucggagacaauccacgcccuaaugauaaaacaggcaguugugguccaguaucgucuaauggagcaaauggaguaaaaggauuuucauucaaauacggcaaugguguuuggauagggagaacuaaaagcauuaguucaagaaacgguuuugagaugauuugggauccgaacggauggacugggacagacaacaacuucucaauaaagcaagauaucguaggaauaaaugaguggucaggauauagcgggaguuuuguucagcauccagaacuaacagggcuggauuguauaagaccuugcuucuggguugaacuaaucagagggcgacccaaagagaacacaaucuggacuagcgggagcagcauauccuuuugugguguaaacagugacacuguggguuggucuuggccagacggugcugaguugccauuuaccauugacaaguaa

SEQ ID NO: 51509 - RNA, 1410 nt, Artificial Sequence
  derived and/or modified CDS sequence (wt) from neuraminidase__InfluenzaA__ADM14758
augaauccaaaccaaaagauaauaaccauugguucggucuguaugacaauuggaauggcuaacuuaauauuacaaauuggaaacauaaucucaauauggauuagccacucaauucaacuugggaaucaaaaucagauugaaacaugcaaucaaagcgucauuacuuaugaaaacaacacuuggguaaaucagacauauguuaacaucagcaacaccaacuuugcugcuggacagucagugguuuccgugaaauuagcgggcaauuccucucucugcccuguuaguggaugggcuauauacaguaaagacaacaguauaagaaucgguuccaagggggauguguuugucauaagggaaccauucauaucaugcucccccuuggaaugcagaaccuucuucuugacucaaggggccuugcuaaaugacaaacauuccaauggaaccauuaaagacaggagcccauaucgaacccuaaugagcuguccuauuggugaaguucccucuccauacaacucaagauuugagucagucgcuuggucagcaagugcuugucaugauggcaucaauuggcuaacaauuggaauuucuggcccagacaauggggcaguggcuguguuaaaguacaacggcauaauaacagacacuaucaagaguuggagaaacaauauauugagaacacaagagucugaaugugcauguguaaaugguucuugcuuuacuguaaugaccgauggaccaagugauggacaggccucauacaagaucuucagaauagaaaagggaaagauagucaaaucagucgaaauaaaugccccuaauuaucacuaugaggaaugcuccuguuauccugauucuagugaaaucacaugugugugcagggauaacuggcauggcucgaaucgaccgugggugucuuucaaccagaaucuggaauaucagauaggauacauaugcagugggauuuucggagacaauccacgcccuaaugauaagacaggcaguugugguccaguaucgucuaauggagcaaauggaguaaaaggauuuucauucaaauacggcaaugguguuuggauagggagaacuaaaagcauuaguucaagaaacgguuuugagaugauuugggauccgaacggauggacugggacagacaauaacuucucaauaaagcaagauaucguaggaauaaaugaguggucaggauauagcgggaguuuuguucagcauccagaacuaacagggcuggauuguauaagaccuugcuucuggguugaacuaaucagagggcgacccaaagagaacacaaucuggacuagcgggagcagcauauccuuuugugguguaaacagugacacuguggguuggucuuggccagacggugcugaguugccauuuaccauugacaaguaa

SEQ ID NO: 51510 - RNA, 1410 nt, Artificial Sequence; identical to SEQ ID NO: 51509
  derived and/or modified CDS sequence (wt) from neuraminidase__InfluenzaA__ADM14767

SEQ ID NO: 51511 - RNA, 1410 nt, Artificial Sequence; identical to SEQ ID NO: 48750
  derived and/or modified CDS sequence (wt) from neuraminidase__InfluenzaA__ADM14777

SEQ ID NO: 51512 - RNA, 1410 nt, Artificial Sequence; identical to SEQ ID NO: 48750
  derived and/or modified CDS sequence (wt) from neuraminidase__InfluenzaA__ADM14814

SEQ ID NO: 51513 - RNA, 1410 nt, Artificial Sequence; identical to SEQ ID NO: 48750
  derived and/or modified CDS sequence (wt) from neuraminidase__InfluenzaA__ADM14823

SEQ ID NO: 51514 - RNA, 1410 nt, Artificial Sequence
  derived and/or modified CDS sequence (wt) from neuraminidase__InfluenzaA__ADM14841
augaauccaaaccaaaagauaauaaccauugguucggucuguaugacaauuggaauggcuaacuuaauauuacaaauuggaaacauaaucucaauauggauuagccacucaauucaacuugggaaucaaaaucagauugaaacaugcaaucaaagcgucauuacuuaugaaaacaacacuuggguaaaucagacauauguuaacaucagcaacaccaacuuugcugcuggacagucagugguuuccgugaaauuagcgggcaauuccucucucugcccuguuaguggaugggcuauauacaguaaagacaacaguauaagaaucgguuccaagggggauguguuugucauaagggaaccauucauaucaugcucccccuuggaaugcagaaccuucuucuugacucaaggggccuugcuaaaugacaaacauuccaauggaaccauuaaagacaggagcccauaucgaacccuaaugagcuguccuauuggugaaguucccucuccauacaacucaagauuugagucagucgcuuggucagcaagugcuugucaugauggcaucaauuggcuaacaauuggaauuucuggcccagacaauggggcaguggcuguguuaaaguacaacggcauaauaacagacacuaucaagaguuggagaaacaauauauugagaacacaagagucugaaugugcauguguaaaugguucuugcuuuacuguaaugaccgauggaccaagugauggacaggccucauacaagaucuucagaauagaaaagggaaagauagucaaaucagucgaaaugaaugccccuaauuaucacuaugaggaaugcuccuguuauccugauucuagugaaaucacaugugugugcagggauaacuggcauggcucgaaucgaccgugggugucuuucaaccagaaucuggaauaucagauaggauacauaugcagugggauuuucggagacaauccacgcccuaaugauaagacaggcaguugugguccaguaucgucuaauggagcaaauggaguaaaaggauuuucauucaaauacggcaaugguguuuggauagggagaacuaaaagcauuaguucaagaaacgguuuugagaugauuugggauccgaacggauggacugggacagacaauaacuucucaacaaagcaagauaucguaggaauaaaugaguggucaggauauagcgggaguuuuguucagcauccagaacuaacagggcuggauuguauaagaccuugcuucuggguugaacuaaucagagggcgacccaaagagaacacaaucuggacuagcgggagcagcauauccuuuugugguguaaacagugacacuguggguuggucuuggccagacggugcugaguugccauuuaccauugacaaguaa

SEQ ID NO: 51515 - RNA, 1410 nt, Artificial Sequence; identical to SEQ ID NO: 51514
  derived and/or modified CDS sequence (wt) from neuraminidase__InfluenzaA__ADM14859

SEQ ID NO: 51516 - RNA, 1410 nt, Artificial Sequence; identical to SEQ ID NO: 49887
  derived and/or modified CDS sequence (wt) from neuraminidase__InfluenzaA__ADM14868

SEQ ID NO: 51517 - RNA, 1410 nt, Artificial Sequence
  derived and/or modified CDS sequence (wt) from neuraminidase__InfluenzaA__ADM14878
augaauccaaaccaaaagauaauaaccauugguucggucuguaugacaauuggaauggccaacuuaauauuacaaauuggaaacauaaucucaauauggauuagccacucaauucaacuugggaaucaaaaucagauugaaacaugcaaucaaagcgucauuacuuaugaaaacaacacuuggguaaaucagacauauguuaacaucagcaacaccaacuuugcugcuggacagucagugguuuccgugaaauuagcgggcaauuccucucucugcccuguuaguggaugggcuauauacaguaaagacaacaguauaagaaucgguuccaagggggauguguuugucauaagggaaccauucauaucaugcucccccuuggaaugcagaaccuucuucuugacucaaggggccuugcuaaaugacaaacauuccaauggaaccauuaaagacaggagcccauaucgaacccuaaugagcuguccuauuggugaaguucccucuccauacaacucaagauuugagucagucgcuuggucagcaagugcuugucaugauggcaucaauuggcuaacaauuggaauuucuggcccagacaauggggcaguggcuguguuaaaguacaacggcauaauaacagacacuaucaagaguuggagaaacaauauauugagaacacaagagucugaaugugcauguguaaaugguucuugcuuuacuguaaugaccgauggaccaagugauggacaggccucauacaagaucuucagaauagaaaagggaaagauagucaaaucagucgaaaugaaugccccuaauuaucacuaugaggaaugcuccuguuauccugauucuagugaaaucacaugugugugcagggauaacuggcauggcucgaaucgaccgugggugucuuucaaccagaaucuggaauaucagauaggauacauaugcagugggauuuucggagacaauccacgcccuaaugauaagacaggcaguugugguccaguaucgucuaauggagcaaauggaguaaaaggauuuucauucaaauacggcaaugguguuuggauagggagaacuaaaagcauuaguucaagaaacgguuuugagaugauuugggauccgaacggauggacugggacagacaauaacuucucaacaaagcaagauaucguaggaauaaaugaguggucaggauauagcgggaguuuuguucagcauccagaacuaacagggcuggauuguauaagaccuugcuucuggguugaacuaaucagagggcgacccaaagagaacacaaucuggacuagcgggagcagcauauccuuuugugguguaaacagugacacuguggguuggucuuggccagacggugcugaguugccauuuaccauugacaaguaa

SEQ ID NO: 51518 - RNA, 1410 nt, Artificial Sequence; identical to SEQ ID NO: 49483
  derived and/or modified CDS sequence (wt) from neuraminidase__InfluenzaA__ADM14887

SEQ ID NO: 51519 - RNA, 1410 nt, Artificial Sequence
  derived and/or modified CDS sequence (wt) from neuraminidase__InfluenzaA__ADM14896
augaauccaaaccaaaagauaauaaccauugguucggucuguaugacaauuggaauggcuaacuuaauauuacaaauuggaaacauaaucucaauauggauuagccacucaauucaacuugggaaucaaaaucagauugaaacaugcaaucaaagcgucauuacuuaugaaaacaacacuuggguaaaucagacauauguuaacaucagcaacaccaacuuugcugcuggacagucagugguuuccgugaaauuagcgggcaauuccucucucugcccuguuaguggaugggcuauauacaguaaagacaacaguauaagaaucgguuccaagggggaugugcuugucauaagggaaccauucauaucaugcucccccuuggaaugcagaaccuucuucuugacucaaggggccuugcuaaaugacaaacauuccaauggaaccauuaaagacaggagcccauaucgaacccuaaugagcuguccuauuggugaaguucccucuccauacaacucaagauuugagucagucgcuuggucagcaagugcuugucaugauggcaucaauuggcuaacaauuggaauuucuggcccagacaauggggcaguggcuguguuaaaguacaacggcauaauaacagacacuaucaagaguuggagaaacaauauauugagaacacaagagucugaaugugcauguguaaaugguucuugcuuuacuguaaugaccgauggaccaagugauggacaggccucauacaagaucuucagaauagaaaagggaaagauagucaaaucagucgaaaugaaugccccuaauuaucacuaugaggaaugcuccuguuauccugauucuagugaaaucacaugugugugcagggauaacuggcauggcucgaaucgaccgugggugucuuucaaccagaaucuggaauaucagauaggauacauaugcagugggauuuucggagacaauccacgcccuaaugauaagacaggcaguugugguccaguaucgucuaauggagcaaauggaguaaaaggauuuucauucaaauacggcaaugguguuuggauagggagaacuaaaagcauuaguucaagaaacgguuuugagaugauuugggauccgaacggauggacugggacagacaauaacuucucaauaaagcaagauaucguaggaauaaaugaguggucaggauauagcgggaguuuuguucagcauccagaacuaacagggcuggauuguauaagaccuugcuucuggguugaacuaaucagagggcgacccaaagagaacacaaucuggacuagcgggagcagcaucuccuuuugugguguaaacagugacacuguggguuggucuuggccagacggugcugaguugccauuuaccauugacaaguaa

SEQ ID NO: 51520 - RNA, 1410 nt, Artificial Sequence; identical to SEQ ID NO: 48750
  derived and/or modified CDS sequence (wt) from neuraminidase__InfluenzaA__ADM14905

SEQ ID NO: 51521 - RNA, 1410 nt, Artificial Sequence
  derived and/or modified CDS sequence (wt) from neuraminidase__InfluenzaA__ADM14923
augaauccaaaccaaaagauaauaaccauugguucggucuguaugacaauuggaauggcuaacuuaauauuacaaauuggaaacauaaucucaauauggauuagccacucaauucaacuugggaaucaaaaucagauugaaacaugcaaucaaagcgucauuacuuaugaaaacaacacuuggguaaaucagacauauguuaacaucagcaacaccaacuuugcugcuggacagucagugguuuccgugaaauuagcgggcaauuccucucucugcccuguuaguggaugggcuauauacaguaaagacaacaguauaagaaucgguuccaagggggauguguuugucauaagggaaccauucauaucaugcucccccuuggaaugcagaaccuucuucuugacucaaggggccuugcuaaaugacaaacauuccaauggaaccauuaaagacaggagcccauaucgaacccuaaugagcuguccuauuggugaaguucccucuccauacaacucaagauuugagucagucgcuuggucagcaagugcuugucaugauggcaucaauuggcuaacaauuggaauuucuggcccagacaauggggcaguggcuguguuaaaguacaacggcauaauaacagacacuaucaagaguuggagaaacaauauauugagaacacaagagucugaaugugcauguguaaaugguucuugcuuuacuguaaugaccgauggaccaagugauggacaggccucauacaagaucuucagaauagaaaagggaaagauagucaaaucagucgaaaugaaugccccuaauuaucacuaugaggaaugcuccuguuauccugauucuagugaaaucacaugugugugcagggauaacuggcauggcucgaaucgaccgugggugucuuucaaccagaaucuggaauaucagauaggauacauaugcagugggauuuucggagacaauccacgcccuaaugauaagacaggcaguugugguccaguaucgucuaauggagcaaauggaguaaaaggauuuucguucaaauacggcaaugguguuuggauagggagaacuaaaagcauuaguucaagaaacgguuuugagaugauuugggauccgaacggauggacugggacagacaauaacuucucaauaaagcaagauaucguaggaauaaaugaguggucaggauauagcgggaguuuuguucagcauccagaacuaacagggcuggauuguauaagaccuugcuucuggguugaacuaaucagagggcgacccaaagagaacacaaucuggacuagcgggagcagcauauccuuuugugguguaaacagugacacuguggguuggucuuggccagacggugcugaguugccauuuaccauugacaaguaa

SEQ ID NO: 51522 - RNA, 1410 nt, Artificial Sequence
  derived and/or modified CDS sequence (wt) from neuraminidase__InfluenzaA__ADM14932
augaauccaaaccaaaagauaauaaccauugguucggucuguaugacaauuggaauggcuaacuuaauauuacaaauuggaaacauaaucucaauauggauuagccacucaauucaacuugggaaucaaaaucagauugaaacaugcaaucaaagcgucauuacuuaugaaaacaacacuuggguaaaucagacauauguuaacaucagcaacaccaacuuugcugcuggacagucagugguuuccgugaaauuagcgggcaauuccucucucugcccuguuaguggaugggcuauauacaguaaagacaacaguauaagaaucgguuccaagggggauguguuugucauaagggaaccauucauaucaugcucccccuuggaaugcagaaccuucuucuugacucaaggggccuugcuaaaugacaaacauuccaauggaaccauuaaagacaggagcccauaucgaacccuaaugagcuguccuauuggugaaguucccucuccauacaacucaagauuugagucagucgcuuggucagcaagugcuugucaugauggcaucaauuggcuaacaauuggaauuucuggcccagacaauggggcaguggcuguguuaaaguacaacggcauaauaacagacacuaucaagaguuggagaaacaauauauugagaacacaagagucugaaugugcauguguaaaugguucuugcuuuacuguaaugaccgauggaccaagugauggacaggccucauacaagaucuucagaauagaaaagggaaagauagucaaaucagucgaaaugaaugccccuaauuaucacuaugaggaaugcuccuguuauccugauucuagugaaaucacaugugugugcagggauaacuggcauggcucgaaucgaccgugggugucuuucaaccagaaucuggaauaucagauaggauacauaugcagugggauuuucggagacaauccacgcccuaaugauaagaaaggcaguugugguccaguaucgucuaauggagcaaauggaguaaaaggauuuucauucaaauacggcaaugguguuuggauagggagaacuaaaagcauuaguucaagaaacgguuuugagaugauuugggauccgaacggauggacugggacagacaauaacuucucaauaaagcaagauaucguaggaauaaaugaauggucaggguauagcgggaguuuuguucagcauccagaacuaacagggcuggauuguauaagaccuugcuucuggguugaacuaaucagagggcgacccaaagagaacacaaucuggacuagcgggagcagcauauccuuuugugguguaaacagugacacuguggguuggucuuggccagacggugcugaguugccauuuaccauugacaaguaa

SEQ ID NO: 51523 - RNA, 1410 nt, Artificial Sequence
  derived and/or modified CDS sequence (wt) from neuraminidase__InfluenzaA__ADM14950
augaauccaaaccaaaagauaauaaccauugguucggucuguaugacaauuggaauggcuaacuuaauauuacaaauuggaaacauaaucucaauauggauuagccacucaauucaacuugggaaccaaaaucagauugaaacaugcaaucaaagcgucauuacuuaugaaaacaacacuuggguaaaucagacauauguuaacaucagcaacaccaacuuugcugcuggacagucagugguuuccgugaaauuagcgggcaauuccucucucugcccuguuaguggaugggcuauauacaguaaagacaacaguauaagaaucgguuccaagggggauguguuugucauaagggaaccauucauaucaugcucccccuuggaaugcagaaccuucuucuugacucaaggggccuugcuaaaugacaaacauuccaauggaaccauuaaagacaggagcccauaucgaacccuaaugagcuguccuauuggugaaguucccucuccauacaacucaagauuugagucagucgcuuggucagcaagugcuugucaugauggcaucaauuggcuaacaauuggaauuucuggcccagacaauggggcaguggcuguguuaaaguacaacggcauaauaacagacacuaucaagaguuggagaaacaauauauugagaacacaagagucugaaugugcauguguaaaugguucuugcuuuacuguaaugaccgauggaccaagugauggacaggccucauacaagaucuucagaauagaaaagggaaagauagucaaaucagucgaaaugaaugccccuaauuaucacuaugaggaaugcuccuguuauccugauucuagugaaaucacaugugugugcagggauaauuggcauggcucgaaucgaccguggguaucuuucaaccagaaucuggaauaucagauaggauacauaugcagugggauuuucggagacaauccacgcccuaaugauaagacaggcaguugugguccaguaucgucuaauggagcaaauggaguaaaaggauuuucauucaaauacggcaaugguguuuggauagggagaacuaaaagcauuaguucaagaaacgguuuugagaugauuugggauccgaacggauggacugggacagacaauaacuucucaauaaagcaagauaucguaggaauaaaugaguggucaggauauagcgggaguuuuguucagcauccagaacuaacagggcuggauuguauaagaccuugcuucuggguugaacuaaucagagggcgacccaaagagaacacaaucuggacuagcgggagcagcauauccuuuugugguguaaacagugacacuguggguuggucuuggccagacggugcugaguugccauuuaccauugacaaguaa

SEQ ID NO: 51524 - RNA, 1410 nt, Artificial Sequence
  derived and/or modified CDS sequence (wt) from neuraminidase__InfluenzaA__ADM14959
augaauccaaaccaaaagauaauaaccauugguucggucuguaugacaauuggaauggcuaacuuaauauuacaaauuggaaacauaaucucaauauggauuagccacucaauucaacuugggaaucaaaaucagauugaaacaugcaaucaaagcgucauuacuuaugaaaacaacacuuggguaaaucagacauauguuaacaucagcaacaccaacuuugcugcuggacagucagugguuuccgugaaauuagcgggcaauuccucucucugcccuguuaguggaugggcuauauacaguaaagacaacaguauaagaaucgguuccaagggggauguguuugucauaagggaaccauucauaucaugcucccccuuggaaugcagaaccuucuucuugacucaaggggccuugcuaaaugacaaacauuccaauggaaccauuaaagacaggagcccauaucgaacccuaaugagcuguccuauuggugaaguucccucuccauacaacucaagauuugagucagucgcuuggucagcaagugcuugucaugauggcaucaauuggcuaacaauuggaauuucuggcccagacaauggggcaguggcuguguuaaaguacaacggcauaauaacagacacuaucaagaguuggagaaacaauauauugagaacacaagagucugaaugugcauguguaaaugguucuugcuuuacuguaaugaccgauggaccaagugauggacaggccucauacaaaaucuucagaauagaaaagggaaagauagucaaaucagucgaaaugaaugccccuaauuaucacuaugaggaaugcuccuguuauccugauucuagugaaaucacaugugugugcagggauaacuggcauggcucgaaucgaccgugggugucuuucaaccagaaucuggaauaucagauaggauacauaugcagugggauuuucggagacaauccacgcccuaaugauaagacaggcaguugugguccaguaucgucuaauggagcaaauggaguaaaaggauuuucauucaaauacggcaaugguguuuggauagggagaacuaaaagcauuaguucaagaaacgguuuugagaugauuugggauccgaacggauggacugggacagacaauaacuucucaauaaagcaagauaucguaggaauaaaugaguggucaggauauagcgggaguuuuguccagcauccagaacuaacagggcugaauuguauaagaccuugcuucuggguugaacuaaucagagggcgacccaaagagaacacaaucuggacuagcgggagcagcauauccuuuugugguguaaacagugacacuguggguuggucuuggccagacggugcugaguugccauuuaccauugacaaguaa

SEQ ID NO: 51525 - RNA, 1410 nt, Artificial Sequence
  derived and/or modified CDS sequence (wt) from neuraminidase__InfluenzaA__ADM14977
augaauccaaaccaaaagauaauaaccauugguucggucuguaugacaauuggaauggcuaacuuaauauuacaaauuggaaacauaaucucaauauggauuagccacucaauucaacuugggaaucaaaaucagauugaaacaugcaaucaaagcgucauuacuuaugaaaacaacacuuggguaaaucagacauauguuaacaucagcaacaccaacuuugcugcuggacagucagugguuuccgugaaauuagcgggcaauuccucucucugcccuguuaauggaugggcuauauacaguaaagacaacaguguaagaaucgguuccaagggggauguguuugucauaagggaaccauucauaucaugcucccccuuggaaugcagaaccuucuucuugacucaaggggccuugcuaaaugacaaacauuccaauggaaccauuaaagacaggagcccauaucgaacccuaaugagcuguccuauuggugaaguucccucuccauacaacucaagauuugagucagucgcuuggucagcaagugcuugucaugauggcaucaauuggcuaacaauuggaauuucuggcccagacaauggggcaguggcuguguuaaaguacaacggcauaauaacagacacuaucaagaguuggagaaacaauauauugagaacacaagagucugaaugugcauguguaaaugguucuugcuuuacuguaaugaccgauggaccaaguaauggacaggccucauacaagaucuucagaauagaaaagggaaagauagucaaaucagucgaaaugaaugccccuaauuaucacuaugaggaaugcuccuguuauccugauucuagugaaaucacaugugugugcagggauaacuggcauggcucgaaucgaccgugggugucuuucaaccagaaucuggaauaucagauaggauacauaugcagugggauuuucggagacaauccacgcccuaaugauaagacaggcaguugugguccaguaucgucuaauggagcaaauggaguaaaaggauuuucauucaaauacggcaaugguguuuggauagggagaacuaaaagcauuaguucaagaaacgguuuugagaugauuugggauccgaacggauggacugggacagacaauaacuucucaauaaagcaagauaucguaggaauaaaugaguggucaggauauagcgggaguuuuguucagcauccagaacuaacagggcuggauuguauaagaccuugcuucuggguugaacuaaucagagggcgacccaaagagaacacaaucuggacuagcgggagcagcauauccuuuugugguguaaacagugacacuguggguuggucuuggccagacggugcugaguugccauuuaccauugacaaguaa

SEQ ID NO: 51526 - RNA, 1410 nt, Artificial Sequence
  derived and/or modified CDS sequence (wt) from neuraminidase__InfluenzaA__ADM14987
augaauccaaaccaaaagauaauaaccauugguucggucuguaugacaauuggaauggcuaacuuaauauuacaaauuggaaacauaaucucaauauggauuagccacucaauucaacuugggaaucaaaaucagauugaaacaugcaaucaaagcgucauuacuuaugaaaacaacacuuggguaaaucagacauauguuaacaucagcaacaccaacuuugcugcuggacagucagugguuuccgugaaauuagcgggcaauuccucucucugcccuguuaguggaugggcuauauacaguaaagacaacaguauaagaaucgguuccaagggggauguguuugucauaagggaaccauucauaucaugcucccccuuggaaugcagaaccuucuucuugacucaaggggccuugcuaaaugacaaacauuccaauggaaccauuaaagacaggagcccauaucgaacccuaaugagcuguccuauuggugaaguucccucuccauacaacucaagauuugagucagucgcuuggucagcaagugcuugucaugauggcaucaauuggcuaacaauuggaauuucuggcccagacaauggggcaguggcuguguuaaaguacaacggcauaauaacagacacuaucaagaguuggagaaacaauauauugagaacacaagagucugaaugugcauguguaaaugguucuugcuuuacuguaaugaccgauggaccaagugauggacaggccucauacaagaucuucagaauagaaaagggaaagauagucaaaucagucgaaaugaaugccccuaauuaucacuaugaggaaugcuccuguuauccugauucuagugaaaucacauguguaugcagggauaacuggcauggcucgaaucgaccgugggugucuuucaaccagaaucuggaauaucagauaggauacauaugcagugggauuuucggagacaauccacgcccuaaugauaagacaggcaguugugguccaguaucgucuaauggagcaaauggaguaaaaggauuuucauucaaauacggcaaugguguuuggauagggagaacuaaaagcauuaguucaagaaacgguuuugagaugauuugggauccgaacggauggacugggacagacaauaacuucucaacaaagcaagauaucguaggaauaaaugaguggucaggauauagcgggaguuuuguucagcauccagaacuaacagggcuggauuguauaagaccuugcuucuggguugaacuaaucagagggcgacccaaagagaacacaaucuggacuagcgggagcagcauauccuuuugugguguaaacagugacacuguggguuggucuuggccagacggugcugaguugccauuuaccauugacaaguaa

SEQ ID NO: 51527 - RNA, 1410 nt, Artificial Sequence; identical to SEQ ID NO: 51226
  derived and/or modified CDS sequence (wt) from neuraminidase__InfluenzaA__ADM26787

SEQ ID NO: 51528 - RNA, 1410 nt, Artificial Sequence
  derived and/or modified CDS sequence (wt) from neuraminidase__InfluenzaA__ADM26798
augaauccaaaucaaaagauaauaacgauuggcucuguuucucucaccauuuccacaauaugcuucuucaugcaaauugccaucuugguaacuacuguaacauugcauuucaagcaauaugaauucaacucccccccaaacaaccaagugaugcugugugaaccaacaauaauagaaagaaacauaacagagauaguguaucugaccaacaccaccauagagaaggaaauaugccccaaacuagcagaauacagaaauuggucaaagccgcaaugugacauuacaggauuugcaccuuuuucuaaggacaauucgauuaggcuuuccgcugguggggacaucugggugacaagagaaccuuaugugucaugcgauccugacaaguguuaucaauuugcccuuggacagggaacaacacuaaacaacgugcauucaaauaacacaguacgugauaggaccccuuaucggacccuauugaugaaugaguuagguguuccuuuucaucuggggaccaagcaagugugcauagcuugguccagcucaaguugucacgauggaaaagcauggcugcauguuuguauaacgggggaugauaaaaaugcaacugcuagcuucauuuacaaugggaggcuuguagauaguguuguuucaugguccaaagacauccucaggacccaggagucagaaugcguuuguaucaauggaacuuguacaguaguaaugacugaugggagugcuucaggaaaagcugauacuaaaauacuauucauugaggaggggaaaaucguucauacuagcacauugucaggaagugcucagcaugucgaggagugcuccugcuauccucgauauccuggugucagaugugucugcagagacaacuggaaaggcuccaauaggcccaucguagauauaaacauaaaggaucauagcauuguuuccaguuauguguguucaggacuuguuggagacacacccagaaaaaacgacagcuccagcaguagccauuguuuggauccuaacaaugaagaagguggucauggagugaaaggcugggccuuugaugauggaaaugacguguggaugggaagaacgaucagcgagaagucacgcuuaggguaugaaaccuucaaagucauugaaggcugguccaacccuaaguccaaauugcagauaaauaggcaagucauaguugacagagguaauagguccgguuauucugguauuuucucuguugaaggcaaaagcugcaucaaucggugcuuuuauguggaguugauaaggggaagaaaggaggaaacugaagucuuguggaccucaaacaguauuguuguguuuuguggcaccucagguacauauggaacaggcucauggccugauggggcgaacaucaaucucaugccuauauaa

SEQ ID NO: 51529 - RNA, 1410 nt, Artificial Sequence
  derived and/or modified CDS sequence (wt) from neuraminidase__InfluenzaA__ADM26809
augaauccaaaucaaaagauaauaacgauuggcucuguuucucucaccauuuccacaauaugcuucuucaugcaaauugccaucuugauaacuacuguaacauugcauuucaagcaauaugaauucaacucccccccaaacaaccaagugaugcugugugaaccaacaauaauagaaagaaacauaacagagauaguguaucugaccaacaccaccauagagaaggaaauaugccccaaacuagcagaauacagaaauuggucaaagccgcaaugugacauuacaggauuugcaccuuuuucuaaggacaauucgauuaggcuuuccgcugguggggacaucugggugacaagagaaccuuaugugucaugcgauccugacaaguguuaucaauuugcccuuggacagggaacaacaguaaacaacgugcauucaaauaacacaguacgugauaggaccccuuaucggacccuauugaugaaugaguuagguguuccuuuucaucuggggaccaagcaagugugcauagcaugguccagcucaaguugucacgauggaaaagcauggcugcauguuuguauaacgggggaugauaaaaaugcaacugcuagcuucauuuacaaugggaggcuuguggauaguguuguuucaugguccaaagaaauccucaggacccaggagucagaaugcgucuguaucaauggaacuuguacaguaguaaugacugaugggagugcuucaggaaaagcugauacuaaaauacuauucauugaggaggggaaaaucguucauacuagcacauugucaggaagugcccagcaugucgaggagugcucuugcuauccucgauauccuggugucagaugugucugcagagacaacuggaaaggcuccaauaggcccaucguagauauaaacauaaaggaucauagcauuguuuccaguuauguguguucaggacuuguuggagacacacccagaaaaaacgacagcuccagcaguagccauuguuuggauccuaacaaugaagaagguggucauggagugaaaggcugggccuuugaugauggaaaugacguguggaugggaagaacgaucagcgagaagucacgcuuaggguaugaaacuuucaaagucauugaaggcugguccaaccauaaguccaaauugcagauaaauaggcaggucauaguugacagagguaauagguccgguuauucugguauuuucucuguugaaggcaaaagcugcaucaaucggugcuuuuauguggaguugauuaggggaagaaaagaggaaacugaaguauuguggaccucaaacaguauuguuguguuuuguggcaccucagguacauauggaacaggcucauggccugauggggcggaccucaaucucaugccuauauaa

SEQ ID NO: 51530 - RNA, 1410 nt, Artificial Sequence
  derived and/or modified CDS sequence (wt) from neuraminidase__InfluenzaA__ADM26820
augaauccaaaucaaaagauaauaacgauuggcucuguuucucucaccauuuccacaauaugcuucuucaugcaaauugccaucuugauaacuacuguaacauugcauuucaagcaauaugaauucaacucccccccaaacaaccaagugaugcugugugaaccaacaauaauagaaagaaacauaacagagauaguguaucugaccaacaccaccauagagaaggaaauaugccccaaacuagcagaauacagaaauuggucaaaaccgcaaugugacauuacaggauuugcaccuuuuucuaaggacaauucgauuaggcuuuccgcugguggggacaucugggugacaagagaaccuuaugugucaugcgauccugacaaguguuaucaauuugcccuuggacagggaacaacacuaaacaacgugcauucaaauaacacaguacgugauaggaccccuuaucggacccuauugaugaaugaguuagguguuccuuuucaucuggggaccaagcaagugugcauagcaugguccagcucaaguugucacgauggaaaagcauggcugcauguuuguauaacgggggaugauaaaaaugcaacugcaagcuucauuuacaaugggaggcuuguagauaguguuguuucaugguccaaagaaauucucaggacccaggagucagaaugcguuuguaucaauggaacuuguacaguaguaaugacugauggaagugcuucaggaaaagcugauacuaaaauacuauucauugaggaggggaaaaucguucauacuagcacauugucaggaagugcucagcaugucgaggagugcucuugcuauccucgauauccuggugucagaugugucugcagagacaacuggaaaggcuccaauaggcccaucguagauauaaacauaaaggaucauagcauuguuuccaguuauguguguucaggacuuguuggagacacacccagaaaaaacgacagcuccagcaguagccauuguuuggauccuaacaaugaagaagguggucauggagugaaaggcugggccuuugaugauggaaaugacguguggaugggaagaacaaucaacgagacgucacgcuuaggguaugaaaccuucaaagucauugaaggcugguccaacccuaaguccaaauugcagauaaauaggcaagucauaguugacagagguaauagguccgguuauucugguauuuucucuguugaaggcaaaagcugcaucaaucggugcuuuuauguggaguugauuaggggaagaaaagaggaaacugaagucuuguggaccucaaacaguauuguuguguuuuguggcaccucagguacauauggaacaggcucauggccugauggggcggaucucaaucucaugccuauauaa

SEQ ID NO: 51531 - RNA, 1350 nt, Artificial Sequence
  derived and/or modified CDS sequence (wt) from neuraminidase__InfluenzaA__ADM31427
augaauccaaaccagaagauaauaaccauuggaucagucuguaugauaauuggaauaguuagcuuaauguuacagauugggaacaugaucucaauaugggucagucauucaauucaaacagggaaucaacaccaagcugaaccaaucagaaauacuaauuuucuuacugagaacgcuguggcuucaguaacauuagcgggcaauucaucucuuugccccauuagaggaugggccguacacaguaaagacaacaguauaaggauuggguccaagggggauguguuuguaauuagggagccguucaucucaugcucccauauggaaugcaggacuuucuuuuugacucagggagccuuacugaaugacaagcauuccaacgggacugucaaagacaggagcccucacagaacacuaaugaguuguccugugggugaggcucccuccccauauaacucgagguuugagucuguugcuuggucagcaagcgcuugccaugauggcaucaguugguugacaauuggaauuucugguccagacaauggggcuguggcgguauugaaauacaauggcauaauaacagacacuaucaagaguugggggaauaacauacugaggacucaagagucugaaugugcauguguaaauggcucuugcuuuacuguaaugacagauggaccaaguaauggacaggcaucauauaagaucuucaaaauagaaaaagggaaaguaguuaaaucagucgaauugaaugcuccuaauuaucacuaugaggaaugcuccuguuauccugauucuggcgaaauaauaugugugugcagggacaauuggcauggcucaaauaggccaugggugucuuucaaucagaauuuggaguaucaaauaggauauauuugcagugggguuuucggagacaauccacggccaaaugaugggacagguaguugugguccaauguccccuaacggggcauaugggauaaaaggguuuucauuuaaauacgguaaugguguuuggaucgggagaaccaaaagcacuaauuccaggagcgguuuugaaaugauuugggauccaaauggguggacuggaacggacagugaauuuucggugaaacaagauauaguagcaauaacugauuggucaggauauagcgggaguuuuguccagcauccggaacugacaggauuagacugcauaagaccuugcuucuggguugaguuaaucagggggcggccaaaagaaagcacaauuuggacuagugggagcagcauaucuuuuugugguguaaauagugacacugugaguuggucuuggccagacggugcugaguugccauucaccauugacaaguaa

SEQ ID NO: 51532 - RNA, 1410 nt, Artificial Sequence
  derived and/or modified CDS sequence (wt) from neuraminidase__InfluenzaA__ADM31481
augaauccaaaccaaaagauaauaaccauugguucggucuguaugacaauuggaauggcuaacuuaauauuacaaauuggaaacauaaucucaauauggauuagccacucaauucaacuugggaaucaaaaucagauugaaacaugcaaucaaagcgucauuacuuaugaaaacaacacuuggguaaaucagacauauguuaacaucagcaacaccaacuuugcugcuggacagucagugguuuccgugaaauuagcgggcaauuccucucucugcccuguuaguggaugggcuauauacaguaaagacaacaguauaagaaucgguuccaagggggauguguuugucauaagggaaccauucauaucaugcucccccuuggaaugcagaaccuucuucuugacucaaggggccuugcuaaaugacaaacauuccaauggaaccauuaaagacaggagcccauaucgaacccuaaugagcuguccuauuggugaaguucccucuccauacaacucaagauuugagucagucgcuuggucagcaagugcuugucaugauggcaucaauuggcuaacaauuggaauuucuggcccagacaagggggcaguggcuguguuaaaguacaacggcauaauaacagacacuaucaagaguuggagaaacaauauauugagaacacaagagucugaaugugcauguguaaaugguucuugcuuuacuguaaugaccgauggaccaagugauggacaggccucauacaagaucuucagaauagaaaagggaaagauagucaaaucagucgaaaugaaugccccuaauuaucacuaugaggaaugcuccuguuauccugauucuagugaaaucacaugugugugcagggauaacuggcauggcucgaaucgaccguggguaucuuucaaccagaaucuggaauaucagauaggauacauaugcagugggauuuucggagacaauccacgcccuaaugauaagacaggcaguugugguccaguaucgucuaauggagcaaauggaguaaaaggauuuucauucaaauacggcaaugguguuuggauagggagaacuaaaagcauuaguucaagaaacgguuuugagaugauuugggauccgaacggauggacugggacagacaauaacuucucaauaaagcaagauaucguaggaauaaaugaguggucaggauauagcgggaguuuuguucagcauccagaacuaacagggcuggauuguauaagaccuugcuucuggguugaacuaaucagagggcgacccaaagagaacacaaucuggacuagcgggagcagcauauccuuuugugguguaaacagugacacuguggguuggucuuggccggacggugcugaguugccauuuaccauugacaaguaa

SEQ ID NO: 51533 - RNA, 1410 nt, Artificial Sequence
  derived and/or modified CDS sequence (wt) from neuraminidase__InfluenzaA__ADM31491
augaauccaaaccaaaagauaauaaccauugguucggucuguaugacaauuggaauggccaacuuaauauuacaaauuggaaacauaaucucaauauggauuagccacucaauucaacuugggaaucaaaaucagauugaaacaugcaaucaaagcgucauuacuuaugaaaacaacacuuggguaaaucagacauauguuaacaucagcaacaccaacuuugcugcuggacagucagugguuuccgugaaauuagcgggcaauucuucucucugcccuguuaguggaugggcuauauacaguaaagacaacaguguaagaaucgguuccaagggggauguguuugucauaagggaaccauucauaucaugcucccccuuggaaugcagaaccuucuucuugacucaaggggccuugcuaaaugacaaacauuccaauggaaccauuaaagacaggagcccauaucgaacccuaaugagcuguccuauuggugaaguucccucuccauacaacucaagauuugagucagucgcuuggucagcaagugcuugucaugauggcaucaauuggcuaacaauuggaauuucuggcccagacaauggggcaguggcuguguuaaaguacaacggcauaauaacagacacuaucaagaguuggagaaacaauauauugagaacacaagagucugaaugugcauguguaaaugguucuugcuuuacuguaaugaccgauggaccaagugauggacaggccucauacaagaucuucagaauagaaaagggaaagauagucaaaucagucgaaaugaaugccccuaauuaucacuaugaggaaugcuccuguuauccugauucuagugaaaucacaugugugugcagggauaacuggcauggcucgaaucgaccguggguuucuuucaaccagaaucuggaauaucagauaggauacauaugcagugggauuuucggagacaauccacgcccuaaugauaagacaggcaguugugguccaguaucgucuaauggagcaaauggaguaaaaggauuuucauucaaauacggcaaugguguuuggauagggagaacuaaaagcauuaguucaagaaacgguuuugagaugauuugggauccgaacggauggacugggacagacaauaacuucucaauaaagcaagauaucguaggaauaaaugaguggucaggauauagcgggaguuuuguucagcauccagaacuaacagggcuggauuguauaagaccuugcuucuggguugaacuaaucagagggcgacccaaagagaacacaaucuggacuagcgggagcagcauauccuuuugugguguaaacagugacacuguggguuggucuuggccagacggugcugaguugccauuuaccauugacaaguaa

SEQ ID NO: 51534 - RNA, 1410 nt, Artificial Sequence
  derived and/or modified CDS sequence (wt) from neuraminidase__InfluenzaA__ADM31501
augaauccaaaccaaaagauaauaaccauugguucggucuguaugacaauuggaauggcuaacuuaauauuacaaauuggaaacauaaucucaauauggauuagccacucaauucaacuugggaaucaaaaucagauugaaacaugcaaucaaagcgucauuacuuaugaaaacaacacuuggguaaaucagacauauguuaacaucagcaacaccaacuuugcugcuggacagucagugguuuccgugaaauuagcgggcaauuccucucucugcccuguuaguggaugggcuauauacaguaaagacaacaguauaagaaucgguuccaagggggauguguuugucauaagggaaccauucauaucaugcucccccuuggaaugcagaaccuucuucuugacucaaggggccuugcuaaaugacaaacauuccaauggaaccauuaaagacaggagcccauaucgaacccuaaugagcuguccuauuggugaaguucccucuccauacaacucaagauuugagucagucgcuuggucagcaagugcuugucaugauggcaucaauuggcuaacaauuggaauuucuggcccagacaauggggcaguggcuguguuaaaguacaacggcauaauaacagacacuaucaagaguuggagaaacaauauauugagaacacaagagucugaaugugcauguguaaaugguucuugcuuuacuguaaugaccgauggaccaagugauggacaggccucauacaagaucuucagaauagaaaagggaaagauagucaaaucagucgaaaugaaugccccuaauuaucacuaugaggaaugcuccuguuauccugauucuagugaaaucacaugugugugcagggauaacuggcauggcucgaaucgaccguggguaucuuucaaccagaaucuggaauaucagauaggauacauaugcagugggauuuucggagacaauccacgcccuaaugauaagacaggcaguugugguccaguaucgucuaauggagcaaauggaguaaaaggauuuucauucaaauacggcaaugguguuuggauagggagaacuaaaagcauuaguucaagaaacgguuuugagaugauuugggauccgaacggauggacugggacagacaauaacuucucaauaaagcaagauaucguaggaauaaaugaguggucaggauauagcgggaguuuuguucagcauccagaacuaacagggcuggauuguauaagaccuugcuucuggguugaacuaaucagagggcgacccaaagagaacacaaucuggacuagcgggagcaucauauccuuuugugguguaaacagugacacuguggguuggucuuggccggacggugcugaguugccauuuaccauugacaaguaa

SEQ ID NO: 51535 - RNA, 1410 nt, Artificial Sequence
  derived and/or modified CDS sequence (wt) from neuraminidase__InfluenzaA__ADM31511
augaauccaaaccaaaagauaauaaccauugguucggucuguaugacaauuggaauggcuaacuuaauauuacaaauuggaaacauaaucucaauauggauuagccacucaauucaacuugggaaucaaaaucagauugaaacaugcaaucaaagcgucauuacuuaugaaaacaacacuuggguaaaucagacauauguuaacaucagcaacaccaacuuugcugcuggacagucagugguuuccgugaaauuagcgggcaauuccucucucugcccuguuaguggaugggcuauauacaguaaagacaacaguauaagaaucgguuccaagggggauguguuugucauaagggaaccauucauaucaugcucccccuuggaaugcagaaccuucuucuugacucaaggggccuugcuaaaugacaaacauuccaauggaaccauuaaagacaggagcccauaucgaacccuaaugagcuguccuauuggugaaguucccucuccauacaacucaagauuugagucagucgcuuggucagcaagugcuugucaugauggcaucaauuggcuaacaauuggaauuucuggcccagacaauggggcaguggcuguguuaaaguacaacggcauaauaacagacacuaucaagaguuggagaaauaauauauugagaacacaagagucugaaugugcauguguaaaugguucuugcuuuacuguaaugaccgauggaccaagugauggacaggccucauacaagaucuucagaauagaaaagggaaagauagucaaaucagucgaaaugaaugccccuaauuaucacuaugaggaaugcuccuguuauccugauucuagugaaaucacaugugugugcagggauaacuggcauggcucgaaucgaccguggguaucuuucaaccagaaucuagaauaucagauaggauacauaugcagugggauuuucggagacaauccacgcccuaaugauaagacaggcaguugugguccaguaucgucuaauggagcaaauggaguaaaaggauuuucauucaaauacggcaaugguguuuggauagggagaacuaaaagcauuaguucaagaaacgguuuugagaugauuugggauccgaacggauggacugggacagacaauaacuucucaauaaagcaagauaucguaggaauaaaugaguggucaggauauagcgggaguuuuguucagcauccagaacuaacagggcuggauuguauaagaccuugcuucuggguugaacuaaucagagggcgacccaaagagaacacaaucuggacuagcgggagcagcauauccuuuugugguguaaacagugacacuguggguuggucuuggccggacggugcugaguugccauuuaccauugacaaguaa

SEQ ID NO: 51536 - RNA, 1410 nt, Artificial Sequence
  derived and/or modified CDS sequence (wt) from neuraminidase__InfluenzaA__ADM31521
augaauccaaaccaaaagauaauaaccauugguucggucuguaugacaauuggaauggcuaacuuaauauuacaaauuggaaacauaaucucaauauggauuagccacucaauucaacuugggaaucaaaaucagauugaaacaugcaaucaaagcgucauuacuuaugaaaacaacacuuggguaaaucagacauauguuaacaucagcaacaccaacuuugcugcuggacagucagugguuuccgugaaauuagcgggcaauuccucucucugcccuguuaguggaugggcuauauacaguaaagacaacaguauaagaaucgguuccaagggggauguguuugucauaagggaaccauucauaucaugcucccccuuggaaugcagaaccuucuucuugacucaaggggccuugcuaaaugacaaacauuccaauggaaccauuaaagacaggagcccauaucgaacccuaaugagcuguccuauuggugaaguucccucuccauacaacucaagauuugagucagucgcuuggucagcaagugcuugucaugauggcaucaauuggcuaacaauuggaauuucuggcccagacaauggggcaguggcuguguuaaaguacaacggcauaauaacagacacuaucaagaguuggagaaacaauauauugagaacacaagagucugaaugugcauguguaaaugguucuugcuuuacuguaaugaccgauggaccaagugauggacaggccucauacaagaucuucagaauagaaaagggaaagauagucaaaucagucgaagugaaugccccuaauuaucacuaugaggaaugcuccuguuauccugauucuagugaaaucacaugugugugcagggauaacuggcauggcucgaaucgaccgugggugucuuucaaccagaaucuggaauaucagauaggauacauaugcagugggauuuucggagacaauccacgcccuaaugauaagacaggcaguugugguccaguaucgucuaauggagcaaauggaguaaaaggauuuucauucaaauacggcaaugguguuuggauagggagaacuaaaagcauuaguucaagaaacgguuuugagaugauuugggauccgaacggauggacugggacagacaauaacuucucaauaaagcaagauaucguaggaauaaaugaguggucaggauauagcgggaguuuuguccagcauccagaacuaacagggcuggauuguauaagaccuugcuucuggguugaacuaaucagagggcgacccaaagagaacacaaucuggacuagcgggagcagcauauccuuuugugguguaaacagugacacuguggguuggucuuggccagacggugcugaguugccauuuaccauugacaaguaa

SEQ ID NO: 51537 - RNA, 1410 nt, Artificial Sequence; identical to SEQ ID NO: 50576
  derived and/or modified CDS sequence (wt) from neuraminidase__InfluenzaA__ADM31531

SEQ ID NO: 51538 - RNA, 1410 nt, Artificial Sequence
  derived and/or modified CDS sequence (wt) from neuraminidase__InfluenzaA__ADM31541
augaauccaaaccaaaagauaauaaccauugguucggucuguaugacaauuggaauggcuaacuuaauauuacaaauuggaaacauaaucucaauauggauuagccacucaauucaacuugggaaucaaaaucagauugaaacaugcaaucaaagcgucauuacuuaugaaaacaacaccuggguaaaucagacauauguuaacaucagcaacaccaacuuugcugcuggacagucagugguuuccgugaaauuagcgggcaauuccucucucugcccuguuaguggaugggcuauauacaguaaagacaacaguauaagaaucgguuccaagggggauguguuugucauaagggaaccauucauuucaugcucccccuuggaaugcagaaccuucuucuugacucaaggggccuugcuaaaugacaaacauuccaauggaaccauuaaagacaggagcccauaucgaacccuaaugagcuguccuauuggugaaguucccucuccauacaacucaagauuugagucagucgcuuggucagcaagugcuugucaugauggcaucaauuggcuaacaauuggaauuucuggcccagacaauggggcaguggcuguguuaaaguacaacggcauaauaacagacacuaucaagaguuggagaaacaauauauugagaacacaagagucugaaugugcauguguaaaugguucuugcuuuacuguaaugaccgauggaccaagugauggacaggccucauacaagaucuucagaauagaaaagggaaagauagucaaaucagucgaaaugaaugccccuaauuaucacuaugaggaaugcuccuguuauccugauucuagugaaaucacaugugugugcagggauaacuggcauggcucgaaucgaccgugggugucuuucaaccagaaucuggaauaucagauaggauacauaugcagugggauuuucggagacaauccacgcccuaaugauaagaaaggcaguugugguccaguaucgucuaauggagcaaauggaguaaaaggauuuucauucaaauacggcaaugguguuuggauagggagaacuaaaagcauuaguucaagaaacgguuuugagaugauuugggauccgaacggauggacuggaacagacaauaacuucucaauaaagcaagauaucguaggaauaaaugaguggucaggguauagcgggaguuuuguccagcauccagaacuaacagggcuggauuguauaagaccuugcuucuggguugaacuaaucagagggcgacccaaagagaacacaaucuggacuagcgggagcagcauauccuuuugugguguaaacagugacacuguggguuggucuuggccagacggugcugaguugccauuuaccauugacaaguaa

SEQ ID NO: 51539 - RNA, 1410 nt, Artificial Sequence
  derived and/or modified CDS sequence (wt) from neuraminidase__InfluenzaA__ADM31551
augaauccaaaccaaaagauaauaaccauugguucggucuguaugacaauuggaauggcuaacuuaauauuacaaauuggaaacauaaucucaauauggauuagccacucaauucaacuugggaaucaaaaucagauugaaacaugcaaucaaagcgucauuacuuaugaaaacaacacuuggguaaaucagacauaugucaacaucagcaacaccaacuuugcugcuggacagucagugguuuccgugaaauuagcgggcaauuccucucucugcccuguuaguggaugggcuauauacaguaaagacaacaguauaagaaucgguuccaagggggauguguuugucauaagggaaccauucauaucaugcucccccuuggaaugcagaaccuucuucuugacucaaggggccuugcuaaaugacaaacauuccaauggaaccauuaaagacaggagcccauaucgaacccuaaugagcuguccuauuggugaaguucccucuccauacaacucaagauuugagucagucgcuuggucagcaagugcuugucaugauggcaucaauuggcuaacaauuggaauuucuggcccagacaauggggcaguggcuguguuaaaguacaacggcauaauaacagacacuaucaagaguuggagaaacaauauauugagaacacaagagucugaaugugcauguguaaaugguucuugcuuuacuguaaugaccgauggaccaagugauggacaggccucauacaagaucuucagaauagaaaagggaaagauagucaaaucagucgaaaugaaugccccuaauuaucacuaugaggaaugcuccuguuauccugauucuagugaaaucacaugugugugcagggauaacuggcauggcucgaaucgaccgugggugucuuucaaccagaaucuggaauaucagauaggauacauaugcagugggauuuucggagacaauccacgcccuaaugauaagacaggcaguugugguccaguaucgucuaauggagcaaauggaguaaaaggauuuucauucaaauacggcaaugguguuuggauagggagaacuaaaagcauuaguucaagaaacgguuuugagaugauuugggauccgaacggauggacugggacagacaauaacuucucaauaaagcaagacaucguaggaauaaaugaguggucaggauauagcgggaguuuuguccagcauccagaacuaacagggcuggauuguauaagaccuugcuucuggguugaacuaaucagagggcgacccaaagagaacacaaucuggacuagcgggagcagcauauccuuuugugguguaaacagugacacuguggguuggucuuggccagacggugcugaguugccauuuaccauugacaaguaa

SEQ ID NO: 51540 - RNA, 1410 nt, Artificial Sequence; identical to SEQ ID NO: 48947
  derived and/or modified CDS sequence (wt) from neuraminidase__InfluenzaA__ADM31561

SEQ ID NO: 51541 - RNA, 1410 nt, Artificial Sequence
  derived and/or modified CDS sequence (wt) from neuraminidase__InfluenzaA__ADM31571
augaauccaaaccaaaagauaauaaccauugguucggucuguaugacaauuggaauggcuaacuuaauauuacaaauuggaaacauaaucucaauauggauuagccacucaauucaacuugggaaucaaaaucagauugaaacaugcaaucaaagcgucauuacuuaugaaaacaacacuuggguaaaucagacauauguuaacaucagcaacaccaacuuugcugcuggacagucagugguuuccgugaaauuagcgggcaauuccucucucugcccuguuaguggaugggcuauauacaguaaagacaacaguauaagaaucgguuccaagggggauguguuugucauaagggaaccauucauaucaugcucccccuuggaaugcagaaccuucuucuugacucaaggggccuugcuaaaugacaaacauuccaauggaaccauuaaagacaggagcccauaucgaacccuaaugagcuguccuauuggugaaguucccucuccauacaacucaagauuugagucagucgcuuggucagcaagugcuugucaugauggcaucaauuggcuaacaauuggaauuucuggcccagacaauggggcaguggcuguguuaaaguacaacggcauaauaacagacacuaucaagaguuggagaaacaauauauugagaacacaagagucugaaugugcauguguaaaugguucuuguuucacuguaaugaccgauggaccaagugauggacaggccucauacaagaucuucagaauagaaaagggaaagauagucaaaucagucgaaaugaaugccccuaauuaucacuaugaggaaugcuccuguuauccugauucuagugaaaucacaugugugugcagggauaacuggcauggcucgaaucgaccguggguaucuuucaaccagaaucuggaauaucagauaggauacauaugcagugggauuuucggagacaauccacgcccuaaugauaagacaggcaguugugguccaguaucgucuaauggagcaaauggaguaaaaggauuuucauucaaauacggcaaugguguuuggauagggagaacuaaaagcauuaguucaagaaacgguuuugagaugauuugggauccgaacggauggacugggacagacaauaacuucucaauaaagcaagauaucguaggaauaaaugaguggucaggauauagcgggaguuuuguucagcauccagaacuaacagggcuggauuguauaagaccuugcuucuggguugaacuaaucagagggcgacccaaagagaacacaaucuggacuagcgggagcagcauauccuuuugugguguaaacagugacacuguggguuggucuuggccggacggugcugaguugccauuuaccauugacaaguaa

SEQ ID NO: 51542 - RNA, 1410 nt, Artificial Sequence; identical to SEQ ID NO: 49927
  derived and/or modified CDS sequence (wt) from neuraminidase__InfluenzaA__ADM31581

SEQ ID NO: 51543 - RNA, 1410 nt, Artificial Sequence; identical to SEQ ID NO: 48947
  derived and/or modified CDS sequence (wt) from neuraminidase__InfluenzaA__ADM31601

SEQ ID NO: 51544 - RNA, 1410 nt, Artificial Sequence; identical to SEQ ID NO: 50038
  derived and/or modified CDS sequence (wt) from neuraminidase__InfluenzaA__ADM31611

SEQ ID NO: 51545 - RNA, 1410 nt, Artificial Sequence
  derived and/or modified CDS sequence (wt) from neuraminidase__InfluenzaA__ADM31621
augaauccaaaccaaaagauaauaaccauugguucggucuguaugacaauuggaauggcuaacuuaauauuacaaauuggaaacauaaucucaauauggauuagccacucaauucaacuugggaaucaaaaucagauugaaacaugcaaucaaagcgucauuacuuaugaaaacaacacuuggguaaaucagacauauguuaacaucagcaacaccaacuuugcugcuggacagucagugguuuccgugaaauuagcgggcaauuccucucucugcccuguuaguggaugggcuauauacaguaaagacaacaguauaagaaucgguuccaagggggauguguuugucauaagggaaccauucauaucaugcuccuccuuggaaugcagaaccuucuucuugacucaaggggccuugcuaaaugacaaacauuccaauggaaccauuaaagacaggagcccauaucgaacccuaaugagcuguccuauuggugaaguucccucuccauacaacucaagauuugagucagucgcuuggucagcaagugcuugucaugauggcaucaauuggcuaacaauuggaauuucuggcccagacaauggggcaguggcuguguuaaaguacaacggcauaauaacagacacuaucaagaguuggagaaacaauauauugagaacacaagagucugaaugugcauguguaaaugguucuugcuuuacuguaaugaccgauggaccaagugauggacaggccucauacaagaucuucagaauagaaaagggaaagauagucaaaucagucgaaaugaaugccccuaauuaucacuaugaggaaugcuccuguuauccugauucuagugaaaucacaugugugugcagggauaacuggcauggcucgaauagaccgugggugucuuucaaccagaaucuggaauaucagauaggauacauaugcagugggauuuucggagacaauccacgcccuaaugauaagacaggcaguugugguccaguaucgucuaauggagcaaauggaguaaaaggauuuucauucaaauacggcaaugguguuuggauagggagaacuaaaagcauuaguucaagaaacgguuuugagaugauuugggauccgaacggauggacugggacagacaauaacuucucaauaaagcaagauaucguaggaauaaaugaguggucaggauauagcgggaguuuuguucagcauccagaacuaacagggcuggauuguauaagaccuugcuucuggguugaacuaaucagagggcgacccaaagagaacacaaucuggacuagcgggagcagcauauccuuuugugguguaaacagugacacuguggguuggucuuggccagacggugcugaguugccauuuaccauugacaaguaa

SEQ ID NO: 51546 - RNA, 1410 nt, Artificial Sequence; identical to SEQ ID NO: 51437
  derived and/or modified CDS sequence (wt) from neuraminidase__InfluenzaA__ADM31631

SEQ ID NO: 51547 - RNA, 1410 nt, Artificial Sequence; identical to SEQ ID NO: 50720
  derived and/or modified CDS sequence (wt) from neuraminidase__InfluenzaA__ADM31641

SEQ ID NO: 51548 - RNA, 1410 nt, Artificial Sequence
  derived and/or modified CDS sequence (wt) from neuraminidase__InfluenzaA__ADM31651
augaauccaaaccaaaagauaauaaccauugguucggucuguaugacaauuggaauggcuaacuuaauauuacaaauuggaaacauaaucucaauauggauuagccacucaauucaacuugggaaucaaaaucagauugaaacaugcaaucaaagcgucauuacuuaugaaaacaacacuuggguaaaucagacauauguuaacaucagcaacaccaacuuugcugcuggacagucagugguucccgugaaauuagcgggcaauuccucucucugcccuguuaguggaugggcuauauacaguaaagacaacaguauaagaaucgguuccaagggggauguguuugucauaagggaaccauucauaucaugcucccccuuggaaugcagaaccuucuucuugacucagggggccuugcuaaaugacaaacauuccaauggaaccauuaaagacaggagcccauaucgaacccuaaugagcuguccuauuggugaaguucccucuccauacaacucaagauuugagucagucgcuuggucagcaagugcuugucaugauggcaucaauuggcuaacaauuggaauuucuggcccagacaauggggcaguggcuguguuaaaguacaacggcauaauaacagacacuaucaagaguuggagaaacaauauauugagaacacaagagucugaaugugcauguguaaaugguucuugcuuuacuguaaugaccgauggaccaagugauggacaggccucauacaagaucuucagaauagaaaagggaaagauagucaaaucagucgaaaugaaugccccuaauuaucacuaugaggaaugcuccuguuauccugauucuagugaaaucacaugugugugcagggauaacuggcauggcucgaaucgaccguggguaucuuucaaccagaaucuggaauaucagauaggauacauaugcagugggauuuucggagacaauccacgcccuaaugauaagacaggcaguugugguccaguaucgucuaauggagcaaauggaguaaaaggauuuucauucaaauacggcaaugguguuuggauagggagaacuaaaagcauuaguucaagaaacgguuuugagaugauuugggauccgaacggauggacugggacagacaauaacuucucaauaaagcaagauaucguaggaauaaaugaguggucaggauauagcgggaguuuuguucagcauccagaacuaacagggcuggauuguauaagaccuugcuucuggguugaacuaaucagagggcgacccaaagagaacacaaucuggacuagcgggagcagcauauccuuuugugguguaaacagugacacuguggguuggucuuggccggacggugcugaguugccauuuaccauugacaaguaa

SEQ ID NO: 51549 - RNA, 1410 nt, Artificial Sequence
  derived and/or modified CDS sequence (wt) from neuraminidase__InfluenzaA__ADM31661
augaauccaaaccaaaagauaauaaccauugguucggucuguaugacaauuggaauggcuaacuuaauauuacaaauugggaacauaaucucaauauggauuagccacucaauucaacuugggaaucaaaaucagauugaaacaugcaaucaaagcgucauuacuuaugaaaacaacacuuggguaaaucagacauauguuaacaucagcaacaccaacuuugcugcuggacagucagugguuuccgugaaauuagcgggcaauuccucucucugcccuguuaguggaugggcuauauacaguaaagacaacaguauaagaaucgguuccaagggggauguguuugucauaagggaaccauucauaucaugcucccccuuggaaugcagaaccuucuucuugacucaaggggccuugcuaaaugacaaacauuccaauggaaccauuaaagacaggagcccauaucgaacccuaaugagcuguccuauuggugaaguucccucuccauacaacucaagauuugagucagucgcuuggucagcaagugcuugucaugauggcaucaauuggcuaacaauuggaauuucuggcccagacaauggggcaguggcuguguuaaaguacaacggcauaauaacagacacuaucaagaguuggagaaacaauauauugagaacacaagagucugaaugugcauguguaaaugguucuugcuuuacuguaaugaccgauggaccaagugauggacaggccucauacaagaucuucagaauagaaaagggaaagauagucaaaucagucgaaaugaaugccccuaauuaucacuaugaggaaugcuccuguuauccugauucuagugaaaucacaugugugugcagggauaacuggcauggcucgaaucgaccguggguaucuuucaaccagaaucuggaauaucagauaggauacauaugcagugggauuuucggagacaauccacgcccuaaugauaagacaggcaguugugguccaguaucgucuaauggagcaaauggaguaaaaggauuuucauucaaauacggcaaugguguuuggauagggagaacuaaaagcauuaguucaagaaacgguuuugagaugauuugggauccgaacggauggacugggacagacaauaaauucucaauaaagcaagauaucguaggaauaaaugaguggucaggauauagcgggaguuuuguucagcauccagaacuaacagggcuggauuguauaagaccuugcuucuggguugaacuaaucagagggcgacccaaagagaacacaaucuggacuagcgggagcagcauauccuuuugugguguaaacagugacacuguggguuggucuuggccagacggugcugaguugccauuuaccauugacaaguaa

SEQ ID NO: 51550 - RNA, 1410 nt, Artificial Sequence
  derived and/or modified CDS sequence (wt) from neuraminidase__InfluenzaA__ADM31671
augaauccaaaccaaaagauaauaaccauugguucggucuguaugacaauuggaauggcuaacuuaauauuacaaauuggaaacauaaucucaauauggauuagccacucaacucaacuugggaaucaaaaucagauugaaacaugcaaucaaagcgucauuacuuaugaaaacaacacuuggguaaaucagacauauguuaacaucagcaacaccaacuuugcugcuggacagucagugguuuccgcgaaauuagcgggcaauuccucucucugcccuguuaguggaugggcuauauacaguaaagacaacaguauaagaaucgguuccaagggggauguguuugucauaagggaaccauucauaucaugcucccccuuggaaugcagaaccuucuucuugacucaaggggccuugcuaaaugacaaacauuccaauggaaccauuaaagacaggagcccauaucgaacccuaaugagcuguccuauuggugaaguucccucuccauacaacucaagauuugagucagucgcuuggucagcaagugcuugucaugauggcaucaauuggcuaacaauuggaauuucuggcccagacaauggggcaguggcuguguuaaaguacaacggcauaauaacagacacuaucaagaguuggagaaacaauauauugagaacacaagagucugaaugugcauguguaaaugguucuugcuuuacuguaaugaccgauggaccaagugauggacaggccucauacaagaucuucagaauagaaaagggaaagauagucaaaucagucgaaaugaaugccccuaauuaucacuaugaggaaugcuccuguuauccugauucuagugaaaucacaugugugugcagggauaacuggcauggcucgaaucgaccguggguaucuuucaaccagaaucuggaauaucagauaggauacauaugcagugggauuuucggagacaauccacgcccuaaugauaagacaggcaguugugguccaguaucgucuaauggagcaaauggaguaaaaggauuuucauucaaauacggcaaugguguuuggauagggagaacuaaaagcauuaguucaagaaacgguuuugagaugauuugggauccgaacggauggacugggacagacaauaauuucucaauaaagcaagauaucguaggaauaaaugaguggucaggauauagcgggaguuuuguucagcauccagaacuaacagggcuggauuguauaagaccuugcuucuggguugaacuaaucagagggcgacccaaagagaacacaaucuggacuagcgggagcagcauauccuuuugugguguaaacagugacacuguggguuggucuuggccggacggugcugaguugccauuuaccauugacaaguaa

SEQ ID NO: 51551 - RNA, 1410 nt, Artificial Sequence; identical to SEQ ID NO: 51437
  derived and/or modified CDS sequence (wt) from neuraminidase__InfluenzaA__ADM31681

SEQ ID NO: 51552 - RNA, 1410 nt, Artificial Sequence
  derived and/or modified CDS sequence (wt) from neuraminidase__InfluenzaA__ADM31691
augaauccaaaccaaaagauacuaaccauugguucggucuguaugacaauuggaauggcuaacuuaauauuacaaauuggaaacauaaucucaauauggauuagccacucaauucaacuugggaaucaaaaucagacugaaacaugcaaucaaagcgucauuacuuaugaaaacaacacuuggguaaaucagacauauguuaacaucagcaacaccaacuuugcugcuggacagucagugguuuccgugaaauuagcgggcaauuccucucucugcccuguuaguggaugggcuauauacaguaaagacaacaguauaagaaucgguuccaagggggauguguuugucauaagggaaccauucauaucaugcucccccuuggaaugcagaaccuucuucuugacucaaggggccuugcuaaaugacaaacauuccaauggaaccauuaaagacaggagcccauaucgaacccuaaugagcuguccuauuggugaaguucccucuccauacaacucaagauuugagucagucgcuuggucagcaagugcuugucaugauggcaucaauuggcuaacaauuggaauuucuggcccagacaauggggcaguggcuguguuaaaguacaacggcauaauaacagacacuaucaagaguuggagaaacaauauauugagaacacaagagucugaaugugcauguguaaaugguucuugcuuuacuguaaugaccgauggaccaagugauggacaggccucauacaagaucuucagaauagaaaagggaaagauagucaaaucagucgaaaugaaugccccuaauuaucacuaugaggaaugcuccuguuauccugauucuagugaaaucacaugugugugcagggauaacuggcauggcucgaaucgaccgugggugucuuucaaccagaaucuggaauaucagauaggauacauaugcagugggauuuucggagacaauccacgcccuaaugauaagacaggcaguugugguccaguaucgucuaauggagcaaauggaguaaaaggauuuucauucaaauacggcaaugguguuuggauagggagaacuaaaagcauuaguucaagaaacgguuuugagaugauuugggauccgaacggauggacugggacagacaauaacuucucaauaaagcaagauaucguaggaauaaaugaguggucaggauauagcgggaguuuuguucagcauccagaacuaacagggcuggauuguauaagaccuugcuucuggguugaacuaaucagagggcgacccaaagagaacacaaucuggacuagcgggagcagcauauccuuuugugguguaaacagugacacuguggguuggucuuggccagacggugcugaguugccauuuaccauugacaaguaa

SEQ ID NO: 51553 - RNA, 1410 nt, Artificial Sequence; identical to SEQ ID NO: 48947
  derived and/or modified CDS sequence (wt) from neuraminidase__InfluenzaA__ADM31701

SEQ ID NO: 51554 - RNA, 1410 nt, Artificial Sequence
  derived and/or modified CDS sequence (wt) from neuraminidase__InfluenzaA__ADM31711
augaauccaaaccaaaagauaauaaccauugguucggucuguaugacaauuggaauggcuaacuuaauauuacaaauuggaaacauaaucucaauauggauuagccacucaauucaacuugggaaucaaaaucagauugaaacaugcaaucaaagcgucauuacuuaugaaaacaacacuuggguaaaucagacauauguuaacaucagcaacaccaacuuugcugcuggacagucagugguuuccgugaaauuagcgggcaauuccucucucugcccuguuaguggaugggcuauauacaguaaagacaacaguauaagaaucgguuccaagggggauguguuugucauaagggaaccauucauaucaugcucccccuuggaaugcagaaccuucuucuugacucaaggggccuugcuaaaugacaaacauuccaauggaaccauuaaagacaggagcccauaucggacccuaaugagcuguccuauuggugaaguucccucuccauacaacucaagauuugagucagucgcuuggucagcaagugcuugucaugauggcaucaauuggcuaacaauuggaauuucuggcccagacaauggggcaguggcuguguuaaaauacaacggcauaauaacagacacuaucaagaguuggagaaacaauauauugagaacacaagagucugaaugugcauguguaaaugguucuugcuuuacuguaaugaccgauggaccaagugauggacaggccucauacaagaucuucagaauagaaaagggaaagauagucaaaucagucgaaaugaaugccccuaauuaucacuaugaggaaugcuccuguuauccugauucuagugaaaucacaugugugugcagggauaacuggcauggcucgaaucgaccgugggugucuuucaaccagaaucuggaauaucagauaggauacauaugcagugggauuuucggagacaauccacgcccuaaugauaagacaggcaguugugguccaguaucgucuaauggagcaaauggaguaaaaggauuuucauucaaauacggcaaugguguuuggauagggagaacuaaaagcauuaguucaagaaacgguuuugagaugauuugggauccgaacggauggacugggacagacaauaacuucucaauaaagcaagauaucguaggaauaaaugaguggucaggauauagcgggaguuuuguucagcauccagaacuaacagggcuggauuguauaagaccuugcuucuggguugaacuaaucagagggcgacccaaagagaacacaaucuggacuagcgggagcagcauauccuuuugugguguaaacagugacacuguggguuggucuuggccagacggugcugaguugccauuuaccauugacaaguaa

SEQ ID NO: 51555 - RNA, 1410 nt, Artificial Sequence
  derived and/or modified CDS sequence (wt) from neuraminidase__InfluenzaA__ADM31721
augaauccaaaccaaaagauaauaaccauugguucggucuguaugacaauuggaauggcuaacuuaauauuacaaauuggaaacauaaucucaauauggauuagccacucaauucaacuugggaaucaaaaucagauugaaacaugcaaucaaagcgucauuacuuaugaaaacaacacuuggguaaaucagacauauguuaacaucaguaacaccaacuuugcugcuggacagucagugguuuccgugaaauuagcgggcaauuccucucucugcccuguuaguggaugggcuauauacaguaaagacaacaguauaagaaucgguuccaagggggauguguuugucauaagggaaccauucauaucaugcucccccuuggaaugcagaaccuucuucuugacucaaggggccuugcuaaaugacaaacauuccaauggaaccauuaaagacaggagcccauaucgaacccuaaugagcuguccuauuggugaaguucccucuccauacaacucaagauuugagucagucgcuuggucagcaagugcuugucaugauggcaucaauuggcuaacaauuggaauuucuggcccagacaauggggcaguggcuguguuaaaguacaacggcauaauaacagauacuaucaagaguuggagaaacaauauauugagaacacaagagucugaaugugcauguguaaaugguucuugcuuuacuguaaugaccgauggaccaagugauggacaggccucauacaagaucuucagaauagaaaagggaaagauagucaaaucagucgaaaugaaugccccuaauuaucacuaugaggaaugcuccuguuacccugauucuagugaaaucacaugugugugcagggauaacuggcauggcucgaaucgaccgugggugucuuucaaccagaaucuggaauaucagauaggauacauaugcagugggauuuucggagacaauccacgcccuaaugauaagaaaggcaguugugguccaguaucgucuaauggagcaaauggaguaaaaggauuuucauucaaauacggcaaugguguuuggauagggagaacuaaaagcauuaguucaagaaacgguuuugagaugauuugggauccgaacggauggacugggacagacaauaacuucucaauaaagcaagauaucguaggaauaaaugaauggucaggauauagcgggaguuuuguucagcauccagaacuaacagggcuggauuguauaagaccuugcuucuggguugaacuaaucagagggcgacccaaagagaacacaaucuggacuagcgggagcagcauauccuuuugugguguaaacagugacacuguggguuggucuuggccagacggugcugaguugccauuuaccauugacaaguaa

SEQ ID NO: 51556 - RNA, 1410 nt, Artificial Sequence
  derived and/or modified CDS sequence (wt) from neuraminidase__InfluenzaA__ADM31731
augaauccaaaccaaaagauaauaaucauugguucggucuguaugacaauuggaauggcuaacuuaauauuacaaauuggaaacauaaucucaauauggauuagccacucaauucaacuugggaaucaaaaucagauugaaacaugcaaucaaagcgucauuacuuaugaaaacaacacuuggguaaaucagacauauguuaacaucagcaacaccaacuuugcugcuggacagucagugguuuccgugaaauuagcgggcaauuccucucucugcccuguuaguggaugggcuauauacaguaaagacaacaguauaagaaucgguuccaagggggauguguuugucauaagggaaccauucauaucaugcucccccuuggaaugcagaaccuucuucuugacucaaggggccuugcuaaaugacaaacauuccaauggaaccauuaaagacaggagcccauaucgaacccuaaugagcuguccuauuggugaaguucccucuccauacaacucaagauuugagucagucgcuuggucagcaagugcuugucaugauggcaucaauuggcuaacaauuggaauuucuggcccagacaauggggcaguggcuguguuaaaguacaacggcauaauaacagacacuaucaagaguuggagaaacaauauauugagaacacaagaaucugaaugugcauguguaaaugguucuugcuuuacuguaaugaccgauggaccaagugauggacaggccucauacaagaucuucagaauagaaaagggaaggauagucaaaucagucgaaaugaaugccccuaauuaucacuaugaggaaugcuccuguuauccugauucuagugaaaucacaugcgugugcagggauaacuggcauggcucgaaucgaccgugggugucuuucaaccagaaucuggaauaucagauaggauacauaugcagugggauuuucggagacaauccacgcccuaaugacaagacaggcaguugugguccaguaucgucuaauggagcaaauggaguaaaaggauuuucauucaaauacggcaaugguguuuggauagggagaacuaaaagcauuaguucaagaaacgguuuugagaugauuugggauccgaacggauggacugggacagacaauaacuucucaauaaagcaagauaucguaggaauaaaugaguggucaggauauagcgggaguuuuguucagcauccagaacuaacagggcuggauuguauaagacccugcuucuggguugaacuaaucagagggcgacccaaagagaacacaaucuggacuagcgggagcagcauauccuuuugugguguaaacagugacacuguggguuggucuuggccagacggugcugaguugccauuuaccauugacaaguaa

SEQ ID NO: 51557 - RNA, 1410 nt, Artificial Sequence; identical to SEQ ID NO: 51125
  derived and/or modified CDS sequence (wt) from neuraminidase__InfluenzaA__ADM31741

SEQ ID NO: 51558 - RNA, 1410 nt, Artificial Sequence
  derived and/or modified CDS sequence (wt) from neuraminidase__InfluenzaA__ADM31751
augaauccaaaccaaaagauaauaaccauugguucggucuguaugacaauuggaauggcuaacuuaauauuacaaauuggaaacauaaucucaauauggauuagccacucaauucaacuugggaaucaaaaucagauugaaacaugcaaucaaagcgucaucacuuaugaaaacaacacuuggguaaaucagacauauguuaacaucagcaacaccaacuuugcugcuggacagucagugguuuccgugaaauuagcgggcaauuccucucucugcccuguuaguggaugggcuauauacaguaaagacaacaguauaagaaucgguuccaagggggauguguuugucauaagggaaccauucauaucaugcucccccuuggaaugcagaaccuucuucuugacucaaggggccuugcuaaaugacaaacauuccaauggaaccauuaaagacaggagcccauaucgaacccuaaugagcuguccuauuggugaaguucccucuccauacaacucaagauuugagucagucgcuuggucagcaagugcuugucaugauggcaucaauuggcuaacaauuggaauuucuggcccagacaauggggcaguggcuguguuaaaguacaacggcauaauaacagacacuaucaagaguuggagaaacaauauauugagaacacaagagucugaaugugcauguguaaaugguucuugcuuuacuguaaugaccgauggaccaagugauggacaggccucauacaagaucuucagaauagaaaagggaaagauagucaaaucagucgaaaugaaugccccuaauuaucacuaugaggaaugcuccuguuauccugauucuagugaaaucacaugugugugcagggauaacuggcauggcucgaaucgaccgugggugucuuucaaccagaaucuggaauaucagauaggauacauaugcagugggauuuucggagacaauccacgcccuaaugauaagacaggcaguugugguccaguaucgucuaauggagcaaauggaguaaaaggauuuucauucaaauacggcaaugguguuuggauagggagaacuaaaagcauuaguucaagaaacgguuuugagaugauuugggauccgaacggauggacugggacagacaauaacuucucaauaaagcaagauaucguaggaauaaaugaguggucaggauauagcgggaguuuuguccagcauccagaacuaacagggcuggauuguauaagaccuugcuucuggguugaacuaaucagagggcgacccaaagagaacacaaucuggacuagcgggagcagcauauccuuuugugguguaaacagugacacuguggguuggucuuggccagacggugcugaguugccauuuaccauugacaaguaa

SEQ ID NO: 51559 - RNA, 1410 nt, Artificial Sequence
  derived and/or modified CDS sequence (wt) from neuraminidase__InfluenzaA__ADM31761
augaauccaaaccaaaagauaauaaccauugguucggucuguaugacaauuggaauggcuaacuuaauauuacaaauuggaaacauaaucucaauauggauuagccacucaauucaacuugggaaucaaaaucagauugaaacaugcaaucaaagcgucauuacuuaugaaaacaacacuuggguaaaucagacauauguuaacaucagcaacaccaacuuugcugcuggacagucagugguuuccgugaaauuagcgggcaauuccucucucugcccuguuaguggaugggcuauauacaguaaagacaacaguauaagaaucgguuccaagggggauguguuugucauaagggaaccauucauaucaugcucccccuuggaaugcagaaccuucuucuugacucaaggggccuugcuaaaugacaaacauuccaauggaaccauuaaagacaggagcccauaucgaacccuaaugagcuguccuauuggugaaguucccucuccauacaacucaagauuugagucagucgcuuggucagcaagugcuugucaugauggcaucaauuggcuaacaauuggaauuucuggcccagacaauggggcaguggcuguguuaaaguacaacggcauaauaacagacacuaucaagaguuggagaaacaauauauugagaacacaagagucugaaugugcauguguaaaugguucuugcuuuacuguaaugaccgauggaccaagugauggacaggccucauacaagaucuucagaauagaaaagggaaagauagucaaaucagucgaaaugaaugccccuaauuaucacuaugaggaaugcuccuguuauccugauucuagugaaaucacaugugugugcagggauaacuggcauggcucgaaucgaccguggguaucuuucaaccauaaucuggaauaucagauaggauacauaugcagugggauuuucggagacaauccacgcccuaaugauaagacaggcaguugugguccaguaucgucuaauggagcaaauggaguaaaaggauuuucauucaaauacggcaaugguguuuggauagggagaacuaaaagcauuaguucaagaaacgguuuugagaugauuugggauccgaacggauggacugggacagacaauaaauucucaauaaagcaagauaucguaggaauaagugaguggucaggauauagcgggaguuuuguucagcauccagaacuaacagggcuggauuguauaagaccuugcuucuggguugaacuaaucagagggcgacccaaagagaacacaaucuggacuagcgggagcagcauauccuuuugugguguaaacagugacacuguggguuggucuuggccagacggugcugaguugccauuuaccauugacaaguaa

SEQ ID NO: 51560 - RNA, 1410 nt, Artificial Sequence
  derived and/or modified CDS sequence (wt) from neuraminidase__InfluenzaA__ADM31771
augaauccaaaccaaaagauacuaaccauugguucggucuguaugacaauuggaauggcuaacuuaauauuacaaauuggaaacauaaucucaauauggauuagccacucaauucaacuugggaaucaaaaucagacugaaacaugcaaucaaagcgucauuauuuaugaaaacaacacuuggguaaaucagacauauguuaacaucagcaacaccaacuuugcugcuggacagucagugguuuccgugaaauuagcgggcaauuccucucucugcccuguuaguggaugggcuauauacaguaaagacaacaguauaagaaucgguuccaagggggauguguuugucauaagggaaccauucauaucaugcucccccuuggaaugcagaaccuucuucuugacucaaggggccuugcuaaaugacaaacauuccaauggaaccauuaaagacaggagcccauaucgaacccuaaugagcuguccuauuggugaaguucccucuccauacaacucaagauuugagucagucgcuuggucagcaagugcuugucaugauggcaucaauuggcuaacaauuggaauuucuggcccagacaauggggcaguggcuguguuaaaguacaacggcauaauaacagacacuaucaagaguuggagaaacaauauauugagaacacaagagucugaaugugcauguguaaaugguucuugcuuuacuguaaugaccgauggaccaagugauggacaggccucauacaagaucuucagaauagaaaagggaaagauagucaaaucagucgaaaugaaugccccuaauuaucacuaugaggaaugcuccuguuauccugauucuagugaaaucacaugugugugcagggauaacuggcauggcucgaaucgaccgugggugucuuucaaccagaaucuggaauaucagauaggauacauaugcagugggauuuucggagacaauccacgcccuaaugauaagacaggcaguugugguccaguaucgucuaauggagcaaauggaguaaaaggauuuucauucaaauacggcaaugguguuuggauagggagaacuaaaagcauuaguucaagaaacgguuuugagaugauuugggauccgaacggauggacugggacagacaauaacuucucaauaaagcaagauaucguaggaauaaaugaguggucaggauauagcgggaguuuuguucagcauccagaacuaacagggcuggauuguauaagaccuugcuucuggguugaacuaaucagagggcgacccaaagagaacacaaucuggacuagcgggagcagcauauccuuuugugguguaaacagugacacuguggguuggucuuggccagacggugcugaguugccauuuaccauugacaaguaa

SEQ ID NO: 51561 - RNA, 1410 nt, Artificial Sequence
  derived and/or modified CDS sequence (wt) from neuraminidase__InfluenzaA__ADM31801
augaauccaaaccaaaagauaauaaccauugguucggucuguaugacaauuggaauggcuaacuuaauauuacaaauuggaaacauaaucucaauauggauuagccacucaauucaacuugggaaucaaaaucagauugaaacaugcaaucaaagcgucauuacuuaugaaaacaacacuuggguaaaucagacauauguuaacaucaacaacaccaacuuugcugcuggacagucagugguuuccgugaaauuagcgggcaauuccucucucugcccuguuaguggaugggcuauauacaguaaagacaacaguauaagaaucggcuccaagggggauguguuugucauaagggaaccauucauaucaugcucccccuuggaaugcagaaccuucuucuugacucaaggggccuugcuaaaugacaaacauuccaauggaaccauuaaagacaggagcccauaucgaacccuaaugagcuguccuauuggugaaguucccucuccauacaacucaagauuugagucagucgcuuggucagcaagugcuugucaugauggcaucaauuggcuaacaauuggaauuucuggcccagacaauggggcaguggcuguguuaaaguacaacggcauaauaacagacacuaucaagaguuggagaaacaauauauugagaacacaagagucugaaugugcauguguaaaugguucuugcuuuacuguaaugaccgauggaccaagugauggacaggccucauacaagaucuucagaauagaaaagggaaagauagucaaaucagucgaaaugaaugccccuaauuaucacuaugaggaaugcuccuguuauccugauucuagugaaaucacaugugugugcagggauaacuggcauggcucgaaucgaccguggguaucuuucaaccagaaucuggaauaucagauaggauacauaugcagugggauuuucggagacaauccacgcccuaaugauaagacaggcaguugugguccaguaucgucuaauggagcaaauggaguaaaaggauuuucauucaaauacggcaaugguguuuggauagggagaacuaaaagcauuaguucaagaaacgguuuugagaugauuugggauccgaacggauggacugggacagacaauaaauucucaauaaagcaagauaucguaggaauaaaugaguggucaggauauagcgggaguuuuguucagcauccagaacuaacagggcuggauuguauaagaccuugcuucuggguugaacuaaucagagggcgacccaaagagaacacaaucuggacuagcgggagcagcauauccuuuugugguguaaacagugacacuguggguuggucuuggccagacggugcugaguugccauuuaccauugacaaguaa

SEQ ID NO: 51562 - RNA, 1410 nt, Artificial Sequence
  derived and/or modified CDS sequence (wt) from neuraminidase__InfluenzaA__ADM31811
augaauccaaaccaaaagauaauaaccauugguucggucuguaugacaauuggaauggcuaacuuaauauuacaaauuggaaacauaaucucaauauggauuagccacucaauucaacuugggaaucaaaaucagauugaaacaugcaaucaaagcgucauuacuuaugaaaacaacacuuggguaaaucagacauauguuaacaucagcaacaccaacuuugcugcuggacagucagugguuuccgugaaauuugcgggcaauuccucucucugcccuguuaguggaugggcuauauacaguaaagacaacaguauaagaaucgguuccaagggggauguguuugucauaagggaaccauucauaucaugcucccccuuggaaugcagaaccuucuucuugacucaaggggccuugcuaaaugacaaacauuccaauggaaccauuaaagacaggagcccauaucgaacccuaaugagcuguccuauuggugaaguuccuucuccauacaacucaagauuugagucagucgcuuggucagcaagugcuugucaugauggcaucaauuggcuaacaauuggaauuucuggcccagacaauggggcaguggcuguguuaaaguacaacggcauaauaacagacacuaucaagaguuggagaaacaauauauugagaacacaagagucugaaugugcauguguaaaugguucuugcuuuacuguaaugaccgauggaccaagugauggacaggccucauacaagaucuucagaauagaaaagggaaagauagucaaaucagucgaaaugaaugccccuaauuaucacuaugaggaaugcuccuguuauccugauucuagugaaaucacaugugugugcagagauaacuggcauggcucgaaucgaccgugggugucuuucaaccagaaucuggaauaucagauaggauacauaugcagugggauuuucggagacaauccacgcccuaaugacaagacaggcaguugugguccaguaucgucuaauggagcaaauggaguaaaaggauuuucauucaaauacggcaaugguguuuggauagggagaacuaaaagcauuaguucaagaaacgguuuugagaugauuugggauccgaacggauggacugggacagacaauaaguucucaauaaagcaggauaucguaggaauaaaugaguggucaggauauagcgggaguuuuguucagcauccagaacuaacagggcuggauuguauaagaccuugcuucuggguugaacuaaucagagggcgacccaaagagaacacaaucuggacuagcgggagcagcauauccuuuugugguguaaacagugacacuguggguuggucuuggccagacggugcugaguugccauuuaccauugacaaguaa

SEQ ID NO: 51563 - RNA, 1410 nt, Artificial Sequence; identical to SEQ ID NO: 51118
  derived and/or modified CDS sequence (wt) from neuraminidase__InfluenzaA__ADM31821

SEQ ID NO: 51564 - RNA, 1410 nt, Artificial Sequence; identical to SEQ ID NO: 51365
  derived and/or modified CDS sequence (wt) from neuraminidase__InfluenzaA__ADM31831

SEQ ID NO: 51565 - RNA, 1410 nt, Artificial Sequence; identical to SEQ ID NO: 51365
  derived and/or modified CDS sequence (wt) from neuraminidase__InfluenzaA__ADM31841

SEQ ID NO: 51566 - RNA, 1410 nt, Artificial Sequence
  derived and/or modified CDS sequence (wt) from neuraminidase__InfluenzaA__ADM31851
augaauccaaaccaaaagauacuaaccauugguucggucuguaugacaauuggaauggcuaacuuaauauuacaaauuggaaacauaaucucaauauggauuagccacucaauucaacuugggaaucaaaaucagacugaaacaugcaaucaaagcgucauuacuuaugaaaacaacacuuggguaaaucagacauauguuaacaucagcaacaccaacuuugcugcuggacagucagugguuuccgugaaauuagcgggcaauuccucucucugcccuguuaguggaugggcuauauacaguaaagacaacaguauaagaaucgguuccaagggggauguguuugucauaagggaaccauucauaucaugcucccccuuggaaugcagaaccuucuucuugacucaaggggccuugcuaaaugacaaacauuccaauggaaccauuaaagacaggagcccauaucgaacccuaaugagcuguccuauuggugaaguucccucuccauacaacucaagauuugagucagucgcuuggucagcaagugcuugucaugauggcaucaauuggcuaacaauuggaauuucuggcccagacaauggggcaguggcuguguuaaaguacaacggcauaauaacagacacuaucaagaguuggagaaacaauauauugagaacacaagagucugaaugugcauguguaaaugguucuugcuuuacuguaaugaccgauggaccaagugauggacaggccucauacaagaucuucagaauagaaaggggaaagauagucaaaucagucgaaaugaaugccccuaauuaucacuaugaggaaugcuccuguuauccugauucuagugaaaucacaugugugugcagggauaacuggcauggcucgaaucgaccgugggugucuuucaaccagaaucuggaauaucagauaggauacauaugcagugggauuuucggagacaauccacgcccuaaugauaagacaggcaguugugguccaguaucgucuaauggagcaaauggaguaaaaggauuuucauucaaauacggcaaugguguuuggauagggagaacuaaaagcauuaguucaagaaacgguuuugagaugauuugggauccgaacggauggacugggacagacaauaacuucucaauaaagcaagauaucguaggaauaaaugaguggucaggauauagcgggaguuuuguucagcauccagaacuaacagggcuggauuguauaagaccuugcuucuggguugaacuaaucagagggcgacccaaagagaacacaaucuggacuagcgggagcagcauauccuuuugugguguaaacagugacacuguggguuggucuuggccagacggugcugaguugccauuuaccauugacaaguaa

SEQ ID NO: 51567 - RNA, 1410 nt, Artificial Sequence; identical to SEQ ID NO: 50738
  derived and/or modified CDS sequence (wt) from neuraminidase__InfluenzaA__ADM31861

SEQ ID NO: 51568 - RNA, 1410 nt, Artificial Sequence; identical to SEQ ID NO: 48750
  derived and/or modified CDS sequence (wt) from neuraminidase__InfluenzaA__ADM31871

SEQ ID NO: 51569 - RNA, 1410 nt, Artificial Sequence
  derived and/or modified CDS sequence (wt) from neuraminidase__InfluenzaA__ADM31881
augaauccaaaccaaaagauaauaaccauugguucggucuguaugacaauuggaauggcuaacuuaauauuacaaauuggaaacacaaucucaauauggauuagccacucaauucaacuugggaaucaaaaucagauugaaacaugcaaucaaagcgucauuacuuaugaaaacaacacuuggguaaaucagacauauguuaacaucagcaacaccaacuuugcugcuggacagucagugguuuccgugaaauuagcgggcaauuccucucucugcccuguuaguggaugggcuauauacaguaaagacaacaguauaagaaucgguuccaagggggauguguuugucauaagggaaccauucauaucaugcucccccuuggaaugcagaaccuucuucuugacucaaggggccuugcuaaaugacaaacauuccaauggaaccauuaaagacaggagcccauaucgaacccuaaugagcuguccuauuggugaaguucccucuccauacaacucaagauuugagucagucgcuuggucagcaagugcuugucaugauggcaucaauuggcuaacaauuggaauuucuggcccagacaauggggcaguggcuguguuaaaguacaacggcauaauaacagacacuaucaagaguuggagaaacaauauauugagaacacaagagucugaaugugcauguguaaaugguucuugcuucacuguaaugaccgauggaccaagugauggacaggccucauacaagaucuucagaauagaaaagggaaagauagucaaaucagucgaaaugaaugccccuaauuaucacuaugaggaaugcuccuguuauccugauucuagugaaaucacaugugugugcagggauaacuggcauggcucgaaucgaccguggguaucuuucaaccagaaucuggaauaucagauaggauacauaugcagugggauuuucggagacaauccacgcccuaaugauaagacaggcaguugugguccaguaucgucuaauggagcaaauggaguaaaaggauuuucauucaaauacggcaaugguguuuggauagggagaacuaaaagcauuaguucaagaaacgguuuugagaugauuugggauccgaacggauggacugggacagacaauaacuucucaauaaagcaagauaucguaggaauaaaugaguggucaggauauagcgggaguuuuguucagcauccagaacuaacagggcuggauuguauaagaccuugcuucuggguugaacuaaucagagggcgacccaaagagaacacaaucuggacuagcgggagcagcauauccuuuugugguguaaacagugacacuguggguuggucuuggccggacggugcugaguugccauuuaccauugacaaguaa

SEQ ID NO: 51570 - RNA, 1410 nt, Artificial Sequence; identical to SEQ ID NO: 48947
  derived and/or modified CDS sequence (wt) from neuraminidase__InfluenzaA__ADM31891

SEQ ID NO: 51571 - RNA, 1410 nt, Artificial Sequence; identical to SEQ ID NO: 48749
  derived and/or modified CDS sequence (wt) from neuraminidase__InfluenzaA__ADM31901

SEQ ID NO: 51572 - RNA, 1410 nt, Artificial Sequence
  derived and/or modified CDS sequence (wt) from neuraminidase__InfluenzaA__ADM31911
augaauccaaaccaaaagauaauaaccauugguucggucuguaugacaauuggaauggcuaacuuaauauuacaaauuggaaacauaaucucaauauggauuagccacucaauucaacuugggaaucaaaaucagauugaaacaugcaaucaaagcgucauuacuuaugaaaacaacacuuggguaaaucagacauauguuaacaucagcaacaccaacuuugcugcuggacagucagugguuuccgugaaauuagugggcaauuccucucucugcccuguuaguggaugggcuauauacaguaaagacaacaguguaagaaucgguuccaagggggauguguuugucauaagggaaccauucauaucaugcucccccuuggaaugcagaaccuucuucuugacucaaggggccuugcuaaaugacaaacauuccaauggaaccauuaaagacaggagcccauaucgaacccuaaugagcuguccuauuggugaaguucccucuccauacaacucaagauuugagucagucgcuuggucagcaagugcuugucaugauggcaucaauuggcuaacaauuggaauuucuggcccagacaauggggcaguggcuguguuaaaguacaacggcauaauaacagacacuaucaagaguuggagaaacaauauauugagaacacaagagucugaaugugcauguguaaaugguucuugcuuuacuguaaugaccgauggaccaaguaauggacaggccucauacaagaucuucagaauagaaaagggaaagauagucaaaucaguugaaaugaaugccccuaauuaucacuaugaggaaugcuccuguuauccugauucuagugaaaucacaugugugugcagggauaacuggcauggcucgaaucgaccgugggugucuuucaaccagaaucuggaauaucagauaggauacauaugcagugggauuuucggagacaauccacgcccuaaugauaagacaggcaguugugguccaguaucgucuaauggagcaaauggaguaaaaggauuuucauucaaauacggcaaugguguuuggauagggagaacuaaaagcauuaguucaagaaacgguuuugagaugauuugggauccgaacggauggacugggacagacaauaacuucucaauaaagcaagauaucguaggaauaaaugaguggucaggauauagcgggaguuuuguucagcauccagaacuaacagggcuggauuguauaagaccuugcuucuggguugaacuaaucagagggcgacccaaagagaacacaaucuggacuagcgggagcagcauauccuuuugugguguaaacagugacacuguggguuggucuuggccagacggugcugaguugccauuuaccauugacaaguaa

SEQ ID NO: 51573 - RNA, 1410 nt, Artificial Sequence; identical to SEQ ID NO: 49973
  derived and/or modified CDS sequence (wt) from neuraminidase__InfluenzaA__ADM31921

SEQ ID NO: 51574 - RNA, 1410 nt, Artificial Sequence
  derived and/or modified CDS sequence (wt) from neuraminidase__InfluenzaA__ADM31931
augaauccaaaccaaaagauaauaaccauugguucggucuguaugacaauuggaauggcuaacuuaauauuacaaauuggaaacauaaucucaauauggauuagccacucaauucaacuugggaaucaaaaucagauugaaacaugcaaucaaagcgucauuacuuaugaaaacaacacuuggguaaaucagacauauguuaacaucagcaacaccaacuuugcugcuggacagucagugguuuccgugaaauuagcgggcaauuccucucucugcccuguuaguggaugggcuauauacaguaaagacaacaguguaagaaucgguuccaagggggauguguuugucauaagggaaccauucauaucaugcucccccuuggaaugcagaaccuucuucuugacucaaggggccuugcuaaaugacaaacauuccaauggaaccauuaaagacaggagcccauaucgaacccuaaugagcuguccuauuggugaaguucccucuccauacaacucaagauuugagucagucgcuuggucagcaagugcuugucaugauggcaucaauuggcuaacaauuggaauuucuggcccagacaauggggcaguggcuguguuaaaguacaacggcguaauaacagacacuaucaagaguuggagaaacaauauauugagaacacaagagucugaaugugcauguguaaaugguucuugcuuuacuguaaugaccgauggaccaaguaauggacaggccucauacaagaucuucagaauagaaaagggaaagauagucaaaucagucgaaaugaaugccccuaauuaucacuaugaggaaugcuccuguuauccugauucuagugaaaucacaugugugugcagggauaacuggcauggcucgaaucgaccgugggugucuuucaaccagaaucuggaauaucagauaggauacauaugcagugggauuuucggagacaauccacggccuaaugauaagacaggcaguugugguccaguaucgucuaauggagcaaauggaguaaaaggauuuucauucaaauacggcaaugguguuuggauagggagaacuaaaagcauuaguucaagaaacgguuuugagaugauuugggauccgaauggauggacugggacagacaauaacuucucaauaaagcaagauaucguaggaauaaaugaguggucaggauauagcgggaguuuuguucagcauccagaacuaacagggcuggauuguauaagaccuugcuucuggguugaacuaaucagagggcgacccaaagagaacacaaucuggacuagcgggagcagcauauccuuuugugguguaaacagugacacuguggguuggucuuggccagacggugcugaguugccauuuaccauugacaaguaa

SEQ ID NO: 51575 - RNA, 1410 nt, Artificial Sequence
  derived and/or modified CDS sequence (wt) from neuraminidase__InfluenzaA__ADM31941
augaauccaaaccaaaagauaauaaccauugguucggucuguaugacaauuggaauggcuaacuuaauauuacaaauuggaaacauaaucucaauauggauuagccacucaauucaacuugggaaucaaaaucagauugaaacaugcaaucaaagcgucauuacuuaugaaaacaacacuuggguaaaucagacauauguuaacaucagcaacaccaacuuugcugcuggacagucagugguuuccgugaaauuagcgggcaauuccucucucugcccuguuaguggaugggcuauauacaguaaagacaacaguguaagaaucgguuccaagggggauguguuugucauaagggaaccauucauaucaugcucccccuuggaaugcagaaccuucuucuugacucaaggggccuugcuaaaugacaaacauuccaauggaaccauuaaagacaggagcccauaucgaacucuaaugagcuguccuauuggugaaguucccucuccauacaacucaagauuugagucagucgcuuggucagcaagugcuugucaugauggcaucaauuggcuaacaauuggaauuucuggcccagacaauggggcaguggcuguguuaaaguacaacggcauaauaacagacacuaucaagaguuggagaaacaauauauugagaacacaagagucugaaugugcauguguaaaugguucuugcuuuacuguaaugaccgauggaccaaguaauggacaggccucauacaagaucuucagaauagaaaagggaaagauagucaaaucagucgaaaugaaugccccuaauuaucacuaugaggaaugcuccuguuauccugauucuagugaaaucacaugugugugcagggauaacuggcauggcucgaaucgaccgugggugucuuucaaccagaaucuggaauaucagauaggauacauaugcagugggauuuucggagacaauccacgcccuaaugauaagacaggcaguugugguccaguaucgucuaauggagcaaauggaguaaaaggauuuucauucaaauacggcaaugguguuuggauagggagaacuaaaagcauuaguucaagaaacgguuuugagaugauuugggauccgaacggauggacugggacagacaauaacuucucaauaaagcaagauaucguaggaauaaaugaguggucaggauauagcgggaguuuuguucagcauccagaacuaacagggcuggauuguauaagaccuugcuucuggguugaacuaaucagagggcgacccaaagagaacacaaucuggacuagcgggagcagcauauccuuuugugguguaaacagugacacuguggguuggucuuggccagacggugcugaguugccauuuaccauugacaaguaa

SEQ ID NO: 51576 - RNA, 1410 nt, Artificial Sequence; identical to SEQ ID NO: 50431
  derived and/or modified CDS sequence (wt) from neuraminidase__InfluenzaA__ADM31951

SEQ ID NO: 51577 - RNA, 1410 nt, Artificial Sequence
  derived and/or modified CDS sequence (wt) from neuraminidase__InfluenzaA__ADM31961
augaauccaaaccaaaagauaauaaccauugguucggucuguauggcaauuggaauggcuaacuuaauauuacaaauuggaaacauaaucucaauauggauuagccacucaauucaacuugggaaucaaaaucagauugaaacaugcaaucaaagcgucauuacuuaugaaaacaacacuuggguaaaucagacauauguuaacaucagcaacaccaacuuugcugcuggacagucagugguuuccgugaaauuagcgggcaauuccucucucugcccuguuaguggaugggcuauauacaguaaagacaacaguauaagaaucgguuccaagggggauguguuugucauaagggaaccauucauaucaugcucccccuuggaaugcagaaccuucuucuugacucaaggggccuugcuaaaugacaaacauuccaauggaaccauuaaagacaggagcccauaucgaacccuaaugagcuguccuauuggugaaguucccucuccauacaacucaagauuugagucagucgcuuggucagcaagugcuugucaugauggcaucaauuggcuaacaauuggaauuucuggcccagacaauggggcaguggcuguguuaaaguacaacggcauaauaacagacacuaucaagaguuggagaaacaauauauugagaacacaagagucugaaugugcauguguaaaugguucuugcuuuacuguaaugaccgauggaccaagugauggacaggccucauacaagaucuucagaauagaaaagggaaagauagucaaaucagucgaaaugaaugccccuaauuaucacuaugaggaaugcuccuguuauccugauucuagugaaaucacaugugugugcagggauaacuggcauggcucgaaucggccgugggugucuuucaaccagaaucuggaauaucagauaggauacauaugcagugggauuuucggagacaauccacgcccuaaugauaagacaggcaguugugguccaguaucgucuaauggagcaaauggaguaaaaggauuuucauucaaauacggcaaugguguuuggauagggagaacuaaaagcauuaguucaagaaacgguuuugagaugauuugggauccgaacggauggacugggacagacaauaacuucucaauaaagcaagauaucguaggaauaaaugaguggucaggauauagcgggaguuuuguucagcauccagaacuaacagggcuggauuguauaagaccuugcuucuggguugaacuaaucagagggcgacccaaagagaacacaaucuggacuagcgggagcagcauauccuuuugugguguaaacagugacacuguggguuggucuuggccagacggugcugaguugccauuuaccauugacaaguaa

SEQ ID NO: 51578 - RNA, 1410 nt, Artificial Sequence
  derived and/or modified CDS sequence (wt) from neuraminidase__InfluenzaA__ADM31971
augaauccaaaccaaaagauaauaaccauugguucggucuguaugacaauuggaauggcuaacuuaauauuacaaauuggaaacauaaucucaauauggauuagccacucaauucaacuugggaaucaaaaucagauugaaacaugcaaucaaagcgucauuacuuaugaaaacaacacuuggguaaaucagacauauguuaacaucagcaacaccaacuuugcugcuggacagucagugguuuccaugaaauuagcgggcaauuccucucucugcccuguuaguggaugggcuauauacaguaaagacaacaguguaagaaucgguuccaagggggauguguuugucauaagggaaccauucauaucaugcucccccuuggaaugcagaaccuucuucuugacucaaggggccuugcuaaaugacaaacauuccaauggaaccauuaaagacaggagcccauaucgaacccuaaugagcuguccuauuggugaaguucccucuccauacaacucaagauuugagucagucgcuuggucagcaagugcuugucaugauggcaucaauuggcuaacaauuggaauuucuggcccagacaauggggcaguggcuguguuaaaguacaacggcguaauaacagacacuaucaagaguuggagaaacaauauauugagaacacaagagucugaaugugcauguguaaaugguucuugcuuuacuguaaugaccgauggaccaaguaauggacaggccucauacaagaucuucagaauagaaaagggaaagauagucaaaucagucgaaaugaaugccccuaauuaucacuacgaggaaugcuccuguuauccugauucuagugaaaucacaugugugugcagggauaacuggcauggcucgaaucgaccgugggugucuuucaaccagaaucuggaauaucagauaggauacauaugcagugggauuuucggagacaauccacgcccuaaugauaagacaggcaguugugguccaguaucgucuaauggagcaaauggaguaaaaggauuuucauucaaauacggcaaugguguuuggauagggagaacuaaaagcauuaguucaagaaacgguuuugagaugauuugggauccgaacggauggacugggacagacaauaacuucucaauaaagcaagauaucguaggaauaaaugaguggucaggauauagcgggaguuuuguucagcauccagaacuaacagggcuggauuguauaagaccuugcuucuggguugaacuaaucagagggcgacccaaagagaacacaaucuggacuagcgggagcagcauauccuuuugugguguaaacagugacacuguggguuggucuuggccagacggugcugaguugccauuuaccauugacaaguaa

SEQ ID NO: 51579 - RNA, 1410 nt, Artificial Sequence; identical to SEQ ID NO: 49973
  derived and/or modified CDS sequence (wt) from neuraminidase__InfluenzaA__ADM31981

SEQ ID NO: 51580 - RNA, 1410 nt, Artificial Sequence; identical to SEQ ID NO: 48749
  derived and/or modified CDS sequence (wt) from neuraminidase__InfluenzaA__ADM31991

SEQ ID NO: 51581 - RNA, 1410 nt, Artificial Sequence; identical to SEQ ID NO: 48749
  derived and/or modified CDS sequence (wt) from neuraminidase__InfluenzaA__ADM32001

SEQ ID NO: 51582 - RNA, 1410 nt, Artificial Sequence; identical to SEQ ID NO: 49380
  derived and/or modified CDS sequence (wt) from neuraminidase__InfluenzaA__ADM32011

SEQ ID NO: 51583 - RNA, 1410 nt, Artificial Sequence; identical to SEQ ID NO: 50253
  derived and/or modified CDS sequence (wt) from neuraminidase__InfluenzaA__ADM32021

SEQ ID NO: 51584 - RNA, 1410 nt, Artificial Sequence
  derived and/or modified CDS sequence (wt) from neuraminidase__InfluenzaA__ADM32031
augaauccaaaccaaaagauaauaaccauugguucggucuguaugacaauuggaauggcuaacuuaauauuacaaauuggaaacauaaucucaauauggauuagccacucaauucaacuuggggaucaaaaucagauugaaacaugcaaucaaagcgucauuacuuaugaaaacaacacuuggguaaaucagacauauguuaacaucagcaacaccaacuuugcugcuggacagucagugguuuccgugaaauuagcgggcaauuccucucucugcccuguuaguggaugggcuauauacaguaaagacaacaguauaagaaucgguuccaagggggauguguuugucauaagggaaccauucauaucaugcucccccuuggaaugcagaaccuucuucuugacucaaggggccuugcuaaaugacaaacauuccaauggaaccauuaaagacaggagcccauaucgaacccuaaugagcuguccuauuggugaaguucccucuccauacaacucaagauuugagucagucgcuuggucagcaagugcuugucaugauggcaucaauuggcuaacaauuggaauuucuggcccagacaauggggcaguggcuguguuaaaguacaacggcauaauaacagacacuaucaagaguuggagaaacaauauauugagaacacaagagucugaaugugcauguguaaaugguucuugcuuuacuguaaugaccgauggaccaagugauggacaggccucauacaagaucuucagaauagaaaagggaaagauagucaaaucagucgaaaugaaugccccuaauuaucacuaugaggaaugcuccuguuauccugauucuagugaaaucacaugugugugcagggauaacuggcauggcucgaaucgaccgugggugucuuucaaccagaaucuggaauaucagauaggauacauaugcagugggauuuucggagacaauccacgcccuaaugauaagacaggcaguugugguccaguaucaucuaauggagcaaauggaguaaaaggauuuucauucaaauacggcaaugguguuuggauagggagaacuaaaagcauuaguucaagaaacgguuuugagaugauuugggauccgaacggauggacugggacagacaauaacuucucaauaaagcaagauaucguaggaauaaaugaguggucaggauauagcgggaguuuuguucagcauccagaacuaacagggcuggauuguauaagaccuugcuucuggguugaacuaaucagagggcgacccaaagagaacacaaucuggacuagcgggagcagcauauccuuuugugguguaaacagugacacuguggguuggucuuggccagacggugcugaguugccauuuaccauugacaaguaa

SEQ ID NO: 51585 - RNA, 1410 nt, Artificial Sequence
  derived and/or modified CDS sequence (wt) from neuraminidase__InfluenzaA__ADM32051
augaauccaaaccaaaagauaauaaccauugguucggucuguaugacaauuggaauggcuaacuuaauauuacaaauuggaaacauaaucucaauauggauuagccacucaauucaacuugggaaucaaaaucagauugaaacaugcaaucaaagcgucauuacuuaugaaaacaacacuuggguaaaucagacauauguuaacaucagcaacaccaacuuugcugcuggacagucagugguuuccgugaaauuagcgggcaauuccucucucugcccuguuaguggaugggcuauauacaguaaagacaacaguguaagaaucgguuccaagggggauguguuugucauaagggaaccauucauaucaugcucccccuuggaaugcagaaccuucuucuugacucaaggggccuugcuaaaugacaaacauuccaauggaaccauuaaagacaggagcccauaucgaacccuaaugagcuguccuguuggugaaguucccucuccauacaacucaagauuugagucagucgcuuggucagcaagugcuugucaugauggcaucaauuggcuaacaauuggaauuucuggcccagacaauggggcaguggcuguguuaaaguacaacggcauaauaacagacacuaucaagaguuggagaaacaauauauugagaacacaagagucugaaugugcauguguaaaugguucuugcuuuacuguaaugaccgauggaccaaguaauggacaggccucauacaagaucuucagaauagaaaagggaaagauagucaaaucagucgaaaugaaugccccuaauuaucacuaugaggaaugcuccuguuauccugauucuagugaaaucacaugugugugcagggauaacuggcauggcucgaauagaccgugggugucuuucaaccagaaucuggaauaucagauaggauacauaugcagugggauuuucggagacaauccacgcccuaaugauaagacaggcaguugugguccaguaucgucuaauggagcaaauggaguaaaaggauuuucauucaaauacggcaaugguguuuggauagggagaacuaaaagcauuaguucaagaaacgguuuugagaugauuugggauccgaacggauggacugggacagacaauaacuucucaauaaagcaagauaucguaggaauaaaugaguggucaggauauagcgggaguuuuguucagcauccagaacuaacagggcuggauuguauaagaccuugcuucuggguugaacuaaucagagggcgacccaaagagaacacaaucuggacuagcgggagcagcauauccuuuugugguguaaacagugacacuguggguuggucuuggccagacggugcugaguugccauuuaccauugacaaguaa

SEQ ID NO: 51586 - RNA, 1410 nt, Artificial Sequence; identical to SEQ ID NO: 48750
  derived and/or modified CDS sequence (wt) from neuraminidase__InfluenzaA__ADM32061

SEQ ID NO: 51587 - RNA, 1410 nt, Artificial Sequence; identical to SEQ ID NO: 48750
  derived and/or modified CDS sequence (wt) from neuraminidase__InfluenzaA__ADM32071

SEQ ID NO: 51588 - RNA, 1410 nt, Artificial Sequence
  derived and/or modified CDS sequence (wt) from neuraminidase__InfluenzaA__ADM32081
augaauccaaaccaaaagauaauaaccauugguucggucuguaugacaauuggaauggcuaacuuaauauuacaaauuggaaacauaaucucaauauggauuagccacucaauucaacuugggaaucaaaaucagauugaaacaugcaaucaaagcgucauuacuuaugaaaacaacacuuggguaaaucagacauauguuaacaucagcaacaccaacuuugcugcuggacagucagugguuuccgugaaauuagcgggcaauuccucucucugcccuguuaguggaugggcuauauacaguaaagacaacaguauaagaaucgguuccaagggggauguguuugucauaagggaaccauucauaucaugcucccccuuggaaugcagaaccuucuucuugacucaaggggccuugcuaaaugacaaacauuccaauggaaccauuaaagacaggagcccauaucgaacccuaaugagcuguccuauuggugaaguucccucuccauacaacucaagauuugagucagucgcuuggucagcaagugcuugucaugauggcaucaauuggcuaacaauuggaauuucuggcccagacaauggggcaguggcuguguuaaaguacaacggcauaauaacagacacuaucaagaguuggagaaacaauauauugagaacacaagagucugaaugugcauguguaaaugguucuugcuuuacuguaaugaccgauggaccaagugauggacaggccucauacaagaucuucagaauagaaaagggaaagauagucaaaucagucgaaaugaaugccccuaauuaucacuaugaggaaugcuccuguuauccugauucuagugaaaucacaugugugugcagggauaacuggcauggcucgaaucggccgugggugucuuucaaccagaaucuggaauaucagauaggauacauaugcagugggauuuucggagacaauccacgcccuaaugauaagacaggcaguugugguccaguaucgucuaauggagcaaauggaguaaaaggauuuucauucaaauacggcaaugguguuuggauagggagaacuaaaagcauuaguucaagaaacgguuuugagaugauuugggauccgaacggauggacugggacagacaauaacuucucaauaaagcaagauaucguaggaauaaaugaguggucaggauauagcgggaguuuuguucagcauccagaacuaacagggcuggauuguauaagaccuugcuucuggguugaacuaaucagagggcgacccaaagagaacacaaucuggacuagcgggagcagcauauccuuuugugguguaaacagugacacuguggguuggucuuggccagacggugcugaguugccauuuaccauugacaaguaa

SEQ ID NO: 51589 - RNA, 1410 nt, Artificial Sequence
  derived and/or modified CDS sequence (wt) from neuraminidase__InfluenzaA__ADM32091
augaauccaaaccaaaagauaauaaccauugguucggucuguaugacaauuggaauggcuaacuuaauauuacaaauuggaaacauaaucucaauauggauuagccacucaauucaacuugggaaucaaaaucagauugaaacaugcaaucaaagcgucauuacuuaugaaaacaacacuuggguaaaucagacauauguuaacaucagcaacaccaacuuugcugcuggacagucagugguuuccgugaaauuagugggcaauuccucucucugcccuguuaguggaugggcuauauacaguaaagacaacaguguaagaaucgguuccaagggggauguguuugucauaagggaaccauucauaucaugcucccccuuggaaugcagaaccuucuucuugacucaaggggccuugcuaaaugacaaacauuccaauggaaccauuaaagacaggagcccauaucgaacccuaaugagcuguccuauuggugaaguucccucuccauacaacucaagauuugagucagucgcuuggucagcaagugcuugucaugauggcaucaauuggcuaacaauuggaauuucuggcccagacaauggggcaguggcuguguuaaaguacaacggcauaauaacagacacuaucaagaguuggagaaacaauauauugagaacacaagagucugaaugugcauguguaaaugguucuugcuuuacuguaaugaccgauggaccaaguaauggacaggccucauacaagaucuucagaauagaaaagggaaagauagucaaaucagucgaaaugaaugccccuaauuaucacuaugaggaaugcuccuguuauccugauucuagugaaaucacaugugugugcagggauaacuggcauggcucgaaucgaccgugggugucuuucaaccagaaucuggaauaucagauaggauacauaugcagugggauuuucggagacaauccacgcccuaaugauaagacaggcaguugugguccaguaucgucuaauggagcaaauggaguaaaaggauuuucauucaaauacggcaaugguguuuggauagggagaacuaaaagcauuaguucaagaaacgguuuugagaugauuugggauccgaacggauggacugggacagacaauaacuucucaauaaagcaagauaucguaggaauaaaugaguggucaggauauagcgggaguuuuguucagcauccagaacuaacagggcuggauuguauaagaccuugcuucuggguugaacuaaucagagggcgacccaaagagaacacaaucuggacuagcgggagcagcauauccuuuugugguguaaacagugacacuguggguuggucuuggccagacggugcugaguugcccuuuaccauugacaaguaa

SEQ ID NO: 51590 - RNA, 1410 nt, Artificial Sequence; identical to SEQ ID NO: 50253
  derived and/or modified CDS sequence (wt) from neuraminidase__InfluenzaA__ADM32101

SEQ ID NO: 51591 - RNA, 1410 nt, Artificial Sequence; identical to SEQ ID NO: 51588
  derived and/or modified CDS sequence (wt) from neuraminidase__InfluenzaA__ADM32111

SEQ ID NO: 51592 - RNA, 1410 nt, Artificial Sequence
  derived and/or modified CDS sequence (wt) from neuraminidase__InfluenzaA__ADM32554
augaauccaaaccaaaagauaauaaccauugguucggucuguaugacaauuggaauggcuaacuuaauauuacaaauuggaaacauaaucucaauauggauuagccacucaauucaacuugggaaucaaaaucagauugaaacaugcaaucaaagcgucauuacuuaugaaaacaacacuuggguaaaucagacauauguuaacaucagcaacaccaacuuugcugcuggacagucagugguuuccgugaaauuagcgggcaauuccucucucugcccuguuaguggaugggcuauauacaguaaagacaacaguguaagaaucgguuccaagggggauguguuugucauaagggaaccauucauaucaugcucccccuuggaaugcagaaccuucuucuugacacaaggggccuugcuaaaugacaaacauuccaauggaaccauuaaagacaggagcccauaucgaacccuaaugagcuguccuauuggugaaguucccucuccauacaacucaagauuugagucagucgcuuggucagcaagugcuugucaugauggcaucaauuggcuaacaauuggaauuucuggcccagacaauggggcaguggcuguguuaaaguacaacggcguaauaacagacacuaucaagaguuggagaaacaauauauugagaacacaagagucugaaugugcauguguaaaugguucuugcuuuacuguaaugaccgauggaccaaguaauggacaggccucauacaagaucuucagaauagaaaagggaaagauagucaaaucagucgaaaugaaugccccuaauuaucacuaugaggaaugcuccuguuauccugauucuagugaaaucacaugugugugcagggauaacuggcauggcucgaaucgaccgugggugucuuucaaccagaaucuggaauaucagauaggauacauaugcagugggauuuucggagacaauccacgcccuaaugauaagacaggcaguugugguccaguaucgucuaauggagcaaauggaguaaaaggauuuucauucaaauacggcaaugguguuuggauagggagaacuaaaagcauuaguucaagaaacgguuuugagaugauuugggauccgaacggauggacugggacagacaauaacuucucaauaaagcaagauaucguaggaauaaaugaguggucaggauauagcgggaguuuuguucagcauccagaacuaacagggcuggauuguauaagaccuugcuucuggguugaacuaaucagagggcgacccaaagagaacacaaucuggacuagcgggagcagcauauccuuuugugguguaaacagugacacuguggguuggucuuggccagacggugcugaguugccauuuaccauugacaaguaa

SEQ ID NO: 51593 - RNA, 1410 nt, Artificial Sequence; identical to SEQ ID NO: 48749
  derived and/or modified CDS sequence (wt) from neuraminidase__InfluenzaA__ADM32564

SEQ ID NO: 51594 - RNA, 1410 nt, Artificial Sequence
  derived and/or modified CDS sequence (wt) from neuraminidase__InfluenzaA__ADM32574
augaauccaaaccaaaagauaauaaccauugguucggucuguaugacaauuggaauggcuaacuuaauauuacaaauuggaaacauaaucucaauauggauuagccacucaauucaacuugggaaucaaaaucagauugaaacaugcaaucaaagcgucauuacuuaugaaaacaacacuuggguaaaucagacauauguuaacaucagcaacaccaacuuugcugcuggacagucagugguuuccgugaaauuagugggcaauuccucucucugcccuguuaguggaugggcuauauacaguaaagacaacaguguaagaaucgguuccaagggggauguguuugucauaagggaaccauucauaucaugcucccccuuggaaugcagaaccuucuucuugacucaaggggccuugcuaaaugacaaacauuccaauggaaccauuaaagacaggagcccauaucgaacccuaaugagcuguccuauuggugaaguucccucuccauacaacucaagauuugagucagucgcuuggucagcaagugcuugucaugauggcaucaauuggcuaacaauuggaauuucuggcccagacaauggggcaguggcuguguuaaaguacaacggcauaauaacagacacuaucaagaguuggagaaacaauauauugagaacacaagagucugaaugugcauguguaaaugguucuugcuuuacuguaaugaccgauggaccaaguaauggacaggccucauacaagaucuucagaauagaaaagggaaagauagucaaaucagucgaaaugaaugccccuaauuaucacuaugaggaaugcuccuguuauccugauucuagugaaaucacaugugugugcagggauaacuggcauggcucgaaucgaccgugggugucuuucaaccagaaucuggaauaucagauaggauacauaugcagugggauuuucggagacaauccacgcccuaaugauaagacaggcaguugugguccaguaucgucuaauggagcaaauggaguaaaaggauuuucauucaaauacggcaaugguguuuggauagggagaacuaaaagcauuaguucaagaaacgguuuugagaugauuugggauccgaacggauggacugggacagacaauaacuucucaauaaagcaagauaucguaggaauaaaugaguggucaggauauagcgggaguuuuguucagcauccagaacuaacagggcuggauuguauaagaccuugcuucuggguugaauuaaucagagggcgacccaaagagaacacaaucuggacuagcgggagcagcauauccuuuugugguguaaacagugacacuguggguuggucuuggccagacggugcugaguugccauuuaccauugacaaguaa

SEQ ID NO: 51595 - RNA, 1410 nt, Artificial Sequence
  derived and/or modified CDS sequence (wt) from neuraminidase__InfluenzaA__ADM32584
augaauccaaaccaaaagauaauaaccauugguucggucuguaugacaauuggaauggcuaacuuaauauuacaaauuggaaacauaaucucaauauggauuagccacucaauucaacuugggaaucaaaaucagauugaaacaugcaaucaaagcgucauuacuuaugaaaacaacacuuggguaaaucagacauauguuaacaucagcaacaccaacuuugcugcuggacagucagugguuuccgugaaauuagcgggcaauuccucucucugcccuguuaguggaugggcuauauacaguaaggacaacaguauaagaaucgguuccaagggggauguguuugucauaagggaaccauucauaucaugcucccccuuggaaugcagaaccuucuucuugacucaaggggccuugcuaaaugacaaacauuccaauggaaccauuaaagacaggagcccauaucgaacccuaaugagcuguccuauuggugaaguucccucuccauacaacucaagauuugagucagucgcuuggucagcaagugcuugucaugauggcaucaauuggcuaacaauuggaauuucuggcccagacaauggggcaguggcuguguuaaaguacaacggcauaauaacagacacuaucaagaguuggagaaacaauauauugagaacacaagagucugaaugugcauguguaaaugguucuugcuuuacuguaaugaccgauggaccaagugauggacaggccucauacaagaucuucagaauagaaaagggaaagauagucaaaucagucgaaaugaaugccccuaauuaucacuaugaggaaugcuccuguuauccugauucuagugaaaucacaugugugugcagggauaacuggcauggcucgaaucgaccgugggugucuuucaaccagaaucuggaauaucagauaggauacauaugcagugggauuuucggagacaauccacgcccuaaugauaagacaggcaguugugguccaguaucgucuaauggagcaaauggaguaaaaggauuuucauucaaauacggcaaugguguuuggauagggagaacuaaaagcauuaguucaagaaacgguuuugagaugauuugggauccgaacggauggacugggacagacaauaacuucucaauaaagcaagauaucguaggaauaaaugaguggucaggauauagcgggaguuuuguucagcauccagaacuaacagggcuggauuguauaagaccuugcuucuggguugaacuaaucagagggcgacccaaagagaacacaaucuggacuagcgggagcagcauauccuuuugugguguaaacagugacacuguggguuggucuuggccagacggugcugaguugccauuuaccauugacaaguaa

SEQ ID NO: 51596 - RNA, 1410 nt, Artificial Sequence; identical to SEQ ID NO: 50431
  derived and/or modified CDS sequence (wt) from neuraminidase__InfluenzaA__ADM32594

SEQ ID NO: 51597 - RNA, 1410 nt, Artificial Sequence; identical to SEQ ID NO: 51588
  derived and/or modified CDS sequence (wt) from neuraminidase__InfluenzaA__ADM32604

SEQ ID NO: 51598 - RNA, 1410 nt, Artificial Sequence
  derived and/or modified CDS sequence (wt) from neuraminidase__InfluenzaA__ADM32614
augaauccaaaccaaaagauaauaaccauugguucggucuguaugacaauuggaauggcuaacuuaauauuacaaauuggaaacauaaucucaauauggauuagccacucaauucaacuugggaaucaaaaucagauugaaacaugcaaucaaagcgucauuacuuaugaaaacaacacuuggguaaaucagacauauguuaacaucagcaacaccaacuuugcugcuggacagucagugguuuccgugaaauuagcgggcaauuccucucucugcccuguuaguggaugggcuauauacaguaaagacaacaguauaagaaucgguuccaagggggauguguuugucauaagggaaccauucauaucaugcucccccuuggaaugcagaaccuucuucuugacucaaggggccuugcuaaaugacaaacauuccaauggaaccauuaaagacaggagcccauaucgaacccuaaugagcuguccuauuggugaaguucccucuccauacaacucaagauuugagucagucgcuuggucagcaagugcuugucaugauggcaucaauuggcuaacaauuggaauuucuggcccagacaauggggcaguggcuguguuaaaguacaacggcauaauaacagacacuaucaagaguuggagaaacaauauauugagaacacaagagucugaaugugcauguguaaaugguucuugcuuuacuguaaugaccgauggaccaagugauggacaggccucauacaagaucuucagaauagaaaagggaaagauagucaaaucagucgaaaugaaugccccuaauuaucacuaugaggaaugcuccuguuauccugauucuagugaaaucacaugugugugcagggauaacuggcauggcucgaaucggccgugggugucuuucaaccagaaucuggaauaucagauaggauacauaugcagugggauuuucggagacaauccacgcccuaaugauaagacaggcaguugugguccaguaucgucuaauggagcaaauggaguaaaaggauuuucauucaaauacggcaaugguguuuggauagggagaacuaaaagcauuaguucaagaaacgguuuugagaugauuugggauccgaacggguggacugggacagacaauaacuucucaauaaagcaagauaucguaggaauaaaugaguggucaggauauagcgggaguuuuguucagcauccagaacuaacagggcuggauuguauaagaccuugcuucuggguugaacuaaucagagggcgacccaaagagaacacaaucuggacuagcgggagcagcauauccuuuugugguguaaacagugacacuguggguuggucuuggccagacggugcugaguugccauuuaccauugacaaguaa

SEQ ID NO: 51599 - RNA, 1410 nt, Artificial Sequence
  derived and/or modified CDS sequence (wt) from neuraminidase__InfluenzaA__ADM32624
augaauccaaaccaaaagauaauaaccauugguucggucuguaugacaauuggaauggcuaacuuaauauuacaaauuggaaacauaaucucaauauggauuagccacucaauucaacuugggaaucaaaaucagauugaaacaugcaaucaaagcgucauuacuuaugaaaacaacacuuggguaaaucagacauauguuaacaucagcaacaccaacuuugcugcuggacagucagugguuuccgugaaauuagcgggcaauuccucucucugcccuguuaguggaugggcuauauacaguaaagacaacaguauaagaaucgguuccaagggggauguguuugucauaagggaaccauucauaucaugcucccccuuggaaugcagaaccuucuucuugacucaaggggccuugcuaaaugacaaacauuccaauggaaccauuaaagacaggagcccauaucgaacccuaaugagcuguccuauuggugaaguucccucuccauacaacucaagauuugagucagucgcuuggucagcaagugcuugucaugauggcaucaauuggcuaacaauuggaauuucuggcccagacaauggggcaguggcuguguuaaaguacaacggcauaauaacagacacuaucaagaguuggagaaacaauauauugagaacacaagagucugaaugugcauguguaaaugguucuugcuuuacuguaaugaccgauggaccaagugacggacaggccucauacaagaucuucagaauagaaaagggaaagauagucaaaucagucgaaaugaaugccccuaauuaucacuaugaggaaugcuccuguuauccugauucuagugaaaucacaugugugugcagggauaacuggcauggcucgaaucgaccgugggugucuuucaaccagaaucuggaauaucagauaggauacauaugcagugggauuuucggagacaauccacgcccuaaugauaagacaggcaguugugguccaguaucgucuaauggagcaaauggaguuaaaggauuuucauucaaauacggcaaugguguuuggauagggagaacuaaaagcauuaguucaagaaacgguuuugagaugauuugggauccgaacggauggacugggacagacaauaacuucucaauaaagcaagauaucguaggaauaaaugaguggucaggauauagcgggaguuuuguucagcauccagaacuaacagggcuggauuguauaagaccuugcuucuggguugaacuaaucagagggcgacccaaagagaacacaaucuggacuagcgggagcagcauauccuuuugugguguaaacagugacacuguggguuggucuuggccagacggugcugaguugccauuuaccauugacaaguaa

SEQ ID NO: 51600 - RNA, 1410 nt, Artificial Sequence
  derived and/or modified CDS sequence (wt) from neuraminidase__InfluenzaA__ADM32634
augaauccaaaccaaaagauaauaaccauugguucggucuguaugacaauuggaauggcuaacuuaauauuacaaauuggaaacauaaucucaauauggauuagccacucaauucaacuugggaaucaaaaucagauugaaacaugcaaucaaagcgucauuacuuaugaaaacaacacuuggguaaaucagacauauguuaacaucagcaacaccaacuuugcugcuggacagucagugguuuccgugaaauuagcgggcaauuccucucucugcccuguuaguggaugggcuauauacaguaaagacaacaguguaagaaucgguuccaagggggauguguuugucauaagggaaccauucauaucaugcucccccuuggaaugcagaaccuucuucuugacucaaggggccuugcuaaaugacaaacauuccaauggaaccauuaaagacaggagcccauaucgaacccuaaugagcuguccuauuggugaaguucccucuccauacaacucaagauuugagucagucgcuuggucagcaagugcuugucaugauggcaucaauuggcuaacaauuggaauuucuggcccagacaauggggcaguggcuguguuaaaguacaacggcguaauaacagacacuaucaagaguuggagaaacaauauauugagaacacaagagucugaaugugcauguguaaaugguucuugcuuuacuguaaugaccgauggaccaaguaauggacaggccucauacaagaucuucagaauagaaaagggaaagauagucaaaucagucgaaaugaaugccccuaauuaucacuaugaggaaugcuccuguuauccugauucuagugaaaucacaugugugugcagggauaacuggcauggcucgaaucgaccgugggugucuuucaaccagaaucuggaauaucagauaggauacauaugcagugggauuuucggagacaauccacgcccuaaugauaagacaggcaguugugguccaguaucgucuaauggagcaaauggaguaaaaggauuuucauucaaauacggcaaugguguuuggauagggagaacuaaaagcauuaguucaagaaacgguuuugagaugauuugggauccgaacggauggacugggacagacaauaacuucucaauaaagcaagauaucguaggaauaaaugaguggucaggauauagcgggagcuuuguucagcauccagaacuaacagggcuggauuguauaagaccuugcuucuggguugaacuaaucagagggcgacccaaagagaacacaaucuggacuagcgggagcagcauauccuuuugugguguaaacagugacacuguggguuggucuuggccagacggugcugaguugccauuuaccauugacaaguaa

SEQ ID NO: 51601 - RNA, 1410 nt, Artificial Sequence
  derived and/or modified CDS sequence (wt) from neuraminidase__InfluenzaA__ADM32644
augaauccaaaccaaaagauaauaaccauugguucagucuguaugacaauuggaauggcuaacuuaauauuacaaauuggaaacauaaucucaauauggauuagccacucaauucaacuugggaaucaaaaucagauugaaacaugcaaucaaagcgucauuacuuaugaaaacaacacuuggguaaaucagacauauguuaacaucagcaacaccaacuuugcugcuggacagucagugguuuccgugaaauuagcgggcaauuccucucucugcccuguuaguggaugggcuauauacaguaaagacaacaguauaagaaucgguuccaagggggauguguuugucauaagggaaccauucauaucaugcucccccuuggaaugcagaaccuucuucuugacucaaggggccuugcuaaaugacaaacauuccaauggaaccauuaaagacaggagcccauaucgaacccuaaugagcuguccuauuggugaaguucccucuccauacaacucaagauuugagucagucgcuuggucagcaagugcuugucaugauggcaucaauuggcuaacaauuggaauuucuggcccagacaauggggcaguggcuguguuaaaguacaacggcauaauaacagacacuaucaagaguuggagaaacaauauauugagaacacaagagucugaaugugcauguguaaaugguucuugcuuuacuguaaugaccgauggaccaagugauggacaggccucauacaagaucuucagaauagaaaagggaaagauagucaaaucagucgaaaugaaugccccuaauuaucacuaugaggaaugcuccuguuauccugauucuagugaaaucacaugugugugcagggauaacuggcauggcucgaaucgaccgugggugucuuucaaccagaaucuggaauaucagauaggauacauaugcagugggauuuucggagacaauccacgcccuaaugauaagacaggcaguugugguccaguaucgucuaauggagcaaauggaguaaaaggauuuucauucaaauacggcaaugguguuuggauagggagaacuaaaagcauuaguucaagaaacgguuuugagaugauuugggauccgaacggauggacugggacagacaauaacuucucaauaaagcaagauaucguaggaauaaaugaguggucaggauauagcgggaguuuuguucagcauccagaacuaacagggcuggauuguauaagaccuugcuucuggguugaacuaaucagagggcgacccaaagagaacacaaucuggacuagcgggagcagcauauccuuuugugguguaaacagugacacuguggguuggucuuggccagacggugcugaguugccauuuaccauugacaaguaa

SEQ ID NO: 51602 - RNA, 1410 nt, Artificial Sequence
  derived and/or modified CDS sequence (wt) from neuraminidase__InfluenzaA__ADM32664
augaauccaaaccaaaagauaauaaccauugguucggucuguaugacaauuggaauggcuaacuuaauauuacaaauuggaaacauaaucucaauauggauuagccacucaauucaacuugggaaucaaaaucagauugaaacaugcaaucaaagcgucauuacuuaugaaaacaacacuuggguaaaucagacauauguuaacaucagcaacaccaacuuugcugcuggacagucagugguuuccgugaaauuagcgggcaauuccucucucugcccuguuaguggaugggcuauauacaguaaagacaacaguauaagaaucgguuccaagggggauguguuugucauaagggaaccauucauaucaugcucccccuuggaaugcagaaccuucuucuugacucaaggggccuugcuaaaugacaaacauuccaauggaaccauuaaagacaggagcccauaucgaacccuaaugagcuguccuauuggugaaguucccucuccauacaacucaagauuugagucagucgcuuggucagcaagugcuugucaugauggcaucaauuggcuaacaauuggaauuucuggcccagacaauggggcaguggcuguguuaaaguacaacggcauaauaacagacacuaucaagaguuggagaaacaauauauugagaacacaagagucugaaugugcauguguaaaugguucuugcuuuacuguaaugaccgauggaccaagugauggacaggccucauacaagaucuucagaauagaaaagggaaagauagucaaaucagucgaaaugaaugccccuaauuaucacuaugaggaaugcuccuguuauccugauucuagugaaaucacaugugugugcagggauaacuggcauggcucgaaucgaccgugggugucuuucaaccagaaucuggaauaucaaauaggauacauaugcagugggauuuucggagacaauccacgcccuaaugauaagacaggcaguugugguccaguaucgucuaauggagcaaauggaguaaaaggauuuucauucaaauacggcaaugguguuuggauagggagaacuaaaagcauuaguucaagaaacgguuuugagaugauuugggauccgaacggauggacugggacagacaauaacuucucaauaaagcaagauaucguaggaauaaaugaguggucaggauauagcgggaguuuuguucagcauccagaacuaacagggcuggauuguauaagaccuugcuucuggguugaacuaaucagagggcgacccaaagagaacacaaucuggacuagcgggagcagcauauccuuuugugguguaaacagugacacuguggguuggucuuggccagacggugcugaguugccguuuaccauugacaaguaa

SEQ ID NO: 51603 - RNA, 1410 nt, Artificial Sequence; identical to SEQ ID NO: 49973
  derived and/or modified CDS sequence (wt) from neuraminidase__InfluenzaA__ADM32674

SEQ ID NO: 51604 - RNA, 1410 nt, Artificial Sequence; identical to SEQ ID NO: 51588
  derived and/or modified CDS sequence (wt) from neuraminidase__InfluenzaA__ADM32684

SEQ ID NO: 51605 - RNA, 1410 nt, Artificial Sequence
  derived and/or modified CDS sequence (wt) from neuraminidase__InfluenzaA__ADM32694
augaauccaaaccaaaagauaauaaccauugguucggucuguaugacaauuggaauggcuaacuuaauauuacaaauuggaaacauaaucucaauauggauuagccacucaauucaacuugggaaucaaaaucagauugaaacaugcaaucaaagcgucauuacuuaugaaaacaacacuuggguaaaucagacauauguuaacaucagcaacaccaacuuugcugcuggacagucagugguuuccgugaaauuagcgggcaauuccucucucugcccuguuaguggaugggcuauauacaguaaagacaacaguguaagaaucgguuccaagggggauguguuugucauaagggaaccauucauaucaugcucccccuuggaaugcagaaccuucuucuugacucaaggggccuugcuaaaugacaaacauuccaauggaaccauuaaagacaggagcccauaucgaacccuaaugagcuguccuauuggugaaguucccucuccauacaacucaagauuugagucagucgcuuggucagcaagugcuugucaugauggcaucaauuggcuaacaauuggaauuucuggcccagacaauggggcaguggcuguguuaaaguacaacggcauaauaacagacacuaucaagaguuggagaaacaauauauugagaacacaagagucugaaugugcauguguaaaugguucuugcuuuacuguaaugaccgauggaccaaguaauggacaggccucauacaagaucuucagaauagaaaagggaaagauagucaaaucagucgaaaugaaugccccuaauuaucacuaugaggaaugcuccuguuauccugauucuagugaaaucacaugugugugcagggauaacuggcauggcucgaaucgaccgugggugucuuucaaccagaaucuggaauaucagauaggauacauaugcagugggauuuucggagacaauccacgcccuaaugauaagacaggcaguugugguccaguaucgucuaauggagcaaauggaguaaaaggauuuucauucaaauacggcaaugguguuuggauagggagaacuaaaagcauuaguucaagaaacgguuuugagaugauuugggauccgaacggauggacugggacagacaauaacuucucaauaaagcaagauaucguaggaauaaaugaguggucaggauauagcgggaguuuuguucagcauccagaacuaacagggcuggauugcauaagaccuugcuucuggguugaacuaaucagagggcgacccaaagagaacacaaucuggacuagcgggagcagcauauccuuuugugguguaaacagugacacuguggguuggucuuggccagacggugcugaguugccauuuaccauugacaaguaa

SEQ ID NO: 51606 - RNA, 1410 nt, Artificial Sequence; identical to SEQ ID NO: 48750
  derived and/or modified CDS sequence (wt) from neuraminidase__InfluenzaA__ADM32704

SEQ ID NO: 51607 - RNA, 1410 nt, Artificial Sequence; identical to SEQ ID NO: 50474
  derived and/or modified CDS sequence (wt) from neuraminidase__InfluenzaA__ADM32714

SEQ ID NO: 51608 - RNA, 1410 nt, Artificial Sequence; identical to SEQ ID NO: 50474
  derived and/or modified CDS sequence (wt) from neuraminidase__InfluenzaA__ADM32724

SEQ ID NO: 51609 - RNA, 1410 nt, Artificial Sequence; identical to SEQ ID NO: 51602
  derived and/or modified CDS sequence (wt) from neuraminidase__InfluenzaA__ADM32734

SEQ ID NO: 51610 - RNA, 1410 nt, Artificial Sequence; identical to SEQ ID NO: 49973
  derived and/or modified CDS sequence (wt) from neuraminidase__InfluenzaA__ADM32744

SEQ ID NO: 51611 - RNA, 1410 nt, Artificial Sequence; identical to SEQ ID NO: 50474
  derived and/or modified CDS sequence (wt) from neuraminidase__InfluenzaA__ADM32754

SEQ ID NO: 51612 - RNA, 1410 nt, Artificial Sequence; identical to SEQ ID NO: 49973
  derived and/or modified CDS sequence (wt) from neuraminidase__InfluenzaA__ADM32764

SEQ ID NO: 51613 - RNA, 1410 nt, Artificial Sequence
  derived and/or modified CDS sequence (wt) from neuraminidase__InfluenzaA__ADM32774
augaauccaaaccaaaagauaauaaucauugguucggucuguaugacaauuggaauggcuaacuuaauauuacaaauuggaaacauaaucucaauauggauuagccacucaauucaacuugggaaucaaaaucagauugaaacaugcaaucaaagcgucacuacuuaugaaaacaacacuuggguaaaucagacauauguuaacaucagcaacaccaacuuugcugcuggacagucagugguuuccgugaaauuagcgggcaauuccucucucugcccuguuaguggaugggcuauauacaguaaagacaacaguauaagaaucgguuccaagggggauguguuugucauaagggaaccauucauaucaugcucccccuuggaaugcagaaccuucuucuugacucaaggggccuugcuaaaugacaaacauuccaauggaaccauuaaagacaggagcccauaucgaacccuaaugagcuguccuauuggugaaguucccucuccauacaacucaagauuugagucagucgcuuggucagcaagugcuugucaugauggcaucaauuggcuaacaauuggaauuucuggcccagacaauggggcaguggcuguguuaaaguacaacggcauaauaacagacacuaucaagaguuggagaaacaauauauugagaacacaagagucugaaugugcauguguaaaugguucuugcuuuacuguaaugaccgauggaccaagugauggacaggccucauacaagaucuucagaauagaaaagggaaagauagucaaaucagucgaaaugaaugccccuaauuaucacuaugaggaaugcuccuguuauccugauucuagugaaaucacaugugugugcagggauaacuggcauggcucgaaucgaccgugggugucuuucaaccagaaucuggaauaucagauaggauacauaugcagugggauuuucggagacaauccacgcccuaaugauaagacaggcaguugugguccaguaucgucuaauggagcaaauggaguaaaaggauuuucauucaaauacggcaaugguguuuggauagggagaacuaaaagcauuaguucaagaaacgguuuugagaugauuugggauccgaacggauggacugggacagacaauaacuucucaauaaagcaagauaucguaggaauaaaugaguggucaggauauagcgggaguuuuguucagcauccagaacuaacagggcuggauuguauaagaccuugcuucuggguugaacuaaucagagggcgacccaaagagaacacaaucuggacuagcgggagcagcauauccuuuugugguguaaacagugacacuguggguuggucuuggccagacggugcugaguugccauuuaccauugacaaguaa

SEQ ID NO: 51614 - RNA, 1410 nt, Artificial Sequence; identical to SEQ ID NO: 51584
  derived and/or modified CDS sequence (wt) from neuraminidase__InfluenzaA__ADM32784

SEQ ID NO: 51615 - RNA, 1410 nt, Artificial Sequence; identical to SEQ ID NO: 50419
  derived and/or modified CDS sequence (wt) from neuraminidase__InfluenzaA__ADM32794

SEQ ID NO: 51616 - RNA, 1410 nt, Artificial Sequence
  derived and/or modified CDS sequence (wt) from neuraminidase__InfluenzaA__ADM32804
augaauccaaaccaaaagauaauaaccauugguucggucuguaugacaauuggaauggcuaacuuaauauuacaaauuggaaacauaaucucaauauggauuagccacucaauucaacuugggaaucaaaaucagauugaaacaugcaaucaaagcgucauuacuuaugaaaacaacacuuggguaaaucagacauauguuaacaucagcaacaccaacuuugcugcuggacagucagugguuuccgugaaauuagugggcaauuccucucucugcccuguuaguggaugggcuauauacaguaaagacaacaguguaagaaucgguuccaagggggauguguuugucauaagggaaccauucauaucaugcucccccuuggaaugcagaaccuucuucuugacucaaggggccuugcuaaaugacaaacauuccaauggaaccauuaaagacaggagcccauaucgaacccuaaugagcuguccuauuggugaaguucccucuccauacaacucaagauuugagucagucgcuuggucagcaagugcuugucaugauggcaucaauuggcuaacaauuggaauuucuggcccagacaauggggcaguggcuguguuaaaguacaacggcauaauaacagacacuaucaagaguuggagaaacaauauauugagaacacaagagucugaaugugcauguguaaaugguucuugcuuuacuguaaugaccgauggaccaaguaauggacaggccucauacaagaucuucagaauagaaaagggaaagauagucaaaucagucgaaaugaaugccccuaauuaucacuaugaggaaugcuccuguuauccugauucuagugaaaucacaugugugugcagagauaacuggcauggcucgaaucgaccgugggugucuuucaaccagaaucuggaauaucagauaggauacauaugcagugggauuuucggagacaauccacgcccuaaugauaagacaggcaguugugguccaguaucgucuaauggagcaaauggaguaaaaggauuuucauucaaauacggcaaugguguuuggauagggagaacuaaaagcauuaguucaagaaacgguuuugagaugauuugggauccgaacggauggacugggacagacaauaacuucucaauaaagcaagauaucguagaaauaaaugaguggucaggauauagcgggaguuuuguucagcauccagaacuaacagggcuggauuguauaagaccuugcuucuggguugaacuaaucagagggcgacccaaagagaacacaaucuggacuagcgggagcagcauauccuuuugugguguaaacagugacacuguggguuggucuuggccagacggugcugaguugccauuuaccauugacaaguaa

SEQ ID NO: 51617 - RNA, 1410 nt, Artificial Sequence
  derived and/or modified CDS sequence (wt) from neuraminidase__InfluenzaA__ADM32814
augaauccaaaccaaaagauaauaaccauugguucggucuguaugacaauuggaauggcuaacuuaauauuacaaauuggaaacauaaucucaauauggauuagccacucaauucaacuugggaaucaaaaucagguugaaacaugcaaucaaagcgucauuacuuaugaaaacaacacuuggguaaaucagacauauguuaacaucagcaacaccaacuuugcagcuggacagucagugguuuccgugaaauuagcgggcaauuccucucucugcccuguuaguggaugggcuauauacaguaaagacaacaguauaagaaucgguuccaagggggauguguuugucauaagggaaccauucauaucaugcucccccuuggaaugcagaaccuucuucuugacucaaggggccuugcuaaaugacaaacauuccaauggaaccauuaaagacaggagcccauaucgaacccuaaugagcuguccuauuggugaaguucccucuccauacaacucaagauuugagucagucgcuuggucagcaagugcuugucaugauggcaucaauuggcuaacaauuggaauuucuggcccagacaauggggcaguggcuguguuaaaguacaacggcauaauaacagacacuaucaagaguuggagaaacaauauauugagaacacaagagucugaaugugcauguguaaaugguucuugcuuuacuguaaugaccgauggaccaagugauggacaggccucauacaagaucuucagaauagaaaagggaaagauagucaaaucagucgaaaugaaugccccuaauuaucacuaugaggaaugcuccuguuauccugauucuagugaaaucacaugugugugcagggauaacuggcauggcucgaaucggccgugggugucuuucaaccagaaucuggaauaucagauaggauacauaugcagugggauuuucggagacaauccacgcccuaaugauaagacaggcaguugugguccaguaucgucuaauggagcaaauggaguaaaaggauuuucauucaaauacggcaaugguguuuggauagggagaacuaaaagcauuaguucaagaaacgguuuugagaugauuugggauccgaacggauggacugggacagacaauaacuucucaauaaagcaagauaucguaggaauaaaugaguggucaggauauagcgggaguuuuguucagcauccagaacuaacagggcuggauuguauaagaccuugcuucuggguugaacuaaucagagggcgacccaaagagaacacaaucuggacuagcgggagcagcauauccuuuugugguguaaacagugacacuguggguuggucuuggccagacggugcugaguugccauuuaccauugacaaguaa

SEQ ID NO: 51618 - RNA, 1410 nt, Artificial Sequence; identical to SEQ ID NO: 48750
  derived and/or modified CDS sequence (wt) from neuraminidase__InfluenzaA__ADM32824

SEQ ID NO: 51619 - RNA, 1410 nt, Artificial Sequence; identical to SEQ ID NO: 49973
  derived and/or modified CDS sequence (wt) from neuraminidase__InfluenzaA__ADM32834

SEQ ID NO: 51620 - RNA, 1410 nt, Artificial Sequence; identical to SEQ ID NO: 48749
  derived and/or modified CDS sequence (wt) from neuraminidase__InfluenzaA__ADM32844

SEQ ID NO: 51621 - RNA, 1410 nt, Artificial Sequence
  derived and/or modified CDS sequence (wt) from neuraminidase__InfluenzaA__ADM32854
augaauccaaaccaaaagauaauaaccauugguucggucuguacgacaauuggaauggcuaacuuaauauuacaaauuggaaacauaaucucaauauggauuagccacucaauucaauuugggaaucaaaaucagauugaaacaugcaaucaaagcgucauuacuuaugaaaacaacacuuggguaaaucagacauauguuaacaucagcaacaccaacuuugcugcuggacagucagugguuuccgugaaauuagugggcaauuccucucucugcccuguuaguggaugggcuauauacaguaaagacaacaguguaagaaucgguuccaagggggauguguuugucauaagggaaccauucauaucaugcucccccuuggaaugcagaaccuucuucuugacucaaggggccuugcuaaaugacaaacauuccaauggaaccauuaaagacaggagcccauaucgaacccuaaugagcuguccuauuggugaaguucccucuccauacaacucaagauuugagucagucgcuuggucagcaagugcuugucaugauggcaucaauuggcuaacaauuggaauuucuggcccagacaauggggcaguggcuguguuaaaguacaacggcauaauaacagacacuaucaagaguuggagaaacaauauauugagaacacaagagucugaaugugcauguguaaaugguucuugcuuuacuguaaugaccgauggaccaaguaauggacaggccucauacaagaucuucagaauagaaaagggaaagauagucaaaucagucgaaaugaaugccccuaauuaucacuaugaggaaugcuccuguuauccugauucuagugaaaucacaugugugugcagggauaacuggcauggcucgaaucgaccgugggugucuuucaaccagaaucuggaauaucagauaggauacauaugcagugggauuuucggagacaauccacgcccuaaugauaagacaggcaguugugguccaguaucgucuaauggagcaaauggaguaaaaggauuuucauucaaauacggcaaugguguuuggauagggagaacuaaaagcauuaguucaagaaacgguuuugagaugauuugggauccgaacggauggacugggacagacaauaacuucucaauaaagcaagauaucguaggaauaaaugaguggucaggauauagcgggaguuuuguucagcauccagaacuaacagggcuggauuguauaagaccuugcuucuggguugaacuaaucagagggcgacccaaagagaacacaaucuggacuagcgggagcagcauauccuuuugugguguaaacagugacacuguggguuggucuuggccagacggugcugaguugccauuuaccauugacaaguaa

SEQ ID NO: 51622 - RNA, 1410 nt, Artificial Sequence; identical to SEQ ID NO: 49380
  derived and/or modified CDS sequence (wt) from neuraminidase__InfluenzaA__ADM32864

SEQ ID NO: 51623 - RNA, 1410 nt, Artificial Sequence
  derived and/or modified CDS sequence (wt) from neuraminidase__InfluenzaA__ADM32874
augaauccaaaccaaaagauaauaaccauugguucggucuguaugacaauuggaauggcuaacuuaauauuacaaauuggaaacauaaucucaauauggauuagccacucaauucaacuugggaaucaaaaucagauugaaacaugcaaucaaagcgucauuacuuaugaaaacaacacuuggguaaaucagacauauguuaacaucagcaacaccaacuuugcugcuggacagucagugguuuccgugaaauuagcgggcaauuccucucucugcccuguuaguggaugggcuauauacaguaaagacaacaguauaagaaucgguuccaagggggauguguuugucauaagggaaccauucauaucaugcucccccuuggaaugcagaaccuucuucuugacucaaggggccuugcuaaaugacaaacauuccaauggaaccauuaaagacaggagcccauaucgaacacuaaugagcuguccuauuggugaaguucccucuccauacaacucaagauuugagucagucgcuuggucagcaagugcuugucaugauggcaucaauuggcuaacaauuggaauuucuggcccagacaauggggcaguggcuguguuaaaguacaacggcauaauaacagacacuaucaagaguuggagaaacaauauauugagaacacaagagucugaaugugcauguguaaaugguucuugcuuuacuguaaugaccgauggaccaagugauggacaggccucauacaagaucuucagaauagaaaagggaaagauagucaaaucagucgaaaugaaugccccuaauuaucacuaugaggaaugcuccuguuacccugauucuagugaaaucacaugugugugcagggauaacuggcauggcucgaaucgaccgugggugucuuucaaccagaaucuggaauaucagauaggauacauaugcagugggauuuucggagacaauccacgcccuaaugauaagacaggcaguugugguccaguaucgucuaauggagcaaauggaguaaaaggauuuucauucaaauacggcaaugguguuuggauagggagaacuaaaagcauuaguucaagaaacgguuuugagaugauuugggauccgaacggauggacugggacagacaauaacuucucaauaaagcaagauaucguaggaauaaaugaguggucaggauauagcgggaguuuuguucagcauccagaacuaacagggcuggauuguauaagaccuugcuucuggguugaacuaaucagagggcgacccaaagagaacacaaucuggacuagcgggagcagcauauccuuuugugguguaaacagugacacuguggguuggucuuggccagacggugcugaguugccauuuaccauugacaaguaa

SEQ ID NO: 51624 - RNA, 1410 nt, Artificial Sequence
  derived and/or modified CDS sequence (wt) from neuraminidase__InfluenzaA__ADM32884
augaauccaaaccaaaagauaauaaccauugguucggucuguaugacaauuggaauggcuaacuuaauauuacaaauuggaaacauaaucucaauauggauuagccacucaauucaacuugggaaucaaaaucagauugaaacaugcaaucaaagcgucauuacuuaugaaaacaacacuuggguaaaucagacauauguuaacaucagcaacaccaacuuugcuguuggacagucagugguuuccgugaaauuagcgggcaauuccucucucugcccuguuaguggaugggcuauauacaguaaagacaacaguauaagaaucgguuccaagggggauguguuugucauaagggaaccauucauaucaugcucccccuuggaaugcagaaccuucuucuugacucaaggggccuugcuaaaugacaaacauuccaauggaaccauuaaagacaggagcccauaucgaacccuaaugagcuguccuauuggugaaguucccucuccauacaacucaagauuugagucagucgcuuggucagcaagugcuugucaugauggcaucaauuggcuaacaauuggaauuucuggcccagacaauggggcaguggcuguguuaaaguacaacggcauaauaacagacacuaucaagaguuggagaaacaauauauugagaacacaagagucugaaugugcauguguaaaugguucuugcuuuacuguaaugaccgauggaccaagugauggacaggccucauacaagaucuucagaauagaaaagggaaagauagucaaaucagucgaaaugaaugccccuaauuaucacuaugaggaaugcuccuguuauccugauucuagugaaaucacaugugugugcagggauaacuggcauggcucgaaucgaccguggguaucuuucaaccagaaucuggaauaucagauaggauacauaugcagugggauuuucggagacaauccacgcccuaaugauaagacaggcaguugugguccaguaucgucuaauggagcaaauggaguaaaaggauuuucauucaaauacggcaaugguguuuggauagggagaacuaaaagcauuaguucaagaaacgguuuugagaugauuugggauccgaacggauggacugggacagacaauaaauucucaauaaagcaagauaucguaggaauaaaugaguggucaggauauagcgggaguuuuguucagcauccagaacuaacagggcuggauuguauaagaccuugcuucuggguugaacuaaucagagggcgacccaaagagaacacaaucuggacuagcgggagcagcauauccuuuugugguguaaacagugacacuguggguuggucuuggccagacggugcugaguugccauuuaccauugacaaguaa

SEQ ID NO: 51625 - RNA, 1410 nt, Artificial Sequence; identical to SEQ ID NO: 48750
  derived and/or modified CDS sequence (wt) from neuraminidase__InfluenzaA__ADM32921

SEQ ID NO: 51626 - RNA, 1410 nt, Artificial Sequence; identical to SEQ ID NO: 48750
  derived and/or modified CDS sequence (wt) from neuraminidase__InfluenzaA__ADM32931

SEQ ID NO: 51627 - RNA, 1410 nt, Artificial Sequence
  derived and/or modified CDS sequence (wt) from neuraminidase__InfluenzaA__ADM32941
augaauccaaaccaaaagauaauaaucauugguucggucuguaugacaauuggaauggcuaacuuaauauuacaaauuggaaacauuaucucaauauggauuagccacucaauucaacuugggaaucaaaaucagauugaaacaugcaaucaaagcgucauuacuuaugaaaacaacacuuggguaaaucagacauauguuaacaucagcaacaccaacuuugcugcuggacagucagugguuuccgugaaauuagcgggcaauuccucucucugcccuguuaguggaugggcuauauacaguaaagacaacaguauaagaaucgguuccaagggagauguguuugucauaagggaaccauucauaucaugcucccccuuggaaugcagaaccuucuucuugacucaaggggccuugcuaaaugacaaacauucuaauggaaccauuaaagacaggagcccauaucgaacccuaaugagcuguccuauuggugaaguucccucuccauacaacucaagauuugagucagucgcuuggucagcaagugcuugucaugauggcaucaauuggcuaacaauuggaauuucuggcccagacaauggggcaguggcuguguuaaaguacaacggcauaauaacagacacuaucaagaguuggagaaacaauauauugagaacacaagagucugaaugugcauguguaaaugguucuugcuuuacuguaaugaccgauggaccaagugauggacaggccucauacaagaucuucagaauagaaaagggaaagauagucaaaucagucgaaaugaaugccccuaauuaucacuaugaggaaugcuccuguuauccugauucuagugaaaucacaugugugugcagggauaacuggcauggcucgaaucgaccgugggugucuuucaaccagaaucuggaauaucagauaggauacauaugcagugggauuuucggagacaauccacgcccuaaugauaagacaggcaguugugguccaguaucgucuaauggagcaaauggaguaaaaggauuuucauucaaauacggcaaugguguuuggauagggagaacuaaaagcauuaauucaagaaacgguuuugagaugauuugggauccgaacggauggacugggacagacaauaacuucucaauaaagcaagauaucguaggaauaaaugaauggucaggauauagcgggaguuuuguucagcauccagaacuaacagggcuggauuguauaagaccuugcuucuggguugaacuaaucagagggcgacccaaagagaacacaaucuggacuagcgggagcagcauauccuuuugugguguaaacagugacacuguggguuggucuuggccagacggugcugaguugccauuuaccauugacaaguaa

SEQ ID NO: 51628 - RNA, 1410 nt, Artificial Sequence; identical to SEQ ID NO: 51501
  derived and/or modified CDS sequence (wt) from neuraminidase__InfluenzaA__ADM32951

SEQ ID NO: 51629 - RNA, 1410 nt, Artificial Sequence
  derived and/or modified CDS sequence (wt) from neuraminidase__InfluenzaA__ADM32960
augaauccaaaccaaaagauaauaaccauugguucggucuguaugacaauuggaauggcuaacuuaauauuacaaauuggaaacauaaucucaauauggauuagccacucaauucaacuugggaaucaaaaucagauugaaacaugcaaucaaagcgucauuacuuaugaaaacaacacuuggguaaaucagacauauguuaacaucagcaacaccaacuuugcugcuggacagucagugguuuccgugaaauuagcgggcaauucuucucucugcccuguuaguggaugggcuauauacaguaaagacaacaguguaagaaucgguuccaagggggauguguuugucauaagggaaccauucauaucaugcucccccuuggaaugcagaaccuucuucuugacucaaggggccuugcuaaaugacaaacauuccaauggaaccaucaaagacaggagcccauaucgaacccuaaugagcuguccuauuggugaaguucccucuccauacaacucaagauuugagucagucgcuuggucagcaagugcuugucaugauggcaucaauuggcuaacaauuggaauuucuggcccagacaauggggcaguggcuguguuaaaguacaacggcauaauaacagacacuaucaagaguuggagaaacaauauauugagaacacaagagucugaaugugcauguguaaaugguucuugcuucacuguaaugaccgauggaccaagugauggacaggccucauacaagaucuucagaauagaaaagggaaagauagucaaaucagucgaaaugaaugccccuaauuaucacuaugaggaaugcuccuguuauccugauucuagugaaaucacaugugugugcagggauaacuggcauggcucgaaucgaccguggguuucuuucaaccagaaucuggaauaucagauaggauacauaugcagugggauuuucggagacaauccacgcccuaaugauaagacaggcaguugugguccaguaucgucuaauggagcaaauggaguaaaaggauuuucauucaaauacggcaaugguguuuggauagggagaacuaaaagcauuaguucaagaaacgguuuugagaugauuugggauccgaacggauggacugggacagacaauaacuucucaauaaagcaagauaucguaggaauaaaugaguggucaggauauagcgggaguuuuguucagcauccagaacuaacagggcuggauuguauaagaccuugcuucuggguugaacuaaucagagggcgacccaaagagaacacaaucuggacuagcgggagcagcauauccuuuugugguguaaacagugacacuguggguuggucuuggccagacggugcugaguugccauuuaccauugacaaguaa

SEQ ID NO: 51630 - RNA, 1410 nt, Artificial Sequence
  derived and/or modified CDS sequence (wt) from neuraminidase__InfluenzaA__ADM32969
augaauccaaaccaaaagauaauaaccauugguucggucuguaugacaauuggaauggcuaacuuaauauuacaaauuggaaacauaaucucaauauggauuagccacucaauucaacuugggaaucaaaaucagauugaaacaugcaaucaaagcgucauuacuuaugaaaacaacacuuggguaaaucagacauauguuaacaucagcaacaccaacuuugcugcuggacagucagugguuuccgugaaauuagcgggcaauuccucucucugcccuguuaguggaugggcuauauacaguaaagacaacaguauaagaaucgguuccaagggggauguguuugucauaagggaaccauucauaucaugcucccccuuggaaugcagaaccuucuucuugacucaaggggccuugcuaaaugacaaacauuccaauggaaccauuaaagacaggagcccauaucgaacccuaaugagcuguccuauuggugaaguucccucuccauacaacucaagauuugagucagucgcuuggucagcaagugcuugucaugauggcaucaauuggcuaacaauuggaauuucuggcccagacaauggggcaguggcuguguuaaaguacaacggcauaauaacagacacuaucaagaguuggagaaacaauauauugagaacacaagagucugaaugugcauguguaaaugguucuugcuucacuguaaugaccgauggaccaagugauggacaggccucauacaagaucuucagaauagaaaagggaaagauagucaaaucagucgaaaugaaugccccuaauuaucacuaugaggaaugcuccuguuauccugauucuagugaaaucacaugugugugcagggauaacuggcauggcucgaaucgaccguggguuucuuucaaccagaaucuggaauaucagauaggauacauaugcagugggauuuucggagacaauccacgcccuaaugauaagacaggcaguugugguccaguaucgucuaauggagcaaauggaguaaaaggauuuucauucaaauacggcaaugguguuuggauagggagaacuaaaagcauuaguucaagaaacgguuuugagaugauuugggauccgaacggauggacugggacagacaauaacuucucaauaaagcaagauaucguaggaauaaaugaguggucaggauauagcgggaguuuuguucagcauccagaacuaacagggcuggauuguauaagaccuugcuucuggguugaacuaaucagagggcgacccaaagagaacacaaucuggacuagcgggagcagcauauccuuuugugguguaaacagugacacuguggguuggucuuggccagacggugcugaguugccauuuaccauugacaaguaa

SEQ ID NO: 51631 - RNA, 1410 nt, Artificial Sequence; identical to SEQ ID NO: 51630
  derived and/or modified CDS sequence (wt) from neuraminidase__InfluenzaA__ADM32979

SEQ ID NO: 51632 - RNA, 1410 nt, Artificial Sequence; identical to SEQ ID NO: 51505
  derived and/or modified CDS sequence (wt) from neuraminidase__InfluenzaA__ADM32988

SEQ ID NO: 51633 - RNA, 1410 nt, Artificial Sequence
  derived and/or modified CDS sequence (wt) from neuraminidase__InfluenzaA__ADM32997
augaauccaaaccaaaagauaauaaccauugguucggucuguaugacaauuggaauggcuaacuuaauauuacaaauuggaaacauaaucucaauauggauuagccacucaauucaacuugggaaucaaaaucagauugaaacaugcaaucaaagcgucauuacuuaugaaaacaacacuuggguaaaucagacauauguuaacaucagcaacaccaacuuugcugcuggacagucagugguuuccgugaaauuagcgggcaauuccucucucugcccuguuaguggaugggcuauauacaguaaagacaacaguauaagaaucgguuccaagggggauguguuugucauaagggaaccauucauaucaugcucccccuuggaaugcagaaccuucuucuugacucaaggggccuugcuaaaugacaaacauuccaauggaaccauuaaagacaggagcccauaucgaacccuaaugagcuguccuauuggugaaguucccucuccauacaacucaagauuugagucagucgcuuggucagcaagugcuugucaugauggcaucaauuggcuaacaauuggaauuucuggcccagacaauggggcaguggcuguguuaaaguacaacggcauaauaacagacacuaucaagaguuggagaaacaauauauugagaacacaagagucugaaugugcauguguaaaugguucuugcuuuacuguaaugaccgauggaccaagugauggacaggccucauacaagaucuucaaaauagaaaagggaaagauagucaaaucagucgaaaugaaugccccuaauuaucacuaugaggaaugcuccuguuauccugauucuagugaaaucacaugugugugcagggauaacuggcauggcucgaaucgaccgugggugucuuucaaccagaaucuggaauaucagauaggauacauaugcagugggauuuucggagacaauccacgcccuaaugauaagacaggcaguugugguccaguaucgucuaauggagcaaauggaguaaaaggauuuucauucaaauacggcaaugguguuuggauagggagaacuaaaagcauuaguucaagaaacgguuuugagaugauuugggauccgaacggauggacugggacagacaauaacuucucaauaaagcaagauaucguaggaauaaaugaguggucaggauauagcgggaguuuuguucagcauccagaacuaacagggcuggauuguauaagaccuugcuucuggguugaacuaaucagagggcgacccaaagagaacacaaucuggacuagcgggagcagcauauccuuuugugguguaaacagugacacuguggguuggucuuggccagacggugcugaguugccauuuaccauugacaaguaa

SEQ ID NO: 51634 - RNA, 1410 nt, Artificial Sequence
  derived and/or modified CDS sequence (wt) from neuraminidase__InfluenzaA__ADM33006
augaauccaaaccaaaagauaauaaccauugguucggucuguaugacaauuggaauggcuaacuuaauauuacaaauuggaaacauaaucucaauauggauuagccacucaauucaacuugggaaucaaaaucagauugaaacaugcaaucaaagcgucauuacuuaugaaaacaacacuuggguaaaucagacauauguuaacaucagcaacaccaacuuugcugcuggacagucagugguuuccgugaaauuagcgggcaauuccucucucugcccuguuaguggaugggcuauauacaguaaagacaacaguauaagaaucgguuccaagggggauguguuugucauaagggaaccauucauaucaugcucccccuuggaaugcagaaccuucuucuugacucaaggggccuugcuaaaugacaaacauuccaauggaaccauuaaagacaggagcccauaucgaacccuaaugagcuguccuauuggugaaguucccucuccauacaacucaagauuugagucagucgcuuggucagcaagugcuugucaugauggcaucaauuggcuaacaauuggaauuucuggcccagacaauggggcaguggcuguguuaaaguacaacggcauaauaacagacacuaucaagaguuggagaaacaauauauugagaacacaagagucugaaugugcauguguaaaugguucuugcuuuacuguaaugaccgauggaccaagugauggacaggccucauacaagaucuucagaauagaaaagggaaagauagucaaaucagucgaaaugaaugccccuaauuaucacuaugaggaaugcuccuguuauccugauucuagugaaaucacaugugugugcagggauaacuggcauggcucgaaucgaccgugggugucuuucaaccagaaucuggaauaucagauaggauacauaugcagugggauuuucggagacaauccacgcccuaaugauaagacaggcaguugugguccaguaucgucuaauggagcaaauggaguaaaaggauuuucauucaaauacggcaaugguguuuggauagggagaacuaaaagcauuaguucaagaaacgguuuugagaugauuugggauccgaacggauggacugggacagacaauaacuucucaauaaagcaagauauuguaggaauaaaugaguggucaggauauagcgggaguuuuguccagcauccagaacuaacagggcuggauuguauaagaccuugcuucuggguugaacuaaucagagggcgacccaaagagaacacaaucuggacuagcgggagcagcauauccuuuugugguguaaacagugacacuguggguuggucuuggccagacggugcugaguugccauuuaccauugacaaguaa

SEQ ID NO: 51635 - RNA, 1410 nt, Artificial Sequence; identical to SEQ ID NO: 51633
  derived and/or modified CDS sequence (wt) from neuraminidase__InfluenzaA__ADM33015

SEQ ID NO: 51636 - RNA, 1410 nt, Artificial Sequence
  derived and/or modified CDS sequence (wt) from neuraminidase__InfluenzaA__ADM33025
augaauccaaaccaaaagauaauaaccauugguucggucuguaugacaauuggaauggcuaacuuaauauuacaaauuggaaacauaaucucaauauggauuagccacucaauucaacuugggaaucaaaaucagauugaaacaugcaaucaaagcgucauuacuuaugaaaacaacacuuggguaaaucagacauauguuaacaucagcaacaccaacuuugcugcuggacagucagugguuuccgugaaauuagcgggcaauuccucucucugcccuguuaguggaugggcuauauacaguaaagacaacaguauaagaaucgguuccaagggggauguguuugucauaagggaaccauucauaucaugcucccccuuggaaugcagaaccuucuucuugacucaaggggccuuacuaaaugacaaacauuccaauggaaccauuaaagacaggagcccauaucgaacccuaaugagcuguccuauuggugaaguucccucuccauacaacucaagauuugagucagucgcuuggucagcaagugcuugucaugauggcaucaauuggcuaacaauuggaauuucuggcccagacaauggggcaguggcuguguuaaaguacaacggcauaauaacagacacuaucaagaguuggagaagcaauauauugagaacacaagagucugaaugugcauguguaaaugguucuugcuuuacuguaaugaccgauggaccaagugauggacaggccucauacaagaucuucagaauagaaaagggaaagauagucaaaucagucgaaaugaaugccccuaauuaucacuaugaggaaugcuccuguuauccugauucuagugaaaucacaugugugugcagggauaacuggcauggcucaaaucgaccgugggugucuuucaaccagaaucuggaauaucagauaggauacauaugcagugggauuuucggagacaauccacguccuaaugauaagacaggcaguugugguccaguaucgucuaauggagcaaauggaguaaaaggauuuucauucaaauacggcaaugguguuuggauagggagaacuaaaagcauuaguucaagaaacgguuuugagaugauuugggauccgaacggauggacugggacagacaauaacuucucaauaaagcaagauaucguaggaauaaaugaguggucaggauauagcgggaguuuuguccagcauccagaacuaacagggcuggauuguauaagaccuugcuucuggguugaacuaaucagagggcgacccaaagagaacacaaucuggacuagcgggagcagcauauccuuuugugguguaaacagugacacuguggguuggucuuggccagacggugcugaguugccauuuaccauugacaaguaa

SEQ ID NO: 51637 - RNA, 1410 nt, Artificial Sequence; identical to SEQ ID NO: 48750
  derived and/or modified CDS sequence (wt) from neuraminidase__InfluenzaA__ADM33042

SEQ ID NO: 51638 - RNA, 1410 nt, Artificial Sequence; identical to SEQ ID NO: 51521
  derived and/or modified CDS sequence (wt) from neuraminidase__InfluenzaA__ADM33062

SEQ ID NO: 51639 - RNA, 1410 nt, Artificial Sequence
  derived and/or modified CDS sequence (wt) from neuraminidase__InfluenzaA__ADM33071
augaauccaaaccaaaagauaauaaccauugguucggucuguaugacaauuggaauggcuaacuuaauauuacaaauuggaaacauaaucucaauauggauuagccacucaauucaacuugggaaucaaaaucagauugaaacaugcaaucaaagcgucauuacuuaugaaaacaacacuuggguaaaucagacauauguuaacaucagcaacaccaacuuugcugcuggacagucagugguuuccgugaaauuagcgggcaauuccucucucugcccuguuaguggaugggcuauauacaguaaagacaacaguauaagaaucgguuccaagggggauguguuugucauaagggaaccauucauaucaugcucccccuuggaaugcagaaccuucuucuugacucaaggggccuugcuaaaugacaaacauuccaauggaaccauuaaagacaggagcccauaucgaacccuaaugagcuguccuauuggugaaguucccuccccauacaacucaagauuugagucagucgcuuggucagcaagugcuugucaugauggcaucaauuggcuaacaauuggaauuucuggcccagacaauggggcaguggcuguguuaaaguacaacggcauaauaacagacacuaucaagaguuggagaaacaauauauugagaacacaagagucugaaugugcauguguaaaugguucuugcuuuacuguaaugaccgauggaccaagugauggacaggccucauacaagaucuucagaauagaaaagggaaagauagucaaaucagucgaaaugaaugccccuaauuaucacuaugaggaaugcuccuguuauccugauucuaguaaaaucacaugugugugcagggauaacuggcauggcucgaaucgaccgugggugucuuucaaccagaaucuggaauaucagauaggauacauaugcagugggauuuucggagacaauccacgcccuaaugauaagacaggcaguugugguccaguaucgucuaauggagcaaauggaguaaaaggauuuucauucaaauacggcaaugguguuuggauagggagaacuaaaagcauuaguucaagaaacgguuuugagaugauuugggauccgaacggauggacugggacagacaauaacuucucaauaaagcaagauaucguaggaauaaaugaguggucaggauauagcgggaguuuuguucagcauccagaacuaacagggcuggauuguauaagaccuugcuucuggguugaacuaaucagagggcgacccaaagagaacacaaucuggacuagcgggagcagcauauccuuuugugguguaaacggugacacuguggguuggucuuggccagacggugcugaguugccauuuaccauugacaaguaa

SEQ ID NO: 51640 - RNA, 1410 nt, Artificial Sequence; identical to SEQ ID NO: 51521
  derived and/or modified CDS sequence (wt) from neuraminidase__InfluenzaA__ADM33081

SEQ ID NO: 51641 - RNA, 1410 nt, Artificial Sequence
  derived and/or modified CDS sequence (wt) from neuraminidase__InfluenzaA__ADM33091
augaauccaaaccaaaagauaauaaccauugguucggucuguaugacaauuggaauggcuaacuuaauauuacaaauuggaaacauaaucucaauauggauuagccacucaauucaacuugggaaucaaaaucagauugaaacaugcaaucaaagcgucauuacuuaugaaaacaacacuuggauaaaucagacauauguuaacaucagcaacaccaacuuugcugcuggacagucagugguuuccgugaaauuagcgggcaauuccucucucugcccuguuaguggaugggcuauauacaguaaagacaacaguauaagaaucgguuccaagggggauguguuugucauaagggaaccauucauaucaugcucccccuuggaaugcagaaccuucuucuugacucaaggggccuugcuaaaugacaaacauuccaauggaaccauuaaagacaggagcccauaucgaacccuaaugagcuguccuauuggugaaguccccucuccauacaacucaagauuugagucagucgcuuggucagcaagugcuugucaugauggcaucaauuggcuaacaauuggaauuucuggcccagacaauggggcaguggcuguguuaaaguacaacggcauaauaacagacacuaucaagaguuggagaaacaauauauugagaacacaagagucugaaugugcguguguaaaugguucuugcuuuacuguaaugaccgauggaccaagugauggacaggccucauacaaaaucuucagaauagaaaagggaaagauaguuaaaucagucgaaaugaaugccccuaauuaucacuaugaggaaugcuccuguuauccugauucuagugaaaucacaugugugugcagggauaacuggcauggcucgaaucgaccgugggugucuuucaaccagaaucuggaauaucagauaggauacauaugcagugggauuuucggagacaauccacgcccuaaugauaagacaggcaguugugguccaguaucgucuaauggagcaaauggaguaaaaggauuuucauucaaauacggcaaugguguuuggauagggagaacuaaaagcauuaguucaagaaacgguuuugagaugauuugggauccgaacggauggacugggacagacaauaacuucucaauaaagcaagauaucguaggaauaaaugaauggucaggauauagcgggaguuuuguucagcauccagaacuaacagggcuggauuguauaagaccuugcuucuggguugaacuaaucagagggcgacccaaagagaacacaaucuggacuagcgggagcagcauauccuuuugugguguaaacagugacacuguggguuggucuuggccagacggugcugaguugccauuuaccauugacaaguaa

SEQ ID NO: 51642 - RNA, 1410 nt, Artificial Sequence; identical to SEQ ID NO: 51641
  derived and/or modified CDS sequence (wt) from neuraminidase__InfluenzaA__ADM33101

SEQ ID NO: 51643 - RNA, 1410 nt, Artificial Sequence; identical to SEQ ID NO: 51641
  derived and/or modified CDS sequence (wt) from neuraminidase__InfluenzaA__ADM33111

SEQ ID NO: 51644 - RNA, 1410 nt, Artificial Sequence
  derived and/or modified CDS sequence (wt) from neuraminidase__InfluenzaA__ADM33121
augaauccaaaccaaaagauaauaaccauugguucggucuguaugacaauuggaauggcuaacuuaauauuacaaauuggaaacauaaucucaauauggauuagccacucaauucaacuugggaaucaaaaucagauugaaacaugcaaucaaagcgucauuacuuaugaaaacaacacuuggguaaaucagacauauguuaacaucagcaacaccaacuuugcugcuggacagucagugguuuccgugaaauuagcgggcaauuccucucucugcccuguuaguggaugggcuauauacaguaaagacaacaguauaagaaucgguuccaagggggauguguuugucauaagggaaccauucauaucaugcucucccuuggaaugcagaaccuucuucuugacucaaggggccuugcuaaaugacaaacauuccaauggaaccauuaaagacaggagcccauaucgaacccuaaugagcuguccuauuggugaaguucccucuccauacaacucaagauuugagucagucgcuuggucagcaagugcuugucaugauggcaucaauuggcuaacaauuggaauuucuggcccagacaauggggcaguggcuguguuaaaguacaacggcauaauaacagacacuaucaagaguuggagaaacaauauauugagaacacaagagucugaaugugcauguguaaaugguucuugcuuuacuguaaugaccgauggaccaagugauggacaggccucauacaagaucuucagaauagaaaagggaaagauagucaaaucagucgaaaugaaugccccuaauuaucacuaugaggaaugcuccuguuauccugauucuagugaaaucacauguguaugcagggauaacuggcauggcucgaaucgaccgugggugucuuucaaccagaaucuggaauaucagauaggauacauaugcagugggauuuucggagacaauccacgcccuaaugauaagacaggcaguugugguccaguaucgucuaauggagcaaauggaguaaaaggauuuucauucaaauacggcaaugguguuuggauagggagaacuaaaagcauuaguucaagaaacgguuuugagaugauuugggauccgaacggauggacugggacagacaauaacuucucaauaaagcaagauaucguaggaauaaaugaguggucaggauauagcgggaguuuuguucagcauccagaacuaacagggcuggauuguauaagaccuugcuucuggguugaacuaaucagagggcgacccaaagagaacacaaucuggacuagcgggagcagcauauccuuuugugguguaaacagugacacuguggguuggucuuggccagacggugcugaguugccauuuaccauugacaaguaa

SEQ ID NO: 51645 - RNA, 1410 nt, Artificial Sequence; identical to SEQ ID NO: 51644
  derived and/or modified CDS sequence (wt) from neuraminidase__InfluenzaA__ADM33130

SEQ ID NO: 51646 - RNA, 1410 nt, Artificial Sequence; identical to SEQ ID NO: 51644
  derived and/or modified CDS sequence (wt) from neuraminidase__InfluenzaA__ADM33139

SEQ ID NO: 51647 - RNA, 1410 nt, Artificial Sequence; identical to SEQ ID NO: 51644
  derived and/or modified CDS sequence (wt) from neuraminidase__InfluenzaA__ADM33149

SEQ ID NO: 51648 - RNA, 1410 nt, Artificial Sequence; identical to SEQ ID NO: 51644
  derived and/or modified CDS sequence (wt) from neuraminidase__InfluenzaA__ADM33159

SEQ ID NO: 51649 - RNA, 1410 nt, Artificial Sequence; identical to SEQ ID NO: 49215
  derived and/or modified CDS sequence (wt) from neuraminidase__InfluenzaA__ADM33169

SEQ ID NO: 51650 - RNA, 1410 nt, Artificial Sequence; identical to SEQ ID NO: 49215
  derived and/or modified CDS sequence (wt) from neuraminidase__InfluenzaA__ADM33179

SEQ ID NO: 51651 - RNA, 1410 nt, Artificial Sequence; identical to SEQ ID NO: 51644
  derived and/or modified CDS sequence (wt) from neuraminidase__InfluenzaA__ADM33188

SEQ ID NO: 51652 - RNA, 1410 nt, Artificial Sequence; identical to SEQ ID NO: 51644
  derived and/or modified CDS sequence (wt) from neuraminidase__InfluenzaA__ADM33197

SEQ ID NO: 51653 - RNA, 1410 nt, Artificial Sequence; identical to SEQ ID NO: 48750
  derived and/or modified CDS sequence (wt) from neuraminidase__InfluenzaA__ADM33206

SEQ ID NO: 51654 - RNA, 1410 nt, Artificial Sequence; identical to SEQ ID NO: 48750
  derived and/or modified CDS sequence (wt) from neuraminidase__InfluenzaA__ADM33215

SEQ ID NO: 51655 - RNA, 1410 nt, Artificial Sequence; identical to SEQ ID NO: 48750
  derived and/or modified CDS sequence (wt) from neuraminidase__InfluenzaA__ADM33224

SEQ ID NO: 51656 - RNA, 1410 nt, Artificial Sequence; identical to SEQ ID NO: 48750
  derived and/or modified CDS sequence (wt) from neuraminidase__InfluenzaA__ADM33234

SEQ ID NO: 51657 - RNA, 1410 nt, Artificial Sequence; identical to SEQ ID NO: 49196
  derived and/or modified CDS sequence (wt) from neuraminidase__InfluenzaA__ADM33243

SEQ ID NO: 51658 - RNA, 1410 nt, Artificial Sequence; identical to SEQ ID NO: 48750
  derived and/or modified CDS sequence (wt) from neuraminidase__InfluenzaA__ADM33253

SEQ ID NO: 51659 - RNA, 1410 nt, Artificial Sequence; identical to SEQ ID NO: 49196
  derived and/or modified CDS sequence (wt) from neuraminidase__InfluenzaA__ADM33262

SEQ ID NO: 51660 - RNA, 1410 nt, Artificial Sequence
  derived and/or modified CDS sequence (wt) from neuraminidase__InfluenzaA__ADM33272
augaauccaaaccaaaagauaauaaccauugguucggucuguaugacaauuggaauggcuaacuuaauauuacaaauuggaaacauaaucucaauauggauuagccacucaauucaacuugggaaucaaaaucagauugaaacaugcaaucaaagcgucauuacuuaugaaaacaacacuuggguaaaucagacauauguuaacaucagcaacaccaacuuugcugcuggacagucagugguuuccgugaaauuagcgggcaauuccucucucugcccuguugguggaugggcuauauacaguaaagacaacaguguaagaaucgguuccaagggggauguguuugucauaagggaaccauucauaucaugcucccccuuggaaugcagaaccuucuucuugacucaaggggccuugcuaaaugacaaacauuccaauggaaccauuaaagacaggagcccauaucgaacccuaaugagcuguccuauuggugaaguucccucuccauacaacucaagauuugagucagucgcuuggucagcaagugcuugucaugauggcaucaauuggcuaacaauuggaauuucuggcccagacaauggggcaguggcuguguuaaaguacaacggcauaauaacagacacuaucaagaguuggagaaacaauauauugagaacacaagagucugaaugugcauguguaaaugguucuugcuuuacuguaaugaccgauggaccaaguaauggacaggccucauacaagaucuucagaauagaaaagggaaagauagucaaaucagucgaaaugaaugccccuaauuaucacuaugaggaaugcuccuguuauccugauucuagugaaaucacaugugugugcagggauaacuggcauggcucgaaucgaccgugggugucuuucaaccagaaucuggaauaucagauaggauacauaugcagugggauuuucggagacaauccacgcccuaaugauaagacaggcaguugugguccaguaucgucuaauggagcaaauggaguaaaaggauuuucauucaaauacggcaaugguguuuggauagggagaacuaaaagcauuaguucaagaaacgguuuugagaugauuugggauccgaacggauggacugggacagacaauaacuucucaauaaagcaagauaucguaggaauaaaugaguggucaggauauagcgggaguuuuguucagcauccagaacuaacagggcuggauuguauaagaccuugcuucuggguugaacuaaucagggggcgacccaaagagaacacaauuuggacuagcgggagcagcauauccuuuugugguguaaacagugacacuguggguuggucuuggccagacggugcugaguugccauuuaccauugacaaguaa

SEQ ID NO: 51661 - RNA, 1410 nt, Artificial Sequence; identical to SEQ ID NO: 48780
  derived and/or modified CDS sequence (wt) from neuraminidase__InfluenzaA__ADM33282

SEQ ID NO: 51662 - RNA, 1410 nt, Artificial Sequence; identical to SEQ ID NO: 48814
  derived and/or modified CDS sequence (wt) from neuraminidase__InfluenzaA__ADM33292

SEQ ID NO: 51663 - RNA, 1410 nt, Artificial Sequence; identical to SEQ ID NO: 48750
  derived and/or modified CDS sequence (wt) from neuraminidase__InfluenzaA__ADM33302

SEQ ID NO: 51664 - RNA, 1410 nt, Artificial Sequence
  derived and/or modified CDS sequence (wt) from neuraminidase__InfluenzaA__ADM33312
augaauccaaaccaaaagauaauaaccauugguucggucuguaugacaauuggaauggcuaacuuaauauuacaaauuggaaacauaaucucaauauggauuagccacucaauucaacuugggaaucaaaaucagauugaaacaugcaaucaaagcgucauuacuuaugaaaacaacacuuggguaaaucagacauauguuaacaucagcaacaccaacuuugcugcuggacagucagugguuuccgugaaauuagcgggcaauuccucucucugcccuguuaguggaugggcuauauacaguaaagacaacaguguaagaaucgguuccaagggggauguguuugucauaagggaaccauucauaucaugcucccccuuggaaugcagaaccuucuucuugacucaaggggccuugcuaaaugacaaacauuccaauggaaccauuaaagacaggagcccauaucgaacccuaaugagcuguccuauuggugaaguucccucuccauacaacucaagauuugagucagucgcuuggucagcaagugcuugucaugauggcaucaauuggcuaacaauuggaauuucuggcccagacaauggggcaguggcuguguuaaaguacaacggcauaauaacagacacuaucaagaguuggagaaacaauauauugagaacacaagaaucugaaugugcauguguaaaugguucuugcuuuacuguaaugaccgauggaccaaguaauggacaggccucauacaagaucuucagaauagaaaagggaaagauagucaaaucagucgaaaugaaugccccuaauuaucacuaugaggaaugcuccuguuauccugauucuagugaaaucacaugugugugcagggauaacuggcauggcucgaaucgaccgugggugucuuucaaccagaaucuggaauaucagauaggauacauaugcagugggauuuucggagacaauccacgcccuaaugauaagacaggcaguugugguccaguaucgucuaauggagcaaauggaguaaaaggauuuucauucaaauacggcaaugguguuuggauagggagaacuaaaagcauuaguucaagaaacgguuuugagaugauuugggauccgaacggauggacugggacagacaauaacuucucaauaaagcaagauaucguaggaauaaaugaguggucaggauauagcgggaguuuuguucagcauccagaacuaacagggcuggauuguauaagaccuugcuucuggguugaacuaaucagagggcgacccaaagagaacacaaucuggacuagcgggagcagcauauccuuuugugguguaaacagugacacuguggguuggucuuggccagacggugcugaguugccauuuaccauugacaaguaa

SEQ ID NO: 51665 - RNA, 1410 nt, Artificial Sequence; identical to SEQ ID NO: 48780
  derived and/or modified CDS sequence (wt) from neuraminidase__InfluenzaA__ADM33322

SEQ ID NO: 51666 - RNA, 1410 nt, Artificial Sequence; identical to SEQ ID NO: 48780
  derived and/or modified CDS sequence (wt) from neuraminidase__InfluenzaA__ADM33332

SEQ ID NO: 51667 - RNA, 1410 nt, Artificial Sequence
  derived and/or modified CDS sequence (wt) from neuraminidase__InfluenzaA__ADM33342
augaauccaaaccaaaagauaauaaccauugguucggucuguaugacaauuggaauggcuaacuuaauauuacaaauuggaaacauaaucucaauauggauuagccacucaauucaacuugggaaucaaaaucagauugaaacaugcaaucaaagcgucauuacuuaugaaaacaacacuuggguaaaucagacauauguuaacaucagcaacaccaacuuugcugcuggacaaucagugguuuccgugaaauuagcaggcaauuccucucucugcccuguugguggaugggcuauauacaguaaagacaacaguguaagaaucgguuccaagggggauguguuugucauaagggaaccauucauaucaugcucccccuuggaaugcagaaccuucuucuugacucaaggggccuugcuaaaugacaaacauuccaauggaaccauuaaagacaggagcccauaucgaacccuaaugagcuguccuauuggugaaguucccucuccauacaacucaagauuugagucagucgcuuggucagcaagugcuugucaugauggcaucaauuggcuaacaauuggaauuucuggcccagacaauggggcaguggcuguguuaaaguacaacggcauaauaacagacacuaucaagaguuggagaaacaauauauugagaacacaagagucugaaugugcauguguaaaugguucuugcuuuacuguaaugaccgauggaccaaguaauggacaggccucauacaagaucuucagaauagaaaagggaaagauagucaaaucagucgaaaugaaugccccuaauuaucacuaugaggaaugcuccuguuauccugauucuagugaaaucacaugugugugcagggauaacuggcauggcucgaaucgaccgugggugucuuucaaccagaaucuggaauaucagauaggauacauaugcagugggauuuucggagacaauccacgcccuaaugauaagacaggcaguugugguccaguaucgucuaauggagcaaauggaguaaaaggauuuucauucaaauacggcaaugguguuuggauagggagaacuaaaagcauuaguucaagaaacgguuuugagaugauuugggauccgaacggauggacugggacagacaauaacuucucaauaaagcaagauaucguaggaauaaaugaguggucaggauauagcgggaguuuuguucagcauccagaacuaacagggcuggauuguauaagaccuugcuucuggguugaacuaaucagagggcgacccaaagagaacacaaucuggacuagcgggagcagcauauccuuuugugguguaaacagugacacuguggguuggucuuggccagacggugcugaguugccauuuaccauugacaaguaa

SEQ ID NO: 51668 - RNA, 1410 nt, Artificial Sequence
  derived and/or modified CDS sequence (wt) from neuraminidase__InfluenzaA__ADM33367
augaauccaaaccaaaagauaauaaccauugguucggucuguaugacaauuggaauggcuaacuuaauauuacaaauuggaaacauaaucucaauauggauuagccacucaauucaacuugggaaucaaaaucagauugaaacaugcaaucaaagcgucguuacuuaugaaaacaacacuuggguaaaucagacauauguuaacaucagcaacaccaacuuugcugcuggacagucagugguuuccgugaaauuagcgggcaauuccucucucugcccuguugguggaugggcuauauacaguaaagacaacaguguaagaaucgguuccaagggggauguguuugucauaagggaaccauucauaucaugcucccccuuggaaugcagaaccuucuucuugacucaaggggccuugcuaaaugacaaacauuccaauggaaccauuaaagacaggagcccauaucgaacccuaaugagcuguccuauuggugaaguucccucuccauacaacucaagauuugagucagucgcuuggucagcaagugcuugucaugauggcaucaauuggcuaacaauuggaauuucuggcccagacaauggggcaguggcuguguuaaaguacaacggcauaauaacagacacuaucaagaguuggagaaacaauauauugagaacacaagagucugaaugugcauguguaaaugguucuugcuuuacuguaaugaccgauggaccaaguaauggacaggccucauacaagaucuucagaauagaaaagggaaagauagucaaaucagucgaaaugaaugccccuaauuaucacuaugaggaaugcuccuguuauccugauucuagugaaaucacaugugugugcagggauaacuggcauggcucgaaucgaccgugggugucuuucaaccagaaucuggaauaucagauaggauacauaugcagugggauuuucggagacaauccacgcccuaaugauaagacaggcaguugugguccaguaucgucuaauggagcaaauggaguaaaaggauuuucauucaaauacggcaaugguguuuggauagggagaacuaaaagcauuaguucaagaaacgguuuugagaugauuugggauccgaacggauggacugggacagacaauaacuucucaauaaagcaagauaucguaggaauaaaugaguggucaggauauagcgggaguuuuguucagcauccagaacuaacagggcuggauuguauaagaccuugcuucuggguugaacuaaucagagggcgacccaaagagaacacaaucuggacuagcgggagcagcauauccuuuugugguguaaacagugacacuguggguuggucuuggccagacggugcugaguugccauuuaccauugacaaguaa

SEQ ID NO: 51669 - RNA, 1410 nt, Artificial Sequence; identical to SEQ ID NO: 48780
  derived and/or modified CDS sequence (wt) from neuraminidase__InfluenzaA__ADM33377

SEQ ID NO: 51670 - RNA, 1410 nt, Artificial Sequence; identical to SEQ ID NO: 48780
  derived and/or modified CDS sequence (wt) from neuraminidase__InfluenzaA__ADM33387

SEQ ID NO: 51671 - RNA, 1410 nt, Artificial Sequence; identical to SEQ ID NO: 48814
  derived and/or modified CDS sequence (wt) from neuraminidase__InfluenzaA__ADM33397

SEQ ID NO: 51672 - RNA, 1410 nt, Artificial Sequence; identical to SEQ ID NO: 48814
  derived and/or modified CDS sequence (wt) from neuraminidase__InfluenzaA__ADM33407

SEQ ID NO: 51673 - RNA, 1410 nt, Artificial Sequence; identical to SEQ ID NO: 48780
  derived and/or modified CDS sequence (wt) from neuraminidase__InfluenzaA__ADM33417

SEQ ID NO: 51674 - RNA, 1410 nt, Artificial Sequence; identical to SEQ ID NO: 49772
  derived and/or modified CDS sequence (wt) from neuraminidase__InfluenzaA__ADM33427

SEQ ID NO: 51675 - RNA, 1410 nt, Artificial Sequence
  derived and/or modified CDS sequence (wt) from neuraminidase__InfluenzaA__ADM33437
augaauccaaaccaaaagauaauaaccauugguucggucuguaugacaauuggaauggcuaacuuaauauuacaaauuggaaacauaaucucaauauggauuagccacucaauucaacuugggaaucaaaaucagauugaaacaugcaaucaaagcgucauuacuuaugaaaacaacacuuggguaaaucagacauauguuaacaucagcaacaccaacuuugcugcuggacagucagugguuuccgugaaauuagcgggcaauuccucucucugcccuguuaguggaugggcuauauacaguaaagacaacaguauaagaaucgguuccaagggggauguguuugucauaagggaaccauucauaucaugcucccccuuggaaugcagaaccuucuucuugacucaaggggccuugcuaaaugacaaacauuccaauggaaccauuaaagacaggagcccauaucgaacccuaaugagcuguccuauuggugaaguucccucugcauacaacucaagauuugagucagucgcuuggucagcaagugcuugucaugauggcaucaauuggcuaacaauuggaauuucuggcccagacaauggggcaguggcuguguuaaaguacaacggcauaauaacagacacuaucaagaguuggagaaacaauauauugagaacacaagagucugaaugugcauguguaaaugguucuugcuuuacuguaaugaccgauggaccaagugauggacaggccucauacaagaucuucagaauagaaaagggaaagauagucaaaucagucgaaaugaaugccccuaauuaucacuaugaggaaugcuccuguuauccugauucuagugaaaucacaugugugugcagggauaacuggcauggcucgaaucgaccgugggugucuuucaaccagaaucuggaauaucagauaggauacauaugcagugggauuuucggagacaauccacgcccuaaugauaagacaggcaguugugguccaguaucgucuaauggagcaaauggaguaaaaggauuuucauucaaauacggcaaugguguuuggauagggagaacuaaaagcauuaguucaagaaacgguuuugagaugauuugggauccgaacggauggacugggacagacaauaacuucucaauaaagcaagauaucguaggaauaaaugaguggucaggauauagcgggaguuuuguucagcauccagaacuaacagggcuggauuguauaagaccuugcuucuggguugaacuaaucagagggcgacccaaagagaacacaaucuggacuagcgggagcagcauauccuuuugugguguaaacagugacacuguggguuggucuuggccagacggugcugaguugccauuuaccauugacaaguaa

SEQ ID NO: 51676 - RNA, 1410 nt, Artificial Sequence; identical to SEQ ID NO: 49157
  derived and/or modified CDS sequence (wt) from neuraminidase__InfluenzaA__ADM33443

SEQ ID NO: 51677 - RNA, 1410 nt, Artificial Sequence; identical to SEQ ID NO: 50708
  derived and/or modified CDS sequence (wt) from neuraminidase__InfluenzaA__ADM52446

SEQ ID NO: 51678 - RNA, 1410 nt, Artificial Sequence; identical to SEQ ID NO: 51060
  derived and/or modified CDS sequence (wt) from neuraminidase__InfluenzaA__ADM52456

SEQ ID NO: 51679 - RNA, 1410 nt, Artificial Sequence; identical to SEQ ID NO: 51534
  derived and/or modified CDS sequence (wt) from neuraminidase__InfluenzaA__ADM52466

SEQ ID NO: 51680 - RNA, 1410 nt, Artificial Sequence; identical to SEQ ID NO: 48750
  derived and/or modified CDS sequence (wt) from neuraminidase__InfluenzaA__ADM52486

SEQ ID NO: 51681 - RNA, 1410 nt, Artificial Sequence; identical to SEQ ID NO: 48749
  derived and/or modified CDS sequence (wt) from neuraminidase__InfluenzaA__ADM52496

SEQ ID NO: 51682 - RNA, 1410 nt, Artificial Sequence; identical to SEQ ID NO: 48750
  derived and/or modified CDS sequence (wt) from neuraminidase__InfluenzaA__ADM52506

SEQ ID NO: 51683 - RNA, 1410 nt, Artificial Sequence; identical to SEQ ID NO: 49380
  derived and/or modified CDS sequence (wt) from neuraminidase__InfluenzaA__ADM52516

SEQ ID NO: 51684 - RNA, 1410 nt, Artificial Sequence; identical to SEQ ID NO: 48749
  derived and/or modified CDS sequence (wt) from neuraminidase__InfluenzaA__ADM52527

SEQ ID NO: 51685 - RNA, 1410 nt, Artificial Sequence
  derived and/or modified CDS sequence (wt) from neuraminidase__InfluenzaA__ADM52537
augaauccaaaccaaaagauaauaaccauugguucggucuguaugacaauuggaauggcuaacuuaauauuacaaauuggaaacauaaucucaauauggauuagccacucaauucaacuugggaaucaaaaucagauugaaacaugcaaucaaagcgucauuacuuaugaaaacaacacuuggguaaaucagacauauguuaacaucagcaacaccaacuuugcugcuggacagucagugguuuccgugaaauuagugggcaauuccucucucugcccuguuaguggaugggcuauauacaguaaagacaacaguguaagaaucgguuccaagggggauguguuugucauaagggaaccauucauaucaugcucccccuuggaaugcagaaccuucuucuugacucaaggggccuugcuaaaugacaaacauuccaauggaaccauuaaagacaggagcccauaucgaacccuaaugagcuguccuauuggugaaguucccucuccauacaacucaagauuugagucagucgcuuggucagcaagugcuugucaugauggcaucaauuggcuaacaauuggaauuucuggcccagacaauggggcaguggcuguguuaaaguacaacggcauaauaacagacacuaucaagaguuggagaaacaauauauugaggacacaagagucugaaugugcauguguaaaugguucuugcuuuacuguaaugaccgauggaccaaguaauggacaggccucauacaagaucuucagaauagaaaagggaaagauagucaaaucagucgaaaugaaugccccuaauuaucacuaugaggaaugcuccuguuauccugauucuagugaaaucacaugugugugcagggauaacuggcauggcucgaaucgaccgugggugucuuucaaccagaaucuggaauaucagauaggauacauaugcagugggauuuucggagacaauccacgcccuaaugauaagacaggcaguugugguccaguaucgucuaauggagcaaauggaguaaaaggauuuucauucaaauacggcaaugguguuuggauagggagaacuaaaagcauuaguucaagaaacgguuuugagaugauuugggauccgaacggauggacugggacagacaauaacuucucaauaaagcaagauaucguaggaauaaaugaguggucaggauauagcgggaguuuuguucagcauccagaacuaacagggcuggauuguauaagaccuugcuucuggguugaacuaaucagagggcgacccaaagagaacacaaucuggacuagcgggagcagcauauccuuuugugguguaaacagugacacuguggguuggucuuggccagacggugcugaguugccauuuaccauugacaaguaa

SEQ ID NO: 51686 - RNA, 1410 nt, Artificial Sequence; identical to SEQ ID NO: 50474
  derived and/or modified CDS sequence (wt) from neuraminidase__InfluenzaA__ADM52547

SEQ ID NO: 51687 - RNA, 1410 nt, Artificial Sequence; identical to SEQ ID NO: 48749
  derived and/or modified CDS sequence (wt) from neuraminidase__InfluenzaA__ADM52557

SEQ ID NO: 51688 - RNA, 1410 nt, Artificial Sequence; identical to SEQ ID NO: 49380
  derived and/or modified CDS sequence (wt) from neuraminidase__InfluenzaA__ADM52567

SEQ ID NO: 51689 - RNA, 1410 nt, Artificial Sequence
  derived and/or modified CDS sequence (wt) from neuraminidase__InfluenzaA__ADM52577
augaauccaaaccaaaagauaauaaccauugguucggucuguaugacaauuggaauggcuaacuuaauauuacaaauuggaaacauaaucucaauauggauuagccacucaauucaacuugggaaucaaaaucagauugaaacaugcaaucaaagcgucauuacuuaugaaaacaacacuuggguaaaucagacauauguuaacaucagcaacaccaacuuugcugcuggacagucagugguuuccgugaaauuagcgggcaauuccucucucugcccuguuaguggaugggcuauauacaguaaagacaacaguguaagaaucgguuccaagggggauguguuugucauaagggaaccauucauaucaugcucccccuuggaaugcagaaccuucuucuugacucaaggggccuugcuaaaugacaaacauuccaauggaaccauuaaagacaggagcccauaucgaacccuaaugagcuguccuauuggugaaguucccucuccauacaacucaagauuugagucagucgcuuggucagcaagugcuugucaugauggcaucaauuggcuaacaauuggaauuucuggcccagacaauggggcaguggcuguguuaaaguacaacggcauaauaacagacacuaucaagaguuggagaaacaauauauugagaacacaagagucugaaugugcauguguaaaugguucuugcuuuacuguaaugaccgauggaccaaguaauggacaggccucauacaagaucuucagaauagaaaagggaaagauagucaaaucagucgaaaugaaugccccuaauuaucacuaugaggaaugcuccuguuauccugauucuagugaaaucacaugugugugcagggauaacuggcauggcucgaaucgaccgugggugucuuucaaccaaaaucuggaauaucagauaggauacauaugcagugggauuuucggagacaauccacgcccuaaugauaagacaggcaguugugguccaguaucgucuaauggagcaaauggaguaaaaggauuuucauucaaauacggcaaugguguuuggauagggagaacuaaaagcauuaguucaagaaacgguuuugagaugauuugggauccgaacggauggacugggacagacaauaacuucucaauaaagcaagauaucguaggaauaaaugaguggucaggauacagcgggaguuuuguucagcauccagaacuaacagggcuggauuguauaagaccuugcuucuggguugaacuaaucagagggcgacccaaagagaacacaaucuggacuagcgggagcagcauauccuuuugugguguaaacagugacacuguggguuggucuuggccagacggugcugaguugccauuuaccauugacaaguaa

SEQ ID NO: 51690 - RNA, 1410 nt, Artificial Sequence; identical to SEQ ID NO: 48750
  derived and/or modified CDS sequence (wt) from neuraminidase__InfluenzaA__ADM52587

SEQ ID NO: 51691 - RNA, 1410 nt, Artificial Sequence; identical to SEQ ID NO: 48750
  derived and/or modified CDS sequence (wt) from neuraminidase__InfluenzaA__ADM52597

SEQ ID NO: 51692 - RNA, 1410 nt, Artificial Sequence; identical to SEQ ID NO: 48749
  derived and/or modified CDS sequence (wt) from neuraminidase__InfluenzaA__ADM52607

SEQ ID NO: 51693 - RNA, 1410 nt, Artificial Sequence; identical to SEQ ID NO: 49380
  derived and/or modified CDS sequence (wt) from neuraminidase__InfluenzaA__ADM52617

SEQ ID NO: 51694 - RNA, 1410 nt, Artificial Sequence
  derived and/or modified CDS sequence (wt) from neuraminidase__InfluenzaA__ADM52627
augaauccaaaccaaaagauaauaaccauugguucggucuguaugacaauuggaauggcuaacuuaauauuacaaauuggaaacauaaucucaauauggauuagccacucaauucaacuugggaaucaaaaucagauugaaacaugcaaucaaagcgucauuacuuaugaaaacaacacuuggguaaaucagacauauguuaacaucagcaacaccaacuuugcugcuggacagucagugguuuccgugaaauuagcgggcaauuccucucucugcccuguuaguggaugggcuauauacaguaaagacaacaguguaagaaucgguuccaagggggauguguuugucauaagggaaccauucauaucaugcucccccuuggaaugcagaaccuucuucuugacucaaggggccuugcuaaaugacaaacauuccaauggaaccauuaaagacaggagcccauaucgaacccuaaugagcuguccuauuggugaaguucccucuccauacaacucaagauuugagucagucgcuuggucagcaagugcuugucaugauggcaucaauuggcuaacaauuggaauuucuggcccagacaauggggcaguggcuguguuaaaguacaacggcguaauaacagacacuaucaagaguuggagaaacaauauauugagaacacaagagucugaaugugcauguguaaaugguucuugcuuuacuguaaugaccgauggaccaaguaauggacaggccucauacaagaucuucagaauagaaaagggaaagauagucaaaucagucgaaaugaaugccccuaauuaucacuaugaggaaugcuccuguuauccugauucuagugaaaucacaugugugugcagggauaacuggcauggcucgaaucgaccgugggugucuuucaaccagaaucuggaauaucagauaggauacauaugcagugggauuuucggagacaauccacgcccuaaugauaagacaggcaguugugguccaguaucgucuaauggagcaaauggaguaaaaggauuuucauucaaauacggcaaugguguuuggauagggagaacuaaaagcauuaguucaagaaacgguuuugagaugauuugggauccgaauggauggacugggacagacaauaacuucucaauaaagcaagauaucguaggaauaaaugaguggucaggauauagcgggaguuuuguucagcauccagaacuaacagggcuggauuguauaagaccuugcuucuggguugaacuaaucagagggcgacccaaagagaacacaaucuggacuagcgggagcagcauauccuuuugugguguaaacagugacacuguggguuggucuuggccagacggugcugaguugccauuuaccauugacaaguaa

SEQ ID NO: 51695 - RNA, 1410 nt, Artificial Sequence; identical to SEQ ID NO: 51685
  derived and/or modified CDS sequence (wt) from neuraminidase__InfluenzaA__ADM52637

SEQ ID NO: 51696 - RNA, 1410 nt, Artificial Sequence; identical to SEQ ID NO: 49973
  derived and/or modified CDS sequence (wt) from neuraminidase__InfluenzaA__ADM52647

SEQ ID NO: 51697 - RNA, 1410 nt, Artificial Sequence; identical to SEQ ID NO: 49380
  derived and/or modified CDS sequence (wt) from neuraminidase__InfluenzaA__ADM52657

SEQ ID NO: 51698 - RNA, 1410 nt, Artificial Sequence; identical to SEQ ID NO: 49973
  derived and/or modified CDS sequence (wt) from neuraminidase__InfluenzaA__ADM52667

SEQ ID NO: 51699 - RNA, 1410 nt, Artificial Sequence; identical to SEQ ID NO: 51575
  derived and/or modified CDS sequence (wt) from neuraminidase__InfluenzaA__ADM52687

SEQ ID NO: 51700 - RNA, 1410 nt, Artificial Sequence
  derived and/or modified CDS sequence (wt) from neuraminidase__InfluenzaA__ADM52697
augaauccaaaccaaaagauaauaaccauugguucggucuguaugacaauuggaauggcuaacuuaauauuacaaauuggaaacauaaucucaauauggauuagccacucaauucaacuugggaaucaaaaucagauugaaacaugcaaucaaagcgucauuacuuaugaaaacaacacuuggguaaaucagacauauguuaacaucagcaacaccaacuuugcugcuggacagucagugguuuccgugaaauuagcgggcaauuccucucucugcccuguuaguggaugggcuauauacaguaaagacaacaguguaagaaucgguuccaagggggauguguuugucauaagggaaccauucauaucaugcucccccuuggaaugcagaaccuucuucuugacucaaggggccuugcuaaaugacaaacauuccaauggaaccauuaaagacaggagcccauaucgaacccuaaugagcuguccuauuggugaaguucccucuccauacaacucaagauuugagucagucgcuuggucagcaagugcuugucaugauggcaucaauuggcuaacaauuggaauuucuggcccagacaauggggcaguggcuguguuaaaguacaacggcauaauaacagacaccaucaagaguuggagaaacaauauauugagaacacaagagucugaaugugcauguguaaaugguucuugcuuuacuguaaugaccgauggaccaaguaauggacaggccucauacaagaucuucagaauagaaaagggaaagauagucaaaucagucgaaaugaaugccccuaauuaucacuaugaggaaugcuccuguuauccugauucuagugaaaucacaugugugugcagggauaacuggcauggcucgaaucgaccgugggugucuuucaaccagaaucuggaauaucagauaggauacauaugcagugggauuuucggagacaauccacgcccuaaugauaagacaggcaguugugguccaguaucgucuaauggagcaaauggaguaaaaggauuuucauucaaauacggcaaugguguuuggauagggagaacuaaaagcauuaguucaagaaacgguuuugagaugauuugggauccgaacggauggacugggacagacaauaacuucucaauaaagcaagauaucguaggaauaaaugaguggucaggauauagcgggaguuuuguucagcauccagaacuaacagggcuggauuguauaagaccuugcuucuggguugaacuaaucagagggcgacccaaagagaacacaaucuggacuagcgggagcagcauauccuuuugugguguaaacagugacacuguggguuggucuuggccagacggugcugaguugccauuuaccauugacaaguaa

SEQ ID NO: 51701 - RNA, 1410 nt, Artificial Sequence; identical to SEQ ID NO: 50431
  derived and/or modified CDS sequence (wt) from neuraminidase__InfluenzaA__ADM52707

SEQ ID NO: 51702 - RNA, 1410 nt, Artificial Sequence
  derived and/or modified CDS sequence (wt) from neuraminidase__InfluenzaA__ADM52717
augaauccaaaccaaaagauaauaaccauugguucggucuguaugacaauuggaauggcuaacuuaauauuacaaauuggaaacauaaucucaauauggauuagccacucaauucaacuugggaaucaaaaucagauugaaacaugcaaucaaagcgucauuacuuaugaaaacaacacuuggguaaaucagacauauguuaacaucagcaacaccaacuuugcugcuggacagucagcgguuuccgugaaauuagugggcaauuccucucucugcccuguuaguggaugggcuauauacaguaaagacaacaguguaagaaucgguuccaagggggauguguuugucauaagggaaccauucauaucaugcucccccuuggaaugcagaaccuucuucuugacucaaggggccuugcuaaaugacaaacauuccaauggaaccauuaaagacaggagcccauaucgaacccuaaugagcuguccuauuggugaaguucccucuccauacaacucaagauuugagucagucgcuuggucagcaagugcuugucaugauggcaucaauuggcuaacaauuggaauuucuggcccagacaauggggcaguggcuguguuaaaguacaacggcauaauaacagacacuaucaagaguuggagaaacaauauauugagaacacaagagucugaaugugcauguguaaaugguucuugcuuuacuguaaugaccgauggaccaaguaauggacaggccucauacaagaucuucagaauagaaaagggaaagauagucaaaucagucgaaaugaaugccccuaauuaucacuaugaggaaugcuccuguuauccugauucuagugaaaucacaugugugugcagggauaacuggcauggcucgaaucgaccgugggugucuuucaaccagaaucuggaauaucagauaggauacauaugcagugggauuuucggagacaauccacgcccuaaugauaagacaggcaguugugguccaguaucgucuaauggagcaaauggaguaaaaggauuuucauucaaauacggcaaugguguuuggauagggagaacuaaaagcauuaguucaagaaacgguuuugagaugauuugggauccgaacggauggacugggacagacaauaacuucucaauaaagcaagauaucguaggaauaaaugaguggucaggauauagcgggaguuuuguucagcauccagaacuaacagggcuggauuguauaagaccuugcuucuggguugaacuaaucagagggcgacccaaagagaacacaaucuggacuagcgggagcagcauauccuuuugugguguaaacagugacacuguggguuggucuuggccagacggugcugaguugccauuuaccauugacaaguaa

SEQ ID NO: 51703 - RNA, 1410 nt, Artificial Sequence
  derived and/or modified CDS sequence (wt) from neuraminidase__InfluenzaA__ADM86402
augaauccaaaccaaaagauaauaaccauugguucggucuguaugacaauuggaauggccaacuuaauauuacaaauuggaaacauaaucucaauauggauuagccacucaauucaacuugggaaucaaaaucagauugaaacaugcaaucaaagcgucauuacuuaugaaaacaacacuuggguaaaucagacauauguuaacaucagcaacaccaacuuugcugcuggacagucaguggcuuccgugaaauuagcgggcaauucuucucucugcccuguuaguggaugggcuauauacaguaaagacaacaguguaagaaucgguuccaagggggauguguuugucauaagggaaccauucauaucaugcucccccuuggaaugcagaaccuucuucuugacucaaggggccuugcuaaaugacaaacauuccaauggaaccguuaaagacaggagcccauaucgaacccuaaugagcuguccuauuggugaaguucccucuccauacaacucaagauuugagucagucgcuuggucagcaagugcuugucaugauggcaucaauuggcuaacaauuggaauuucuggcccagacaauggggcaguggcuguguuaaaguacaacggcauaauaacagacacuaucaagaguuggagaaacaauauauugagaacacaagagucugaaugugcauguguaaaugguucuugcuuuacuguaaugaccgauggaccaagugauggacaggccucauacaagaucuucagaauagaaaagggaaagauagucaaaucagucgaaaugaaugccccuaauuaucacuaugaggaaugcuccuguuauccugauuccagugaaaucacaugugugugcagggauaacuggcauggcucgaaucgaccguggguuucuuucaaccagaaucuggaauaucagauaggauacauaugcagugggauuuucggagacaauccacgcccuaaugauaagacaggcaguugugguccaguaucguccaauggagcaaauggaguaaaaggauuuucauucaaauacggcaaugguguuuggauagggagaacuaaaagcauuaguucaagaaacgguuuugagaugauuugggauccgaacggauggacugggacagacaauaacuucucaauaaagcaagauaucguaggaauaaaugaguggucaggauauagcgggaguuuuguucagcauccagaacuaacagggcuggauuguauaagaccuugcuucuggguugaacuaaucagagggcgacccaaagagaacacaaucuggacuagcgggagcagcauauccuuuugugguguaaacagugacacuguggguuggucuuggccagacggugcugaguugccauuuaccauugacaaguaa

SEQ ID NO: 51704 - RNA, 1410 nt, Artificial Sequence; identical to SEQ ID NO: 48947
  derived and/or modified CDS sequence (wt) from neuraminidase__InfluenzaA__ADM86412

SEQ ID NO: 51705 - RNA, 1410 nt, Artificial Sequence
  derived and/or modified CDS sequence (wt) from neuraminidase__InfluenzaA__ADM86422
augaauccaaaccaaaagauaauaaccauugguucggucuguaugacaauuggaauggcuaacuuaauauuacaaauuggaaacauaaucucaauauggauuagccacucaauucaacuugggaaucaaaaucagauugaaacaugcaaucaaagcgucauuacuuaugaaaacaacacuuggguaaaucagacauauguuaacauaagcaacaccaacuuuguugcuggacagucagugguuuccgugaaauuagcgggcaauuccucucucugcccuguuaguggaugggcuauauacaguaaagacaacaguauaagaaucgguuccaagggggauguguuugucauaagggaaccauucauaucaugcucccccuuggaaugcagaaccuucuucuugacucaaggggccuugcuaaaugacaaacauuccaauggaaccauuaaagacaggagcccauaucgaaccuuaaugagcuguccuauuggugaaguucccucuccauacaacucaagauuugagucagucgcuuggucagcaagugcuugucaugauggcaucaauuggcuaacaauuggaauuucuggcccagacaauggggcaguggcuguguuaaaguacaacggcauaauaacagacacuaucaagaguuggagaaacaauauauugagaacacaagagucugaaugugcauguguaaaugguucuugcuuuacuguaaugaccgauggaccaagugauggacaggccucauacaagaucuucagaauagaaaagggaaagguagucaaaucagucgaaaugaaugccccuaauuaucacuaugaggaaugcuccuguuauccugauucuagugaaaucacaugugugugcagggauaacuggcauggcucgaaucgaccgugggugucuuucaaccagaaucuggaauaucagauaggauacauaugcagugggauuuucggagacaauccacgcccuaaugauaagacaggcaguugugguccaguaucgucuaauggagcaaauggaguaaaaggauuuucauucaaauacggcaaugguguuuggauagggagaacuaaaagcauuaguucaagaaacgguuuugagaugauuugggauccgaacggauggacugggacagacaauaacuucucaauaaagcaagauaucguaggaauaaaugaguggucaggauauagcgggaguuuuguccagcauccagaacuaacagggcuggauuguauaagaccuugcuucuggguugaacuaaucagagggcgacccaaagagaacacaaucuggacuagcgggagcagcauauccuuuugugguguaaacagugacacuguggguuggucuuggccagacggugcugaguugccauuuaccauugacaaguaa

SEQ ID NO: 51706 - RNA, 1410 nt, Artificial Sequence
  derived and/or modified CDS sequence (wt) from neuraminidase__InfluenzaA__ADM86432
augaauccaaaucaaaagauaauaacgauuggcucuguuucucucaccauuuccacaauaugcuucuucaugcaaaccgccauccugauaacuacuguaacauugcauuucaagcaaugugaauucaacucccccccaaacaaccaagugaugcugugugaaccaacaauaauagaaagaaacauaacagagauaguguaucugaccaacaccaccauagagaaggaaauaugccccaaacuagcagaauacagaaauuggucaaagccgcaaugugacauuacaggauuugcaccuuuuucuaaggacaauucgauuaggcuuuccgcugguggggacaucugggugacaagagaaccuuaugugucaugcgauccugacaaguguuaucaauuugcccuuggacagggaacaacacuaaacaacgugcauucaaauaacacaguacgugauaggaccccuuaucggacucuauugaugaaugaguuagguguuccuuuucaucuggggaccaagcaagugugcauagcaugguccagcucaaguugucacgauggaaaagcauggcugcauguuuguauaacgggggaugauaaaaaugcaacugcuagcuucauuuacaauggaaggcuuguagauaguguuguuucaugguccaaagaaauccucaggacccaggagucagaaugcguuuguaucaauggaacuuguacaguaguaaugacugaugggagugcuucagggaaagcugauacuaaaauacuauucauugaggaggggaaaaucguucauacuagcacauugucaggaagugcucagcaugucgaggagugcuccugcuauccucgauauccuggugucagaugugucugcagagacaacuggaaaggcuccaauaggcccaucguagauauaaacauaaaggaucauagcauuguuuccaguuauguguguucaggacuuguuggagacacacccagaaaaaacgacagcuccagcaguagccauuguuuggauccuaacaaugaagaagguggucauggagugaaaggcugggccuuugaugauggaaaugacguguggaugggaagaacgaucagcgagaaaucacgcuuaggguaugaaaccuucaaagucauugaaggcugguccaacccuaaguccaaauugcagauaaauaggcaagucauaguugauagagguaauagguccgguuauucugguauuuucucuguugaaggcaaaagcugcaucaaccggugcuuuuauguggaguugauaaggggaaggaaagaggaaacugaagucuuguggaccucaaacaguauuguuguguuuuguggcaccucagguacauauggaacaggcucauggccugauggggcggacaucaaucucaugccuauauaa

SEQ ID NO: 51707 - RNA, 1410 nt, Artificial Sequence
  derived and/or modified CDS sequence (wt) from neuraminidase__InfluenzaA__ADM86443
augaauccaaaccaaaagauaauaaccauugguucggucuguaugacaauuggaauggcuaacuuaauauuacaaauuggaaacauaaucucaauauggauuagccacucaauucaacuugggaaucaaaaucagauugaaacaugcaaucaaagcgucauuacuuaugaaaacaacacuuggguaaaucagacauauguuaacaucagcaacaccaacuuugcugcuggacagucagugguuuccgugaaauuagcgggcaauuccucucucugcccuguuaguggaugggcuauauacaguaaagacaacaguauaagaaucgguuccaagggggauguguuugucauaagggaaccauucauaucaugcucccccuuggaaugcagaaccuucuucuugacucaaggggccuugcuaaaugacaaacauuccaauggaaccauuaaagacaggagcccauaucgaacccuaaugagcuguccuauuggugaaguucccucuccauacaacucaagauuugagucagucgcuuggucagcaagugcuugucaugauggcaucaauuggcuaacaauuggaauuucuggcccagacaauggggcaguggcuguguuaaaguacaacggcauaauaacagacacuaucaagaguuggagaaacaauauauugagaacacaagagucugaauguguauguguaaaugguucuugcuucacuguaaugaccgauggaccaagugauggacaggccucauacaagaucuucagaauagaaaagggaaagauagucaaaucagucgaaaugaaugccccuaauuaucacuaugaggaaugcuccuguuauccugauucuagugaaaucacaugugugugcagggauaacuggcauggcucgaaucgaccguggguaucuuucaaccagaaucuggaauaucagauaggauacauaugcagugggauuuucggagacaauccacgcccuaaugauaagacaggcaguugugguccaguaucgucuaauggagcaaauggaguaaaaggauuuucauucaaauacggcaaugguguuuggauagggagaacuaaaagcauuaguucaagaaacgguuuugagaugauuugggauccgaacggauggacugggacagacaauaacuucucaauaaagcaagauaucguaggaaugaaugaguggucaggauauagcgggaguuuuguucagcauccagaacuaacagggcuggauuguauaagaccuugcuucuggguugaacuaaucagagggcgacccaaagagaacacaaucuggacuagcgggagcagcauauccuuuugugguguaaacagugacacuguggguuggucuuggccggacggugcugaguugccauuuaccauugacaaguaa

SEQ ID NO: 51708 - RNA, 1410 nt, Artificial Sequence; identical to SEQ ID NO: 51533
  derived and/or modified CDS sequence (wt) from neuraminidase__InfluenzaA__ADM86453

SEQ ID NO: 51709 - RNA, 1350 nt, Artificial Sequence
  derived and/or modified CDS sequence (wt) from neuraminidase__InfluenzaA__ADM95377
augaauccaaaucagaagauaauaaccaucggaucaaucuguaugguaacuggaauaguuagcuuaauguuacaaguugggagcaugaucucaauaugggucagucauucaauucacacagggaaucagcaccaagcugagccaaucagcaauacuaauuuucuuacugagaaagcuguggcuucaguaaaauuagcgggcaauucaucucuuugccccauuaacggaugggcuguauacaguaaggacaacaguauaaggaucgguuccaagggggauguguuuguuauaagagagccguucaucucaugcucccacuuggaaugcagaacuuucuuuuugacucagggagccuugcugaaugacaaacacuccaaugggacugucaaagacagaagcccucacagaacauuaaugaguuguccuaugggugaggcucccuccccauacaacucaagguuugagucuguugcuuggucagcaagugcuugccaugauggcaccaguugguugacaauuggaauuucuggcccagacaauggggcuguggcuguauugaaauacaauggcauaauaacagacacuaucaagaguuggaggaacaacauacugagaacucaagagucugaaugugcauguguaaauggcucuugcuuuacuguaaugacugauggaccaaguaauggucaggcaucacauaagaucuucaaaauggaaaaaggaaaagugauuaaaucagucgaauuggaugcuccuaauuaucacuaugaggaaugcuccuguuauccugaugccggcgaaaucacaugugugugcagggauaauuggcauggcucaaaucggccauggguaucuuucaaucaaaacuuggaguaucaaauaggauauauaugcagugggguuuucggagacaauccacgccccaaugauggaacagguaguugugguccgguguccucuaacggggcauaugggguaaaaggguuuucauuuaaauacggcaauggugucuggaucgggagaaccaaaagcacuaauuccaggagcggcuuugaaaugauuugggauccaaauggguggacugaaacggacaguagauuuucagugaaacaagauaucguagcaauaacugauuggucaggauauagcgggaguuuuguccagcauccagaacugacaggacuagauugcauaagaccuuguuucuggguugaguugaucagagggcggcccaaagagagcacaauuuggacuagugggagcagcauaucuuuuugugguguaaauagugacacuguggguuggucuuggccagacggugcugaguugccauucaccauugacaaguag

SEQ ID NO: 51710 - RNA, 1410 nt, Artificial Sequence; identical to SEQ ID NO: 48750
  derived and/or modified CDS sequence (wt) from neuraminidase__InfluenzaA__ADM95650

SEQ ID NO: 51711 - RNA, 1410 nt, Artificial Sequence; identical to SEQ ID NO: 48887
  derived and/or modified CDS sequence (wt) from neuraminidase__InfluenzaA__ADM95651

SEQ ID NO: 51712 - RNA, 1410 nt, Artificial Sequence
  derived and/or modified CDS sequence (wt) from neuraminidase__InfluenzaA__ADM95652
augaauccaaaccaaaagauaauaaccauugguucggucuguaugacaauuggaauggcuaacuuaauauuacaaauuggaaacauaaucucaauauggauuagccacucaauucaacuugggaaucaaaaucagauugaaacaugcaaucaaagcgucauuacuuaugaaaacaacacuuggguaaaucagacauauguuaacaucagcaacaccaacuuugcugcuggacagucagugguuuccgugaaauuugcgggcaauuccucucucugcccuguuaguggaugggcuauauacaguaaagacaacaguauaagaaucgguuccaagggggauguguuugucauaagggaaccauucauaucaugcucccccuuggaaugcagaaccuucuucuugacucaaggggccuugcuaaaugacaaacauuccaauggaaccauuaaagacaggagcccauaucgaacccuaaugagcuguccuauuggugaaguucccucuccauacaacucaagauuugagucagucgcuuggucagcaagugcuugucaugauggcaucaauuggcuaacaauuggaauuucuggcccagacaauggggcaguggcuguguuaaaguacaacggcauaauaacagacacuaucaagaguuggagaaacaauauauugagaacacaagagucugaaugugcauguguaaaugguucuugcuuuacuguaaugaccgauggaccaagugauggacaggccucauacaagaucuucagaauagaaaagggaaagauagucaaaucagucgaaaugaaugccccuaauuaucacuaugaggaaugcuccuguuauccugauucuagugaaaucacaugugugugcagggauaacuggcauggcucgaaucgaccgugggugucuuucaaccagaaucuggaauaucagauaggauacauaugcagugggauuuucggagacaauccacgcccuaaugauaagacaggcaauugugguccaguaucgucuaauggagcaaauggaguaaaaggauuuucauucaaauacggcaaugguguuuggauagggagaacuaaaagcauuaguucaagaaacgguuuugagaugauuugggauccgaacggauggacugggacagacaauaacuucucaauaaagcaagauaucguaggaauaaaugaguggucaggauauagcgggaguuuuguucagcauccagaacuaacagggcuggauuguauaagaccuugcuucuggguugaacuaaucagagggcgacccaaagagaacacaaucuggacuagcgggagcagcauauccuuuugugguguaaacagugacacuguggguuggucuuggccagacggugcugaguugccauuuaccauugacaaguaa

SEQ ID NO: 51713 - RNA, 1410 nt, Artificial Sequence
  derived and/or modified CDS sequence (wt) from neuraminidase__InfluenzaA__ADM95654
augaauccaaaccaaaagauaauaaccauugguucggucuguaugacaauuggaauggcuaacuuaauauuacaaauuggaaacauaaucucaauauggauuagccacucaauucaacuugggaaucaaaaucagauugaaacaugcaaucaaagcgucauuacuuaugaaaacaacacuuggguaaaucagacauauguuaacaucagcaacaccaacuuugcugcuggacagucagugguuuccgugaaauuagcgggcaauuccucucucugcccuguuaguggaugggcuauauacaguaaagacaacaguauaagaaucgguuccaagggggauguguuugucauaagggaaccauucauaucaugcucccccuuggaaugcagaaccuucuucuugacucaaggggccuugcuaaaugacaaacauuccaauggaaccauuaaagacaggagcccauaucgaacccuaaugagcuguccuauuggugaaguucccucuccauacaacucaagauuugagucagucgcuuggucagcaagugcuugucaugauggcaucaauuggcuaacaauuggaauuucuggcccagacaauggggcaguggcuguguuaaaguacaacggcauaauaacagacacuaucaagaguuggagaaacaauauauugagaacacaagagucugaaugugcauguguaaaugguucuugcuuuacuguaaugaccgauggaccaagugauggacaggccucauacaagaucuucagaauagaaaagggaaagauagucaaaucagucgaaaugaaugccccuaauuaucacuaugaggaaugcuccuguuauccugauucuagugaaaucacaugugugugcagggauaacuggcauggcucgaaucgaccgugggugucuuucaaccagaaucuggaauaucagauaggauacauaugcagugggauuuucggagacaauccacgcccuaaugauaagacaggcaguugugguccaguaucgucuaauggagcaaauggaguaaaaggauuuucauucaaauacggcaaugguguuuggauagggagaacuaaaagcauuaguucaagacacgguuuugagaugauuugggauccgaacggauggacugggacagacaauaacuucucaauaaagcaagauaucguaggaacaaaugaguggucaggauauagcgggaguuuuguucagcauccagaacuaacagggcuggauuguauaagaccuugcuucuggguugaacuaaucagagggcgacccaaagagaacacaaucuggacuagcgggagcagcauauccuuuugugguguaaacagugacacuguggguuggucuuggccagacggugcugaguugccauuuaccauugacaaguaa

SEQ ID NO: 51714 - RNA, 1410 nt, Artificial Sequence
  derived and/or modified CDS sequence (wt) from neuraminidase__InfluenzaA__ADM95655
augaauccaaaccaaaagauaauaaccauugguucggucuguaugacaauuggaauggcuaacuuaauauuacaaauuggaaacauaaucucaauauggauuagccacucaauucaacuugggaaucaaaaucagauugaaacaugcaaucaaagcgucauuacuuaugaaaacaacacuuggguaaaucagacauauguuaacaucagcaacaccaacuuugcugcuggacagucagugguuuccgugaaauuagcgggcaauuccucucucugcccuguuaguggaugggcuauauacaguaaagacaacaguauaagaaucgguuccaagggggauguguuugucauaagggaaccauucauaucaugcucccccuuggaaugcagaaccuucuucuugacucaaggggccuugcuaaaugacaaacauuccaauggaaccauuaaagacaggagcccauaucgaacccuaaugagcuguccuauuggugaaguucccucuccauacaacucaagauuugagucagucgcuuggucagcaagugcuugucaugauggcaucaauuggcuaacaauuggaauuucuggcccagacaacggggcaguggcuguguuaaaguacaacggcauaauaacagacacuaucaagaguuggagaaacaauauauugagaacacaagagucugaaugugcauguguaaaugguucuugcuuuacuguaaugaccgauggaccaagugauggacaggccucauacaagaucuucagaauagaaaagggaaagauagucaaaucagucgaaaugaaugccccuaauuaucacuaugaggaaugcuccuguuauccugauucuagugaaaucacaugugugugcagggauaacuggcauggcucgaaucgaccgugggugucuuucaaccagaaucuggaauaucagauaggauacauaugcagugggauuuucggagacaauccacgcccuagugauaagacaggcaguugugguccaguaucgucuaauggagcaaauggaguaaaaggauuuucauucaaauacggcaaugguguuuggauagggagaacuaaaagcauuaguucaagaaacgguuuugagaugauuugggauccgaacggauggacugggacagacaaugacuucucaauaaagcaagauaucguaggaauaaaugaguggucaggauauagcgggaguuuuguucagcauccagaacuaacagggcuggauuguauaagaccuugcuucuggguugaacuaaucagagggcgacccaaagagaacacaaucuggacuagcgggagcagcauauccuuuugugguguaaacagugacacuguggguuggucuuggccagacggugcugaguugccauuuaccauugacaaguaa

SEQ ID NO: 51715 - RNA, 1410 nt, Artificial Sequence
  derived and/or modified CDS sequence (wt) from neuraminidase__InfluenzaA__ADM95656
augaauccaaaccaaaagauaauaaccauugguucggucuguaugacaauuggaauggcuaacuuaauauuacaaauuggaaacauaaucucaauauggauuagccacucaauucaacuugggaaucaaaaucagauugaaacaugcaaucaaagcgucauuacuuaugaaaacaacacuuggguaaaucagacauauguuaacaucagcaacaccaacuuugcugcuggacagucagugguuuccgugaaauuagcgggcaauuccucucucugcccuguuaguggaugggcuauauacaguaaagacaacaguauaagaaucgguuccaagggggauguguuugucauaagggaaccauucauaucaugcucccccuuggaaugcagaaccuucuucuugacucaaggggccuugcuaaaugacaaacauuccaauggaaccauuaaagacaggagcccauaucgaacccuaaugagcuguccuauuggugaaguucccucuccauacaacucaagauuugagucagucgcuuggucagcaagugcuugucaugauggcaucaauuggcuaacaauuggaauuucuggcccagacaauggggcaguggcuguguuaaaguacaacggcauaauaacagacacuaucaagaguuggagaaacaauauauugagaacacaagagucugaaugugcauguguaaaugguucuugcuuuacuguaaugaccgauggaccaagugauggacaggccucauacaagaucuucagaauagaaaagggaaagauagucaaaucagucgaaaugaaugccccuaauuaucacuaugaggaaugcuccuguuauccugauucuagugaaaucacaugugugugcagggauaacuggcauggcucgaaucgaccgugggugucuuucaaccagaaucuggaauaucagauaggauacauaugcagugggauuuucggagacaauccacgcccuaaugauaagacaggcaguugugguccaguaucgucuaauggagcaaauggaguaaaaggauuuucauucaaauacggcaaugguguuuggauagggagaacuaaaagcauuaguucaagaaacgguuuugagaugauuugggauccgaauggauggacugggacagacaauaacuucucaauaaagcaagauaucguaggaacaaaugaguggucaggauauagcgggaguuuuguucagcauccagaacuaacagggcuggauuguauaagaccuugcuucuggguugaacuaaucagagggcgacccaaagagaacacaaucuggacuagcgggagcagcauauccuuuugugguguaaacagugacacuguggguuggucuuggccagacggugcugaguugccauuuaccauugacaaguaa

SEQ ID NO: 51716 - RNA, 1410 nt, Artificial Sequence
  derived and/or modified CDS sequence (wt) from neuraminidase__InfluenzaA__ADM95658
augaauccaaaccaaaagauaauaaccauugguucggucuguaugacaauuggaauggcuaacuuaauauuacaaauuggaaacauaaucucaauauggauuagccacucaauucaacuugggaaucaaaaucagauugaaacaugcaaucaaagcgucauuacuuaugaaaacaacacuuggguaaaucagacauauguuaacaucaguaacaccaacuuugcugcuggacagucagugguuuccgugaaauuagcgggcaauuccucucucugcccuguuaguggaugggcuauauacaguaaagacaacaguauaagaaucgguuccaagggggauguguuugucauaagggaaccauucauaucaugcucccccuuggaaugcagaaccuucuucuugacucaaggggccuugcuaaaugacaaacauuccaauggaaccauuaaagacaggagcccauaucgaacccuaaugagcuguccuauuggugaaguucccucuccauacaacucaagauuugagucagucgcuuggucagcaagugcuugucaugauggcaucaauuggcuaacaauuggaauuucuggcccagacaauggggcaguggcuguguuaaaguacaacggcauaauaacagacacuaucaagaguuggagaaacaauauauugagaacacaagagucugaaugugcauguguaaaugguucuugcuuuacuguaaugaccgauggaccaagugauggacaggccucauacaagaucuucagaauagaaaagggaaagauagucaaaucagucgaaaugaaugccccuaauuaucacuaugaggaaugcuccuguuauccugauucuagugaaaucacauguguaugcagggauaacuggcauggcucgaaucgaccgugggugucuuucaaccagaaucuggaauaucagauaggauacauaugcagugggauuuucggagacaauccacgcccuaaugauaagacaggcaguugugguccaguaucgucuaauggagcaaauggaguaaaaggauuuucauucaaauacggcaaugguguuuggauagggagaacuaaaagcauuaguucaagaaacgguuuugagaugauuugggauccgaacggauggacugggacagacaauaaguucucaauaaagcaagauaucguaggaauaaaugaguggucaggauauagcgggaguuuuguucagcauccagaacuaacagggcuggauuguauaagaccuugcuucuggguugaacuaaucagagggcgacccaaagagaacacaaucuggacuagcgggagcagcauauccuuuugugguguaaacagugacacuguggguuggucuuggccagacggugcugaguugccauuuaccauugacaaguaa

SEQ ID NO: 51717 - RNA, 1410 nt, Artificial Sequence
  derived and/or modified CDS sequence (wt) from neuraminidase__InfluenzaA__ADM95659
augaauccaaaccaaaagauaauaaccauugguucggucuguaugacaauuggaauggcuaacuuaauauuacaaauuggaaacauaaucucaauauggauuagccacucaauucaacuugggaaucaaaaucagauugaaacaugcaaucaaagcgucauuacuuaugaaaacaacacuuggguaaaucagacauauguuaacaucagcaacaccaacuuugcugcuggacagucagugguuuccgugaaauuagcgggcaauuccucucucugcccuguuaguggaugggcuauauacaguaaagacaacaguauaagaaucgguuccaagggggauguguuugucauaagggaaccauucauaucaugcucccccuuggaaugcagaaccuucuucuugacucaaggggccuugcuaaaugacaaacauuccaauggaaccauuaaagacaggagcccauaucgaacccuaaugagcuguccuauuggugaaguucccucuccauacaacucaagauuugagucagucgcuuggucagcaagugcuugucaugauggcaucaauuggcuaacaauuggaauuucuggcccagacaauggggcaguggcuguguuaaaguacaacggcauaauaacagacacuaucaagaguuggagaaacaauauauugagaacacaagagucugaaugugcauguguaaaugguucuugcuuuacuguaaugaccgauggaccaagugauggacaggccucauacaagaucuucagaauagaaaagggaaagauagucaaaucagucgaaaugaaugccccuaauuaucacuaugaggaaugcuccuguuauccugauucuagugaaaucacaugugugugcagggauaacuggcauggcucgaaucgaccgugggugucuuucaaccagaaucuggaauaucagauaggauacauaugcagugggauuuucggagacaauccacgcccuaaugauaagacaggcaguugugguccaguaucgucuaauggagcaaauggaguaaaaggauuuucauucaaauacggcaaugguguuuggauagggagaacuaaaagcauuaguucaagaagcgguuuugagaugauuugggauccgaacggauggacugggacagacaauaacuucucaauaaagcaagauaucauaggaacaaaugaguggucaggauauagcgggaguuuuguucagcauccagaacuaacagggcuggauuguauaagaccuugcuucuggguugaacuaaucagagggcgacccaaagagaacacaaucuggacuagcgggagcagcauauccuuuugugguguaaacagugacacuguggguuggucuuggccagacggugcugaguugccauuuaccauugacaaguaa

SEQ ID NO: 51718 - RNA, 1410 nt, Artificial Sequence
  derived and/or modified CDS sequence (wt) from neuraminidase__InfluenzaA__ADM95660
augaauccaaaccaaaagauaauaaccauugguucggucuguaugacaauuggaauggcuaacuuaauauuacaaauuggaaacauaaucucaauauggauuagccacucaauucaacuugggaaucaaaaucagauugaaacaugcaaucaaagcgucauuacuuaugaaaacaacacuuggguaaaucagacauauguuaacaucagcaacaccaacuuugcugcuggacagucagugguuuccgugaaauuagcgggcaauuccucucucugcccuguuaguggaugggcuauauacaguaaagacaacaguauaagaaucgguuccaagggggauguguuugucauaagggaaccauucauaucaugcucccccuuggaaugcagaaccuucuucuugacucaaggggccuugcuaaaugacaaacauuccaauggaaccauuaaagacaggagcccauaucgaacccuaaugagcuguccuauuggugaaguucccucuccauacaacucaagauuugagucagucgcuuggucagcaagugcuugucaugauggcaucaauuggcuaacaauuggaauuucuggcccagacaauggggcaguggcuguguuaaaguacaacggcauaauaacagacacuaucaagaguuggagaaacaauauauugagaacacaagagucugaaugugcauguguaaaugguucuugcuuuacuguaaugaccgauggaccaagugauggacaggccucauacaagaucuucagaauagaaaagggaaagauagucaaaucagucgaaaugaaugccccuaauuaucacuaugaggaaugcuccuguuauccugauucuagugaaaucacaugugugugcagggauaacuggcauggcucgaaucgaccgugggugucuuucaaccagaaucuggaauaucagauaggauacauaugcagugggauuuucggagacaauccacgcccuaacgauaagacaggcaguugugguccaguaucgucuaauggagcaaauggaguaaaaggauuuucauucaaauacggcaaugguguuuggauagggagaacuaaaagcauuaguucaagaaacgguuuugagaugauuugggauccgaacggauggacugggacagacaauaacuucucaauaaagcaagauaucguaggaauaaaugaguggucaggauauagcgggaguuuuguucagcauccagaacuaacagggcuggauuguauaagaccuugcuucuggguugaacuaaucagagggcgacccaaagagaacacaaucuggacuagcgggagcagcauauccuuuugugguguaaacagugacacuguggguuggucuuggccagacggugcugaguugccauuuaccauugacaaguaa

SEQ ID NO: 51719 - RNA, 1410 nt, Artificial Sequence
  derived and/or modified CDS sequence (wt) from neuraminidase__InfluenzaA__ADM95661
augaauccaaaccaaaagauaauaaccauugguucggucuguaugacaauuggaauggcuaacuuaauauuacaaauuggaaacauaaucucaauauggauuagccacucaauucaacuugggaaucaaaaucagauugaaacaugcaaucaaagcgucauuacuuaugaaaacaacacuuggguaaaucagacauauguuaacaucagcaacaccaacuuugcugcuggacagucagugguuuccgugaaauuagcgggcaauuccucucucugcccuguuaguggaugggcuauauacaguaaagacaacaguauaagaaucgguuccaagggggauguguuugucauaagggaaccauucauaucaugcucccccuuggaaugcagaaccuucuucuugacucaaggggccuugcuaaaugacaaacauuccaauggaaccauuaaagacaggagcccauaucgaacccuaaugagcuguccuauuggugaaguucccucuccauacaacucaagauuugagucagucgcuuggucagcaagugcuugucaugauggcaucaauuggcuaacaauuggaauuucuggcccagacaauggggcaguggcuguguuaaaguacaacggcauaauaacagacacuaucaagaguuggagaaacaauauauugagaacacaagagucugaaugugcauguguaaaugguucuugcuuuacuguaaugaccgauggaccaagugauggacaggccucauacaagaucuucagaauagaaaagggaaagauagucaaaucagucgaaaugaaugccccuaauuaucacuaugaggaaugcuccuguuauccugauucuagugaaaucacaugugugugcagggauaacuggcauggcucgaaucgaccgugggugucuuucaaccagaaucuggaauaucagauaggauacauaugcagugggauuuucggagacaauccacgcccuaaugauaagacaggcaguugugguccaguaucgucuaauggagcaaauggaguaaaaggauuuucauucaaauacggcaaugguguuuggauagggagaacuaaaagcauuaguucaagaaacgguuuugagaugauuugggauccgaacggauggacugggacagacaauaacuucucaauaaagcaagauaucguaggaacaaaugaguggucaggauauagcgggaguuuuguucagcauccagaacuaacagggcuggauuguauaagaccuugcuucuggguugaacuaaucagagggcgacccaaagagaacacaaucuggacuagcgggagcaucauauccuuuugugguguaaacagugacacuguggguuggucuuggccagacggugcugaguugccauuuaccauugacaaguaa

SEQ ID NO: 51720 - RNA, 1410 nt, Artificial Sequence
  derived and/or modified CDS sequence (wt) from neuraminidase__InfluenzaA__ADM95662
augaauccaaaccaaaagauaauaaccauugguucggucuguaugacaauuggaauggcuaacuuaauauuacaaauuggaaacauaaucucaauauggauuagccacucaauucaacuugggaaucaaaaucagauugaaacaugcaaucaaagcgucauuacuuaugaaaacaacacuuggguaaaucagacauauguuaacaucagcaacaccaacuuugcugcuggacagucagugguuuccgugaaauuagcgggcaauuccucucucugcccuguuaguggaugggcuauauacaguaaagacaacaguauaagaaucgguuccaagggggauguguuugucauaagggaaccauucauaucaugcucccccuuggaaugcagaaccuucuucuugacucaaggggccuugcuaaaugacaaacauuccaauggaaccauuaaagacaggagcccauaucgaacccuaaugagcuguccuauuggugaaguucccucuccauacaacucaagauuugagucagucgcuuggucagcaagugcuugucaugauggcaucaauuggcuaacaauuggaauuucuggcccagacaauggggcaguggcuguguuaaaguacaacggcauaauaacagacacuaucaagaguuggagaaacaauauauugagaacacaagagucugaaugugcauguguaaaugguucuugcuuuacuguaaugaccgauggaccaagugauggacaggccucauacaagaucuucagaauagaaaagggaaagauagucaaaucagucgaaaugaaugccccuaauuaucacuaugaggaaugcuccuguuauccugauucuagugaaaucacaugugugugcagggauaacuggcauggcucgaaucgaccgugggugucuuucaaccagaaucuggaauaucagauaggauacauaugcagugggauuuucggagacaauccacgcccuaaugauaagacaggcaguugugguccaguaucgucuaauggagcaaauggaguaaaaggauuuucauucaaauacggcaaugguguuuggauagggagaacuaaaagcauuaguucaagaaacgguuuugagaugauuugggauccgaacggauggacugggacagacaauaacuucucaauaaagcaagauaucguaggaacaaaugaguggucaggauauagcgggaguuuuguucagcauccagaacuaacagggcuggauuguauaagaccuugcuucuggguugaacuaaucagagggcgacccaaagagaacacaaucuggacuagcgggagcagcauauccuuuugugguguaaacagugacacuguggguuggucuuggccagacggugcugaguugccauuuaccauugacaaguaa

SEQ ID NO: 51721 - RNA, 1410 nt, Artificial Sequence
  derived and/or modified CDS sequence (wt) from neuraminidase__InfluenzaA__ADM95663
augaauccaaaccaaaagauaauaaccauugguucggucuguaugacaauuggaauggcuaacuuaauauuacaaauuggaaacauaaucucaauauggauuagccacucaauucaacuugggaaucaaaaucagauugaaacaugcaaucaaagcgucauuacuuaugaaaacaacacuuggguaaaucagacauauguuaacaucagcaacaccaacuuugcugcuggacagucagugguuuccgugaaauuagcgggcaauuccucucucugcccuguuaauggaugggcuauauacaguaaagacaacaguauaagaaucgguuccaagggggauguguuugucauaagggaaccauucauaucaugcucccccuuggaaugcagaaccuucuucuugacucaaggggccuugcuaaaugacaaacauuccaauggaaccauuaaagacaggagcccauaucgaacccuaaugagcuguccuauuggugaaguucccucuccauacaacucaagauuugagucagucgccuggucagcaagugcuugucaugauggcaucaauuggcuaacaauuggaauuucuggcccagacaauggggcaguggcuguguuaaaguacaacggcauaauaacagacacuaucaagaguuggagaaacaauauauugagaacacaagagucugaaugugcauguguaaaugguucuugcuuuacuguaaugaccgauggaccaagugauggacaggccucauacaagaucuucagaauagaaaagggaaagauagucaaaucaaucgaaaugaaugccccuaauuaucacuaugaggaaugcuccuguuauccugauucuagugaaaucacaugugugugcagggauaacuggcauggcucgaaucgaccgugggugucuuucaaccagaaucuggaauaucagauaggauacauaugcagugggauuuucggagacaauccacgcccuaaugauaagacaggcaguugugguccaguaucgucuaauggagcaaauggaguaaaaggauuuucauucaaauacggcaaugguguuuggauagggagaacuaaaagcauuaguucaagaaacgguuuugagaugauuugggauccgaacggauggacugggacagacaauaacuucucaauaaagcaagauaucguaggaacaaaugaguggucaggauauagcgggaguuuuguucagcauccagaacuaacagggcuggauuguauaagaccuugcuucuggguugaacuaaucagagggcgacccaaagagaacacaaucuggacuagcgggagcaucauauccuuuuguggugugaacagugacacuguggguuggucuuggccagacggugcugaguugccauuuaccauugacaaguaa

SEQ ID NO: 51722 - RNA, 1410 nt, Artificial Sequence; identical to SEQ ID NO: 51720
  derived and/or modified CDS sequence (wt) from neuraminidase__InfluenzaA__ADM95664

SEQ ID NO: 51723 - RNA, 1410 nt, Artificial Sequence
  derived and/or modified CDS sequence (wt) from neuraminidase__InfluenzaA__ADM95665
augaauccaaaccaaaagauaauaaccauugguucggucuguaugacaauuggaauggcuaacuuaauauuacaaauuggaaacauaaucucaauauggauuagccacucaauucaacuugggaaucaaaaucagauugaaacaugcaaucaaagcgucauuacuuaugaaaacaacacuuggguaaaucagacauauguuaacaucagcaacaccaacuuugcugcuggacagucagugguuuccgugaaauuagcgggcaauuccucucucugcccuguuaguggaugggcuauauacaguaaagacaacaguauaagaaucgguuccaagggggauguguuugucauaagggaaccauucauaucaugcucccccuuggaaugcagaaccuucuucuugacucaaggggccuugcuaaaugacaaacauuccaauggaaccauuaaagacaggagcccauaucgaacccuaaugagcuguccuauuggugaaguucccucuccauacaacucaagauuugagucagucgcuuggucagcaagugcuugucaugauggcaucaauuggcuaacaauuggaauuucuggcccagacaauggggcaguggcuguguuaaaguacaacggcauaauaacagacacuaucaagaguuggagaaacaauauauugagaacacaagagucugaaugugcauguguaaaugguucuugcuuuacuguaaugaccgauggaccaagugauggacaggccucauacaagaucuucagaauagaaaagggaaagauagucaaaucagucgaaaugaaugccccuaauuaucacuaugaggaaugcuccuguuauccugauucuagugaaaucacaugugugugcagggauaacuggcauggcucgaaucgaccgugggugucuuucaaccagaaucuggaauaucagauaggauacauaugcagugggauuuucggagacaauccacgcccuaaugauaagacgggcaguugugguccaguaucgucuaauggagcaaauggaguaaaaggauuuucauucaaauacggcaaugguguuuggauagggagaacuaaaagcauuaguucaagaaacgguuuugagaugauuugggauccgaacggauggacugggacagacaauaacuucucaauaaagcaagauaucguaggaacaaaugaguggucaggauauagcgggaguuuuguucagcauccagaacuaacagggcuggauuguauaagaccuugcuucuggguugaacuaaucagagggcgacccaaagagaacacaaucuggacuagcgggagcagcauauccuuuugugguguaaacagugacacuguggguuggucuuggccagacggugcugaguugccauuuaccauugacaaguaa

SEQ ID NO: 51724 - RNA, 1410 nt, Artificial Sequence
  derived and/or modified CDS sequence (wt) from neuraminidase__InfluenzaA__ADM95666
augaauccaaaccaaaagauaauaaccauugguucggucuguaugacaauuggaauggcuaacuuaauauuacaaauuggaaacauaaucucaauauggauuagccacucaauucaacuugggaaucaaaaucagauugaaacaugcaaucaaagcgucauuacuuaugaaaacaacacuuggguaaaucagacauauguuaacaucagcaacaccaacuuugcugcuggacagucagugguuuccgugaaauuagcgggcaauuccucucucugcccuguuaauggaugggcuauauacaguaaagacaacaguauaagaaucgguuccaagggggauguguuugucauaagggaaccauucauaucaugcucccccuuggaaugcagaaccuucuucuugacucaaggggccuugcuaaaugacaaacauuccaauggaaccauuaaagacaggagcccauaucgaacccuaaugagcuguccuauuggugaaguucccucuccauacaacucaagauuugagucagucgccuggucagcaagugcuugucaugauggcaucaauuggcuaacaauuggaauuucuggcccagacaauggggcaguggcuguguuaaaguacaacggcauaauaacagacacuaucaagaguuggagaaacaauauauugagaacacaagagucugaaugugcauguguaaaugguucuugcuuuacuguaaugaccgauggaccaagugauggacaggccucauacaagaucuucaaaauagaaaagggaaagauagucaaaucagucgaaaugaaugccccuaauuaucacuaugaggaaugcuccuguuauccugauucuagugaaaucacaugugugugcagggauaacuggcauggcucgaaucgaccgugggugucuuucaaccagaaucuggaauaucagauaggauacauaugcagugggauuuucggagacaauccacgcccuaaugauaagacaggcaguugugguccaguaucguuuaauggagcaaauggaguaaaaggauuuucauucaaauacggcaaugguguuuggauagggagaacuaaaagcauuaguucaagaaacgguuuugagaugauuugggauccgaacggauggacugggacagacaauaacuucucaauaaagcaagauaucguaggaacaaaugaguggucaggauauagcgggaguuuuguucagcauccagaacuaacagggcuggauuguauaagaccuugcuucuggguugaacuaaucagagggcgacccaaagagaacacaaucuggacuagcgggagcaucauauccuuuuguggugugaacagugacacuguggguuggucuuggccagacggugcugaguugccauuuaccauugacaaguaa

SEQ ID NO: 51725 - RNA, 1410 nt, Artificial Sequence; identical to SEQ ID NO: 51720
  derived and/or modified CDS sequence (wt) from neuraminidase__InfluenzaA__ADM95667

SEQ ID NO: 51726 - RNA, 1410 nt, Artificial Sequence; identical to SEQ ID NO: 51720
  derived and/or modified CDS sequence (wt) from neuraminidase__InfluenzaA__ADM95668

SEQ ID NO: 51727 - RNA, 1410 nt, Artificial Sequence; identical to SEQ ID NO: 48750
  derived and/or modified CDS sequence (wt) from neuraminidase__InfluenzaA__ADM95669

SEQ ID NO: 51728 - RNA, 1410 nt, Artificial Sequence; identical to SEQ ID NO: 48750
  derived and/or modified CDS sequence (wt) from neuraminidase__InfluenzaA__ADM95670

SEQ ID NO: 51729 - RNA, 1410 nt, Artificial Sequence
  derived and/or modified CDS sequence (wt) from neuraminidase__InfluenzaA__ADM95672
augaauccaaaccaaaagauaauaaccauugguucggucuguaugacaauuggaauggcuaacuuaauauuacaaauuggaaacauaaucucaauauggauuagccacacaauucaacuugggaaucaaaaucagauugaaacaugcaaucaaagcgucauuacuuaugaaaacaacacuuggguaaaucagacauauguuaacaucagcaacaccaacuuugcugcuggacagucagugguuuccgugaaauuagcgggcaauuccucucucugcccuguuaguggaugggcuauauacaguaaagacaacaguauaagaaucgguuccaagggggauguguuugucauaagggaaccauucauaucaugcucccccuuggaaugcagaaccuucuucuugacucaaggggccuugcuaaaugacaaacauuccaauggaaccauuaaagacaggagcccauaucgaacccuaaugagcuguccuauuggugaaguucccucuccauacaacucaagauuugagucagucgcuuggucagcaagugcuugucaugauggcaucaauuggcuaacaauuggaauuucuggcccagacaauggggcaguggcuguguuaaaguacaacggcauaauaacagacacuaucaagaguuggagaaacaauauauugagaacacaagagucugaaugugcauguguaaaugguucuugcuuuacugugaugaccgauggaccaagugauggacaggccucauacaagaucuucagaauagaaaagggaaagauagucaaaucagucgaaaugaaugccccuaauuaucacuaugaggaaugcuccuguuauccugauucuagugaaaucacaugugugugcagggauaacuggcauggcucgaaucgaccgugggugucuuucaaccagaaucuggaauaucagauaggauacauaugcagugggauuuucggagacaauccacgcccuaaugauaagacaggcaguugugguccaguaucgucuaauggagcaaauggaguaaaaggauuuucauucaaauacggcaaugguguuuggauagggagaacuaaaagcauuaguucaagaaacgguuuugagaugauuugggauccgaacggauggacugggacagacaauaacuucucaauaaagcaagauaucguaggaacaaaugaguggucaggauauagcgggaguuuuguucagcauccagaacuaacagggcuggauuguauaagaccuugcuucuggguugaacuaaucagagggcgacccaaagagaacacaaucuggacuagcgggagcagcauauccuuuugugguguaaacagugacacuguggguuggucuuggccagacggugcugaguugccauuuaccauugacaaguaa

SEQ ID NO: 51730 - RNA, 1410 nt, Artificial Sequence; identical to SEQ ID NO: 48814
  derived and/or modified CDS sequence (wt) from neuraminidase__InfluenzaA__ADM95673

SEQ ID NO: 51731 - RNA, 1410 nt, Artificial Sequence; identical to SEQ ID NO: 51720
  derived and/or modified CDS sequence (wt) from neuraminidase__InfluenzaA__ADM95674

SEQ ID NO: 51732 - RNA, 1410 nt, Artificial Sequence; identical to SEQ ID NO: 48750
  derived and/or modified CDS sequence (wt) from neuraminidase__InfluenzaA__ADM95675

SEQ ID NO: 51733 - RNA, 1410 nt, Artificial Sequence
  derived and/or modified CDS sequence (wt) from neuraminidase__InfluenzaA__ADM95677
augaauccaaaccaaaagauaauaaccauugguucggucuguaugacaauuggaauggcuaacuuaauauuacaaauuggaaacauaaucucaauauggauuagccacucaauucaacuugggaaucaaaaucagauugaaacaugcaaucaaagcgucauuacuuaugaaaacaacacuuggguaaaucagacauauguuaacaucagcaacaccaacuuugcugcuggacagucagugguuuccgugaaauuagcgggcaauuccucucucugcccuguuaauggaugggcuauauacaguaaagacaacaguauaagaaucgguuccaagggggauguguuugucauaagggaaccauucauaucaugcucccccuuggaaugcagaaccuucuucuugacucaaggggccuugcuaaaugacaaacauuccaauggaaccauuaaagacaggagcccauaucgaacccuaaugagcuguccuauuggugaaguucccucuccauacaacucaagauuugagucagucgccuggucagcaagugcuugucaugauggcaucaauuggcuaacaauuggaauuucuggcccagacaauggggcaguggcuguguuaaaguacaacggcauaauaacagacacuaucaagaguuggagaaacaauauauugagaacacaagagucugaaugugcauguguaaaugguucuugcuuuacuguaaugaccgauggaccaagugauggacaggccucauacaagaucuucagaauagaaaagggaaagauagucaaaucagucgaaaugaaugccccuaauuaucacuaugaggaaugcuccuguuauccugauucuagugaaaucacaugugugugcagggauaacuggcauggcucgaaucgaccgugggugucuuucaaccagaaucuggaauaucagauaggauacauaugcagugggauuuucggagacaauccacgcccuaaugauaagacaggcaguugugguccaguaucgucuaauggagcaaauggaguaaaaggauuuucauucaaauacggcaaugguguuuggauagggagaacuaaaagcauuaguucaagaaacgguuuugagaugauuugggauccgaacggauggacugggacagacaauaacuucucaauaaagcaagauaucguaggaacaaaugaguggucaggauauagcgggaguuuuguucagcauccagaacuaacagggcuggauuguauaagaccuugcuucuggguugaacuaaucagagggcgacccaaagagaacacaaucuggacuagcgggagcaucauauccuuuuguggugugaacagugacacuguggguuggucuuggccagacggugcugaguugccauuuaccauugacaaguaa

SEQ ID NO: 51734 - RNA, 1410 nt, Artificial Sequence
  derived and/or modified CDS sequence (wt) from neuraminidase__InfluenzaA__ADM95678
augaauccaaaccaaaagauaauaaccauugguucggucuguaugacaauuggaauggcuaacuuaauauuacaaauuggaaacauaaucucaauauggauuagccacucaauucaacuugggaaucaaaaucagauugaaacaugcaaucaaagcgucauuacuuaugaaaacaacacuuggguaaaucagacauauguuaacaucagcaacaccaacuuugcugcuggacagucagugguuuccgugaaauuugcgggcaauuccucucucugcccuguuaguggaugggcuauauacaguaaagacaacaguauaagaaucgguuccaagggggauguguuugucauaagggaaccauucauaucaugcucccccuuggaaugcagaaccuucuucuugacucaaggggccuugcuaaaugacaaacauuccaauggaaccauuaaagacaggagcccauaucgaacccuaaugagcuguccuauuggugaaguucccucuccauacaacucaagauuugagucagucgcuuggucagcaagugcuugucaugauggcaucaauuggcuaacaauuggaauuucuggcccagacaauggggcaguggcuguguuaaaguacaacggcauaauaacagacacuaucaagaguuggagaaacaauauauugagaacacaagagucugaaugugcauguguaaaugguucuugcuuuacuguaaugaccgauggaccaagugauggacaggccucauacaagaucuucagaauagaaaagggaaagauagucaaaucagucgaaaugaaugccccuaauuaucacuaugaggaaugcuccuguuauccugauucuagugaaaucacaugugugugcagggauaacuggcauggcucgaaucgaccgugggugucuuucaaccagaaucuggaauaucagauaggauacauaugcagugggauuuucggagacaauccacgcccuaaugauaagacaggcaguugugguccaguaucgucuaauggagcaaauggaguaaaaggauuuucauucaaauacggcaaugguguuuggauagggagaacuaaaagcauuaguucaagaaacgguuuugagaugauuugggauccgaacggauggacugggacagacaauaacuucucaauaaagcaagauaucguaggaauaaaugaguggucaggauauagcgggaguuuuguucagcauccagaacuaacagggcuggauuguauaagaccuugcuucuggguugaacuaaucagagggcgacccaaagagaacacaaucuggacuagcgggagcagcauauccuuuugugguguaaacagugacacuguggguuggucuuggccagacggugcugaguugccauuuaccauugacaaguaa

SEQ ID NO: 51735 - RNA, 1410 nt, Artificial Sequence; identical to SEQ ID NO: 51733
  derived and/or modified CDS sequence (wt) from neuraminidase__InfluenzaA__ADM95679

SEQ ID NO: 51736 - RNA, 1410 nt, Artificial Sequence; identical to SEQ ID NO: 51733
  derived and/or modified CDS sequence (wt) from neuraminidase__InfluenzaA__ADM95680

SEQ ID NO: 51737 - RNA, 1410 nt, Artificial Sequence
  derived and/or modified CDS sequence (wt) from neuraminidase__InfluenzaA__ADM95681
augaauccaaaccaaaagauaauaaccauugguucggucuguaugacaauuggaauggcuaacuuaauauuacaaauuggaaacauaaucucaauauggauuagccacucaauucaacuugggaaucaaaaucagauugaaacaugcaaucaaagcgucauuacuuaugaaaacaacacuuggguaaaucagacauauguuaacaucagcaacaccaacuuugcugcuggacagucagugguuuccgugaaauuagcgggcaauuccucucucugcccuguuaguggaugggcuauauacaguaaagacaacaguauaagaaucgguuccaagggggauguguuugucauaagggaaccauucauaucaugcucccccuuggaaugcagaaccuucuucuugacucaaggggccuugcuaaaugacaaacauuccaauggaaccauuaaagacaggagcccauaucgaacccuaaugagcuguccuauuggugaaguucccucuccauacaacucaagauuugagucagucgcuuggucagcaagugcuugucaugauggcaucaauuggcuaacaauuggaauuucuggcccagacaauggggcaguggcuguguuaaaguacaacggcauaauaacagacacuaucaagaguuggagaaacaauauauugagaacacaagagucugaaugugcauguguaaaugguucuugcuuuacuguaaugaccgauggaccaagugauggacaggccucauacaagaucuucagaauagaaaagggaaagauagucaaaucagucgaaaugaaugccccuaauuaucacuaugaggaaugcuccuguuauccugauucuagugaaaucacaugugugugcagggauaacuggcauggcucgaaucgaccgugggugucuuucaaccagaaucuggaauaucagauaggauacauaugcagugggauuuucggagacaauccacgcccuaaugauaagacaggcaguugugguccaguaucgucuaauggagcaaauggaguaaaaggauuuucauucaaauacggcaaugguguuuggauagggagaacuaaaagcauuaguucaagaaacgguuuugagaugauuugggauccgaacggauggacugggacagacaauaacuucucaauaaagcaagauaucguaggaauaaaugaguggucaggauauagcgggaguuuuguucagcauccagaacuaacagggcuggauuguauaagaccuugcuucuggguugaacuaaucagagggcggcccaaagagaacacaaucuggacuagcgggagcagcauauccuuuugugguguaaacagugacacuguggguuggucuuggccagacggugcugaguugccauuuaccauugacaaguaa

SEQ ID NO: 51738 - RNA, 1410 nt, Artificial Sequence
  derived and/or modified CDS sequence (wt) from neuraminidase__InfluenzaA__ADM95682
augaauccaaaccaaaagauaauaaccauugguucggucuguaugacaauuggaauggcuaacuuaauauuacaaauuggaaacauaaucucaauauggauuagccacucaauucaacuugggaaucaaaaucagauugaaauaugcaaucaaagcgucauuacuuaugaaaacaacacuuggguaaaucagacauauguuaacaucagcaacaccaacuuugcugcuggacagucagugguuuccgugaaauuagcgggcaauuccucucucugcccuguuaguggaugggcuauauacaguaaagacaacaguauaagaaucgguuccaagggggauguguuugucauaagggaaccauucauaucaugcucccccuuggaaugcagaaccuucuucuugacucaaggggccuugcuaaaugacaaacauuccaauggaaccauuaaagacaggagcccauaucgaacccuaaugagcuguccuauuggugaaguucccucuccauacaacucaagauuugagucagucgcuuggucagcaagugcuugucaugauggcaucaauuggcuaacaauuggaauuucuggcccagacaauggggcaguggcuguguuaaaguacaacggcauaauaacagacacuaucaagaguuggaggaacaauauauugagaacacaagagucugaaugugcauguguaaaugguucuugcuuuacuguaaugaccgauggaccaagugauggacaggccucauacaagaucuucagaauagaaaagggaaagauagucaaaucagucgaaaugaaugccccuaauuaucacuaugaggaaugcuccuguuauccugauucuagugaaaucacaugugugugcagggauaacuggcauggcucgaaucgaccgugggugucuuucaaccagaaucuggaauaucagauaggauacauaugcagugggauuuucggagacaauccacgcccuaaugauaagacaggcaguugugguccaguaucgucuaauggagcaaauggaguaaaaggauuuucauucaaauacggcaaugguguuuggauagggagaacuaaaagcauuaguucaagaaacgguuuugagaugauuugggauccgaacggauggacugggacagacaauaacuucucaauaaagcaagauaucguaggaacaaaugaguggucaggauauagcgggaguuuuguucagcauccagaacuaacagggcuggauuguauaagaccuugcuucuggguugaacuaaucagagggcgacccaaagagaacacaaucuggacuagcgggagcagcauauccuuuugugguguaaacagugacacuguggguuggucuuggccagacggugcugaguugccauuuaccauugacaaguaa

SEQ ID NO: 51739 - RNA, 1410 nt, Artificial Sequence
  derived and/or modified CDS sequence (wt) from neuraminidase__InfluenzaA__ADM95683
augaauccaaaccaaaagauaauaaccauugguucggucuguaugacaauuggaauggcuaacuuaauauuacaaauuggaaauauaaucucaauauggauuagccacucaauucaacuugggaaucaaaaucagauugaaacaugcaaucaaagcgucauuacuuaugaaaacaacacuuggguaaaucagacauauguuaacaucagcaacaccaacuuugcugcuggacagucagugguuuccgugaaauuagcgggcaauuccucucucugcccuguuaguggaugggcuauauacaguaaagacaacaguauaagaaucgguuccaagggggauguguuugucauaagggaaccauucauaucaugcucccccuuggaaugcagaaccuucuucuugacucaaggggccuugcuaaaugacaaacauuccaauggaaccauuaaagacaggagcccauaucgaacccuaaugagcuguccuauuggugaaguucccucuccauacaacucaagauuugagucagucgcuuggucagcaagugcuugucaugauggcaucaauuggcuaacaauuggaauuucuggcccagacaauggggcaguggcuguguuaaaguacaacggcauaauaacagacacuaucaagaguuggagaaacaauauauugagaacacaagagucugaaugugcauguguaaaugguucuugcuuuacuguaaugaccgauggaccaagugauggacaggccucauacaagaucuucagaauagaaaagggaaagauagucaaaucagucgaaaugaaugccccuaauuaucacuaugaggaaugcuccuguuauccugauucuagugaaaucacaugugugugcagggauaacuggcauggcucgaaucgaccgugggugucuuucaaccagaaucuggaauaucagauaggauacauaugcagugggauuuucggagacaauccacgcccuaaugauaagacaggcaguugugguccaguaucgucuaauggagcaaauggaguaaaaggauuuucauucaaauacggcaaugguguuuggauagggagaacuaaaagcauuaguucaagaaacgguuuugagaugauuugggauccgaacggauggacugggacagacaauaacuucucaauaaagcaagauaucguaggaauaaaugaguggucaggauauagcgggaguuuuguucagcauccagaacuaacagggcuggauuguauaagaccuugcuucuggguugaacuaaucagagggcgacccaaagagaacacaaucuggacuagcgggagcagcauguccuuuugugguguaaacagugacacuguggguuggucuuggccagacggugcugaguugccauuuaccauugacaaguaa

SEQ ID NO: 51740 - RNA, 1410 nt, Artificial Sequence; identical to SEQ ID NO: 48750
  derived and/or modified CDS sequence (wt) from neuraminidase__InfluenzaA__ADM95684

SEQ ID NO: 51741 - RNA, 1410 nt, Artificial Sequence
  derived and/or modified CDS sequence (wt) from neuraminidase__InfluenzaA__ADM95685
augaauccaaaccaaaagauaauaaccauugguucggucuguaugacaauuggaauggcuaacuuaauauuacaaauuggaaacauaaucucaauauggauuagccacucaauucaacuugggaaucaaaaucagauugaaacaugcaaucaaagugucauuacuuaugaaaacaacacuuggguaaaucagacauauguuaacaucagcaacaccaacuuugcugcuggacagucagugguuuccgugaaauuagcgggcaauuccucucucugcccuguuaguggaugggcuauauacaguaaagacaacaguauaagaaucgguuccaagggggauguguuugucauaagggaaccauucauaucaugcucccccuuggaaugcagaaccuucuucuugacucaaggggccuugcuaaaugacaaacauuccaauggaaccauuaaagacaggagcccauaucgaacccuaaugagcuguccuauuggugaaguucccucuccauacaacucaagauuugagucagucgcuuggucagcaagugcuugucaugauggcaucaauuggcuaacaauuggaauuucuggcccagacaauggggcaguggcuguguuaaaguacaacggcauaauaacagacacuaucaagaguuggagaaacaauauauugagaacacaagagucugaaugugcauguguaaaugguucuugcuuuacuguaaugaccgauggaccaagugauggacaggccucauacaagaucuucagaauagaaaagggaaagauagucaaaucagucgaaaugaaugccccuaauuaucacuaugaggaaugcuccuguuauccugauucuagugaaaucacaugugugugcagggauaacuggcauggcucgaaucgaccgugggugucuuucaaccagaaucuggaauaucagauaggauacauaugcagugggauuuucggagacaauccacgcccuaaugauaagacaggcaguugugguccaguaucgucuaauggagcaaauggaguaaaaggauuuucauucaaauacggcaaugguguuuggauagggagaacuaaaagcauuaguucaagacacgguuuugagaugauuugggauccgaacggauggacugggacagacaauaacuucucaauaaagcaagauaucguaggaacaaaugaguggucaggauauagcgggaguuuuguucagcauccagaacuaacagggcuggauuguauaagaccuugcuucuggguugaacuaaucagagggcgacccaaagagaacacagucuggacuagcgggagcagcauauccuuuugugguguaaacagugacacuguggguuggucuuggccagacggugcugaguugccauuuaccauugacaaguaa

SEQ ID NO: 51742 - RNA, 1410 nt, Artificial Sequence
  derived and/or modified CDS sequence (wt) from neuraminidase__InfluenzaA__ADM95686
augaauccaaaccaaaagauaauaaccauugguucggucuguaugacaauuggaauggcuaacuuaauauuacaaauuggaaacauaaucucaauauggauuagccacucaauucaacuugggaaucaaaaucagauugaaacaugcaaucaaagcgucauuacuuaugaaaacaacacuuggguaaaucagacauauguuaacaucagcaacaccaacuuugcugcuggacagucagugguuuccgugaaauuagcgggcaauuccucucucugcccuguuaguggaugggcuauauacaguaaagacaacaguauaagaaucgguuccaagggggauguguuugucauaagggaaccauucauaucaugcucccccuuggaaugcagaaccuucuucuugacucaaggggccuugcuaaaugacaaacauuccaauggaaccauuaaagacaggagcccauaucgaacccuaaugagcuguccuauuggugaaguucccucuccauacaacucaagauuugagucagucgcuuggucagcaagugcuugucaugauggcaucaauuggcuaacaauuggaauuucuggcccagacaauggggcaguggcuguguuaaaguacaacggcauaauaacagacacuaucaagaguuggagaaacaauauauugagaacacaagagucugaaugugcauguguaaaugguucuugcuuuacuguaaugaccgauggaccaagugauggacaggccucauacaagaucuucagaauagaaaagggaaagauagucaaaucagucgaaaugaaugccccuaauuaucacuaugaggaaugcuccuguuauccugauucuagugaaaucacaugugugugcagggauaacuggcauggcucgaaucgaccgugggugucuuucaaccagaaucuggaauaucagauaggauacauaugcagugggauuuucggagacaauccacgcccuaaugauaagacaggcaguugugguccaguaucgucuaauggagcaaauggaguaaaaggauuuucauucaaauacggcaaugguguuuggauagggagaacuaaaagcauuaguucaagaaacgguuuugagaugauuugggauccgaacggauggacugggacagacaaugacuucucaauaaagcaagauaucguaggaauaaaugaguggucaggauauagcgggaguuuuguucagcauccagaacuaacagggcuggauuguauaagaccuugcuucuggguugaacuaaucagagggcgacccaaagagaacacaaucuggacuagcgggagcagcauauccuuuugugguguaaacagugacacuguggguuggucuuggccagacggugcugaguugccauuuaccauugacaaguaa

SEQ ID NO: 51743 - RNA, 1410 nt, Artificial Sequence
  derived and/or modified CDS sequence (wt) from neuraminidase__InfluenzaA__ADM95687
augaauccaaaccaaaagauaauaaccauugguucggucuguaugacaauuggaauggcuaacuuaauauuacaaauuggaaacauaaucucaauauggauuagccacucaauucaacuugggaaucaaaaucagauugaaacaugcaaucaaagcgucauuacuuaugaaaacaacacuuggguaaaucagacauauguuaacaucagcaacaccaacuuugcugcuggacagucagugguuuccgugaaauuagcgggcaauuccucucucugcccuguuaguggaugggcuauauacaguaaagacaacaguauaagaaucgguuccaagggggauguguuugucauaagggaaccauucauaucaugcucccccuuggaaugcagaaccuucuucuugacucaaggggccuugcuaaaugacaaacauuccaauggaaccauuaaagacaggagcccauaucgaacccuaaugagcuguccuauuggugaaguucccucuccauacaacucaagauuugagucagucgcuuggucagcaagugcuugucaugauggcaucaauuggcuaacaauuggaauuucuggcccagacaauggggcaguggcuguguuaaaguacaacggcauaauaacagacacuaucaagaguuggagaaacaauauauugagaacacaggagucugaaugugcauguguaaaugguucuugcuuuacuguaaugaccgauggaccaagugauggacaggccucauacaagaucuucagaauagaaaagggaaagauagucaaaucagucgaaaugaaugccccuaauuaucacuaugaggaaugcuccuguuauccugauucuagugaaaucacaugugugugcagggauaacuggcauggcucgaaucgaccgugggugucuuucaaccagaaucuggaauaucagauaggauacauaugcagugggauuuucggagacaauccacgcccuaaugauaagacaggcaguugugguccaguaucgucuaauggagcaaauggaguaaaaggauuuucauucaaauacggcaaugguguuuggauagggagaacuaaaagcauuaguucaagaaacgguuuugagaugauuugggauccgaacggauggacugggacagacaauaacuucucaauaaagcaagauaucguaggaauaaaugaguggucaggauauagcgggaguuuuguucagcauccagaacuaacagggcuggauuguauaagaccuugcuucuggguugaacuaaucagagggcgacccaaagagaacacaaucuggacuagcgggagcagcauauccuuuugugguguaaacagugacacuguggguuggucuuggccagacggugcugaguugccauuuaccauugacaaguaa

SEQ ID NO: 51744 - RNA, 1410 nt, Artificial Sequence
  derived and/or modified CDS sequence (wt) from neuraminidase__InfluenzaA__ADM95688
augaauccaaaccaaaagauaauaaccauugguucggucuguaugacaauuggaauggcuaacuuaauauuacaaauuggaaacauaaucucaauauggauuagccacucaauucaacuugggaaucaaaaucagauugaaacaugcaaucaaagcgucauuacuuaugaaaacaacacuuggguaaaucagacauauguuaacaucagcaacaccaacuuugcugcuggacagucagugguuuccgugaaauuagcgggcaauuccucucucugcccuguuaguggaugggcuauauacaguaaagacaacaguauaagaaucgguuccaagggggauguguuugucauaagggaaccauucauaucaugcucccccuuggaaugcagaaccuucuucuugacucaaggggccuugcuaaaugacaaacauuccaauggaaccauuaaagacaggagcccauaucgaacccuaaugagcuguccuauuggugaaguucccucuccauacaacucaagauuugagucagucgccuggucagcaagugcuugucaugauggcaucaauuggcuaacaauuggaauuucuggcccagacaauggggcaguggcuguguuaaaguacaacggcauaauaacagacacuaucaagaguuggagaaacaauauauugagaacacaagagucugaaugugcauguguaaaugguucuugcuuuacuguaaugaccgauggaccaagugauggacaggccucauacaagaucuucagaauagaaaagggaaagauagucaaaucagucgaaaugaaugccccuaauuaucacuaugaggaaugcuccuguuauccugauucuagugaaaucacaugugugugcagggauaacuggcauggcucgaaucgaccgugggugucuuucaaccagaaucuggaauaucagauaggauacauaugcagugggauuuucggagacaauccacgcccuaaugauaagacaggcaguugugguccaguaucgucuaauggagcaaauggaguaaaaggauuuucauucaaauacggcaaugguguuuggauagggagaacuaaaagcauuaguucaagaaacgguuuugagaugauuugggauccgaacggauggacugggacagacaauaacuucucaauaaagcaagauaucguaggaacaaaugaguggucaggauauagcgggaguuuuguucagcauccagaacuaacaaggcuggauuguauaagaccuugcuucuggguugaacuaaucagagggcgacccaaagagaacacaaucuggacuagcgggagcaucauauccuuuuguggugugaacagugacacuguggguuggucuuggccagacggugcugaguugccauuuaccauugacaaguaa

SEQ ID NO: 51745 - RNA, 1410 nt, Artificial Sequence; identical to SEQ ID NO: 51742
  derived and/or modified CDS sequence (wt) from neuraminidase__InfluenzaA__ADM95689

SEQ ID NO: 51746 - RNA, 1410 nt, Artificial Sequence
  derived and/or modified CDS sequence (wt) from neuraminidase__InfluenzaA__ADM95690
augaauccaaaccaaaagauaauaaccauugguucggucuguaugacaauuggaauggcuaacuuaauauuacaaauuggaaacauaaucucaauauggauuagccacucaauucaacuugggaaucaaaaucagauugaaacaugcaaucaaagcgucauuacuuaugaaaacaacacuuggguaaaucagacauauguuaacaucagcaacaccaacuuugcugcuggacagucagugguuuccgugaaauuagcgggcaauuccucucucugcccuguuaguggaugggcuauauacaguaaagacaauaguauaagaaucgguuccaagggggauguguuugucauaagggaaccauucauaucaugcucccccuuggaaugcagaaccuucuucuugacucaaggggccuugcuaaaugacaaacauuccaauggaaccauuaaagacaggagcccauaucgaacccuaaugagcuguccuauuggugaaguucccucuccauacaacucaagauuugagucagucgcuuggucagcaagugcuugucaugauggcaucaauuggcuaacaauuggaauuucuggcccagacaauggggcaguggcuguguuaaaguacaacggcauaauaacagacacuaucaagaguuggagaaacaauauauugagaacacaagagucugaaugugcauguguaaaugguucuugcuuuacuguaaugaccgauggaccaagugauggacaggccucauacaagaucuucagaauagaaaagggaaagauagucaaaucagucgaaaugaaugccccuaauuaucacuaugaggaaugcuccuguuauccugauucuagugaaaucacaugugugugcagggauaacuggcauggcucgaaucgaccgugggugucuuucaaccagaaucuggaauaucagauaggauacauaugcagugggauuuucggagacaauccacgcccuaaugauaagacaggcaguugugguccaguaucgucuaauggagcaaauggaguaaaaggauuuucauucaaauacggcaaugguguuuggauagggagaacuaaaagcauuaguucaagaaacgguuuugagaugauuugggauccgaacggauggacugggacagacaauaacuucucaauaaagcaagauaucauaggaacaaaugaguggucaggauauagcgggaguuuuguucagcauccagaacuaacagggcuggauuguauaagaccuugcuucuggguugaacuaaucagagggcgacccaaagagaacacaaucuggacuagcgggagcagcauauccuuuugugguguaaacagugacacuguggguuggucuuggccagacggugcugaguugccauuuaccauugacaaguaa

SEQ ID NO: 51747 - RNA, 1410 nt, Artificial Sequence
  derived and/or modified CDS sequence (wt) from neuraminidase__InfluenzaA__ADM95691
augaauccaaaccaaaagauaauaaccauugguucggucuguaugacaauuggaauggcuaacuuaauauuacaaauuggaaacauaaucucaauauggauuagccacucaauucaacuugggaaucaaaaucagauugaaacaugcaaucaaagcgucauuacuuaugaaaacaacacuuggguaaaucagacauauguuaacaucagcaacaccaacuuugcugcuggacagucagugguuuccgugaaauuagcgggcaauuccucucucugcccuguuaguggaugggcuauauacaguaaagacaacaguauaagaaucgguuccaagggggauguguuugucauaagggaaccauucauaucaugcucccccuuggaaugcagaaccuucuucuugacucaaggggccuugcuaaaugacaaacauuccaauggaaccauuaaagacaggagcccauaucgaacccuaaugagcuguccuauuggugaaguucccucuccauacaacucaagauuugagucagucgcuuggucagcaagugcuugucaugauggcaucaauuggcuaacaauuggaauuucuggcccagacaauggggcaguggcuguguuaaaguacaacggcauaauaacagacacuaucaagaguuggagaaacaauauauugagaacacaagagucugaaugugcauguguaaaugguucuugcuuuacuguaaugaccgauggaccaagugauggacaggccucauacaagaucuucagaauagaaaagggaaagauagucaaaucagucgaaaugaaugccccuaauuaucacuaugaggaaugcuccuguuauccugauucuagugaaaucacaugugugugcagggauaacuggcauggcucgaaucgaccgugggugucuuucaaccagaaucuggaauaucagauaggauacauaugcagugggauuuucggagacaauccacgcccuaaugauaagacaggcaguugugguccaguaucgucuaauggagcaaauggaguaaaaggauuuucauucaaauacggcaaugguguuuggauagggagaaccaaaagcauuaguucaagaaacgguuuugagaugauuugggauccgaacggauggacugggacagacaauaacuucucaauaaagcaagauaucguaggaauaaaugaguggucaggauauagcgggaguuuuguucagcauccagaacuaacagggcuggauuguauaagaccuugcuucuggguugaacuaaucagagggcgacccaaagagaacacaaucuggacuagcgggagcagcauauccuuuugugguguaaacagugacacuguggguuggucuuggccagacggugcugaguugccauuuaccauugacaaguaa

SEQ ID NO: 51748 - RNA, 1410 nt, Artificial Sequence
  derived and/or modified CDS sequence (wt) from neuraminidase__InfluenzaA__ADM95692
augaauccaaaccaaaagauaauaaccauugguucggucuguaugacaauuggaauggcuaacuuaauauuacaaauuggaaacauaaucucaauauggauuagccacucaauucaacuugggaaucaaaaucagauugaaacaugcaaucaaagcgucauuacuuaugaaaacaacacuuggguaaaucagacauauguuaacaucaucaacaccaacuuugcugcuggacagucagugguuuccgugaaauuagcgggcaauuccucucucugcccuguuaguggaugggcuauauacaguaaagacaacaguauaagaaucgguuccaagggggauguguuugucauaagggaaccauucauaucaugcucccccuuagaaugcagaaccuucuucuugacucaaggggccuugcuaaaugacaaacauuccaauggaaccauuaaagacaggagcccauaucgaacccuaaugagcuguccuauuggugaaguucccucuccauacaacucaagauuugagucagucgcuuggucagcaagugcuugucaugauggcaucaauuggcuaacaauuggaauuucuggcccagacaauggggcaguggcuguguuaaaguacaacggcauaauaacagacacuaucaagaguuggagaaacaauauauugagaacacaagagucugaaugugcauguguaaaugguucuugcuuuacuguaaugaccgauggaccaagugauggacaggccucauacaagaucuucagaauagaaaagggaaagauagucaaaucagucgaaaugaaugccccuaauuaucacuaugaggaaugcuccuguuauccugauucuagugaaaucacauguguaugcagggauaacuggcauggcucgaaucgaccgugggugucuuucaaccagaaucuggaauaucagauaggauacauaugcagugggauuuucggagacaauccacgcccuaaugauaagacaggcaguugugguccaguaucgucuaauggagcaaauggaguaaaaggauuuucauucaaauacggcaaugguguuuggauagggagaacuaaaagcauuaguucaagaaacgguuuugagaugauuugggauccgaacggauggacugggacagacaauaacuucucaauaaagcaagauaucguaggaauaaaugaguggucaggauauagcgggaguuuuguucagcauccagaacuaacagggcuggauuguauaagaccuugcuucuggguugaacuaaucagagggcgacccaaagagaacacaaucuggacuagcgggagcagcauauccuuuugugguguaaacagugacacuguggguuggucuuggccagacggugcugaguugccauuuaccauugacaaguaa

SEQ ID NO: 51749 - RNA, 1410 nt, Artificial Sequence
  derived and/or modified CDS sequence (wt) from neuraminidase__InfluenzaA__ADM95693
augaauccaaaccaaaagauaauaaccauugguucggucuguaugacaauuggaauggcuaacuuaauauuacaaauuggaaacauaaucucaauauggauuagccacucaauucaacuugggaaucaaaaucagauugaaacaugcaaucaaagcgucauuacuuaugaaaacaacacuuggguaaaucagacauauguuaacaucagcaacaccaacuuugcugcuggacagucagugguuuccgugaaauuagcgggcaauuccucucucugcccuguuaguggaugggcuauauacaguaaagacaacaguauaagaaucgguuccaagggggauguguuugucauaagggaaccauucauaucaugcucccccuuagaaugcagaaccuucuucuugacucaaggggccuugcuaaaugacaaacauuccaauggaaccauuaaagacaggagcccauaucgaacccuaaugagcuguccuauuggugaaguucccucuccauacaacucaagauuugagucagucgcuuggucagcaagugcuugucaugauggcaucaauuggcuaacaauuggaauuucuggcccagacaauggggcaguggcuguguuaaaguacaacggcauaauaacagacacuaucaagaguuggagaaacaauauauugagaacacaagagucugaaugugcauguguaaaugguucuugcuuuacuguaaugaccgauggaccaagugauggacaggccucauacaagaucuucagaauagaaaagggaaagauagucaaaucagucgaaaugaaugccccuaauuaucacuaugaggaaugcuccuguuauccugauucuagugaaaucacauguguaugcagggauaacuggcauggcucgaaucgaccgugggugucuuucaaccagaaucuggaauaucagauaggauacauaugcagugggauuuucggagacaauccacgcccuaaugauaagacaggcaguugugguccaguaucgucuaauggagcaaauggaguaaaaggauuuucauucaaauacggcaaugguguuuggauagggagaacuaaaagcauuaguucaagaaacgguuuugagaugauuugggauccgaacggauggacugggacagacaauaacuucucaauaaagcaagauaucguaggaauaaaugaguggucaggauauagcgggaguuuuguucagcauccagaacuaacagggcuggauuguauaagaccuugcuucuggguugaacuaaucagagggcgacccaaagagaacacaaucuggacuagcgggagcagcauauccuuuugugguguaaacagugacacuguggguuggucuuggccagacggugcugaguugccauuuaccauugacaaguaa

SEQ ID NO: 51750 - RNA, 1410 nt, Artificial Sequence
  derived and/or modified CDS sequence (wt) from neuraminidase__InfluenzaA__ADM95694
augaauccaaaccaaaagauaauaaccauugguucggucuguaugacaauuggaauggcuaacuuaauauuacaaauuggaaacauaaucucaauauggauuagccacucaauucaacuugggaaucaaaaucagauugaaacaugcaaucaaagcgucauuacuuaugaaaacaacacuuggguaaaucagacauauguuaacaucagcaacaccaacuuugcugcuggacagucagugguuuccgugaaguuagcgggcaauuccucucucugcccuguuaguggaugggcuauauacaguaaagacaacaguauaagaaucgguuccaagggggauguguuugucauaagggaaccauucauaucaugcucccccuuggaaugcagaaccuucuucuugacucaaggggccuugcuaaaugacaaacauuccaauggaaccauuaaagacaggagcccauaucgaacccuaaugagcuguccuauuggugaaguucccucuccauacaacucaagauuugagucagucgcuuggucagcaagugcuugucaugauggcaucaauuggcuaacaauuggaauuucuggcccagacaauggggcaguggcuguguuaaaguacaacggcauaauaacagacacuaucaagaguuggagaaacaauauauugagaacacaagagucugaaugugcauguguaaaugguucuugcuuuacuguaaugaccgauggaccaagugauggacaggccucauacaagaucuucagaauagaaaagggaaagauagucaaaucagucgaaaugaaugccccuaauuaucacuaugaggaaugcuccuguuauccugauucuagugaaaucacauguguaugcagggauaacuggcauggcucgaaucgaccgugggugucuuucaaccagaaucuggaauaucagauaggauacauaugcagugggauuuucggagacaauccacgcccuaaugauaagacaggcaguugugguccaguaucgucuaauggagcaaauggaguaaaaggauuuucauucaaauacggcaaugguguuuggauagggagaacuaaaagcauuaguucaagaaacgguuuugagaugauuugggauccgaacggauggacugggacagacaauaacuucucaauaaagcaagauaucguaggaauaaaugaguggucaggauauagcgggaguuuuguucagcauccagaacuaacagggcuggauuguauaagaccuugcuucuggguugaacuaaucagagggcgacccaaagagaacacaaucuggacuagcgggagcagcauauccuuuugugguguaaacagugacacuguggguuggucuuggccagacggugcugaguugccauuuaccauugacaaguaa

SEQ ID NO: 51751 - RNA, 1410 nt, Artificial Sequence; identical to SEQ ID NO: 48750
  derived and/or modified CDS sequence (wt) from neuraminidase__InfluenzaA__ADM95695

SEQ ID NO: 51752 - RNA, 1410 nt, Artificial Sequence; identical to SEQ ID NO: 51742
  derived and/or modified CDS sequence (wt) from neuraminidase__InfluenzaA__ADM95696

SEQ ID NO: 51753 - RNA, 1410 nt, Artificial Sequence; identical to SEQ ID NO: 51720
  derived and/or modified CDS sequence (wt) from neuraminidase__InfluenzaA__ADM95697

SEQ ID NO: 51754 - RNA, 1413 nt, Artificial Sequence
  derived and/or modified CDS sequence (wt) from neuraminidase__InfluenzaA__ADM95698
augaacccaaaucaaaagauaauaaccauuggaucaaucaguauagcaaucggaauaauuagucugauguugcaaauaggaaauauuauuucaauaugggcuagucacucaauccaaacuggaagucaaaacaacacuggaauaugcaaccaaagaaucaucacauaugaaaacaacaccugggugaaucacacauauguuaauauuaacaacacuaauguuguugcugaagaggacaaaacuucagugacauuggccggcaauucaucucuuuguucuaucaguggaugggcuauauacacaaaagacaacagcauaagaauuggcuccaaaggagauguuuuugucauaagagaaccuuucauaucauguucucacuuggaaugcagaaccuuuuuucugacccaaggcgcucuauuaaaugacaaacauucaaaugggaccguaaaggacagaaguccuuauagggccuuaaugagcuguccucuaggugaagcuccguccccauacaauucaaaguucgaaucaguugcauggucagcaagcgcaugccaugauggcaugggcugguuaacaaucggaauuucugguccagacaauggagcuguggcuguacuaaaauacaacggaauaauaacuggaaccauaaaaaguuggaaaaagcaaauauuaagaacacaagagucugaaugugucuguaugaacgggucauguuucaccauaaugaccgauggcccgaguaauaaggccgccucguacaaaauuuucaagaucgaaaaggggaagguuacuaaaucaauagaguugaaugcacccaauuuucauuaugaggaauguuccuguuacccagacacuggcauagugauguguguaugcagggacaacuggcaugguucaaaucgaccuugggugucuuuuaaccaaaacuuggauuaucaaauaggauacaucugcaguggaguguucggugacaauccgcgucccgaagauggagagggcagcugcaauccagugacuguugauggagcaaacggaguaaaaggguuuucauacaaauaugauaaugguguuuggauaggaaggaccaaaaguaacagacuuagaaagggguuugagaugauuugggauccuaauggauggacaaauaccgacagugauuucucagugaaacaggauguuguagcaauaacugauuggucaggguacagcggaaguuucguccaacauccugaguuaacaggauuggacuguauaagaccuugcuucuggguugaguuggucagagggcagccuagagaaaauacaacaaucuggacuagugggagcagcauuucuuuuuguggcguuaauagugauacugcaaacuggucuuggccagacggugcugaguugccguucaccauugacaaguag

SEQ ID NO: 51755 - RNA, 1413 nt, Artificial Sequence
  derived and/or modified CDS sequence (wt) from neuraminidase__InfluenzaA__ADM95699
augaacccaaaucaaaagauaauaaccauuggaucaaucaguauagcaaucggaauaauuagucuaauguugcaaauaggaaauauuauuucaauaugggcuagucacucaauccaaacuggaagucaaaacaacacuggaauaugcaaccaaagaaucaucacauaugaaaacaacaccugggugaaucacacauauguuaauauuaacaacacuaauguuguugcugaagaggacaaaacuucagugacauuggccggcaauucaucucuuuguucuaucaguggaugggcuauauacacaaaagacaacagcauaagaauuggcuccaaaggagauguuuuugucauaagagaaccuuucauaucauguucucacuuggagugcagaaccuuuuuucugacccaaggcgcucuauuaaaugacaaacauucaaaugggaccguaaaggacagaaguccuuauagggccuuaaugagcuguccucuuggugaagcuccguccccauacaauucaaaguucgaaucaguugcauggucagcaagcgcaugccaugauggcaugggcugguuaacaaucggaauuucugguccagacaauggagcuguggcuguacuaaaauacaacggaauaauaacuggaaccauaaaaaguuggaaaaagcaaauauuaagaacacaagagucugaaugugucuguaugaacgggucauguuucacaauaaugaccgauggcccgaguaauaaggccgccucguacaaaauuuucaagaucgaaaaggggaagguuacuaaaucaauagaguugaaugcacccaauuuuuauuaugaggaauguuccuguuacccagacacuggcauagugauguguguauguagggacaacuggcaugguucaaaucgaccuugggugucuuuuaaucaaaacuuggauuaucaaauaggauacaucugcaguggaguguucggugacaauccgcgucccgaagauggagagggcagcugcaauccagugacuguugauggagcaaacggaguaaaaggguuuucauacaaauaugauaaugguguuuggauaggaaggaccaaaaguaacagacuuagaaagggguuugagaugauuugggauccuaauggauggacaaauaccgacagugauuucucagugaaacaggauguuguagcaauaacugauuggucaggguacagcggaaguuucguccaacauccugaguuaacaggauuggacuguauaagaccuugcuucuggguugaguuggucagagggcugccuagagaaaauacaacaaucuggacuagugggagcagcauuucuuuuuguggcguuaauagugauacugcaaacuggucuuggccagacggugcugaguugccguucaccauugacaaguag

SEQ ID NO: 51756 - RNA, 1413 nt, Artificial Sequence
  derived and/or modified CDS sequence (wt) from neuraminidase__InfluenzaA__ADM95701
augaacccaaaucaaaagauaauaaccauuggaucaaucaguauagcaaucggaauaauuagucuaauguugcaaauaggaaauauuauuucaauaugggcuagucacucaauccaaacuggaagucaaaacaacacuggaauaugcaaccaaagaaucaucacauaugaaaacaacaccugggugaaucacacauauguuaauauuaacaacacuaauguuguugcugaagaggacaaaacuucagugacauuggccggcaauucaucucuuuguucuaucaguggaugggcuauauacacaaaagacaacagcauaagaauuggcuccaaaggagauguuuuugucauaagagaaccuuucauaucauguucucacuuggaaugcagaaccuuuuuucugacccaaggcgcucuauuaaaugacaaacauucaaaugggaccguaaaggacagaaguccuuauagggccuuaaugagcuguccucuaggugaagcuccguccccauacaauucaaaguucgaaucaguugcauggucagcaagcgcaugccaugauggcaugggcugguuaacaaucggaauuucugguccagacaauggagcuguggcuguacuaaaauacaacggaauaauaacuggaaccauaaaaaguuggaaaaagcaaauauuaagaacacaagagucugaaugugucuguaugaacgggucauguuucaccauaaugaccgauggcccgaguaauaaggccgccucguacaaaauuuucaagaucgaaaaggggaagguuacuaaaucaauagaguugaaugcacccaauuuucauuaugaggaauguuccuguuacccagacacuggcauagugauguguguaugcagggacaacuggcaugguucaaaucgaccuugggugucuuuuaaccaaaacuuggauuaucaaauaggauacaucugcaguggaguguucggugacaauccgcgucccgaagauggagagggcagcugcaauccagugacuguugauggagcaaacggaguaaaaggguuuucauacaaauaugauaaugguguuuggauaggaaggaccaaaaguaacagacuuagaaagggguuugagaugauuugggauccuaauggauggacaaauaccgacagugauuucucagugaaacaggauguuguagcaauaacugauuggucaggguacagcggaaguuucguccaacauccugaguuaacaggauuggacuguauaagaccuugcuucuggguugaguuggucagagggcugccuagagaaaauacaacaaucuggacuagugggagcagcauuucuuuuuguggcguuaauagugauacugcaaacuggucuuggccagacggugcugaguugccguucaccauugacaaguag

SEQ ID NO: 51757 - RNA, 1413 nt, Artificial Sequence
  derived and/or modified CDS sequence (wt) from neuraminidase__InfluenzaA__ADM95702
augaacccaaaucaaaagauaauaaccauuggaucaaucaguauagcaaucggaauaauuagucuaauguugcaaauaggaaauauuauuucaauaugggccagucacucaauccaaacuggacgucaaaacaacacuggaauaugcaaccaaagaaucaucacauaugaaaacagcaccugggugaaucacacauauguuaauauuaacaacacuaaaguuguugcuggagaggacaaaacuucagugacauuggccggcaauucaucucuuuguucuaucaguggaugggcuauauacacaaaagacaacagcauaagaauuggcuccaaaggagauguuuuugucauaagagaaccuuucauaucauguucucacuuggaaugcagaaccuuuuuucugacccaaggcgcucuauuaaaugacaaacauucaaaugggaccguaaaggacagaaguccuuauagggccuuaaugagcuguccucuaggugaagcuccguccccauacaauucaaaguucgaaucaguugcauggucagcaagcgcaugccaugauggcaugggcugguuaacaaucggaauuucugguccagacaauggagcuguggcuguacuaaaauacaacggaauaauaacuggaaccauaaaaaguuggaaaaagcaaauauuaagaacacaagagucugaaugugucuguaugaacgggucauguuucaccauaaugaccgauggcccgaguaauaaggccgccucguacaaaauuuucaagaucgaaaaggggaagguuacuaaaucaauagaguugaaugcacccaauuuuuauuaugaggaaugcuccuguuacccagacacuggcauagugauguguguaugcagggacaacuggcaugguucaaaucgaccuugggugucuuuuaaucaaaacuuggauuaucaaauaggauacaucugcaguggaguguuuggugacaauccgcgucccgaagauggagagggcagcugcaauccagugacuguugauggagcaaacggaguaaaaggguuuucauacaaauaugguaaugggguuuggauaggaaggaccaaaaguaacagacuuagaaagggguuugaggugauuugggauccuaauggauggacaaauaccgacagugauuucucagugaaacaggauguuguagcaauaacugauuggucaggguacagcggaaguuucguccaacauccugaguuaacaggauuggacuguauaagaccuugcuucuggguugaguuagucagagggcugccuagagaaaauacaacaaucuggacuagugggagcagcauuucuuuuuguggcguuaauagugauacugcaaacuggucuuggccagacggugcugaguugccguucaccaucgacaaguag

SEQ ID NO: 51758 - RNA, 1413 nt, Artificial Sequence
  derived and/or modified CDS sequence (wt) from neuraminidase__InfluenzaA__ADM95704
augaacccaaaucaaaagauaauaaccauuggaucaaucaguauagcaaucggaauaauuagucuaauguugcaaauaggaaauauuguuucaauaugggcuagucacucaauccaaacuggaagucaaaacaacacuggaauaugcaaccaaagaaucaucacauaugaaaacaacaccugggugaaucacacauauguuaauauuaacaacacuaauguuguugcugaagaggacaaaacuucagugacauuggcuggcaauucaucucuuuguucuaucaguggaugggcuauauacacaaaagacaacagcauaagaauuggcuccaaaggagauguuuuugucauaagagaaccuuucauaucauguucucacuuggaaugcagaaccuuuuuucugacccaaggcgcucuauuaaaugacaaacauucaaaugggaccguaaaggacagaaguccuuauagggccuuaaugagcuguccucuaggugaagcuccguccccauacaauucaaaguucgaaucaguugcauggucagcaagcgcaugccaugauggcaugggcugguuaacaaucggaauuucugguccagacaauggagcuguggcuguacuaaaauacaacggaauaauaacuggaaccauaaaaaguuggaaaaagcaaauauuaagaacacaagagucugaaugugucuguaugaacgggucauguuucacaauaaugaccgauggcccgaguaauagggccgccucguacaaaauuuucaagaucgaaaaggggaaaguuacuaaaucaauagaguugaaugcacccaauuuucauuaugaggaauguuccuguuacccagacacuggcauagugauguguguaugcagggacaacuggcaugguucaaaucgaccuuggguuucuuuuaaccaaaacuuggauuaucaaauaggauacaucugcaguggaguguucggugacaauccgcgucccgaagauggagagggcagcugcaauccagugacuguugauggagcaaacggaguaaaaggguuuucauacaaauaugauaaugguguuuggauaggaaggaccaaaaguaacagacuuagaaagggguuugagaugauuugggauccuaauggauggacaaauaccgacagugauuucucagugaaacaggauguuguagcaauaacugauuggucaggguacagcggaaguuucguccaacauccugaguuaacaggauuggacuguauaagaccuugcuucuggguugaguuggucagagggcugccuagagaaaauacaacaaucuggacuagugggagcagcauuucuuuuuguggcguuaauagugauacugcaaacuggucuuggccagacggugcugaguugccguucaccauugacaaguag

SEQ ID NO: 51759 - RNA, 1413 nt, Artificial Sequence
  derived and/or modified CDS sequence (wt) from neuraminidase__InfluenzaA__ADM95705
augaacccaaaucaaaagauaauaaccauuggaucaaucaguauagcaaucggaauaauuagucuaauguugcaaauaggaaauauuauuucaauaugggccagucacucaauccaaacuggacgucaaaacaacacuggaauaugcaaccaaagaaucaucacauaugaaaacagcaccugggugaaucacacauauguuaauauuaacaacacuaaaguuguugcuggagaggacaaaacuucagugacauuggccggcaauucaucucuuuguucuaucaguggaugggcuauauacacaaaagacaacagcauaagaauuggcuccaaaggagauguuuuugucauaagagaaccuuucauaucauguucucacuuggaaugcagaaccuuuuuucugacccaaggcgcucuauuaaaugacaaacauucaaaugggaccguaaaggacagaaguccuuauagggccuuaaugagcuguccucuaggugaagcuccguccccauacaauucaaaguucgaaucaguugcauggucagcaagcgcaugccaugauggcaugggcugguuaacaaucggaauuucugguccagacaauggagcuguggcuguacuaaaauacaacggaauaauaacuggaaccauaaaaaguuggaaaaagcaaauauuaagaacacaagagucugaaugugucuguaugaacgggucauguuucaccauaaugaccgauggcccgaguaauaaggccgccucguacaaaauuuucaagaucgaaaaggggaagguuacuaaaucaauagaguugaaugcacccaauuuuuauuaugaggaaugcuccuguuacccagacacuggcauagugauguguguaugcagggacaacuggcaugguucaaaucgaccuugggugucuuuuaaucaaaacuuggauuaucaaauaggauacaucugcaguggaguguuuggugacaauccgcgucccgaagauggagagggcagcugcaauccagugacuguugauggagcaaacggaguaaaaggguuuucauacaaauaugguaaugggguuuggauaggaaggaccaaaaguaacagacuuagaaagggguuugagaugauuugggauccuaauggauggacaaauaccgacagugauuucucagugaaacaggauguuguagcaauaacugauuggucaggguacagcggaaguuucguccaacauccugaguuaacaggauuggacuguauaagaccuugcuucuggguugaguuagucagagggcugccuagagaaaauacaacaaucuggacuagugggagcagcauuucuuuuuguggcguuaauagugauacugcaaacuggucuuggccagacggugcugaguugccguucaccaucgacaaguag

SEQ ID NO: 51760 - RNA, 1413 nt, Artificial Sequence; identical to SEQ ID NO: 51759
  derived and/or modified CDS sequence (wt) from neuraminidase__InfluenzaA__ADM95706

SEQ ID NO: 51761 - RNA, 1413 nt, Artificial Sequence; identical to SEQ ID NO: 51759
  derived and/or modified CDS sequence (wt) from neuraminidase__InfluenzaA__ADM95707

SEQ ID NO: 51762 - RNA, 1413 nt, Artificial Sequence
  derived and/or modified CDS sequence (wt) from neuraminidase__InfluenzaA__ADM95708
augaacccaaaucaaaagauaauaaccauuggaucaaucaguauagcaaucggaauaauuagucuaauguugcaaauaggaaauauuauuucaauaugggcuagucacucaauccaaacugggagucaaaacaacacuggaauaugcaaccaaagaaucaucacauaugaaaacagcaccugggugaaucacacauauguuaauauuaacaacacuaauguuguugcuggagaggacaaaacgucagugacauuggccggcaauucaucucuuuguucuaucaguggaugggcuauauacacaaaagacaacagcauaagaauuggcuccaaaggagauguuuuugucauaagagaaccuuucauaucauguucucacuuggaaugcagaaccuuuuuucugacccaaggcgcucuauuaaaugacaaacauucaaaugggaccguaaaggacagaaguccuuauagggccuuaaugagcuguccucuaggugaagcuccguccccauacaauucaaaguucgaaucaguugcauggucagcaagcgcaugccaugauggcaugggcugguuaacaaucggaauuucugguccagacaauggagcuguggcuguacuaaaauacaacggaauaauaacuggaaccauaaaaaguuggaaaaagcaaauauuaagaacacaagagucugaaugugucuguaugaacgggucauguuucaccauaaugaccgauggcccgaguaauaaggccgccucguacaaaauuuucaagaucgaaaaggggaagguuacuaaaucaauagaguugaaugcacccaauuuuuauuaugaggaaugcuccuguuacccagauacuggcauagugauguguguaugcagggacaacuggcaugguucaaaucgaccuugggugucuuuuaaucaaaacuuggauuaucaaauaggauacaucugcaguggaguguuuggugacaauccgcgucccgaagauggagagggcagcugcaauccagugacuguugauggagcaaacggaguaaaaggguuuucauacaaauaugguaaugguguuuggauagggaggaccaaaaguaacagacuuagaaagggguuugagaugauuugggauccuaauggauggacaaauaccgacagugauuucucagugaaacaggauguuguagcaauaacugauuggucaggguacagcggaaguuucguccaacauccugaguuaacaggauuggacuguauaagaccuugcuucuggguugaguuagucagagggcugccuagagaaaauacaacaaucuggacuagugggagcagcauuucuuuuuguggcguuaauagugauacugcaaacuggucuuggccagacggugcugaguugccguucaccauugacaaguag

SEQ ID NO: 51763 - RNA, 1410 nt, Artificial Sequence
  derived and/or modified CDS sequence (wt) from neuraminidase__InfluenzaA__ADM95710
augaauccaaaucaaaagauaauaacgauuggcucuguuucucucaccauuuccacaauaugcuucuucaugcaaauugccaucuugauaacuacuguaacauugcauuucaagcaauaugaauucaacucccccccaaacaaccaagugaugcugugugaaccaacaauaauagaaagaaacauaacagagauaguguaucugaccaacaccaccauagagaaggaaauaugccccaaacuagcagaauacagaaauuggucaaagccgcaaugugacauuacaggauuugcaccuuuuucuaaggacaauucgauuaggcuuuccgcugguggggacaucugggugacaagagaaccuuaugugucaugcgauccugacaaguguuaucaauuugcucuuggacagggaacaacacuaaacaacgugcauucaaauaacacaguacgugauaggaccccuuaucggacccuauugaugaaugaguuagguguuccuuuucaucuggggaccaagcaagugugcauagcaugguccagcucaaguugucacgauggaaaagcauggcugcauguuuguauaacgggggaugauaaaaaugcaacugcuagcuucauuuacaaugggaggcuuguagauaguguuguuucaugguccaaagaaauccucaggacccaggagucagaaugcguuuguaucaauggaacuuguacaguaguaaugacugaugggagugcuucaggaaaagcugauacuaaaauacuauucauugaggaggggaaaaucguucauacuagcacauugucaggaagugcucagcaugucgaggagugcuccugcuauccucgauauccuggugucagaugugucugcagagacaacuggaaaggcuccaauaggcccaucguagauauaaacauaaaggaucauaacauuguuuccaguuauguguguucaggacuuguuggagacacacccagaaaaaacgacagcuccagcaguagccauuguuuggauccuaacaaugaagaagguggucauggagugaaaggcugggccuuugaugauggaaaugacguguggaugggaagaacgaucagcgagaagucacgcuuaggguaugaaaccuucaaagucauugaaggcugguccaacccuaaguccaaauugcagauaaauaggcaagucauaguugacagagguaauagguccgguuauucugguauuuucucuguugaaggcaaaagcugcaucaaucggugcuuuuauguggaguugauaaggggaagaaaagaggaaacugaugucuuguggaccucaaacaguauuguuguguuuuguggcaccucagguacauauggaacaggcucauggccugauggggcggacaucaaucucaugccuauauaa

SEQ ID NO: 51764 - RNA, 1410 nt, Artificial Sequence
  derived and/or modified CDS sequence (wt) from neuraminidase__InfluenzaA__ADM95711
augaauccaaaucaaaagauaauaacgauuggcucuguuucucucaccauuuccacaauaugcuucuucaugcaaauugccaucuugauaacuacuguaacauugcauuucaagcaauaugaauucaacucccccccaaacaaccaagugaugcugugugaaccaacaauaauagaaagaaacauaacagagauaguauaucugaccaacaccaccauagagaaggaaauaugccccaaacuagcagaauacagaaauuggucaaagccgcaaugugacauuacaggauuugcaccuuuuucuaaggacaauucgauuaggcuuuccgcugguggggacaucugggugacaagagaaccuuaugugucaugcgauccugacaaguguuaucaauuugcccuuggacagggaacaacacuaaacaacgugcauucaaauaacacaguacgugauaggaccccuuaucggacccuauugaugaaugaguuagguguuccuuuucaucuggggaccaagcaagugugcauagcaugguccagcucaaguugucacgauggaaaagcauggcugcauguuuguauaacgggggaugauaaaaaugcaacugcuagcuucauuuacaaugggaggcuuguagauaguguuguuucaugguccaaagaaauccucaggacccaggagucagaaugcguuuguaucaauggaacuuguacaguaguaaugacugaugggagugcuucaggaaaagcugauacuaaaauacuauucauugaggaggggaaaaucguucauacuagcacauugucaggaagugcucagcaugucgaggagugcuccugcuauccucgauauccuggugucagaugugucugcagagacaacuggaaaggcuccaauaggcccaucguagauauaaacauaaaggaucauagcauuguuuccaguuauguguguucaggacuuguuggagacacacccagaaaaaacgacagcuccagcaguagccauuguuuggauccuaacaaugaagaagguggucauggagugaaaggcugggccuuugaugauggaaaugacguguggaugggaagaacgaucagcgagaagucacgcuuaggguaugaaaccuucaaagucauugaaggcugguccaacccuaaguccaaauugcagauaaauaggcaagucauaguugacagagguaauagguccgguuauucugguauuuucucuguugaaggcaaaagcugcaucaaucggugcuuuuauguggaguugauaaggggaagaaaagaggaaacugaagucuuguggaccucaaacaguauuguuguguuuuguggcaccucagguacauauggaacaggcucauggccugauggggcggacaucaaucucaugccuauauaa

SEQ ID NO: 51765 - RNA, 1410 nt, Artificial Sequence; identical to SEQ ID NO: 51764
  derived and/or modified CDS sequence (wt) from neuraminidase__InfluenzaA__ADM95712

SEQ ID NO: 51766 - RNA, 1410 nt, Artificial Sequence; identical to SEQ ID NO: 48611
  derived and/or modified CDS sequence (wt) from neuraminidase__InfluenzaA__ADM95713

SEQ ID NO: 51767 - RNA, 1410 nt, Artificial Sequence
  derived and/or modified CDS sequence (wt) from neuraminidase__InfluenzaA__ADM95714
augaauccaaaucaaaagauaauaacgauuggcucuguuucucucaccauuuccacaauaugcuucuucaugcaaauugccaucuugauaacuacuguaacauugcauuucaagcaauaugaauucaacucccccccaaacaaccaagugaugcugugugaaccaacaauaauagaaagaaacauaacagagauaguguaucugaccaacaccaccauagagaaggaaauaugccccaaacuagcagaauacagaaauuggucaaagccgcaaugugacauuacaggauuugcaccuuuuucuaaggacaauucgauuaggcuuuccgcugguggggacaucugggugacaagagaaccuuaugugucaugcgauccugacaaguguuaucaauuugcccuuggacagggaacaacacuaaacaacgugcauucaaauaacacaguacgugauaggaccccuuaucggacccuauugaugaaugaguuagguguuccuuuucaucuggggaccaagcaagugugcauagcaugguccagcucaaguugucacgauggaaaagcauggcugcauguuuguauaacgggggaugauaaaaaugcaacugcuagcuucauuuacaaugggaggcuuguagauaguguuguuucaugguccaaagaaauccucaggacccaggagucagaaugcguuuguaucaauggaacuuguacaguaguaaugacugaugggagugcuucaggaaaagcugauacuaaaauacuauucauugaggaggggaaaaucguucauacuagcacauugucaggaagugcucagcaugucgaggagugcuccugcuauccucgauauccuggugucagaugugucugcagagacaacuggaaaggcuccaauaggcccaucguagauauaaacauaaaggaucauagcauuguuuccaguuauguguguucaggacuuguuggagacacacccagaaaaaacgacagcuccagcaguagccauuguuuggauccuaacaaugaagaagguggucauggagugaaaggcugggccuuugaugauggaaaugacguguggaugggaagaacgaucagcgagaagucacgcuuaggguaugaaaccuucaaagucauugaaggcugguccaacccuaaauccaaauugcagauaaauaggcaagucauaguugacagagguaauagguccgguuauucugguauuuucucuguugaaggcaaaagcugcaucaaucggugcuuuuauguggaguugauaaggggaagaaaagaggaaacugaugucuuguggaccucaaacaguauuguuguguuuuguggcaccucagguacauauggaacaggcucauggccugauggggcggacaucaaucucaugccuauauaa

SEQ ID NO: 51768 - RNA, 1410 nt, Artificial Sequence; identical to SEQ ID NO: 48611
  derived and/or modified CDS sequence (wt) from neuraminidase__InfluenzaA__ADM95715

SEQ ID NO: 51769 - RNA, 1410 nt, Artificial Sequence
  derived and/or modified CDS sequence (wt) from neuraminidase__InfluenzaA__ADM95716
augaauccaaaucaaaagauaauaacgauuggcucuguuucucucaccauuuccacaauaugcuucuucaugcaaauugccaucuugauaacuacuguaacauugcauuucaagcaauaugaauucaacucccccccaaacaaccaagugaugcugugugaaccaacaauaauagaaagaaacauaacagagauaguguaucugaccaacaccaccauagagaaggaaauaugccccaaacuagcagaauacagaaauuggucaaagccgcaaugugacauuacaggauuugcaccuuuuucuaaggacaauucgauuaggcuuuccgcugguggggacaucugggugacaagagaaccuuaugugucaugcgauccugacaaguguuaucaauuugcccuuggacagggaacaacacuaaacaacgugcauucaaauaacacaguacgugauaggaccccuuaucggacccuauugaugaaugaguuagguguuccuuuucaucuggggaccaagcaagugugcauagcaugguccagcucaaguugucacgauggaaaagcauggcugcauguuuguauaacgggggaugauaaaaaugcaacugcuagcuucauuuacaaugggaggcuuguagauaguguuguuucaugguccaaagaaauccucaggacccaggagucagaaugcguuuguaucaauggaacuuguacaguaguaaugacugaugggagugcuucaggaaaagcugauacuaaaauacuauucauugaggaggggaaaaucguucauacuagcacauugucaggaagugcucagcaugucgaggagugcuccugcuauccucgauauccuggugucagaugugucugcagagacaacuggaaaggcuccaauaggcccaucguagauauaaacauaaaggaucauagcauuguuuccaguuauguguguucaggacuuguuggagacacacccagaaaaaacgacagcuccagcaguagccauuguuuggauccuaacaaugaagaagguggucauggagugaaaggcugggccuuugaugauggaaaugacguguggaugggaagaacgaucagcgagaagucacgcuuaggguaugaaaccuucaaagucauugaaggcugguccaacccuaaguccaaauugcagauaaauaggcaagucauaguugacagagguaauagguccgguuauucugguauuuucucuguugaaggcaaaagcugcaucaaucggugcuuuuauguggaguugauaaggggaagaaaagaggaaacugaugucuuguggaccucaaacaguauuguuguguuuuguggcaccucagguacauauggaacaggcucauggccugauggggcggacaucaaucucaugccuauauaa

SEQ ID NO: 51770 - RNA, 1410 nt, Artificial Sequence
  derived and/or modified CDS sequence (wt) from neuraminidase__InfluenzaA__ADM95717
augaauccaaaucaaaagauaauaacgauuggcucuguuucucucaccauuuccacaauaugcuucuucaugcaaauugccaucuugauaacuacuguaacauugcauuucaagcaauaugaauucaacucccccccaaacaaccaagugaugcugugugaaccaacaauaauagaaagaaacauaacagagauaguguaucugaccaacaccaccauagagaaggaaauaugccccaaacuagcagaauacagaaauuggucaaagccgcaaugugacauuacaggauuugcaccuuuuucuaaggacaauucgauuaggcuuuccgcugguggggacaucugggugacaagagaaccuuaugugucaugcgauccugacaaguguuaucaauuugcccuuggacagggaacaacacuaaacaacgugcauucaaauaacacaguacgugauaggaccccuuaucggacccuauugaugaaugaguuagguguuccuuuucaucuggggaccaagcaagugugcauagcaugguccagcucaaguugucacgauggaaaagcauggcugcauguuuguauaacgggggaugauaaaaaugcaacugcuagcuucauuuacaaugggaggcuuguagauaguguuguuucaugguccaaagaaauccucaggacccaggagucagaaugcguuuguaucaauggaacuuguacaguaguaaugacugaugggagugcuucagggaaagcugauacuaaaauacuauucauugaggaggggaaaaucguucauacuagcacauugucaggaagugcucagcaugucgaggagugcuccugcuauccucgauauccuggugucagaugugucugcagagacaacuggaaaggcuccaauaggcccaucguagauauaaacauaaaggaucauagcauuguuuccaguuauguguguucaggacuuguuggagacacacccagaaaaaacgacagcuccagcaguagccauuguuuggauccuaacaaugaagaagguggucauggagugaaaggcugggccuuugaugauggaaaugacguguggaugggaagaacgaucagcgagaagucacgcuuaggguaugaaaccuucaaagucauugaaggcugguccaacccuaaguccaaauugcagauaaauaggcaagucauaguugacagagguaauagguccgguuauucugguauuuucucuguugaaggcaaaagcugcaucaaucggugcuuuuauguggaguugauaaggggaagaaaagaggaaacugaugucuuguggaccucaaacaguauuguuguguuuuguggcaccucaggcacauauggaacaggcucauggccugauggggcggacaucaaucucaugccuauauaa

SEQ ID NO: 51771 - RNA, 1410 nt, Artificial Sequence; identical to SEQ ID NO: 48611
  derived and/or modified CDS sequence (wt) from neuraminidase__InfluenzaA__ADM95718

SEQ ID NO: 51772 - RNA, 1410 nt, Artificial Sequence
  derived and/or modified CDS sequence (wt) from neuraminidase__InfluenzaA__ADM95719
augaauccaaaucaaaagauaauaacgauuggcucuguuucucucaccauuuccacaauaugcuucuucaugcaaauugccaucuugauaacuacuguaacauugcauuucaagcaauaugaauucaacucccccccaaacaaccaagugaugcugugugaaccaacaauaauagaaagaaacauaacagagauaguguaucugaccaacaccaccauagagaaggaaauaugccccaaacucgcagaauacagaaauuggucaaagccgcaaugugacauuacaggauuugcaccuuuuucuaaggacaauucgauuaggcuuuccgcugguggggacaucugggugacaagagaaccuuaugugucaugcgauccugacaaguguuaucaauuugcccuuggacagggaacaacacuaaacaacgugcauucaaauaacacaguacgugauaggaccccuuaucggacccuauugaugaaugaguuagguguuccuuuucaucuggggaccaagcaagugugcauagcaugguccagcucaaguugucacgauggaaaagcauggcugcauguuuguauaacgggggaugauaaaaaugcaacugcuagcuucauuuacaaugggaggcuuguagauaguguuguuucaugguccaaagaaauccucaggacccaggagucagaaugcguuuguaucaauggaacuuguacaguaguaaugacugaugggagugcuucaggaaaagcugauacuaaaauacuauucauugaggaggggaaaaucguucauacuagcacauugucaggaagugcucagcaugucgaggagugcuccugcuauccucgauauccuggugucagaugugucugcagagacaacuggaaaggcuccaauaggcccaucguagauauaaacauaaaggaucauagcauuguuuccaguuauguguguucaggacuuguuggagacacacccagaaaaaacgacagcuccagcaguagccauuguuuggauccuaacaaugaagaagguggucauggagugaaaggcugggccuuugaugauggaaaugacguguggaugggaagaacgaucagcgagaagucacgcucaggguaugaaaccuucaaagucauugaaggcugguccaacccuaaguccaaauugcagauaaauaggcaagucauaguugacagagguaauagguccgguuauucugguauuuucucuguugaaggaaaaagcugcaucaaucggugcuuuuauguggaguugauaaggggaagaaaagaggaaacugaagucuuguggaccucaaacaguauuguuguguuuuguggcaccucagguacauauggaacaggcucauggccugauggggcggacaucaaucucaugccuauauaa

SEQ ID NO: 51773 - RNA, 1410 nt, Artificial Sequence; identical to SEQ ID NO: 48611
  derived and/or modified CDS sequence (wt) from neuraminidase__InfluenzaA__ADM95720

SEQ ID NO: 51774 - RNA, 1410 nt, Artificial Sequence; identical to SEQ ID NO: 48611
  derived and/or modified CDS sequence (wt) from neuraminidase__InfluenzaA__ADM95721

SEQ ID NO: 51775 - RNA, 1410 nt, Artificial Sequence
  derived and/or modified CDS sequence (wt) from neuraminidase__InfluenzaA__ADM95723
augaauccaaaucaaaagauaauaacgauuggcucuguuucucucaccauuuccacaauaugcuucuucaugcaaauugccaucuugauaacuacuguaacauugcauuucaagcaauaugaauucaacucccccccaaacaaccaagugaugcugugugaaccaacaauaauagaaagaaacauaacagagauaguguaucugaccaacaccaccauagagaaggaaauaugccccaaacuagcagaauacagaaauuggucaaagccgcaaugugacauuacaggauuugcaccuuuuucuaaggacaauucaauuaggcuuuccgcugguggggacaucugggugacaagagaaccuuaugugucaugcgauccugacaaguguuaucaauuugcccuuggacagggaacaacacuaaacaacgugcauucaaauaacacaguacgugacaggaccccuuaucggacccuauugaugaaugaguuagguguuccuuuucaucuggggaccaagcaagugugcauagcaugguccagcucaaguugucacgauggaaaagcauggcugcauguuuguauaacgggggaugauaaaaaugcaacugcuagcuucauuuacaaugggaggcuuguagauaguguuguuucaugguccaaagaaauccuuaggacccaggagucagaaugcguuuguaucaauggaacuuguacaguaguaaugacugaugggagugcuucaggaaaagcugauacuaaaauacuauucauugaggaggggaaaaucguucauacuagcacauugucaggaagugcucagcaugucgaggagugcuccugcuauccucgauauccuggugucagaugugucugcagagacaacuggaaaggcuccaauaggcccaucguagauauaaacauaaaggaucauagcauuguuuccaguuauguguguucaggacuuguuggagacacacccagaaaaaacgacagcuccagcaguagccauuguuuggauccuaacaaugaagaagguggucauggagugaaaggcugggccuuugaugauggaaacgacguguggaugggaagaacgaucagcgagaagucacgcuuaggguaugaaaccuucaaagucauugaaggcugguccaacccuaaguccaaauugcagauaaauaggcaagucauaguugacagagguaauagguccgguuauucugguauuuucucuguugaaggcaaaagcugcaucaaucggugcuuuuauguggaguugauaaggggaagaaaagaggaaacugaagucuuguggaccucaaacaguauuguuguguuuuguggcaccucagguacauauggaacaggcucauggccugauggggcggacaucaaucucaugccuauauaa

SEQ ID NO: 51776 - RNA, 1410 nt, Artificial Sequence
  derived and/or modified CDS sequence (wt) from neuraminidase__InfluenzaA__ADM95724
augaauccaaaucaaaagauaauaacgauuggcucuguuucucucaccauuuccacaauaugcuucuucaugcaaauugccaucuugauaacuacuguaacauugcauuucaagcaauaugaauucaacucccccccaaacaaccaagugaugcugugugaaccaacaauaauagaaagaaacauaacagagauaguguaucugaccaacaccaccauagagaaggaaauaugccccaaacuagcagaauacagaaauuggucaaagccgcaaugugacauuacaggauuugcaccuuuuucuaaggacaauucgauuaggcuuuccgcugguggggacaucugggugacaagagaaccuuaugugucaugcgauccugacaaguguuaucaauuugcccuuggacagggaacaacacuaaacaacgugcauucaaauaacacaguacgugauaggaccccuuaucggacccuauugaugaaugaguuagguguuccuuuucaucuggggaccaagcaagugugcauagcaugguccagcucaagcugucacgauggaaaagcauggcugcauguuuguauaacgggggaugauaaaaaugcaacugcuagcuucauuuacaaugggaggcuuguagauaguguuguuucaugguccaaagaaauccucaggacccaggagucagaaugcguuuguaucaauggaacuuguacaguaguaaugacugaugggagugcuucaggaaaagcugauacuaaaauacuauucauugaggaggggaaaaucguucauacuagcacauugucaggaagugcucagcaugucgaggagugcuccugcuauccucgauauccuggugucagaugugucugcagagacaacuggaaaggcuccaauaggcccaucguagauauaaacauaaaggaucauagcauuguuuccaguuauguguguucaggacuuguuggagacacacccagaaaaaacgacagcuccagcaguagccauuguuuggauccuaacaaugaagaagguggucauggagugaaaggcugggccuuugaugauggaaaugacguguggaugggaagaacgaucagcgagaagucacgcuuaggguaugaaaccuucaaagucauugaaggcugguccaacccuaauuccaaauugcagauaaauaggcaagucauaguugacagagguaauagguccgguuauucugguauuuucucuguugaaggcaaaagcugcaucaaucggugcuuuuauguggaguugauaaggggaagaaaagaggaaacugaagucuuguggaccucaaacaguauuguuguguuuuguggcaccucagguacauauggaacaggcucauggccugauggggcggacaucaaucucaugccuauauaa

SEQ ID NO: 51777 - RNA, 1410 nt, Artificial Sequence
  derived and/or modified CDS sequence (wt) from neuraminidase__InfluenzaA__ADM95725
augaauccaaaucaaaagauaauaacgauuggcucuguuucucucaccauuuccacaauaugcuucuucaugcaaauugccaucuugauaacuacuguaacauugcauuucaagcaauaugaauucaacccccccccaaacaaccaagugaugcugugugaaccaacaauaauagaaagaaacauaacagagauaguguaucugaccaacaccaccauagagaaggaaguaugccccaaacuagcagaauacagaaauuggucaaagccgcaaugugacauuacaggauuugcaccuuuuucuaaggacaauucgauuaggcuuuccgcugguggggacaucugggugacaagagaaccuuaugugucaugcgauccugacaaguguuaucaauuugcccuuggacagggaacaacacuaaacaacgugcauucaaauaacacaguacgugauaggaccccuuaucggacccuauugaugaaugaguuagguguuccuuuucaucuggggaccaagcaagugugcauagcaugguccagcucaaguugucacgauggaaaagcauggcugcauguuuguauaacgggggaugauaaaaaugcaacugcuagcuucauuuacaaugggaggcuuguagauaguguuguuucaugguccaaagaaauccucaggacccaggagucagaaugcguuuguaucaauggaacuuguacaguaguaauaacugaugggagugcuucaggaaaagcugauacuaaaauacuauucauugaggaggggaaaaucguucauacuagcacauugucaggaagugcucagcaugucgaggagugcuccugcuauccucgauauccuggugucagaugugucugcagagacaacuggaaaggcuccaauaggcccaucguagauauaaacauaaaggaucauagcauuguuuccaguuauguguguucaggacuuguuggagacacacccagaaaaaacgacagcuccagcaguagccauuguuuggauccuaacaaugaagaagguggucauggagugaaaggcugggccuuugaugauggaaaugacguguggaugggaagaacgaucagcgagaagucacgcuuaggguaugaaaccuucaaagucauugaaggcugguccaacccuaaauccaaauugcagauaaauaggcaagucauaguugacagagguaauagguccgguuauucugguauuuucucuguugaaggcaaaagcugcaucaaucggugcuuuuauguggaguugauaaggggaagaaaagaggaaacugaugucuuguggaccucaaacaguauuguuguguuuuguggcaccucagguacauauggaacaggcucauggccugauggggcggacaucaaucucaugccuauauaa

SEQ ID NO: 51778 - RNA, 1410 nt, Artificial Sequence
  derived and/or modified CDS sequence (wt) from neuraminidase__InfluenzaA__ADM95726
augaauccaaaucaaaagauaauaacgauuggcucuguuucucucaccauuuccacaauaugcuucuucaugcaaauugccaucuugauaacugcuguaacauugcauuucaagcaauaugaauucaacucccccccaaacaaccaagugaugcugugugaaccaacaauaauagaaagaaacauaacagagauaguguaucugaccaacaccaccauagagaaggaaauaugccccaaacuagcagaauacagaaauuggucaaagccgcaaugugacauuacaggauuugcaccuuuuucuaaggacaauucgauuaggcuuuccgcugguggggacaucugggugacaagagaaccuuaugugucaugcgauccugacaaguguuaucaauuugcccuuggacagggaacaacacuaaacaacgugcauucaaauaacacaguacgugauaggaccccuuaucggacccuauugaugaaugaguuagguguuccuuuucaucuggggaccaagcaagugugcauagcaugguccagcucaaguugucacgauggaaaagcauggcugcauguuuguauaacgggggaugauaaaaaugcaacugcuagcuucauuuacaaugggaggcuuguagauaguguuguuucaugguccaaagaaauccucaggacccaggagucagaaugcguuuguaucaauggaacuuguacaguaguaaugacugaugggagugcuucaggaaaagcugauacuaaaauacuauucauugaggaggggaaaaucguucauacuagcacauugucaggaagugcucagcaugucgaggagugcuccugcuauccucgauauccuggugucagaugugucugcagagacaacuggaaaggcuccaauaggcccaucguagauauaaacauaaaggaucauagcauuguuuccaguuauguguguucaggacuuguuggagacacacccagaaaaaacgacagcuccagcaguagccauuguuuggauccuaacaaugaagaagguggucauggagugaaaggcugggccuuugaugauggaaaugacguguggaugggaagaacgaucagcgagaagucacgcuuaggguaugaaaccuucaaagucauugaaggcugguccaacccuaaguccaaauugcagauaaauaggcaagucauaguugacagagguaauagguccgguuauucugguauuuucucuguugaaggcaaaagcugcaucaaucggugcuuuuauguggaguugauaaggggaagaaaagaggaaacugaugucuuguggaccucaaacaguauuguuguguuuuguggcaccucagguacauauggaacaggcucauggccugauggggcggacaucaaucucaugccuauauaa

SEQ ID NO: 51779 - RNA, 1410 nt, Artificial Sequence
  derived and/or modified CDS sequence (wt) from neuraminidase__InfluenzaA__ADM95727
augaauccaaaucaaaagauaauaacgauuggcucuguuucucucaccauuuccacaauaugcuucuucaugcaaauugccaucuugauaacuacuguaacauugcauuucaagcaauaugaauucaacucacccccaaacaaccaagugaugcugugugaaccaacaauaauagaaagaaacauaacagagauaguguaucugaccaacaccaccauagagaaggaaauaugccccaaacuagcagaauacagaaauuggucaaagccccaaugugacauuacaggauuugcaccuuuuucuaaggacaauucgauuaggcuuuccgcugguggggacaucugggugacaagagaaccuuaugugucaugcgauccugacaaguguuaucaauuugcccuuggacagggaacaacacuaaacaacgugcauucaaauaacacaguacgugauaggaccccuuaucggacccuauugaugaaugaguuagguguuccuuuucaucuggggaccaagcaagugugcauagcaugguccagcucaaguugucacgauggaaaagcauggcugcauguuuguauaacgggggaugauaaaaaugcaacugcuagcuucauuuacaaugggaggcuuguagauaguguuguuucaugguccaaagaaauccucaggacccaggagucagaaugcguuuguaucaauggaacuuguacaguaguaaugacugaugggagugcuucaggaaaagcugauacuaaaauacuauucauugaggaggggaaaaucguucauacuagcacauugucaggaagugcucagcaugucgaggagugcuccugcuauccucgauauccuggugucagaugugucugcagagacaacuggaaaggcuccaauaggcccaucguagauauaaacauaaaggaucauagcauuguuuccaguuauguguguucaggacuuguuggagacacacccagaaaaaacgacagcuccagcaguagccauuguuuggauccuaacaaugaagaagguggucauggagugaaaggcugggccuuugaugauggaaaugacguguggaugggaagaacgaucagcgagaagucacgcuuaggguaugaaaccuucaaagucauugaaggcugguccaacccuaaguccaaauugcagauaaauaggcaagucauaguugacagagguaauagguccgguuauucugguauuuucucuguugaaggcaaaagcugcaucaaucggugcuuuuauguggaguugauaaggggaagaaaagaggaaacugaagucuuguggaccucaaacaguauuguuguguuuuguggcaccucagguacauauggaacaggcucauggccugauggggcggacaucaaucucaugccuauauaa

SEQ ID NO: 51780 - RNA, 1410 nt, Artificial Sequence
  derived and/or modified CDS sequence (wt) from neuraminidase__InfluenzaA__ADM95728
augaauccaaaucaaaagauaauaacgauuggcucuguuucucucaccauuuccacaauaugcuucuucaugcaaauugccaucuugauaacuacugugacauugcauuucaagcaauaugaauucaacucccccccaaacaaccaagugaugcugugugaaccaacaauaauagaaagaaacauaacagagauaguguaucugaccaacaccaccauagagaaggaaauaugccccgaacuagcagaauacagaaauuggucaaagccgcaaugugacauuacaggauuugcaccuuuuuccaaggacaauucgauuaggcuuuccgcugguggggacaucuggguaacaagagaaccuuaugugucaugcgauccugacaaguguuaucaauuugcccuuggacagggaacaacacuaaacaacgugcauucaaauaacacaguacgugauaggaccccuuaucggacccuauugaugaaugaguuagguguuccuuuucaucuggggaccaagcaagugugcauagcaugguccagcucaaguugucacgauggaaaagcauggcugcauguuuguauaacgggggaugauaaaaaugcaacugcuagcuucauuuacaaugggaggcuuguagauaguguuguuucaugguccaaagaaauccucaggacccaggagucagaaugcguuuguaucaauggaacuuguacaguaguaaugacugaugggagugcuucaggaaaagcugauacuaaaauacuauucauugaggaggggaaaaucguucauacuagcacauugucaggaagugcucagcaugucgaggagugcuccugcuauccucgauauccuggugucagaugugucugcagagacaacuggaaaggcuccaauaggcccaucguagauauaaacauaaaggaucauagcauuguuuccaguuauguguguucaggacuuguuggagacacacccagaaaaaacgacagcuccagcaguagccauuguuuggauccuaacaaugaagaagguggucauggagugaaaggcugggccuuugaugauggaaaugacguguggaugggaagaacgaucagcgagaagucacgcuuaggguaugaaaccuucaaagucauugaaggcugguccaacccuaaguccaaauugcagauaaauaggcaagucauaguugacagagguaauagguccgguuauucugguauuuucucuguugaaggcaaaagcugcaucaaucggugcuuuuauguggaguugauaaggggaagaaaagaggaaacugaagucuuguggaccucaaacaguauuguuguguuuuguggcaccucagguacauauggaacaggcucauggccugauggggcggacaucaaucucaugccuauauaa

SEQ ID NO: 51781 - RNA, 1410 nt, Artificial Sequence
  derived and/or modified CDS sequence (wt) from neuraminidase__InfluenzaA__ADM95729
augaauccaaaucaaaagauaauaacgauuggcucuguuucucucaccauuuccacaauaugcuucuucaugcaaauugccaucuugauaacuacuguaacauugcauuucaagcaauaugaauucaacucccccccaaacaaccaagugaugcugugugaaccaacaauaauagaaagaaacauaacagagauaguguaucugaccaacaccaccauagagaaggaaauaugccccaaacuagcagaauacagaaauuggucaaagccgcaaugugacauuacaggauuugcaccuuuuucuaaggacaauucgauuaggcuuuccgcugguggggacaucugggugacaagagaaccuuaugugucaugcgauccugacaaguguuaucaauuugcccuuggacagggaacaacacuaaacaacgugcauucaaauaacacaguacgugauaggaccccuuaucggacccuauugaugaaugaguuagguguuccuuuucaucuggggaccaagcaagugugcauagcaugguccagcucaaguugucacgauggaaaagcauggcugcauguuuguauaacgggggaugauaaaaaugcaacugcuagcuucauuuacaaugggaggcuuguagauaguguuguuucaugguccaaagaaauccucaggacccaggagucagaaugcguuuguaucaauggaacuuguacaguaguaaugacugaugggagugcuucaggaaaagcugauacuaaaauacuauucauugaggaggggaaaaucguucauacuagcacauugucaggaagugcucagcaugucgaggagugcuccugcuauccucgauauccuggugucagaugugucugcagagacaacuggaaaggcuccaauaggcccaucguagauauaaacauaaaggaucauagcauuguuuccaguuauguguguucaggacuuguuggagacacacccagaaaaaacgacagcuccagccguagccauuguuuggauccuaacaacgaagaagguggucauggagugaaaggcugggccuuugaugauggaaaugacguguggaugggaagaacgaucagcgagaagucacgcuuaggguaugaaaccuucaaagucauugaaggcugguccaacccuaaguccaaauugcagauaaauaggcaagucauaguugacagagguaauagguccgguuauucugguauuuucucuguugaaggcaaaagcugcaucaaucggugcuuuuauguggaguugauaaggggaagaaaagaggaaacugaagucuuguggaccucaaacaguauuguuguguuuuguggcaccucagguacauauggaacaggcucauggccugauggggcggacaucaaucucaugccuauauaa

SEQ ID NO: 51782 - RNA, 1410 nt, Artificial Sequence
  derived and/or modified CDS sequence (wt) from neuraminidase__InfluenzaA__ADM95730
augaauccaaaucaaaagauaauaacgauuggcucuguuucucucaccauuuccacaauaugcuucuucaugcaaauugccaucuugauaacuacuguaacauugcauuucaagcaauaugaauucaacucccccccaagcaaccaagugaugcugugugaaccaacaauaauagaaagaaacauaacagagauaguguaucugaccaacaccaccauagagaaggaaauaugccccaaacuagcagaauacagaaauuggucaaagccgcaaugugacauuacaggauuugcaccuuuuucuaaggacaauucgauuaggcuuuccgcugguggggacaucugggugacaagagaaccuuaugugucaugcgauccugacaaguguuaucaauuugcccuuggacagggaacaacacuaaacaacgugcauucaaauaacacaguacgugauaggaccccuuaucggacccuauugaugaaugaguuagguguuccuuuucaucuggggaccaagcaagugugcauagcaugguccagcucaaguugucacgauggaaaagcauggcugcauguuuguauaacgggggaugauaaaaaugcaacugcuagcuucauuuacaaugggaggcuuguagauaguguuguuucaugguccaaagaaauccucaggacccaggagucagaaugcguuuguaucaauggaacuuguacaguaguaaugacugaugggagugcuucaggaaaagcugauacuaaaauacuauucauugaggaggggaaaaucguucauacuagcacauugucaggaagugcucagcaugucgaggagugcuccugcuauccucgauauccuggugucagaugugucugcagagacaacuggaaaggcuccaauaggcccaucguagauauaaacauaaaggaucauagcauuguuuccaguuauguguguucaggacuuguuggagacacacccagaaaaaacgacagcuccagcaguagccauuguuuggauccuaacaaugaagaagguggucauggagugaaaggcugggccuuugaugauggaaaugacguguggaugggaagaacgaucagcgagaagucacgcuuaggguaugaaaccuucaaagucauugaaggcugguccaacccuaaguccaaauugcagauaaauaggcaagucauaguugacagagguaauagguccgguuauucugguauuuucucuguugaaggcaaaagcugcaucaaucggugcuuuuauguggaguugauaaggggaagaaaagaggaaacugaagucuuguggaccucaaacaguauuguuguguuuuguggcaccucagguacauauggaacaggcucauggccugauggggcggacaucaaucucaugccuauauaa

SEQ ID NO: 51783 - RNA, 1410 nt, Artificial Sequence
  derived and/or modified CDS sequence (wt) from neuraminidase__InfluenzaA__ADM95732
augaauccaaaucaaaagauaauaacgauuggcucuguuucucucaccauuuccacaauaugcuucuucaugcaaauugccaucuugauaacuacuguaacauugcauuuuaagcaauaugaauucaacucccccccaaacaaccaagugaugcuaugugaaccaacaauaauagaaagaaacauaacagagauaguguaucugaccaacaccaccauagagaaggaaauaugccccaaacuagcagaauacagaaauuggucaaagccgcaaugugacaucacaggauuugcaccuuuuucuaaggacaauucgauuaggcuuuccgcugguggggacauuugggugacgagagaaccuuaugugucaugcgauccugacaaguguuaucaauuugcccuugggcagggaacaacacuaaacaacgugcauucaaaugacacaguacgugauaggaccccuuaucggacccuauugaugaaugaguuagguguuccuuuucaucuggggaccaagcaagugugcauagcaugguccagcucaaguugucacgauggaaaagcauggcugcauguuuguauaacgggggaugauaaaaaugcaacugcuagcuucauuuacaaugggaggcuuguagauaguauuguuucaugguccaaagaaauccucaggacccaggagucagaaugcguuuguaucaauggaacuuguacaguaguaaugacugaugggagugcuucaggaaaagcugauacuaaaauacuauucauugaggaggggaaaaucguucauacuagcacauugucaggaagugcucagcaugucgaggaguguuccugcuauccucgauauccuggugucagaugugucugcagagacaauuggaaaggcuccaauaggcccaucguagauauaaacauaaaggaccguagcauuguuuccaguuauguguguucagggcuuguuggagacacacccagaaaaaacgacagcuccagcaguagccauuguuuggauccuaacaaugaagaagguggucauggagugaaaggcugggccuuugaugauggaaaugacguguggaugggaagaacgaucagcgagaagucacgcuuaggguaugaaaccuucaaagucauugaaggcugguccaaccauaaguccaaauugcagauaaauaggcaagucauaguugacagagguaauagguccgguuauucugguauuuucucuguugaaggcaaaagcugcaucaaucggugcuuuuauguggaguugauaaggggaagaaaagaggaaacugaagucuuguggaccucaaacaguauuguuguguuuuguggcacuucagguacauauggaacaggcucauggccugauggggcggacaucaaucucaugccuauauaa

SEQ ID NO: 51784 - RNA, 1410 nt, Artificial Sequence
  derived and/or modified CDS sequence (wt) from neuraminidase__InfluenzaA__ADM95733
augaauccaaaucaaaagauaauaacgauuggcucuguuucucucaccauuuccacaauaugcuucuucaugcaaauugccauauugauaacuacuguaacauugcauuucaagcaauaugaauucaacucccccccaaacaaccaagugaugcugugugaaccaacaauaauagaaagaaacauaacagagauaguguaucugaccaacaccaccauagagaaggaaauaugccccaaacuagcagaauacagaaauuggucaaagccgcaaugugacauuacaggauuugcaccuuuuucuaaggacaauucgauuaggcuuuccgcugguggggacaucugggugacaagagaaccuuaugugucaugcgauccugacaaguguuaucaauuugcccuuggacagggaacaacacuaaacaacgugcauucaaauaacacaguacgugauaggaccccuuaucggacccuauugaugaaugaguuagguguuccuuuucaucuggggaccaagcaagugugcauagcaugguccagcucaaguugucacgauggaaaagcauggcugcauguuuguauaacgggggaugauaaaaaugcaacugcuagcuucauuuacaaugggaggcuuguagauaguguuguuucaugguccaaagaaauccucaggacccaggagucagaaugcguuuguaucaauggaacuuguacaguaguaaugacugaugggagugcuucaggaaaagcugauacuaaaauacuauucauugaggaggggaaaaucguucauacuagcacauugucaggaagugcucagcaugucgaggagugcuccugcuauccucgauauccuggugucagaugugucugcagagacaacuggaaaggcuccaauaggcccaucguagauauaaacauaaaggaucauagcauuguuuccaguuauguguguucaggacuuguuggagacacacccagaaaaaacgacagcuccagcaguagccauuguuuggauccuaacaaugaagaagguggucauggagugaaaggcugggccuuugaugauggaaaugacguguggaugggaagaacgaucagugagaagucacgcuuaggguaugaaaccuucaaagucauugaaggcugguccaacccuaaguccaaauugcagauaaauaggcaagucauaguugacagagggaauagguccgguuauucugguauuuucucuguugaaggcaaaagcugcaucaaucggugcuuuuauguggaguugauaaggggaagaaaagaggaaacugaagucuuguggaccucaaacaguauuguuguguuuuguggcaccucagguacauauggaacaggcucauggccugauggggcggacaucaaucucaugccuauauaa

SEQ ID NO: 51785 - RNA, 1410 nt, Artificial Sequence; identical to SEQ ID NO: 51784
  derived and/or modified CDS sequence (wt) from neuraminidase__InfluenzaA__ADM95734

SEQ ID NO: 51786 - RNA, 1410 nt, Artificial Sequence
  derived and/or modified CDS sequence (wt) from neuraminidase__InfluenzaA__ADM95735
augaauccaaaucaaaagauaauaacgauuggcucuguuucucucaccauuuccacaauaugcuucuucaugcaaauugccaucuugauaacuacuguaacauugcauuucaagcaauaugaauucaacucccccccaaacaaccaagugaugcugugugaaccaacaauaauagaaagaaacauaacagagauaguguaucugaccaacaccaccauagagaaggaaauaugccccaaacuagcagaauacagaaauuggucaaagccgcaaugugacauuacaggauuugcaccuuuuucuaaggacaauucgauuaggcuuuccgcugguggggacaucugggugacaagagaaccuuaugugucaugcgauccugacaaguguuaucaauuugcccuuggacagggaacaacacuaaacaaugugcauucaaauaacacaguacgugauaggaccccuuaucggacccuauugaugaaugaguuagguguuccuuuucaucuggggaccaagcaagugugcauagcaugguccagcucaaguugucacgauggaaaagcauggcugcauguuuguauaacgggggaugauaaaaaugcaacugcuagcuucauuuacaaugggaggcuuguagauaguguuguuucaugguccaaagaaauccucaggacccaggagucagaaugcguuuguaucaauggaacuuguacaguaguaaugacugaugggagugcuucaggaaaagcugauacuaaaauacuauucauugaggaggggaaaaucguucauacuagcacauugucaggaagugcucagcaugucgaggagugcuccugcuauccucgauauccuggugucagaugugucugcagagacaacuggaaaggcuccaauaggcccaucguagauauaaacauaaaggaucauagcauuguuuccaguuauguguguucaggacuuguuggagacacacccagaaaaaacgacagcuccagcaguagccauuguuuggauccuaacaaugaagaagguggucauggagugaaaggcugggccuuugaugauggaaaugacguguggaugggaagaacgaucagcgagaagucacgcuuaggguaugaaaccuucaaagucauugaaggcugguccaacccuaaguccaaauugcagauaaauaggcaagucauaguugacagagguaauagguccgguuauucugguauuuucucuguugaaggcaaaagcugcaucaaucggugcuuuuauguggaguugauaaggggaagaaaagaggaaacugaagucuuguggaccucaaacaguauuguuguguuuuguggcaccucagguacauauggaacaggcucauggccugauggggcggacaucaaucucaugccuauauaa

SEQ ID NO: 51787 - RNA, 1410 nt, Artificial Sequence
  derived and/or modified CDS sequence (wt) from neuraminidase__InfluenzaA__ADM95736
augaauccaaaucaaaagauaauaacgauuggcucuguuucucucaccauuuccacaauaugcuucuucaugcaaauugccauauugauaacuacuguaacauugcauuucaagcaauaugaauucaacucccccccaaacaaccaagugaugcugugugaaccaacaauaauagaaagaaacauaacagagauaguguaucugaccaacaccaccauagagaaggaaauaugccccaaacuagcagaauacagaaauuggucaaagccgcaaugugacauuacaggauuugcaccuuuuucuaaggacaauucgauuaggcuuuccgcugguggggacaucugggugacaagagaaccuuaugugucaugcgauccugacaaguguuaucaauuugcccuuggacagggaacaacacuaaacaacgugcauucaaauaacacaguacgugauaggaccccuuaucggacccuauugaugaaugaguuagguguuccuuuucaucuggggaccaagcaagugugcauagcaugguccagcucaaguugucacgauggaaaagcauggcugcauguuuguauaacgggggaugauaaaaaugcaacugcuagcuucauuuacaaugggaggcuuguagauaguguuguuucaugguccaaagaaauccucaggacccaggagucagaaugcguuuguaucaauggaacuuguacaguaguaaugacugaugggagugcuucaggaaaagcugauacuaaaauacuauucauugaggaggggaaaaucguucauacuagcacauugucaggaagugcucagcaugucgaggagugcuccugcuauccucgauauccuggugucagaugugucugcagagacaacuggaaaggcuccaauaggcccauuguagauauaaacauaaaggaucauagcauuguuuccaguuauguguguucaggacuuguuggagacacacccagaaaaaacgacagcuccagcaguagccauuguuuggauccuaacaaugaagaagguggucauggagugaaaggcugggccuuugaugauggaaaugacguguggaugggaagaacgaucagugagaagucacgcuuaggguaugaaaccuucaaagucauugaaggcugguccaacccuaaguccaaauugcagauaaauaggcaagucauaguugacagagggaauagguccgguuauucugguauuuucucuguugaaggcaaaagcugcaucaaucggugcuuuuauguggaguugauaaggggaagaaaagaggaaacugaagucuuguggaccucaaacaguauuguuguguuuuguggcaccucagguacauauggaacaggcucauggccugauggggcggacaucaaucucaugccuauauaa

SEQ ID NO: 51788 - RNA, 1410 nt, Artificial Sequence
  derived and/or modified CDS sequence (wt) from neuraminidase__InfluenzaA__ADM95737
augaauccaaaucaaaagauaauaacgauuggcucuguuucucucaccauuuccacaauaugcuucuucaugcaaauugccaucuugauaacuacuguaacauugcauuucaagcaauaugaauucaacucccccccaaacaaccaagugaugcugugugaaccaacaauaauagaaagaaacauaacagagauaguguaucugaccaacaccaccauagagaaggaaauaugccccaaacuagcagaauacagaaauuggucaaagccgcaaugugacauuacaggauuugcaccuuuuucuaaggacaauucgauuaggcuuuccgcugguggggacaucugggugacaagagaaccuuaugugucaugcgauccugacaaguguuaucaauuugcccuuggacagggaacaacacuaaacaacgugcauucaaauaacacaguacgugauaggaccccuuaucggacccuauugaugaaugaguuagguguuccuuuucaucuggggaccaagcaagugugcauagcaugguccagcucaaguugucacgauggaaaagcauggcugcauguuuguauaacgggggaugauaaaaaugcaacugcuagcuucauuuacaaugggaggcuuguagauaguguuguuucaugguccaaagaaauccucaggacccaggagucagaaugcguuuguaucaauggaacuuguacaguaguaaugacugaugggagugcuucaggaagagcugauacuaaaauacuauucauugaggaggggaaaaucguucauacuagcacauugucaggaagugcucagcaugucgaggagugcuccugcuauccucgauauccuggugucagaugugucugcagagacaacuggaaaggcuccaauaggcccaucguagauauaaacauaaaggaucauagcauuguuuccaguuauguguguucaggacuuguuggagacacacccagaaaaaacgacagcuccagcaguagccauuguuuggauccuaacaaugaagaagguggucauggagugaaaggcugggccuuugaugauggaaaugacguguggaugggaagaacgaucagcgagaagucacgcuuaggguaugaaaccuucaaagucauugaaggcugguccaacccuaaguccaaauugcagauaaauaggcaagucauaguugacagagguaauagguccgguuauucugguauuuucucuguugaaggcaaaagcugcaucaaucggugcuuuuauguggaguugauaaggggaagaaaagaggaaacugaugucuuguggaccucaaacaguauuguuguguuuuguggcaccucagguacauauggaacaggcucauggccugauggggcggacaucaaucucaugccuauauaa

SEQ ID NO: 51789 - RNA, 1410 nt, Artificial Sequence
  derived and/or modified CDS sequence (wt) from neuraminidase__InfluenzaA__ADM95738
augaauccaaaucaaaagauaauaacgauuggcucuguuucucucaccauuuccacaauaugcuucuucaugcaaauugccaucuugauaacuacuguaacauugcauuucaagcaauaugaauucaacucccccccaaacaaccaagugaugcugugugaaccaacaauaauagaaagaaacauaacagagauaguguaucugaccaacaccaccauagagaaggaaauaugccccaaacuagcagaauacagaaauuggucaaagccgcaaugugacauuacaggauuugcaccuuuuucuaaggacaauucgauuaggcuuuccgcugguggggacaucugggugacaagagaaccuuaugugucaugcgauccugacaaguguuaucaauuugcccuuggacagggaacaacacuaaacaaugugcauucaaauaacacaguacgugauaggaccccuuaucggacccuauugaugaaugaguuagguguuccuuuucaucuggggaccaagcaagugugcauagcaugguccagcucaaguugucacgauggaaaagcauggcugcauguuuguauaacgggggaugauaaaaaugcaacugcuagcuucauuuacaaugggaggcuuguagauaguguuguuucaugguccaaagaaauccucaggacccaggagucagaaugcguuuguaucaauggaacuuguacaguaguaaugacugaugggagugcuucaggaaaagcugauacuaaaauacuauucauugaggaggggaaaaucguucauacuagcacauugucaggaagugcucagcaugucgaggagugcuccugcuauccucgauauccuggugucagaugugucugcagagacaacuggaaaggcuccaauaggcccaucguagauauaaacauaaaggaucauagcauuguuuccaguuauguguguucaggacuuguuggagacacacccagaaaaaacgacagcuccagcaguagccauuguuuggauccuaacaaugaagaagguggucauggagugaaaggcugggccuuugaugauggaaaugacguguggaugggaagaacgaucagcgagaagucacgcuuaggguaugaaaccuucaaagucauugaaggcugguccaacccuaaguccaaauugcagauaaauaggcaagucauaguugacagagguaauagguccgguuauucugguauuuucucuguugaaggcaaaagcugcaucaaucggugcuuuuauguggaguugauaaggggaagaaaagaggaaacugaagucuuauggaccucaaacaguauuguuguguuuuguggcaccucagguacauauggaacaggcucauggccugauggggcggacaucaaucucaugccuauauaa

SEQ ID NO: 51790 - RNA, 1410 nt, Artificial Sequence; identical to SEQ ID NO: 48611
  derived and/or modified CDS sequence (wt) from neuraminidase__InfluenzaA__ADM95739

SEQ ID NO: 51791 - RNA, 1410 nt, Artificial Sequence
  derived and/or modified CDS sequence (wt) from neuraminidase__InfluenzaA__ADM95740
augaauccaaaucaaaagauaauaacgauuggcucuguuucucucaccauuuccacaauaugcuucuucaugcaaauugccaucuugauaacuacuguaacauugcauuucaagcaauaugaauucaacucccccccaaacaaccaagugaugcugugugaaccaacaauaauagaaagaaacauaacagagauaguguaucugaccaacaccaccauagagaaggaaauaugccccaaacuagcagaauacagaaauuggucaaagccgcaaugugacauuacaggauuugcaccuuuuucuaaggacaauucgauuaggcuuuccgcugguggggacaucugggugacaagagaaccuuaugugucaugcgauccugacaaguguuaucaauuugcccuuggacagggaacaacacuaaacaacgugcauucaaauaacacaguacgugauaggaccccuuaucggacccuauugaugaaugaguuagguguuccuuuucaucuggggaccaagcaagugugcauagcaugguccagcucaaguugucacgauggaaaagcauggcugcauguuuguauaacgggggaugauaaaaaugcaacugcuagcuucauuuacaaugggaggcuuguagauaguguuguuucaugguccaaagaaauccucaggacccaggagucagaaugcguuuguaucaauggaacuuguacaguaguaaugacugaugggagugcuucaggaaaagcugauacuaaaauacuauucauugaggaggggaaaaucguucauacuagcacauugucaggaagugcucagcaugucgaggagugcuccugcuauccucgauauccuggugucagaugugucugcagagacaacuggaaaggcuccaauaggcccaucguagauauaaacauaaaggaucauagcauuguuuccaguuauguguguucaggacuuguuggagacacacccagaaaaaacgacagcuccagcaguagccauuguuuggauccuaacgaugaagaagguggucauggagugaaaggcugggccuuugaugauggaaaugacguguggaugggaagaacgaucagcgagaagucacgcuuaggguaugaaaccuucaaagucauugaaggcugguccaacccuaaguccaaauugcagauaaauaggcaagucauaguugacagagguaauagguccgguuauucugguauuuucucuguugaaggcaaaagcugcaucaaucggugcuuuuauguggaguugauaaggggaagaaaagaggaaacuaaagucuuguggaccucaaacaguauuguuguguuuuguggcaccucagguacauauggaacaggcucauggccugauggggcggacaucaaucucaugccuauauaa

SEQ ID NO: 51792 - RNA, 1410 nt, Artificial Sequence; identical to SEQ ID NO: 51769
  derived and/or modified CDS sequence (wt) from neuraminidase__InfluenzaA__ADM95741

SEQ ID NO: 51793 - RNA, 1410 nt, Artificial Sequence; identical to SEQ ID NO: 51784
  derived and/or modified CDS sequence (wt) from neuraminidase__InfluenzaA__ADM95742

SEQ ID NO: 51794 - RNA, 1410 nt, Artificial Sequence
  derived and/or modified CDS sequence (wt) from neuraminidase__InfluenzaA__ADM95743
augaauccaaaucaaaagauaauaacgauuggcucuguuucucucaccauuuccacaauaugcuucuucaugcaaauugccaucuugauaaccacuguaacauugcauuucaagcaauaugaauucaacuccuccccaaacaaccaagugaugcugugugaaccaacaauaauagaaagaaacauaacagagauaguguaucugaccaacaccaccauagagaaggaaauaugccccaaacuagcagaauacagaaauuggucaaagccgcaaugugacauuacaggauuugcaccuuuuucuaaggacaauucgauuaggcuuuccgcugguggggacaucugggugacaagagaaccuuaugugucaugcgauccugacaaguguuaucaauuugcccuuggacagggaacaacacuaaacaacgugcauucaaauaacacaguacgugauaggaccccuuaucggacccuauugaugaaugaguuagguguuccuuuucaucuggggaccaagcaagugugcauagcaugguccagcucaaguugucacgauggaaaagcauggcugcauguuuguauaacgggggaugauaaaaaugcaacugcuagcuucauuuacaaugggaggcuuguagauaguguuguuucaugguccaaagaaauccucaggacccaggagucagaaugcguuuguaucaauggaacuuguacaguaguaaugacugaugggagugcuucaggaaaagcugauacuaaaauacuauucauugaggaggggaaaaucguucauacuagcacauugucaggaagugcucagcaugucgaggagugcuccugcuauccucgauauccuggugucagaugugucugcagagacaacuggaaaggcuccaauaggcccaucguagauauaaacauaaaggaucauagcauuguuuccaguuauguguguucaggacuuguuggagacacacccagaaaaaacgacagcuccagcaguagccauuguuuggauccuaacaaugaagaagguggucauggagugaaaggcugggccuuugaugauggaaaugacguguggaugggaagaacgaucagcgagaagucacgcuuaggguaugaaaccuucaaagucauugaaggcugguccaacccuaaguccaaauugcagauaaauaggcaagucauaguugacagagguaauagguccgguuauucugguauuuucucuguugaaggcaaaagcugcaucaaucggugcuuuuauguggaguugauaaggggaagaaaagaggaaacugaagucuuguggaccucaaacaguauuguuguguuuuguggcaccucagguacauauggaacaggcucauggccugauggggcggacaucaaucucaugccuauauaa

SEQ ID NO: 51795 - RNA, 1410 nt, Artificial Sequence
  derived and/or modified CDS sequence (wt) from neuraminidase__InfluenzaA__ADM95744
augaauccaaaucaaaagauaauaacgauuggcucuguuucucucaccauuuccacaauaugcuucuucaugcaaauugccaucuugauaacuacuguaacauugcauuucaagcaauaugaauucaacucccccccaaacaaccaagugaugcugugugaaccaacaauaauagaaagaaacauaacagagauaguguaucugaccaacaccaccauagagaaggaaauaugccccaaacuagcagaauacagaaauuggucaaagccgcaaugugacauuacaggauuugcaccuuuuucuaaggacaauucgauuaggcuuuccgcugguggggacaucugggugacaagagaaccuuaugugucaugcgauccugacaaguguuaucaauuugcccuuggacagggaacaacacuaaacaacgugcauucaaauaacacaguacgugauaggaccccuuaucggacccuauugaugaaugaguuagguguuccuuuucaucuggggaccaagcaagugugcauagcaugguccagcucaaguugucacgauggaaaagcauggcugcauguuuguauaacgggggaugauaaaaaugcaacugcuagcuucauuuacaaugggaggcuuguagauaguguuguuucaugguccaaagaaauccucaggacccaggagucagaaugcguuuguaucaauggaacuuguacaguaguaaugacugaugggagugcuucaggaaaagcugauacuaaaauacuauucauugaggaggggaaaaucguucauacuagcacauugucaggaagugcucagcaugucgaagagugcuccugcuauccucgauauccuggugucagaugugucugcagagacaacuggaaaggcuccaauaggcccaucguagauauaaacauaaaggaucauagcauuguuuccaguuauguguguucaggacuuguuggagacacacccagaaaaaacgacagcuccagcaguagccauuguuuggauccuaacaaugaagaagguggucauggagugaaaggcugggccuuugaugauggaaaugacguguggaugggaagaacgaucagcgagaagucacgcuuaggguaugaaaccuucaaagucauugaaggcugguccaacccuaaguccaaauugcagauaaauaggcaagucauaguugacagagguaauagguccgguuauucugguauuuucucuguugagggcaaaagcugcaucaaucggugcuuuuauguggaguugauaaggggaagaaaagaggaaacugaagucuuguggaccucaaacaguauuguuguguuuuguggcaccucagguacauacggaacaggcucauggccugauggggcggacaucaaucucaugccuauauaa

SEQ ID NO: 51796 - RNA, 1410 nt, Artificial Sequence
  derived and/or modified CDS sequence (wt) from neuraminidase__InfluenzaA__ADN05229
augaauccaaaccaaaagauaauaaccauugguucggucuguaugacaauuggaauggcuaacuuaauauuacaaauuggaaacauaaucucaauauggauuagccacucaauucaacuugggaaucaaaaucagauugaaacaugcaaucaaagcgucauuacuuaugaaaacaacacuuggguaaaucagacauauguuaacaucagcaacaccaacuuugcugcuggacagucagugguuuccgugaaauuagcgggcaauuccucucucugcccuguuaguggaugggcuauauacaguaaagacaacaguauaagaaucgguuccaagggggauguguuugucauaagggaaccauucauaucaugcucccccuuggaaugcagaaccuucuucuugacucaaggggccuugcuaaaugacaaacauuccaauggaaccauuaaagacaggagcccauaucgaacccuaaugagcuguccuauuggugaaguucccucuccauacaacucaagauuugagucagucgcuuggucagcaagugcuugucaugauggcaucaauuggcuaacaauuggaauuucuggcccagacaauggggcaguggcuguguuaaaguacaacggcauaauaacagacacuaucaagaguuggagaaacaauauauugagaacacaagagucugaaugugcauguguaaaugguucuugcuuuacuguaaugaccgauggaccaagugauggacaggccucauacaagaucuucagaauagaaaagggaaagauagucaaaucagucgaaaugaaugccccuaauuaucacuaugaggaaugcuccuguuacccugauucuagugaaaucacaugugugugcagggauaacuggcauggcucgaaucgaccgugggugucuuucaaccagaaucuggaauaucagauaggauacauaugcagugggauuuucggagacaauccacgcccuaaugauaagacaggcaguugugguccaguaucgucuaauggagcaaauggaguaaaaggauuuucauucaaauacggcaaugguguuuggauagggagaacuaaaagcauuaguucaagaaacgguuuugagaugauuugggauccgaacggauggacugggacagacaauaacuucucaauaaagcaagauaucguaggaauaaaugaauggucaggauauagcgggaguuuuguucagcauccagaacuaacagggcuggauuguauaagaccuugcuucuggguugaacuaaucagagggcgacccaaagagaacacaaucuggacuagcgggagcagcauauccuuuugugguguaaacagugacacuguggguuggucuuggccagacggugcugaguugccauuuaccauugacaaguaa

SEQ ID NO: 51797 - RNA, 1413 nt, Artificial Sequence
  derived and/or modified CDS sequence (wt) from neuraminidase__InfluenzaA__ADN06292
augaacccaaaucaaaagauaauaaccauuggaucaaucaguauagcaaucggaauaauuagucuaauguugcaaauaggaaauauuauuucaauaugggcuagucacucaauccaaacugggagucaaaacaacacuggaauaugcaaccaaagaaucaucacauaugaaaacagcaccugggugaaucacacauauguuaauauuaacaacacuaauguuguugcuggagaggacaaaacaucagugacauuggccggcaauucaucucuuuguucuaucaguggaugggcuauauacacaaaagacaacagcauaagaauuggcuccaaaggagauguuuuugucauaagagaaccuuucauaucauguucucacuuggaaugcagaaccuuuuuucugacccaaggcgcucuauuaaaugacaaacauucaaaugggaccguaaaggacagaaguccuuauagggccuuaaugagcuguccucuaggugaagcuccguccccauacaauucaaaguucgaaucaguugcauggucagcaagcgcaugccaugauggcaugggcugguuaacaaucggaauuucugguccagacaauggagcuguggcuguacuaaaauacaacggaauaauaacuggaaccauaaaaaguuggaaaaagcaaauauuaagaacacaagagucugaaugugucuguaugaacgggucauguuucaccauaaugaccgauggcccgaguaauaaggccgccucguacaaaauuuucaagaucgaaaaggggaagguuacuaaaucaauagaguugaaugcacccaauuuuuauuaugaggaaugcuccuguuacccagauacuggcauagugauguguguaugcagggacaacuggcaugguucaaaucgaccuugggugucuuuuaaucaaaacuuggauuaucaaauaggauacaucugcaguggaguguuuggugacaauccgcgucccgaagauggagagggcagcugcaauccagugacuguugauggagcaaacggaguaaaaggguuuucauacaaauaugguaaugguguuuggauagggaggaccaaaaguaacagacuuagaaagggguuugagaugauuugggauccuaauggauggacaaauaccgacagugauuucucagugaaacaggauguuguagcaauaacugauuggucaggguacagcggaaguuucguccaacauccugaguuaacaggauuggacuguauaagaccuugcuucuggguugaguuagucagagggcugccuagagaaaauacaacaaucuggacuagugggagcagcauuucuuuuuguggcguuaauagugauacugcaaacuggucuuggccagacggugcugaguugccguucaccauugacaaguag

SEQ ID NO: 51798 - RNA, 1413 nt, Artificial Sequence
  derived and/or modified CDS sequence (wt) from neuraminidase__InfluenzaA__ADN06303
augaacccaaaucaaaagauaauaaccauuggaucaaucaguauagcaaucggaauaauuagucuaauguugcaaauaggaaguauuauuucaauaugggcuagucacucaauccaaacuggaagucaaaacaacacuggaauaugcaaccaaagaaucaucacauaugaaaacagcaccugggugaaucacacauauguuaauauuaacaacacuaauguuguugcuggagaggacaaaacgucagugacauuggccggcaauucaucucuuuguucuaucaguggaugggcuauauacacaaaagacaacagcauaagaauuggcuccaaaggagauguuuuugucauaagagaaccuuucauaucauguucucacuuggaaugcagaaccuuuuuucugacccaaggcgcucuauuaaaugacaaacauucaaaugggaccguaaaggacagaaguccuuauagggccuuaaugagcuguccucuaggugaagcuccguccccauacaauucaaaguucgaaucaguugcauggucagcaagcgccugccaugauggcaugggcugguuaacaaucggaauuucugguccagacaauggagcuguggcuguacuaaaauacaacggaauaauaacuggaaccauaaaaaguuggaaaaagcaaauauuaagaacacaagagucugaaugugucuguaugaacgggucauguuucaccauaaugaccgauggcccgaguaauaaagcagccucguacaaaauuuucaagaucgaaaaggggaagguuacuaaaucaauagaguugaaugcacccaauuuuuauuaugaggaaugcuccuguuacccagacacuggcauagugauguguguaugcagggacaacuggcaugguucaaaucgaccuugggugucuuuuaaucaaaauuuggauuaucaaauaggauacaucugcaguggaguguuuggugacaauccgcgucccgaagauggagagggcagcugcaauccagugacuguagauggagcaaacggaguaaaaggguuuucauacaaauaugguaaugguguuuggauaggaaggaccaaaaguaacagacuuagaaagggguuugagaugauuugggauccuaauggauggacaaauaccgacagugauuucucagugaaacaggauguuguagcaauaacugauuggucaggguacagcggaaguuucguccaacauccugaauugacaggauuggacuguauaagaccuugcuucuggguugaguuagucagagggcugccuagagaaaauacaacaaucuggacuagugggagcagcauuucuuuuuguggcguuaauagugauacugcaaacuggucuuggccagacggugcugaguugccguucaccauugacaaguag

SEQ ID NO: 51799 - RNA, 1413 nt, Artificial Sequence
  derived and/or modified CDS sequence (wt) from neuraminidase__InfluenzaA__ADN06314
augaacccaaaucaaaagauaauaaccauuggaucaaucaguauagcaaucggaauaauuagucuaauguugcaaauaggaaauauuauuucaauaugggcuagucacucaauccaaacugggagucaaaacaacacuggaauaugcaaccaaagaaucaucacauaugaaaacagcaccugggugaaucacacauauguuaauauuaacaacacuaauguuguugcuggagaggacaaaacaucagugacauuggccggcaauucaucucuuuguucuaucaguggaugggcuauauacacaaaagacaacagcauaagaauuggcuccaaaggagagguuuuugucauaagagaaccuuucauaucauguucucacuuggaaugcagaaccuuuuuucugacccaaggcgcucuauuaaaugacaaacauucaaaugggaccguaaaggacagaaguccuuauagggccuuaaugagcuguccucuaggugaagcuccguccccauacaauucaaaguucgaaucaguugcauggucagcaagcgcaugccaugauggcaugggcugguuaacaaucggaauuucugguccagacaauggagcuguggcuguacuaaaauacaacgggauaauaacuggaaccauaaaaaguuggaaaaagcaaauauuaagaacacaagagucugaaugugucuguaugaacgggucauguuucaccauaaugaccgauggcccgaguaauaaggccgccucguacaaaauuuucaagaucgaaaaggggaagguuacuaaaucaauagaguugaacgcacccaauuuuuauuaugaggaaugcuccuguuacccagauacuggcauagugauguguguaugcagggacaacuggcaugguucaaaucgaccuugggugucuuuuaaucaaaacuuggauuaucaaauaggauacaucugcaguggaguguuuggugacaauccgcgucccgaagauggagagggcagcugcaauccagugacuguugauggagcaaacggaguaaaaggguuuucauacaaauaugguaaugguguuuggauagggaggaccaaaaguaacagacuuagaaagggguuugagaugauuugggauccuaauggauggacaaauaccgacagugauuucucagugaaacaggauguuguagcaauaacugauuggucaggguacagcggaaguuucguccaacauccugaguuaacaggauuggacuguauaagaccuugcuucuggguugaguuagucagagggcugccuagagaaaauacaacaaucuggacuagugggagcagcauuucuuuuuguggcguuaauggugauacugcaaacuggucuuggccagacggugcugaguugccguucaccauugacaaguag

SEQ ID NO: 51800 - RNA, 1413 nt, Artificial Sequence
  derived and/or modified CDS sequence (wt) from neuraminidase__InfluenzaA__ADN06325
augaacccaaaucaaaagauaauaaccauuggaucaaucaguauagcaaucggaauaauuagucuaauguugcaaauaggaaguauuauuucaauaugggcuagucacucaauccaaacuggaagucaaaacaacacuggaauaugcaaccaaagaaucaucacauaugaaaacagcaccugggugaaucacacauauguuaauauuaacaacacuaauguuguugcuggagaggacaaaacgucagugacauuggccggcaauucaucucuuuguucuaucaguggaugggcuauauacacaaaagacaacagcauaagaauuggcuccaaaggagauguuuuugucauaagagaaccuuucauaucauguucucacuuggaaugcagaaccuuuuuucugacccaaggcgcucuauuaaaugacaaacauucaaaugggaccguaaaggacagaaguccuuauagggccuuaaugagcuguccucuaggugaagcuccguccccauacaauucaaaguucgaaucaguugcauggucagcaagcgcaugccaugauggcaugggcugguuaacaaucggaauuucugguccagacaauggagcuguggcuguacuaaaauacaacggaauaauaacuggaaccauaaaaaguuggaaaaagcaaauauuaagaacacaagagucugaaugugucuguaugaacgggucauguuucaccauaaugaccgauggcccgaguaauaaagccgccucguacaaaauuuucaagaucgaaaaggggaagguuacuaaaucaauagaguugaaugcacccaauuuuuauuaugaggaaugcuccuguuacccagacacuggcauagugauguguguaugcagggacaacuggcaugguucaaaucgaccuugggugucuuuuaaucaaaauuuggauuaucaaauaggauacaucugcaguggaguguuuggugacaauccgcgucccgaagauggagagggcaguugcaauccagugacuguagauggagcaaacggaguaaaaggguuuucauacaaauaugguaaugguguuuggauaggaaggaccaaaaguaacagacuuagaaagggguuugagaugauuugggauccuaauggauggacaaauaccgacagugauuucucagugaaacaggauguuguggcaauaacugauuggucaggguacagcggaaguuucguccaacauccugaauugacaggauuggacuguauaagaccuugcuucuggguugaguuagucagagggcuaccuagagaaaauacaacaaucuggacuagugggagcagcauuucuuuuuguggcguuaauagugauacugcaaacuggucuuggccagacggugcugaguugccguucaccauugacaaguag

SEQ ID NO: 51801 - RNA, 1413 nt, Artificial Sequence
  derived and/or modified CDS sequence (wt) from neuraminidase__InfluenzaA__ADN06347
augaacccaaaucaaaagauaauaaccauuggaucaaucaguauagcaaucggaauaauuagucuaauguugcaaauaggaaauauuauuucaauaugggcuagucacucaauccaaacugaaagucaaaacaacacuggaauaugcaaccaaagaaucaucacauaugaaaacagcaccugggugaaucacacauauguuaauauuaacaacacuaauguuguugcuggagaggacaaaacuucagugacauuggccggcaauucaucucuuuguucuaucaguggaugggcuauauacacaaaagacaacagcauaagaauuggcuccaaaggagauguuuuugucauaagagaaccuuucauaucauguucucacuuggaaugcagaaccuuuuuucugacccaaggcgcucuauuaaaugacaaacauucaaaugggaccguaaaggacagaaguccuuauagggccuuaaugagcuguccucuaggugaagcuccguccccauacaauucaaaguucgaaucaguugcauggucagcaagcgcaugccaugauggcaugggcugguuaacaaucggaauuucugguccagacaauggagcuguggcuguacuaaaauacaacggaauaauaacuggaaccauaaaaaguuggaaaaagcaaauauuaagaacacaagagucugaaugugucugcaugaacgggucauguuucacuauaaugaccgauggcccgaguaauaaggccgccucguacaaaauuuucaagaucgaaaaggggaagguuacuaaaucaauagaguugaaugcacccaauuuuuauuaugaggaaugcuccuguuacccagacacuggcauagugauguguguaugcagggacaacuggcaugguucaaaucgaccuugggugucuuuuaaucaaaacuuggauuaccaaaugggauacaucugcaguggaguguuuggugacaauccgcgucccgaagauggagagggcagcugcaauccagugaauguugauggagcaaacggaguaaaaggguuuucauacaaauaugguaaugguguuuggauaggaaggaccaaaaguaacagacuuagaaagggguuugagaugauuugggauccuaauggauggacaaauaccgacagugauuucucagugaaacaggauguuguagcaauaacugauuggucaggguacagcggaaguuucguccaacauccugaguuaacaggauuggacuguauaagaccuugcuucuggguugaguuggucagagggcugccuagagaaaauacaacaaucuggacuagugggagcagcauuucuuuuuguggcguuaauagugauacugcaaacuggucuuggccagacggugcugaguugccguucaccaucgacaaguag

SEQ ID NO: 51802 - RNA, 1410 nt, Artificial Sequence
  derived and/or modified CDS sequence (wt) from neuraminidase__InfluenzaA__ADN06369
augaauccaaaccaaaagauaauaacgauuggcucuguuucucucaccauuuccacaauaugcuucuucaugcaaauugccaucuugauaacuacuguaacauugcauuucaagcaauauaaauucaacucccccccaaacaaccaagugaugcugugugaaccaacaauaauagaaagaaacauaacagagauaguguaucugaccaacaccaccauagagaaggaaauaugccccaaacuagcagaauacagaaauuggucaaaaccgcaaugugacauuacgggauuugcaccuuuuucuaaggacaauucgauuaggcuuuccgcugguggggacaucugggugacaagagaaccuuaugugucaugcgauccugacaaguguuaucaauuugcccuuggacagggaacaacacuaaacaacgugcauucaaauaacacaguacgugauaggaccccuuaucggacccuauugaugaaugaguuagguguuccuuuucaucuggggaccaagcaagugugcauagcaugguccagcucgaguugucacgauggaaaagcauggcugcauguuuguauaacgggggaugauaaaaaugcaacugcuagcuucauuuacaaugggaggcuuguagauaguguuguuucaugguccaaagaaauucucaggacccaggagucagaaugcguuuguaucaauggaacuuguacaguaguaaugacugauggaagugcuucaggaaaagcugauacuaaaauacuauucauugaggaggggaaaauuguucauacuagcacauugucaggaagugcucagcaugucgaggagugcucuugcuauccucgauauccuggugucagaugugucugcagagacaacuggaaaggcuccaauaggcccaucguagauauaaacauaaaggaucauagcauuguuuccaguuauguguguucaggacuuguuggagacacacccagaaaaaacgacagcuccagcaguagccauuguuuggauccuaacaaugaagaagguggucauggagugaaaggcugggccuuugaugauggaaaugacguguggaugggaagaacaaucaacgagacgucacgcuuaggguaugaaaccuucaaagucauugaaggcugguccaacccuaaguccaaauugcagauaaauaggcaagucauaguugacagagguaauagguccgguuauucugguauuuucucuguugaaggcaaaagcugcaucaaucggugcuuuuauguggaguugauuaggggaagaaaagaggaaacugaagucuuguggaccucaaacaguauuguuguguuuuguggcaccucagguacauauggaacaggcucauggccugauggggcggaccucaaucucaugccuauauaa

SEQ ID NO: 51803 - RNA, 1410 nt, Artificial Sequence; identical to SEQ ID NO: 48750
  derived and/or modified CDS sequence (wt) from neuraminidase__InfluenzaA__ADN26031

SEQ ID NO: 51804 - RNA, 1410 nt, Artificial Sequence; identical to SEQ ID NO: 48750
  derived and/or modified CDS sequence (wt) from neuraminidase__InfluenzaA__ADN26032

SEQ ID NO: 51805 - RNA, 1410 nt, Artificial Sequence; identical to SEQ ID NO: 48750
  derived and/or modified CDS sequence (wt) from neuraminidase__InfluenzaA__ADN26033

SEQ ID NO: 51806 - RNA, 1410 nt, Artificial Sequence; identical to SEQ ID NO: 48949
  derived and/or modified CDS sequence (wt) from neuraminidase__InfluenzaA__ADN26034

SEQ ID NO: 51807 - RNA, 1410 nt, Artificial Sequence; identical to SEQ ID NO: 48750
  derived and/or modified CDS sequence (wt) from neuraminidase__InfluenzaA__ADN26035

SEQ ID NO: 51808 - RNA, 1410 nt, Artificial Sequence; identical to SEQ ID NO: 48750
  derived and/or modified CDS sequence (wt) from neuraminidase__InfluenzaA__ADN26036

SEQ ID NO: 51809 - RNA, 1410 nt, Artificial Sequence
  derived and/or modified CDS sequence (wt) from neuraminidase__InfluenzaA__ADN26037
augaauccaaaccaaaagauaauaaccauugguucggucuguaugacaauuggaauggcuaacuuaauauuacaaauuggaaacauaaucucaauauggauuagccacucaauucaacuugggaaucaaaaucagauugaaacaugcaaucaaagcgucauuacuuaugaaaacaacacuuggguaaaucagacauauguuaacaucagcaacaccaacuuugcugcuggacagucagugguuuccgugaaauuagcgggcaauuccucucucugcccuguuaguggaugggccauauacaguaaagacaacaguguaagaaucgguuccaagggggauguguuugucauaagggaaccauucauaucaugcucccccuuggaaugcagaaccuucuucuugacucaaggggccuugcuaaaugacaaacauuccaauggaaccauuaaagacaggagcccauaucgaacccuaaugagcuguccuauuggugaaguucccucuccauacaacucaagauuugagucagucgcuuggucagcaagugcuugucaugauggcaucaauuggcuaacaauuggaauuucuggcccagacaauggggcaguggcuguguuaaaguacaacggcauaauaacagacacuaucaagaguuggagaaacaauauauugagaacacaagagucugaaugugcauguguaaaugguucuugcuuuacuguaaugaccgauggaccaaguaauggacaggccucauacaagaucuucagaauagaaaagggaaagauagucaaaucagucgaaaugaaugccccuaauuaucacuaugaggaaugcuccuguuauccugauucuagugaaaucacaugugugugcagggauaacuggcauggcucgaaucgaccgugggugucuuucaaccagaaucuggaauaucagauaggauacauaugcagugggauuuucggagacaauccacgcccuauugauaagacaggcaguugugguccaguaucgucuaauggagcaaauggaguaaaaggauuuucauucaaauacggcaaugguguuuggauagggagaacuaaaagcauuaguucaagaaacgguuuugagaugauuugggauccgaacggauggacugggacagacaauaacuucucaauaaagcaagauaucguaggaauaaaugaguggucaggauauagcgggaguuuuguucagcauccggaacuaacagggcuggauuguauaagaccuugcuucuggguugaacuaaucagagggcgacccaaagagaacacaaucuggacuagcgggagcagcauauccuuuugugguguaaacagugacacuguggguuggucuuggccagacggugcugaguugccauuuaccauugacaaguaa

SEQ ID NO: 51810 - RNA, 1410 nt, Artificial Sequence; identical to SEQ ID NO: 48750
  derived and/or modified CDS sequence (wt) from neuraminidase__InfluenzaA__ADN26038

SEQ ID NO: 51811 - RNA, 1410 nt, Artificial Sequence
  derived and/or modified CDS sequence (wt) from neuraminidase__InfluenzaA__ADN26041
augaauccaaaccaaaagauaauaaccauugguucggucuguaugacaauuggaauggcuaacuuaauauuacaaauuggaaacauaaucucaauauggauuagccacucaauucaacuugggaaucaaaaucagauugaaacaugcaaucaaagcgucauuacuuaugaaaacaacacuuggguaaaucagacauauguuaacaucagcaacaccaacuuugcugcuggacagucagugguuuccgugaaauuagcgggcaauuccucucucugcccuguuaguggaugggcuauauacaguaaagacaacaguauaagaaucgguuccaagggggauguguuugucauaagggaaccauucauaucaugcucccccuuggaaugcagaaccuucuucuugacucaaggggccuugcuaaaugacaaacauuccaauggaaccauuaaagacaggagcccauaucgaacccuaaugagcuguccuauuggugaaguucccucuccauacaacucaagauuugagucagucgcuuggucagcaagugcuugucaugauggcaucaauuggcuaacaauuggaauuucuggcccagacaauggggcaguggcuguguuaaaguacaacggcauaauaacagacacuauaaagaguuggagaaacaauauauugagaacacaagagucugaaugugcauguguaaaugguucuugcuuuacuguaaugaccgauggaccaagugauggacaggccucauacaagaucuucagaauagaaaagggaaagauagucaaaucagucgaaaugaaugccccuaauuaucacuaugaggaaugcuccuguuauccugauucuagugaaaucacaugugugugcagggauaacuggcauggcucgaaucgaccgugggugucuuucaaccagaaucuggaauaucagauaggauacauaugcagugggauuuucggagacaauccacgcccuaaugauaagacaggcaguugugguccaguaucgucuaauggagcaaauggaguaaaaggauuuucauucaaauacggcaaugguguuuggauagggagaacuaaaagcauuaguucaagaaacgguuuugagaugauuugggauccgaacggauggacugggacagacaauaacuucucaauaaagcaagauaucguaggaauaaaugaguggucaggauauagcgggaguuuuguucagcauccagaacuaacagggcuggauuguauaagaccuugcuucuggguugaacuaaucagagggcgacccaaagagaacacaaucuggacuagcgggagcagcauauccuuuugugguguaaacagugacacuguggguuggucuuggccagacggugcugaguugccauuuaccauugacaaguaa

SEQ ID NO: 51812 - RNA, 1410 nt, Artificial Sequence
  derived and/or modified CDS sequence (wt) from neuraminidase__InfluenzaA__ADN26042
augaauccaaaccaaaagauaauaaccauugguucggucuguaugacaauuggaauggcuaacuuaauauuacaaauuggaaacauaaucucaauauggauuagccacucaauucaacuugggaaucaaaaucagauugaaacaugcaaucaaagcgucauuacuuaugaaaacaacacuuggguaaaucagacauauguuaacaucagcaacaccaacuuugcugcuggacagucagugguuuccgugaaauuagcgggcaauuccucucucugcccuguuaguggaugggcuauauacaguaaagacaacaguauaagaaucgguuccaagggggauguguuugucauaagggaaccauucauaucaugcucccccuuggaaugcagaaccuucuuuuugacucaaggggccuugcuaaaugacaaacauuccaauggaaccauuaaagacaggagcccauaucgaacccuaaugagcuguccuauuggugaaguucccucuccauacaacucaagauuugagucagucgcuuggucagcaagugcuugucaugauggcaucaauuggcuaacaauuggaauuucuggcccagacaauggggcaguggcuguguuaaaguacaacggcauaauaacagacacuaucaagaguuggagaaacaauauauugagaacacaagagucugaaugugcauguguaaaugguucuugcuuuacuguaaugaccgauggaccaagugauggacaggccucauacaagaucuucagaauagaaaagggaaagauagucaaaucagucgaaaugaaugccccuaauuaucacuaugaggaaugcuccuguuauccugauucuagugaaaucacaugugugugcagggauaacuggcauggcucgaaucgaccgugggugucuuucaaccagaaucuggaauaucagauaggauacauaugcagugggauuuucggagacaauccacgcccuaaugauaagacaggcaguugugguccaguaucgucuaauggagcaaauggaguaaaaggauuuucauucaaauacggcaaugguguuuggauagggagaacuaaaagcauuaguucaagaaacgguuuugagaugauuugggauccgaacggauggacugggacagacaauaacuucucaauaaagcaagauaucguaggaauaaaugaguggucaggauauagcgggaguuuuguucagcauccagaacuaacagggcuggauuguauaagaccuugcuucuggguugaacuaaucagagggcgacccaaagagaacacaaucuggacuagcgggagcagcauauccuuuugugguguaaacagugacacuguggguuggucuuggccagacggugcugaguugccauuuaccauugacaaguaa

SEQ ID NO: 51813 - RNA, 1410 nt, Artificial Sequence
  derived and/or modified CDS sequence (wt) from neuraminidase__InfluenzaA__ADN26043
augaauccaaaccaaaagauaauaaccauugguucggucuguaugacaauuggaauggcuaacuuaauauuacaaauuggaaacauaaucucaauauggauuagccacucaauucaacuugggaaucaaaaucagauugaaacaugcaaucaaagcgucauuacuuaugaaaacaacacuuggguaaaucagacauauguuaacaucagcaacaccaacuuugcugcuggacagucagugguuuccgugaaauuagcgggcaauuccucucucugcccuguuaguggaugggcuauauacaguaaagacaacaguauaagaaucgguuccaagggggauguguuugucauaagggaaccauucauaucaugcucccccuuggaaugcagaaccuucuucuugacucaaggggccuugcuaaaugacaaacauuccaauggaaccauuaaagacaggagcccauaucgaacccuaaugagcuguccuauuggugaaguucccucuccauacaacucaagauuugagucagucgcuuggucagcaagugcuugucaugauggcaucaauuggcuaacaauuggaauuucuggcccagacaauggggcaguggcuguguuaaaguacaacggcauaauaacagacacuaucaagaguuggagaaacaauauauugagaacacaagagucugaaugugcauguguaaaugguucuugcuuuacuguaaugaccgauggaccaagugauggacaggccucauacaagaucuucagaauagaaaagggaaagauagucaaaucagucgaaaugaaugccccuaauuaucacuaugaggaaugcuccuguuauccugauucuagugaaaucacaugugugugcagggauaacuggcauggcucgaaucgaccgugggugucuuucaaccagaaucuggaauaucagguaggauacauaugcagugggauuuucggagacaauccacgcccuaaugauaagacaggcaguugugguccaguaucgucuaauggagcaaauggaguaaaaggauuuucauucaaauacggcaaugguguuuggauagggagaacuaaaagcauuaguucaagaaacgguuuugagaugauuugggauccgaacggauggacugggacagacaauaacuucucaauaaagcaagauaucguaggaauaaaugaguggucaggauauagcgggaguuuuguucagcauccagaacuaacagggcuggauuguauaagaccuugcuucuggguugaacuaaucagagggcgacccaaagagaacacaaucuggacuagcgggagcagcauauccuuuugugguguaaacagugacacuguggguuggucuuggccagacggugcugaguugccauuuaccauugacaaguaa

SEQ ID NO: 51814 - RNA, 1410 nt, Artificial Sequence; identical to SEQ ID NO: 48750
  derived and/or modified CDS sequence (wt) from neuraminidase__InfluenzaA__ADN26044

SEQ ID NO: 51815 - RNA, 1410 nt, Artificial Sequence; identical to SEQ ID NO: 48750
  derived and/or modified CDS sequence (wt) from neuraminidase__InfluenzaA__ADN26045

SEQ ID NO: 51816 - RNA, 1410 nt, Artificial Sequence
  derived and/or modified CDS sequence (wt) from neuraminidase__InfluenzaA__ADN26047
augaauccaaaccaaaagauaauaaccauugguucggucuguaugacaauuggaauggcuaacuuaauauuacaaauuggaaacauaaucucaauauggauuagccacucaauucaacuugggaaucaaaaucagauugaaacaugcaaucaaagcgucauuacuuaugaaaacaacacuuggguaaaucagacauauguuaacaucagcaacaccaacuuugcugcuggacagucaaugguuuccgugaaauuaacgggcaauuccucucucugcccuguuaguggaugggcuauauacaguaaagacaacaguguaagaaucgguuccaagggggauguguuugucauaagggaaccauucauaucaugcucccccuuggaaugcagaaccuucuucuugacucaaggggccuugcuaaaugacaaacauuccaauggaaccauuaaagacaggagcccauaucgaacccuaaugagcuguccuauuggugaaguucccucuccauacaacucaagauuugagucagucgcuuggucagcaagugcuugucaugauggcaucaauuggcuaacaauuggaauuucuggcccagacaauggggcaguggcuguguuaaaguacaacggcauaauaacagacacuaucaagaguuggagaaacaauauauugagaacacaagagucugaaugugcauguguaaaugguucuugcuuuacuguaaugaccgauggaccaaguaauggacaggccucauacaagaucuucagaauagaaaagggaaagauagucaaaucagucgaaaugaaugccccuaauuaucacuaugaggaaugcuccuguuauccugauucuagugaaaucacaugugugugcagggauaacuggcauggcucgaaucgaccgugggugucuuucaaccagaaucuggaauaucagauaggauacauaugcagugggauuuucggagacaauccacgcccuaaugauaagacaggcaguugugguccaguaucgucuaauggagcaaauggaguaaaaggauuuucauucaaauacggcaaugguguuuggauagggagaacuaaaagcauuaguucaagaaacgguuuugagaugauuugggauccgaacggauggacugggacagacaauaacuucucaauaaagcaagauaucguaggaauaaaugaguggucaggauauagcgggaguuuuguucagcauccagaacuaacagggcuggauuguauaagaccuugcuucuggguugaacuaaucagagggcgacccaaagagaacacaaucuggacuagcgggagcagcauaucuuuuugugguguaaacagugacacuguggguuggucuuggccagacggugcugaguugccauuuaccauugacaaguaa

SEQ ID NO: 51817 - RNA, 1410 nt, Artificial Sequence; identical to SEQ ID NO: 48750
  derived and/or modified CDS sequence (wt) from neuraminidase__InfluenzaA__ADN26048

SEQ ID NO: 51818 - RNA, 1410 nt, Artificial Sequence; identical to SEQ ID NO: 48750
  derived and/or modified CDS sequence (wt) from neuraminidase__InfluenzaA__ADN26049

SEQ ID NO: 51819 - RNA, 1410 nt, Artificial Sequence; identical to SEQ ID NO: 50341
  derived and/or modified CDS sequence (wt) from neuraminidase__InfluenzaA__ADN26050

SEQ ID NO: 51820 - RNA, 1410 nt, Artificial Sequence; identical to SEQ ID NO: 51812
  derived and/or modified CDS sequence (wt) from neuraminidase__InfluenzaA__ADN26051

SEQ ID NO: 51821 - RNA, 1410 nt, Artificial Sequence; identical to SEQ ID NO: 48750
  derived and/or modified CDS sequence (wt) from neuraminidase__InfluenzaA__ADN26052

SEQ ID NO: 51822 - RNA, 1410 nt, Artificial Sequence
  derived and/or modified CDS sequence (wt) from neuraminidase__InfluenzaA__ADN26053
augaauccaaaccaaaagauaauaaccauugguucggucugcaugacaauuggaauggcuaacuuaauauuacaaauuggaaacauaaucucaauauggauuagccacucaauucaacuugggaaucaaaaucagauugaaacaugcaaucaaagcgucauuacuuaugaaaacaacacuuggguaaaucagacauauguuaacaucagcaacaccaacuuugcugcuggacagucagugguuuccgugaaauuagcgggcaauuccucucucugcccuguuaguggaugggcuauauacaguaaagacaacaguguaagaaucgguuccaagggggauguguuugucauaagggaaccauucauaucaugcucccccuuggaaugcagaaccuucuucuugacucaaggggccuugcuaaaugacaaacauuccaauggaaccauuaaagacaggagcccauaucgaacccuaaugagcuguccuauuggugaaguucccucuccauacaacucaagauuugagucagucgcuuggucagcaagugcuugucaugauggcaucaauuggcuaacaauuggaauuucuggcccagacaauggggcaguggcuguguuaaaguacaacggcauaauaacagacacuaucaagaguuggagaaacaauauauugagaacacaagagucugaaugugcauguguaaaugguucuugcuuuacuguaaugaccgauggaccaaguaauggacaggccucauacaagaucuucagaauagaaaagggaaagauagucaaaucagucgaaaugaaugccccuaauuaucacuaugaggaaugcuccuguuauccugauucuagugaaaucacaugugugugcagggauaacuggcauggcucgaaucgaccgugggugucuuucaaccagaaucuggaauaucagauaggauacauaugcagugggauuuucggagacaauccacgcccuaaugauaagacaggcaguugugguccaguaucgucuaauggagcaaauggaguaaaaggauuuucauucaaauacggcaaugguguuuggauagggagaacuaaaagcauuaguucaagaaacgguuuugagaugauuugggauccgaacggauggacugggacagacaauaacuucucaauaaagcaagauaucguaggaauaaaugaguggucaggauauagcggaaguuuuguucagcauccggaacuaacagggcuggauuguauaagaccuugcuucuggguugaacuaaucagagggcgacccaaagagaacacaaucuggacuagugggagcagcauauccuuuugugguguaaacagugacacuguggguuggucuuggccagacggugcugaguugccauuuaccauugacaaguaa

SEQ ID NO: 51823 - RNA, 1410 nt, Artificial Sequence; identical to SEQ ID NO: 49794
  derived and/or modified CDS sequence (wt) from neuraminidase__InfluenzaA__ADN26054

SEQ ID NO: 51824 - RNA, 1410 nt, Artificial Sequence; identical to SEQ ID NO: 48947
  derived and/or modified CDS sequence (wt) from neuraminidase__InfluenzaA__ADN26057

SEQ ID NO: 51825 - RNA, 1410 nt, Artificial Sequence; identical to SEQ ID NO: 48750
  derived and/or modified CDS sequence (wt) from neuraminidase__InfluenzaA__ADN26058

SEQ ID NO: 51826 - RNA, 1410 nt, Artificial Sequence; identical to SEQ ID NO: 48814
  derived and/or modified CDS sequence (wt) from neuraminidase__InfluenzaA__ADN26059

SEQ ID NO: 51827 - RNA, 1410 nt, Artificial Sequence
  derived and/or modified CDS sequence (wt) from neuraminidase__InfluenzaA__ADN26060
augaauccaaaccaaaagauaauaaccauugguucggucuguaugacaauuggaauggcuaacuuaauauuacaaauuggaaacauaaucucaauauggauuagccacucaauucaacuugggaaucaaaaucagauugaaacaugcaaucaaagcgucauuacuuaugaaaacaacacuuggguaaaucagacauauguuaacaucagcaacaccaacuuugcugcuggacagucagugguuuccgugaaauuagcgggcaauuccucucucugcccuguuaguggaugggcuauauacaguaaagacaacaguguaagaaucgguuccaagggggauguguuugucauaagggaaccauucauaucaugcucccccuuggaaugcagaaccuucuucuugacucaaggggccuugcuaaaugacaaacauuccaauggaaccauuaaagacaggagcccauaucgaacccuaaugagcuguccuauuggugaaguucccucuccauacaacucaagauuugagucagucgcuuggucagcaagugcuugucaugauggcaucaauuggcuaacaauuggaauuucuggcccagacaauggggcaguggcuguguuaaaguacaacggcauaauaacagacacuaucaagaguuggagaaacaauauauugagaacacaagagucugaaugugcauguguaaaugguucuugcuuuacuguaaugaccgauggaccaaguaauggacaggccucauacaagaucuucagaauagaaaagggaaagauagucaaaucagucgaaaugaaugccccuaauuaucacuaugaggaaugcuccuguuauccugauucuggugaaaucacaugugugugcagggauaacuggcauggcucgaaucgaccgugggugucuuucaaccagaaucuggaauaucagauaggauacauaugcagugggauuuucggagacaauccacgcccuaaugacaagacaggcaguugugguccaguaucgucuaauggagcaaauggaguaaaaggauuuucauucaaauacggcaaugguguuuggauagggagaacuaaaagcauuaguucaagaaacgguuuugagaugauuugggauccgaacggauggacugggacagacaauaacuucucaauaaagcaagauaucguaggaauaaaugaguggucaggauauagcgggaguuuuguucagcauccagaacuaacagggcuggauuguauaagaccuugcuucuggguugaacuaaucagagggcgacccaaagagaacacaaucuggacuagcgggagcagcauauccuuuugugguguaaacagugacacuguggguuggucuuggccagacggugcugaguugccauuuaccauugacaaguaa

SEQ ID NO: 51828 - RNA, 1410 nt, Artificial Sequence; identical to SEQ ID NO: 48750
  derived and/or modified CDS sequence (wt) from neuraminidase__InfluenzaA__ADN26061

SEQ ID NO: 51829 - RNA, 1410 nt, Artificial Sequence
  derived and/or modified CDS sequence (wt) from neuraminidase__InfluenzaA__ADN26063
augaauccaaaccaaaagauaauaaccauugguucggucuguaugacaauuggaauggcuaacuuaauauuacaaauuggaaacauaaucucaauauggauuagccacucaauucaacuugggaaucaaaaucagauugaaacaugcaaucaaagcgucauuacuuaugaaaacaacacuuggguaaaucagacauauguuaacaucagcaacacuaacuuugcugcuggacagucagugguuuccgugaaauuagcgggcaauuccucucucugcccuguuaguggaugggcuauauacaguaaagacaacaguauaagaaucgguuccaagggggauguguuugucauaagggaaccauucauaucaugcucccccuuggaaugcagaaccuucuucuugacucaaggggccuugcuaaaugacaaacauuccaauggaaccauuaaagacaggagcccauaucgaacccuaaugagcuguccuauuggugaaguucccucuccauacaacucaagauuugagucagucgcuuggucagcaagugcuugucaugauggcaucaauuggcuaacaauuggaauuucuggcccagacaauggggcaguggcuguguuaaaguacaacggcauaauaacagacacuaucaagaguuggagaaacaauauauugagaacacaagagucugaaugugcauguguaaaugguucuugcuuuacuguaaugaccgauggaccaagugauggacaggccucauacaagaucuucagaauagaaaagggaaagauagucaaaucagucgaaaugaaugccccuaauuaucacuaugaggaaugcuccuguuauccugauucuagugaaaucacaugugugugcagggauaacuggcauggcucgaaucgaccgugggugucuuucaaccagaaucuggaauaucagauaggauacauaugcagugggauuuucggagacaauccacgcccuaaugauaagacaggcaguugugguccaguaucgucuaauggagcaaauggaguaaaaggauuuucauucaaauacggcaaugguguuuggauagggagaacuaaaagcauuaguucaagaaacgguuuugagaugauuugggauccgaacggauggacugggacagacaauaacuucucaauaaagcaagauaucguaggaauaaaugaguggucaggauauagcgggaguuuuguucagcauccagaacuaacagggcuggauuguauaagaccuugcuucuggguugaacuaaucagagggcgacccaaagagaacacaaucuggacuagcgggagcagcauauccuuuugugguguaaacagugacacuguggguuggucuuggccagacggugcugaguugccauuuaccauugacaaguaa

SEQ ID NO: 51830 - RNA, 1410 nt, Artificial Sequence; identical to SEQ ID NO: 48947
  derived and/or modified CDS sequence (wt) from neuraminidase__InfluenzaA__ADN26064

SEQ ID NO: 51831 - RNA, 1410 nt, Artificial Sequence
  derived and/or modified CDS sequence (wt) from neuraminidase__InfluenzaA__ADN26065
augaauccaaaccaaaagauaauaaccauugguucggucuguaugacaauuggaauggcuaacuuaauauuacaaauuggaaacauaaucucaauauggauuagccacucaauucaacuugggaaucaaaaucagauugaaacaugcaaucaaagcgucauuacuuaugaaaacaacacuuggauaaaucagacauauguuaacaucagcaacaccaacuuugcugcuggacagucagugguuuccgugaaauuagcgggcaauuccucucucugcccuguuaguggaugggcuauauacaguaaagacaacaguauaagaaucgguuccaagggggauguguuugucauaagggaaccauucauaucaugcucccccuuggaaugcagaaccuucuucuugacucaaggggccuugcuaaaugacaaacauuccaauggaaccauuaaagacaggagcccauaucgaacccuaaugagcuguccuauuggugaaguucccucuccauacaacucaagauuugagucagucgcuuggucagcaagugcuugucaugauggcaucaauuggcuaacaauuggaauuucuggcccagacaauggggcaguggcuguguuaaaguacaacggcauaauaacagacacuaucaagaguuggagaaacaauauauugagaacacaagagucugaaugugcauguguaaaugguucuugcuuuacuguaaugaccgauggaccaagugauggacaggccucauacaagaucuucagaauagaaaagggaaagauagucaaaucagucgaaaugaaugccccuaauuaucacuaugaggaaugcuccuguuauccugauucuagugaaaucacaugugugugcagggauaacuggcaugguucgaaucgaccgugggugucuuucaaccagaaucuggaauaucagauaggauacauaugcagugggauuuucggagacaauccacgcccuaaugauaagacaggcaguugugguccaguaucgucuaauggagcaaauggaguaaaaggauuuucauucaaauacggcaaugguguuuggauagggagaacuaaaagcauuaguucaagaaacgguuuugagaugauuugggauccgaacggauggacugggacagacaauaacuucucaauaaagcaagauaucguaggaauaaaugaguggucaggauauagcgggaguuuuguucagcauccagaacuaacagggcuggauuguauaagaccuugcuucuggguugaacuaaucagagggcgacccaaagagaacacaaucuggacuagcgggagcagcauauccuuuugugguguaaacagugacacuguggguuggucuuggccagacggugcugaguugccauuuaccauugacaaguaa

SEQ ID NO: 51832 - RNA, 1410 nt, Artificial Sequence; identical to SEQ ID NO: 48814
  derived and/or modified CDS sequence (wt) from neuraminidase__InfluenzaA__ADN26066

SEQ ID NO: 51833 - RNA, 1410 nt, Artificial Sequence
  derived and/or modified CDS sequence (wt) from neuraminidase__InfluenzaA__ADN26067
augaauccaaaccaaaagauaauaaccauugguucggucuguaugacaauuggaauggcuaacuuaauauuacaaauuggaaacauaaucucaauauggauuagccacucaauucaacuugggaaucaaaaucagauugaaacaugcaaucaaagcgucauuacuuaugaaaacaacacuuggguaaaucagacauauguuaacaucagcaacaccaacuuugcugcuggacagucagugguuuccgugaaauuagcgggcaauuccucucucugcccuguuaguggaugggcuauauacaguaaagacaacaguauaagaaucgguuccaagggggauguguuugucauaagggaaccauucauaucaugcucccccuuggaaugcagaaccuucuucuugacucaaggggccuugcuaaaugacaaacauuccaauggaaccauuaaagacaggagcccauaucgaacccuaaugagcuguccuauuggugaaguucccucuccauacaacucaagauuugagucagucgcuuggucagcaagugcuugucaugauggcaucaauuggcuaacaauuggaauuucuggcccugacaauggggcaguggcuguguuaaaguacaacggcauaauaacagacacuaucaagaguuggagaaacaauauauugagaacacaagagucugaaugugcauguguaaaugguucuugcuuuacuguaaugaccgauggaccaagugauggacaggccucauacaagaucuucagaauagaaaagggaaagauagucaaaucagucgaaaugaaugccccuaauuaucacuaugaggaaugcuccuguuauccugauucuagugaaaucacaugugugugcagggauaacuggcauggcucgaaucgaccgugggugucuuucaaccagaaucuggaauaucagauaggauacauaugcagugggauuuucggagacaauccacgcccuaaugauaagacaggcaguugugguccaguaucgucuaauggagcaaauggaguaaaaggauuuucauucaaauacggcaaugguguuuggauagggagaacuaaaagcauuaguucaagaaacgguuuugagaugauuugggauccgaacggauggacugggacagacaauaacuucucaauaaagcaagauaucguaggaauaaaugaguggucaggauauagcgggaguuuuguccagcauccagaacuaacagggcuggauuguauaagaccuugcuucuggguugaacuaaucagagggcgacccaaagagaacacaaucuggacuagcgggagcagcauauccuuuugugguguaaacagugacacuguggguuggucuuggccagacggugcugaguugccauuuaccauugacaaguaa

SEQ ID NO: 51834 - RNA, 1410 nt, Artificial Sequence; identical to SEQ ID NO: 51833
  derived and/or modified CDS sequence (wt) from neuraminidase__InfluenzaA__ADN26069

SEQ ID NO: 51835 - RNA, 1410 nt, Artificial Sequence
  derived and/or modified CDS sequence (wt) from neuraminidase__InfluenzaA__ADN26070
augaauccaaaccaaaagauaauaaccauugguucagucuguaugacaauuggaauggcuaacuuaauauuacaaauuggaaacauaaucucaauauggauuagccacucaauucaacuugggaaucaaaaucagauugaaacaugcaaucaaagcgucauuacuuaugaaaacaacacuuggguaaaucagacauauguuaacaucagcaacaccaacuuugcugcuggacagucagugguuuccgugaaauuagcgggcaauuccucucucugcccuguuaguggaugggcuauauacaguaaagacaacaguauaagaaucgguuccaagggggauguguuugucauaagggaaccauucauaucaugcucccccuuggaaugcagaaccuucuucuugacucaaggggccuugcuaaaugacaaacauuccaauggaaccauuaaagacaggagcccauaucgaacccuaaugagcuguccuauuggugaaguucccucuccauacaacucaagauuugagucagucgcuuggucagcaagugcuugucaugauggcaucaauuggcuaacaauuggaauuucuggcccagacaauggggcaguggcuguguuaaaguacaacggcauaauaacagacacuaucaagaguuggagaaacaauauauugagaacacaagagucugaaugugcauguguaaaugguucuugcuuuacuguaaugaccgauggaccaagugauggacaggccucauacaagaucuucagaauagaaaagggaaagauagucaaaucagucgaaaugaaugccccuaauuaucacuaugaggaaugcuccuguuauccugauucuagugaaaucacauguguaugcagggauaacuggcauggcucgaaucgaccgugggugucuuucaaccagaaucuggaauaucagauaggauacauaugcagugggauuuucggagacaauccacgcccuaaugauaagacaggcaguugugguccaguaucgucuaauggagcaaauggaguaaaaggauuuucauucaaauacggcaaugguguuuggauagggagaacuaaaagcauuaguucaagaaacgguuuugagaugauuugggauccgaacggauggacugggacagacaauaacuucucaauaaagcaagauaucguaggaauaaaugaguggucaggauauagcgggaguuuuguucagcauccagaacuaacagggcuggauuguauaagaccuugcuucuggguugaacuaaucagagggcgacccaaagagaacacaaucuggacuagcgggagcagcauauccuuuugugguguaaacagugacacuguggguuggucuuggccagacggugcugaguugccauuuaccauugacaaguaa

SEQ ID NO: 51836 - RNA, 1410 nt, Artificial Sequence
  derived and/or modified CDS sequence (wt) from neuraminidase__InfluenzaA__ADN26072
augaauccaaaccaaaagauaauaaccauugguucggucuguaugacaauuggaauggcuaacuuaauauuacaaauuggaaacauaaucucaauauggauuagccacucaauucaacuugggaaucaaaaucagauugaaacaugcaaucaaagcgucauuacuuaugaaaacaacacuuggguaaaucagacauauguuaacaucagcaacaccaacuuugcugcuggacaaucagugguuuccgugaaauuagcgggcaauuccucucucugcccuguuaguggaugggcuauauacaguaaagacaacaguauaagaaucgguuccaagggggauguguuugucauaagggaaccauucauaucaugcucccccuuggaaugcagaaccuucuucuugacucaaggggccuugcuaaaugacaaacauuccaauggaaccauuaaagacaggagcccauaucgaacccuaaugagcuguccuauuggugaaguucccucuccauauaacucaagauuugagucagucgcuuggucagcaagugcuugucaugauggcaucaauuggcuaacaauuggaauuucuggcccagacaauggggcaguggcuguguuaaaguacaacggcauaauaacagacacuaucaagaguuggagaaacaauauauugagaacacaagagucugaaugugcauguguaaauggcucuugcuuuacuguaaugaccgauggaccaagugauggacaggccucauacaagaucuucagaauagaaaagggaaagauagucaaaucagucgaaaugaaugccccuaauuaucacuaugaggaaugcuccuguuauccugauucuagugaaaucacauguguaugcagggauaacuggcauggcucgaaucgaccgugggugucuuucaaccagaaucuggaauaucagauaggauacauaugcagugggauuuucggagacaauccacgcccuaaugauaagacaggcaguugugguccaguaucgucuaauggagcaaauggaguaaaaggauuuucauucaaauacggcaaugguguuuggauagggagaacuaaaagcauuaguucaagaaacgguuuugagaugauuugggauccgaacggauggacugggacagacaauaacuucucaauaaagcaagauaucguaggaauaaaugaguggucaggauauagcgggaguuuuguucagcauccagaacuaacagggcuggauuguauaagaccuugcuucuggguugaacuaaucagagggcgacccaaagagaacacaaucuggacuagcgggagcagcauauccuuuugugguguaaacagugacacuguggguuggucuuggccagacggugcugaguugccauuuaccauugacaaguaa

SEQ ID NO: 51837 - RNA, 1410 nt, Artificial Sequence; identical to SEQ ID NO: 48750
  derived and/or modified CDS sequence (wt) from neuraminidase__InfluenzaA__ADN26073

SEQ ID NO: 51838 - RNA, 1410 nt, Artificial Sequence; identical to SEQ ID NO: 48750
  derived and/or modified CDS sequence (wt) from neuraminidase__InfluenzaA__ADN26075

SEQ ID NO: 51839 - RNA, 1410 nt, Artificial Sequence; identical to SEQ ID NO: 48947
  derived and/or modified CDS sequence (wt) from neuraminidase__InfluenzaA__ADN26076

SEQ ID NO: 51840 - RNA, 1410 nt, Artificial Sequence; identical to SEQ ID NO: 48814
  derived and/or modified CDS sequence (wt) from neuraminidase__InfluenzaA__ADN26077

SEQ ID NO: 51841 - RNA, 1410 nt, Artificial Sequence
  derived and/or modified CDS sequence (wt) from neuraminidase__InfluenzaA__ADN26078
augaauccaaaccaaaagauaauaaccauugguucggucuguaugacaauuggaauggcuaacuuaauauuacaaauuggaaacauaaucucaauauggauuagccacucaauucaacuuggaaaucaaaaucagauugaaacaugcaaucaaagcgucauuacuuaugaaaacaacacuuggguaaaucagacauauguuaacaucagcaacaccaacuuugcugcuggacagucagugguuuccgugaaauuagcgggcaauuccucucucugcccuguuaguggaugggcuauauacaguaaagacaacaguauaagaaucgguuccaagggggauguguuugucauaagggaaccauucauaucaugcucccccuuggaaugcagaaccuucuucuugacucaaggggccuugcuaaaugacaaacauuccaauggaaccauuaaagacaggagcccauaucgaacccuaaugagcuguccuauuggugaaguucccucuccauacaacucaagauuugagucagucgcuuggucagcaagugcuugucaugauggcaucaauuggcuaacaauuggaauuucuggcccagacaauggggcaguggcuguguuaaaguacaacggcauaauaacagacacuaucaagaguuggagaaacaauauauugagaacacaagagucugaaugugcauguguaaaugguucuugcuuuacuguaaugaccgauggaccaagugauggacaggccucauacaagaucuucagaauagaaaagggaaagauagucaaaucagucgaaaugaaugccccuaauuaucacuaugaggaaugcuccuguuauccugauucuagugaaaucacaugugugugcagggauaacuggcauggcucgaaucgaccgugggugucuuucaaccagaaucuggaauaucagauaggauacauaugcagugggauuuucggagacaauccacgcccuaaugauaagacaggcaguugugguccaguaucgucuaauggagcaaauggaguaaaaggauuuucauucaaauacggcaaugguguuuggauagggagaacuaaaagcauuaguucaagaaacgguuuugagaugauuugggauccgaacggauggacugggacagacaauaacuucucaauaaagcaagauaucguaggaauaaaugaguggucaggauauagcgggaguuuuguccagcauccagaacuaacagggcuggauuguauaagaccuugcuucuggguugaacuaaucagagggcgacccaaagagaacacaaucuggacuagcgggagcagcauauccuuuugugguguaaacagugacacuguggguuggucuuggccagacggugcugaguugccauuuaccauugacaaguaa

SEQ ID NO: 51842 - RNA, 1410 nt, Artificial Sequence
  derived and/or modified CDS sequence (wt) from neuraminidase__InfluenzaA__ADN26079
augaauccaaaccaaaagauaauaaccauugguucagucuguaugacaauuggaauggcuaacuuaauauuacaaauuggaaacauaaucucaauauggauuagccacucaauucaacuugggaaucaaaaucagauugaaacaugcaaucaaagcgucauuacuuaugaaaacaacacuuggguaaaucagacauauguuaacaucagcaacaccaacuuugcugcuggacagucagugguuuccgugaaauuagcgggcaauuccucucucugcccuguuaguggaugggcuauauacaguaaagacaacaguauaagaaucgguuccaagggggauguguuugucauaagggaaccauucauaucaugcucccccuuggaaugcagaaccuucuucuugacucaaggggccuuacuaaaugacaaacauuccaauggaaccauuaaagacaggagcccauaucgaacccuaaugagcuguccuauuggugaaguucccucuccauacaacucaagauuugagucagucgcuuggucagcaagugcuugucaugauggcaucaauuggcuaacaauuggaauuucuggcccagacaauggggcaguggcuguguuaaaguacaacggcauaauaacagacacuaucaagaguuggagaaacaauauauugagaacacaagagucugaaugugcauguguaaaugguucuugcuuuacuguaaugaccgauggaccaagugauggacaggccucauacaagaucuucagaauagaaaagggaaagauagucaaaucagucgaaaugaaugccccuaauuaucacuaugaggaaugcuccuguuauccugauucuagugaaaucacauguguaugcagggauaacuggcauggcucgaaucgaccgugggugucuuucaaccagaaucuggaauaucagauaggauacauaugcagugggauuuucggagacaauccacgcccuaaugauaagacaggcaguugugguccaguaucgucuaauggagcaaauggaguaaaaggauuuucauucaaauacggcaaugguguuuggauagggagaacuaaaagcauuaguucaagaaacgguuuugagaugauuugggauccgaacggauggacugggacagacaauaacuucucaauaaagcaagauaucguaggaauaaaugaguggucaggauauagcgggaguuuuguucagcauccagaacuaacagggcuggauuguauaagaccuugcuucuggguugaacuaaucagagggcgacccaaagagaacacaaucuggacuagcgggagcagcauauccuuuugugguguaaacagugacacuguggguuggucuuggccagacggugcugaguugccauuuaccauugacaaguaa

SEQ ID NO: 51843 - RNA, 1410 nt, Artificial Sequence; identical to SEQ ID NO: 51835
  derived and/or modified CDS sequence (wt) from neuraminidase__InfluenzaA__ADN26080

SEQ ID NO: 51844 - RNA, 1410 nt, Artificial Sequence; identical to SEQ ID NO: 51841
  derived and/or modified CDS sequence (wt) from neuraminidase__InfluenzaA__ADN26081

SEQ ID NO: 51845 - RNA, 1410 nt, Artificial Sequence; identical to SEQ ID NO: 51841
  derived and/or modified CDS sequence (wt) from neuraminidase__InfluenzaA__ADN26082

SEQ ID NO: 51846 - RNA, 1410 nt, Artificial Sequence; identical to SEQ ID NO: 51841
  derived and/or modified CDS sequence (wt) from neuraminidase__InfluenzaA__ADN26083

SEQ ID NO: 51847 - RNA, 1410 nt, Artificial Sequence; identical to SEQ ID NO: 51450
  derived and/or modified CDS sequence (wt) from neuraminidase__InfluenzaA__ADN26084

SEQ ID NO: 51848 - RNA, 1410 nt, Artificial Sequence; identical to SEQ ID NO: 48814
  derived and/or modified CDS sequence (wt) from neuraminidase__InfluenzaA__ADN26085

SEQ ID NO: 51849 - RNA, 1410 nt, Artificial Sequence; identical to SEQ ID NO: 50339
  derived and/or modified CDS sequence (wt) from neuraminidase__InfluenzaA__ADN26086

SEQ ID NO: 51850 - RNA, 1410 nt, Artificial Sequence; identical to SEQ ID NO: 48750
  derived and/or modified CDS sequence (wt) from neuraminidase__InfluenzaA__ADN26087

SEQ ID NO: 51851 - RNA, 1410 nt, Artificial Sequence; identical to SEQ ID NO: 48750
  derived and/or modified CDS sequence (wt) from neuraminidase__InfluenzaA__ADN26088

SEQ ID NO: 51852 - RNA, 1410 nt, Artificial Sequence; identical to SEQ ID NO: 49777
  derived and/or modified CDS sequence (wt) from neuraminidase__InfluenzaA__ADN26090

SEQ ID NO: 51853 - RNA, 1410 nt, Artificial Sequence; identical to SEQ ID NO: 49194
  derived and/or modified CDS sequence (wt) from neuraminidase__InfluenzaA__ADN26091

SEQ ID NO: 51854 - RNA, 1410 nt, Artificial Sequence; identical to SEQ ID NO: 51835
  derived and/or modified CDS sequence (wt) from neuraminidase__InfluenzaA__ADN26092

SEQ ID NO: 51855 - RNA, 1410 nt, Artificial Sequence; identical to SEQ ID NO: 51835
  derived and/or modified CDS sequence (wt) from neuraminidase__InfluenzaA__ADN26093

SEQ ID NO: 51856 - RNA, 1410 nt, Artificial Sequence
  derived and/or modified CDS sequence (wt) from neuraminidase__InfluenzaA__ADN26094
augaauccaaaccaaaagauaauaaccauugguucggucuguaugacaauuggaauggcuaacuuaauauuacaaauuggaaacauaaucucaauauggauuagccacucaauucaacuugggaaucaaaaucagauugaaacaugcaaucaaagcgucauuacuuaugaaaacaacacuuggguaaaucagacauauguuaacaucagcaacaccaacuuugcugcuggacagucagugguuuccgugaaauuagcgggcaauuccucucucugcccuguuaguggaugggcuauauacaguaaagacaacaguauaagaaucgguuccaagggggauguguuugucauaagggaaccauucauaucaugcucccccuuggaaugcagaaccuucuucuugacucaaggggccuugcuaaaugacaaacauuccaauggaaccauuaaagacaggagcccauaucgaacccuaaugagcuguccuauuggugaaguucccucuccauacaacucaagauuugagucagucgcuuggucagcaagugcuugucaugauggcaucaauuggcuaacaauuggaauuucuggcccagacaauggggcaguggcuguguuaaaguacaacggcauaauaacagacacuaucaagaguuggagaaacaauauauugagaacacaagagucugaaugugcauguguaaaugguucuugcuuuacuguaaugaccgauggaccaagugauggacaggccucauacaagaucuucagaauagaaaagggaaagauagucaaaucagucgaaaugaaugccccuaauuaucacuaugaggaaugcuccuguuauccugauucuagugaaaucacauguguaugcagggauaacuggcauggcucgaaucgaccgugggugucuuucaaccagaaucuggaauaucagauaggauacauaugcagugggauuuucggagacaauccacgcccuaaugauaagacaggcaguugugguccaguaucgucuaauggagcaaauggaguaaaaggauuuucauucaaauacggcaaugguguuuggauagggagaacuaaaagcauuaguucaagaaacgguuuugagaugauuugggauccgaacggauggacugggaaagacaauaacuucucaauaaagcaagauaucguaggaauaaaugaguggucaggauauagcgggaguuuuguucagcauccagaacuaacagggcuggauuguauaagaccuugcuucuggguugaacuaaucagagggcgacccaaagagaacacaaucuggacuagcgggagcagcauauccuuuugugguguaaacagugacacuguggguuggucuuggccagacggugcugaguugccauuuaccauugacaaguaa

SEQ ID NO: 51857 - RNA, 1410 nt, Artificial Sequence; identical to SEQ ID NO: 51450
  derived and/or modified CDS sequence (wt) from neuraminidase__InfluenzaA__ADN26095

SEQ ID NO: 51858 - RNA, 1410 nt, Artificial Sequence
  derived and/or modified CDS sequence (wt) from neuraminidase__InfluenzaA__ADN26096
augaauccaaaccaaaagauaauaaccauugguucggucuguaugacaauuggaauggcuaacuuaauauuacaaauuggaaacauaaucucaauauggauuagccacucaauucaacuugggaaucaaaaucagauugaaacaugcaaucaaagcgucauuacuuaugaaaacaacacuuggguaaaucagacauauguuaacaucagcaacaccaacuuugcugcuggacagucagugguuuccgugaaauuagcgggcaauuccucucucugcccuguuaauggaugggcuauauacaguaaagacaacaguauaagaaucgguuccaagggggauguguuugucauaagggaaccauucauaucaugcucccccuuggaaugcagaaccuucuucuugacucaaggggccuugcuaaaugacaaacauuccaauggaaccauuaaagacaggagcccauaucgaacccuaaugagcuguccuauuggugaaguucccucuccauacaacucaagauuugagucagucgcuuggucagcaagugcuugucaugauggcaucaauuggcuaacaauuggaauuucuggcccagacaauggggcaguggcuguguuaaaguacaacggcauaauaacagacacuaucaagaguuggagaaacaauauauugagaacacaagagucugaaugugcauguguaaaugguucuugcuuuacuguaaugaccgauggaccaagugauggacaggccucauacaagaucuucagaauagaaaagggaaagauagucaaaucagucgaaaugaaugccccuaauuaucacuaugaggaaugcuccuguuauccugauucuagugaaaucacaugugugugcagggauaacuggcauggcucgaaucgaccguggguaucuuucaaccagaaucuggaauaucagauaggauacauaugcagugggauuuucggagacaauccacgcccuaaugauaagacaggcaguugugguccaguaucgucuaauggagcaaauggaguaaaaggauuuucauucaaauacggcaaugguguuuggauagggagaacuaaaaacauuaguucaagaaacgguuuugagaugauuugggauccgaacggauggacugggacagacaauaacuucucaauaaagcaagauaucguaggaauaaaugaguggucaggauauagcgggaguuuuguucagcauccagaacuaacagggcuggauuguauaagaccuugcuucuggguugaacuaaucagagggcgacccaaagagaacacaaucuggacuagcgggagcagcauauccuuuugugguguaaacagugacacuguggguuggucuuggccggacggugcugaguugccauuuaccauugacaaguaa

SEQ ID NO: 51859 - RNA, 1410 nt, Artificial Sequence
  derived and/or modified CDS sequence (wt) from neuraminidase__InfluenzaA__ADN26097
augaauccaaaccaaaagauaauaaccauugguucggucuguaugacaauuggaauggcuaacuuaauauuacaaauuggaaacauaaucucaauauggauuagccacucaauucaacuugggaaucaaaaucagauugaaacaugcaaucaaagcgucauuacuuaugaaaacaacacuuggguaaaucagacauauguuaacaucagcaauaccaacuuugcugcuggacagucagugguuuccgugaaauuggcgggcaauuccucucucugcccuguuaguggaugggcuauauacaguaaagacaacaguauaagaaucgguuccaagggggauguguuugucauaagggaaccauucauaucaugcucccccuuggaaugcagaaccuucuucuugacucaaggggccuugcuaaaugacaaacauuccaauggaaccauuaaagacaggagcccauaucgaacccuaaugagcuguccuauuggugaaguucccucuccauacaacucaagauuugagucagucgcuuggucagcaagugcuugucaugauggcaucaauuggcuaacaauuggaauuucuggcccagacaauggggcaguggcuguguuaaaguacaacggcauaauaacagacacuaucaagaguuggagaaacaauauauugagaacacaagagucugaaugugcaugugugaaugguucuugcuuuacuguaaugaccgauggaccaagugauggacaggccucauacaagaucuucagaauagaaaagggaaagauagucaaaucagucgaaaugaaugccccuaauuaucacuaugaggaaugcuccuguuauccugauucuagugaaaucacauguguaugcagggauaacuggcauggcucgaaucgaccgugggugucuuucaaccagaaucuggaauaucagauaggauacauaugcagugggauuuucggagacaauccacgcccuaaugauaagacaggcaguugugguccaguaucgucuaauggagcaaauggaguaaaaggauuuucauucaaauacggcaaugguguuuggauagggagaacuaaaagcauuaguucaagaaacgguuuugagaugauuugggauccgaacggauggacugggacagacaauaacuucucaauaaagcaagauaucguagggauaaaugaguggucaggauauagcgggaguuuuguucagcauccagaacuaacagggcuggauuguauaagaccuugcuucuggguugaacuaaucagagggcgacccaaagagaacacaaucuggacuagcgggagcagcauauccuuuugugguguaaacagugacacuguggguuggucuuggccagacggugcugaguugccauuuaccauugacaaguaa

SEQ ID NO: 51860 - RNA, 1410 nt, Artificial Sequence; identical to SEQ ID NO: 48947
  derived and/or modified CDS sequence (wt) from neuraminidase__InfluenzaA__ADN26098

SEQ ID NO: 51861 - RNA, 1410 nt, Artificial Sequence; identical to SEQ ID NO: 48947
  derived and/or modified CDS sequence (wt) from neuraminidase__InfluenzaA__ADN26099

SEQ ID NO: 51862 - RNA, 1410 nt, Artificial Sequence; identical to SEQ ID NO: 48947
  derived and/or modified CDS sequence (wt) from neuraminidase__InfluenzaA__ADN26100

SEQ ID NO: 51863 - RNA, 1410 nt, Artificial Sequence; identical to SEQ ID NO: 48947
  derived and/or modified CDS sequence (wt) from neuraminidase__InfluenzaA__ADN26101

SEQ ID NO: 51864 - RNA, 1410 nt, Artificial Sequence
  derived and/or modified CDS sequence (wt) from neuraminidase__InfluenzaA__ADN26102
augaauccaaaccaaaagauaauaaccauugguucggucuguaugacaauuggaauggcuaacuuaauauuacaaauuggaaacauaaucucaauauggauuagccacuuaauucaacuugggaaucaaaaucagauugaaacaugcaaucaaagcgucauuacuuaugaaaacaacacuuggguaaaucagacauauguuaacaucagcaacaccaacuuugcugcuggacagucagugguuuccgugaaauuagcgggcaauuccucucucugcccuguuaguggaugggcuauauacaguaaagacaacaguauaagaaucgguuccaagggggauguguuugucauaagggagccauucauaucaugcucccccuuggaaugcagaaccuucuucuugacucaaggggccuugcuaaaugacaaacauuccaauggaaccauuaaagacaggagcccauaucgaacccuaaugagcuguccuauuggugaaguucccucuccauacaacucaagauuugagucagucgcuuggucagcaagugcuugucaugauggcaucaauuggcuaacaauuggaauuucuggcccagacaauggggcaguggcuguguuaaaguacaacggcauaauaacagacacuaucaagaguuggagaaacaauauauugagaacacaagagucugaaugugcauguguaaaugguucuugcuuuacuguaaugaccgauggaccaagugauggacaggccucauacaagaucuucaaaauagaaaagggaaagauagucaaaucagucgaaaugaaugccccuaauuaucacuaugaggaaugcuccuguuauccugauucuagugaaaucacaugugugugcagggauaacuggcauggcucgaaucgaccguggguaucuuucaaccagaaucuggaauaucagauaggauacauaugcagugggauuuucggagacaauccacgcccuaaugauaagacaggcaguugugguccaguaucgucuaauggagcaaauggaguaaaaggauuuucauucaaauacggcaaugguguuuggauagggagaacuaaaagcauuaguucaagaaaugguuuugagaugauuugggauccgaacggauggacugggacagacaauaacuucucaauaaagcaagauaucguaggaauaaaugaguggucaggauauagcgggaguuuuguucagcauccagaacuaacagggcuggauuguauaagaccuugcuucuggguugaacuaaucagagggcgacccaaagagaacucaaucuggacuagcgggagcagcauauccuuuugugguguaaacagugacacuguggguuggucuuggccggacggugcugaguugccauuuaccauugacaaguaa

SEQ ID NO: 51865 - RNA, 1410 nt, Artificial Sequence; identical to SEQ ID NO: 50533
  derived and/or modified CDS sequence (wt) from neuraminidase__InfluenzaA__ADN26103

SEQ ID NO: 51866 - RNA, 1410 nt, Artificial Sequence; identical to SEQ ID NO: 48947
  derived and/or modified CDS sequence (wt) from neuraminidase__InfluenzaA__ADN26104

SEQ ID NO: 51867 - RNA, 1410 nt, Artificial Sequence; identical to SEQ ID NO: 48947
  derived and/or modified CDS sequence (wt) from neuraminidase__InfluenzaA__ADN26105

SEQ ID NO: 51868 - RNA, 1410 nt, Artificial Sequence; identical to SEQ ID NO: 51835
  derived and/or modified CDS sequence (wt) from neuraminidase__InfluenzaA__ADN26106

SEQ ID NO: 51869 - RNA, 1410 nt, Artificial Sequence; identical to SEQ ID NO: 51450
  derived and/or modified CDS sequence (wt) from neuraminidase__InfluenzaA__ADN26107

SEQ ID NO: 51870 - RNA, 1410 nt, Artificial Sequence; identical to SEQ ID NO: 51450
  derived and/or modified CDS sequence (wt) from neuraminidase__InfluenzaA__ADN26108

SEQ ID NO: 51871 - RNA, 1410 nt, Artificial Sequence; identical to SEQ ID NO: 48947
  derived and/or modified CDS sequence (wt) from neuraminidase__InfluenzaA__ADN26109

SEQ ID NO: 51872 - RNA, 1410 nt, Artificial Sequence
  derived and/or modified CDS sequence (wt) from neuraminidase__InfluenzaA__ADN26110
augaauccaaaccaaaagauaauaaccauugguucggucuguaugacaauuggaauggcuaacuuaauauuacaaauuggaaacauaaucucaauauggauuagccacucaauucaacuugggaaucaaaaucagauugaaacaugcaaucaaagcgucauuacuuaugaaaacaacacuuggguaaaucagacauauguuaacaucagcaacaccaacuuugcugcuggacagucagugguuuccgugaaauuagcgggcaauuccucucucugcccuguuaauggaugggcuauauacaguaaagacaacaguauaagaaucgguuccaagggggauguguuugucauaagggaaccauucauaucaugcucccccuuggaaugcagaaccuucuucuugacucaaggggccuugcuaaaugacaaacauuccaauggaaccauuaaagacaggagcccauaucgaacccuaaugagcuguccuauuggugaaguucccucuccauacaacucaagauuugagucagucgcuuggucagcaagugcuugucaugauggcaucaauuggcuaacaauuggaauuucuggcccagacaauggggcaguggcuguguuaaaguacaacggcauaauaacagacacuaucaagaguuggagaaacaauauauugagaacacaagagucugaaugugcauguguaaaugguucuugcuuuacuguaaugaccgauggaccaagugauggacaggccucauacaagaucuucagaauagaaaagggaaagauagucaaaucagucgaaaugaaugccccuaauuaucacuaugaggaaugcuccuguuauccugauucuagugaaaucacaugugugugcagggauaacuggcauggcucgaaucgaccguggguaucuuucaaccagaaucuggaauaucagauaggauacauaugcagugggauuuucggagacaauccacgcccuaaugauaagacaggcaguugugguccaguaucgucuaauggagcaaauggaguaaaaggauuuucauucaaauacggcaaugguguuuggauagggagaacuaaaagcauuaguucaagaaacgguuuugagaugauuugggauccgaacggauggacugggacagacaauaacuucucaauaaagcaagauaucguaggaauaaaugaguggucaggauauagcgggaguuuuguucagcauccagaacuaacagggcuggauuguauaagaccuugcuucuggguugaacuaaucagagggcgacccaaagagaacacaaucuggacuagcgggagcagcauauccuuuugugguguaaacagugacacuguggguuggucuuggccggacggugcugaguugccauuuaccauugacaaguaa

SEQ ID NO: 51873 - RNA, 1410 nt, Artificial Sequence; identical to SEQ ID NO: 51450
  derived and/or modified CDS sequence (wt) from neuraminidase__InfluenzaA__ADN26111

SEQ ID NO: 51874 - RNA, 1410 nt, Artificial Sequence; identical to SEQ ID NO: 51872
  derived and/or modified CDS sequence (wt) from neuraminidase__InfluenzaA__ADN26112

SEQ ID NO: 51875 - RNA, 1410 nt, Artificial Sequence
  derived and/or modified CDS sequence (wt) from neuraminidase__InfluenzaA__ADN26113
augaauccaaaccaaaagauaauaaccauugguucggucuguaugacaauuggaauggcuaacuuaauauuacaaauuggaaacauaaucucaauauggauuagccacucaauucaacuugggaaucaaaaucagauugaaacaugcaaucaaagcgucauuacuuaugaaaacaacacuuggguaaaucagacauauguuaacaucagcaacaccaacuuugcugcuggacagucagugguuuccgugaaauuagcgggcaauuccucucucugcccuguuaguggaugggcuauauacaguaaagacaacaguauaagaaucgguuccaagggggauguguuugucauaagggagccauucauaucaugcucccccuuggaaugcagaaccuucuucuugacucaaggggccuugcuaaaugacaaacauuccaauggaaccauuaaagacaggagcccauaucgaacucuaaugagcuguccuauuggugaaguucccucuccauacaacucaagauuugagucagucgcuuggucagcaagugcuugucaugauggcaucaauuggcuaacaauuggaauuucuggcccagacaauggggcaguggcuguguuaaaguacaacggcauaauaacagacacuaucaagaguuggagaaacaauauauugagaacacaagagucugaaugugcauguguaaaugguucuugcuuuacuguaaugaccgauggaccaagugauggacaggccucauacaagaucuucaaaauagaaaagggaaagauagucaaaucagucgaaaugaaugccccuaauuaucacuaugaggaaugcuccuguuauccugauucuagugaaaucacaugugugugcagggauaacuggcauggcucgaaucgaccguggguaucuuucaaccagaaucuggaauaucagauaggauacauaugcagugggauuuucggagacaauccacgcccuaaugauaagacaggcaguugugguccaguaucgucuaauggagcaaauggaguaaaaggauuuucauucaaauacggcaaugguguuuggauagggagaacuaaaagcauuaguucaagaaaugguuuugagaugauuugggauccgaacggauggacugggacagacaauaacuucucaauaaagcaagauaucguaggaauaaaugaguggucaggauauagcgggaguuuuguucagcauccagaacuaacagggcuggauuguauaagaccuugcuucuggguugaacuaaucagagggcgacccaaagagaacacaaucuggacuagcgggagcagcauauccuuuugugguguaaacagugacacuguggguuggucuuggccggacggugcugaguugccauuuaccauugacaaguaa

SEQ ID NO: 51876 - RNA, 1410 nt, Artificial Sequence
  derived and/or modified CDS sequence (wt) from neuraminidase__InfluenzaA__ADN26114
augaauccaaaccaaaagauaauaaccauugguucggucuguaugacaauuggaauggcuaacuuaauauuacaaauuggaaacauaaucucaauauggauuagccacucaauucaacuugggaaucaaaaucagauugaaacaugcaaucaaagcgucauuacuuaugaaaacaacacuuggguaaaucagacauauguuaacaucaacaacaccaacuuugcugcuggacagucagugguuuccgugaaauuagcgggcaauuccucucucugcccuguuaguggaugggcuauauacaguaaagacaacaguauaagaaucgguuccaagggggauguguuugucauaagggaaccauucauaucaugcucccccuuggaaugcagaaccuucuucuugacucaaggggccuugcuaaaugacaaacauuccaauggaaccauuaaagacaggagcccauaucgaacccuaaugagcuguccuauuggugaaguucccucuccauacaacucaagauuugagucagucgcuuggucagcaagugcuugucaugauggcaucaauuggcuaacaauuggaauuucuggcccagacaauggggcaguggcuguguuaaaguacaacggcauaauaacagacacuaucaagaguuggagaaacaauauauugagaacacaagagucugaaugugcauguguaaaugguucuugcuuuacuguaaugaccgauggaccaagugauggacaggccucauacaagaucuucagaauagaaaagggaaagauagucaaaucagucgaaaugaaugccccuaauuaucacuaugaggaaugcuccuguuauccugauucuagugaaaucacaugugugugcagggauaacuggcauggcucgaaucgaccgugggugucuuucaaccagaaucuggaauaucagauaggauacauaugcagugggauuuucggagacaauccacgcccuaaugauaagacaggcaguugugguccaguaucgucuaauggagcaaauggaguaaaaggauuuucauucaaauacggcaaugguguuuggauagggagaacuaaaagcauuaguucaagaaacgguuuugagaugauuugggauccgaacggauggacugggacagacaauaacuucucaauaaagcaagauaucguaggaauaaaugaguggucaggauauagcgggaguuuuguccagcauccagaacuaacagggcuggauuguauaagaccuugcuucuggguugaacuaaucagagggcgacccaaagagaacacaaucuggacuagcgggagcagcauauccuuuugugguguaaacagugacacuguggguuggucuuggccagacggugcugaguugccauuuaccauugacaaguaa

SEQ ID NO: 51877 - RNA, 1410 nt, Artificial Sequence; identical to SEQ ID NO: 48947
  derived and/or modified CDS sequence (wt) from neuraminidase__InfluenzaA__ADN26115

SEQ ID NO: 51878 - RNA, 1410 nt, Artificial Sequence
  derived and/or modified CDS sequence (wt) from neuraminidase__InfluenzaA__ADN26116
augaauccaaaccaaaagauaauaaccauugguucggucuguaugacaauuggaauggcuaacuuaauauuacaaauuggaaacauaaucucaauauggauuagccacucaauucaacuugggaaucaaaaucagauugaaacaugcaaucaaagcgucauuacuuaugaaaacaacacuuggguaaaucagacauauguuaacaucagcaacaccaacuuugcugcuggacagucagugguuuccgugaaauuagcgggcaauuccucucucugcccuguuaauggaugggcuauauacaguaaagacaacaguauaagaaucgguuccaagggggauguguuugucauaagggaaccauucauaucaugcucccccuuggaaugcagaaccuucuucuugacucaaggggccuugcuaaaugacaaacauuccaauggaaccauuaaagacaggagcccauaucgaacccuaaugagcuguccuauuggugaaguucccucuccauacaacucaagauuugagucagucgcuuggucagcaagugcuugucaugauggcaucaauuggcuaacaauuggaauuucuggcccagacaauggggcaguggcuguguuaaaguacaacggcauaauaacagacacuaucaagaguuggagaaacaauauauugagaacacaagagucugaaugugcauguguaaaugguucuugcuuuacuguaaugaccgauggaccaagugauggacaggccucauacaagaucuucagaauagaaaagggaaagauagucaaaucagucgaaaugaaugccccuaauuaucacuaugaggaaugcuccuguuauccugauucuagugaaaucacauguguaugcagggauaacuggcauggcucgaaucgaccguggguaucuuucaaccagaaucuggaauaucagauaggauacauaugcagugggauuuucggagacaauccacgcccuaaugauaagacaggcaguugugguccagugucgucuaauggagcaaacggaguaaaaggauuuucauucaaauacggcaaugguguuuggauagggagaacuaaaagcauuaguucaagaaacgguuuugagaugauuugggauccgaacggauggacugggacagacaauaacuucucaauaaagcaagauaucguaggaauaaaugaguggucaggauauagcgggaguuuuguucagcauccagaacuaacaaggcuggauuguauaagaccuugcuucuggguugaacuaaucagagggcgacccaaagagaacacaaucuggacuagcgggagcagcauauccuuuugugguguaaacagugacacuguggguuggucuuggccggacggugcugaguugccauuuaccauugacaaguaa

SEQ ID NO: 51879 - RNA, 1410 nt, Artificial Sequence
  derived and/or modified CDS sequence (wt) from neuraminidase__InfluenzaA__ADN26117
augaauccaaaccaaaagauaauaaccauugguucggucuguaugacaauuggaauggcuaacuuaauauuacaaauuggaaacauaaucucaauauggauuagccacucaauucaacuugggaaucaaaaucagauugaaacaugcaaucaaagcgucauuacuuaugaaaacaacacuuggguaaaucagacauauguuaacaucagcaacaccaacuuugcugcuggacagucagugguuuccgugaaauuagcgggcaauuccucucucugcccuguuaguggaugggcuauauacaguaaagacaacaguauaagaaucgguuccaagggggauguguuugucauaagggagccauucauaucaugcucccccuuggaaugcagaaccuucuucuugacucaaggggccuugcuaaaugacaaacauuccaauggaaccauuaaagacaggagcccauaucgaacucuaaugagcuguccuauuggugaaguucccucuccauacaacucaagauuugagucagucgcuuggucagcaagugcuugucaugauggcaucaauuggcuaacaauuggaauuucuggcccagacaauggggcaguggcuguguuaaaguacaacggcauaauaacagacacuaucaagaguuggagaaacaauauauugagaacacaagagucugaaugugcauguguaaaugguucuugcuuuacuguaaugaccgauggaccaagugauggacaggccucauacaagaucuucaaaauagaaaagggaaagauagucaaaucagucgaaaugaaugccccuaauuaucacuaugaggaaugcuccuguuauccugauucuagugaaaucacaugugugugcagggauaacuggcauggcucgaaucgaccguggguaucuuucaaccagaaucuggaauaucagauaggauacauaugcagugggauuuucggagacaauccacgcccuaaugauaagacaggcaguugugguccaguaucgucuaauggagcaaauggaguaaaaggauuuucauucaaauacggcaaugguguuuggauagggagaacuaaaagcauuaguucaagaaaugguuuugagaugauuugggauccgaacggauggacugggacagacaauaacuucucaauaaagcaagauaucguaggaauaaaugaguggucaggauauagcgggaguuuuguucagcauccagaacuaacagggcuggauuguauaagaccuugcuucuggguugaacuaaucagagggcgacccaaagagaacacaaucuggacuagcgggagcagcauaucauuuugugguguaaacagugacacuguggguuggucuuggccggacggugcugaguugccauuuaccauugacaaguaa

SEQ ID NO: 51880 - RNA, 1410 nt, Artificial Sequence; identical to SEQ ID NO: 51450
  derived and/or modified CDS sequence (wt) from neuraminidase__InfluenzaA__ADN26118

SEQ ID NO: 51881 - RNA, 1410 nt, Artificial Sequence; identical to SEQ ID NO: 49215
  derived and/or modified CDS sequence (wt) from neuraminidase__InfluenzaA__ADN26119

SEQ ID NO: 51882 - RNA, 1410 nt, Artificial Sequence; identical to SEQ ID NO: 51872
  derived and/or modified CDS sequence (wt) from neuraminidase__InfluenzaA__ADN26120

SEQ ID NO: 51883 - RNA, 1410 nt, Artificial Sequence; identical to SEQ ID NO: 51450
  derived and/or modified CDS sequence (wt) from neuraminidase__InfluenzaA__ADN26121

SEQ ID NO: 51884 - RNA, 1410 nt, Artificial Sequence; identical to SEQ ID NO: 48947
  derived and/or modified CDS sequence (wt) from neuraminidase__InfluenzaA__ADN26122

SEQ ID NO: 51885 - RNA, 1410 nt, Artificial Sequence; identical to SEQ ID NO: 49215
  derived and/or modified CDS sequence (wt) from neuraminidase__InfluenzaA__ADN26123

SEQ ID NO: 51886 - RNA, 1410 nt, Artificial Sequence; identical to SEQ ID NO: 48947
  derived and/or modified CDS sequence (wt) from neuraminidase__InfluenzaA__ADN26124

SEQ ID NO: 51887 - RNA, 1410 nt, Artificial Sequence; identical to SEQ ID NO: 51872
  derived and/or modified CDS sequence (wt) from neuraminidase__InfluenzaA__ADN26125

SEQ ID NO: 51888 - RNA, 1410 nt, Artificial Sequence; identical to SEQ ID NO: 51872
  derived and/or modified CDS sequence (wt) from neuraminidase__InfluenzaA__ADN26126

SEQ ID NO: 51889 - RNA, 1410 nt, Artificial Sequence
  derived and/or modified CDS sequence (wt) from neuraminidase__InfluenzaA__ADN26127
augaauccaaaccaaaagauaauaaccauugguucggucuguaugacaauuggaauggcuaacuuaauauuacaaauuggaaacauaaucucaauauggauuagccacucaauucaacuugggaaucaaaaucagauuggaacaugcaaucaaagcgucauuacuuaugaaaacaacacuuggguaaaucagacauauguuaacaucagcaacaccaacuuugcugcuggacagucagugguuuccgugaaauuagcgggcaauuccucucucugcccuguuaguggaugggcuauauacaguaaagacaacaguauaagaaucgguuccaagggggauguguuugucauaagggaaccauucauaucaugcucccccuuggaaugcagaaccuucuucuugacucaaggggccuugcuaaaugacaaacauuccaauggaaccauuaaagacaggagcccauaucgaacccuaaugagcuguccuauuggugaaguucccucuccauacaacucaagauuugagucaguugcuuggucagcaagugcuugucaugauggcaucaauuggcuaacaauuggaauuucuggcccagacaauggggcaguggcuguguuaaaguacaacggcauaauaacagacacuaucaagaguuggagaaacaauauauugagaacacaagagucugaaugugcauguguaaaugguucuugcuuuacuguaaugaccgauggaccaagugauggacaggccucauacaagaucuucagaauagaaaagggaaagauagucaaaucagucgaaaugaaugccccuaauuaucacuaugaggaaugcuccuguuauccugauucuagugaaaucacaugugugugcagggauaacuggcauggcucgaaucgaccgugggugucuuucaaccagaaucuggaauaucagauaggauacauaugcagugggauuuucggagacaauccacgcccuaaugauaagacaggcaguugugguccaguaucgucuaauggagcaaauggaguaaaaggauuuucauucaaauacggcaaugguguuuggauagggagaacuaaaagcauuaguucaagaaacgguuuugagaugauuugggauccgaacggauggacugggacagacaauaacuucucaauaaagcaagauaucguaggaauaaaugaguggucaggauauagcgggaguuuuguucagcauccagaacuaacagggcuggauuguauaagaccuugcuucuggguugaacuaaucagagggcgacccaaagagaacacaaucuggacuagcgggagcagcauauccuuuugugguguaaacagugacacuguggguuggucuuggccagacggugcugaguugccauuuaccauugacaaguaa

SEQ ID NO: 51890 - RNA, 1410 nt, Artificial Sequence; identical to SEQ ID NO: 48947
  derived and/or modified CDS sequence (wt) from neuraminidase__InfluenzaA__ADN26128

SEQ ID NO: 51891 - RNA, 1410 nt, Artificial Sequence; identical to SEQ ID NO: 51872
  derived and/or modified CDS sequence (wt) from neuraminidase__InfluenzaA__ADN26129

SEQ ID NO: 51892 - RNA, 1410 nt, Artificial Sequence; identical to SEQ ID NO: 51450
  derived and/or modified CDS sequence (wt) from neuraminidase__InfluenzaA__ADN26130

SEQ ID NO: 51893 - RNA, 1410 nt, Artificial Sequence
  derived and/or modified CDS sequence (wt) from neuraminidase__InfluenzaA__ADN26131
augaauccaaaccaaaagauaauaaccauugguucggucuguaugacaauuggaauggcuaacuuaauauuacaaauuggaaacauaaucucaauauggauuagccacucaauucaacuugggaaucaaaaccagauugaaacaugcaaucaaagcgucauuacuuaugaaaacaacacuuggguaaaucagacauauguuaacaucagcaacaccaacuuugcugcuggacagucagugguuuccgugaaauuagcgggcaauuccucucucugcccuguuaguggaugggcuauauacaguaaagacaacaguauaagaaucgguuccaagggggauguguuugucauaagggaaccauucauaucaugcucccccuuggaaugcagaaccuucuucuugacucaaggggccuugcuaaaugacaaacauuccaauggaaccauuaaagacaggagcccauaucgaacccuaaugagcuguccuauuggugaaguucccucuccauacaacucaagauuugagucagucgcuuggucagcaagugcuugucaugauggcaucaauuggcuaacaauuggaauuucuggcccagacaauggggcaguggcuguguuaaaguacaacggcauaauaacagacacuaucaagaguuggagaaacaauauauugagaacacaagagucugaaugugcauguguaaaugguucuugcuuuacuguaaugaccgauggaccaagugauggacaggccucauacaagaucuucagaauagaaaagggaaagauagucaaaucagucgaaaugaaugccccuaauuaucacuaugaggaaugcuccuguuauccugauucuagugaaaucacaugugugugcagggauaacuggcauggcucgaaucgaccgugggugucuuucaaccagaaucuggaauaucagauaggauacauaugcagugggauuuucggagacaauccacgcccuaaugauaagaaaggcaguugugguccaguaucgucuaauggagcaaauggaguaaaaggauuuucauucaaauacggcaaugguguuuggauagggagaacuaaaagcauuaguucaagaaacgguuuugagaugauuugggauccgaacggauggacugggacagacaauaacuucucaauaaagcaagauaucguaggaauaaaugaauggucaggauauagcgggaguuuuguucagcauccagaacuaacagggcuggauuguauaagaccuugcuucuggguugaacuaaucagagggcgacccaaagagaacacaaucuggacuagcgggagcagcauaucccuuugugguguaaacagugacacuguggguuggucuuggccagacggugcugaguugccauuuaccauugacaaguaa

SEQ ID NO: 51894 - RNA, 1410 nt, Artificial Sequence; identical to SEQ ID NO: 51450
  derived and/or modified CDS sequence (wt) from neuraminidase__InfluenzaA__ADN26132

SEQ ID NO: 51895 - RNA, 1410 nt, Artificial Sequence; identical to SEQ ID NO: 51872
  derived and/or modified CDS sequence (wt) from neuraminidase__InfluenzaA__ADN26134

SEQ ID NO: 51896 - RNA, 1410 nt, Artificial Sequence; identical to SEQ ID NO: 48814
  derived and/or modified CDS sequence (wt) from neuraminidase__InfluenzaA__ADN26135

SEQ ID NO: 51897 - RNA, 1410 nt, Artificial Sequence
  derived and/or modified CDS sequence (wt) from neuraminidase__InfluenzaA__ADN26136
augaauccaaaccaaaagauaauaaccauugguucggucuguaugacaauuggaauggcuaacuuaauauuacaaauuggaaacauaaucucaauauggauuagccacucaauucaacuugggaaucaaaaucagauugaaacaugcaaucaaagcgucauuacuuaugaaaauaacacuuggguaaaucagacauauguuaacaucagcaacaccaacuuugcugcuggacagucagugguuuccgugaaauuagcgggcaauuccucucucugcccuguuaguggaugggcuauauacaguaaagacaacaguauaagaaucgguuccaagggggauguguuugucauaagggaaccauucauaucaugcucccccuuggaaugcagaaccuucuucuugacucaaggggccuugcuaaaugacaaacauuccaauggaaccauuaaagacaggagcccauaucgaacccuaaugagcuguccuauuggugaaguucccucuccauacaacucaagauuugagucagucgcuuggucagcaagugcuugucaugauggcaucaauuggcuaacaauuggaauuucuggcccagacaauggggcaguggcuguguuaaaguacaacggcauaauaacagacacuaucaagaguuggagaaacaauauauugagaacacaagagucugaaugugcauguguaaaugguucuugcuuuacuguaaugaccgauggaccaagugauggacaggccucauacaagaucuucagaauagaaaagggaaagauagucaaaucagucgaaaugaaugccccuaauuaucacuaugaggaaugcuccuguuauccugauucuagugaaaucacaugugugugcagggauaacuggcauggcucgaaucgaccgugggugucuuucaaccagaaucuggaauaucagauaggauacauaugcagugggauuuucggagacaauccacgcccuaaugauaagacaggcaguugugguccaguaucgucuaauggagcaaauggaguaaaaggauuuucauucaaauacggcaaugguguuuggauagggagaacuaaaagcauuaguucaagaaacgguuuugagaugauuugggauccgaacggauggacugggacagacaauaacuucucaauaaagcaagauaucguaggaauaaaugaguggucaggauauagcgggaguuuuguccagcauccagaacuaacagggcuggauuguauaagaccuugcuucuggguugaacuaaucagagggcgacccaaagagaacacaaucuggacuagcgggagcagcauauccuuuugugguguaaacagugacacuguggguuggucuuggccagacggugcugaguugccauuuaccauugacaaguaa

SEQ ID NO: 51898 - RNA, 1410 nt, Artificial Sequence
  derived and/or modified CDS sequence (wt) from neuraminidase__InfluenzaA__ADN26137
augaauccaaaccaaaagauaauaaccauugguucggucuguaugacaauuggaauggcuaacuuaauauuacaaauuggaaacauaaucucaauauggauuagccacucaauucaacuugggaaucaaaaucagauugaaacaugcaaucaaagcgucauuacuuaugaaaacaacacuuggguaaaucagacauauguuaacaucagcaauaccaacuuugcugcuggacagucagugguuuccgugaaauuggcgggcaauuccucucucugcccuguuaguggaugggcuauauacaguaaagacaacaguauaagaaucgguuccaagggggauguguuugucauaagggaaccauucauaucaugcucccccuuggaaugcagaaccuucuucuugacucaaggggccuugcuaaaugacaaacauuccaauggaaccauuaaagacaggagcccauaucgaacccuaaugagcuguccuauuggugaaguucccucuccauacaacucaagauuugagucagucgcuuggucagcaagugcuugucaugauggcauaaauuggcuaacaauuggaauuucuggcccagacaauggggcaguggcuguguuaaaguacaacggcauaauaacagacacuaucaagaguuggagaaacaauauauugagaacacaagagucugaaugugcauguguaaaugguucuugcuuuacuguaaugaccgauggaccaagugauggacaggccucauacaagaucuucagaauagaaaagggaaagauagucaaaucagucgaaaugaaugccccuaauuaucacuaugaggaaugcuccuguuauccugauucuagugaaaucacauguguaugcagggauaacuggcauggcucgaaucgaccgugggugucuuucaaccagaaucuggaauaucagauaggauacauaugcagugggauuuucggagacaauccacgcccuaaugauaagacaggcaguugugguccaguaucgucuaauggagcaaauggaguaaaaggauuuucauucaaauacggcaaugguguuuggauagggagaacuaaaagcauuaguucaagaaacgguuuugagaugauuugggauccgaacggauggacugggacagacaauaacuucucaauaaagcaagauaucguagggauaaaugaguggucaggauauagcgggaguuuuguucagcauccagaacuaacagggcuggauuguauaagaccuugcuucuggguugaacuaaucagagggcgacccaaagagaacacaaucuggacuagcgggagcagcauauccuuuugugguguaaacagugacacuguggguuggucuuggccagacggugcugaguugccauuuaccauugacaaguaa

SEQ ID NO: 51899 - RNA, 1410 nt, Artificial Sequence
  derived and/or modified CDS sequence (wt) from neuraminidase__InfluenzaA__ADN26138
augaauccaaaccaaaagauaauaaccauugguucggucuguaugacaauuggaauggcuaacuuaauauuacaaauuggaaacauaaucucaauauggauuagccacucaauucaacuugggaaucaaaaucagauugaaacaugcaaucaaagcgucauuacuuaugaaaacaacacuuggguaaaucagacauauguuaacaucagcaacaccaacuuugcugcuggacagucagugguuuccgugaaauuagcgggcaauuccucucucugcccuguuaguggaugggcuauauacaguaaagacaacaguauaagaaucgguuccaagggggauguguuugucauaagggagccauucauaucaugcucccccuuggaaugcagaaccuucuucuugacucaaggggccuugcuaaaugacaaacauuccaauggaaccauuaaagacaggagcccauaucgaacccuaaugagcuguccuauuggugaaguucccucuccauacaacucaagauuugagucagucgcuuggucagcaagugcuugucaugauggcaucaauuggcuaacaauuggaauuucuggcccagacaauggggcaguggcuguguuaaaguacaacggcauaauaacagacacuaucaagaguuggagaaacaauauauugagaacacaagagucugaaugugcauguguaaaugguucuugcuuuacuguaaugaccgauggaccaagugauggacaggccucauacaagaucuucaaaauagaaaagggaaagauagucaaaucagucgaaaugaaugccccuaauuaucacuaugaggaaugcuccuguuauccugauucuagugaaaucacaugugugugcagggauaacuggcauggcucgaaucgaccguggguaucuuucaaccagaaucuggaauaucagauaggauacauaugcagugggauuuucggagacaauccacgcccuaaugacaagacaggcaguugugguccaguaucgucuaauggagcaaauggaguaaaaggauuuucauucaaauacggcaaugguguuuggauagggagaacuaaaagcauuaguucaagaaaugguuuugagaugauuugggauccgaacggauggacugggacagacaauaacuucucaauaaagcaagauaucguaggaauaaaugaauggucaggauauagcgggaguuuuguucagcauccagaacuaacagggcuggauuguauaagaccuugcuucuggguugaacuaaucagagggcgacccaaagagaacacaaucuggacuagcgggagcagcauauccuuuugugguguaaacagugacacuguggguuggucuuggccggacggugcugaguugccauuuaccauugacaaguaa

SEQ ID NO: 51900 - RNA, 1410 nt, Artificial Sequence
  derived and/or modified CDS sequence (wt) from neuraminidase__InfluenzaA__ADN26140
augaauccaaaccaaaagauaauaaccauugguucggucuguaugacaauuggaauggcuaacuuaauauuacaaauuggaaacauaaucucaauauggauuagccacucaauucaacuugggaaucaaaaucagauugaaacaugcaaucaaagcgucauuacuuaugaaaacaacacuuggguaaaucagacauauguuaacaucagcaacaccaacuuugcugcuggacagucagugguuuccgugaaauuagcgggcaauuccucucucugcccuguuaauggaugggcuauauacaguaaagacaacaguauaagaaucgguuccaagggggauguguuugucauaagggaaccauucauaucaugcucccccuuggaaugcagaaccuucuucuugacucaaggggccuugcuaaaugacaaacauuccaauggaaccauuaaagacaggagcccauaucgaacccuaaugagcuguccuauuggugaaguucccucuccauacaacucaagauuugagucagucgcuuggucagcaagugcuugucaugauggcaucaauuggcuaacaauuggaauuucuggcccagacaauggggcaguggcuguguuaaaguacaacggcauaauaacagacacuaucaagaguuggagaaacaauauauugagaacacaagagucugaaugugcauguguaaaugguucuugcuuuacuguaaugaccgauggaccaagugauggacaggccucauacaagaucuucagaauagaaaagggaaagauagucaaaucagucgaaaugaaugccccuaauuaucacuaugaggaaugcuccuguuauccugauucuagugaaaucacaugugugugcagggauaacuggcauggcucgaaucgaccguggguaucuuucaaccagaaucuggaauaucagauaggauacauaugcagugggauuuucggagacaauccacgcccuaaugauaagacaggcaguugugguccaguaucgucuaauggagcaaacggaguaaaaggauuuucauucaaauacggcaaugguguuuggauagggagaacuaaaagcauuaguucaagaaacgguuuugagaugauuugggauccgaacggauggacugggacagacaauaacuucucaauaaagcaagauaucguaggaauaaaugaguggucaggauauagcgggaguuuuguucagcauccagaacuaacagggcuggauuguauaagaccuugcuucuggguugaacuaaucagagggcgacccaaagagaacacaaucuggacuagcgggagcagcauauccuuuugugguguaaacagugacacuguggguuggucuuggccggacggugcugaguugccauuuaccauugacaaguaa

SEQ ID NO: 51901 - RNA, 1410 nt, Artificial Sequence
  derived and/or modified CDS sequence (wt) from neuraminidase__InfluenzaA__ADN26141
augaauccaaaccaaaagauaauaaccauugguucggucuguaugacaauuggaauggcuaacuuaauauuacaaauuggaaacauaaucucaauauggauuagccacucaauucaacuugggaaucaaaaucggauugaaacaugcaaucaaagcgucauuacuuaugaaaacaacacuuggguaaaucagacauauguuaacaucagcaacaccaacuuugcugcuggacagucagugguuuccgugaaauuagcgggcaauuccucucucugcccuguuaguggaugggcuauauacaguaaagacaacaguauaagaaucgguuccaagggggauguguuugucauaagggaaccauucauaucaugcucccccuuggaaugcagaaccuucuucuugacucaaggggccuugcuaaaugacaaacauuccaauggaaccauuaaagacaggagcccauaucgaacccuaaugagcuguccuauuggugaaguucccucuccauacaacucaagauuugagucagucgcuuggucagcaagugcuugucaugauggcaucaauuggcuaacaauuggaauuucuggcccagacaauggggcaguggcuguguuaaaguacaacggcauaauaacagacacuaucaagaguuggagaaacaauauauugagaacacaagagucugaaugugcauguguaaaugguucuugcuuuacuguaaugaccgauggaccaagugauggacaggccucauacaagaucuucagaauagaaaagggaaagauagucaaaucagucgaaaugaaugccccuaauuaucacuaugaggaaugcuccuguuauccugauucuagugaaaucacaugugugugcagggauaacuggcauggcucgaaucgaccgugggugucuuucaaccagaaucuggaauaucagauaggauacauaugcagugggauuuucggagacaauccacgcccuaaugauaagacaggcaguugugguccaguaucgucuaauggagcaaauggaguaaaaggauuuucauucaaauacggcaaugguguuuggauagggagaacuaaaagcauuaguucaagaaacgguuuugagaugauuugggauccgaacggauggacugggacagacaauaacuucucaauaaagcaagauaucguaggaauaaaugaguggucaggauauagcgggaguuuuguccagcauccagaacuaacagggcuggauuguauaagaccuugcuucuggguugaacuaaucagagggcgacccaaagagaacacaaucuggacuagcgggagcagcauauccuuuugugguguaaacagugacacuguggguuggucuuggccagacggugcugaguugccauuuaccauugacaaguaa

SEQ ID NO: 51902 - RNA, 1410 nt, Artificial Sequence
  derived and/or modified CDS sequence (wt) from neuraminidase__InfluenzaA__ADN26142
augaauccaaaccaaaagauaauaaccauugguucggucuguaugacaauuggaauggcuaacuuaauauuacaaauuggaaacauaaucucaauauggauuagccacucaauucaacuugggaaucaaaaucagauugaaacaugcaaucaaagcgucauuacuuaugaaaacaacacuuggguaaaucagacauauguuaacaucagcaacaacaacuuugcugcuggacagucagugguuuccgugaaauuagcgggcaauuccucucucugcccuguuaauggaugggcuauauacaguaaagacaacaguauaagaaucgguuccaagggggauguguuugucauaagggaaccauucauaucaugcucccccuuggaaugcagaaccuucuucuugacucaaggggccuugcuaaaugacaaacauuccaauggaaccauuaaagacaggagcccauaucgaacccuaaugagcuguccuauuggugaaguucccucuccauacaacucaagauuugagucagucgcuuggucagcaagugcuugucaugauggcaucaauuggcuaacaauuggaauuucuggcccagacaauggggcaguggcuguguuaaaguacaacggcauaauaacagacacuaucaagaguuggagaaacaauauauugagaacacaagagucugaaugugcauguguaaaugguucuugcuuuacuguaaugaccgauggaccaagugauggacaggccucauacaagaucuucagaauagaaaagggaaagauagucaaaucagucgaaaugaaugccccuaauuaucacuaugaggaaugcuccuguuauccugauucuagugaaaucacaugugugugcagggauaacuggcauggcucgaaucgaccguggguaucuuucaaccagaaucuggaauaucagauaggauacauaugcagugggauuuucggagacaauccacgcccuaaugauaagacaggcaguugugguccaguaucgucuaauggagcaaacggaguaaaaggauuuucauucaaauacggcaaugguguuuggauagggagaacuaaaagcauuaguucaagaaacgguuuugagaugauuugggauccgaacggauggacugggacagacaauaacuucucaauaaagcaagauaucguaggaauaaaugaguggucaggauauagcgggaguuuuguucagcauccagaacuaacagggcuggauuguauaagaccuugcuucuggguugaacuaaucagagggcgacccaaagagaacacaaucuggacuagcgggagcagcauauccuuuugugguguaaacagugacacuguggguuggucuuggccggacggugcugaguugccauuuaccauugacaaguaa

SEQ ID NO: 51903 - RNA, 1410 nt, Artificial Sequence; identical to SEQ ID NO: 48947
  derived and/or modified CDS sequence (wt) from neuraminidase__InfluenzaA__ADN26143

SEQ ID NO: 51904 - RNA, 1410 nt, Artificial Sequence; identical to SEQ ID NO: 51450
  derived and/or modified CDS sequence (wt) from neuraminidase__InfluenzaA__ADN26144

SEQ ID NO: 51905 - RNA, 1410 nt, Artificial Sequence; identical to SEQ ID NO: 51450
  derived and/or modified CDS sequence (wt) from neuraminidase__InfluenzaA__ADN26145

SEQ ID NO: 51906 - RNA, 1410 nt, Artificial Sequence
  derived and/or modified CDS sequence (wt) from neuraminidase__InfluenzaA__ADN26146
augaauccaaaccaaaagauaauaaccauugguucggucuguaugacaauuggaauggcuaacuuaauauuacaaauuggaaacauaaucucaauauggauuagccacucaauucaacuugggaaucaaaaucagauugaaacaugcaaucaaagcgucauuacuuaugaaaacaacacuuggguaaaucagacauauguuaacaucagcaacaccaacuuugcugcuggacagucagugguuuccgugaaauuagcgggcaauuccucucucugcccuguuaguggaugggcuauauacaguaaagacaacaguauaagaaucgguuccaagggggauguguuugucauaagggaaccauucauaucaugcucccccuuggaaugcagaaccuucuucuugacucaaggggccuugcuaaaugacaaacauuccaauggaaccauuaaagacaggagcccauaucgaacccuaaugagcuguccuauuggugaaguucccucuccauacaacucaagauuugagucagucgcuuggucagcaagugcuugucaugauggcaucaauuggcuaacaauuggaauuucuggcccagacaauggggcaguggcuguguuaaaguacaacggcauaauaacagacacuaucaagaguuggagaaacaauauauugagaacacaagagucugaaugugcauguguaaaugguucuuguuuuacuguaaugaccgauggaccaagugauggacaggccucauacaagaucuucagaauagaaaagggaaagauagucaaaucagucgaaaugaaugccccuaauuaucacuaugaggaaugcuccuguuauccugauucuagugaaaucacaugugugugcagggauaacuggcauggcucgaaucgaccgugggugucuuucaaccagaaucuggaauaucagauaggauacauaugcagugggauuuucggagacaauccacgcccuaaugauaagacaggcaguugugguccaguaucgucuaauggagcaaauggaguaaaaggauuuucauucaaauacggcaaugguguuuggauagggagaacuaaaagcauuaguucaagaaacgguuuugagaugauuugggauccgaacggauggacugggacagacaauaacuucucaauaaagcaagauaucguaggaauaaaugaguggucaggauauagcgggaguuuuguccagcauccagaacuaacagggcuggauuguauaagaccuugcuucuggguugaacuaaucagagggcgacccaaagagaacacaaucuggacuagcgggagcagcauauccuuuugugguguaaacagugacacuguggguuggucuuggccagacggugcugaguugccauuuaccauugacaaguaa

SEQ ID NO: 51907 - RNA, 1410 nt, Artificial Sequence; identical to SEQ ID NO: 51450
  derived and/or modified CDS sequence (wt) from neuraminidase__InfluenzaA__ADN26147

SEQ ID NO: 51908 - RNA, 1410 nt, Artificial Sequence; identical to SEQ ID NO: 49215
  derived and/or modified CDS sequence (wt) from neuraminidase__InfluenzaA__ADN26148

SEQ ID NO: 51909 - RNA, 1410 nt, Artificial Sequence; identical to SEQ ID NO: 51450
  derived and/or modified CDS sequence (wt) from neuraminidase__InfluenzaA__ADN26149

SEQ ID NO: 51910 - RNA, 1410 nt, Artificial Sequence
  derived and/or modified CDS sequence (wt) from neuraminidase__InfluenzaA__ADN26150
augaauccaaaccaaaagauaauaaccauugguucggucuguaugacaauuggaauggcuagcuuaauauuacaaauuggaaacauaaucucaauauggauuagccacucaauucaacuugggaaucaaaaucagauugaaacaugcaaucaaagcgucauuacuuaugaaaacaacacuuggguaaaucagacauauguuaacaucagcaacaccaacuuugcugcuggacagucagugguuuccgugaaauuagcgggcaauuccucucucugcccuguuaguggaugggcuauauacaguaaagacaacaguauaagaaucgguuccaagggggauguguuugucauaagggaaccauucauaucaugcucccccuuggaaugcagaaccuucuucuugacucaaggggccuugcuaaaugacaaacauuccaauggaaccauuaaagacaggagcccauaucgaacccuaaugagcuguccuauuggugaaguucccucuccauacaacucaagauuugagucagucgcuuggucagcaagugcuugucaugauggcaucaauuggcuaacaauuggaauuucuggcccagacaauggggcaguggcuguguuaaaguacaacggcauaauaacagacacuaucaagaguuggagaaacaauauauugagaacacaagagucugaaugugcauguguaaaugguucuugcuuuacuguaaugaccgauggaccaagugauggacaggccucauacaagaucuucagaauagaaaagggaaagauagucaaaucagucgaaaugaaugccccuaauuaucacuaugaggaaugcuccuguuauccugauucuagugaaaucacaugugugugcagggauaacuggcauggcucgaaucgaccgugggugucuuucaaccagaaucuggaauaucagauaggauacauaugcagugggauuuucggagacaauccacgcccuaaugauaagacaggcaguugugguccaguaucgucuaauggagcaaauggaguaaaaggauuuucauucaaauacggcaaugguguuuggauagggagaacuaaaagcauuaguucaagaaacgguuuugagaugauuugggauccgaacggauggacugggacagacaauaacuucucaauaaagcaagauaucguaggaauaaaugaguggucaggauauagcgggaguuuuguccagcauccagaacuaacagggcuggauuguauaagaccuugcuucuggguugaacuaaucagagggcgacccaaagagaacacaaucuggacuagcgggagcagcauauccuuuugugguguaaacagugacacuguggguuggucuuggccagacggugcugaguugccauuuaccauugacaaguaa

SEQ ID NO: 51911 - RNA, 1410 nt, Artificial Sequence
  derived and/or modified CDS sequence (wt) from neuraminidase__InfluenzaA__ADN26151
augaauccaaaccaaaagauaauaaccauugguucggucuguaugacaauuggaauggcuaacuuaauauuacaaauuggaaacauaaucucaauauggauuagccauucaauucaacuugggaaucaaaaucagauugaaacaugcaaucaaagcgucauuacuuaugaaaacaacacuuggguaaaucagacauauguuaacaucagcaacaccaacuuugcugcuggacagucagugguuuccgugaaauuagcgggcaauuccucucucugcccuguuaauggaugggcuauauacaguaaagacaacaguauaagaaucgguuccaagggggauguguuugucauaagggaaccauucauaucaugcucccccuuggaaugcagaaccuucuucuugacucaaggggccuugcuaaaugacaaacauuccaauggaaccauuaaagacaggagcccauaucgaacccuaaugagcuguccuauuggugaaguucccucuccauacaacucaagauuugagucagucgcuuggucagcaagugcuugucaugauggcaucaauuggcuaacaauuggaauuucuggcccagacaauggggcaguggcuguguuaaaguacaacggcauaauaacagacacuaucaagaguuggagaaacaauauauugagaacacaagagucugaaugugcauguguaaaugguucuugcuuuacuguaaugaccgauggaccaagugauggacaggccucauacaagaucuucagaauagaaaagggaaagauagucaaaucagucgaaaugaaugccccuaauuaucacuaugaggaaugcuccuguuauccugauucuagugaaaucacaugugugugcagggauaacuggcauggcucgaaucgaccguggguaucuuucaaccagaaucuggaauaucagauaggauacauaugcagugggauuuucggagacaauccacgcccuaaugauaagacaggcaguugugguccaguaucgucuaauggagcaaauggaguaaaaggauuuucauucaaauacggcaaugguguuuggauagggagaacuaaaagcauuaguucaagaaacgguuuugagaugauuugggauccgaacggauggacugggacagacaauaacuucucaauaaagcaagauaucguaggaauaaaugaguggucaggauauagcgggaguuuuguucagcauccagaacuaacagggcuggauuguauaagaccuugcuucuggguugaacuaaucagagggcgacccaaagagaacacaaucuggacuagcgggagcagcauauccuuuugugguguaaacagugacacuguggguuggucuuggccggacggugcugaguugccauuuaccauugacaaguaa

SEQ ID NO: 51912 - RNA, 1410 nt, Artificial Sequence
  derived and/or modified CDS sequence (wt) from neuraminidase__InfluenzaA__ADN26152
augaauccaaaccaaaagauaauaaccauugguucggucuguaugacaauuggaauggcuaacuuaauauuacaaauuggaaacauaaucucaauauggauuagccacucaauucaacuugggaaucaaaaucagauugaaacaugcaaucaaagcgucauuacuuaugaaaacaacacuuggguaaaucagacauauguuaacaucagcaacaccaacuuugcugcuggacagucagugguuuccaugaaauuagcgggcaauuccucucucugcccuguuaauggaugggcuauauacaguaaagacaacaguauaagaaucgguuccaagggggauguguuugucauaagggaaccauucauaucaugcucccccuuggaaugcagaaccuucuucuugacucaaggggccuugcuaaaugacaaacauuccaauggaaccauuaaagacaggagcccauaucgaacccuaaugagcuguccuauuggugaaguucccucuccauacaacucaagauuugagucagucgcuuggucagcaagugcuugucaugauggcaucaauuggcuaacaauuggaauuucuggcccagacaauggggcaguggcuguguuaaaguacaacggcauaauaacagacacuaucaagaguuggagaaacaauauauugagaacacaagagucugaaugugcauguguaaaugguucuugcuuuacuguaaugaccgauggaccaagugauggacaggccucauacaagaucuucagaauagaaaagggaaaaauagucaaaucagucgaaaugaaugccccuaauuaucacuaugaggaaugcuccuguuauccugauucuagugaaaucacaugugugugcagggauaacuggcauggcucgaaucgaccguggguaucuuucaaccagaaucuggaauaucagauaggauacauaugcagugggauuuucggagacaauccacgcccuaaugauaagacaggcaguugugguccaguaucgucuaauggagcaaauggaguaaaaggauuuucauucaaauacggcaaugguguuuggauagggagaacuaaaagcauuaguucaagaaacgguuuugagaugauuugggauccgaacggauggacuaggacagacaauaacuucucaauaaagcaagauaucguaggaauaaaugaguggucaggauauagcgggaguuuuguucagcauccagaacuaacagggcuggauuguauaagaccuugcuucuggguugaacuaaucagagggcgacccaaagagaacacaaucuggacuagcgggagcagcauauccuuuugugguguaaacagugacacuguggguuggucuuggccggacggugcugaguugccauuuaccauugacaaguaa

SEQ ID NO: 51913 - RNA, 1410 nt, Artificial Sequence; identical to SEQ ID NO: 51450
  derived and/or modified CDS sequence (wt) from neuraminidase__InfluenzaA__ADN26153

SEQ ID NO: 51914 - RNA, 1410 nt, Artificial Sequence; identical to SEQ ID NO: 51533
  derived and/or modified CDS sequence (wt) from neuraminidase__InfluenzaA__ADN26154

SEQ ID NO: 51915 - RNA, 1410 nt, Artificial Sequence
  derived and/or modified CDS sequence (wt) from neuraminidase__InfluenzaA__ADN26155
augaauccaaaccaaaagauaauaaccauugguucggucuguaugacaauuggaauggcuaacuuaauauuacaaauuggaaacauaaucucaauauggauuagccacucaauucaacuugggaaucaaaaucagauugaaacaugcaaucaaagcgucauuacuuaugaaaacaacacuuggguaaaucagacauauguuaacaucagcaacaccaacuuugcugcuggacagucagugguuuccgugaaauuagcgggcaauuccucucucugcccuguuaguggaugggcuauauacaguaaagacaacaguauaagaaucgguuccaagggggauguguuugucauaagggaaccauucauaucaugcucucccuuggaaugcagaaccuucuucuugacucaaggggccuugcuaaaugacaaacauuccaauggaaccauuaaagacaggagcccauaucgaacccuaaugagcuguccuauuggugaaguucccucuccauacaacucaagauuugagucagucgcuuggucagcaagugcuugucaugauggcaucaauuggcuaacaauuggaauuucuggcccagacaauggggcaguggcuguguuaaaguacaacggcauaauaacagacacuaucaagaguuggagaaacaauauauugagaacacaagagucugaaugugcauguguaaaugguucuugcuuuacuguaaugaccgauggaccaagugauggacaggccucauacaagaucuucagaauagaaaagggaaagauagucaaaucagucgaaaugaaugccccuaauuaucacuaugaggaaugcuccuguuauccugauucuagugaaaucacaugugugugcagggauaacuggcauggcucgaaucgaccgugggugucuuucaaccagaaucuggaauaucagauaggauacauaugcagugggauuuucggagacaauccacgcccuaaugauaagacaggcaguugugguccaguaucgucuaauggagcaaauggaguaaaaggauuuucauucaaauacggcaaugguguuuggauagggagaacuaaaagcauuaguucaagaaacgguuuugagaugauuugggauccgaacggauggacugggacagacaauaacuucucaauaaagcaagauaucguaggaauaaaugaguggucaggauauagcgggaguuuuguccagcauccagaacuaacagggcuggauuguauaagaccuugcuucuggguugaacuaaucagagggcgacccaaagagaacacaaucuggacuagcgggagcagcauauccuuuugugguguaaacagugacacuguggguuggucuuggccagacggugcugaguugccauuuaccauugacaaguaa

SEQ ID NO: 51916 - RNA, 1410 nt, Artificial Sequence; identical to SEQ ID NO: 51900
  derived and/or modified CDS sequence (wt) from neuraminidase__InfluenzaA__ADN26157

SEQ ID NO: 51917 - RNA, 1410 nt, Artificial Sequence; identical to SEQ ID NO: 48947
  derived and/or modified CDS sequence (wt) from neuraminidase__InfluenzaA__ADN26159

SEQ ID NO: 51918 - RNA, 1410 nt, Artificial Sequence
  derived and/or modified CDS sequence (wt) from neuraminidase__InfluenzaA__ADN26161
augaauccaaaccaaaagauaauaaccauugguucggucuguaugacaauuggaauggcuaacuuaauauuacaaauuggaaacauaaucucaauauggauuagccacucaauucaacuugggaaucaaaaucagauugaaacaugcaaucaaagcgucauuacuuaugaaaacaacacuuggguaaaucagacauauguuaacaucagcaacaccaacuuugcugcuggacagucagugguuuccgugaaauuagcgggcaauuccucucucugcccuguuaguggaugggcuauauacaguaaagacaacaguauaagaaucgguuccaagggggauguguuugucauaagggaaccauucauaucaugcucccccuuggaaugcagaaccuucuucuugacucaaggggccuugcuaaaugacaaacauuccaauggaaccauuaaagacaggagcccauaucgaacccuaaugagcuguccuauuggugaaguucccucuccauacaacucaagauuugagucagucgcuuggucagcaagugcuugucaugauggcaucaauuggcuaacaauuggaauuucuggcccagacaauggggcaguggcuguguuaaaguacaacggcauaauaacagacacuaucaagaguuggagaaacaauauauugagaacacaagagucugaaugugcauguguaaaugguucuugcuuuacuguaaugaccgauggaccaagugauggacaggccucauacaagaucuucagaauagaaaagggaaagauagucaaaucagucgaaaugaaugccccuaauuaucacuaugaggaaugcuccuguuauccugauucuagugaaaucacaugugugugcagggauaacuggcauggcucgaaucgaccgugggugucuuucaaccagaaucuggaauaucagauaggauacauaugcagugggauuuucggugacaauccacgcccuaaugauaagacaggcaguugugguccaguaucgucuaauggagcaaauggaguaaaaggauuuucauucaaauacggcaaugguguuuggauagggagaacuaaaagcauuaguucaagaaacgguuuugagaugauuugggauccgaacggauggacugggacagacaauaacuucucaauaaagcaagauaucguaggaauaaaugaguggucaggauauagcgggaguuuuguccagcauccagaacuaacagggcuggauuguauaagaccuugcuucuggguugaacuaaucagagggcgacccaaagagaacacaaucuggacuagcgggagcagcauauccuuuugugguguaaacagugacacuguggguuggucuuggccagacggugcugaguugccauuuaccauugacaaguaa

SEQ ID NO: 51919 - RNA, 1410 nt, Artificial Sequence
  derived and/or modified CDS sequence (wt) from neuraminidase__InfluenzaA__ADN26162
augaauccaaaccaaaagauaauaaccauuaguucggucuguaugacaguuggaauggcuaacuuaauauuacaaauuggaaacauaaucucaauauggauuagccacucaauucaacuugggaaucaaaaucagauugaaacaugcaaucaaagcgucauuacuuaugaaaacaacacuuggguaaaucagacauauguuaacaucagcaacaccaacuuugcugcuggacagucagugguuuccgugaaauuagcgggcaauuccucucucugcccuguuaguggaugggcuauauacaguaaagacaacaguauaagaaucgguuccaagggggauguguuugucauaagggaaccauucauaucaugcucccccuuggaaugcagaaccuucuucuugacucaaggggccuugcuaaaugacaaacauuccaauggaaccauuaaagacaggagcccauaucgaacccuaaugagcuguccuauuggugaaguucccucuccauacaacucaagauuugagucagucgcuuggucagcaagugcuugucaugauggcaucaauuggcuaacaauuggaauuucuggcccagacaauggggcaguggcuguguuaaaguacaacggcauaauaacagacacuaucaagaguuggagaaacaauauauugagaacacaagagucugaaugugcauguguaaaugguucuugcuuuacuguaaugaccgauggaccaagugauggacaggccucauacaagaucuucagaauagaaaagggaaagauagucaaaucagucgaaaugaaugccccuaauuaucacuaugaggaaugcuccuguuauccugauucuagugaaaucacaugugugugcagggauaacuggcauggcucgaaucgaccgugggugucuuucaaccagaaucuggaauaucagauaggauacauaugcagugggauuuucggagacaauccacgcccuaaugauaagacaggcaguugugguccaguaucgucuaauggagcaaauggaguaaaaggauuuucauucaaauacggcaaugguguuuggauagggagaacuaaaagcauuaguucaagaaacgguuuugagaugauuugggauccgaacggauggacugggacagacaauaacuucucaauaaagcaagauaucguaggaauaaaugaguggucaggauauagcgggaguuuuguucagcauccagaacuaacagggcuggauuguauaagaccuugcuucuggguugaacuaaucagagggcgacccaaagagaacacaaucuggacuagcgggagcagcauauccuuuugugguguaaacagugacacuguggguuggucuuggccagacggugcugaguugccauuuaccauugacaaguaa

SEQ ID NO: 51920 - RNA, 1410 nt, Artificial Sequence
  derived and/or modified CDS sequence (wt) from neuraminidase__InfluenzaA__ADN26163
augaauccaaaccaaaagauaauaaccauugguucggucuguaugacaauuggaauggcuaacuuaauauuacaaauuggaaacauaaucucaauauggauuagccacucaauucaacuugggaaucaaaaucagauugaaacaugcaaucaaagcgucauuacuuaugaaaacaacacuuggguaaaucagacauauguuaacaucagcaacaccaacuuugcugcuggacagucagugguuuccgugaaauuagcgggcaauuccucucucugcccuguuaguggaugggcuauauacaguaaagacaacaguauaagaaucgguuccaagggggauguguuugucauaagggaaccauucauaucaugcucccccuuggaaugcagaaccuucuucuugacucaaggggccuugcuaaaugacaaacauuccaauggaaccauuaaagacaggagcccauaucgaacccuaaugagcuguccuauuggugaaguucccucuccauacaacucaagauuugagucagucgcuuggucagcaagugcuugucaugauggcaucaauuggcuaacaauuggaauuucuggcccagacaauggggcaguggcuguguuaaaguacaacggcauaauaacagacacuaucaagaguuggagaaacaauauauugagaacacaagagucugaaugugcauguguaaaugguucuugcuuuacuguaaugaccgauggaccaagugauggacaggccucauacaagaucuucagaauagaaaagggaaagauagucaaaucagucgaaaugaaugccccuaauuaucacuaugaggaaugcuccuguuauccugauucuagugaaaucacaugugugugcagggauaacuggcauggcucgaaucgaccgugggugucuuucaaccagaaucuggaauaucagauaggauacauaugcagugggauuuucggagacaauccacgcccuaaugauaagacaggcaguugugguccaguaucgucuaauggagcaaauggaguaaaaggauuuucauucaaauacggcaaugguguuuggauagggagaacuaaaagcauuaguucaagaaacgguuuugagaugauuugggauccgaacggauggacugggacagacaauaacuucucaauaaagcaagauaucauaggaauaaaugaguggucaggauauagcgggaguuuuguucagcauccagaacuaacagggcuggauuguauaagaccuugcuucuggguugaacuaaucagagggcgacccaaagagaacacaaucuggacuagcgggagcagcauauccuuuugugguguaaacagugacacuguggguuggucuuggccagacggugcugaguugccauuuaucauugacaaguaa

SEQ ID NO: 51921 - RNA, 1410 nt, Artificial Sequence
  derived and/or modified CDS sequence (wt) from neuraminidase__InfluenzaA__ADN26164
augaauccaaaccaaaagauaauaaccauugguucggucuguaugacaauuggaauggcuaacuuaauauuacaaauuggaaacauaaucucaauauggauuagccacucaauucaacuugggaaucaaaaucagauugaaacaugcaaucaaagcgucauuacuuaugaaaacaacacuuggguaaaucagacauauguuaacaucagcaacaccaacuuugcugcuggacagucagugguuuccgugaaauuagcgggcaauuccucucucugcccuguuaguggaugggcuauauacaguaaagacaacaguauaagaaucgguuccaagggggauguguuugucauaagggaaccauucauaucaugcucccccuuggaaugcagaaccuucuucuugacucaaggggccuugcuaaaugacaaacauuccaauggaaccauuaaagaccggagcccauaucgaacccuaaugagcuguccuauuggugaaguucccucuccauacaacucaagauuugagucagucgcuuggucagcaagugcuugucaugauggcaucaauuggcuaacaauuggaauuucuggcccagacaauggggcaguggcuguguuaaaguacaacggcauaauaacagacacuaucaagaguuggagaaacaauauauugagaacacaagagucugaaugugcaugucuaaaugguucuugcuuuacuguaaugaccgauggaccaagugauggacaggccucauacaagaucuucagaauagaaaagggaaagauagucaaaucagucgaaaugaaugccccuaauuaucacuaugaggaaugcuccuguuauccugauucuagugaaaucacaugugugugcagggauaacuggcauggcucgaaucgaccgugggugucuuucaaccagaaucuggaauaucagauaggauacauaugcagugggauuuucggagacaauccacgcccuaaugauaagacaggcaguugugguccaguaucgucuaauggagcaaauggaguaaaaggauuuucauucaaauacggcaaugguguuuggauagggagaacuaaaagcauuaguucaagaaacgguuuugagaugauuugggauccgaacggauggacugggacagacaaugacuucucaauaaagcaagauaucguaggaauaaaugaguggucaggauauagcgggaguuuuguucagcauccagaacuaacagggcuggauuguauaagaccuugcuucuggguugaauuaaucagagggcgacccaaagagaacacaaucuggacuagcgggagcagcauauccuuuugugguguaaacagugacacuguggguuggucuuggccagacggugcugaguugccauuuaccauugacaaguaa

SEQ ID NO: 51922 - RNA, 1410 nt, Artificial Sequence; identical to SEQ ID NO: 50707
  derived and/or modified CDS sequence (wt) from neuraminidase__InfluenzaA__ADN26168

SEQ ID NO: 51923 - RNA, 1410 nt, Artificial Sequence; identical to SEQ ID NO: 49973
  derived and/or modified CDS sequence (wt) from neuraminidase__InfluenzaA__ADN26178

SEQ ID NO: 51924 - RNA, 1410 nt, Artificial Sequence; identical to SEQ ID NO: 48750
  derived and/or modified CDS sequence (wt) from neuraminidase__InfluenzaA__ADN26868

SEQ ID NO: 51925 - RNA, 1410 nt, Artificial Sequence; identical to SEQ ID NO: 48750
  derived and/or modified CDS sequence (wt) from neuraminidase__InfluenzaA__ADN26869

SEQ ID NO: 51926 - RNA, 1410 nt, Artificial Sequence
  derived and/or modified CDS sequence (wt) from neuraminidase__InfluenzaA__ADN26870
augaauccaaaccaaaagauaauaaccauugguucggucuguaugacaauuggaauggcuaacuuaauauuacaaauuggaaacauaaucucaauauggauuagccacucaauucaacuuggaaaucaaaaucagauugaaacaugcaaucaaagcgucauuacuuaugaaaacaacacuuggguaaaucagacauauguuaacaucagcaacaccaacuuugcugcuggacagucagugguuuccgugaaauuagcgggcaauuccucucucugcccuguuaguggaugggcuauauacaguaaagacaacaguauaagaaucgguuccaagggggauguguuugucauaagggaaccauucauaucaugcucccccuuggaaugcagaaccuucuucuugacucaaggggccuugcuaaaugacaaacauuccaauggaaccauuaaagacaggagcccauaucgaacucuaaugagcuguccuauuggugaaguucccucuccauacaacucaagauuugagucagucgcuuggucagcaagugcuugucaugauggcaucaauuggcuaacaauuggaauuucuggcccagacaauggggcaguggcuguguuaaaguacaacggcauaauaacagacacuaucaagaguuggagaaacaauauauugagaacacaagagucugaaugugcauguguaaaugguucuugcuuuacuguaaugaccgauggaccaagugauggacaggccucauacaagaucuucagaauagaaaagggaaagauagucaaaucagucgaaaugaaugccccuaauuaucacuaugaggaaugcuccuguuauccugauucuagugaaaucacaugugugugcagggauaacuggcauggcucgaaucgaccgugggugucuuucaaccagaaucuggaauaucagauaggauacauaugcagugggauuuucggagacaauccacgcccuaaugauaagacaggcaguugugguccaguaucgucuaauggagcaaauggaguaaaaggauuuucauucaaauacggcaaugguguuuggauagggagaacuaaaagcauuaguucaagaaacgguuuugagaugauuugggauccgaacggauggacugggacagacaauaacuucucaauaaagcaagauaucguaggaauaaaugaguggucaggauauagcgggaguuuuguucagcauccagaacuaacagggcuggauuguauaagaccuugcuucuggguugaacuaaucagagggcgacccaaagagaacacaaucuggacuagcgggagcagcauauccuuuugugguguaaacagugacacuguggguuggucuuggccagacggugcugaguugccauuuaccauugacaaguaa

SEQ ID NO: 51927 - RNA, 1410 nt, Artificial Sequence
  derived and/or modified CDS sequence (wt) from neuraminidase__InfluenzaA__ADN26871
augaauccaaaccaaaagauaauaaccauugguucggucuguaugacaauuggaauggcuaacuuaauauuacaaauuggaaacauaaucucaauauggauuagccacucaauucaacuugggaaucaaaaucagauugaaacauacaaucaaagcgucauuacuuaugaaaacaacacuuggguaaaucagacauauguuaacaucagcaacaccaacuuugcugcuggacagucagugguuuccgugaaauuagcgggcaauuccucucucugcccuguuaguggaugggcuauauacaguaaagacaacaguauaagaaucgguuccaagggggauguguuugucauaagggaaccauucauaucaugcucccccuuggaaugcagaaccuucuucuugacucaaggggccuugcuaaaugacaaacauuccaauggaaccauuaaagacaggagcccauaucgaacccuaaugagcuguccuauuggugaaguucccucuccauacaacucaagauuugagucagucgcuuggucagcaagugcuugucaugauggcaucaauuggcuaacaauuggaauuucuggcccagacaauggggcaguggcuguguuaaaguacaacggcauaauaacagacacuaucaagaguuggagaaacaauauauugagaacacaagagucugaaugugcauguguaaaugguucuugcuuuacuguaaugaccgauggaccaagugauggacaggccucauacaagaucuucagaauagaaaagggaaagauagucaaaucagucgaaaugaaugccccuaauuaucacuaugaggaaugcuccuguuauccugauucuagugaaaucacaugugugugcagggauaacuggcauggcucgaaucgaccgugggugucuuucaaccagaaucuggaauaucagauaggauacauaugcagugggauuuucggagacaauccacgcccuaaugauaagacaggcaguugugguccaguaucgucuaauggagcaaauggaguaaaaggauuuucauucaaauacggcaaugguguuuggauagggagaacuaaaagcauuaguucaagaaacgguuuugagaugauuugggauccgaacggauggacugggacagacaauaacuucucaauaaagcaagauaucguaggaauaaaugaguggucgggauauagcgggaguuuuguucagcauccagaacuaacagggcuggauuguauaagaccuugcuucuggguugaacuaaucagagggcgacccaaagagaacacaaucuggacuagcgggagcagcauauccuuuugugguguaaacagugacacuguggguuggucuuggccagacggugcugaguugccauuuaccauugacaaguaa

SEQ ID NO: 51928 - RNA, 1410 nt, Artificial Sequence
  derived and/or modified CDS sequence (wt) from neuraminidase__InfluenzaA__ADN26872
augaauccaaaccaaaagauaauaaccauugguucggucuguaugacaauuggaauggcuaacuuaauauuacaaauuggaaacauaauuucaauauggauuagccacucaauucaacuugggaaucaaaaucagauugaaacaugcaaucaaagcgucauuacuuaugaaaacaacacuuggguaaaucagacauauguuaacaucagcaacaccaacuuugcugcugggcugucagugguuuccgugaaauuagcgggcaauuccucucucugcccuguuaguggaugggcuauauacaguaaagacaacaguauaagaaucgguuccaagggggauguguuugucauaagggaaccauucauaucaugcucccccuuggaaugcagaaccuucuucuugacucaaggggccuugcuaaaugacaaacauuccaauggaaccauuaaagacaggagcccauaucgaacucuaaugagcuguccuauuggugaaguucccucuccauacaacucaagauuugagucagucgcuuggucagcaagugcuugucaugauggcaucaguuggcuaacaauuggaauuucuggcccagacaauggggcaguggcuguguuaaaguacaacggcauaauaacagacacuaucaagaguuggagaaacaauauauugagaacacaagagucugaaugugcauguguaaaugguucuugcuuuacuguaaugaccgauggaccaagugauggacaggccucauacaagaucuucagaauagaaaagggaaagauagucaaaucagucgaaaugaaugccccuaauuaucacuaugaggaaugcuccuguuauccugauucuagugaaaucacaugugugugcagggauaacuggcauggcucgaaucgaccgugggugucuuucaaccagaaucuggaauaucagauaggauacauaugcagugggauuuucggagacaauccacgcccuaaugauaagacaggcaguugugguccaguaucgucuaauggagcaaauggaguaaaaggauuuucauucaaauacggcaaugguguuuggauagggagaacuaaaagcauuaguucaagaaacgguuuugagaugauuugggauccgaacggauggacugggacagacaauaacuucucaauaaagcaagauaucguaggaauaaaugaguggucaggauauagcgggaguuuuguucagcauccagaacuaacagggcuggauuguauaagaccuugcuucuggguugaacuaaucagagggcgacccaaagagaacacaaucuggacuagcgggagcagcauauccuuuugugguguaaacagugacacuguggguuggucuuggccagacggugcugaguugccauuuaccauugacaaguaa

SEQ ID NO: 51929 - RNA, 1410 nt, Artificial Sequence
  derived and/or modified CDS sequence (wt) from neuraminidase__InfluenzaA__ADN26873
augaauccaaaccaaaagauaauaaccaucgguucggucuguaugacaauuggaauggcuaacuuaauauuacaaauuggaaacauaaucucaauauggauuagccacucaauucaacuugggaaucaaaaucagauugaaacaugcaaucaaagcgucauuacuuaugaaaacaacacuuggguaaaucagacauauguuaacaucagcaacaccaacuuugcugcuggacagucagugguuuccgugaaauuagcgggcaauuccucucucugcccuguuaguggaugggcuauauacaguaaagacaacaguauaagaaucgguuccaagggggauguguuugucauaagggaaccauucauaucaugcucccccuuggaaugcagaaccuucuucuugacucaaggggccuugcuaaaugacaaacauuccaauggaaccauuaaagacaggagcccauaucgaacccuaaugagcuguccuauuggugaaguucccucuccauacaacucaagauuugagucagucgcuuggucagcaagugcuugucaugauggcaucaauuggcuaacaauuggaauuucuggcccagacaauggggcaguggcuguguuaaaguacaacggcauaauaacagacacuaucaagaguuggagaaacaauauauugagaacacaagagucugaaugugcauguguaaaugguucuugcuuuacuguaaugaccgauggaccaagugauggacaggccucauacaagaucuucagaauagaaaagggaaagauagucaaaucagucgaaaugaaugccccuaauuaucacuaugaggaaugcuccuguuauccugauucuagugaaaucacaugugugugcagggauaacuggcauggcucgaaucgaccgugggugucuuucaaccagaaucuggaauaucagauaggauacauaugcagugggauuuucggagacaauccacgcccuaaugauaagacaggcaguugugguccaguaucgucuaauggagcaaauggaguaaaaggauuuucauucaaauacggcaaugguguuuggauagggagaacuaaaagcauuaguucaagaaacgguuuugagaugauuugggauccgaacggauggacugggacagacaauaacuucucaauaaagcaagauaucguaggaauaaaugaguggucgggauauagcgggaguuuuguucagcauccagaauuaacagggcuggauuguauaagaccuugcuucuggguugaacuaaucagagggcgacccaaagagaacacaaucuggacuagcgggagcagcauauccuuuugugguguaaacagugacacuguggguuggucuuggccagacggugcugaguugccauuuaccauugacaaguaa

SEQ ID NO: 51930 - RNA, 1410 nt, Artificial Sequence
  derived and/or modified CDS sequence (wt) from neuraminidase__InfluenzaA__ADN26874
augaauccaaaccaaaagauaauaaccauugguucggucuguaugacaauuggaauggcuaacuuaauauuacaaauuggaaacauaaucucaauauggauuagccacucaauucaacuugggaaucaaaaucagauugaaacaugcaaucaaagcgucauuacuuaugaaaacaacacuuggguaaaucagacauauguuaacaucagcaacaccaacuuugcugcuggacagucagugguuuccgugaaauuagcgggcaauuccucucucugcccuguuaguggaugggcuauauacaguaaagacaacaguauaagaaucgguuccaagggggauguguuugucauaagggaaccauucauaucaugcucccccuuggaaugcagaaccuucuucuugacucaaggggccuugcuaaaugacaaacauuccaauggaaccauuaaagacaggagcccauaucgaacccuaaugagcuguccuauuggugaaguucccucuccauacaacucaagauuugagucagucgcuuggucagcaagugcuugucaugauggcaucaauuggcuaacaauuggaauuucuggcccagacaauggggcaguggcuguguuaaaguacaacggcauaauaacagacacuaucaagaguuggagaaacaauauauugagaacacaagagucugaaugugcauguguaaaugguucuugcuuuacuguaaugaccgauggaccaagugauggacaggccucauacaagaucuucagaauagaaaagggaaagauagucaaaucagucgaaaugaaugccccuaauuaucacuaugaggaaugcuccuguuauccugauucuagugaaaucacaugugugugcagggauaacuggcauggcucgaaucgaccgugggugucuuucaaccagaaucuggaauaucagauaggauacauaugcagugggauuuucggagacaauccacgcccuaaugauaagacaggcaguugugguccaguaucgucuaauggagcaaauggaguaaaaggauuuucauucaaauacggcaaugguguauggauagggagaacuaaaagcauuaguucaagaaacgguuuugagaugauuugggauccgaacggauggacugggacagacaauaacuucucaauaaagcaagauaucguaggaauaaaugaguggucgggauauagcgggaguuuuguucagcauccagaacuaacagggcuggauuguauaagaccuugcuucuggguugaacuaaucagagggcgacccaaagagaacacaaucuggacuagcgggagcagcauauccuuuugugguguaaacagugacacuguggguuggucuuggccagacggugcugaguugccauuuaccauugacaaguaa

SEQ ID NO: 51931 - RNA, 1410 nt, Artificial Sequence
  derived and/or modified CDS sequence (wt) from neuraminidase__InfluenzaA__ADN26875
augaauccaaaccaaaagauaauaaccauugguucggucuguaugacaauuggaauggcuaacuuaauauuacaaauuggaaacauaaucucaauauggauuagccacucaauucaacuugggaaucaaaaucagauugaaacaugcaaucaaagcgucauuacuuaugaaaacaacacuuggguaaaucagacauauguuaacaucagcaacaccaacuuugcugcuggacagucagugguuuccgugaaauuagcgggcaauuccucucucugcccuguuaguggaugggcuauauacaguaaagacaacaguauaagaaucgguuccaagggggauguguuugucauaagggaaccauucauaucaugcucccccuuggaaugcagaaccuucuucuugacucaaggggccuugcuaaaugacaaacauuccaauggaaccauuaaagacaggagcccauaucgaacccuaaugagcuguccuauuggugaaguucccucuccauacaacucaagauuugagucagucgcuuggucagcaagugcuugucaugauggcaucaauuggcuaacaauuggaauuucuggcccagacaauggggcaguggcuguguugaaguacaacggcauaauaacagacacuaucaagaguuggagaaacaauauauugagaacacaagagucugaaugugcauguguaaaugguucuugcuuuacuguaaugaccgauggaccaagugauggacaggccucauacaagaucuucagaauagaaaagggaaagauagucaaaucagucgaaaugaaugccccuaauuaucacuaugaggaaugcuccuguuauccugauucuagugaaaucacaugugugugcagggauaacuggcauggcucgaaucgaccgugggugucuuucaaccagaaucuggaauaucagauaggauacauaugcagugggauuuucggagacaauccacgcccuaaugauaagacaggcaguugugguccaguaucgucuaauggagcaaauggaguaaaaggauuuucauucaaauacggcaaugguguuuggauagggagaacuaaaagcauuaguucaagaaacgguuuugagaugauuugggauccgaacggauggacugggacagacaauaacuucucaauaaagcaagauaucguaggaauaaaugaguggucgggauauagcgggaguuuuguucagcauccagaacuaacagggcuggauuguauaagaccuugcuucuggguugaacuaaucagagggcgacccaaagagaacacaaucuggacuagcgggagcagcauauccuuuugugguguaaacagugacacuguggguuggucuuggccagacggugcugaguugccauuuaccauugacaaguaa

SEQ ID NO: 51932 - RNA, 1410 nt, Artificial Sequence; identical to SEQ ID NO: 51929
  derived and/or modified CDS sequence (wt) from neuraminidase__InfluenzaA__ADN26876

SEQ ID NO: 51933 - RNA, 1410 nt, Artificial Sequence
  derived and/or modified CDS sequence (wt) from neuraminidase__InfluenzaA__ADN26877
augaauccaaaccaaaagauaauaaccaucgguucggucuguaugacaauuggaauggcuaacuuaauauuacaaauuggaaacauaaucucaauauggauuagccacucaauucaacuugggaaucaaaaucagauugaaacaugcaaucaaagcgucauuacuuaugaaaacaacacuuggguaaaucagacauauguuaacaucagcaacaccaacuuugcugcuggacagucagugguuuccgugaaauuagcgggcaauuccucucucugcccuguuaguggaugggcuauauacaguaaagacaacaguauaagaaucgguuccaagggggauguguuugucauaagggaaccauucauaucaugcucccccuuggaaugcagaaccuucuucuugacucaaggggcauugcuaaaugacaaacauuccaauggaaccauuaaagacaggagcccauaucgaacccuaaugagcuguccuauuggugaaguucccucuccauacaacucaagauuugagucagucgcuuggucagcaagugcuugucaugauggcaucaauuggcuaacaauuggaauuucuggcccagacaauggggcaguggcuguguuaaaguacaacggcauaauaacagacacuaucaagaguuggagaaacaauauauugagaacacaagagucugaaugugcauguguaaaugguucuugcuuuacuguaaugaccgauggaccaagugauggacaggccucauacaagaucuucagaauagaaaagggaaagauagucaaaucagucgaaaugaaugccccuaauuaucacuaugaggaaugcuccuguuauccugauucuagugaaaucacaugugugugcagggauaacuggcauggcucgaaucgaccgugggugucuuucaaccagaaucuggaauaucagauaggauacauaugcagugggauuuucggagacaauccacgcccuaaugauaagacaggcaguugugguccaguaucgucuaauggagcaaauggaguaaaaggauuuucauucaaauacggcaaugguguuuggauagggagaacuaaaagcauuaguucaagaaacgguuuugagaugauuugggauccgaacggauggacugggacagacaauaacuucucaauaaagcaagauaucguaggaauaaaugaguggucgggauauagcgggaguuuuguucagcauccagaauuaacagggcuggauuguauaagaccuugcuucuggguugaacuaaucagagggcgacccaaagagaacacaaucuggacuagcgggagcagcauauccuuuugugguguaaacagugacacuguggguuggucuuggccagacggugcugaguugccauuuaccauugacaaguaa

SEQ ID NO: 51934 - RNA, 1410 nt, Artificial Sequence; identical to SEQ ID NO: 49794
  derived and/or modified CDS sequence (wt) from neuraminidase__InfluenzaA__ADN26878

SEQ ID NO: 51935 - RNA, 1410 nt, Artificial Sequence
  derived and/or modified CDS sequence (wt) from neuraminidase__InfluenzaA__ADN26879
augaauccaaaccaaaagauaauaaccauugguucggucuguaugacaauuggaauggcuaacuuaauauuacaaauuggaaacauaaucucaauauggauuagccacucaauucaacuuggaaaucaaaaucagauugaaacaugcaaucaaagcgucauuacuuaugaaaacaacacuuggguaaaucagacauauguuaacaucagcaacaccaacuuugcugcuggacagucagugguuuccgugaaauuagcgggcaauuccucucucugcccuguuaguggaugggcuauauacaguaaagacaacaguauaagaaucgguuccaagggggauguguuugucauaagggaaccauucauaucaugcucccccuuggaaugcagaaccuucuucuugacucaaggggccuugcuaaaugacaaacauuccaauggaaccauuaaagacaggagcccauaucgaacccuaaugagcuguccuauuggugaaguucccucuccauacaacucaagauuugagucagucgcuuggucagcaagugcuugucaugauggcaucaauuggcuaacaauuggaauuucuggcccagacaauggggcaguggcuguguuaaaguacaacggcauaauaacagacacuaucaagaguuggagaaacaauauauugagaacacaagagucugaaugugcauguguaaaugguucuugcuuuacuguaaugaccgauggaccaagugauggacaggccucauacaagaucuucagaauagaaaagggaaagauagucaaaucagucgaaaugaaugccccuaauuaucacuaugaggaaugcuccuguuauccugauucuagugaaaucacaugugugugcagggauaacuggcauggcucgaaucgaccgugggugucuuucaaccagaaucuggaauaucagauaggauacauaugcagugggauuuucggagacaauccacgcccuaaugauaagacaggcaguugugguccaguaucgucuaauggagcaaauggaguaaaaggauuuucauucaaauacggcaaugguguuuggauagggagaacuaaaagcauuaauucaagaaacgguuuugagaugauuugggauccgaacggauggacugggacagacaauaacuucucaauaaagcaagauaucguaggaauaaaugaguggucaggauauagcgggaguuuuguucagcauccagaacuaacagggcuggauuguauaagaccuugcuucuggguugaacuaaucagagggcgacccaaagagaacacaaucuggacuagcgggagcagcauauccuuuugugguguaaacagugacacuguggguuggucuuggccagacggugcugaguugccauuuaccauugacaaguaa

SEQ ID NO: 51936 - RNA, 1410 nt, Artificial Sequence
  derived and/or modified CDS sequence (wt) from neuraminidase__InfluenzaA__ADN26880
augaauccaaaccaaaagauaauaaccauugguucggucuguaugacaauuggaauggcuaacuuaauauuacaaauuggaaacauaaucucaauauggauuagccacucaauucaacuugggaaucaaaaucagauugaaacaugcaaucaaagcgucauuacuuaugaaaacaacacuuggguaaaucagacauauguuaacaucagcaacaccaacuuugcugcuggacagucagugguuuccgugaaauuagcgggcaauuccucucucugcccuguuaguggaugggcuauauacaguaaagacaacaguauaagaaucgguuccaagggggauguguuugucauaagggaaccauucauaucaugcucccccuuggaaugcagaaccuucuucuugacucaaggggccuugcuaaaugacaaacauuccaauggaaccauuaaagacaggagcccauaucgaacccuaaugagcuguccuauuggugaaguucccucuccauacaacucaagauuugagucagucgcuuggucagcaagugcuugucaugauggcaucaauuggcuaacaauuggaauuucuggcccagacaauggggcaguggcuguguuaaaguacaacggcauaauaacagacacuaucaagaguuggagaaacaauauauugagaacacaagagucugaaugugcauguguaaaugguucuugcuuuacuguaaugaccgauggaccaagugauggacaggccucauacaagaucuucagaauagaaaagggaaagauagucaaaucagucgaaaugaaugccccuaauuaucacuaugaggaaugcuccuguuauccugauucuagugaaaucacaugugugugcagggauaacuggcauggcucgaaucgaccgugggugucuuucaaccagaaucuggaauaucagauaggauacauaugcagugggauuuucggagacaauccacgcccuaaugauaagacaggcaguugugguccaguaucgucuaauggagcaaauggaguaaaaggauuuucauucaaauacggcaaugguguuuggauagggagaacuaaaagcauuaguucaagaaacgguuuugagaugauuugggauccgaacggauggacugggacagacaauaacuucucaauaaagcaagauaucguaggaauaaaugaguggucgggauauagcgggaguuuuguucagcauccagaacuaacagggcuggauuguauaagaccuugcuucuggguugaacuaaucagagggcgacccaaagagaacacaaucuggacuagcgggagcagcauauccuuuugugguguaaacagugacacuguggguuggucuuggccagacggugcugaguugccauuuaccauugacaaguaa

SEQ ID NO: 51937 - RNA, 1410 nt, Artificial Sequence; identical to SEQ ID NO: 51936
  derived and/or modified CDS sequence (wt) from neuraminidase__InfluenzaA__ADN26881

SEQ ID NO: 51938 - RNA, 1410 nt, Artificial Sequence; identical to SEQ ID NO: 51747
  derived and/or modified CDS sequence (wt) from neuraminidase__InfluenzaA__ADN26882

SEQ ID NO: 51939 - RNA, 1410 nt, Artificial Sequence; identical to SEQ ID NO: 51929
  derived and/or modified CDS sequence (wt) from neuraminidase__InfluenzaA__ADN26883

SEQ ID NO: 51940 - RNA, 1413 nt, Artificial Sequence
  derived and/or modified CDS sequence (wt) from neuraminidase__InfluenzaA__ADN89064
augaacccaaaucaaaagauaauaaccauuggaucaaucaguauagcaaucggaauaauuagucuaauguugcaaauaggaaauauuauuucaauaugggcuagucacucaauccaaacuggaagucaaaacaacacuggaauaugcaaccaaagaaucaucacauaugaaaacagcaccugggugaaucacacauacguuaauauuaacaacacuaauguuguugcuggagaggacaaaacuucagugacauuggccggcaauucaucucuuuguucuaucaguggaugggcuauauacacaaaagacaacagcauaagaauuggcuccaaaggagauguuuuugucauaagagaaccuuucauaucauguucucacuuggaaugcagaaccuuuuuucugacccaaggcgcucuauuaaaugacaaacauucaaaugggaccguaaaggacagaaguccuuauagggccuuaaugagcuguccucuaggugaagcuccguccccauacaauucaaaguucgaaucaguugcauggucagcaagcgcaugccaugauggcaugggcugguuaacaaucggaauuucugguccagacaauggagcuguggcuguacuaaaauacaacggaauaauaacuggaaccauaaaaaguuggaaaaagcaaauauuaagaacacaagagucugaaugugucuguaugaacgggucauguuucaccauaaugaccgauggcccgaguaauaaggccgccucguacaaaauuuucaagaucgaaaaggggaagguuacuaaaucaauagaguugaaugcacccaauuuuuauuaugaggaaugcuccuguuacccagacacuggcauagugauguguguaugcagggacaacuggcaugguucaaaucgaccuugggugucuuuuaaucaaaacuuggauuaucaaauaggauacaucugcaguggaguguuuggugacaauccgcgucccgaagauggagagggcagcugcaauccagugacuguugauggagcaaacggaguaaaaggguuuucauacaaauaugguaaugguguuuggauaggaaggaccaaaaguaacagacuuagaaggggguuugagaugauuugggauccuaauggauggacaaauaccgacagugauuucucagugaaacaggauguuguagcaauaacugauuggucaggguacagcggaaguuucguccaacauccugaguuaacaggauuggacuguauaagaccuugcuucuggguugaguuagucagagggcugccuagagaaaauacaacaaucuggacuagugggagcagcauuucuuuuuguggcguuaauagugauacugcaaacuggucuuggccagacggugcugaguugccguucaccaucgacaaguag

SEQ ID NO: 51941 - RNA, 1413 nt, Artificial Sequence
  derived and/or modified CDS sequence (wt) from neuraminidase__InfluenzaA__ADN89075
augaacccaaaucaaaagauaauaaccauuggaucaaucaguauagcaaucggaauaauuagucuaauguugcaaauaggaaauauuauuucaauaugggcuagucacucaauccaaacuggaagucaaaacaacacuggaauaugcaaccaaagaaucaucacauaugaaaacagcaccugggugaaucacacauauguuaauauuaacaacacuaauguuguugcuggagaggacaaaacuucagugacauuggccggcaauucaucucuuuguucuaucaguggaugggcuauauacacaaaagacaacagcaucagaauuggcuccaaaggagauguuuuugucauaagagaaccuuucauaucauguucucacuuggaaugcagaaccuuuuuucugacccaaggcgcucuauuaaaugacaaacauucaaaugggaccguaaaggacagaaguccuuauagggccuuaaugagcuguccucuaggugaagcuccguccccauacaauucaaaguucgaaucaguugcauggucagcaagcgcaugccaugauggcaugggcugguuaacaaucggaauuucugguccagacaauggagcuguggcuguacuaaaauacaacggaauaauaacuggaaccauaaaaaguuggaaaaagcaaauauuaagaacacaagagucugaaugugucuguaugaacgggucauguuucaccauaaugacugauggcccgaguaacaaggccgccucguacaaaauuuucaagaucgaaaaggggaagguuacuaaaucaauagaguugaaugcacccaauuuuuauuaugaggaaugcuccuguuacccagacacuggcauagugauguguguaugcagggacaacuggcaugguucaaaucgaccuugggugucuuuuaaucaaaacuuggauuaucaaauaggauacaucugcaguggaguguuuggugacaauccgcgucccgaagauggagaggguagcugcaauccagugacuguugauggagcaaacggaguaaaaggguuuucauacaaauaugguaaugguguuuggauaggaaggaccaaaaguaacagacuuagaaagggguuugagaugauuugggauccuaauggauggacaaauaccgacagugauuucucagugaaacaggauguuguagcaauaacugauuggucaggguacagcggaaguuucguccaacauccugaguuaacaggauuggacuguauaagaccuugcuucuggguugaguuagucagagggcugccuagagaaaauacaacaaucuggacuagugggagcagcauuucuuuuuguggcguuaauagugauacugcaaacuggucuuggccagacggugcugaguugccguucaccaucgacaaguag

SEQ ID NO: 51942 - RNA, 1413 nt, Artificial Sequence
  derived and/or modified CDS sequence (wt) from neuraminidase__InfluenzaA__ADN89086
augaacccaaaucaaaagauaauaaccauuggaucaaucaguauagcaaucggaauaauuagucuaauguugcaaauaggaaauauuauuucaauaugggcuagucacucaauccaaacugggagucaaaacaacacuggaauaugcaaccaaagaaucaucacauaugaaaacagcaccugggugaaucacacauauguuaauauuaacaacacuaauguuguugcuggagaggacaaaacaucagugacauuggccggcaauucaucucuuuguucuaucaguggaugggcuauauacacaaaagacaacagcauaagaauuggcuccaaaggagauguuuuugucauaagagaaccuuucauaucauguucucacuuggaaugcagaaccuuuuuucugacccaaggcgcucuauuaaaugacaaacauucaaaugggaccguaaaggacagaaguccuuauagggccuuaaugagcuguccucuaggcgaagcuccguccccauacaauucaaaguucgaaucaguugcauggucagcaagcgcaugccaugauggcaugggcugguuaacaaucggaauuucugguccagacaauggagcuguggcuguacuaaaauacaacggaauaauaacuggaaccauaaaaaguuggaaaaagcaaauauuaagaacacaagagucugaaugugucuguaugaacgggucauguuucaccauaaugaccgauggcccgaguaauaagaccgccucguacaaaauuuucaagaucgaaaaggggaagguuacuaaaucaauagaguugaaugcacccaauuuuuauuaugaggaaugcuccuguuacccagauacuggcauagugauguguguaugcagggacaacuggcaugguucaaaucgaccuugggugucuuuuaaucaaaacuuggauuaucaaauaggauacaucugcaguggaguguuuggugacaauccgcgucccgaagauggagagggcagcugcaauccaguaacuguugauggagcaaacggaguaaaaggguuuucauacaaauaugguaaugguguuuggauagggaggaccaaaaguaacagacuuagaaagggguuugagaugauuugggauccuaauggauggacaaauaccgacagugauuucucagugaaacaggauguuguagcaauaacugauuggucaggguacagcggaaguuucguccaacauccugaguuaacaggauuggacuguauaagaccuugcuucuggguugaguuagucagagggcugccuagagaaaauacaacaaucuggacuagugggagcagcauuucuuuuuguggcguuaauagugauacugcaaacuggucuuggccagacggugcugaguugccguucaccauugacaaguag

SEQ ID NO: 51943 - RNA, 1413 nt, Artificial Sequence
  derived and/or modified CDS sequence (wt) from neuraminidase__InfluenzaA__ADN89097
augaacccaaaucaaaagauaauaaccauuggaucaaucaguauagcaaucggaauaaucagucuaauguugcaaauaggaaauauuauuucaauaugggcuagucacucaauccaaacugggagucaaaacaacacuggaauaugcaaccaaagaaucaucacauaugaaaacagcaccugggugaaucacacauauguuaauauuaacaacacuaauguuguugcuggagaggacaaaacaucagugacauuggccggcaauucaucucuuuguucuaucaguggaugggcuauauacacaaaagacaacagcauaagaauuggcuccaaaggagauguuuuugucauaagagaaccuuucauaucauguucucacuuggaaugcagaaccuuuuuucugacccaaggcgcucuauuaaaugacaaacauucaaaugggaccguaaaggacagaaguccuuauagggccuuaaugagcuguccucuaggugaagcuccguccccauacaauucaaaguucgaaucaguugcauggucagcaagcgcaugccaugauggcaugggcugguuaacaaucggaauuucugguccagacaauggagcuguggcuguacuaaaauacaacggaauaauaacuggaaccauaaaaaguuggaaaaagcaaauauuaagaacacaagagucugaaugugucuguaugaacgggucauguuucaccauaaugaccgauggcccgaguaauaaggccgccucguacaaaauuuucaagaucgaaaaggggaagguuacuaaaucaauagaguugaaugcacccaauuuuuauuaugaggaaugcuccuguuacccagauacuggcauagugauguguguaugcagggacaacuggcaugguucaaaucgaccuugggugucuuuuaaucaaaauuuggauuaucaaauaggauacaucugcaguggaguguuuggugacaauccgcgucccgaagauggagagggcagcugcaauccagugacuguugauggagcaaacggaguaaaaggguuuucauacaaauaugguaaugguguuuggauagggaggaccaaaaguaacagacuuagaaagggguuugagaugauuugggauccuaauggauggacaaauaccgacagugauuucucagugaaacaggauguuguagcaauaacugauuggucaggguacagcggaaguuucguccaacauccugaguuaacaggauuggacuguauaagaccuugcuucuggguugaguuagucagagggcugccuagagaaaauacaacaaucuggacuagugggagcagcauuucuuuuuguggcguuaauagugauacugcaaacuggucuuggccagacggugcugaguugccguucaccauugacaaguag

SEQ ID NO: 51944 - RNA, 1413 nt, Artificial Sequence
  derived and/or modified CDS sequence (wt) from neuraminidase__InfluenzaA__ADN89108
augaacccaaaucaaaagauaauaaccauuggaucaaucaguauagcaaucggaauaauuagucuaauguugcaaauaggaaauauuauuucaauaugggcuagucacucaauccaaacuggaagucaaaacaacacuggaauaugcaaccaaagaaucaucacauaugaaaacagcaccugggugaaucacacauauguuaauauuaacaacacuaauguuguugcuggagaggacaaaacgucagugacauuggccggcaauucaucucuuuguucuaucaguggaugggcuauauacacaaaagacaacagcauaagaauuggauccaaaggagauguuuuugucauaagagaaccuuucauaucauguucucacuuggaaugcagaaccuuuuuucugacccaaggcgcucuauuaaaugacaaacauucaaaugggaccguaaaggacagaaguccuuauagggccuuaaugagcuguccucuaggugaagcuccguccccauacaauucaaaguucgaaucaguugcauggucagcaagcgcaugccaugauggcaugggcugguuaacaaucggaauuucugguccagacaauggagcuguggcuguacuaaaauacaacggaauaauaacuggaaccauaaaaaguuggaaaaagcaaauauuaagaacacaagagucugaaugugucuguaugaacgggucauguuucaccauaaugaccgauggcccgaguaauaaagccgccucguacaaaauuuucaagaucgaaaaggggaagguuacuaaaucaauagaguugaaugcacccaauuuuuauuaugaggaaugcuccuguuacccagacacuggcauagugauguguguaugcagggacaacuggcaugguucaaaucgaccuugggugucuuuuaaucaaaauuuagauuaucaaauaggauacaucugcaguggaguguuuggugacaauccgcgucccgaagauggagagggcagcugcaauccagugacuguugauggagcaaacggaguaaaaggguuuucauacaaauaugguaaugguguuuggauaggaaggaccaaaaguaacagacuuagaaagggguuugagaugauuugggauccuaauggauggacaaauaccgacagugauuucucagugaaacaggauguuguaucaauaacugauuggucaggguacagcggaaguuucguccaacauccugaguugacaggauuggacuguauaagaccuugcuucuggguugaguuagucagagggcugccuagagaaaauacaacaaucuggacuagugggagcagcauuucuuuuugugguguuaauagugauacugcaaacuggucuuggccagacggugcugaguugccguucaccauugacaaguag

SEQ ID NO: 51945 - RNA, 1413 nt, Artificial Sequence
  derived and/or modified CDS sequence (wt) from neuraminidase__InfluenzaA__ADN89119
augaacccaaaucaaaagauaauaaccauuggaucaaucaguauagcaaucggaauaauuagucuaauguugcaaauaggaaauauuauuucaauaugggcuagucacucaauccaaacuggaagucaaaacaacacuggaauaugcaaccaaagaaucaucacauaugaaaacagcaccugggugaaucacacauauguuaauauuaacaacacuaauguuguugcuggagaggacaaaacgucagugacauuggccggcaauucaucucuuuguucuaucaguggaugggcuauauacacaaaagacaacagcauaagaauuggcuccaaaggagauguuuuugucauaagagaaccuuucauaucauguucucacuuggaaugcagaaccuuuuuucugacccaaggcgcucuauuaaaugacaaacauucaaaugggaccguaaaggacagaaguccuuauagggccuuaaugagcuguccucuaggugaagcuccguccccauacaauucaaaguucgaaucaguugcauggucagcaagcgcaugccaugauggcaugggcugguugacaaucggaauuucugguccagacaauggagcuguggcuguacuaaaauacaacggaauaauaacuggaaccauaaaaaguuggaaaaagcaaauauuaagaacacaagagucugaaugugucuguaugaacgggucauguuucaccauaaugaccgauggcccgaguaauaaagccgccucguacaaaauuuucaagaucgaaaaggggaagguuacuaaaucaauagaguugaaugcacccaauuuuuauuacgaggaaugcuccuguuacccagacacuggcauagugauguguguaugcagggacaacuggcaugguucaaaucgaccuugggugucuuuuaaucaaaauuuggauuaucaaauaggauacaucugcaguggaguguuuggugacaauccgcgucccgaagauggagagggcagcugcaauccagugacuguuaauggagcagacggaguaaaaggguuuucauacaaauaugguaaugguguuuggauaggaaggaccaaaaguaacagacuuagaaagggguuugagaugauuugggauccuaauggauggacaaauaccgacagugauuucucagugaaacaggauguuguagcaauaacugauuggucaggguacagcggaaguuucguccaacauccugaguugacaggauuggacuguacaagaccuugcuucuggguugaguuagucagagggcugccuagagaaaauacaacaaucuggacuagugggagcagcauuucuuuuuguggcguuaauagugauacugcaaacuggucuuggccagacggugcugaguugccguucaccauugacaaguag

SEQ ID NO: 51946 - RNA, 1413 nt, Artificial Sequence
  derived and/or modified CDS sequence (wt) from neuraminidase__InfluenzaA__ADN89130
augaacccaaaucaaaagauaauaaccauuggaucaaucaguauagcaaucggaauaauuagucuaauguugcaaauaggaaauauuauuucaauaugggcuagucacucaauccaaacugggagucaaaacaacacuggaauaugcaaccaaagaaucaucacauaugaaaacagcaccugggugaaucacacauauguuaauauuaacaacacuaauguuguugcuggagaggacaaaacaucagugacauuggccggcaauucaucucuuuguucuaucaguggaugggcuauauacacaaaagacaacagcauaagaauuggcuccaaaggagauguuuuugucauaagagaaccuuucauaucauguucucacuuggaaugcagaaccuuuuuucugacccaaggcgcucuauuaaaugacaaacauucaaaugggaccguaaaggacagaaguccuuauagggccuuaaugagcuguccucuaggugaagcuccguccccauacaauucaaauuucgaaucaguugcauggucagcaagcgcaugccaugauggcaugggcugguuaacaaucggaauuucugguccagacaauggagcuguggcuguacuaaaauacaacgggauaauaacuggaaccauaaaaaguuggaaaaagcaaaucuuaagaacacaagagucugaaugugucuguaugaacgggucauguuucaccauaaugaccgauggcccgaguaauaaggccgccucguacaaaauuuucaagaucgaaaaggggaagguuacuaaaucaauagaguugaacgcacccaauuuuuauuaugaggaaugcuccuguuacccagauacuggcauagugauguguguaugcagggacaacuggcaugguucaaaucgaccuugggugucuuuuaaucaaaacuuggauuaucaaauaggauacaucugcaguggaguguuuggugacaauccgcgucccgaagauggagagggcagcugcaauccagugacuguugauggagcaaacggaguaaaaggguuuucauacaaauaugguaaugguguuuggauagggaggaccaaaaguaacagacuuagaaagggguuugagaugauuugggauccuaauggauggacaaauaccgacagugauuucucagugaaacaggauguuguagcaauaacugauuggucaggguacagcggaaguuucguccaacauccugaguuaacaggauuggacuguauaagaccuugcuucuggguugaguuagucagagggcugccuagagaaaauacaacaaucuggacuagugggagcagcauuucuuuuuguggcguuaauggugauacugcaaacuggucuuggccagacggugcugaguugccguucaccauugacaaguag

SEQ ID NO: 51947 - RNA, 1413 nt, Artificial Sequence; identical to SEQ ID NO: 51944
  derived and/or modified CDS sequence (wt) from neuraminidase__InfluenzaA__ADN89141

SEQ ID NO: 51948 - RNA, 1413 nt, Artificial Sequence
  derived and/or modified CDS sequence (wt) from neuraminidase__InfluenzaA__ADN89152
augaacccaaaucaaaagauaauaaccauuggaucaaucaguauagcaaucggaauaauuagucuaauguugcaaauaggaaauauuauuucaauaugggcuagucacucaauccaaacuggaagucaaaacaacacuggaauaugcaaccaaagaaucaucacauaugaaaacagcaccugggugaaucacacauauguuaauauuaacaacacuaauguuguugcuggagaagacaaaacuucagugacauuggccggcaauucaucucuuuguucuaucaguggaugggcuauauacacaaaagacaacagcauaagaauuggcuccaaaggagauguuuuugucauaagagaaccuuucauaucauguucucacuuggaaugcagaaccuuuuuucugacccaaggcgcccuauuaaaugacaaacauucaaaugggaccguaaaggacagaaguccuuauagggccuuaaugagcuguccucuaggugaagcuccguccccauacaauucaaaguucgaaucaguugcauggucagcaagcgcaugccaugauggcaugggcugguuaacaaucggaauuucugguccagacaauggagcuguggcuguacuaaaauacaacggaauaauaacuggaaccauaaaaaguuggaaaaagcaaauauuaagaacacaagagucugaaugugucuguaugaacgggucauguuucaccauaaugaccgauggcccgaguaauaaggccgccucguacaaaauuuucaagaucgaaaaggggaagguuacuaaaucaauagaguugaaugcacccaauuuuuauuaugaggaaugcuccuguuacccagacacuggcauagugauguguguaugcagggacaacuggcaugguucaaaucgaccuugggugucuuuuaaucaaaacuuggauuaucaaauaggauacaucugcaguggaguguuuggugacaauccgcgucccgaagauggagagggcagcugcaauccagugacuauugauggagcaaacggaguaaaaggguuuucauacaaauaugguaaugggguuuggauaggaaggaccaaaaguaacagacuuagaaagggguuugagaugauuugggauccuaauggauggacaaauaccgacagugauuucucagugaaacaggauguuguagcaauaacugauuggucaggguacagcggaaguuucguccaacauccugaguuaacaggauuggacuguauaagaccuugcuucuggguugaguuagucagagggcugccuagagaaaauacaacaaucuggacuagugggagcagcauuucuuuuuguggcguuaauagugauacugcaaacuggucuuggccagacggugcugaguugccguucaccaucgacaaguag

SEQ ID NO: 51949 - RNA, 1413 nt, Artificial Sequence
  derived and/or modified CDS sequence (wt) from neuraminidase__InfluenzaA__ADN89163
augaacccaaaucaaaggauaauaaccauuggaucaaucaguauagcaaucggaauaauuagucuaauguugcaaauaggaaauauuauuucaauaugggcuagucacucaauccaaacuggaagucaaaacaacacuggaauaugcaaccaaagaaucaucacauaugaaaacagcaccugggugaaucauacauauguuaauauuaacaacacuaauguuguugcuggagaggacaaaacgucagugacauuggccggcaauucaucucuuuguucuaucaguggaugggcuauauacacaaaagacaacagcauaagaauuggcuccaaaggagauguuuuugucauaagagaaccuuucauaucauguucucacuuggaaugcagaaccuuuuuucugacccaaggcgcucuauuaaaugacaaacauucaaaugggaccgcaaaggacagaaguccuuauagggccuuaaugagcuguccucuaggugaagcuccguccccauacaauucaaaguucgaaucaguugcauggucagcaagcgcaugccaugauggcaugggcugguuaacaaucggaauuucugguccagacaauggagcuguggcuguacuaaaauacaacggaauaauaacuggaaccauaaaaaguuggaaaaagcaaauauuaagaacacaagagucugaaugugucuguaugaacgggucauguuucaccauaaugaccgauggcccgaguaauaaggccgccucguacaaaauuuucaagaucgaaaaggggaagguuacuaaaucaauagaguugaaugcacccaauuuuuauuaugaggaaugcuccuguuacccagacacuggcauagugauguguguaugcagggacaacuggcaugguucaaaucgaccuugggugucuuuuaaucaaaacuuggauuaucaaauaggauacaucugcaguggaguguuuggugacaauccgcgucccgaagauggagagggcagcugcaauccggugacuguugauggagcaaacggaguaaaaggguuuucauacaaauaugguaaugguguuuggauaggaaggaccaaaaguaacagacuuagaaagggguuugagaugauuugggauccuaauggauggacaaauaccgacagugauuucucagugaaacaggauguuguagcaauaacugauuggucaggguacagcggaaguuucguccaacacccugaguuaacaggauuggacuguauaagaccuugcuucuggguugaguuagucagagggcugccuagagaaaauacaacaaucuggacuagugggagcagcauuucuuuuuguggcguuaauagugauacugcaaacuggucuuggccagacggugcugaguugccguucaccauugacaaguag

SEQ ID NO: 51950 - RNA, 1413 nt, Artificial Sequence
  derived and/or modified CDS sequence (wt) from neuraminidase__InfluenzaA__ADN89174
augaacccaaaucaaaagauaauaaccauuggaucaaucaguauagcaaucggaauaauuagucuaauguugcaaauaggaaguauuauuucaauaugggcuagucacucaauccaaacuggaagucaaaacaacacuggaauaugcaaccaaagaaucaucacauaugaaaacagcaccugggugaaucacacauauguuaauauuaacaacacuaauguuguugcuggagaggacaaaacgucagugacauuggcuggcaauucaucucuuuguucuaucaguggaugggcuauauacacaaaagacaacagcauaagaauuggcuccaaaggagauguuuuugucauaagagaaccuuucauaucauguucucacuuggaaugcagaaccuuuuuucugacccaaggcgcucuauuaaaugacaaacauucaaaugggaccguaaaggacagaaguccuuauagggccuuaaugagcuguccucuaggugaagcuccguccccauacaauucaaaguucgaaucaguugcauggucagcaagcgcaugccaugauggcaugggcugguuaacaaucggaauuucugguccagacaauggagcuguggcuguacuaaaauacaacggaauaauaacuggaaccauaaaaaguuggaaaaagcaaauauuaagaacacaagagucugaaugugucuguaugaacgggucauguuucaccauaaugaccgauggcccgaguaauaaagccgccucguacaaaauuuucaagaucgaaaaggggaagguuacuaaaucaauagaguugaaugcacccaauuuuuauuaugaggaaugcuccuguuacccagacacuggcauagugauguguguaugcagggacaacuggcaugguucaaaucgaccuugggugucuuuuaaucaaaauuuggauuaucaaauaggauacaucugcaguggaguguuuggugacaauccgcgucccgaagauggagagggcagcugcaauccagugacuguagauggagcaaacggaguaaaaggguuuucauacaaauaugguaaugguguuuggauaggaaggaccaaaaguaacagacuuagaaagggguuugagaugauuugggauccuaauggauggacaaauaccgacagugauuucucagugaaacaggauguuguagcaauaacugauuggucaggguacagcggaaguuucguccaacauccugaauugacaggauuggacuguauaagaccuugcuucuggguugaguuagucagagggcugccuagagaaaauacaacaaucuggacuagugggagcagcauuucuuuuuguggcguuaauagugauacugcaaacuggucuuggccagacggugcugaguugccguucaccauugacaaguag

SEQ ID NO: 51951 - RNA, 1413 nt, Artificial Sequence; identical to SEQ ID NO: 51944
  derived and/or modified CDS sequence (wt) from neuraminidase__InfluenzaA__ADN89185

SEQ ID NO: 51952 - RNA, 1413 nt, Artificial Sequence
  derived and/or modified CDS sequence (wt) from neuraminidase__InfluenzaA__ADN89196
augaacccaaaucaaaagauaauaaccauuggaucaaucaguauagcaaucggaauaauuagucuaauguugcaaauaggaaguauuauuucaauaugggcuagucacucaauccaaacuggaagucaaaacaacacuggaauaugcaaccaaagaaucaucacauaugaaaacagcaccugggugaaucacacauauguuaauauuaacaacacuaauguuguugcuggagaggacaaaacgucagugacauuggccggcaauucaucucuuuguucuaucaguggaugggcuauauacacaaaagacaacagcauaagaauuggcuccaaaggagauguuuuugucauaagagaaccuuucauaucauguucucacuuggaaugcagaaccuuuuuucugacccaaggcgcucuauuaaaugacaaacauucaaaugggaccguaaaggacagaaguccuuauagggccuuaaugagcuguccucuaggugaagcuccguccccauacaauucaaaguucgaaucaguugcauggucagcaagcgcaugccaugauggcaugggcugguuaacaaucggaauuucugguccagacaauggagcuguggcuguacuaaaauacaacggaauaauaacuggaaccauaaaaaguuggaaaaagcaaauauuaagaacacaagagucugaaugugucuguaugaacgggucauguuucaccauaaugaccgauggcccgaguaauaaagccgccucguacaaaauuuucaagaucgaaaaggggaagguuacuaaaucaauagaguugaaugcacccaauuuuuauuaugaggaaugcuccuguuacccagacacuggcauagugauguguguaugcagggacaacuggcaugguucaaaucgaccuugggugucuuuuaaucaaaauuuggauuaucaaaugggauacaucugcaguggaguguuuggugacaauccgcgucccgaagauggagagggcagcugcaauccagugacuguagauggagcaaacggaguaaaaggguuuucauacaaauaugguaaugguguuuggauaggaaggaccaaaaguaacagacuuagaaagggguuugagaugauuugggauccuaauggauggacaaauaccgacagugauuucucauugaagcaggauguuguagcaauaacugauuggucaggguacagcggaaguuucguccaacauccugaauugacaggauuggacuguauaagaccuugcuucuggguugaguuagucagagggcugccuagagaaaauacaacaaucuggaccagugggagcagcauuucuuuuuguggcguuaauagugauacugcaaacuggucuuggccagacggugcugaguugccguucaccauugacaaguag

SEQ ID NO: 51953 - RNA, 1413 nt, Artificial Sequence; identical to SEQ ID NO: 51952
  derived and/or modified CDS sequence (wt) from neuraminidase__InfluenzaA__ADN89207

SEQ ID NO: 51954 - RNA, 1413 nt, Artificial Sequence
  derived and/or modified CDS sequence (wt) from neuraminidase__InfluenzaA__ADN89218
augaacccaaaucaaaagauaauaaccauuggaucaaucaguauagcaaucggaauaauuagucuaauguugcaaauaggaaauauuauuucaauaugggcuagucacucaauccaaccugggagucaaaacaacacuggaauaugcaaccaaagaaucaucacauaugaaaacagcaccugggugaaucacacauauguuaacauuaacaacacuaauguuguugcuggagaggacaaaacaucagugacauuggccggcaauucaucucuuuguucuaucaguggaugggcuauauacacaaaagacaacagcauaagaauuggcuccaaaggagauguuuuugucauaagagaaccuuucauaucauguucucacuuggaaugcagaaccuuuuuucugacccaaggcgcucuauuaaaugacaaacauucaaaugggaccguaaaggacagaaguccuuauagggccuuaaugagcuguccucuaggugaagcuccguccccauacaauucaaaguucgaaucaguugcauggucagcaagcgcaugccaugauggcaugggcugguuaacaaucggaauuucugguccagacaauggagcuguggcuguacuaaaauacaacgggauaauaacuggaaccauaaaaaguuggaaaaagcaaauauuaagaacacaagagucugaaugugucuguaugaacgggucauguuucaccauaaugaccgauggcccgaguaauaaggccgccucguacaaaauuuucaagaucgaaaaggggaagguuacuaaaucaauagaguugaacgcacccaauuuuuauuaugaggaaugcuccuguuacccagauacuggcauagugauguguguaugcagggacaacuggcaugguucaaaucgaccuugggugucuuuuaaucaaaacuuggauuaucaaauaggauacaucugcaguggaguguuuggugacaauccgcgucccgaagauggagagggcagcugcaauccagugacuguugauggagcaaacggaguaaaaggguuuucauacaaauaugguaaugguguuuggauagggaggaccaaaaguaacagacuuagaaagggguuugagaugauuugggauccuaauggauggacaaauaccgacagugauuucucagugaaacaggauguuguagcaauaacugauuggucaggguacagcggaaguuucguccaacauccugaguuaacaggauuggacuguauaagaccuugcuucuggguugaguuagucagagggcugccuagagaaaauacaacaaucuggacuagugggagcagcauuucuuuuuguggcguuaauggugauacugcaaacuggucuuggccagacggugcugaguugccguucaccauugacaaguag

SEQ ID NO: 51955 - RNA, 1413 nt, Artificial Sequence
  derived and/or modified CDS sequence (wt) from neuraminidase__InfluenzaA__ADN89229
augaacccaaaucaaaagauaauaaccauuggaucaaucaguauagcaaucggaauaauuagucuaauguuacaaauaggaaauauuauuucaauaugggcuagucacucaauccaaacuggaagucaaaacaacacuggaauaugcaaccaaagaaucaucacauaugaaaacagcaccugggugaaucacacauauguuaauauuaacaacacuaauguuguugcuggagaggacaaaacuucagugacauuggccggcaauucaucucuuuguucuaucaguggaugggcuauauacacaaaagacaacagcauaagaauuggcuccaaaggagauguuuuugucauaagagaaccuuucauaucauguucucacuuggaaugcagaaccuuuuuucugacccaaggcgcucuauuaaaugacaaacauucaaaugggaccguaaaggacagaaguccuuauagggccuugaugagcuguccucuaggugaagcuccguccccauacaauucaaaguucgaaucaguugcauggucagcaagcgcaugccaugauggcaugggcugguuaacaaucggaauuucugguccagacaauggagcuguggcuguacuaaaauacaacggaauaauaacugggaccauaaaaaguuggaaaaagcaaauauuaagaacacaagagucugaaugugucuguaugaacgggucauguuucaccauaaugaccgauggcccgaguaauaaggccgccucguacaaaauuuucaagaucgaaaaggggaagguuacuaaaucaauagaguugaaugcacccaauuuuuauuaugaggaaugcuccuguuacccagacacuggcauagugauguguguaugcagggacaacuggcaugguucaaaucgaccuugggugucuuuuaaucaaaacuuggauuaucaaauaggauacaucugcaguggaguguuuggugacaauccgcgucccgaagauggagagggcagcugcaauccagugacuguugauggagcaaacggaguaaaaggguuuucauacaaauaugguaaugguguuuggauaggaaggaccaaaaguaacagacuuagaaagggguuugagaugauuugggacccuaauggauggacaaauaccgacagugauuucucagugaaacaggauguuguagcaacaacugauuggucaggguacagcggaaguuucguccaacauccugaguuaacaggauuggacuguauaagaccuugcuucuggguugaguuagucagagggcugccuagagaaaauacaacaaucuggacuagugggagcagcauuucuuuuuguggcguuaauagugauacugcaaacuggucuuggccagacggugcugaguugccguucaccaucgacaaguag

SEQ ID NO: 51956 - RNA, 1413 nt, Artificial Sequence
  derived and/or modified CDS sequence (wt) from neuraminidase__InfluenzaA__ADN89240
augaacccaaaucaaaagauaauaaccauuggaucaaucaguauagcaaucggaauaauuagucuaauguugcaaauaggaaauauuauuucaauaugggcuagucacucaauccaaacugggagucaaaacaacacuggaauaugcaaccaaagaaucaucacauaugaaaacagcaccugggugaaucacacauauguuaauauuaacaacacuaauguuguugcuggagaggacaaaacaucagugacauuggccggcaauucaucucuuuguucuaucaguggaugggcuauauacacaaaagacaacagcauaagaauuggcuccaaaggagauguuuuugucauaagagaaccuuucauaucauguucucacuuggaaugcagaaccuuuuuucugacccaaggcgcucuauuaaaugacaaacauucaaaugggaccguaaaggacagaaguccuuauagggccuuaaugagcuguccucuaggugaagcuccguccccauacaauucaaaguucgaaucaguugcauggucagcaagcgcaugccaugauggcaugggcugguuaacaaucggaauuucugguccagacaauggagcuguggcuguacuaaaauacaacgggauaauaacuggaaccauaaaaaguuggaaaaagcaaauauuaagaacacaagagucugaaugugucuguaugaacgggucauguuucaccauaaugaccgauggcccgaguaauaaggccgccucguacaaaauuuucaagaucgaaaaggggaagguuacuaaaucaauagaguugaacgcacccaauuuuuauuaugaggaaugcuccuguuacccagauacuggcauagugauguguguaugcagggacaacuggcaugguucaaaucgaccuugggugucuuuuaaucaaaacuuggauuaucaaauaggauacaucugcaguggaguguuuggugacaauccgcgucccgaagauggagagggcagcugcaauccagugacuguugauggagcaaacggaguaaaaggguuuucauacaaauaugguaaugguguuuggauagggaggaccaaaaguaacagacuuagaaagggguuugagaugauuugggauccuaauggauggacaaauaccgacagugauuucucagugaaacaggauguuguagcaauaacugauuggucaggguacagcggaaguuucguccaacauccugaguuaacaggauuggacuguauaaggccuugcuucuggguugaguuagucagagggcugccuagagaaaauacaacaaucuggacuagugggagcagcauuucuuuuuguggcguuaauggugauacugcaaacuggucuuggccagacggugcugaguugccguucaccauugacaaguag

SEQ ID NO: 51957 - RNA, 1413 nt, Artificial Sequence; identical to SEQ ID NO: 51419
  derived and/or modified CDS sequence (wt) from neuraminidase__InfluenzaA__ADN89251

SEQ ID NO: 51958 - RNA, 1413 nt, Artificial Sequence
  derived and/or modified CDS sequence (wt) from neuraminidase__InfluenzaA__ADN89262
augaacccaaaucaaaagauaauaaccauuggaucaaucaguauagcaaucggaauaauuagucuaauguugcaaauaggaaauauuauuucaauaugggcuagucacucaauccaaacugggagucaaaacaacacuggaauaugcaaccaaagaaucaucacauaugaaaacagcaccugggugaaucacacauauguuaauauuaacaacacuaauguuguugcuggagaggacaaaacaucagugacauuggccggcaauucaucucuuuguucuaucaguggaugggcuauauacacaaaagacaacagcauaagaauuggcuccaaaggagauguuuuugucauaagagaaccuuucauaucauguucucacuuggaaugcagaaccuuuuuucugacccaaggcgcucuauuaaaugacaaacauucaaaugggaccguaaaggacagaaguccuuauagggccuuaaugagcuguccucuaggcgaagcuccguccccauacaauucaaaguucgaaucaguugcauggucagcaagcgcaugccaugauggcaugggcugguuaacaaucggaauuucugguccagacaauggagcuguggcuguacuaaaauacaacggaauaauaacuggaaccauaaaaaguuggaaaaagcaaauauuaagaacacaagagucugaaugugucuguaugaacgggucauguuucaccauaaugaccgauggcccgaguaauaaggccgccucguacaaaauuuucaagaucgaaaaggggaagguuacuaaaucaauagaguugaaugcacccaauuuuuauuaugaggaaugcuccuguuacccagauacuggcauagugauguguguaugcagggacaacuggcaugguucaaaucgaccuugggugucuuuuaaucaaaacuuggauuaucaaauaggauacaucugcaguggaguguuuggugacaauccgcguccugaagauggagagggcagcugcaauccaguaacuguugauggagcaaacggaguaaaaggguuuucauacaaauaugguaaugguguuuggauagggaggaccaaaaguaacagacuuagaaagggguuugagaugauuugggauccuaauggauggacaaauaccgacagugauuucucagugaaacaggauguuguagcaauaacugauuggucaggguacagcggaaguuucguccaacauccugaguuaacaggauuggacuguauaagaccuugcuucuggguugaguuagucagagggcugccuagagaaaauacaacaaucuggacuagugggagcagcauuucuuuuuguggcguuaauagugauacugcaaacuggucuuggccagacggugcugaguugccguucaccauugacaaguag

SEQ ID NO: 51959 - RNA, 1413 nt, Artificial Sequence
  derived and/or modified CDS sequence (wt) from neuraminidase__InfluenzaA__ADN89273
augaacccaaaucaaaagauaauaaccauuggaucaaucaguauagcaaucggaauaauuagucuaauguugcaaauaggaaauauuauuucaauaugggcuagucacucaauccaaacuggaagucaaaacaacacuggaauaugcaaccaaagaaucaucacauaugaaaacagcaccugggugaaucacacauacguuaauauuaacaacacuaauguuguugcuggagaggacaaaacuucagugacauuggccggcaauucaucucuuuguucuaucaguggaugggcuauauacacaaaagacaacagcauaagaauuggcuccaaaggagauguuuuugucauaagagaaccuuucauaucauguucucacuuggaaugcagaaccuuuuuucugacccaaggcgcucuauuaaaugacaaacauucaaaugggaccguaaaggacagaaguccuuauagggccuuaaugagcuguccucuaggugaagcuccguccccauacaauucaaaguucgaaucaguugcauggucagcaagcgcaugccaugauggcaugggcugguuaacaaucggaauuucugguccagacaauggagcuguggcuguacuaaaauacaacggaauaauaacuggaaccauaaaaaguuggaaaaagcaaauauuaagaacacaagagucugaaugugucuguaugaacgggucauguuucaccauaaugaccgauggcccgaguaauaaggccgccucguacaaaauuuucaagaucgaaaaggggaagguuacuaaaucaauagaguugaaugcacccaauuuuuauuaugaggaaugcuccuguuacccagacacuggcauagugauguguguaugcagggacaacuggcaugguucaaaucgaccuugggugucuuuuaaucaaaacuuggauuaucaaauaggauacaucugcaguggaguguuuggugacaauccgcgucccgaagauggagagggcagcugcaauccagugacuguugauggagcaaacggaguaaaaggguuuucauacaaauaugguaaugguguuuggauaggaaggaccaaaaguaacagacuuagaaagggguuugagaugauuugggauccuaauggauggacaaauaccgacagugauuucucagugaaacaggauguuguagcaauaacugauuggucaggguacagcggaaguuucguccaacauccugaguuaacaggauuggacuguauaagaccuugcuucuggguugaguuagucagagggcugccuagagaaaauacaacaaucuggacuagugggagcagcauuucuuuuuguggcguuaauagugauacugcaaacuggucuuggccagacggugcugaguugccguucaccaucgacaaguag

SEQ ID NO: 51960 - RNA, 1413 nt, Artificial Sequence; identical to SEQ ID NO: 51959
  derived and/or modified CDS sequence (wt) from neuraminidase__InfluenzaA__ADN89284

SEQ ID NO: 51961 - RNA, 1413 nt, Artificial Sequence; identical to SEQ ID NO: 51959
  derived and/or modified CDS sequence (wt) from neuraminidase__InfluenzaA__ADN89295

SEQ ID NO: 51962 - RNA, 1413 nt, Artificial Sequence; identical to SEQ ID NO: 51959
  derived and/or modified CDS sequence (wt) from neuraminidase__InfluenzaA__ADN89306

SEQ ID NO: 51963 - RNA, 1413 nt, Artificial Sequence
  derived and/or modified CDS sequence (wt) from neuraminidase__InfluenzaA__ADN89317
augaacccaaaucaaaggauaauaaccauuggaucaaucaguauagcaaucggaauaauuagucuaauguugcaaauaggaaauauuauuucaauaugggcuagucacucaauccaaacugggagucaaaacaacacuggaauaugcaaccaaagaauuaucacauaugaaaacagcacuugggugaaucacacauauguuaauauuaacagcacuaauguuguugcuggagaggacaaaacaucagugacauuggccggcaauucaucucuuuguucuaucaguggaugggcuauauacacaaaagacaacagcauaagaauuggcuccaaaggagauguuuuugucauaagagaaccuuucauaucauguucucacuuggaaugcagaaccuuuuuucugacccaaggcgcucuauuaaaugacaaacauucaaaugggaccguaaaggacagaaguccuuauagggccuuaaugagcuguccucuaggugaagcuccguccccauacaauucaaaguucgaaucaguugcauggucagcaagcgcaugccaugauggcaugggcugguuaacaaucggaauuucugguccagacaauggagcuguggcuguacuaaaauacaacggaauaauaacuggaaccauaaaaaguuggaaaaagcaaauauuaagaacacaagagucugaaugugucuguaugaacgggucauguuucaccauaaugaccgauggcccgaguaauaaggccgccucguacaaaauuuucaagaucgaaaaggggaagguuacuaaaucaauagaguugaaugcacccaauuuuuauuaugaggaaugcuccuguuacccagauacuggcauagugauguguguaugcagggacaacuggcaugguucaaaucgaccuugggugucuuuuaaucaaaacuuggauuaucaaauaggauacaucugcaguggaguguuuggugacaauccgcgucccgaagauggagagggcagcugcaauccagugacuguugauggagcaaacggaguaaaaggguuuucauacaaauaugguaaugguguuuggauagggaggaccaaaaguaacagacuuagaaagggguuugagaugauuugggauccuaauggauggacaaauaccgacagugauuucucagugaaacaggauguuguagcaauaacugauuggucaggguacagcggaaguuucguccaacauccugaguuaacaggauuggacuguauaagaccuugcuucuggguugaguuagucagagggcugccuagagaaaauacaacaaucuggacuagugggagcagcauuucuuuuuguggcguuaauggugauacugcaaacuggucuuggccagacggugcugaguugccguucaccauugacaaguag

SEQ ID NO: 51964 - RNA, 1413 nt, Artificial Sequence
  derived and/or modified CDS sequence (wt) from neuraminidase__InfluenzaA__ADN89328
augaacccaaaucaaaagauaauaaccauuggaucaaucaguauagcaaucggaauaauuagucuaauguugcaaauaggaaguauuauuucaauaugggcuagucacucaauccaaacuggaagucaaaacaacacuggaauaugcaaccaaagaaucaucacauaugaaaauagcaccugggugaaucacacauauguuaauauuaacaacacuaauguuguugcuggagaggacaaaacgucagugacauuggccggcaauucaucucuuuguucuaucaguggaugggcuauauacacaaaagacaacagcauaagaauuggcuccaaaggagauguuuuugucauaagagaaccuuucauaucauguucucacuuggaaugcagaaccuuuuuucugacccaaggcgcucuauuaaaugacaaacauucaaaugggaccguaaaggacagaaguccuuauagggccuuaaugagcuguccucuaggugaagcuccguccccauacaauucaaaguucgaaucaguugcauggucagcaagcgcaugccaugauggcaugggcugguuaacaaucggaauuucugguccagacaauggagcuguggcuguacuaaaauacaacggaauaauaacuggaaccauaaaaaguuggaaaaagcaaauauuaagaacacaagagucugaaugugucuguaugaacgggucauguuucaccauaaugaccgauggcccgaguaauaaagccgccucguacaaaauuuucaagaucgaaaaggggaagguuacuaaaucaauagaguugaaugcacccaauuuuuauuaugaggaaugcuccuguuacccagacacuggcauagugauguguguaugcagggacaacuggcaugguucaaaucgaccuugggugucuuuuaaucaaaauuuggauuaucaaauaggauacaucugcaguggaguguuuggugacaauccgcgucccgaagauggagagggcagcugcaauccagugacuguugauggagcaaacggaguaaaaggguuuucauacaaauaugguaaugguguuuggauaggaaggaccaaaaguaacagacuuagaaagggguuugagaugauuugggauccuaauggauggacaaauaccgacagugauuucucagugaaacaggauguuguagcaauaacugauuggucaggguacagcggaaguuucguccaacauccugaguugacaggauuggacuguauaagaccuugcuucuggguugaguuagucagagggcugccuagagaaaauacaacaaucugggcuagugggagcagcauuucuuuuuguggcguuaauagugauacugcaaacuggucuuggccagacggugcugaguugccguucaccauugacaaguag

SEQ ID NO: 51965 - RNA, 1413 nt, Artificial Sequence; identical to SEQ ID NO: 51949
  derived and/or modified CDS sequence (wt) from neuraminidase__InfluenzaA__ADN89339

SEQ ID NO: 51966 - RNA, 1413 nt, Artificial Sequence; identical to SEQ ID NO: 51955
  derived and/or modified CDS sequence (wt) from neuraminidase__InfluenzaA__ADN89350

SEQ ID NO: 51967 - RNA, 1413 nt, Artificial Sequence
  derived and/or modified CDS sequence (wt) from neuraminidase__InfluenzaA__ADN89361
augaacccaaaucaaaagauaauaaccauuggaucaaucaguauagcaaucggaauaauuagucuaauguugcaaauaggaaguauuauuucaauaugggcuagucacucaauccaaacuggaagucaaaacaacacuggaauaugcaaccaaagaaucaucacauaugaaaacagcaccugggugaaucacacauauguuaauauuaacaacacuaauguuguugcuggagaggacaaaacgucagugacauuggccggcaauucaucucuuuguucuaucaguggaugggcuauauacacaaaagacaacagcauaagaauuggcuccaaaggagauguuuuuaucauaagagaaccuuucauaucauguucucacuuggaaugcagaaccuuuuuucugacccaaggcgcucuauuaaaugacaaacauucaaaugggaccguaaaggacagaaguccuuauagggccuuaaugagcuguccucuaggugaagcuccguccccauacaauucaaaguucgaaucaguugcauggucagcaagcgcaugucaugauggcaugggcugguuaacaaucggaauuuccgguccagacaauggagcuguggcuguacuaaaauacaacggaauaauaacuggaaccauaaaaaguuggaaaaagcaaauauuaagaacacaagagucugaaugugucuguaugaacgggucauguuucaccauaaugaccgauggcccgaguaauaaagccgccucguacaaaauuuucaagaucgaaaaggggaagguuacuaaaucaauagaguugaaugcacccaauuuuuauuaugaggaaugcuccuguuacccagacacuggcauagugauguguguaugcagggacaacuggcaugguucaaaucgaccuugggugucuuuuaaucaaaauuuggauuaucaaauaggauacaucugcaguggaguguuuggugacaauccgcgucccgaagauggagagggcagcugcaauccagugacuguugauggagcaaacggaguaaaaggguuuucauacaaauaugguaaugguguuuggauaggaaggaccaaaaguaacagacuuagaaagggguuugagaugauuugggauccuaauggauggacaaauaccgacagugauuucucagugaaacaggauguuguagcaauaacugauuggucaggguacagcggaaguuucguccaacauccugaguugacaggauuggacuguauaagaccuugcuucuggguugaguuagucagagggcugccuagagaaaauacaacaaucuggacuagugggagcagcauuucuuuuuguggcguuaauagugauacugcaaacuggucuuggccagacggugcugaguugccguucaccauugacaaguag

SEQ ID NO: 51968 - RNA, 1413 nt, Artificial Sequence
  derived and/or modified CDS sequence (wt) from neuraminidase__InfluenzaA__ADN89372
augaacccaaaucaaaagauaauaaccauuggaucaaucaguauagcaaucggaauaauuagucuaauguugcaaauaggaaauauuauuucaauaugggcuagucacucaauccaaacuggaagucaaaacaacacuggaauaugcaaccaaagaaucaucacauaugaaaacagcaccugggugaaucacacauauguuaauauuaacaacacuaauauuguugcuggagaggacaaaacgucagugacauuggccggcaauucaucucuuuguucuaucaguggaugggcuauauacacaaaagacaacagcauaagaauuggcuccaaaggagauguuuuugucauaagagaaccuuucauaucauguucucacuuggaaugcagaaccuuuuuucugacccaaggcgcucuauuaaaugacaaacauucaaaugggaccguuaaggacagaaguccuuauagggccuuaaugagcuguccucuaggugaagcuccguccccauacaauucaaaguucgaaucaguugcauggucagcaagcgcaugccaugauggcaugggcugguugacaaucggaauuucugguccagacaauggagcuguggcuguacuaaaauacaacggaauaauaacuggaaccauaaaaaguuggaaaaagcaaauauuaagaacacaagagucugaaugugucuguaugaacgggucauguuucaccauaaugaccgauggcccgaguaauaaagccgccucguacaaaauuuucaagaucgaaaaggggaagguuacuaaaucaauagaguugaaugcacccaauuuuuauuacgaggaaugcuccuguuacccagacacuggcauagugauguguguaugcagggacaacuggcaugguucaaaucgaccuugggugucuuuuaaucaaaauuuggauuaucaaauaggauacaucugcaguggaguguuuggugacaauccgcgucccgaagauggagagggcagcugcaauccagugacuguuaauggagcagacggaguaaaaggguuuucauacaaauaugguaaugguguuuggauaggaaggaccaaaaguaacagacuuagaaagggguuugagaugauuugggauccuaauggauggacaaauaccgacagugauuucucagugaaacaggauguuguagcaauaacugauuggucaggguacagcggaaguuucguccaacauccugaguugacaggauuggacuguauaagaccuugcuucuggguugaguuagucagagggcugccuagagaaaauacaacaaucuggacuagugggagcagcauuucuuuuuguggcguuaauagugauacugcaaacuggucuuggccagacggugcugaguugccguucaccauugacaaguag

SEQ ID NO: 51969 - RNA, 1413 nt, Artificial Sequence; identical to SEQ ID NO: 51944
  derived and/or modified CDS sequence (wt) from neuraminidase__InfluenzaA__ADN89383

SEQ ID NO: 51970 - RNA, 1413 nt, Artificial Sequence
  derived and/or modified CDS sequence (wt) from neuraminidase__InfluenzaA__ADN89405
augaacccaaaucaaaagauaauaaccauuggaucaaucaguauagcaaucggaauaauuagucuaauguugcaaauaggaaguauuauuucaauaugggcuagucacucaauccaaacuggaagucaaaacaacacuggaauaugcaaccaaagaaucaucacauaugaaaacagcaccugggugaaucacacauauguuaauauuaacaacacuaauguuguugcuggagaggacaaaacgucagugacauuggccggcaauucaucucuuuguucuaccagugggugggcuauauacacaaaagacaacagcauaagaauuggcuccaaaggagauguuuuugucauaagagaaccuuucauaucauguucucacuuggaaugcagaaccuuuuuucugacccaaggcgcucuauuaaaugacaaacauucaaaugggaccguaaaggacagaaguccuuauagggccuuaaugagcuguccucuaggugaagcuccguccccauacaauucaaaguucgaaucaguugcauggucagcaagcgcaugccaugauggcaugggcugguuaacaaucggaauuucugguccggacaauggagcuguggcuguacuaaaauacaacggaauaauaacuggaaccauaaaaaguuggaaaaagcaaauauuaagaacacaagagucugaaugugucuguaugaacgggucauguuucaccauaaugaccgauggcccgaguaauaaagccgccucguacaaaauuuucaagaucgaaaaggggaagguuacuaaaucaauagaguugaaugcacccaauuuuuauuaugaggaaugcuccuguuacccagacacuggcauagugauguguguaugcagggacaacuggcaugguucaaaucgaccuugggugucuuuuaaucaaaauuuggauuaucaaauaggauacaucugcaguggaguguuuggugacaauccgcgucccgaagauggagagggcagcugcaauccagugacuguagauggagcaaacggaguaaaaggguuuucauacaaauaugguaaugguguuuggauaggaaggaccaaaaguaacagacuuagaaagggguuugagaugauuugggauccuaauggauggacaaauaccgacagugauuucucagugaaacaggauguuguagcaauaacugauuggucaggguacagcggaaguuucguccaacauccugaauugacaggauuggacuguauaagaccuugcuucuggguugaguuagucagagggcugccuagagaaaauacaacaaucuggacuagugggagcagcauuucuuuuuguggcguuaauagugauacugcaaacuggucuuggccagacggugcugaguugccguucaccauugacaaguag

SEQ ID NO: 51971 - RNA, 1413 nt, Artificial Sequence
  derived and/or modified CDS sequence (wt) from neuraminidase__InfluenzaA__ADN89416
augaacccaaaucaaaagauaauaaccauuggaucaaucaguauagcaaucggaauaauuagucuaauguugcaaauaggaaauauuauuucaauaugggcuagucacucaauccaaacugggagucaaaacaacacuggaauaugcaaccaaagaaucaucacauaugaaaacagcaccugggugaaucacacauauguuaauauuaacaacacuaauguuguugcuggagaggacaaaacaucagugacauuggccggcaauucaucucuuuguucuaucaguggaugggcuauauacacaaaagacaacagcauaagaauuggcuccaaaggagauguuuuugucauaagagaaccuuucauaucauguucucacuuggaaugcagaaccuuuuuucugacccaaggcgcucuauuaaaugacaaacauucaaaugggaccguaaaggacagaaguccuuauagggccuuaaugagcuguccucuaggugaagcuccguccccauacaauucaaaguucgaaucaguugcauggucagcaagcgcaugccaugauggcaugggcugguuaacaaucggaauuucugguccagacaauggagcuguggcuguacuaaaauacaacgggauaauaacuggaaccauaaaaaguuggaaaaagcaaauauuaagaacacaagagucugaaugugucuguaugaacgggucauguuucaccauaaugaccgauggcccgaguaauaaggccgccucguacaaaauuuucaagaucgaaaaggggaagguuacuaaaucaauagaguugaacgcacccaauuuuuauuaugaggaaugcuccuguuacccagauacuggcauagugauguguguaugcagggacaacuggcaugguucaaaucgaccuugggugucuuuuaaucaaaacuuggauuaucaaauaggauacaucugcaguggagugcuuggugacaauccgcgucccgaagauggagagggcagcugcaauccagugacuguugauggagcaaacggaguaaaaggguuuucauacaaauaugguaaugguguuuggauagggaggaccaaaaguaacagacuuagaaagggguuugagaugauuugggauccuaauggauggacaaauaccgacagugauuucucagugaaacaggauguuguagcaauaacugauuggucaggguacagcggaaguuucguccaacauccugaguuaacaggauuggacuguauaagaccuugcuucuggguugaguuagucagagggcugccuagagaaaauacaacaaucuggacuagugggagcagcauuucuuuuuguggcguuaauggugauacugcaaacuggucuuggccagacggugcugaguugccguucaccauugacaaguag

SEQ ID NO: 51972 - RNA, 1413 nt, Artificial Sequence
  derived and/or modified CDS sequence (wt) from neuraminidase__InfluenzaA__ADN89427
augaacccaaaucaaaagauaauaaccauuggaucaaucaguauagcaauuggaauaauuagucuaauguugcaaauaggaaguauuauuucaauaugggcuagucacucaauccaaacuggaagucaaaacaacacuggaauaugcaaccaaagaaucaucacauaugaaaacagcaccugggugaaucacacauauguuaauauuaacaacacuaauguuguugcuggagaggacaaaacgucagugacauuggccggcaauucaucucuuuguucuaucaguggaugggcuauauacacaaaagacaacagcauaagaauuggcuccaaaggagauguuuuugucauaagagaaccuuucauaucauguucucacuuggaaugcagaaccuuuuuucugacccaaggcgcucuauuaaaugacaaacauucaaaugggaccguaaaggacagaaguccuuauagggccuuaaugagcuguccucuaggugaagcuccguccccauacaauucaaaguucgaaucaguugcauggucagcaagcgcaugccaugauggcaugggcugguuaacaaucggaauuucugguccagacaauggagcuguggcuguacuaaaauacaacggaauaauaacuggaaccauaaaaaguuggaaaaagcaaauauuaagaacacaagagucugaaugugucuguaugaacgggucauguuucaccauaaugaccgauggcccgaguaauaaagccgccucguacaaaauuuucaagaucgaaaaggggaagguuacuaaaucaauagaguugaaugcacccaauuuuuauuaugaggaaugcuccuguuacccagacacuggcauagugauguguguaugcagggacaacuggcaugguucaaaucgaccuugggugucuuuuaaucaaaauuuggauuaucaaauaggauacaucugcaguggaguguuuggugacaauccgcgucccgaggauggagagggcagcugcaauccagugacuguugauggagcaaacggaguaaaaggguuuucauacaaauaugguaaugguguuuggauaggaaggaccaaaaguaacagacuuagaaagggguuugagaugauuugggauccuaauggauggacaaauaccgacagugauuucucagugaaacaggauguuguagcaauaacugauuggucaggguacagcggaaguuucguccaacauccugaguugacaggauuggacuguauaagaccuugcuucuggguugaguuagucagagggcugccuagagaaaauacaacaaucuggacuagcgggagcagcauuucuuuuuguggcguugauagugaugcugcagacuggucuuggccagacggugcugaguugccguucaccauugacaaguag

SEQ ID NO: 51973 - RNA, 1413 nt, Artificial Sequence; identical to SEQ ID NO: 51797
  derived and/or modified CDS sequence (wt) from neuraminidase__InfluenzaA__ADN89438

SEQ ID NO: 51974 - RNA, 1413 nt, Artificial Sequence
  derived and/or modified CDS sequence (wt) from neuraminidase__InfluenzaA__ADN89449
augaacccaaaucaaaagauaauaaccauuggaucaaucaguauagcaaucggaauaauuagucuaauguugcaaauaggaaauauuauuucaauaugggcuagucauucaauccaaacuggaagucaaaacaacacuggaauaugcaaccaaagaaucaucacauaugaaaacagcaccugggugaaucacacauauguuaauauuaacaacacuaauguuguugcuggagaggacaaaccaucagugacauuggccggcaauucaucucuuuguucuaucaguggaugggcuauauacacaaaagacaacagcauaagaauuggcuccaaaggagauguuuuugucauaagagaaccuuucauaucauguucucacuuggaaugcagaacauuuuuucugacccaaggcgcucuauuaaaugacaaacauucaaaugggaccguaaaggacagaaguccuuauagggccuuaaugagcuguccucuaggugaagcuccguccccauacaauucaaaguucgaaucaguugcauggucagcaagcgcaugccaugauggcaugggcugguuaacaaucggaauuucugguccagacaauggagcuguggcuguacuaaaauacaacggaauaauaacuggaaccauaaaaaguuggaaaaagcaaauauuaagaacacaagagucugaaugugucuguaugaacgggucauguuucaccauaaugaccgauggcccgaguaauaaggccgcuucauacaaaauuuucaagaucgaaaaggggaaggucacuaaaucaauagaguugaaugcacccaauuuuuauuaugaggaaugcuccuguuacccagauacuggcauagugauguguguaugcagggacaacuggcaugguucaaaucgaccuugggugucuuuuaaucaaaacuuggauuaucaaauaggauacaucugcaguggaguguuuggugacaauccgcgucccgaagauggagagggcagcugcaauccagugacuguugauggagcaaacggaguaaaaggguuuucauacaaauaugguaaugguguuuggauaggaaggaccaaaaguaacagacuuagaaagggguuugagaugauuugggauccuaauggauggacaaauaccgacagugauuucucagugaaacaggauguuguagcaauaacugauuggucaggguacagcggaaguuucguccaacauccugaguuaacaggauuggacuguauaagaccuugcuucuggguugaguuagucagagggcugccuagagaaaauacaacaaucuggacuagugggagcagcauuucuuuuuguggcguuaauagugauacugcaaacuggucuuggccagacggugcugaguugccguucaccauugacaaguag

SEQ ID NO: 51975 - RNA, 1413 nt, Artificial Sequence; identical to SEQ ID NO: 51950
  derived and/or modified CDS sequence (wt) from neuraminidase__InfluenzaA__ADN89460

SEQ ID NO: 51976 - RNA, 1413 nt, Artificial Sequence; identical to SEQ ID NO: 51941
  derived and/or modified CDS sequence (wt) from neuraminidase__InfluenzaA__ADN89482

SEQ ID NO: 51977 - RNA, 1413 nt, Artificial Sequence
  derived and/or modified CDS sequence (wt) from neuraminidase__InfluenzaA__ADN89493
augaacccaaaucaaaagauaauaaccauuggaucaaucaguauagcaaucggaauaauuagucuaauguugcaaauaggaaauauuauuucaauaugggcuagucacucaauccaaacugaaagucaaaacaacacuggaauaugcaaccaaagaaucaucacauaugaaaacagcaccugggugaaucacacauauguuaauauuaacaacacuaauguuguugcuggagaggacaaaacuucagugacauuggccggcaauucaucucuuuguucuaucaguggaugggcuauauacacaaaagacaacagcauaagaauuggcuccaaaggagauguuuuugucauaagagaaccuuucauaucauguucucacuuggaaugcagaaccuuuuuucugacccaaggcgcucuauuaaaugacaaacauucaaaugggaccguaaaggacagaaguccuuauagggccuuaaugagcuguccucuaggugaagcuccguccccauacaauucaaaguucgaaucaguugcauggucagcaagcgcaugccaugauggcaugggcugguuaacaaucggaauuucugguccagacaauggagcuguggcuguacuaaaauacaacggaauaauaacuggaaccauaaaaaguuggaaaaagcaaauauuaagaacacaagagucugaaugugucugcaugaacgggucauguuucacuauaaugaccgauggcccgaguaauaaggccgccucguacaaaauuuucaagaucgaaaaggggaagguuacuaaaucaauagaguugaaugcacccaauuuuuauuaugaggaaugcuccuguuacccagacacuggcauagugauguguguaugcagggacaacuggcaugguucaaaucgaccuugggugucuuuuaaucaaaacuuggauuaccaaaugggauacaucugcaguggaguguuuggugacaauccgcgucccgaagauggagagggcagcugcaauccagugacuguugauggagcaaacggaguaaaaggguuuucauacaaauaugguaaugguguuuggauaggaaggaccaaaaguaacagacuuagaaagggguuugagaugauuugggauccuaauggauggacaaauaccgacagugauuucucagugaaacaggauguuguagcaauaacugauuggucaggguacagcggaaguuucguccaacauccugaguuaacaggauuggacuguauaagaccuugcuucuggguugaguuggucagagggcugccuagagaaaauacaacaaucuggacuagugggagcagcauuucuuuuuguggcguuaauagugauacugcaaacuggucuuggccagacggugcugaguugccguucaccaucgacaaguag

SEQ ID NO: 51978 - RNA, 1413 nt, Artificial Sequence; identical to SEQ ID NO: 51419
  derived and/or modified CDS sequence (wt) from neuraminidase__InfluenzaA__ADN89504

SEQ ID NO: 51979 - RNA, 1413 nt, Artificial Sequence
  derived and/or modified CDS sequence (wt) from neuraminidase__InfluenzaA__ADN89515
augaacccaaaucaaaagauaauaaccauuggaucaaucaguauagcaaucggaauaauuagucuaauguugcaaauaggaaauauuauuucaauaugggcuagucacucaauccaaacugggagucaaaacaacacuggaauaugcaaccaaagaaucaucacauaugaaaacagcaccugggugaaucacacauauguuaauauuaacaacacuaauguuguugcuggagaggacaaaacaucagugacauuggccggcaauucaucucuuuguucuaucaguggaugggcuauauacacaaaagacaacagcauaagaauuggcuccaaaggagauguuuuugucauaagagaaccuuucauaucauguucucacuuggaaugcagaaccuuuuuucugacccaaggcgcucuauuaaaugacaaacauucaaaugggaccguaaaggacagaaguccuuauagggccuuaaugagcuguccucuaggcgaagcuccguccccauacaauucaaaguucgaaucaguugcauggucagcaagcgcaugccaugauggcaugggcugguuaacaaucggaauuucugguccagacaauggagcuguggcuguacuaaaauacaacggaauaauaacuggaaccauaaaaaguuggaaaaagcaaauauuaagaacacaagagucugaaugugucuguaugaacgggucauguuucaccauaaugaccgauggcccgaguaauaaggccgccucguacaaaauuuucaagaucgaaaaggggaagguuacuaaaucaauagaguugaaugcacccaauuuuuauuaugaggaaugcuccuguuacccagauacuggcauagugauguguguaugcagggacaacuggcaugguucaaaucgaccuugggugucuuuuaaucaaaacuuggauuaucaaauaggauacaucugcaguggaguguuuggugacaauccgcgucccgaagauggagagggcagcugcaauccaguaacuguugauggagcaaacggaguaaaaggguuuucauacaaauaugguaaugguguuuggauagggaggaccaaaaguaacagacuuagaaagggguuugagaugauuugggauccuaauggauggacaaauaccgacagugauuucacagugaaacaggauguuguagcaauaacugauuggucaggguacagcggaaguuucguccaacauccugaguuaacaggauuggacuguauaagaccuugcuucuggguugaguuagucagagggcugccuagagaaaauacaacaaucuggacuagugggagcagcauuucuuuuuguggcguuaauagugauacugcaaacuggucuuggccagacggugcugaguugccguucaccauugacaaguag

SEQ ID NO: 51980 - RNA, 1413 nt, Artificial Sequence
  derived and/or modified CDS sequence (wt) from neuraminidase__InfluenzaA__ADN89526
augaacccaaaucaaaagauaauaaccauuggaucaaucaguauagcaaucggaauaauuagucuaauguuacaaauaggaaauauuauuucaauaugggcuagucacucaauccaaacuggaagucaaaacaacacuggaauaugcaaccaaagaaucaucacauaugaaaacagcaccugggugaaucacacauauguuaauauuaacaacacuaauguuguugcuggagaggacaaaacuucagugacauuggccggcaauucaucucuuuguucuaucaguggaugggcuauauacacaaaagacaacagcauaagaauuggcuccaaaggagauguuuuugucauaagagaaccuuucauaucauguucucacuuggaaugcagaaccuuuuuucugacccaaggcgcucuauuaaaugacaaacauucaaaugggaccguaaaggacagaaguccuuauagggccuugaugagcuguccucuaggugaagcuccguccccauacaauucaaaguucgaaucaguugcauggucagcaagcgcaugccaugauggcaugggcugguuaacaaucggaauuucugguccagacaauggagcuguggcuguacuaaaauacaacggaauaauaacugggaccauaaaaaguuggaaaaagcaaauauuaagaacacaagagucugaaugugucuguaugaacgggucauguuucaccauaaugaccgauggcccgaguaauaaggccgccucguacaaaauuuucaagaucgaaaaggggaagguuacuaaaucaauagaguugaaugcacccaauuuuuauuaugaggaaugcuccuguuacccagacacuggcauagugauguguguaugcagggacaacuggcaugguucaaaucgaccuugggugucuuuuaaucaaaacuuggauuaucaaauaggauacaucugcaguggaguguuuggugacaauccgcgucccgaagauggagagggcagcugcaauccagugacuguugauggagcaaacggaguaaaaggguuuucauacaaauaugguaaugguguuuggauaggaaggaccaaaaguaacagacuuagaaagggguuugagaugauuugggauccuaauggauggacaaauaccgacagugauuucucagugaaacaggauguuguagcaauaacugauuggucaggguacagcggaaguuucguccaacauccugaguuaacaggauuggacuguauaagaccuugcuucuggguugaguuagucagagggcugccuagagaaaauacaacaaucuggacuagugggagcagcauuucuuuuuguggcguuaauagugauacugcaaacuggucuuggccagacggugcugaguugccguucaccaucgacaaguag

SEQ ID NO: 51981 - RNA, 1413 nt, Artificial Sequence; identical to SEQ ID NO: 51944
  derived and/or modified CDS sequence (wt) from neuraminidase__InfluenzaA__ADN89537

SEQ ID NO: 51982 - RNA, 1413 nt, Artificial Sequence; identical to SEQ ID NO: 51797
  derived and/or modified CDS sequence (wt) from neuraminidase__InfluenzaA__ADN89548

SEQ ID NO: 51983 - RNA, 1413 nt, Artificial Sequence; identical to SEQ ID NO: 51941
  derived and/or modified CDS sequence (wt) from neuraminidase__InfluenzaA__ADN89570

SEQ ID NO: 51984 - RNA, 1413 nt, Artificial Sequence
  derived and/or modified CDS sequence (wt) from neuraminidase__InfluenzaA__ADN89581
augaacccaaaucaaaagauaauaaccauuggaucaaucaguauagcaaucggaauaauuagucuaauguugcaaauaggaaauauuauuucaauaugggcuagucacucaauccaaacugggagucaaaacaacacuggaauaugcaaccaaagaaucaucacauaugaaaacagcaccugggugaaucacacauauguuaauauuaacaacacuaauguuguugcuggagaggacaaaacaucagugacauuggccggcaauucaucucuuuguucuaucaguggaugggcuauauacacaaaagacaacagcauaagaauuggcuccaaaggagauguuuuugucauaagagaaccuuucauaucauguucucacuuggaaugcagaaccuuuuuucugacccaaggcgcucuauuaaaugacaaacauucaaaugggaccguaaaggacagaaguccuuauagggccuuaaugagcuguccucuaggugaagcuccguccccauacaauucaaaguucgaaucaguugcauggucagcaagcgcaugccaugauggcaugggcugguuaacaaucggaauuucugguccagacaauggagcuguggcuguacuaaaauacaacgggauaauaacuggaaccauaaaaaguuggaaaaagcaaauauuaagaacacaagagucugaaugugucuguaugaacgggucauguuucaccauaaugaccgauggcccgaguaauaagaccgccucguacaaaauuuucaagaucgaaaaggggaagguuacuaaaucaauagaguugaacgcacccaauuuuuauuaugaggaaugcuccuguuacccagauacuggcauagugauguguguaugcagggacaacuggcaugguucaaaucgaccuugggugucuuuuaaucaaaacuuggauuaucaaauaggauacaucugcaguggaguguuuggugacaauccgcgucccgaagauggagagggcagcugcaauccagugacuguugauggagcaaacggaguaaaaggguuuucauacaaauaugguaaugguguuuggauagggaggaccaaaaguaacagacuuagaaagggguuugagaugauuugggauccuaauggauggacaaauaccgacagugauuucucagugaaacaggauguuguagcaauaacugauuggucaggguacagcggaaguuucguccaacauccugaguuaacaggguuggacuguauaagaccuugcuucuggguugaguuagucagagggcugccuagagaaaauacaacaaucuggacuagugggagcagcauuucuuuuuguggcguuaauggugauacugcaaacuggucuuggccagacggugcugaguugccguucaccauugacaaguag

SEQ ID NO: 51985 - RNA, 1413 nt, Artificial Sequence
  derived and/or modified CDS sequence (wt) from neuraminidase__InfluenzaA__ADN89592
augaacccaaaucaaaagauaauaaccauuggaucaaucaguauagcaaucggaauaauuagucuaauguugcaaauaggaaguauuauuucaauaugggcuagucacucaauccaaacuggaagucaaaacaacacuggaauaugcaaccaaagaaucaucacauaugaaaacagcaccugggugaaucacacauauguuaauauuaacaacacuaauguuguugcuggagaggacaaaacgucagugacauuggccggcaauucaucucuuuguucuaucaguggaugggcuauauacacaaaagacaacagcauaagaauuggcuccaaaggagauguuuuugucauaagagaaccuuucauaucauguucucacuuggaaugcagaaccuuuuuucugacccaaggcgcucuauuaaaugacaaacauucaaaugggaccguaaaggacagaaguccuuauagggccuuaaugagcuguccucuaggugaagcuccguccccauacaauucaaaguucgaaucaguugcauggucagcaagcgcaugccaugauggcaugggcugguuaacaaucggaauuucugguccagacaauggagcuguggcuguacuaaaauacaacggaauaauaacuggaaccauaaaaaguuggaaaaagcaaauauuaagaacacaagagucugaaugugucuguaugaacgggucauguuucaccauaaugaccgauggcccgaguaauaaagcagccucguacaaaauuuucaagaucgaaaaggggaagguuacuaaaucaauagaguugaaugcacccaauuuuuauuaugaggaaugcuccuguuacccagacacuggcauagugauguguguaugcagggacaacuggcaugguucaaaucgaccuugggugucuuuuaaucaaaauuuggauuaucaaauaggauacaucugcaguggaguguuuggugacaauccgcgucccgaagauggagagggcagcugcaauccagugacuguagauggagcaaacggaguaaaaggguuuucauacaaauaugguaaugguguuuggauaggaaggaccaaaaguaacagacuuagaaagggguuugagaugauuugggauccuaauggauggacaaauaccgacagugauuucucagugaaacaggauguuguagcaauaacugauuggucaggguacagcggaaguuucguccaacauccugaauugacaggauuggacuguauaagaccuugcuucuggguugaguuagucagagggcugccuagagaaaauacaacaaucuggacuagugggagcagcauuucuuuuuguggcguuaauagugauacugcaaacuggucuuggccagacggugcugaguugccguucaccauugacaaguag

SEQ ID NO: 51986 - RNA, 1413 nt, Artificial Sequence
  derived and/or modified CDS sequence (wt) from neuraminidase__InfluenzaA__ADN89603
augaacccaaaucaaaagauaauaaccauuggaucaaucaguauagcaaucggaauaauuagucuaauguugcaaauaggaaguauuauuucaauaugggcuagucacucaauccaaacuggaagucaaaacaacacuggaauaugcaaccaaagaaucaucacauaugaaaacagcaccugggugaaucacacauauguuaauauuaacaacacuaauguuguugcuggagaggacaaaacgucagugacauuggccggcaauucaucucuuuguucuaucaguggaugggcuauauacacaaaagacaacagcauaagaauuggcuccaaaggagauguuuuugucauaagagaaccuuucauaucauguucucacuuggaaugcagaaccuuuuuucugacccaaggcgcucuauuaaaugacaaacauucaaaugggaccguaaaggacagaaguccuuauagggccuuaaugagcuguccucuaggugaagcuccguccccauacaauucaaaguucgaaucaguugcauggucagcaagcgcaugccaugauggcaugggcugguuaacaaucggaauuucugguccagacaauggagcuguggcuguacuaaaauacaacggaauaauaacuggaaccauaaaaaguuggaaaaagcaaauauuaagaacacaagagucugaaugugucuguaugaacgggucauguuucaccauaaugaccgauggcccgaguaauaaagccgccucguacaaaauuuucaagaucgaaaaggggaagguuacuaaaucaauagaguugaaugcacccaauuuuuauuaugaggaaugcuccuguuacccagacacuggcauagugauguguguaugcagggacaacuggcaugguucaaaucgaccuugggugucuuuuaaucaaaauuuggauuaucaaauaggauacaucugcaguggaguguuuggugacaauccacgucccgaagauggagagggcagcugcaauccagugacuguagauggagcaaacggaguaaaaggguuuucauacaaauaugguaaugguguuuggauaggaaggaccaaaaguaacagacuuagaaagggguuugagaugauuugggauccuaauggauggacaaauaccgacagugauuucucagugaaacaggauguuguggcaauaacugauuggucaggguacagcggaaguuucguccaacauccugaauugacaggauuggacuguauaagaccuugcuucuggguugaguuagucagagggcuaccuagagaaaauacaacaaucuggacuagugggagcagcauuucuuuuuguggcguuaauagugauacugcaaacuggucuuggccagacggugcugaguugccguucaccauugacaaguag

SEQ ID NO: 51987 - RNA, 1413 nt, Artificial Sequence; identical to SEQ ID NO: 51952
  derived and/or modified CDS sequence (wt) from neuraminidase__InfluenzaA__ADN89614

SEQ ID NO: 51988 - RNA, 1413 nt, Artificial Sequence; identical to SEQ ID NO: 51971
  derived and/or modified CDS sequence (wt) from neuraminidase__InfluenzaA__ADN89625

SEQ ID NO: 51989 - RNA, 1413 nt, Artificial Sequence; identical to SEQ ID NO: 51797
  derived and/or modified CDS sequence (wt) from neuraminidase__InfluenzaA__ADN89636

SEQ ID NO: 51990 - RNA, 1413 nt, Artificial Sequence; identical to SEQ ID NO: 51419
  derived and/or modified CDS sequence (wt) from neuraminidase__InfluenzaA__ADN89647

SEQ ID NO: 51991 - RNA, 1413 nt, Artificial Sequence; identical to SEQ ID NO: 51797
  derived and/or modified CDS sequence (wt) from neuraminidase__InfluenzaA__ADN89658

SEQ ID NO: 51992 - RNA, 1413 nt, Artificial Sequence; identical to SEQ ID NO: 51985
  derived and/or modified CDS sequence (wt) from neuraminidase__InfluenzaA__ADN89669

SEQ ID NO: 51993 - RNA, 1413 nt, Artificial Sequence; identical to SEQ ID NO: 50947
  derived and/or modified CDS sequence (wt) from neuraminidase__InfluenzaA__ADN89680

SEQ ID NO: 51994 - RNA, 1413 nt, Artificial Sequence; identical to SEQ ID NO: 51958
  derived and/or modified CDS sequence (wt) from neuraminidase__InfluenzaA__ADN89691

SEQ ID NO: 51995 - RNA, 1413 nt, Artificial Sequence; identical to SEQ ID NO: 51971
  derived and/or modified CDS sequence (wt) from neuraminidase__InfluenzaA__ADN89702

SEQ ID NO: 51996 - RNA, 1413 nt, Artificial Sequence; identical to SEQ ID NO: 51941
  derived and/or modified CDS sequence (wt) from neuraminidase__InfluenzaA__ADN89713

SEQ ID NO: 51997 - RNA, 1413 nt, Artificial Sequence; identical to SEQ ID NO: 51419
  derived and/or modified CDS sequence (wt) from neuraminidase__InfluenzaA__ADN89724

SEQ ID NO: 51998 - RNA, 1413 nt, Artificial Sequence; identical to SEQ ID NO: 51941
  derived and/or modified CDS sequence (wt) from neuraminidase__InfluenzaA__ADN89735

SEQ ID NO: 51999 - RNA, 1413 nt, Artificial Sequence; identical to SEQ ID NO: 51941
  derived and/or modified CDS sequence (wt) from neuraminidase__InfluenzaA__ADN89746

SEQ ID NO: 52000 - RNA, 1413 nt, Artificial Sequence
  derived and/or modified CDS sequence (wt) from neuraminidase__InfluenzaA__ADN89757
augaacccaaaucaaaagauaauaaccauuggaucaaucaguauagcaaucggaauaauuagucuaauguugcaaauaggaaauauuauuucaauaugggcuagucacucaauccaaacugggagucaaaacaacacuggaauaugcaaccaaagaaucaucacauaugaaaacagcaccugggugaaucacacauauguuaauauuaacaacacuaauguuguugcuggagaggacaaaacgucagugacauuggccggcaauucaucucuuuguucuaucaguggaugggcuauauacacaaaagacaacagcauaagaauuggcuccaaaggagauguuuuugucauaagagaaccuuucauaucauguucucacuuggaaugcagaaccuuuuuucugacccaaggcgcucuauuaaaugacaaacauucaaaugggaccguaaaggacagaaguccuuauagggccuuaaugagcuguccucuaggugaagcuccguccccauacaauucaaaguucgaaucaguugcauggucagcaagcgcaugccaugauggcaugggcugguuaacaaucggaauuucugguccagacaauggagcuguggcuguacuaaaauacaacggaauaauaacuggaaccauaaaaaguuggaaaaagcaaauauuaagaacacaagagucugaaugugucuguaugaacgggucauguuucaccauaaugaccgauggcccgaguaauaaggccgccucguacaaaauuuucaagaucgaaaaggggaagguuacuaaaucaauagaguugaaugcacccaauuuuuauuaugaggaauguuccuguuacccagauacuggcauagugauguguguaugcagggacaacuggcaugguucaaaucgaccuugggugucuuuuaaucaaaacuuggauuaucaaauaggauacauuugcaguggaguguuuggugacaauccgcgucccgaagauggagagggcagcugcaauccagugacuguugauggagcaaacggaguaaaaggguuuucauacaaauaugguaaugguguuuggauagggaggaccaaaaguaacagacuuagaaagggguuugagaugauuugggauccuaauggauggacaaauaccgacagugauuuuucagugaaacaggauguuguagcaauaacugauuggucaggguacagcggaaguuucguccaacauccugaguuaacaggauuggacuguauaagaccuugcuucuggguugaguuagucagagggcugccuagagaaaauacaacaaucuggacuagugggagcagcauuucuuuuuguggcguuaauagugauacugcaaacuggucuuggccagacggugcugaguugccguucaccauugacaaguag

SEQ ID NO: 52001 - RNA, 1413 nt, Artificial Sequence; identical to SEQ ID NO: 51959
  derived and/or modified CDS sequence (wt) from neuraminidase__InfluenzaA__ADN89768

SEQ ID NO: 52002 - RNA, 1413 nt, Artificial Sequence
  derived and/or modified CDS sequence (wt) from neuraminidase__InfluenzaA__ADN89779
augaacccaaaucaaaagauaauaaccauuggaucaaucaguauagcaaucggaauaauuagucuaauguugcaaauaggaaauauuauuucaauaugggcuagucacucaauccaaacuggaagucaaaacaacacuggaauaugcaaccaaagaaucaucacauaugaaaacagcaccugggugaaucacacauauguuaauauuaacaacacuaauguuguugcuggagaggacaaaacuucagugacauuggccggcaauucaucucuuuguucuaucaguggaugggcuauauacacaaaagacaacagcauaagaauuggcuccaaaggagauguuuuugucauaagagaaccuuucauaucauguucucacuuggaaugcagaaccuuuuuucugacccaaggcgcucuauuaaaugacaaacauucaaaugggaccguaaaggacagaaguccuuauagggccuuaaugagcuguccucuaggugaagcuccguccccauacaauucaaaguucgaaucaguugcauggucagcaagcgcaugccaugauggcaugggcugguuaacaaucggaauuucugguccagacaauggagcuguggcuguacuaaaauacaacggaauaauaacuggaaccauaaaaaguuggaaaaagcaaauauuaagaacacaagagucugaaugugucuguaugaacgggucauguuucaccauaaugaccgauggcccgaguaauaaggccgccucguacaaaauuuucaagaucgaaaaggggaagguuacuaaaucaauagaguugaaugcacccaauuuuuauuaugaggaaugcuccuguuacccagacacuggcauagugauguguguaugcagggacaacuggcaugguucaaaucgaccuugggugucuuuuaaucaaaacuuggauuaucaaauaggauacaucugcaguggaguguuuggugacaauccgcgucccgaagauggagagggcagcugcaauccagugacuauugauggagcaaacggaguaaaaggguuuucauacaaauaugguaaugggguuuggauaggaaggaccaaaaguaacagacuuagaaagggguuugagaugauuugggauccuaauggauggacaaauaccgacagugauuucucagugaaacaggauguuguagcaauaacugauuggucaggguacagcggaaguuucguccaacauccugaguuaacaggauuggacuguauaagaccuugcuucuggguugaguuagucagagggcugccuagagaaaauacaacaaucuggacuagugggagcagcauuucuuuuuguggcguuaauagugauacugcaaacuggucuuggccagacggugcugaguugccguucaccaucgacaaguag

SEQ ID NO: 52003 - RNA, 1413 nt, Artificial Sequence; identical to SEQ ID NO: 50947
  derived and/or modified CDS sequence (wt) from neuraminidase__InfluenzaA__ADN89790

SEQ ID NO: 52004 - RNA, 1413 nt, Artificial Sequence
  derived and/or modified CDS sequence (wt) from neuraminidase__InfluenzaA__ADN89801
augaacccaaaucaaaagauaauaaccauuggaucaaucaguauagcaaucggaacaauuagucuaauguuacaaauaggaaauauuauuucaauaugggcuagucacucaauccaaacuggaagucaaaacaacacuggaauaugcaaccaaagaaucaucacauauaaaaacagcaccugggugaaucacacguauguuaauauuaacaacacuaauguuguugcuggagaggacaaaacuucagugacauuggccggcaauucaucucuuuguucuaucaguggaugggcuauauacacaaaagacaacagcauaagaauuggcuccaaaggagauguuuuugucauaagagaaccuuucauaucauguucucacuuggaaugcagaaccuuuuuucugacccaaggcgcucuauuaaaugacaaacauucaaaugggaccguaaaggacagaaguccuuauagggccuugaugagcuguccucuaggugaagcuccguccccauacaauucaaaguucgaaucaguugcauggucagcaagcgcaugccaugauggcaugggcugguuaacaaucggaauuucugguccagacaauggagcuguggcuguacuaaaauacaacggaauaauaacugggaccauaaaaaguuggaaaaagcaaauauuaagaacacaagagucugaaugugucuguaugaacgggucauguuucaccauaaugaccgauggcccgaguaauaaggccgccucguacaaaauuuucaagaucgaaaaggggaagguuacuaaaucaauagaguugaaugcacccaauuuuuauuaugaggaaugcuccuguuacccagacacuggcauagugauguguguaugcagggacaacuggcaugguucaaaucgaccuugggugucuuuuaaucaaaacuuggauuaucaaauaggauacaucugcaguggaguguuuggugacaauccgcgucccgaagauggagagggcagcugcaauccagugacuguugauggagcaaacggaguaaaaggguuuucauacaaauaugguaaugguguuuggauaggaaggaccaaaaguaacagacuuagaaagggguuugagaugauuugggauccuaauggauggacaaauaccgacagugauuucucagugaaacaggauguuguagcaauaacugauuggucaggguacagcggaaguuucguccaacauccugaguuaacaggauuggacuguauaagaccuugcuucuggguugaguuagucagagggcugccuagagaaaauacaacaaucuggacuagugggagcagcauuucuuuuuguggcguuaauagugauacugcaaacuggucuuggccagacggugcugaguugccguucaccaucgacaaguag

SEQ ID NO: 52005 - RNA, 1413 nt, Artificial Sequence
  derived and/or modified CDS sequence (wt) from neuraminidase__InfluenzaA__ADN89823
augaacccaaaucaaaagauaauaaccauuggaucaaucaguauagcaaucggaauaauuagucuaauguugcaaauaggaaguauuauuucaauaugggcuagucacucaauccauacuggaagucaaaacaacacuggaauaugcaaccaaagaaucaucacauaugaaaacagcaccugggugaaucacacauauguuaauauuaacaacacuaauguuguugcuggagaggacaaaacgucagugacauuggccggcaauucaucucuuuguucuaucaguggaugggcuauauacacaaaagacaacagcauaagaauuggcuccaaaggagauguuuuugucauaagagaaccuuucauaucauguucucacuuggaaugcagaaccuuuuuucugacccaaggcgcucuauuaaaugacaaacauucaaaugggaccguaaaggacagaaguccuuauagggccuuaaugagcuguccucuaggugaagcuccauccccauacaauucaaaguucgaaucaguugcauggucagcaagcgcaugccaugauggcaugggcugguuaacaaucggaauuucugguccagacaauggagcuguggcuguacuaaaauacaacggaauaauaacuggaaccauaaaaaguuggaaaaagcaaauauuaagaacacaagagucugaaugugucuguaugaacgggucauguuucaccauaaugaccgauggcccgaguaauaaagccgccucguacaaaauuuucaagaucgaaaaggggaagguuacuaaaucaauagaguugaaugcacccaauuuuuauuaugaggaaugcuccuguuacccagacacuggcauagugauguguguaugcagggacaacuggcaugguucaaaucgaccuugggugucuuuuaaucaaaauuuggauuaucaaauaggauacaucugcaguggaguguuuggugacaauccgcgucccgaagauggagagggcagcugcaauccagugacuguagauggagcaaacggaguaaaaggguuuucauacaaauaugguaaugguguuuggauaggaaggaccaaaaguaacagacuuagaaagggguuugagaugauuugggauccuaauggauggacaaauaccgacagugauuucucagugaaacaggauguuguagcaauaacugauuggucaggguacagcggaaguuucguccaacauccugaauugacaggauuggacuguauaagaccuugcuucuggguugaguuagucagagggcugccuagagaaaauacaacaaucuggacuagugggagcagcauuucuuuuuguggcguuaauagugauacugcaaacuggucuuggccagacggugcugaguugccguucacuauugacaaguag

SEQ ID NO: 52006 - RNA, 1413 nt, Artificial Sequence; identical to SEQ ID NO: 51950
  derived and/or modified CDS sequence (wt) from neuraminidase__InfluenzaA__ADN89834

SEQ ID NO: 52007 - RNA, 1413 nt, Artificial Sequence
  derived and/or modified CDS sequence (wt) from neuraminidase__InfluenzaA__ADN89845
augaacccaaaucaaaagauaauaaccauuggaucaaucaguauagcaaucggaauaauuagucuaauguugcaaauaggaaauauuauuucaauaugggcuagucacucaauccaaacuggaagucaaaacaacacuggaauaugcaaccaaagaaucaucacauaugaaaacagcaccugggugaaucacacauauguuaauauuaacaacacuaauguuguugcuggagaggacaaaacgucagugacauuggccggcaauucaucucuuuguucuaucaguggaugggcuauauacacaaaagacaacagcauaagaauuggcuccaaaggagauguuuuugucauaagagaaccuuucauaucauguucucacuuggaaugcagaaccuuuuuucugacccaaggcgcucuauuaaaugacaaacauucaaaugggaccguaaaggacagaaguccuuauagggccuuaaugagcuguccucuaggugaagcuccguccccauacaauucaaaguucgaaucaguugcauggucagcaagcgcaugccaugauggcaugggcugguuaacaaucggaauuucugguccagacaauggagcuguggcuguacuaaaauacaacggaauaauaacuggaaccauaaaaaguuggaaaaagcaaauauuaagaacacaagagucugaaugugucuguaugaacgggucauguuucaccauaaugaccgauggcccgaguaauaaagccgccucguacaaaauuuucaagaucgaaaaagggaagguuacuaaaucaauagaguugaaugcacccaauuuuuauuaugaggaaugcuccuguuacccagacacuggcauagugauguguguaugcagggacaacuggcaugguucaaaucgaccuugggugucuuuuaaucaaaauuuagauuaucaaauaggauacaucugcaguggaguguuuggugacaauccgcgucccgaagauggagagggcagcugcaauccagugacuguugauggagcaaacggaguaaaaggguuuucauacaaauaugguaaugguguuuggauaggaaggaccaaaaguaacagacuuagaaagggguuugagaugauuugggauccuaauggauggacaaauaccgacagugauuucucagugaaacaggauguuguaucaauaacugauuggucaggguacagcggaaguuucguccaacauccugaguugacaggauuggacuguauaagaccuugcuucuggguugaguuagucagagggcugccuagagaaaauacaacaaucuggacuagugggagcagcauuucuuuuugugguguuaauagugauacugcaaacuggucuuggccagacggugcugaguugccguucaccauugacaaguag

SEQ ID NO: 52008 - RNA, 1413 nt, Artificial Sequence; identical to SEQ ID NO: 51980
  derived and/or modified CDS sequence (wt) from neuraminidase__InfluenzaA__ADN89856

SEQ ID NO: 52009 - RNA, 1410 nt, Artificial Sequence; identical to SEQ ID NO: 51422
  derived and/or modified CDS sequence (wt) from neuraminidase__InfluenzaA__ADN89867

SEQ ID NO: 52010 - RNA, 1410 nt, Artificial Sequence; identical to SEQ ID NO: 51422
  derived and/or modified CDS sequence (wt) from neuraminidase__InfluenzaA__ADN89878

SEQ ID NO: 52011 - RNA, 1410 nt, Artificial Sequence; identical to SEQ ID NO: 51422
  derived and/or modified CDS sequence (wt) from neuraminidase__InfluenzaA__ADN89889

SEQ ID NO: 52012 - RNA, 1410 nt, Artificial Sequence; identical to SEQ ID NO: 51422
  derived and/or modified CDS sequence (wt) from neuraminidase__InfluenzaA__ADN89900

SEQ ID NO: 52013 - RNA, 1410 nt, Artificial Sequence; identical to SEQ ID NO: 51422
  derived and/or modified CDS sequence (wt) from neuraminidase__InfluenzaA__ADN89911

SEQ ID NO: 52014 - RNA, 1410 nt, Artificial Sequence
  derived and/or modified CDS sequence (wt) from neuraminidase__InfluenzaA__ADN89922
augaauccaaaucaaaagauaauaacgauuggcucuguuucucucaccauuuccacaauaugcuucuucaugcaaauugccaucuugauaacuacuguaacauugcauuucaagcaauauaaauucaacucccccccaaacaaccaagugaugcugugugaaccaacaauaauagaaagaaacauaacagagauaguguaucugaccaacaccaccauagagaaggaaauaugccccaaacuagcagaauacagaaauuggucaaaaccgcaaugugacauuacgggauuugcaccuuuuucuaaggacaauucgauuaggcuuuccgcugguggggacaucugggugacaagagaaccuuaugugucaugcgauccugacaaguguuaucaauuugcccuuggacagggaacaacacuaaacaacgugcauucaaauaacacaguacgugauaggaccccuuaucggacccuauugaugaaugaguuagguguuccuuuucaucuggggaccaagcaagugugcauagcaugguccagcucgaguugucacgauggaaaagcauggcugcauguuuguauaacgggggaugauaaaaaugcaacugcuagcuucauuuacaaugggaggcuuguagauaguguuguuucaugguccaaagaaauucucaggacccaggagucagaaugcguuuguaucaauggaacuuguacaguaguaaugacugauggaagugcuucaggaaaagcugauacuaaaauacuauucauugaggaggggaaaauuguucauacuagcacauugucaggaagugcucagcaugucgaggagugcucuugcuauccucgauauccuggugucagaugugucugcagagacaacuggaaaggcuccaauaggcccaucguagauauaaacauaaaggaucauagcauuguuuccaguuauguguguucaggacuuguuggagacacacccagaaaaaacgacagcuccagcaguagccauuguuuggauccuaacaaugaagaagguggucauggagugaaaggcugggccuuugaugauggaaaugacguguggaugggaagaacaaucaacgagacgucacgcuuaggguaugaaaccuucaaagucauugaaggcugguccaacccuaaguccaaauugcagauaaauaggcaagucauaguugacagagguaauagguccgguuauucugguauuuucucuguugaaggcaaaagcugcaucaaucggugcuuuuauguggaguugauuaggggaagaaaagaggaaacugaagucuuguggaccucaaacaguauuguuguguuuuguggcaccucagguacauauggaacaggcucauggccugauggggcggaccucaauaucaugccuauauaa

SEQ ID NO: 52015 - RNA, 1410 nt, Artificial Sequence; identical to SEQ ID NO: 51422
  derived and/or modified CDS sequence (wt) from neuraminidase__InfluenzaA__ADN89933

SEQ ID NO: 52016 - RNA, 1410 nt, Artificial Sequence; identical to SEQ ID NO: 51422
  derived and/or modified CDS sequence (wt) from neuraminidase__InfluenzaA__ADN89955

SEQ ID NO: 52017 - RNA, 1410 nt, Artificial Sequence; identical to SEQ ID NO: 51422
  derived and/or modified CDS sequence (wt) from neuraminidase__InfluenzaA__ADN89966

SEQ ID NO: 52018 - RNA, 1410 nt, Artificial Sequence; identical to SEQ ID NO: 51422
  derived and/or modified CDS sequence (wt) from neuraminidase__InfluenzaA__ADN89977

SEQ ID NO: 52019 - RNA, 1410 nt, Artificial Sequence; identical to SEQ ID NO: 51422
  derived and/or modified CDS sequence (wt) from neuraminidase__InfluenzaA__ADN89988

SEQ ID NO: 52020 - RNA, 1410 nt, Artificial Sequence; identical to SEQ ID NO: 51422
  derived and/or modified CDS sequence (wt) from neuraminidase__InfluenzaA__ADN89999

SEQ ID NO: 52021 - RNA, 1410 nt, Artificial Sequence; identical to SEQ ID NO: 51422
  derived and/or modified CDS sequence (wt) from neuraminidase__InfluenzaA__ADN90010

SEQ ID NO: 52022 - RNA, 1410 nt, Artificial Sequence
  derived and/or modified CDS sequence (wt) from neuraminidase__InfluenzaA__ADN90021
augaauccaaaucaaaagauaauaacgauuggcucuguuucucucaccauuuccacaauaugcuucuucaugcaaauugccaucuugauaacuacuguaacauugcauuucaagcaauauaaauucaacucccccccaaacaaccaagugaugcugugugaaccaacaauaauagaaagaaacauaacagagauaguguaucugaccaacaccaccauagagaaggaaauaugccccaaacuagcagaauacagaaauuggucaaaaccgcaaugugacauuacgggauuugcaccuuuuucuaaggacaauucgauuaggcuuuccgcugguggggacaucugggugacaagagaaccuuaugugucaugcgauccugacaaguguuaucaauuugcccuuggacagggaacaacacuaaacaacgugcauucaaauaacacaguacgugauaggaccccuuaucggacccuauugaugaaugaguuagguguuccuuuucaucuggggaccaagcaagugugcauagcaugguccagcucgaguugucacgauggaaaagcauggcugcauguuuguauaacgggggaugauaaaaaugcaacugcuagcuucauuuacaaugggaggcuuguagauaguguuguuucaugguccaaagaaauucucaggacccaggagucagaaugcguuuguaucaauggaacuuguacaguaguaaugacugauggaagugcuucaggaaaagcugauacuaaaauacuauucauugaggaggggaaaauuguucauacuagcaccuugucaggaagugcucagcaugucgaggagugcucuugcuauccucgauauccuggugucagaugugucugcagagacaacuggaaaggcuccaauaggcccaucguagauauaaacauaaaggaucauagcauuguuuccaguuauguguguucaggacuuguuggagacacacccagaaaaaacgacagcuccagcaguagccauuguuuggauccuaacaaugaagaagguggucauggagugaaaggcugggccuuugaugauggaaaugacguguggaugggaagaacaaucaacgagacgucacgcuuaggguaugaaaccuucaaagucauugaaggcugguccaacccuaaguccaaauugcagauaaauaggcaagucauaguugacagagguaauagguccgguuauucugguauuuucucuguugaaggcaaaagcugcaucaaucggugcuuuuauguggaguugauuaggggaagaaaagaggaaacugaagucuuguggaccucaaacaguauuguuguguuuuguggcaccucagguacauauggaacaggcucauggccugauggggcggaccucaaucucaugccuauauaa

SEQ ID NO: 52023 - RNA, 1410 nt, Artificial Sequence; identical to SEQ ID NO: 51422
  derived and/or modified CDS sequence (wt) from neuraminidase__InfluenzaA__ADN90032

SEQ ID NO: 52024 - RNA, 1410 nt, Artificial Sequence; identical to SEQ ID NO: 51422
  derived and/or modified CDS sequence (wt) from neuraminidase__InfluenzaA__ADN90043

SEQ ID NO: 52025 - RNA, 1410 nt, Artificial Sequence; identical to SEQ ID NO: 51422
  derived and/or modified CDS sequence (wt) from neuraminidase__InfluenzaA__ADN90054

SEQ ID NO: 52026 - RNA, 1410 nt, Artificial Sequence; identical to SEQ ID NO: 51422
  derived and/or modified CDS sequence (wt) from neuraminidase__InfluenzaA__ADN90065

SEQ ID NO: 52027 - RNA, 1410 nt, Artificial Sequence; identical to SEQ ID NO: 51422
  derived and/or modified CDS sequence (wt) from neuraminidase__InfluenzaA__ADN90076

SEQ ID NO: 52028 - RNA, 1410 nt, Artificial Sequence; identical to SEQ ID NO: 51422
  derived and/or modified CDS sequence (wt) from neuraminidase__InfluenzaA__ADN90087

SEQ ID NO: 52029 - RNA, 1410 nt, Artificial Sequence; identical to SEQ ID NO: 51422
  derived and/or modified CDS sequence (wt) from neuraminidase__InfluenzaA__ADN90098

SEQ ID NO: 52030 - RNA, 1410 nt, Artificial Sequence; identical to SEQ ID NO: 51422
  derived and/or modified CDS sequence (wt) from neuraminidase__InfluenzaA__ADN90109

SEQ ID NO: 52031 - RNA, 1410 nt, Artificial Sequence; identical to SEQ ID NO: 51422
  derived and/or modified CDS sequence (wt) from neuraminidase__InfluenzaA__ADN90120

SEQ ID NO: 52032 - RNA, 1410 nt, Artificial Sequence; identical to SEQ ID NO: 51422
  derived and/or modified CDS sequence (wt) from neuraminidase__InfluenzaA__ADN90131

SEQ ID NO: 52033 - RNA, 1410 nt, Artificial Sequence; identical to SEQ ID NO: 51422
  derived and/or modified CDS sequence (wt) from neuraminidase__InfluenzaA__ADN90142

SEQ ID NO: 52034 - RNA, 1410 nt, Artificial Sequence; identical to SEQ ID NO: 51422
  derived and/or modified CDS sequence (wt) from neuraminidase__InfluenzaA__ADN90153

SEQ ID NO: 52035 - RNA, 1410 nt, Artificial Sequence; identical to SEQ ID NO: 51422
  derived and/or modified CDS sequence (wt) from neuraminidase__InfluenzaA__ADN90164

SEQ ID NO: 52036 - RNA, 1410 nt, Artificial Sequence; identical to SEQ ID NO: 51422
  derived and/or modified CDS sequence (wt) from neuraminidase__InfluenzaA__ADN90186

SEQ ID NO: 52037 - RNA, 1410 nt, Artificial Sequence; identical to SEQ ID NO: 51422
  derived and/or modified CDS sequence (wt) from neuraminidase__InfluenzaA__ADN90197

SEQ ID NO: 52038 - RNA, 1410 nt, Artificial Sequence
  derived and/or modified CDS sequence (wt) from neuraminidase__InfluenzaA__ADN90208
augaauccaaaucaaaagauaauaacgauuggcucuguuucucucaccauuuccacaauaugcuucuucaugcaaauugccaucuugauaacuacuguaacauugcauuucaagcaauauaaauucaacucccccccaaacaaccaagugaugcugugugaaccaacaauaauagaaagaaacauaacagagauaguguaucugaccaacaccaccauagagaaggaaauaugccccaaacuagcagaauacagaaauuggucaaaaccgcaaugugacauuacgggauuugcaccuuuuucuaaggacaauucgauuaggcuuuccgcugguggggacaucugggugacaagagaaccuuaugugucaugcgauccugacaaguguuaucaauuugcccuuggacagggaacaacacuaaacaacgugcauucaaauaacacaguacgugauaggaccccuuaucggacccuauugaugaaugaguuagguguuccuuuucaucuggggaccaagcaagugugcauagcaugguccagcucgaguugucacgauggaaaagcauggcugcauguuuguauaacgggggaugauaaaaaugcaacugcuagcuucauuuacaaugggaggcuuguagauaguguuguuucaugguccaaagaaauucucaggacccaggagucagaaugcguuuguaucaauggaacuuguacaguaguaaugacugauggaagugcuucaggaaaagcugauacuaaaauacuauucauugaggaggggaaaauuguucauacuagcacauugucaggaagugcucagcaugucgaggagugcucuugcuauccucgauauccuggugucagaugugucugcagagacaacuggaaaggcuccaauaggcccaucguagauauaaacauaaaggaucauagcauuguuuccaguuauguguguucaggacuuguuggagacacacccagaaaaaacgacagcuccagcaguagccauuguuuggauccuaacaaugaagaagguggucauggagugaaaggcugggccuuugaugauggaaaugacguguggaugggaagaacaaucaacgagacgucacgcuuaggguaugaaaccuucaaagucauugaaggcugguccaacccuaaguccaaauugcagauaaauaggcaagucauaguugacagaaguaauagguccgguuauucugguauuuucucuguugaaggcaaaagcugcaucaaucggugcuuuuauguggaguugauuaggggaagaaaagaggaaacugaagucuuguggaccucaaacaguauuguuguguuuuguggcaccucagguacauauggaacaggcucauggccugauggggcggaccucaaucucaugccuauauaa

SEQ ID NO: 52039 - RNA, 1410 nt, Artificial Sequence; identical to SEQ ID NO: 51422
  derived and/or modified CDS sequence (wt) from neuraminidase__InfluenzaA__ADN90219

SEQ ID NO: 52040 - RNA, 1410 nt, Artificial Sequence
  derived and/or modified CDS sequence (wt) from neuraminidase__InfluenzaA__ADN92469
augaauccaaaucaaaagauaauaacgauuggcucuguuucucucaccauuuccacaauaugcuucuucaugcaaauugccaucuuaauaacuacuguaacauugcauuucaagcaauaugaauucaacucccccccaaacaaccaagugaugcugugugaaccaacaauaauagaaagaaacauaacagagauaguguaucugaccaacaccaccauagagaaagaaauaugccccaaacuagcagaauacagaaauuggucaaagccgcaaugugacauuacaggguuugcaccuuuuucuaaggacaauucgauuaggcuuuccgcugguggggacaucugggugacaagagaaccuuaugugucaugcgauccugacaaauguuaucaauuugcccuuggacagggaacaacacuaaacaacguacauucaaauaacacaguacgugauaggaccccuuaucggacccuauugaugaaugaguuagguguuccuuuucaucuggggaccaagcaagugugcauagcaugguccagcucaaguugucacgauggaaaagcauggcugcauguuuguauaacgggggaugauaaaaaugcaacugcuagcuucauuuacaaugggaggcuuguagauaguguuguuucaugguccaaagaaauccucaggacccaggagucagaaugcguuuguaucaauggaacuuguacaguaguaaugacugaugggagugcuucagaaaaagcugauacuaaaauacuauucauugaggaggggaaaaucguucauacuagcacauugucaggaagugcccagcaugucgaggagugcuccugcuauccucgauauccuggugucagaugugucugcagagacaacuggaaaggauccaauaggcccaucguagauauaaacauaaaggaucauagcauugucuccaguuauguguguucaggacuuguuggagacacacccagaaaaaacgacagcuccagcaguagccauuguuuggauccuaauaaugaggaagguggucauggggugaaaggcugggccuuugaugauggaaaugacguguggaugggaagaacgaucagcgagaagucacgcuuaggguaugaaaccuucaaagucauugaaggaugguccaacccuaaguccaaauugcagauaaauaggcaagucauaguugacagagguaauagguccgguuauucugguauuuucucuguugaaggcaaaagcugcaucaaucggugcuuuuauguggaguugauaaggggaagaaaagaggaaacugaagucuuguggaccucaaacaguauuguuguguuuuguggcaccucagguacauauggaacaggcucauggccugauggggcggacaucaaucucaugccuauauaa

SEQ ID NO: 52041 - RNA, 1410 nt, Artificial Sequence
  derived and/or modified CDS sequence (wt) from neuraminidase__InfluenzaA__ADN92480
augaauccaaaucaaaagauaauaacgauuggcucuguuucucucaccauuuccacaauaugcuucuucaugcaaauugccaucuugauaacuacuguaacauugcauuucaagcaauaugaauucaacucccccccaaacaaccaagugaugcugugugaaccaacaauaauagaaagaaacauaacagagauaguguaucugaccaacaccaccauagagaaggaaauaugccccaaacuagcagaauacagaaauuggucaaagccgcaaugugacauuacaggguuugcaccuuuuucuaaggacaauucgauuaggcuuuccgcugguggggacaucugggugacacgagaaccuuaugugucaugcgauccugacaaguguuaucaauuugcccuuggacagggaacaacacuaaacaacguacauucaaauaacacaguacgugauaggaccccuuaucggacccuauugaugaaugaguuagguguuccuuuucaucuggggaccaagcaagugugcauagcaugguccagcucaaguugucacgauggaaaagcauggcugcauguuuguauaacgggggaugauaaaaaugcaacugcuagcuucauuuacaaugggaggcuuguagauaguguuguuucaugguccaaagaaauccucaggacccaggagucagaaugcguuuguaucaauggaacuuguacaguaguaaugacugaugggagugcuucaggaaaagcugauacuaaaauacuauucauugaggaggggaaaaucguucauacuagcacauugucaggaagugcucagcaugucgaggagugcuccugcuauccucgauauccuggugucagaugugucugcagagacaacuggaaaggauccaauaggcccaucguagauauaaacauaaaggaucauagcauugucuccaguuauguguguucaggacuuguuggagacacacccagaaaaaacgacagcuccagcaguagccauuguuuggauccuaacaaugaggaagguggucauggggugaaaggcugggccuuugaugauggaaaugacguguggaugggaagaacgaucagcgagaagucacgcuuaggguaugaaaccuucaaagucauugaaggaugguccaauccuaaguccaaauugcagauaaauaggcaagucauaguugacagagguaauagguccgguuauucugguauuuucucuguugaaggcaaaagcugcaucaaucggugcuuuuauguggaguugauaaggggaagaaaagaggaaaaugaagucuuguggaccucaaacaguauuguuguguuuuguggcaccucagguacauauggaacaggcucauggccugauggggcggacaucaaucucaugccuauauaa

SEQ ID NO: 52042 - RNA, 1410 nt, Artificial Sequence; identical to SEQ ID NO: 52041
  derived and/or modified CDS sequence (wt) from neuraminidase__InfluenzaA__ADN92491

SEQ ID NO: 52043 - RNA, 1410 nt, Artificial Sequence
  derived and/or modified CDS sequence (wt) from neuraminidase__InfluenzaA__ADN92502
augaauccaaaucaaaagauaauaacgauuggcucuguuucucucaccauuuccacaauaugcuucuucaugcaaauugccaucuugauaacuacuguaacauugcauuucaagcaauaugaauucaacucccccccaaacaaccaagugaugcugugugaaccaacaauaauagaaagaaacauaacagagauaguguaucugaccaacaccaccauagagaaggaaauaugccccaaacuagcagaauacagaaauuggucaaagccgcaaugugacauuacaggguuugcaccuuuuucuaaggacaauucgauuaggcuuuccgcugguggggacaucugggugacacgagaaccuuaugugucaugcgauccugacaaguguuaucaauuugcccuuggacagggaacaacacuaaacaacguacauucaaauaacacaguacgugauaggaccccuuaucggacccuauugaugaaugaguuagguguuccuuuucaucuggggaccaagcaagugugcauagcaugguccaguucaaguugucacgauggaaaagcauggcugcauguuuguauaacgggggaugauaaaaaugcaacugcuagcuucauuuacaaugggaggcuuguagauaguguuguuucaugguccaaagaaauccucaggacccaggagucagaaugcguuuguaucaauggaacuuguacaguaguaaugacugaugggagugcuucaggaaaagcugauacuaaaauacuauucauugaggaggggaaaaucguucauacuagcacauugucaggaagugcucagcaugucgaggagugcuccugcuauccucgauauccuggugucagaugugucugcagagacaacuggaaaggauccaauaggcccaucguagauauaaacauaaaggaucauagcauugucuccaguuauguguguucaggacuuguuggagacacacccagaaaaaacgacagcuccagcaguagccauuguuuggauccuaacaaugaggaaggugguaauggggugaaaggcugggccuuugaugauggaaaugauguguggaugggaagaacgaucagcgagaagucacgcuuaggguaugaaaccuucaaagucauugaaggaugguccaauccuaaguccaaauugcagauaaauaggcaagucauaguugacagagguaauagguccgguuauucugguauuuucucuguugaaggcaaaagcugcaucaaucggugcuuuuauguggaguugauaaggggaagaaaagaggaaaaugaagucuuguggaccucaaacaguauuguuguguuuuguggcaccucagguacauauggaacaggcucauggccugauggggcggacaucaaucucaugccuauauaa

SEQ ID NO: 52044 - RNA, 1410 nt, Artificial Sequence; identical to SEQ ID NO: 48750
  derived and/or modified CDS sequence (wt) from neuraminidase__InfluenzaA__ADN92512

SEQ ID NO: 52045 - RNA, 1410 nt, Artificial Sequence
  derived and/or modified CDS sequence (wt) from neuraminidase__InfluenzaA__ADN92522
augaauccaaaccaaaagauaauaaccauugguucggucuguaugacaauuggaauggcuaacuuaauauuacaaauuggaaacauaaucucaauauggauuagccacucaauucaacuugggaaucaaaaucagauugaaacaugcaaucaaagcgucauuacuuaugaaaacaacacuuggguaaaucagacauauguuaacaucagcaacaccaacuuugcugcuggacagucagugguuuccgugaaauuagcgggcaauuccucucucugcccuguuaguggaugggcuauauacaguaaagacaacaguauaagaaucgguuccaagggggauguguuugucauaagggaaccauucauaucaugcucccccuuggaaugcagaaccuucuucuugacucaaggggccuugcuaaaugacaaacauuccaauggaaccauuaaagacaggagcccauaucgaacccuaaugagcuguccuauuggugaaguucccucuccauacaacucaagauuugagucagucgcuuggucagcaagugcuugucaugauggcaucaauuggcuaacaauuggaauuucuggcccagacaauggggcaguggcuguguuaaaguacaacggcauaauaacagacacuaucaagaguuggagaaacaauauauugagaacacaagagucugaaugugcauguguaaaugguucuugcuuuacuguaaugaccgauggaccaagugauggacaggccucauacaagaucuucagaauagaaaagggaaagauagucaaaucagucgaaaugaaugccccuaauuaucacuaugaggaaugcuccuguuauccugauucuagugaaaucacaugugugugcagggauaauuggcauggcucgaaucgaccgugggugucuuucaaccagaaucuggaauaucagauaggauacauaugcagugggauuuucggagacaauccacgcccuaaugauaagacaggcaguugugguccaguaucgucuaauggagcaaauggaguaaaaggauuuucauucaaauacggcaaugguguuuggauagggagaacuaaaagcauuaguucaagaaacgguuuugagaugauuugggauccgaacggauggacugggacagacaauaacuucucaauaaagcaagauaucguaggaauaaaugaguggucaggauauagcgggaguuuuguucagcauccagaacuaacagggcuggauuguauaagaccuugcuucuggguugaacuaaucagagggcgacccaaagagaacacaaucuggacuagcgggagcagcauauccuuuugugguguaaacagugacacuguggguuggucuuggccagacggugcugaguugccauuuaccauugacaaguaa

SEQ ID NO: 52046 - RNA, 1410 nt, Artificial Sequence; identical to SEQ ID NO: 48750
  derived and/or modified CDS sequence (wt) from neuraminidase__InfluenzaA__ADN92532

SEQ ID NO: 52047 - RNA, 1410 nt, Artificial Sequence; identical to SEQ ID NO: 48750
  derived and/or modified CDS sequence (wt) from neuraminidase__InfluenzaA__ADN92542

SEQ ID NO: 52048 - RNA, 1410 nt, Artificial Sequence; identical to SEQ ID NO: 52045
  derived and/or modified CDS sequence (wt) from neuraminidase__InfluenzaA__ADN92552

SEQ ID NO: 52049 - RNA, 1410 nt, Artificial Sequence
  derived and/or modified CDS sequence (wt) from neuraminidase__InfluenzaA__ADO00733
augaauccaaaccaaaagauaauaaccauugguucggucuguaugacaauuggaauggcuaacuuaauauuacaaauuggaaacauaaucucaauauggauuagccacucaauucaacuugggaaucaaaaucagauugaaacaugcaaucaaagcgucauuacuuaugaaaacaacacuuggguaaaucagacauauguuaacaucagcaacaccaacuuugcugcuggacagucagugguuuccgugaaauuagcgggcaauuccucucucugcccuguuaguggaugggcuauauacaguaaagacaacaguauaagaaucgguuccaagggggauguguuugucauaagggaaccauucauaucaugcucccccuuggaaugcagaaccuucuucuugacucaaggggccuugcuaaaugacaaacauuccaauggaaccauuaaagacaggagcccauaucgaacccuaaugagcuguccuauuggugaaguucccucuccauacaacucaagauuugagucagucgcuuggucagcaagugcuugucaugauggcaucaauuggcuaacaauuggaauuucuggcccagacaauggggcaguggcuguguuaaaguacaacggcauaauaacagacacuaucaaaaguuggagaaacaauauauugagaacacaagagucugaaugugcauguguaaaugguucuugcuuuacuguaaugaccgauggaccaagugauggacaggccucauacaagaucuucagaauagaaaagggaaagauagucaaaucagucgaaaugaaugccccuaauuaucacuaugaggaaugcuccuguuauccugauucuagugaaaucacaugugugugcagggauaacuggcauggcucgaaucgaccgugggugucuuucaaccagaaucuggaauaucagauaggauacauaugcagugggauuuucggagacaauccacgcccuaaugauaagacaggcaguugugguccaguaucgucuaauggagcaaauggaguaaaaggauuuucauucaaauacggcaaugguguuuggauagggagaacuaaaagcauuaguucaagaaacgguuuugagaugauuugggauccgaacggauggacugggacagacaauaacuucucaauaaagcaagauaucguaggaauaaaugaguggucaggauauagcgggaguuuuguucagcauccagaacuaacagggcuggauuguauaagaccuugcuucuggguugaacuaaucagagggcgacccaaagagaacacaaucuggacuagcgggagcagcauauccuuuugugguguaaacagugacacuguggguuggucuuggccagacggugcugaguugccauuuaccauugacaaguaa

SEQ ID NO: 52050 - RNA, 1410 nt, Artificial Sequence
  derived and/or modified CDS sequence (wt) from neuraminidase__InfluenzaA__ADO00743
augaauccaaaccaaaagauaauaaccauugguucggucuguaugacaauuggaauggcuaacuuaauauuacaaauuggaaacauaaucucaauauggauuagccacucaauucaacuugggaaucaaaaucagauugaaacaugcaaucaaagcgucauuacuuaugaaaacaacacguggguaaaucagacauauguuaacaucagcaacaccaacuuugcugcuggacagucagugguuuccgcgaaauuagcgggcaauuccucucucugcccuguuaguggaugggcuauauacaguaaagacaacaguauaagaaucgguuccaagggggauguguuugucauaagggaaccauucauaucaugcucccccuuggaaugcagaaccuucuucuugacucaaggggccuugcuaaaugacaaacauuccaauggaaccauuaaagacaggagcccauaucgaacccuaaugagcuguccuauuggugaaguucccucuccauacaacucaagauuugagucagucgcuuggucagcaagugcuugucaugauggcaucaauuggcuaacaauuggaauuucuggcccagacaauggggcaguggcuguguuaaaguacaacggcauaauaacagacacuaucaagaguuggagaaacaauauauugagaacacaagagucugaaugugcauguguaaaugguucuugcuuuacuguaaugaccgauggaccaagugauggacaggccucauacaagaucuucagaauagaaaagggaaagauagucaaaucagucgaaaugaaugccccuaauuaucacuaugaggaaugcuccuguuauccugauucuagugaaaucacaugugugugcagggauaacuggcauggcucgaaucgaccguggguaucuuucaaccagaaucuggaauaucagauaggauacauaugcagugggauuuucggagacaauccacgcccuaaugauaagacaggcaguugugguccaguaucgucuaauggagcaaauggaguaaaaggauuuucauucaaauacggcaaugguguuuggauagggagaacuaaaagcauuaguucaagaaacgguuuugagaugauuugggauccgaacggauggacugggacagacaauaacuucucaauaaggcaagauaucguaggaauaaaugaguggucaggauauagcgggaguuuuguucagcauccagaacuaacagggcuggauuguauaagaccuugcuucuggguugaacuaaucagagggcgacccaaagagaacacaaucuggacuagcgggagcagcauauccuuuugugguguaaacagugacacuguggguuggucuuggccggacggugcugaguugccauuuaccauugacaaguaa

SEQ ID NO: 52051 - RNA, 1410 nt, Artificial Sequence; identical to SEQ ID NO: 49927
  derived and/or modified CDS sequence (wt) from neuraminidase__InfluenzaA__ADO00753

SEQ ID NO: 52052 - RNA, 1410 nt, Artificial Sequence; identical to SEQ ID NO: 48750
  derived and/or modified CDS sequence (wt) from neuraminidase__InfluenzaA__ADO12146

SEQ ID NO: 52053 - RNA, 1410 nt, Artificial Sequence; identical to SEQ ID NO: 48750
  derived and/or modified CDS sequence (wt) from neuraminidase__InfluenzaA__ADO12156

SEQ ID NO: 52054 - RNA, 1410 nt, Artificial Sequence; identical to SEQ ID NO: 48750
  derived and/or modified CDS sequence (wt) from neuraminidase__InfluenzaA__ADO12166

SEQ ID NO: 52055 - RNA, 1410 nt, Artificial Sequence; identical to SEQ ID NO: 48750
  derived and/or modified CDS sequence (wt) from neuraminidase__InfluenzaA__ADO12176

SEQ ID NO: 52056 - RNA, 1410 nt, Artificial Sequence; identical to SEQ ID NO: 48750
  derived and/or modified CDS sequence (wt) from neuraminidase__InfluenzaA__ADO12186

SEQ ID NO: 52057 - RNA, 1410 nt, Artificial Sequence; identical to SEQ ID NO: 48750
  derived and/or modified CDS sequence (wt) from neuraminidase__InfluenzaA__ADO12196

SEQ ID NO: 52058 - RNA, 1410 nt, Artificial Sequence; identical to SEQ ID NO: 48750
  derived and/or modified CDS sequence (wt) from neuraminidase__InfluenzaA__ADO12206

SEQ ID NO: 52059 - RNA, 1410 nt, Artificial Sequence; identical to SEQ ID NO: 48750
  derived and/or modified CDS sequence (wt) from neuraminidase__InfluenzaA__ADO12216

SEQ ID NO: 52060 - RNA, 1410 nt, Artificial Sequence; identical to SEQ ID NO: 48750
  derived and/or modified CDS sequence (wt) from neuraminidase__InfluenzaA__ADO12226

SEQ ID NO: 52061 - RNA, 1410 nt, Artificial Sequence
  derived and/or modified CDS sequence (wt) from neuraminidase__InfluenzaA__ADO12246
augaauccaaaccaaaagauaauaaccauugguucggucuguaugacaauuggaauggcuaacuuaauauuacaaauuggaaacauaaucucaauauggauuagccacucaauucaacuugggaaucaaaaucagauugaaacaugcaaucaaagcgucauuacuuaugaaaacaacacuuggguaaaucagacauauguuaacaucagcaacaccaacuuugcugcuggacagucagugguuuccgugaaauuagcgggcaauuccucucucugcccuguuaguggaugggcuauauacaguaaagacaacaguauaagaaucgguuccaagggggauguguuugucauaagggaaccauucauaucaugcucccccuuggaaugcagaaccuucuucuugacucaaggggccuugcuaaaugacaaacauuccaauggaaccauuaaagacaggagcccauaucgaacccuaaugagcuguccuauuggugaaguucccucuccauacaacucaagauuugagucagucgcuuggucagcaagugcuugucaugauggcaucaauuggcuaacaauuggaauuucuggcccagacaauggggcaguggcuguguuaaaguacaacggcauaauaacagacacuaucaagaguuggagaaacaauauauugagaacacaagagucugaaugugcauguguaaaugguucuugcuuuacuguaaugaccgauggaccaagugauggacaggccucauacaagaucuucagaauagaaaagggaaagauagucaaaucagucgaaaugaaugccccuaauuaucacuaugaggaaugcuccuguuauccugauucuagugaaaucacaugugugugcagggauaacuggcauggcucgaaucgaccgugggugucuuucaaccagaaucuggaauaucagauaggauacauaugcagugggauuuucggagacaauccacgcccuaaugauaagacaggcaguugugguccaguaucgucuaauggagcaaauggaguaaaaggauuuucauucaaauacggcaaugguguuuggauagggagaacuaaaagcauuaguucaagaaacgguuuugagaugauuugggauccgaacggauggacugggacagacaacaacuucucaauaaagcaagauaucguaggaauaaaugaguggucaggauauagcgggaguuuuguucagcauccagaacuaacagggcuggauuguauaagaccuugcuucuggguugaacuaaucagagggcgacccaaagagaacacaaucuggacuagcgggagcagcauauccuuuugugguguaaacagugacacuguggguuggucuuggccagacggugcugaguugccauuuaccauugacaaguaa

SEQ ID NO: 52062 - RNA, 1410 nt, Artificial Sequence; identical to SEQ ID NO: 48750
  derived and/or modified CDS sequence (wt) from neuraminidase__InfluenzaA__ADO12266

SEQ ID NO: 52063 - RNA, 1410 nt, Artificial Sequence
  derived and/or modified CDS sequence (wt) from neuraminidase__InfluenzaA__ADO12276
augaauccaaaccaaaagauaauaaccauugguucggucuguaugacaauuggaauggcuaacuuaauauuacaaauuggaaacauaaucucaauauggauuagccacucaauucaacuugggaaucaaaaucagauugaaacaugcaaucaaagcgucauuacuuaugaaaacaacacuuggguaaaucagacauauguuaacaucagcaacaccaacuuugcugcuggacagucagugguuuccgugaaauuagcgggcaauuccucucucugcccuguuaguggaugggcuauauacaguaaagacaacaguauaagaaucgguuccaagggggauguguuugucauaagggaaccauucauaucaugcucccccuuggaaugcagaaccuucuucuugacucaaggggccuugcuaaaugacaaacauuccaauggaaccauuaaagacaggagcccauaucgaacccuaaugagcuguccuauuggugaaguucccucuccauacaacucaagauuugagucagucgcuuggucagcaagugcuugucaugauggcaucaauuggcuaacaauuggaauuucuggcccagacaauggggcaguggcuguguuaaaguacaacggcauaauaacagacacuaucaagaguuggagaaacaauauauugagaacacaagagucugaaugugcauguguaaaugguucuugcuuuacuguaaugaccgauggaccaagugauggacaggccucauacaagaucuucagaauagaaaagggaaagauagucaaaucagucgaaaugaaugccccuaauuaucacuaugaggaaugcuccuguuauccugauucuagugaaaucacaugugugugcagggauaacuggcauggcucgaaucgaccgugggugucuuucaaccagaaucuggaauaucagauaggauacauaugcagugggauuuucggagacaauccacgcccuaaugauaagucaggcaguugugguccaguaucgucuaauggagcaaauggaguaaaaggauuuucauucaaauacggcaaugguguuuggauagggagaacuaaaagcauuaguucaagaaacgguuuugagaugauuugggauccgaacggauggacugggacagacaauaacuucucaauaaagcaagauaucguaggaauaaaugaguggucaggauauagcgggaguuuuguucagcauccagaacuaacagggcuggauuguauaagaccuugcuucuggguugaacuaaucagagggcgacccaaagagaacacaaucuggacuagcgggagcagcauauccuuuugugguguaaacagugacacuguggguuggucuuggccagacggugcugaguugccauuuaccauugacaaguaa

SEQ ID NO: 52064 - RNA, 1410 nt, Artificial Sequence; identical to SEQ ID NO: 48750
  derived and/or modified CDS sequence (wt) from neuraminidase__InfluenzaA__ADO12286

SEQ ID NO: 52065 - RNA, 1410 nt, Artificial Sequence; identical to SEQ ID NO: 48750
  derived and/or modified CDS sequence (wt) from neuraminidase__InfluenzaA__ADO12296

SEQ ID NO: 52066 - RNA, 1410 nt, Artificial Sequence; identical to SEQ ID NO: 48750
  derived and/or modified CDS sequence (wt) from neuraminidase__InfluenzaA__ADO12306

SEQ ID NO: 52067 - RNA, 1410 nt, Artificial Sequence
  derived and/or modified CDS sequence (wt) from neuraminidase__InfluenzaA__ADO12316
augaauccaaaccaaaagauaauaaccauugguucggucuguaugacaauuggaauggcuaacuuaauauuacaaauuggaaacauaaucucaauauggauuagccacucaauucaacuugggaaucaaaaucagauugaaacaugcaaucaaagcgucauuacuuaugaaaacaacacuuggguaaaucagacauauguuaacaucagcaacaccaacuuugcugcuggacagucagugguuuccgugaaauuagcgggcaauuccucucucugcccuguuaguggaugggcuauauacaguaaagacaacaguauaagaaucgguuccaagggggauguguuugucauaagggaaccauucauaucaugcucccccuuggaaugcagaaccuucuucuugacucaaggggccuugcuaaaugacaaacauuccaauggaaccauuaaagacaggagcccauaucgaacucuaaugagcuguccuauuggugaaguucccucuccauacaacucaagauuugagucagucgcuuggucagcaagugcuugucaugauggcaucaauuggcuaacaauuggaauuucuggcccagacaauggggcaguggcuguguuaaaguacaacggcauaauaacagacacuaucaagaguuggagaaacaauauauugagaacacaagagucugaaugugcauguguaaaugguucuugcuuuacuguaaugaccgauggaccaagugauggacaggccucauacaagaucuucagaauagaaaagggaaagauagucaaaucagucgaaaugaaugccccuaauuaucacuaugaggaaugcuccuguuauccugauucuagugaaaucacaugugugugcagggauaacuggcauggcucgaaucgaccgugggugucuuucaaccagaaucuggaauaucagauaggauacauaugcagugggauuuucggagacaauccacgcccuaaugauaagacaggcaguugugguccaguaucgucuaauggagcaaauggaguaaaaggauuuucauucaaauacggcgaugguguuuggauagggagaacuaaaagcauuaguucaagaaacgguuuugagaugauuugggauccgaacggauggacugggacagacaauaacuucucaauaaagcaagauaucguaggaauaaaugaguggucaggauauagcgggaguuuuguucagcauccagaacuaacagggcuggauuguauaagaccuugcuucuggguugaacuaaucagagggcgacccaaagagaacacaaucuggacuagcgggagcagcauauccuuuugugguguaaacagugacacuguggguuggucuuggccagacggugcugaguugccauuuaccauugacaaguaa

SEQ ID NO: 52068 - RNA, 1410 nt, Artificial Sequence; identical to SEQ ID NO: 52061
  derived and/or modified CDS sequence (wt) from neuraminidase__InfluenzaA__ADO12326

SEQ ID NO: 52069 - RNA, 1410 nt, Artificial Sequence; identical to SEQ ID NO: 48750
  derived and/or modified CDS sequence (wt) from neuraminidase__InfluenzaA__ADO12336

SEQ ID NO: 52070 - RNA, 1410 nt, Artificial Sequence; identical to SEQ ID NO: 48750
  derived and/or modified CDS sequence (wt) from neuraminidase__InfluenzaA__ADO12346

SEQ ID NO: 52071 - RNA, 1410 nt, Artificial Sequence; identical to SEQ ID NO: 48750
  derived and/or modified CDS sequence (wt) from neuraminidase__InfluenzaA__ADO12356

SEQ ID NO: 52072 - RNA, 1410 nt, Artificial Sequence; identical to SEQ ID NO: 48750
  derived and/or modified CDS sequence (wt) from neuraminidase__InfluenzaA__ADO12366

SEQ ID NO: 52073 - RNA, 1410 nt, Artificial Sequence; identical to SEQ ID NO: 52061
  derived and/or modified CDS sequence (wt) from neuraminidase__InfluenzaA__ADO12376

SEQ ID NO: 52074 - RNA, 1410 nt, Artificial Sequence; identical to SEQ ID NO: 48750
  derived and/or modified CDS sequence (wt) from neuraminidase__InfluenzaA__ADO12386

SEQ ID NO: 52075 - RNA, 1410 nt, Artificial Sequence; identical to SEQ ID NO: 48750
  derived and/or modified CDS sequence (wt) from neuraminidase__InfluenzaA__ADO12396

SEQ ID NO: 52076 - RNA, 1410 nt, Artificial Sequence; identical to SEQ ID NO: 48750
  derived and/or modified CDS sequence (wt) from neuraminidase__InfluenzaA__ADO12406

SEQ ID NO: 52077 - RNA, 1410 nt, Artificial Sequence
  derived and/or modified CDS sequence (wt) from neuraminidase__InfluenzaA__ADO12416
augaauccaaaccaaaagauaauaaccauugguucggucuguauuacaauuggaauggcuaacuuaauauuacaaauuggaaacauaaucucaauauggauuagccacucaauucaacuugggaaucaaaaucagauugaaacaugcaaucaaagcgucauuacuuaugaaaacaacacuuggguaaaucagacauauguuaacaucagcaacaccaacuuugcugcuggacagucagugguuuccgugaaauuagcgggcaauuccucucucugcccuguuaguggaugggcuauauacaguaaagacaacaguauaagaaucgguuccaagggggauguguuugucauaagggaaccauucauaucaugcucccccuuggaaugcagaaccuucuucuugacucaaggggccuugcuaaaugacaaacauuccaauggaaccauuaaagacaggagcccauaucgaacccuaaugagcuguccuauuggugaaguucccucuccauacaacucaagauuugagucagucgcuuggucagcaagugcuugucaugauggcaucaauuggcuaacaauuggaauuucuggcccagacaauggggcaguggcuguguuaaaguacaacggcauaauaacagacacuaucaagaguuggagaaacaauauauugagaacacaagagucugaaugugcauguguaaaugguucuugcuuuacuguaaugaccgauggaccaagugauggacaggccucauacaagaucuucagaauagaaaagggaaagauagucaaaucagucgaaaugaaugccccuaauuaucacuaugaggaaugcuccuguuauccugauucuagugaaaucacaugugugugcagggauaacuggcauggcucgaaucgaccgugggugucuuucaaccagaaucuggaauaucagauaggauacauaugcagugggauuuucggagacaauccacgcccuaaugauaagacgggcaguugugguccaguaucgucuaauggagcaaauggaguaaaaggauuuucauucaaauacggcaaugguguuuggauagggagaacuaaaagcauuaguucaagaaacgguuuugagaugauuugggauccgaacggauggacugggacagacaauaacuucucaauaaagcaagauaucguaggaauaaaugaguggucaggauauagcgggaguuuuguucagcauccagaacuaacagggcuggauuguauaagaccuugcuucuggguugaacuaaucagagggcgacccaaagagaacacaaucuggaccagcgggagcagcauauccuuuugugguguaaacagugacacuguggguuggucuuggccagacggugcugaguugccauuuaccauugacaaguaa

SEQ ID NO: 52078 - RNA, 1410 nt, Artificial Sequence; identical to SEQ ID NO: 48750
  derived and/or modified CDS sequence (wt) from neuraminidase__InfluenzaA__ADO12426

SEQ ID NO: 52079 - RNA, 1410 nt, Artificial Sequence; identical to SEQ ID NO: 48750
  derived and/or modified CDS sequence (wt) from neuraminidase__InfluenzaA__ADO12436

SEQ ID NO: 52080 - RNA, 1410 nt, Artificial Sequence; identical to SEQ ID NO: 48750
  derived and/or modified CDS sequence (wt) from neuraminidase__InfluenzaA__ADO12446

SEQ ID NO: 52081 - RNA, 1410 nt, Artificial Sequence; identical to SEQ ID NO: 48750
  derived and/or modified CDS sequence (wt) from neuraminidase__InfluenzaA__ADO12456

SEQ ID NO: 52082 - RNA, 1410 nt, Artificial Sequence; identical to SEQ ID NO: 48750
  derived and/or modified CDS sequence (wt) from neuraminidase__InfluenzaA__ADO12466

SEQ ID NO: 52083 - RNA, 1410 nt, Artificial Sequence
  derived and/or modified CDS sequence (wt) from neuraminidase__InfluenzaA__ADO12476
augaauccaaaccaaaagauaauaaccauugguucggucuguaugacaauuggaauggcuaacuuaauauuacaaauuggaaacauaaucucaauauggauuagccacucaauucaacuugggaaucaaaaucagauugaaacaugcaaucaaagcgucauuacuuaugaaaacaacacuuggguaaaucagacauauguuaacaucagcaacaccaacuuugcugcuggacagucagugguuuccgugaaauuagcgggcaauuccucucucugcccuguuaguggaugggcuauauacaguaaagacaacaguauaagaaucgguuccaagggggauguguuugucauaagggaaccauucauaucaugcucccccuuggaaugcagaaccuucuucuugacucaaggggccuugcuaaaugacaaacauuccaauggaaccauuaaagacaggagcccauaucgaacccuaaugagcuguccuauuggugaaguucccucuccauacaacucaagauuugagucagucgcuuggucagcaagugcuugucaugauggcaucaauuggcuaacaauuggaauuucuggcccagacaauggggcaguggcuguguuaaaguacaacggcauaauaacagacacuaucaagaguuggagaaacaauauauugagaacacaagagucugaaugugcauguguaaaugguucuugcuuuacuguaaugaccgauggaccaagugauggacaggccucauacaagaucuucagaauagaaaagggaaagauagucaaaucagucgaaaugaaugccccuaauuaucacuaugaggaaugcuccuguuauccugauucuagugaaauaacaugugugugcagggauaacuggcauggcucgaaucgaccgugggugucuuucaaccagaaucuggaauaucagauaggauacauaugcagugggauuuucggagacaauccacgcccuaaugauaagacaggcaguugugguccaguaucgucuaauggagcaaauggaguaaaaggauuuucauucaaauacggcaaugguguuuggauagggagaacuaaaagcauuaguucaagaaacgguuuugagaugauuugggauccgaacggauggacugggacagacaauaacuucucaauaaagcaagauaucguaggaauaaaugaguggucaggauauagcgggaguuuuguucagcauccagaacuaacagggcuggauuguauaagaccuugcuucuggguugaacuaaucagagggcgacccaaagagaacacaaucuggacuagcgggagcagcauauccuuuugugguguaaacagugacacuguggguuggucuuggccagacggugcugaguugccauuuaccauugacaaguaa

SEQ ID NO: 52084 - RNA, 1410 nt, Artificial Sequence; identical to SEQ ID NO: 49943
  derived and/or modified CDS sequence (wt) from neuraminidase__InfluenzaA__ADO12486

SEQ ID NO: 52085 - RNA, 1410 nt, Artificial Sequence; identical to SEQ ID NO: 48750
  derived and/or modified CDS sequence (wt) from neuraminidase__InfluenzaA__ADO12496

SEQ ID NO: 52086 - RNA, 1410 nt, Artificial Sequence
  derived and/or modified CDS sequence (wt) from neuraminidase__InfluenzaA__ADO12506
augaauccaaaccaaaagauaauaaccauugguucggucuguaugacaauuggaauggcuaacuugauauuacaaauuggaaacauaaucucaauauggauuagccacucaauucaacuugggaaucaaaaucagauugaaacaugcaaucaaagcgucauuacuuaugaaaacaacacuuggguaaaucagacauauguuaacaucagcaacaccaacuuugcugcuggacagucagugguuuccgugaaauuagcgggcaauuccucucucugcccuguuaguggaugggcuauauacaguaaagacaacaguauaagaaucgguuccaagggggauguguuugucauaagggaaccauucauaucaugcucccccuuggaaugcagaaccuucuucuugacucaaggggccuugcuaaaugacaaacauuccaauggaaccauuaaagacaggagcccauaucgaacccuaaugagcuguccuauuggugaaguucccucuccauacaacucaagauuugagucagucgcuuggucagcaagugcuugucaugauggcaucaauuggcuaacaauuggaauuucuggcccagacaauggggcaguggcuguguuaaaguacaacggcauaauaacagacacuaucaagaguuggagaaacaauauauugagaacacaagagucugaaugugcauguguaaaugguucuugcuuuacuguaaugaccgauggaccaagugauggacaggccucauacaagaucuucagaauagaaaagggaaagauagucaaaucagucgaaaugaaugccccuaauuaucacuaugaggaaugcuccuguuauccugauucuagugaaaucacaugugugugcagggauaacuggcauggcucgaaucgaccgugggugucuuucaaccagaaucuggaauaucagauaggauacauaugcagugggauuuucggagacaauccacgcccuaaugauaagacaggcaguugugguccaguaucgucuaauggagcaaauggaguaaaaggauuuucauucaaauacggcaaugguguuuggauagggagaacuaaaagcauuaguucaagaaacgguuuugagaugauuugggauccgaacggauggacugggacagacaauaacuucucaauaaagcaagauaucguaggaauaaaugaguggucaggauauagcgggaguuuuguucagcauccagaacuaacagggcuggauuguauaagaccuugcuucuggguugaacuaaucagagggcgacccaaagagaacacaaucuggacuagcgggagcagcauauccuuuugugguguaaacagugacacuguggguuggucuuggccagacggugcugaguugccauuuaccauugacaaguaa

SEQ ID NO: 52087 - RNA, 1410 nt, Artificial Sequence
  derived and/or modified CDS sequence (wt) from neuraminidase__InfluenzaA__ADO12516
augaauccaaaccaaaagauaauaaccauugguucggucuguaugacaauuggaauggcuaacuuaauauuacaaauuggaaacauaaucucaauauggauuagccacucaauucaacuugggaaucaaaaucagauugaaacaugcaaucaaagcgucauuacuuaugaaaacaacacuuggguaaaucagacauauguuaacaucagcaauaccaacuuugcugcuggacagucagugguuuccgugaaauuagcgggcaauuccucucucugcccuguuaguggaugggcuauauacaguaaagacaacaguauaagaaucgguuccaagggggauguguuugucauaagggaaccauucauaucaugcucccccuuggaaugcagaaccuucuucuugacucaaggggccuugcuaaaugacaaacauuccaauggaaccauuaaagacaggagcccauaucgaacccuaaugagcuguccuauuggugaaguucccucuccauacaacucaagauuugagucagucgcuuggucagcaagugcuugucaugauggcaucaauuggcuaacaauuggaauuucuggcccagacaauggggcaguggcuguguuaaaguacaacggcauaauaacagacacuaucaagaguuggagaaacaauauauugagaacacaagagucugaaugugcauguguaaaugguucuugcuuuacuguaaugaccgauggaccaagugauggacaggccucauacaagaucuucagaauagaaaagggaaagauagucaaaucagucgaaaugaaugccccuaauuaucacuaugaggaaugcuccuguuauccugauucuagugaaaucacaugugugugcagggauaacuggcauggcucgaaucgaccgugggugucuuucaaccagaaucuggaauaucagauaggauacauaugcagugggauuuucggagacaauccacgcccuaaugauaagacaggcaguugugguccaguaucgucuaauggagcaaauggaguaaaaggauuuucauucaaauacggcaaugguguuuggauagggagaacuaaaagcauuaguucaagaaacgguuuugagaugauuugggauccgaacggauggacugggacagacaauaacuucucaauaaagcaagauaucguaggaauaaaugaguggucaggauauagcgggaguuuuguucagcauccagaacuaacagggcuggauuguauaagaccuugcuucuggguugaacuaaucagagggcgacccaaagagaacacaaucuggacuagcgggagcagcauauccuuuugugguguaaacagugacacuguggguuggucuuggccagacggugcugaguugccauuuaccauugacaaguaa

SEQ ID NO: 52088 - RNA, 1410 nt, Artificial Sequence; identical to SEQ ID NO: 48750
  derived and/or modified CDS sequence (wt) from neuraminidase__InfluenzaA__ADO12526

SEQ ID NO: 52089 - RNA, 1410 nt, Artificial Sequence; identical to SEQ ID NO: 49943
  derived and/or modified CDS sequence (wt) from neuraminidase__InfluenzaA__ADO12536

SEQ ID NO: 52090 - RNA, 1410 nt, Artificial Sequence; identical to SEQ ID NO: 48750
  derived and/or modified CDS sequence (wt) from neuraminidase__InfluenzaA__ADO12546

SEQ ID NO: 52091 - RNA, 1410 nt, Artificial Sequence; identical to SEQ ID NO: 48750
  derived and/or modified CDS sequence (wt) from neuraminidase__InfluenzaA__ADO12556

SEQ ID NO: 52092 - RNA, 1410 nt, Artificial Sequence; identical to SEQ ID NO: 48750
  derived and/or modified CDS sequence (wt) from neuraminidase__InfluenzaA__ADO12566

SEQ ID NO: 52093 - RNA, 1410 nt, Artificial Sequence
  derived and/or modified CDS sequence (wt) from neuraminidase__InfluenzaA__ADO12576
augaauccaaaccaaaagauaauaaccauugguucggucuguaugacaauuggaauggcuaacuuaauauuacaaauuggaaacauaaucucaauauggauuagccacucaauucaacuugggaaucaaaaucagauugaaacaugcaaucaaagcgucauuacuuaugaaaacaacacuuggguaaaucagacauauguuaacaucagcaacaccaacuuugcugcuggacagucagugguuuccgugaaauuagcgggcaauuccucucucugcccuguuaguggaugggcuauauacaguaaagacaacaguauaagaaucgguuccaagggggauguguuugucauaagggaaccauucauaucaugcucacccuuggaaugcagaaccuucuucuugacucaaggggccuugcuaaaugauaaacauuccaauggaaccauuaaagacaggagcccauaucgaacccuaaugagcuguccuauuggugaaguucccucuccauacaacucaagauuugagucagucgcuuggucagcaagugcuugucaugauggcaucaauuggcuaacaauuggaauuucuggcccagacaauggggcaguggcuguguuaaaguacaacggcauaauaacagacacuaucaagaguuggagaaacaauauauugagaacacaagagucugaaugugcauguguaaaugguucuugcuuuacuguaaugaccgauggaccaagugauggacaggccucauacaagaucuucagaauagaaaagggaaagauagucaaaucagucgaaaugaaugccccuaauuaucacuaugaggaaugcuccuguuauccugauucuagugaaaucacaugugugugcagggauaacuggcauggcucgaaucgaccgugggugucuuucaaccagaaucuggaauaucagauaggauacauaugcagugggauuuucggagacaauccacgcccuaaugauaagacaggcaguugugguccaguaucgucuaauggagcaaauggaguaaaaggauuuucauucaaauacggcaaugguguuuggauagggagaacuaaaagcauuaguucaagaaacgguuuugagaugauuugggauccgaacggauggacugggacagacaauaacuucucaauaaagcaagauaucguaggaauaaaugaguggucaggauauagcgggaguuuuguucagcauccagaacuaacagggcuggauuguauaagaccuugcuucuggguugaacuaaucagagggcgacccaaagagaacacaaucuggacuagcgggagcagcauauccuuuugugguguaaacagugacacuguggguuggucuuggccagacggugcugaguugccauuuaccauugacaaguaa

SEQ ID NO: 52094 - RNA, 1410 nt, Artificial Sequence
  derived and/or modified CDS sequence (wt) from neuraminidase__InfluenzaA__ADO12586
augaauccaaaccaaaagauaauaaccauugguucggucuguaugacaauuggaauggcuaacuuaauauuacaaauuggaaacauaaucucaauauggauuagccacucaauucaacuugggaaucaaaaucagauugaaacaugcaaucaaagcgucauuacuuaugaaaacaacacuuggguaaaucagacauauguuaacaucagcaacaccaacuuugcugcuggacagucagugguuuccgugaaauuagcgggcaauuccucucucugcccuguuaguggaugggcuauauacaguaaagacaacaguauaagaaucgguuccaagggggauguguuugucauaagggaaccauucauaucaugcucccccuuggaaugcagaaccuucuucuugacucaaggggccuugcuaaaugacaaacauuccaauggaaccauuaaagacaggagcccauaucgaacccuaaugagcuguccuauuggugaaguucccucuccauacaacucaagauuugagucagucgcuuggucagcaagugcuugucaugauggcaucaauuggcuaacaauuggaauuucuggcccagacaguggggcaguggcuguguuaaaguacaacggcauaauaacagacacuaucaagaguuggagaaacaauauauugagaacacaagagucugaaugugcauguguaaaugguucuugcuuuacuguaaugaccgauggaccaagugauggacaggccucauacaagaucuucagaauagaaaagggaaagauagucaaaucagucgaaaugaaugccccuaauuaucacuaugaggaaugcuccuguuauccugauucuagugaaaucacaugugugugcagggauaacuggcauggcucgaaucgaccgugggugucuuucaaccagaaucuggaauaucagauaggauacauaugcagugggauuuucggagacaauccacgcccuaaugauaagacaggcaguugugguccaguaucgucuaauggagcaaauggaguaaaaggauuuucauucaaauacggcaaugguguuuggauagggagaacuaaaagcauuaguucaagaaacgguuuugagaugauuugggauccgaacggauggacugggacagacaauaacuucucaauaaagcaagauaucguaggaauaaaugaguggucaggauauagcgggaguuuuguucagcauccagaacuaacagggcuggauuguauaagaccuugcuucuggguugaacuaaucagagggcgacccaaagagaacacaaucuggacuagcgggagcagcauauccuuuugugguguaaacagugacacuguggguuggucuuggccagacggugcugaguugccauuuaccauugacaaguaa

SEQ ID NO: 52095 - RNA, 1410 nt, Artificial Sequence; identical to SEQ ID NO: 52094
  derived and/or modified CDS sequence (wt) from neuraminidase__InfluenzaA__ADO12596

SEQ ID NO: 52096 - RNA, 1410 nt, Artificial Sequence
  derived and/or modified CDS sequence (wt) from neuraminidase__InfluenzaA__ADO12606
augaauccaaaccaaaagauaauaaccauugguucggucuguaugacaauuggaauggcuaacuuaauauuacaaauuggaaacauaaucucaauauggauuagccacucaauucaacuugggaaucaaaaucagauugaaacaugcaaucaaagcgucauuacuuaugaaaacaacacuuggguaaaucagacauauguuaacaucagcaacaccaacuuugcugcuggacagucagugguuuccgugaaauuagcgggcaauuccucucucugcccuguuaguggaugggccauauacaguaaagacaacaguauaagaaucgguuccaagggggauguguuugucauaagggaaccauucauaucaugcucccccuuggaaugcagaaccuucuucuugacucaaggggccuugcuaaaugacaaacauuccaauggaaccauuaaagacaggagcccauaucgaacccuaaugagcuguccuauuggugaaguucccucuccauacaacucaagauuugagucagucgcuuggucagcaagugcuugucaugauggcaucaauuggcuaacaauuggaauuucuggcccagacaauggggcaguggcuguguuaaaguacaacggcauaauaacagacacuaucaagaguuggagaaacaauauauugagaacacaagagucugaaugugcauguguaaaugguucuugcuuuacuguaaugaccgauggaccaagugauggacaggccucauacaagaucuucagaauagaaaagggaaagauagucaaaucagucgaaaugaaugccccuaauuaucacuaugaggaaugcuccuguuauccugauucuagugaaaucacaugugugugcagggauaacuggcauggcucgaaucgaccgugggugucuuucaaccagaaucuggaauaucagauaggauacauaugcagugggauuuucggagacaauccacgcccuaaugauaagacaggcaguugugguccaguaucgucuaauggagcaaauggaguaaaaggauuuucauucaaauacggcaaugguguuuggauagggagaacuaaaagcauuaguucaagaaacgguuuugagaugauuugggauccgaacggauggacugggacagacaauaacuucucaauaaagcaagauaucguaggaauaaaugaguggucaggauauagcgggaguuuuguucagcauccagaacuaacagggcuggauuguauaagaccuugcuucuggguugaacuaaucagagggcgacccaaagagaacacaaucuggacuagcgggagcagcauauccuuuugugguguaaacagugacacuguggguuggucuuggccagacggugcugaguugccauuuaccauugacaaguaa

SEQ ID NO: 52097 - RNA, 1410 nt, Artificial Sequence; identical to SEQ ID NO: 50236
  derived and/or modified CDS sequence (wt) from neuraminidase__InfluenzaA__ADO12616

SEQ ID NO: 52098 - RNA, 1410 nt, Artificial Sequence; identical to SEQ ID NO: 48750
  derived and/or modified CDS sequence (wt) from neuraminidase__InfluenzaA__ADO12626

SEQ ID NO: 52099 - RNA, 1410 nt, Artificial Sequence; identical to SEQ ID NO: 48814
  derived and/or modified CDS sequence (wt) from neuraminidase__InfluenzaA__ADO14355

SEQ ID NO: 52100 - RNA, 1401 nt, Artificial Sequence
  derived and/or modified CDS sequence (wt) from neuraminidase__InfluenzaA__ADO21028
augaauccaaaucagaagauaauagcaauuggcucuguuucucuaacuauugcgacaauauguuuccucaugcagauugccauacuagcaacgacuaugacacuacauuucaagcagaaugaaugcagcaaccccucgaauaaucaaguagugccaugugaaccaaccauaauagaaaggaacauagugcauuugaauaguacuaccauagagaaggaaauuuguccuaaaguggcagaauacaagaauuggucaaaaccacaaugucaaauuacaggguccgcuccuuucuccaagggcaacucaauuaggcuuuccgcagguggggauaucugggugacaagagaaccuuauguaucgugcagucucgguaaauguuaucaauuugcacuugggcagggaaccacuuugaaaaacaaacacucaaauggaacuacacaugacagaguuccucauagaacccuuuuaaugagugaguugggugucccguuucauuugggaaccaaacaagugugcauagcaugguccagcucaagcugccaugaugggaaagcaugguuacauguuugugucacuggggaugauaaaaaugcgacugcuaguaucauuuaugaugggaugcuuguugacagcauugguucaugguccaaaaacauccucagaacccaggagucagaaugcguuugcaucaaugggacuuguacaguagugaugacugauggaagugcaucgggaaaggcugacacuagaauacuauucauaagagaggggaaaauuguacacauuagcccauugucaggaagugcucagcauguggaggaaugcuccuguuacccccgguauccagaaguuagguguguuugcagagacaauuggaagggcuccaauaggcccguucuauacauaaauauggcagauuauaguauugaguccaguuaugugugcucaggacuuguuggcgacacaccaagaaaugaugauagcuacagcagcagcaacugcagggauccaaauaacgagagaggggccccaggagugaaagggugggccuuugacaauggaaaugauauuuggaugggacgaacaaucaaagaggauucacgcucagguuaugagacuuucagggucguuggugguuggaccacagcuaauuccaagucacagauaaauagacaagucauaguugacagugacaacuggucuggguauucugguaucuucucuguugaaggcaaaaacugcaucaacagguguuuuuauguugaguugauaagaggaagaccacaggagacuagggugugguggacuucaaauagcauaauuguauuuuguggaaccucagguaccuauggaacaggcucauggccugauggggcgaauaucaacuucaugccuauauaa

SEQ ID NO: 52101 - RNA, 1401 nt, Artificial Sequence
  derived and/or modified CDS sequence (wt) from neuraminidase__InfluenzaA__ADO21039
augaauccaaaucagaagauaauagcaauuggcucuguuucucuaacuauugcgacaauauguuuccucaugcagauugccauacuagcaacgacuaugacacuacauuucaagcagaaugaaugcagcaaccccucgaauaaucaaguagugccaugugaaccaaccauaauagaaaggaacauagugcauuugaauaguacuaccauagagaaggaaauuuguccuaaaguggcagaauacaagaauuggucaaaaccacaaugucaaauuacaggguccgcuccuuucuccaagggcaacucaauuaggcuuuccgcagguggggauaucugggugacaagagaaccuuauguaucgugcagucucgguaaauguuaucaauuugcacuugggcagggaaccacuuugaaaaacaaacacucaaauggaacuacacaugauagagauccucauagaacccuuuuaaugagugaguugggugucccguuucauuugggaaccaaacaagugugcauagcaugguccagcucaagcugccaugaugggaaagcaugguuacauguuugugucacuggggaugauaaaaaugcgacugcuaguaucauuuaugaugggaugcuuguugacagcauugguucaugguccaaaaacauccucagaacccaggagucagaaugcguuugcaucaaugggacuuguacaguagugaugacugauggaagugcaucgggaaaggcugacacuagaauacuauucauaagagaggggaaaauuguacacauuagcccauugucaggaagugcucagcauguggaggaaugcuccuguuacccccgguauccagaaguuagguguguuugcagagacaauuggaagggcuccaauaggcccguucuauacauaaauauggcagauuauacuauugaguccaguuaugugugcucaggacuuguuggcgacacaccaagaaaugaugauagcuacagcagcagcaacugcagggauccaaauaacgagagaggggccccaggagugaaagggugggccuuugacaauggaaaugauauuuggaugggacgaacaaucaaagaggauucacgcucagguuaugagacuuucagggucguuggugguuggaccacagcuaauuccaagucacagauaaauagacaagucauaguugacagugacaacuggucuggguauucugguaucuucucuguugaaggcaaaaacugcaucaacagguguuuuuauguugaguugauaagaggaagaccacaggagacuagggugugguggacuucaaauagcauaauuguauuuuguggaaccucagguaccuauggaacaggcucauggccugauggggcgaauaucaacuucaugccuauauaa

SEQ ID NO: 52102 - RNA, 1401 nt, Artificial Sequence
  derived and/or modified CDS sequence (wt) from neuraminidase__InfluenzaA__ADO21050
augaauccaaaucagaagauaauagcaauuggcucuguuucucuaacuauugcgacaauauguuuccucaugcagauugccauacuagcaacgacuaugacacuacauuucaagcagaaugaaugcagcaaccccucgaauaaucaaguagugccaugugaaccaaccauaauagaaaggaacauagugcauuugaauaguacuaccauagagaaggaaauuuguccuaaaguggcagaauacaagaauuggucaaaaccacaaugucaaauuacaggguccgcuccuuucuccaagggcaacucaauuaggcuuuccgcagguggggauaucugggugacaagagaaccuuauguaucgugcagucucgguaaauguuaucaauuugcacuugggcagggaaccacuuugaaaaacaaacacucaaauggaacuacacaugauagagguccucauagaacccuuuuaaugagugaguugggugucccguuucauuugggaaccaaacaagugugcauagcaugguccagcucaagcugccaugaugggaaagcaugguuacauguuugugucacuggggaugauaaaaaugcgacugcuaguaucauuuaugaugggaugcuuguugacagcauugguucaugguccaaaaacauccucagaacccaggagucagaaugcguuugcaucaaugggacuuguacaguagugaugacugauggaagugcaucgggaaaggcugacacuagaauacuauucauaagagaggggaaaauuguacacauuagcccauugucaggaagugcucagcauguggaggaaugcuccuguuacccccgguauccagaaguuagguguguuugcagagacaauuggaagggcuccaauaggcccguucuauacauaaauauggcagauuauaguauugaguccaguuaugugugcucaggacuuguuggcgacacaccaagaaaugaugauagcuacagcagcagcaacugcagggauccaaauaacgagaguggggccccaggagugaaagggugggccuuugacaauggaaaugauauuuggaugggacgaacaaucaaagaggauucacgcucagguuaugagacuuucagggucguuggugguuggaccacagcuaauuccaagucacagauaaauagacaagucauaguugacagugacaacuggucuggguauucugguaucuucucuguugaaggcaaaaacugcaucaacagguguuuuuauguugaguugauaagaggaagaccacaggagacuagggugugguggacuucaaauagcauaauuguauuuuguggaaccucagguaccuauggaacaggcucauggccugauggggcgaauaucaacuucaugccuauauaa

SEQ ID NO: 52103 - RNA, 1410 nt, Artificial Sequence
  derived and/or modified CDS sequence (wt) from neuraminidase__InfluenzaA__ADO25095
augaauccaaaccaaaagauaauaaccauugguucggucuguaugacaauuggaauggcuaacuuaauauuacaaauuggaaacauaaucucaauauggauuagccacucaauucaacuugggaaucaaaaucagauugaaacaugcaaucaaagcaucauuacuuaugaaaacaacacuuggguaaaucagacauauguuaacaucagcaacaccaacuuugcugcuggacagucagugguuuccgugaaauuagcgggcaauuccucucucugcccuguuaguggaugggcuauauacaguaaagacaacaguauaagaaucgguuccaagggggauguguuugucauaagggaaccauucauaucaugcucccccuuggaaugcagaaccuucuucuugacucaaggggccuugcuaaaugacaaacauuccaauggaaccauuaaagacaggagcccauaucgaacccuaaugagcuguccuauuggugaaguucccucuccauacaacucaagauuugagucagucgcuuggucagcaagugcuugucaugauggcaucaauuggcuaacaauuggaauuucuggcccagacaauggggcaguggcuguguuaaaguacaacggcauaauaacagacacuaucaagaguuggagaaacaauauauugagaacacaagagucugaaugugcauguguaaaugguucuugcuuuacuguaaugaccgauggaccaagugauggacaggccucauacaagaucuucagaauagaaaagggaaagauagucaaaucagucgaaaugaaugccccuaauuaucacuaugaggaaugcuccuguuauccugauucuagugaaaucacaugugugugcagggauaacuggcauggcucgaaucgaccgugggugucuuucaaccagaaucuggaauaucagauaggauacauaugcagugggauuuucggagacaauccacgcccuaaugauaagacaggcaguugugguccaguaucgucuaauggagcaaaugggguaaaaggauuuucauucaaauacggcaaugguguuuggauagggagaacuaaaagcauuaguucaagaagcgguuuugagaugauuugggauccgaacggauggacugggacagacaauaacuucucaauaaagcaagauaucguaggaauaaaugaguggucaggauauagcgggaguuuuguucagcauccagaacuaacagggcuggauuguauaagaccuugcuucuggguugaacuaaucagagggcgacccaaagagaacacaaucuggacuagcgggagcagcauauccuuuugugguguaaacagugacacuguggguuggucuuggccagacggugcugaguugccauuuaccauugacaaguaa

SEQ ID NO: 52104 - RNA, 1410 nt, Artificial Sequence
  derived and/or modified CDS sequence (wt) from neuraminidase__InfluenzaA__ADO25105
augaauccaaaccaaaagauaauaaccauugguucggucuguaugacaauuggaauggcuaacuuaauauuacaaauuggaaacauaaucucaauauggauuagccacucaauucaacuugggaaucaaaaucagauuggaacaugcaaucaaagcgucauuacuuaugaaaccaacacuuggguaaaucagacauauguuaacaucagcaacaccaacuuugcugcuggacagucagugguuuccgugaaauuagcgggcaauuccucucucugcccuguuaguggaugggcuauauacaguaaagacaacaguauaagaaucgguuccaagggggauguguuugucauaagggaaccauucauaucaugcucccccuuggaaugcagaaccuucuucuugacucaaggggccuugcuaaaugacaaacauuccaauggaaccauuaaagacaggagcccauaucgaacccuaaugagcuguccuauuggugaaguucccucuccauacaacucaagauuugagucagucgcuuggucagcaagugcuugucaugauggcaucaauuggcuaacaauuggaauuucuggcccagacaauggggcaguggcuguguuaaaguacaacggcauaauaacagacacuaucaagaguuggagaaacaauauauugagaacacaagagucugaaugugcauguguaaaugguucuugcuuuacuguaaugaccgauggaccuagugauagacaggccucauacaagaucuucagaauagaaaagggaaagauagucaaaucagucgaaaugaaugccccuaauuaucacuaugaggaaugcuccuguuauccugauucuagugaaaucacaugugugugcagggauaacuggcauggcucgaaucgaccgugggugucuuucaaccagaaucuggaauaucagauaggauacauaugcagugggauuuucggagacaauccacgcccuaaugauaagacaggcaguugugguccaguaucgucuaauggagcaaauggaguaaaaggauuuucauucaaauacggcaaugguguuuggauagggagaacuaaaagcauuaguucaagaaacgguuuugagaugauuugggauccgaacggauggacugggacagacaauaacuucucaauaaagcaagauaucguaggaauaaaugaguggucaggauauagcgggaguuuuguucagcauccagaacuaacagggcuggauuguauaagaccuugcuucuggguugaacuaaucagagggcgacccaaagagaacacaaucuggacuagcgggagcagcauauccuuuugugguguaaacagugacacuguggguuggucuuggccagacggugcugaguugccauuuaccauugacaaguaa

SEQ ID NO: 52105 - RNA, 1410 nt, Artificial Sequence; identical to SEQ ID NO: 50634
  derived and/or modified CDS sequence (wt) from neuraminidase__InfluenzaA__ADO25115

SEQ ID NO: 52106 - RNA, 1410 nt, Artificial Sequence; identical to SEQ ID NO: 50634
  derived and/or modified CDS sequence (wt) from neuraminidase__InfluenzaA__ADO25125

SEQ ID NO: 52107 - RNA, 1410 nt, Artificial Sequence
  derived and/or modified CDS sequence (wt) from neuraminidase__InfluenzaA__ADO25135
augaauccaaaccaaaagauaauaaccauugguucggucuguaugacaauuggaauggcuaacuuaguauuacaaauuggaaacauaaucucaauauggauuagccacucaauucaacuugggaaucaaaaucagauugaaacauguaaucaaagcgucauuacuuaugaaaacaacacuuggguaaaucagacauauguuaacaucagcaacaccaacuuugcugcuggacagucagugguuuccgugaaauuagcgggcaauuccucucucugcccuguuaguggaugggcuauauacaguaaagacaacaguauaagaaucgguuccaagggggauguguuugucauaagggaaccauucauaucaugcucccccuuggaaugcagaaccuucuucuugacucaaggggccuugcuaaaugacaaacauuccaauggaaccauuaaagacaggagcccauaucgaacccuaaugagcuguccuauuggugaaguucccucuccauacaacucaagauuugagucagucgcuuggucagcaagugcuugucaugauggcaucaauuggcuaacaauuggaauuucuggcccagacaauggggcaguggcuguguuaaaguacaacggcauaauaacagacacuaucaagaguuggagaaacaauauauugagaacacaagagucugaaugugcauguguaaaugguucuugcuuuacuguaaugaccgauggaccaagugauggacaggccucauacaagaucuucagaauagaaaagggaaagauagucaaaucagucgaaaugaaugccccuaauuaucacuaugaggaaugcuccuguuauccugauucuagugaaaucacaugugugugcagggauaacuggcauggcucgaaucgaccgugggugucuuucaaccagaaucuggaauaucagauaggauacauaugcagugggauuuucggagacaauccacgcccuaaugauaagacaggcaguugugguccaguaucgucuaauggagcaaauggaguaaaaggauuuucauucaaauacggcaaugguguuuggauagggagaacuaaaagcauuaguucaagaaacgguuuugagaugauuugggauccgaacggauggacugggacagacaauaacuucucaauaaagcaagauaucguaggaauaaaugaguggucaggauauagcgggaguuuuguccagcauccagaacuaacagggcuggauuguauaagaccuugcuucuggguugaacuaaucagagggcgacccaaagagaacacaaucuggacuagcgggagcagcauauccuuuugugguguaaacagugacacuguggguuggucuuggccagacggugcugaguugccauuuaccauugacaaguaa

SEQ ID NO: 52108 - RNA, 1410 nt, Artificial Sequence; identical to SEQ ID NO: 50176
  derived and/or modified CDS sequence (wt) from neuraminidase__InfluenzaA__ADO25145

SEQ ID NO: 52109 - RNA, 1410 nt, Artificial Sequence; identical to SEQ ID NO: 48750
  derived and/or modified CDS sequence (wt) from neuraminidase__InfluenzaA__ADO25155

SEQ ID NO: 52110 - RNA, 1410 nt, Artificial Sequence; identical to SEQ ID NO: 48750
  derived and/or modified CDS sequence (wt) from neuraminidase__InfluenzaA__ADO25165

SEQ ID NO: 52111 - RNA, 1410 nt, Artificial Sequence; identical to SEQ ID NO: 48750
  derived and/or modified CDS sequence (wt) from neuraminidase__InfluenzaA__ADO25175

SEQ ID NO: 52112 - RNA, 1410 nt, Artificial Sequence
  derived and/or modified CDS sequence (wt) from neuraminidase__InfluenzaA__ADO25185
augaauccaaaccaaaagauaauaaccauugguucggucuguaugacaauuggaauggcuaacuuaauauuacaaauuggaaacauaaucucaauauggauuagccacucaauucaacuugggaaucaaaaucagauugaaacaugcaaucaaagcgucauuacuuaugaaaacaacacuuggguaaaucagacauauguuaacaucagcaacaccaacuuugcugcuggacagucagugguuuccgugaaauuagcgggcaauuccucucucugcccuguuaguggaugggcuauauacaguaaagacaacaguauaagaaucgguuccaagggggauguguuugucauaagggaaccauucauaucaugcucccccuuggaaugcagaaccuucuucuugacucaaggggccuugcuaaaugacaaacauuccaauggaaccauuaaagacaggagcccauaucgaacccuaaugagcuguccuauuggugaaguucccucuccauacaacucaagauuugagucagucgcuuggucagcaagugcuugucaugauggcaucaauuggcuaacaauuggaauuucuggcccagacaauggggcaguggcuguguuaaaguacaacggcauaauaacagacacuaucaagaguuggagaaacaauauauugagaacacaagagucugaaugugcauguguaaaugguucuugcuuuacuguaaugaccgauggaccaagugauggacaggccucauacaagaucuucagaauagaaaagggaaagauagucaaaucagucgagaugaaugccccuaauuaucacuaugaggaaugcuccuguuauccugauucuagugaaaucacaugugugugcagggauaacuggcauggcucgaaucgaccgugggugucuuucaaccagaaucuggaauaucagauaggauacauaugcagugggauuuucggagacaauccacgcccuaaugauaagacaggcaguugugguccaguaucgucuaauggagcaaauggaguaaaaggauuuucauucaaauacggcaaugguguuuggauagggagaacuaaaagcaugaguucaagaaacgguuuugagaugauuugggauccgaacggauggacugggacagacaauaacuucucaauaaagcaagauaucguaggaauaaaugaguggucaggauauagcgggaguuuuguucagcauccagaacuaacagggcuggauuguauaagaccuugcuucuggguugaacuaaucagagggcgacccaaagagaacacaaucuggacuagcgggagcagcauauccuuuugugguguaaacagugacacuguggguuggucuuggccagacggugcugaguugccauuuaccauugacaaguaa

SEQ ID NO: 52113 - RNA, 1410 nt, Artificial Sequence
  derived and/or modified CDS sequence (wt) from neuraminidase__InfluenzaA__ADO25195
augaauccaaaccaaaagauaauaaccauugguucggucuguaugacaauuggaauggcuaacuuaauauuacaaauuggaaacauaaucucaauauggauuagccacucaauucaacuugggaaucaaaaucagauugaaacaugcaaucaaagcgucauuacuuaugaaaacaacacuuggguaaaucagacauauguuaacaucagcaacaccaacuuugcugcuggacagucagugguuuccgugaaauuagcgggcaauuccucucucugcccuguuaguggaugggcuauauacaguaaagacaacaguauaagaaucgguuccaagggggauguguuugucauaagggaaccauucauaucaugcucccccuuggaaugcagaaccuucuucuugacucaaggggccuugcuaaaugacaaacauuccaauggaaccauuaaagacaggagcccauaucgaacccuaaugagcuguccuauuggugaaguucccucuccauacaacucaagauuugagucagucgcuuggucagcaagugcuugucaugauggcaucaauuggcuaacaauuggaauuucuggcccagacaauggggcaguggcuguguuaaaguacaacggcauaauaacagacacuaucaagaguuggagaaacaauauauugagaacacaagagucugaaugugcauguguaaaugguucuugcuuuacuguaaugaccgauggaccaagugauggacaggccucauacaagaucuucagaauagaaaagggaaagauagucaaaucagucgaaaugaaugccccuaauuaucacuaugaggaaugcuccuguuauccugauucuagugaaaucacaugugugugcagggauaacuggcauggcucgaaucgaccgugggugucuuucaaccagaaucuggaauaucagauaggauacauaugcagugggauuuucggagacaauccacgcccuaaugauaagacaggcaguugugguccaguaucgucuaauggagcaaauggaguaaaaggauuuucauucaaauacggcaaugguguuuggauagggagaacuaaaagcauuaguucaagaaacgguuuugagaugauuugggauccgaacggauggacugggacagacaauaacuucucaaugaagcaagauaucguaggaauaaaugaguggucaggauauagcgggaguuuuguucagcauccagaacuaacagggcuggauuguauaagaccuugcuucuggguugaacuaaucagagggcgacccaaagagaacacaaucuggacuagcgggagcagcauauccuuuugugguguaaacagugacacuguggguuggucuuggccggacggugcugaguugccauuuaccauugacaaguaa

SEQ ID NO: 52114 - RNA, 1410 nt, Artificial Sequence; identical to SEQ ID NO: 49887
  derived and/or modified CDS sequence (wt) from neuraminidase__InfluenzaA__ADO25205

SEQ ID NO: 52115 - RNA, 1410 nt, Artificial Sequence; identical to SEQ ID NO: 50176
  derived and/or modified CDS sequence (wt) from neuraminidase__InfluenzaA__ADO25215

SEQ ID NO: 52116 - RNA, 1410 nt, Artificial Sequence
  derived and/or modified CDS sequence (wt) from neuraminidase__InfluenzaA__ADO25225
augaauccaaaccaaaagauaauaaccauugguucggucuguaugacaauuggaauggcuaacuuaauauuacaaauuggaaacauaaucucaauauggauuagccacucaauucaacuugggaaucaaaaucagauugaaacaugcaaucaaagcgucauuacuuaugaaaacaacacuuggguaaaucagacauauguuaacaucagcaacaccaacuuugcugcuggacagucagugguuuccgugaaauuagcgggcaauuccucucucugcccuguuaguggaugggcuauauacaguaaagacaacaguauaagaaucgguuccaagggggauguguuugucauaagggaaccauucauaucaugcucccccuuggaaugcagaaccuucuucuugacucaaggggccuugcuaaaugacaaacauuccaauggaaccauuaaagacaggagcccauaucgaacccuaaugagcuguccuauuggugaaguucccucuccauacaacucaagauuugagucagucgcuuggucagcaagugcuugucaugauggcaucaauuggcuaacaauuggaauuucuggcccagacaauggggcaguggcuguguuaaaguacaacggcauaauaacagacacuaucaagaguuggagaaacaauauauugagaacacaagagucugaaugugcauguguaaaugguucuugcuuuacuguaaugaccgauggaccaagugauggacaggccucauacaagaucuucagaauagaaaagggaaagauagucaaaucagucgaaaugaaugccccuaauuaucacuaugaggaaugcuccuguuauccugauucuagugaaaucacaugugugugcagggauaacuggcauggcucgaaucgaccgugggugucuuucaaccagaaucuggaauaucaaauaggauacauaugcagugggauuuucggagacaauccacgcccuaaugauaagacaggcaguugugguccaguaucgucuaauggagcaaauggaguaaaaggauuuucauucaaauacggcaaugguguuuggauagggagaacuaaaagcauuaguucaagaaacgguuuugagaugauuugggauccgaacggauggacugggacagacaauaacuucucaauaaagcaagauaucguaggaauaaaugaauggucaggauauagcgggaguuuuguucagcauccagaacuaacagggcuggauuguauaagaccuugcuucuggguugaacuaaucagagggcgacccaaagagaacacaaucuggacuagcgggagcagcauauccuuuugugguguaaacagugacacuguggguuggucuuggccagacggugcugaguugccauuuaccauugacaaguaa

SEQ ID NO: 52117 - RNA, 1410 nt, Artificial Sequence
  derived and/or modified CDS sequence (wt) from neuraminidase__InfluenzaA__ADO25235
augaauccaaaccaaaagauaauaaucauugguucggucuguaugacaauuggaauggcuaacuuaauauuacaaauuggaaacauaaucucaauauggauuagccacucaauucaacuugggaaucaaaaucagauugaaacaugcaaccaaagcgucauuacuuaugaaaacaacacuuggguaaaucagacauauguuaacaucagcaacaccaacuuugcugcuggacagucagugguuuccgugaaauuagcgggcaauuccucucucugcccuguuaguggaugggcuauauacaguaaagacaacaguauaagaaucgguuccaagggggauguguuugucauaagggaaccauucauaucaugcucccccuuggaaugcagaaccuucuucuugacucaaggggccuugcuaaaugacaaacauuccaauggaaccauuaaagacaggagcccauaucgaacccuaaugagcuguccuauuggugaaguucccucuccauacaacucaagauuugagucagucgcuuggucagcaagugcuugucaugauggcaucaauuggcuaacaauuggaauuucuggcccagacaauggggcaguggcuguguuaaaguacaacggcauaauaacagacacuaucaagaguuggagaaacaauauauugagaacacaagagucugaaugugcauguguaaaugguucuugcuuuacuguaaugaccgauggaccaagugauggacaggccucauacaagaucuucagaauagaaaagggaaagauagucaaaucagucgaaaugaaugccccuaauuaucacuaugaggaaugcuccuguuauccugauucuagugaaaucacaugugugugcagggauaacuggcauggcucgaaucgaccgugggugucuuucaaccagaaucuggaauaucagauaggauacauaugcagugggauuuucggagacaauccacgcccuaaugauaagacaggcaguugugguccaguaucgucuaauggagcaaauggaguaaaaggauuuucauucaaauacggcaaugguguuuggauagggagaacuaaaagcauuaguucaagaaacgguuuugagaugauuugggauccgaacggauggacugggacagacaauaacuucucaauaaagcaagauaucguaggaauaaaugaguggucaggauauagcgggaguuuuguucagcauccagaacuaacagggcuggauuguauaagaccuugcuucuggguugaacuaaucagagggcgacccaaagagaacacaaucuggacuagcgggagcagcauauccuuuugugguguaaacagugacacuguggguuggucuuggccagacggugcugaguugccauuuaccauugacaaguaa

SEQ ID NO: 52118 - RNA, 1410 nt, Artificial Sequence; identical to SEQ ID NO: 48750
  derived and/or modified CDS sequence (wt) from neuraminidase__InfluenzaA__ADO25245

SEQ ID NO: 52119 - RNA, 1410 nt, Artificial Sequence
  derived and/or modified CDS sequence (wt) from neuraminidase__InfluenzaA__ADO25255
augaauccaaaccaaaagauaauaaccauugguucggucuguaugacaauuggaauggcuaacuuaauauuacaaauuggaaacauaaucucaauauggauuagccacucaauucaacuugggaaucaaaaucagauugaaacaugcaaucaaagcgucauuacuuaugaaaacaacacuuggguaaaucagacauauguuaacaucagcaacaccaacuuugcugcuggacagucagugguuuccgugaaauuagcgggcaauuccucucucugcccuguuaguggaugggcuauauacaguaaagacaacaguauaagaaucgguuccaagggggauguguuugucauaagggaaccauucauaucaugcucccccuuggaaugcagaaccuucuucuugacucaaggggccuugcuaaaugacaaacauuccaauggaaccauuaaagacaggagcccauaucgaacccuaaugagcuguccuauuggugaaguucccucuccauacaacucaagauuugagucagucgcuuggucagcaagugcuugucaugauggcaucaauuggcuaacaauuggaauuucuggcccagacaauggggcaguggcuguguuaaaguacaacggcauaauaacagacacuaucaagaguuggagaaacaauauauugagaacacaagagucugaaugugcauguguaaaugguucuugcuuuacuguaaugaccgauggaccaagugauggacaggccucauacaagaucuucagaauagaaaagggaaagauagucaaaucagucgaaaugaaugccccuaauuaucacuaugaggaaugcuccuguuauccugauucuagugaaaucacaugugugugcagggauaacuggcauggcucgaaucgaccgugggugucuuucaaccagaaucuggaauaucagauaggauacauaugcagugggauuuucggagacaauccacgcccuaaugauaagacaggcaguugugguccaguaucgucuaauggagcaaauggaguaaaaggauuuucauucaaauacggcaaugguguuuggauagggagaacuaaaagcauuaguucaagaaacgguuuugagaugauuugggauccgaacggauggacugggacagacaauaacuucucaauaaagcaagauaucguaggaauaaaugaauggucaggauauagcgggaguuuuguucagcauccagaacuaacagggcuggauuguauaagaccuugcuucuggguugaacuaaucagagggcgacccaaagagaacacaaucuggacuagcgggagcagcauaucuuuuugugguguaaacagugacacuguggguuggucuuggccagacggugcugaguugccauuuaccauugacaaguaa

SEQ ID NO: 52120 - RNA, 1410 nt, Artificial Sequence; identical to SEQ ID NO: 50634
  derived and/or modified CDS sequence (wt) from neuraminidase__InfluenzaA__ADO25265

SEQ ID NO: 52121 - RNA, 1410 nt, Artificial Sequence
  derived and/or modified CDS sequence (wt) from neuraminidase__InfluenzaA__ADO25275
augaauccaaaccaaaagauaauaaccauugguucggucuguaugacaauuggaauggcuaacuuaauauuacaaauugggaacauaaucucaauauggauuagccacucaauucaacuugggaaucaaaaucagauugaaacaugcaaucaaagcgucauuacuuaugaaaacaacacuuggguaaaucagacauauguuaacaucagcaacaccaacuuugcugcuggacagucagugguuuccgugaaauuagcgggcaauuccucucucugcccuguuaguggaugggcuauauacaguaaagacaacaguauaagaaucgguuccaagggggauguguuugucauaagggaaccauucauaucaugcucccccuuggaaugcagaaccuucuucuugacucaaggggccuugcuaaaugacaaacauuccaauggaaccauuaaagacaggagcucauaucgaacccuaaugagcuguccuauuggugaaguucccucuccauacaacucaagauuugagucagucgcuuggucagcaagugcuugucaugauggcaucaauuggcuaacaauuggaauuucuggcccagacaauggggcaguggcuguguuaaaguauaacggcauaauaacagacacuaucaagaguuggagaaacaauauauugagaacacaagagucugaaugugcauguguaaaugguucuugcuuuacuguaaugaccgauggaccaagugauggacaggccucauacaagaucuucagaauagaaaagggaaagauagucaaaucagucgaaaugaaugccccuaauuaucacuaugaggaaugcuccuguuauccugauucuagugaaaucacaugugugugcagggauaacuggcauggcucgaaucgaccgugggugucuuucaaccagaaucuggaauaucagauaggauacauaugcagugggauuuucggagacaauccacgcccuaaugauaagacaggcaguugugguccaguaucgucuaauggagcaaauggaguaaaaggauuuucauucaaauacggcaaugguguuuggauagggagaacuaaaagcauuaguucaagaaacgguuuugagaugauuugggauccgaacggauggacugggacagacaauaacuucucaauaaagcaagauaucguaggaauaaaugaguggucaggauauagcgggaguuuuguucagcauccagaacuaacagggcuggauuguauaagaccuugcuucuggguugaacuaaucagagggcgacccaaagagaacacaaucuggacuagcgggagcagcauauccuuuugugguguaaacagugacacuguggguuggucuuggccagacggugcugaguugccauuuaccauugacaaguaa

SEQ ID NO: 52122 - RNA, 1410 nt, Artificial Sequence; identical to SEQ ID NO: 50176
  derived and/or modified CDS sequence (wt) from neuraminidase__InfluenzaA__ADO25285

SEQ ID NO: 52123 - RNA, 1413 nt, Artificial Sequence
  derived and/or modified CDS sequence (wt) from neuraminidase__InfluenzaA__ADO27623
augaacccaaaucaaaagauaauaaccauuggaucaaucaguauagcaaucggaauaauuagucuaauguugcaaauaggaaauauuauuucaauaugggcuagucacucaauccaaacuggaagucaaaacaacacuggaauauguaaccaaagaaucaucacauaugaaaacagcaccugggugaaucacacauauguuaauauuaacaacacuaauguugcugcuggagaagacaaaacuucagugacauuggccggcaauucaucucuuuguucuaucaguggaugggcuauauacacaaaagacaacagcauaagaauuggcuccaaaggagauguuuuugucauaagagaaccuuucauaucauguucucacuuggaaugcagaaccuuuuuucugacccaaggcgcucuauuaaaugacaaacauucaaaugggaccguaaaggacagaaguccuuauagggccuuaaugagcuguccucuaggugaagcuccguccccauacaauucaaaguucgaaucaguugcauggucagcaagcgcaugccaugauggcaugggcugguuaacaaucggaauuucugguccagacaauggagcuguggcuguacuaaaauacaacggaauaauaacuggaaccauaaaaaguuggaaaaagcaaauauuaagaacacaagagucugaaugugucuguaugaacgggucauguuucaccauaaugaccgauggcccgaguaauaaggccgccucguacaaaauuuucaagaucgaaaaggggaagguuacuaaaucaauagaguugaaugcacccaauuuuuauuaugaggaaugcuccuguuacccagacacuggcauagugauguguguaugcagggacaacuggcaugguucaaaucgaccuugggugucuuuuaaucaaaacuuggauuaucaaauaggauacaucugcaguggaguguucggugacaauccgcgucccgaagauggagagggcagcugcaauccagugacuguugauggagcaaacggaguaaaaggguuuucauacaaauaugguaaugguguuuggauaggaaggaccaaaaguaacagacuuagaaagggguuugagaugauuugggauccuaauggauggacaaauaccgacagugauuucucagugaaacaggauguuguagcaauaacugauuggucaggguacagcggaaguuucguccaacauccugaguuaacaggauuggacuguauaagaccuugcuucuggguugaguuagucagagggcugccuagagaaaauacaacaaucuggacuagugggagcagcauuucuuuuuguggcguuaauagugauacugcaaacuggucuuggccagacggugcugaguugccguucaccauugacaaguag

SEQ ID NO: 52124 - RNA, 1410 nt, Artificial Sequence; identical to SEQ ID NO: 48750
  derived and/or modified CDS sequence (wt) from neuraminidase__InfluenzaA__ADO30410

SEQ ID NO: 52125 - RNA, 1410 nt, Artificial Sequence; identical to SEQ ID NO: 50176
  derived and/or modified CDS sequence (wt) from neuraminidase__InfluenzaA__ADO30420

SEQ ID NO: 52126 - RNA, 1410 nt, Artificial Sequence; identical to SEQ ID NO: 49647
  derived and/or modified CDS sequence (wt) from neuraminidase__InfluenzaA__ADP95343

SEQ ID NO: 52127 - RNA, 1410 nt, Artificial Sequence
  derived and/or modified CDS sequence (wt) from neuraminidase__InfluenzaA__ADP95353
augaauccaaaccaaaagauaauaaccauugguucggucuguaugacaauuggaauggcuaacuuaauauuacaaauuggaaacauaaucucaauauggauuagccacucaauucaacuugggaaucaaaaucagauugaaacaugcaaucaaagcgucauuacuuaugaaaacaacacuuggguaaaucagacauauguuaacaucagcaacaccaacuuugcugcuggacagucagugguuuccgugaaauuagcgggcaauuccucucucugcccuguuaguggaugggcuauauacagcaaagacaacaguguaagaaucgguuccaagggggauguguuugucauaagagaaccauucauaucaugcucccccuuggaaugcagaaccuucuucuugacucaaggggccuugcuaaaugacaaacauuccaauggaaccauuaaagacaggagcccauaucgaacccuaaugagcuguccuauuggugaaguucccucuccauacaacucaagauuugagucagucgcuuggucagcaagugcuugucaugauggcaucaauuggcuaacaauuggaauuucuggcccagacaauggggcaguggcuguguuaaaguacaacggcauaauaacagacacuaucaagaguuggagaaacaauauauugagaacacaagagucugaaugugcauguguaaaugguucuugcuuuacuguaaugaccgauggaccaaguaauggacaggccucauacaagaucuucagaauagaaaagggaaagauagucaaaucagucgaaaugaaugccccuaauuaucacuaugaggaaugcuccuguuauccugauucuagugaaaucacaugugugugcagggauaacuggcauggcucgaaucgaccgugggugucuuucaaccagaaucuggaauaucagauaggauacauaugcagugggauuuucggagacaauccacgcccuaaugauaagacaggcaguugugguccaguaucgucuaauggagcaaauggaguaaaaggauuuucauucaaauacggcaaugguguuuggauagggagaacuaaaagcauuaguucaagaaacgguuuugagaugauuugggauccgaacggauggacugggacagacaauaacuucucaauaaagcaagauaucguaggaauaaaugaguggucaggauauagcgggaguuuuguucagcauccagaacuaacagggcuggauuguauaagaccuugcuucuggguugaacuaaucagagggcgacccaaagagaacacaaucuggacuagcgggagcagcauauccuuuugugguguaaacagugacacuguggguuggucuuggccagacggugcugaguugccauuuaccauugacaaguaa

SEQ ID NO: 52128 - RNA, 1410 nt, Artificial Sequence; identical to SEQ ID NO: 52127
  derived and/or modified CDS sequence (wt) from neuraminidase__InfluenzaA__ADP95363

SEQ ID NO: 52129 - RNA, 1410 nt, Artificial Sequence; identical to SEQ ID NO: 52127
  derived and/or modified CDS sequence (wt) from neuraminidase__InfluenzaA__ADP95373

SEQ ID NO: 52130 - RNA, 1410 nt, Artificial Sequence; identical to SEQ ID NO: 52127
  derived and/or modified CDS sequence (wt) from neuraminidase__InfluenzaA__ADP95383

SEQ ID NO: 52131 - RNA, 1410 nt, Artificial Sequence; identical to SEQ ID NO: 52127
  derived and/or modified CDS sequence (wt) from neuraminidase__InfluenzaA__ADP95393

SEQ ID NO: 52132 - RNA, 1410 nt, Artificial Sequence
  derived and/or modified CDS sequence (wt) from neuraminidase__InfluenzaA__ADQ43774
augaauccaaaccaaaagauaauaaccauugguucgggcuguaugacaauuggaauggcuaacuuaauauuacaaauuggaaacauaaucucaauauggauuagccacucaauucaacuugggaaucaaaaucagauugaaacaugcaaucaaagcgucauuacuuaugaaaacaacacuuggguaaaucagacauauguuaacaucagcaacaccaacuuugcugcuggacagucagugguuuccgugaaauuagcgggcaauuccucucucugcccuguuaguggaugggcuauauacaguaaagacaacaguauaagaaucgguuccaagggggauguguuugucauaagggaaccauucauaucaugcucccccuuggaaugcagaaccuucuucuugacucaaggggccuugcuaaaugacaaacauuccaauggaaccauuaaagacaggagcccauaucgaacccuaaugagcuguccuauuggugaaguucccucuccauacaacucaagauuugagucagucgcuuggucagcaagugcuugucaugauggcaucaauuggcuaacaauuggaauuucuggcccagacaauggggcaguggcuguguuaaaguacaacggcauaauaacagacacuaucaagaguuggagaaacaauauauugagaacacaagagucugaaugugcauguguaaaugguucuugcuuuacuguaaugaccgauggaccaagugauggacaggccucauacaagaucuucagaauagaaaagggaaagauagucaaaucagucgaaaugaaagccccuaauuaucacuaugaggaaugcuccuguuauccugauucuagugaaaucacaugugugugcagggauaacuggcauggcucgaaucgaccgugggugucuuucaaccagaaucuggaauaucagauaggauacauaugcagugggauuuuuggagacaauccacgcccuaaugauaagacaggcaguuguggucccguaucgucuaauggagcaaauggaguaaaaggauuuucauucaaauacggcaaugguguuuggauagggagaacuaaaagcauuaguucaagaaacgguuuugagaugauuugggauccgaacggauggacugggacagacaauaacuucucaauaaagcaagauaucguaggaauaaaugaguggucaggauauagcgggaguuuuguucagcauccagaacuaacagggcuggauuguauaagaccuugcuucuggguugaacuaaucagagggcgacccaaagagaacacaaucuggacuagcgggagcagcauauccuuuugugguguaaacagugacacuguggguuggucuuggccagacggugcugaguugccauuuaccauugacaaauaa

SEQ ID NO: 52133 - RNA, 1410 nt, Artificial Sequence
  derived and/or modified CDS sequence (wt) from neuraminidase__InfluenzaA__ADQ92578
augaauccaaaucaaaagauaauaacgauuggcucuguuucucucaccauuuccacaauaugcuucuucaugcaaauugccaucuugauaacuacuguaacauugcauuucaagcaauaugaauucaacucccccccaaacaaccaagugauacugugugaaccaacaauaauagaaagaaacauaacagagauaguguaucugaccaacgccaccauagagaaggaaauaugccccaaacuagcagaauacagaaauuggucaaagccgcaaugugacauuacaggauuugcaccuuuuucuaaggacaauucgauuaggcuuuccgcugguggggacaucugggugacaagagaaccuuaugugucaugcgauccugacaaguguuaucaauuugcccuuggacagggaacaacacuaaacaacgugcauucaaauaacacaguacgugauaggaccccuuaucggacccuauugaugaaugaguuagguguuccuuuucaucuggggaccaagcaagugugcauagcaugguccagcucaaguugucacgauggaaaagcauggcugcauguuuguauaacgggggaugauaaaaaugcaacugcuagcuucauuuacaaugggaggcuuguagauaguguuguuucaugguccaaagaaauccucaggacccaggagucagaaugcguuuguaucaauggaacuuguacaguaguaaugacugaugggagugcuucaggaaaagcugauacuaaaauacuauucauugaggaggggaaaaucguucauaccagcacauugucaggaagugcucagcaugucgaggagugcuccugcuauccucgauauccuggugucagaugugucugcagagacaacuggaaaggcuccaauaggcccaucguagauauaaacauaaaggaucauagcauuguuuccaguuaugugugcucaggacuuguuggagacacacccagaaaaaacgacagcuccagcaguagccauuguuuggauccuaacaaugaagaagguggucauggagugaaaggcugggccuuugaugauggaaaugacguguggaugggaagaacgaucagcgagaagucacgcuuaggguaugaaaccuucaaagucauugaaggcugguccaacccuaaguccaaauugcagauaaauaggcaagucauaguugacagagguaauagguccgguuauucugguauuuucucuguugaaggcaaaagcugcaucaaucggugcuuuuauguggaguugauaaggggaagaaaagaggaaacugaaguuuuguggaccucaaacaguauuguuguguuuuguggcaccucagguacauauggaacaggcucauggccugauggggcggacaucaaucucaugccuauauaa

SEQ ID NO: 52134 - RNA, 1410 nt, Artificial Sequence; identical to SEQ ID NO: 51263
  derived and/or modified CDS sequence (wt) from neuraminidase__InfluenzaA__ADR32364

SEQ ID NO: 52135 - RNA, 1410 nt, Artificial Sequence
  derived and/or modified CDS sequence (wt) from neuraminidase__InfluenzaA__ADT64478
augaauccaaaccaaaagauaauaaccauugguucggucuguaugacaauuggaauggcuaacuuaauauuacaaauuggaaacauaaucucaauauggauaggccacucaauucaacuugggaaucaaaaucagauugaaacaugcaaucaaagcgucauuacuuaugaaaacaacacuuggguaaaucagacauauguuaacaucagcaacaccaacuuugcugcuggacagucagugguuuccgugaaauuagcgggcaauuccucucucugcccuguuaguggaugggcuauauacaguaaagacaacaguguaagaaucgguuccaagggggauguguuugucauaagggaaccauucauaucaugcucccccuuggaaugcagaaccuucuucuugacucaaggggccuugcuaaaugacaaacauuccaauggaaccauuaaagacaggagcccauaucgaacccuaaugagcuguccuauuggugaaguucccucuccauacaacucaagauuugagucagucgcuuggucagcaagugcuugucaugauggcaucaauuggcuaacaauuggaauuucuggcccagacaauggggcaguggcuguguuaaaguacaacggcauaauaacagacacuaucaagaguuggagaaacaauauauugagaacacaagagucugaaugugcauguguaaaugguucuugcuuuacuguaaugaccgauggaccaaguaauggacaggccucauacaagaucuucagaauagaaaagggaaagauagucaaaucagucgaaaugaaugccccuaauuaucacuaugaggaaugcuccuguuauccugauucuagugaaaucacaugugugugcagggauaacuggcauggcucgaaucgaccgugggugucuuucaaccagaaucuggaauaucagauaggauacauaugcagugggauuuucggagacaauccacgcccuaaugauaagacaggcaguugugguccaguaucgucuaauggagcaaauggaguaaaaggauuuucauucaaauacggcaaugguguuuggauagggagaacuaaaagcauuaguucaagaaacgguuuugagaugauuugggauccgaacggauggacugggacagacaauaacuucucaauaaagcaagauaucguaggaauaaaugaguggucaggauauagcgggaguuuuguucagcauccagaacuaacagggcuggauuguauaagaccuugcuucuggguugaacuaaucagagggcgacccaaagagaacacaaucuggacuagcgggagcagcauauccuuuugugguguaaacagugacacuguggguuggucuuggccagacggugcugaguugccauuuaccauugacaaguaa

SEQ ID NO: 52136 - RNA, 1410 nt, Artificial Sequence
  derived and/or modified CDS sequence (wt) from neuraminidase__InfluenzaA__ADT78889
augaauccaaaucaaaagauaauaacaauuggcucugucucucucaccauugcaacaguaugcuuccucaugcagauugccauccugguaacuacuguaacauugcauuuuaagcaacaugagugcgacucccccgcgagcaaccaaguaaugccaugugaaccaauaauaauagaaaggaacauaacagagauaguguauuugaauaacaccaccauagagaaagagaucugccccaaaguaguggaauacagaaauuggucaaagccgcaaugucaaauuacaggauuugcaccuuuuucuaaggacaauucaauccggcuuucugcugguggggacauuugggugacgagagaaccuuaugugucaugcgauccuggcaaguguuaucaauuugcacucgggcaggggaccacacuagacaacaaacauucaaaugacacaauacaugauagaaucccucaucgaacccuauuaaugaaugaguuggguguuccauuucauuuaggaaccaggcaaguguguguagcaugguccagcucaaguugucacgauggaaaagcaugguugcauguuugugucacuggggaugauaaaaaugcaacugcuagcuucauuuaugacgggaggcuuguggacaguauugguucauggucucaaaauauccucaggacccaggagucggaaugcguuuguaucaaugggacuugcacaguaguaaugacugauggaagugcuucaggaagagccgauacuagaauacuauucauugaagaggggaaaauuguccauauuagcccauugucaggaagugcucagcauguagaggaguguuccuguuauccucgauauccugacgucagauguaucugcagagauaacuggaaaggcucuaauaggcccgucauagacauaaauauggaagauuauagcauugauuccaguuaugugugcucagggcuuguuggcgacacacccagaaacgacgauagaucuagcaauagcaauugcagggauccuaacaaugagagagggaauccaggagugaaaggcugggccuuugacaauggagaugacguguggaugggaagaacgaucagcaaggauuuacgcucagguuaugaaacuuucaaagucauuggugguugguccacaccuaauuccaaaucgcagaucaauagacaggucauaguugacagcaauaauuggucagguuacucugguauuuucucuguugagggcaaaagcugcaucaauaggugcuuuuauguggaguugauaaggggaaggcaacaggagacuagaguaugguggaccucaaacaguauuguuguguuuuguggcacuucagguacuuauggaacaggcucauggccugauggggcgaacaucaguuucaugccuauauaa

SEQ ID NO: 52137 - RNA, 1410 nt, Artificial Sequence
  derived and/or modified CDS sequence (wt) from neuraminidase__InfluenzaA__ADT78899
augaauccaaaucaaaagauaauaacaauuggcucugucucucucaccauugcaacaguaugcuuccucaugcagauugccauccuggcaacuacugugacauugcauuuuaagcaacaugagugcgacucccccgcgagcaaccaaguaaugccaugugaaccaauaauaauagaaaggaacauaacagagauaguguauuugaauaacaccaccauagagaaagagauuugccccgaaguaguggaauacagaaauuggucaaagccgcaaugucaaauuacaggauuugcaccuuuuucuaaggacaauucaauccggcuuucugcugguggggacauuugggugaugagagaaccuuaugugucaugcaauccuggcaaguguuaucaauuugcacucgggcaggggaccacacuagacaacaaacauucaaauggcacaauacaugauagaaucccucaucgaacccuauuaaugaaugaguuggguguuccauuucauuuaggaaccaaacaaguguguguagcaugguccagcucaaguugucacgauggaaaagcaugguugcauguuugugucacuggggaugauagaaaugcaacugcuagcuucauuuaugacgggaggcuuguggacaguauugguucauggucucaaaauauccucaggacccaggagucggaaugcguuuguaucaaugggacuugcacaguaguaaugacugauggaagugcaucaggaagagccgauacuagaauacuauucauuaaagaggggaaaauuguccauauuagcccauugucaggaagugcucagcauauagaggaguguuccuguuacccucgauauccugacgucagauguaucugcagagacaacuggaaaggcucuaauaggcccguuauagacauaaauauggaagauuauagcauugauuccaguuaugugugcucaggacuuguuggcgacacacccagaaacgacgacagcucuagcaauagcaauugcagggauccuaacaaugagagagggaauccaggagugaaaggcugggccuuugacaauggagaugauguauggaugggaagaacaaucagcaaagauuuacgcucagguuaugaaacuuucaaagucauuggugguugguccacaccuaauuccaaaucgcaggucaauagacaggucauaguugacaacaauaauuggucugguuacucugguauuuucucuguugagggcaaaagcugcaucaauaggugcuuuuauguggaguugauaaggggaaggccacaggagacuagaguaugguggaccucaagcaguauuguuguguuuuguggcacuucagguacuuauggaacaggcucauggccugauggggcgaacaucaauuucaugccuauauaa

SEQ ID NO: 52138 - RNA, 1410 nt, Artificial Sequence
  derived and/or modified CDS sequence (wt) from neuraminidase__InfluenzaA__ADT78963
augaauccaaaucaaaagauaauaacaauuggcucugucucucucaccauugcaacaguaugcuuccucaugcagauugccauccuggcaacuacugugacauugcauuuuaagcaacaugagugcgacucccccgcgagcaaccaaguaaugccaugugaaccaauaauaauagaaaggaacauaacagagauaguguauuugaauaacaccaccauagagaaagagaucugccccgaaguaguggaauacagaaauuggucaaagccgcaaugucaaauuacaggauuugcaccuuuuucuaaggacaauucaauccggcuuucugcugguggggacauuugggugacgagagaaccuuaugugucaugcgauccuggcaaguguuaucaauuugcacucgggcaggggaccacacuagacaacaaacauucaaaugacacaauacaugauagaaucccucaucgaacccuauuaaugaaugaguuggguguuccauuucauuuaggaaccagacaaguguguguagcaugguccagcucaaguugucacgauggaaaagcaugguugcauguuugugucacuggggaugauagaaaugcaacugcuagcuucauuuaugacgggaggcuuguggacaguauugguucauggucucaaaauauccucaggacccaggagucggaaugcguuuguaucaaugggacuugcacaguaguaaugacugauggaagugcaucaggaagagccgauacuagaauacuauucauuaaagaggggaaaauuguccauauuagcccauugucaggaagugcucagcauguagaggaguguuccuguuauccucgauauccugacgucagauguaucugcagagacaacuggaaaggcucuaauaggcccguuauagacauaaauauggaagauuauagcauugauuccaguuaugugugcucagggcuuguuggcgacacacccagaaacgacgacagaucuagcaauagcaauugcagggauccuaacaaugagagagggaauccaggagugaaaggcugggccuuugacaauggaaaugacguguggaugggaagaacgaucagcaaagauuuacgcucagguuaugaaacuuucaaagucauuggugguugguccacaccuaauuccaaaucgcaggucaauagacaggucauaguugacaacaauaauuggucugguuacucugguauuuucucuguugagggcaaaagcugcaucaauaggugcuuuuauguggaguugauaaggggaaggcaacaggagacuagaguaugguggaccucaaacaguauuguuguguuuuguggcacuucagguacuuauggaacaggcucauggccugauggggcgaacaucaauuucaugccuauauaa

SEQ ID NO: 52139 - RNA, 1410 nt, Artificial Sequence
  derived and/or modified CDS sequence (wt) from neuraminidase__InfluenzaA__ADT79001
augaauccaaaucaaaagauaauaacaauuggcucuaucucucucaccauugcaacaauaugcuuccucaugcagauugccauccugguaacuacuguaacauugcauuucaagcaauaugagugcgacucccccgcgaacaaccaaguaaugccgugugaaccaauaauaauagaaaggaacauaacagaaauaguguauuugacuaacaccaccauagagaaagagauaugccccaaauuaguggaauacaggaauuggucaaagccgcaauguaaaauuacaggauuugcaccuuuuucuaaggacaauucaauucggcuuucugcugguggggacauuugggugacgagagaaccuuaugugucaugcgauccuggcaaguguuaucaauuugcacucgggcaggggaccacacuagacaacaaacauucaaaugacacaauacaugauagaaucccucaucgaacccuauugaugaaugaguuggguguuccauuucauuugggaaccaggcaaguguguauagcaugguccagcucaaguugucacgauggaaaagcauggcugcauguuugugucacuggggaugauaaaaaugcaacugcuagcuucauuuacgaugggaggcuuguggacaguauugguucauggucucaaaauauccucaggacccaggagucggaaugcguuuguaucaaugggacuuguacaguaguaaugacugauggaagugcuucaggaaaagcugauacuagaauacuauucauugaagaggggaaaauuguucauauuagcccauugucaggaagugcucagcauguagaggaguguuccuguuauccucgauauccuggugucagauguaucugcagagacaacuggaaaggcucuaauaggcccgucguagauauaaaugugaaagauuauagcauugauuccaguuaugugugcucagggcuuguuggcgacacacccagaaacaacgacagaucuagcaguagcuauugccggaauccuaacaaugagagagggaaucacggagugaaaggcugggccuuugacgauggaaaugacguguggaugggaagaacgaucagcaaggauucacgcucagguuaugaaaccuucaaagucauuggugguugguccacaccuaauuccaaaucgcagauaaauaggcaagucauaguugacagcgauaauaggucagguuauucugguauuuucucuguugagggcaaaagcugcaucaauaggugcuuuuauguggaguugauaaggggaagggaacaggagacuagaguaugguggaccucaaacaguauuguuguguuuuguggcacuucagguaccuaugggacaggcucauggccugauggggcggacaucaaucucaugccuauauaa

SEQ ID NO: 52140 - RNA, 1410 nt, Artificial Sequence
  derived and/or modified CDS sequence (wt) from neuraminidase__InfluenzaA__ADT79021
augaauccaaaucaaaagauaauaacaauuggcucugucucucucaccauugcgacaauaugcuuccucaugcagauugccauccugguaacuacuguaacauugcauuucaagcaauaugagugcgacucccccgcgaacaaccaaguaaugccgugugaaccaauaauaauagaaaggaacauaacagagauaguguauuugacuaacaccaccauagagaaagagauaugccccaaauuaguggaauacaggaauuggucaaagccgcaauguaaaauuacaggauuugcaccuuuuucuaaggacaauucaauucggcuuucugcugguggggacauuugggugacgagagaaccuuaugugucaugcgauccuggcaaguguuaucaauuugcacucgggcaggggaccacacuagacaacaaacauucaaaugacacaauacaugauagaaccccucaucgaacccuauugaugaaugaguuggguguuccauuucauuugggaaccaggcaaguguguauagcaugguccagcucaaguugucacgauggaaaagcauggcugcauguuugugucacuggguaugauaaaaaugcaacugcuagcuucauuuacgaugggaggcuuguagacaguauugguucauggucucaaaauauccucaggacccaggagucggaaugcguuuguaucaaugggacuuguacaguaguaaugacugauggaagugcuucaggaagagcugauacuaaaauacuauucauugaagaggggaaaauuguucauauuagcccauugucaggaagugcucagcauguagaggaguguuccuguuauccucgauauccuggugucagauguaucugcagagacaacuggaaaggcucuaauaggcccgucguagauauaaaugugaaagauuauagcauugauuccaguuaugugugcucagggcuuguuggcgacacacccagaaacaacgacagaucuagcaauagcuauugccggaauccuaacaaugagaaagggaaucacggagugaaaggcugggccuuugacgauggaaaugacguguggaugggaagaacgaucagcgaggauucacgcucagguuaugaaaccuucaaagucauuggugguugguccacaccuaauuccaaauugcagauaaauaggcaagucauaguugacagcgauaauaggucagguuauucugguauuuucucuguugagggcaaaagcugcaucaauaggugcuuuuauguggaguugauaaggggaagggaacaggaaacuagaguaugguggaccucaaacaguauuguuguguuuuguggcacuucagguaccuaugggacaggcucauggccugauggggcggacaucaaucucaugccuauauaa

SEQ ID NO: 52141 - RNA, 1410 nt, Artificial Sequence
  derived and/or modified CDS sequence (wt) from neuraminidase__InfluenzaA__ADT79041
augaauccaaaucaaaagauaauaacaauuggcucugucucucucaccauugcaacaguaugcuuccucaugcagauugccauccugguaacuacuguaacauugcauuucaggcaauaugagugcgacucucccgcgaacaaccaaguaaugccgugugaaccaauaauaauagaaaggaacauaacagagauaguguauuugaauaacaccaccauagagaaagagauaugccccaaauuaguggaauacagaaauuggucaaagccgcaauguaaaauuacaggauuugcaccuuuuucuaaggacaauucaauccggcuuucugcugguggggacauuugggugacgagagaaccuuaugugucaugcgauccuggcaaguguuaucaauuugcacucgggcaggggaccacacuagacaacaaacauucaaaugacacaauacaugauagaaucccucaucgaacccuauugaugaaugaguuggguguuccauuucauuuaggaaccaggcaaguguguauagcaugguccagcucaaguugucacgauggaaaagcauggcugcauguuugugucacuggggaugauaaaaaugcaacugcuagcuucauuuaugacgggaggcuuguggacaguauugguucauggucucaaaauauccucaggacccaggagucggaaugcguuuguaucaaugggacuuguacaguaguaaugacugauggaagugcuucaggaagagcugauacuaaaauacuauucauugaagaggggaaaauuguccauauuagcccauugucaggaagugcucagcauguagaggaguguuccuguuauccucgauauccuggcgucagauguaucugcagagacaacuggaaaggcucuaauaggcccgucguagauauaaauguggaagauuauagcauugauuccaguuaugugugcucagggcuuguuggcgacacacccagaaacaacgacagaucuagcaauagcaauugcaggaauccuaacaaugagagagggaaucacggagugaaaggcugggccuuugacgauggaaaugacguguggaugggaagaacgaucagcaaggauuuacgcucagguuaugaaaccuucaaagucauuggugguugguccacaccuaauuccaaaucgcagauaaauaggcaagucauaguugacagcgauaauaggucagguuauucugguauuuucucuguugagggcaaaagcugcaucaauaggugcuuuuauguggaguuaauaaggggaagggaacaggagacuagaguaugguggaccucaaacaguauuguuguguuuuguggcacuucagguaccuaugggacaggcucauggccugauggggcggacaucaaucucaugccuauauaa

SEQ ID NO: 52142 - RNA, 1410 nt, Artificial Sequence
  derived and/or modified CDS sequence (wt) from neuraminidase__InfluenzaA__ADT79121
augaauccaaaucaaaagauaauaacaauuggcucugucucucucaccauugcaacaguaugcuuccucaugcagauugccauccuggcaacuacugugacauugcauuuuaaacaacaugagugcgacucccccgcgagcaaccaaguaaugccaugugaaccaauaauaauagaaaggaacauaacagagauaguguauuugaauaacaccaccauagagaaagagauuugccccgaaguaguggaauacagaaauuggucaaagccgcaaugucaaauuacaggauuugcaccuuuuucuaaggacaauucaauccggcuuucugcugguggggacauuugggugacgagagaaccuuaugugucaugcgauccuggcaaguguuaucaauuugcacucgggcaggggaccacacuagacaacaaacauucaaauggcacaauacaugauagaaucccucaccgaacccuauuaaugaaugaguuggguguuccauuucauuuaggaaccaaacaaguguguguagcaugguccagcucaaguugucacgauggaaaagcaugguugcauguuugugucacuggggaugauagaaaugcgacugcuagcuucauuuaugacgggaggcuuguggacaguauugguucauggucucaaaauauccucaggacccaggagucggaaugcguuuguaucaaugggacuugcacaguaguaaugacugauggaagugcaucaggaagagccgauacuagaauacuauucauuaaagaggggaaaauuguccauauuagcccauugucaggaagugcucagcauauagaggaauguuccuguuacccucgauauccugacgucagauguaucugcagagacaacuggaaaggcucuaauaggcccguuauagacauaaauauggaagauuauagcauugauuccaguuaugugugcucagggcuuguuggcgacacacccaggaacgacgacagcucuagcaauagcaauugcagggauccuaacaaugagagagggaauccaggagugaaaggcugggccuuugacaauggagaugauguauggaugggaagaacaaucaacaaagauucacgcucaggcuaugaaacuuucaaagucauuggugguugguccacaccuaauuccaaaucgcaggucaauagacaggucauaguugacaacaauaauuggucugguuacucugguauuuucucuguugagggcaaaagcugcaucaauaggugcuuuuauguggaguugauaaggggaaggccacaggagacuagaguaugguggaccucaaacaguauuguuguguuuuguggcacuucagguacuuauggaacaggcucauggccugauggggcgaacaucaauuucaugccuauauaa

SEQ ID NO: 52143 - RNA, 1410 nt, Artificial Sequence
  derived and/or modified CDS sequence (wt) from neuraminidase__InfluenzaA__ADT79131
augaauccaaaucaaaagauaauaacaauuggcucugucucucucaccauugcaacaguaugcuuccucaugcagauugccauccuggcaacuacugugacauugcauuuuaagcaacaugagugcgacucccccgcgagcaaccaaguaaugccaugugaaccaauaauaauagaaaggaacauaacagagauaguguauuugaauaacaccaccauagagaaagagauuugccccgaaguaguagaauacagaaauuggucaaagccgcaaugucaaauuacaggauuugcaccuuucucuaaggacaauucaauccggcuuucugcugguggggacauuugggugacgagagaaccuuaugugucaugugauccuggcaaguguuaucaauuugcacucgggcaggggaccacacuagacaacaaacauucaaauggcacaauacaugauagaaucccucaucgaacccuauuaaugaaugaguuggguguuccauuucauuuaggaaccaaacaaguguguguagcaugguccagcucaaguugccacgauggaaaagcaugguugcauguuugugucacuggggaugauagaaaugcaacugcuagcuucauuuaugacgggaggcuugaggacaguauugguucauggucucaaaauauccucaggacccaggagucggaaugcguuuguaucaaugggacuugcacaguaguaaugacugauggaagugcaucaggaagagccgauacuagaauacuauucauuaaagaggggaaaauuguccauauuagcccauugucaggaagugcucagcauauagaggaguguuccuguuacccucgauauccugacgucagauguaucugcagagacaacuggaaaggcucuaauaggcccguuuuagacauaaguauggaagauuauagcauugauuccaguuaugugugcucagggcuuguuggcgacacacccaggaacgacgacagcucuagcaauagcaacugcagggauccuaacaaugagagagggaauccaggagugaaaggcugggccuuugacaauggagaugauguauggaugggaagaacaaucagcaaagauuuacgcucagguuaugaaacuuucaaagucauuggugguugguccacaccuaacuccaaaucgcaggucaauagacaggucauaguggacaacaauaauuggucugguuacucugguauuuucucuguugagggcaaaagcugcaucaauaggugcuuuuauguggaguugauaaggggaaggucacaggagacuagaguaugguggaccucaaacaguauuguuguguucuguggcacuucagguacuuauggaacaggcucauggccugauggggcgaacaucaauuucaugccuauauaa

SEQ ID NO: 52144 - RNA, 1410 nt, Artificial Sequence
  derived and/or modified CDS sequence (wt) from neuraminidase__InfluenzaA__ADT79234
augaauccaaaccaaaagauaauaaccauugguucggucuguaugacaauuggaauggcuaacuuaauauuacaaauuggaaacauaaucucaauauggauuagccacucaauucaacuugggaaucaaaaucagauugaaacaugcaaucaaagcgucauuacuuaugaaaacaacacuuggguaaaucagacauauguuaacaucagcaacaccaacuuugcugcuggacagucagugguuuccgugaaauuagcgggcaauuccucucucugcccuguuaguggaugggcuauauacaguaaagacaacaguauaagaaucgguuccaagggggauguguuugucauaagggaaccauucauaucaugcucccccuuggaaugcagaaccuucuucuugacucaaggggccuugcuaaaugacaaacauuccaauggaaccauuaaagacaggagcccauaucgaacccuaaugagcuguccuauuggugaaguucccucuccauacaacucaagauuugagucaguugcuuggucagcaagugcuugucaugauggcaucaauuggcuaacaauuggaauuucuggcccagacaauggggcaguggcuguguuaaaguacaacggcauaauaacagacacuaucaagaguuggagaaacaauauauugagaacacaagagucugaaugugcauguguaaaugguucuugcuuuacuguaaugaccgauggaccaagugauggacaggccucauacaagaucuucagaauagaaaagggaaagauagucaaaucagucgaaaugaaugccccuaauuaucacuaugaggaaugcuccuguuauccugauucuagugaaaucacaugugugugcagggauaacuggcauggcucgaaucgaccgugggugucuuucaaccagaaucuggaauaucagauaggauauauaugcagugggauuuucggagacaauccacgcccuaaugauaagacaggcaguugugguccaguaucgucuaauggagcaaauggaguaaaaggauuuucauucaaauacggcaaugguguuuggauagggagaacuaaaagcauuaguucaagaaacgguuuugagaugauuugggauccgaacggauggacugggacagacaauaacuucucaauaaagcaagauaucguaggaauaaaugaguggucaggauauagcgggaguuuuguucagcauccagaacuaacagggcuggauuguauaagaccuugcuucuggguugaacuaaucagagggcgacccaaagagaacacaaucuggacuagcgggagcagcaucuccuuuugugguguaaacagugacacuguggguuggucuuggccagacggugcugaguugccauuuaccauugacaaguaa

SEQ ID NO: 52145 - RNA, 1410 nt, Artificial Sequence; identical to SEQ ID NO: 48749
  derived and/or modified CDS sequence (wt) from neuraminidase__InfluenzaA__ADT79244

SEQ ID NO: 52146 - RNA, 1410 nt, Artificial Sequence
  derived and/or modified CDS sequence (wt) from neuraminidase__InfluenzaA__ADU25480
augaauccaaaucagaagauaauaaucauuaguucgaucuguuugauaaauggaauuacuagcuugauauuacaaauugggaacauaaucucaauauggauuagccauucaauucaaauugggaaccaaaaucagacugaaacaugcagccaaaacaucauuacuuaugaaaacaacacuuggguaaaucagacauauguuaacaucagcaacaacaauuuuguugcugaacaggcaguugucucaaugaaguuagcgggcaguucgccucucugccccguuagugggugggcuauauacaguaaagauaacaguguaagaaucgguuccaagggggauguguuugucauaagagagccauucaucucaugcucccacuuggaauguagaaccuucuucuugacucaaggggcccugcugaaugacaaacauucuaauggaaccauuaaagacagaagccccuaccgaacccugaugagcugcccuauuggugaaguccccucuccauacaacucaagauuugagucaguugcuuggucagcaagugcuugccaugauggaaccaguugguugacgauuggaauuucuggcccagacaauggggcaguggcuguauugaaauacaaugacauaaucacagacacuaucaagaguuggagaaauaacauauugagaacacaagagucugaauguguaugcguaaauggcucuugcuuuacuguaaugaccgauggaccaaguaaugggcaggccucguacaagaucuucaaaauagaaaaggggaaaguagucaaaucagucgaguugaaugccccuaauuaucacuaugaggaauguuccuguuauccugauucuggugaaaucauaugugugugcagggacaauuggcauggaucgaaucgaccgugggugucuuucaaucagaaucuggaguaucaaauaggauacauaugcaguggaauucucggagauaauccccgcccuaaugauagaacaggcaguugugguccaguaucacuuaauggagcuaaugggguaaaaggguuuucguucaaauacggcaaugguguuuggauagggagaacuaaaagcaguaguucaaggagcgguuuugagaugauuugggauccaaacggauggacugagacagacaauaacuucuuaguaaagcaagauaucguagggaugacugacuggucaggauacaguggcaguuuuguucagcauccagaacuaaccgggaugaauuguaugagaccuugcuucuggguugaacugaucagagggcgacccaaagagaacacaaucuggacuagcgggagcagcauauccuuuugugguguaaauagugauacuguggauuggucuuggccagacggugcugaguugccauuuaccauugacaaguaa

SEQ ID NO: 52147 - RNA, 1410 nt, Artificial Sequence
  derived and/or modified CDS sequence (wt) from neuraminidase__InfluenzaA__ADU59780
augaauccaaaccaaaagauaauaaccauugguucggucuguaugacaauuggaauggcuaacuuaauauuacaaauuggaaacauaaucucaauauggauuagccacucaauucaacuugggaaucaaaaucagauugaaacaugcaaucaaagcgucauuacuuaugaaaacaacacuuggguaaaucagacauauguuaacaucagcaacaccaacuuugcugcuggacagucagugguuuccgugaaauuagcgggcaauuccucucucugcccuguuaguggaugggcuauauacaguaaagacaacaguauaagaaucgguuccaagggggauguguuugucauaagggaaccauucauaucaugcucccccuuggaaugcagaaccuucuucuugacucaaggggccuugcuaaaugacaaacauuccaauggaaccauuaaagacaggagcccauaucgaacccuaaugagcuguccuauuggugaaguucccucuccauacaacucaagauuugagucagucgcuuggucagcaagugcuugucaugauggcaucaauuggcuaacaauuggaauuucuggcccagacaauggggcaguggcuguguuaaaguacaacggcauaauaacagacacuaucaagaguuggagaaacaauauauugagaacacaagagucugaaugugcauguguaaaugguucuugcuuuacuguaaugaccgauggaccaagugauggacaggccucauacaagaucuucagaauagaaaagggaaagauagucaaaucagucgaaaugaaugccccuaauuaucacuaugaggaaugcuccuguuauccugauucuagugaaaucacaugugugugcagggauaacuggcauggcucgaaucgaccgugggugucuuucaaccagaaucuggaauaucagauaggauacauaugcagugggauuuucggagacaauccacgcccuaaugauaagacaggcaguugugguccaguaucgucuaauggagcaaauggaguaaaaggauuuucauucaaauacggcaaugguguuuggauagggagaacuaaaagcauuaguucaagaaacgguuuugagaugauuugggauccgaacggauggacugggacagacaauaacuucucaauaaagcaagauaucguaggaauaaaugaguggucaggauauagcgggaguuuuguucagcauccagaacuaacagggcuggauuguauaagaccuugcuucuggguugaacuaaucagagggcgacccaaagagaacacaaucuggacuagcgggagcagcauauccuuuugugguguaaacagugacacuguggguuggucuuggccagacggugcugaguugccauuuacuauugacaaguaa

SEQ ID NO: 52148 - RNA, 1410 nt, Artificial Sequence
  derived and/or modified CDS sequence (wt) from neuraminidase__InfluenzaA__ADU59789
augaauccaaaccaaaagauaauaaccauugguucggucuguaugacaauuggaauggcuaacuuaauauuacaaauuggaaacauaaucucaauauggauuagccacucaauucaacuugggaaucaaaaucagauugaaacaugcaaucaaagcgucauuacuuaugaaaacaacacuuggguaaaucagacauauguuaacgucagcaacaccaacuuugcugcuggacagucagugguuuccgugaaauuagcgggcaauuccucucucugcccuguuaguggaugggcuauauacaguaaagacaacaguauaagaaucgguuccaagggggauguguuugucauaagggaaccauucauaucaugcucccccuuggaaugcagaaccuucuucuugacucaaggggccuugcuaaaugacaaacauuccaauggaaccauuaaagacaggagcccauaucgaacccuaaugagcuguccuauuggugaaguucccucuccauacaacucaagauuugagucagucgcuuggucagcaagugcuugucaugauggcaucaauuggcuaacaauuggaauuucuggcccagacaauggggcaguggcuguguuaaaguacaacggcauaauaacagacacuaucaagaguuggagaaacaauauauugagaacacaagagucugaaugugcauguguaaaugguucuugcuuuacuguaaugaccgauggaccaagugauggacaggccucauacaagaucuucagaauagaaaagggaaagauagucaaaucagucgaaaugaaugccccuaauuaucacuaugaggaaugcuccuguuauccugauucuagugaaaucacaugugugugcagggauaacuggcauggcucgaaucgaccgugggugucuuucaaccagaaucuggaauaucagauaggauacauaugcagugggauuuucggagacaauccacgcccuaaugauaagacaggcaguugugguccaguaucgucuaauggagcaaauggaguaaaaggauuuucauucaaauacggcaaugguguuuggauagggagaacuaaaagcauuaguucaagaaacgguuuugagaugauuugggauccgaacggauggacugggacagacaauaacuucucaauaaagcaagauaucguaggaauaaaugaguggucaggauauagcgggaguuuuguucagcauccagaacuaacagggcuggauuguauaagaccuugcuucuggguugaacuaaucagagggcgacccaaagagaacacaaucuggacuagcgggagcagcauauccuuuugugguguaaacagugacacuguggguuggucuuggccagacggugcugaguugccauuuaccauugacaaguaa

SEQ ID NO: 52149 - RNA, 1410 nt, Artificial Sequence; identical to SEQ ID NO: 48750
  derived and/or modified CDS sequence (wt) from neuraminidase__InfluenzaA__ADU59829

SEQ ID NO: 52150 - RNA, 1410 nt, Artificial Sequence
  derived and/or modified CDS sequence (wt) from neuraminidase__InfluenzaA__ADU59838
augaauccaaaccaaaagauaauaaucauugguucggucuguaugacaauuggaauggcuaacuuaauauuacaaauuggaaacauaaucucaauauggauuagccacucaauucaacuugggaaucaaaaucagauugaaacaugcaaucaaagcgucauuacuuaugaaaacaacacuuggguaaaucagacauauguuaacaucagcaacaccaacuuugcugcuggacagucagugguuuccgugaaauuagcgggcaauuccucucucugcccuguuaguggaugggcuauauacaguaaagacaacaguauaagaaucgguuccaagggggauguguuugucauaagggaaccauucauaucaugcucccccuuggaaugcagaaccuucuucuugacucaaggggccuugcuaaaugacaaacauuccaauggaaccauuaaagacaggagcccauaucgaacccuaaugagcuguccuauuggugaaguucccucuccauacaacucaagauuugagucagucgcuuggucagcaagugcuugucaugauggcaucaauuggcuaacaauuggaauuucuggcccagacaauggggcaguggcuguguuaaaguacaacggcauaauaacagacacuaucaagaguuggagaaacaauauauugagaacacaagagucugaaugugcauguguaaaugguucuugcuuuacuguaaugaccgauggaccaagugauggacaggccucauacaagaucuucagaauagaaaagggaaagauagucaaaucagucgaaaugaaugccccuaauuaucacuuugaggaaugcuccuguuauccugauucuagugaaaucacaugugugugcagggauaacuggcaugguucgaaucgaccgugggugucuuucaaccagaaucuggaauaucagauaggauacauaugcagugggauuuucggagacaauccacgcccuaaugauaagacaggcaguugugguccaguaucgucuaauggagcaaauggaguaaaaggauuuucauucaaauacggcaaugguguuuggauagggagaacuaaaagcauuaguucaagaaacgguuuugagaugauuugggauccgaacggauggacugggacagacaauaacuucucaauaaagcaagauaucguaggaauaaaugaguggucaggauauagcgggaguuuuguucagcauccagaacuaacagggcuggauuguauaagaccuugcuucuggguugaacuaaucagagggcgacccaaagagaacacaaucuggacuagcgggagcagcauauccuuuugugguguaaacagugacacuguggauuggucuuggccagacggugcugaguugccauuuaccauugacaaguaa

SEQ ID NO: 52151 - RNA, 1410 nt, Artificial Sequence; identical to SEQ ID NO: 50176
  derived and/or modified CDS sequence (wt) from neuraminidase__InfluenzaA__ADU59847

SEQ ID NO: 52152 - RNA, 1410 nt, Artificial Sequence
  derived and/or modified CDS sequence (wt) from neuraminidase__InfluenzaA__ADU59907
augaauccaaaccaaaagauaauaaccauugguucggucuguaugacaauuggaauggcuaacuuaauauuacaaauuggaaacauaaucucaauauggauuagccacucaauucaacuugggaaucaaaaucagauugaaacaugcaaucaaagcgucauuacuuaugaaaacaacacuuggguaaaucagacauauguuaacaucagcaacaccaacuuugcugcuggacagucagugguuuccgugaaauuagcgggcaauuccucucucugcccuguuaguggaugggcuauauacaguaaagacaacaguauaagaaucgguuccaagggggauguguuugucauaagggaaccauucauaucaugcucccccuuggaaugcagaaccuucuucuugacucaaggggccuugcuaaaugacaaacauuccaauggaaccauuaaagacaggagcccauaucgaacucuaaugagcuguccuauuggugaaguucccucuccauacaacucaagauuugagucagucgcuuggucagcaagugcuugucaugauggcaucaauuggcuaacaauuggaauuucuggcccagacaauggggcaguggcuguguuaaaguacaacggcauaauaacagacacuaucaagaguuggagaaacaauauauugagaacacaagagucugaaugugcauguguaaaugguucuugcuuuacuguaaugaccgauggaccaagugauggacaggccucauacaagaucuucagaauagaaaagggaaagauagucaaaucagucgaaaugaaugccccuaauuaucacuaugaggaaugcuccuguuauccugauucuagugaaaucacaugugugugcagggauaacuggcauggcucgaaucgaccgugggugucuuucaaccagaaucuggaauaucagauaggauacauaugcagugggauuuucggagacaauccacgcccuaaugauaagacaggcaguugugguccaguaucgucuaauggagcaaauggaguaaaaggauuuucauucaaauacggcaaugguguuuggauagggagaacuaaaagcauuaguucaagaaacgguuuugagaugauuugggauccgaacggauggacugggacagacaauaacuucucaauaaagcaagauaucguaggaauaaaugaguggucaggauauagcgggaguuuuguucagcauccagaacuaacagggcuggauuguauaagaccuugcuucuggguugaacuaaucagagggcgacccaaagagaacacaaucuggacuagcgggagcagcauauccuuuugugguguaaacagugacacuguggguuggucuuggccagacggugcugaguugccauuuaccauugacaaguaa

SEQ ID NO: 52153 - RNA, 1410 nt, Artificial Sequence; identical to SEQ ID NO: 48750
  derived and/or modified CDS sequence (wt) from neuraminidase__InfluenzaA__ADU59917

SEQ ID NO: 52154 - RNA, 1410 nt, Artificial Sequence; identical to SEQ ID NO: 48750
  derived and/or modified CDS sequence (wt) from neuraminidase__InfluenzaA__ADU59920

SEQ ID NO: 52155 - RNA, 1410 nt, Artificial Sequence; identical to SEQ ID NO: 48750
  derived and/or modified CDS sequence (wt) from neuraminidase__InfluenzaA__ADU59941

SEQ ID NO: 52156 - RNA, 1410 nt, Artificial Sequence
  derived and/or modified CDS sequence (wt) from neuraminidase__InfluenzaA__ADU76311
augaauccaaaccaaaagauaauaaccauugguucggucuguaugacaauuggaauggcuaacuuaauauuacaaauuggaaacauaaucucaauauggauuagccacucaauucaacuugggaaucaaaaucaaauugaaacaugcaaucaaagcgucauuacuuaugaaaacaacacuuggguaaaucagacauauguuaacaucagcaacaccaacuuugcugcuggacagucagugguuuccgugaaauuagcgggcaauuccucucucugcccuguuaguggaugggcuauauacaguaaagacaacaguauaagaaucgguuccaagggggauguguuugucauaagggaaccauucauaucaugcucccccuuggaaugcagaaccuucuucuugacucaaggggccuugcuaaaugacaaacauuccaauggaaccauuaaagacaggagcccauaucgaacccuaaugagcuguccuauuggugaaguucccucuccauacaacucaagauuugagucagucgcuuggucagcaagugcuugucaugauggcaucaauuggcuaacaauuggaauuucuggcccagacaauggagcaguggcuguguuaaaguacaacggcauaauaacagacaccaucaagaguuggagaaacaauauauugagaacacaagagucugaaugugcauguguaaaugguucuugcuuuacuguaaugaccgauggaccaagugauggacaggccucauacaagaucuucagaauagaaaagggaaagauagucaaaucagucgaaaugaaugccccuaauuaucacuaugaggaaugcuccuguuauccugauucuagugaaaucacaugugugugcagggauaacuggcauggcucgaaucgaccgugggugucuuucaaccagaaucuggaauaucagauaggauacauaugcagugggauuuucggagacaauccacgcccuaaugauaagacaggcaguugugguccaguaucgucuaauggagcaaauggaguaaaaggauuuucauucaaauacggcaaugguguuuggauagggagaacuaaaagcauuaguucaagaaacgguuuugagaugauuugggauccgaacggauggacugggacagacaauaacuucucaauaaagcaagauaucguaggaauaaaugaguggucaggauauagcgggaguuuuguccagcauccagaacuaacagggcuggauuguauaagaccuugcuucuggguugaacuaaucagagggcgacccaaagagaacacaaucuggacuagcgggagcagcauauccuuuugugguguaaacagugacacuguggguuggucuuggccagacggugcuaaguugccauuuaccauugacaaguaa

SEQ ID NO: 52157 - RNA, 1410 nt, Artificial Sequence
  derived and/or modified CDS sequence (wt) from neuraminidase__InfluenzaA__ADU76313
augaauccaaaccaaaagauaauaaccauugguucggucuguaugacaauuggaauggcuaacuuaauauuacaaauuggaaacauaaucucaauauggauuagccacucaauucaacuugggaaucaaaaucaaauugaaacaugcaaucaaagcgucauuacuuaugaaaacaacacuuggguaaaucagacauauguuaacaucagcaacaccaacuuugcugcuggacagucagugguuuccgugaaauuagcgggcaauuccucucucugcccuguuaguggaugggcuauauacaguaaagacaacaguauaagaaucgguuccaagggggauguguuugucauaagggaaccauucauaucaugcucccccuuggaaugcagaaccuucuucuugacucaaggggccuugcuaaaugacaaacauuccaauggaaccauuaaagacaggagcccauaucgaacccuaaugagcuguccuauuggugaaguucccucuccauacaacucaagauuugagucagucgcuuggucagcaagugcuugucaugauggcaucaauuggcuaacaauuggaauuucuggcccagacaauggagcaguggcuguguuaaaguacaacggcauaauaacagacaccaucaagaguuggagaaacaauauauugagaacacaagagucugaaugugcauguguaaaugguucuugcuuuacuguaaugaccgauggaccaagugauggacaggccucauacaagaucuucagaauagaaaagggaaagauagucaaaucagucgaaaugaaugccccuaauuauuacuaugaggaaugcuccuguuauccugauucuagugaaaucacaugugugugcagggauaacuggcauggcucgaaucgaccgugggugucuuucaaccagaaucuggaauaucagauaggauacauaugcagugggauuuucggagacaauccacgcccuaaugauaagacaggcaguugugguccaguaucgucuaauggagcaaauggaguaaaaggauuuucauucaaauacggcaaugguguuuggauagggagaacuaaaagcauuaguucaagaaacgguuuugagaugauuugggauccgaacggauggacugggacagacaauaacuucucaauaaagcaagauaucguaggaauaaaugaguggucaggauauagcgggaguuuuguccagcauccagaacuaacagggcuggauuguauaagaccuugcuucuggguugaacuaaucagagggcgacccaaagagaacacaaucuggacuagcgggagcagcauauccuuuugugguguaaacagugacacuguggguuggucuuggccagacggugcuaaguugccauuuaccauugacaaguaa

SEQ ID NO: 52158 - RNA, 1410 nt, Artificial Sequence; identical to SEQ ID NO: 52157
  derived and/or modified CDS sequence (wt) from neuraminidase__InfluenzaA__ADU76314

SEQ ID NO: 52159 - RNA, 1410 nt, Artificial Sequence; identical to SEQ ID NO: 52157
  derived and/or modified CDS sequence (wt) from neuraminidase__InfluenzaA__ADU76315

SEQ ID NO: 52160 - RNA, 1410 nt, Artificial Sequence; identical to SEQ ID NO: 52157
  derived and/or modified CDS sequence (wt) from neuraminidase__InfluenzaA__ADU76316

SEQ ID NO: 52161 - RNA, 1410 nt, Artificial Sequence
  derived and/or modified CDS sequence (wt) from neuraminidase__InfluenzaA__ADU76317
augaauccaaaccaaaagauaauaaccauugguucggucuguaugacaauuggaauggcuaacuuaauauuacaaauuggaaacauaaucucaauauggauuagccacucaauucaacuugggaaucaaaaucagauugaaacaugcaaucaaagcgucauuacuuaugaaaacaacacuuggguaaaucagacauauguuaacaucagcaacaccaacuuugcugcuggacagucagugguuuccgugaaauuagcgggcaauuccucucucugcccuguuaguggaugggcuauauacaguaaagacaacaguauaagaaucgguuccaagggggauguguuugucauaagggaaccauucauaucaugcucccccuuggaaugcagaaccuucuucuugacucaaggggccuugcuaaaugacaaacauuccaauggaaccauuaaagacaggagcccauaucgaacccuaaugagcuguccuauuggugaaguucccucuccauacaacucaagauuugagucagucgcuuggucagcaagugcuugucaugauggcaucaauuggcuaacaauuggaauuucuggcccagacaauggggcaguggcuguguuaaaguacaacggcauaauaacagacacuaucaagaguuggagaaacaauauauugagaacacaagagucugaaugugcauguguaaaugguucuugcuuuacuguaaugaccgauggaccaagugauggacaggccucauacaagaucuucagaauagaaaagggaaagauagucaaaucagucgaaaugaaugccccuaauuaucacuaugaggaaugcuccuguuauccugauucuagugaaaucacaugugugugcagggauaacuggcauggcucgaaucgaccgugggugucuuucaaccagaaucuggaauaucagauaggauacauaugcagugggauuuucggagacaauccacgcccuaaugauaagacaggcaguugugguccaguaucgucuaauggagcaaauggaguaaaaggauuuucauucaaauacggcaaugguguuuggauagggagaacuaaaagcacuaguucaagaaacgguuuugagaugauuugggauccgaacggauggacugggacagacaauaacuucucaauaaagcaagauaucguaggaauaaaugaguggucaggauauagcgggaguuuuguccagcauccagaacuaacagggcuggauuguauaagaccuugcuucuggguugaacuaaucagagggcgacccaaagagaacacaaucuggacuagcgggagcagcauauccuuuugugguguaaacagugacacuguggguuggucuuggccagacggugcugaguugccauuuaccauugacaaguaa

SEQ ID NO: 52162 - RNA, 1410 nt, Artificial Sequence
  derived and/or modified CDS sequence (wt) from neuraminidase__InfluenzaA__ADU76318
augaauccaaaccaaaagauaauaaccauugguucggucuguaugacaauuggaauggcuaacuuaauauuacaaauuggaaacauaaucucaauauggauuagccacucaauucaacuugggaaucaaaaucagauugaaacaugcaaucaaagcgucauuacuuaugaaaacaacacuuggguaaaucagacauauguuaacaucagcaacaccaacuuugcugcuggacagucagugguuuccgugaaauuagcgggcaauuccucucucugcccuguuaguggaugggcuauauacaguaaagacaacaguauaagaaucgguuccaagggggauguguuugucauaagggaaccauucauaucaugcucccccuuggaaugcagaaccuucuucuugacucaaggggccuugcuaaaugacaaacauuccaauggaaccauuaaagacaggagcccauaucgaacccuaaugagcuguccuauuggugaaguucccucuccauacaacucaagauuugagucagucgcuuggucagcaagugcuugucaugauggcaucaauuggcuaacaauuggaauuucuggcccagacaauggggcaguggcuguguuaaaguacaacggcauaauaacagacacuaucaagaguuggagaaacaauauauugagaacacaagagucugaaugugcauguguaaaugguucuugcuuuacuguaaugaccgauggaccaagugauggacaggccucauacaagaucuucagaauagaaaagggaaagauagucaaaucagucgaaaugaaugccccuaauuaucacuaugaggaaugcuccuguuauccugauucuagugaaaucacauguguaugcagggauaacuggcauggcucgaaucgaccgugggugucuuucaaccauaaucuggaauaucagauaggauacauaugcagugggauuuucggagacaauccacgcccuaaugauaagacaggcaguugugguccaguaucgucuaauggagcaaauggaguaaaaggauuuucauucaaauacggcaaugguguuuggauagggagaacuaaaagcauuaguucaagaaacgguuuugagaugauuugggauccgaacggauggacugggacagacaauaacuucucaauaaagcaagauaucguaggaauaaaugaguggucaggauauagcgggaguuuuguucagcauccagaacuaacagggcuggauuguauaagaccuugcuucuggguugaacuaaucagagggcgacccaaagagaacacaaucuggacuagcgggagcagcauauccuuuugugguguaaacagugacacuguggguuggucuuggccagacggugcugaguugccauuuaccauugacaaguaa

SEQ ID NO: 52163 - RNA, 1410 nt, Artificial Sequence
  derived and/or modified CDS sequence (wt) from neuraminidase__InfluenzaA__ADU76319
augaauccaaaccaaaagauaauaaccauugguucggucuguaugacaauuggaauggcuaacuuaauauuacaaauuggaaacauaaucucaauauggauuagccacucaauucaacuugggaaucaaaaucagauugaaacaugcaaucaaagcgucauuacuuaugaaaacaacacuuggguaaaucagacauauguuaacaucagcaacaccaacuuugcugcuggacagucagugguuuccgugaaauuagcgggcaauuccucucucugcccuguuaguggaugggcuauauacaguaaagacaacaguauaagaaucgguuccaagggggauguguuugucauaagggaaccauucauaucaugcucccccuuggaaugcagaaccuucuucuugacucaaggggccuugcuaaaugacaaacauuccaauggaaccauuaaagacaggagcccauaucgaacccuaaugagcuguccuauuggugaaguucccucuccauacaacucaagauuugagucagucgcuuggucagcaagugcuugucaugauggcaucaauuggcuaacaauuggaauuucuggcccagacaauggggcaguggcuguguuaaaguacaacggcauaauaacagacacuaucaagaguuggagaaacaauauauugagaacacaagagucugaaugugcauguguaaaugguucuugcuuuacuguaaugaccgauggaccaaaugauggacaggccucauacaagaucuucagaauagaaaagggaaagauagucaaaucagucgaaaugaaugccccuaauuaucacuaugaggaaugcuccuguuauccugauucuagugaaaucacaugugugugcagggauaacuggcauggcucgaaucgaccgugggugucuuucaaccagaaucuggaauaucagauaggauacauaugcagugggauuuucggagacaauccacgcccuaaugauaagacaggcaguugugguccaguaucgucuaauggagcaaauggaguaaaaggauuuucauucaaauacggcaaugguguuuggauagggagaacuaaaagcauuaguucaagaaacgguuuugagaugauuugggauccgaacggauggacugggacagacaauaacuucucaauaaagcaagauaucguaggaauaaaugaguggucaggauauagcgggaguuuuguccagcauccagaacuaacagggcuggauuguauaagaccuugcuucuggguugaacuaaucagagggcgacccaaagagaacacaaucuggacuagcgggagcagcauauccuuuugugguguaaacagugacacuguggguuggucuuggccagacggugcugaguugccauuuaccauugacaaguaa

SEQ ID NO: 52164 - RNA, 1410 nt, Artificial Sequence; identical to SEQ ID NO: 49215
  derived and/or modified CDS sequence (wt) from neuraminidase__InfluenzaA__ADU76320

SEQ ID NO: 52165 - RNA, 1410 nt, Artificial Sequence
  derived and/or modified CDS sequence (wt) from neuraminidase__InfluenzaA__ADU76321
augaauccaaaccaaaagauaauaaccauugguucggucuguaugacaauuggaauggcuaacuuaauauuacaaauuggaaacauaaucucaauauggauuagccacucaauucaacuugggaaucaaaaucagauugaaacaugcaaucaaagcgucauuacuuaugaaaacaacacuuggguaaaucagacauauguuaacaucagcaacaccaacuuugcugcuggacagucagugguuuccgugaaauuagcgggcaauuccucucucugcccuguuaguggaugggcuauauacaguaaagacaacaguauaagaaucgguuccaagggggauguguuugucauaagggaaccauucauaucaugcucccccuuggaaugcagaaccuucuucuugacucaaggggccuugcuaaaugacaaacauuccaauggaaccauuaaagacaggagcccauaucgaacucuaaugagcuguccuauuggugaaguucccucuccauacaacucaagauuugagucagucgcuuggucagcaagugcuugucaugauggcaucaauuggcuaacaauuggaauuucuggcccagacaauggggcaguggcuguguuaaaguacaacggcauaauaacagacacuaucaagaguuggagaaacaauauauugagaacacaagagucugaaugugcauguguaaaugguucuugcuuuacuguaaugaccgauggaccaagugauggacaggccucauacaagaucuucagaauagaaaagggaaagauagucaaaucagucgaaaugaaugccccuaauuaucacuaugaggaaugcuccuguuauccugauucuagugaaaucacauguguaugcagggauaacuggcauggcucgaaucgaccgugggugucuuucaaccagaaucuggaauaucagauaggauacauaugcagugggauuuucggagacaauccacgcccuaaugauaagacaggcaguugugguccaguaucgucuaauggagcaaauggaguaaaaggauuuucauucaaauacggcaaugguguuuggauagggagaacuaaaagcauuaguucaagaaacgguuuugagaugauuugggauccgaacggauggacugggacagacaauaacuucucaauaaagcaagauaucguaggaauaaaugaguggucaggauauagcgggaguuuuguucagcauccagaacuaacagggcuggauuguauaagaccuugcuucuggguugaacuaaucagagggcgacccaaagagaacacaaucuggacuagcgggagcagcauauccuuuugugguguaaacagugacacuguggguuggucuuggccagacggugcugaguugccauuuaccauugacaaguaa

SEQ ID NO: 52166 - RNA, 1410 nt, Artificial Sequence
  derived and/or modified CDS sequence (wt) from neuraminidase__InfluenzaA__ADU76322
augaauccaaaccaaaagauaauaaccauugguucggucuguaugacaauuggaauggcuaacuuaauauuacaaauuggaaacauaaucucaauauggauuagccacucaauucaacuugggaaucaaaaucagauugaaacaugcaaucaaagcgucauuacuuaugaaaacaacacuuggguaaaucagacauauguuaacaucagcaacaccaacuuugcugcuggacagucagugguuuccgugaaauuagcgggcaauuccucucucugcccuguuaguggaugggcuauauacaguaaagacaacaguauaagaaucgguuccaagggggauguguuugucauaagggaaccauucauaucaugcucccccuuggaaugcagaaccuucuucuugacucaaggggccuugcuaaaugacaaacauuccaauggaaccauuaaagacaggagcccauaucgaacccuaaugagcuguccuauuggugaaguucccucuccauacaacucaagauuugagucagucgcuuggucagcaagugcuugucaugauggcaucaauuggcuaacaauuggaauuucuggcccagacaauggggcaguggcuguguuaaaguacaacggcauaauaacagacacuaucaagaguuggagaaacaauauauugagaacacaagagucugaaugugcauguguaaaugguucuugcuuuacuguaaugaccgauggaccaagugauggacaggccucauacaagaucuucagaauagaaaagggaaagguagucaaaucagucgaaaugaaugccccuaauuaucacuaugaggaaugcuccuguuauccugauucuagugaaaucacaugugugugcagggauaacuggcauggcucgaaucgaccguggguaucuuucaaccagaaucuggaauaucagauaggauacauaugcagugggauuuucggagacaauccacgcccuaaugauaagacaggcaguugugguccaguaucgucuaauggagcaaauggaguaaaaggauuuucauucaaauacggcaaugguguuuggauagggagaacuaaaagcauuaguucaagaaacgguuuugagaugauuugggauccgaacggauggacugggacagacaauaacuucucaauaaagcaagauaucguaggaauaaaugaguggucaggauauagcgggaguuuuguucagcauccagaacuaacagggcuggauuguauaagaccuugcuucuggguugaacuaaucagagggcgacccaaagagaacacaaucuggacuagcgggagcaucauauccuuuugugguguaaacagugacacuguggguuggucuuggccggacggugcugaguugccauuuaccauugacaaguaa

SEQ ID NO: 52167 - RNA, 1410 nt, Artificial Sequence; identical to SEQ ID NO: 52156
  derived and/or modified CDS sequence (wt) from neuraminidase__InfluenzaA__ADU76323

SEQ ID NO: 52168 - RNA, 1410 nt, Artificial Sequence; identical to SEQ ID NO: 52157
  derived and/or modified CDS sequence (wt) from neuraminidase__InfluenzaA__ADU76324

SEQ ID NO: 52169 - RNA, 1410 nt, Artificial Sequence; identical to SEQ ID NO: 52156
  derived and/or modified CDS sequence (wt) from neuraminidase__InfluenzaA__ADU76325

SEQ ID NO: 52170 - RNA, 1410 nt, Artificial Sequence; identical to SEQ ID NO: 52157
  derived and/or modified CDS sequence (wt) from neuraminidase__InfluenzaA__ADU76326

SEQ ID NO: 52171 - RNA, 1410 nt, Artificial Sequence; identical to SEQ ID NO: 52157
  derived and/or modified CDS sequence (wt) from neuraminidase__InfluenzaA__ADU76327

SEQ ID NO: 52172 - RNA, 1410 nt, Artificial Sequence; identical to SEQ ID NO: 52156
  derived and/or modified CDS sequence (wt) from neuraminidase__InfluenzaA__ADU76328

SEQ ID NO: 52173 - RNA, 1410 nt, Artificial Sequence; identical to SEQ ID NO: 52157
  derived and/or modified CDS sequence (wt) from neuraminidase__InfluenzaA__ADU76329

SEQ ID NO: 52174 - RNA, 1410 nt, Artificial Sequence; identical to SEQ ID NO: 52157
  derived and/or modified CDS sequence (wt) from neuraminidase__InfluenzaA__ADU76330

SEQ ID NO: 52175 - RNA, 1410 nt, Artificial Sequence; identical to SEQ ID NO: 52157
  derived and/or modified CDS sequence (wt) from neuraminidase__InfluenzaA__ADU76331

SEQ ID NO: 52176 - RNA, 1410 nt, Artificial Sequence; identical to SEQ ID NO: 52157
  derived and/or modified CDS sequence (wt) from neuraminidase__InfluenzaA__ADU76332

SEQ ID NO: 52177 - RNA, 1410 nt, Artificial Sequence; identical to SEQ ID NO: 48947
  derived and/or modified CDS sequence (wt) from neuraminidase__InfluenzaA__ADU76333

SEQ ID NO: 52178 - RNA, 1410 nt, Artificial Sequence; identical to SEQ ID NO: 48947
  derived and/or modified CDS sequence (wt) from neuraminidase__InfluenzaA__ADU76334

SEQ ID NO: 52179 - RNA, 1410 nt, Artificial Sequence; identical to SEQ ID NO: 49215
  derived and/or modified CDS sequence (wt) from neuraminidase__InfluenzaA__ADU76335

SEQ ID NO: 52180 - RNA, 1410 nt, Artificial Sequence; identical to SEQ ID NO: 52157
  derived and/or modified CDS sequence (wt) from neuraminidase__InfluenzaA__ADU76336

SEQ ID NO: 52181 - RNA, 1410 nt, Artificial Sequence
  derived and/or modified CDS sequence (wt) from neuraminidase__InfluenzaA__ADU76337
augaauccaaaccaaaagauaauaaccauugguucggucuguauaacaauuggaauggcuaacuuaauauuacaaauuggaaacauaaucucaauauggauuagccacucaauucaacuugggaaucaaaaucagauugaaacaugcaaucaaagcgucauuacuuaugaaaacaacacuuggguaaaucagacauauguuaacaucagcaacaccaacuuugcugcuggacagucagugguuuccgugaaauuagcgggcaauuccucucucugcccuguuaguggaugggcuauauacaguaaagacaacaguauaagaaucgguuccaagggggauguguuugucauaagggagccauucauaucaugcucccccuuggaaugcagaaccuucuucuugacucaaggggccuugcuaaaugacaaacauuccaauggaaccauuaaagacaggagcccauaucgaacccuaaugagcuguccuauuggugaaguucccucuccauacaacucaagauuugagucagucgcuuggucagcaagugcuugucaugauggcaucaauuggcuaacaauuggaauuucuggcccagacaauggggcaguggcuguguuaaaguacaacggcauaauaacagacacuaucaagaguuggagaaacaauauauugagaacacaagagucugaaugugcauguguaaaugguucuugcuuuacuguaaugaccgauggaccaagugauggacaggccucauacaagaucuucagaauagaaaagggaaagauagucaaaucagucgaaaugaaugccccuaauuaucacuaugaggaaugcuccuguuauccugauucuagugaaaucacaugugugugcagggauaacuggcauggcucgaaucgaccgugggugucuuucaaccagaaucuggaauaucagauaggauacauaugcagugggauuuucggagacaauccacgcccuaaugauaagacaggcaguugugguccaguaucgucuaauggagcaaauggaguaaaaggauuuucauucaaauacggcaaugguguuuggauagggagaacuaaaagcauuaguucaagaaacgguuuugagaugauuugggauccgaacggauggacugggacagacaauaacuucucaauaaagcaagauaucguaggaauaaaugaguggucaggauauagcgggaguuuuguucagcauccagaacuaacagggcuggacuguauaagaccuugcuucuggguugaacuaaucagagggcgacccaaagagaacacaaucuggacuagcgggagcagcauauccuuuugugguguaaacagugacacuguggguuggucuuggccagacggugcugaguugccauuuaccauugacaaguaa

SEQ ID NO: 52182 - RNA, 1410 nt, Artificial Sequence; identical to SEQ ID NO: 51450
  derived and/or modified CDS sequence (wt) from neuraminidase__InfluenzaA__ADU76338

SEQ ID NO: 52183 - RNA, 1410 nt, Artificial Sequence; identical to SEQ ID NO: 52156
  derived and/or modified CDS sequence (wt) from neuraminidase__InfluenzaA__ADU76339

SEQ ID NO: 52184 - RNA, 1410 nt, Artificial Sequence; identical to SEQ ID NO: 48814
  derived and/or modified CDS sequence (wt) from neuraminidase__InfluenzaA__ADU76341

SEQ ID NO: 52185 - RNA, 1410 nt, Artificial Sequence; identical to SEQ ID NO: 52165
  derived and/or modified CDS sequence (wt) from neuraminidase__InfluenzaA__ADU76342

SEQ ID NO: 52186 - RNA, 1410 nt, Artificial Sequence; identical to SEQ ID NO: 52165
  derived and/or modified CDS sequence (wt) from neuraminidase__InfluenzaA__ADU76343

SEQ ID NO: 52187 - RNA, 1410 nt, Artificial Sequence; identical to SEQ ID NO: 52157
  derived and/or modified CDS sequence (wt) from neuraminidase__InfluenzaA__ADU76344

SEQ ID NO: 52188 - RNA, 1410 nt, Artificial Sequence; identical to SEQ ID NO: 52157
  derived and/or modified CDS sequence (wt) from neuraminidase__InfluenzaA__ADU76345

SEQ ID NO: 52189 - RNA, 1410 nt, Artificial Sequence
  derived and/or modified CDS sequence (wt) from neuraminidase__InfluenzaA__ADU76346
augaauccaaaccaaaagauaauaaccauugguucggucuguaugacaauuggaauggcuaacuuaauauuacaaauuggaaacauaaucucaauauggauuagccacucaauucaacuugggaaucaaaaucagauugaaacaugcaaucaaagcgucauuacuuaugaaaacaacacuuggguaaaucagacauauguuaacaucagcaacaccaacuuugcugcuggacagucagugguuuccgugaaauuagcgggcaauuccucucucugcccuguuaguggaugggcuauauacaguaaagacaacaguauaagaaucgguuccaagggggauguguuugucauaagggaaccauucauaucaugcucccccuuggaaugcagaaccuucuucuugacucaaggggccuugcuaaaugacaaacauuccaauggaaccauuaaagacaggagcccauaucgaacucuaaugagcuguccuauuggugaaguucccucuccauacaacucaagauuugagucagucgcuuggucagcaagugcuugucaugauggcaucaauuggcuaacaauuggaauuucuggcccagacaauggggcaguggcuguguuaaaguacaacggcauaauaacagacacuaucaagaguuggagaaacaauauauugagaacacaagagucugaaugugcauguguaaaugguucuugcuuuacuguaaugaccgauggaccaagugauggacaggccucauacaagaucuucagaauagaaaagggaaagauagucaaaucagucgaaaugaaugccccuaauuaucacuaugaggaaugcuccuguuauccugauucuagugaaaucacauguguaugcagggauaacuggcauggcucgaaucgaccgugggugucuuucaaccagaaucuggaauaucagauaggauacauaugcagugggauuuucggagacaauccacgcccuaaugauaagacaggcaguugugguccaguaucgucuaauggagcaaauggaguaaaaggguuuucauucaaauacggcaaugguguuuggauagggagaacuaaaagcauuaguucaagaaacgguuuugagaugauuugggauccgaacggauggacugagacagacaauaacuucucaauaaagcaagauaucguaggaauaaaugaguggucaggauauagcgggaguuuuguucagcauccagaacuaacagggcuggauuguauaagaccuugcuucuggguugaacuaaucagagggcgacccaaagagaacacaaucuggacuagcgggagcagcauauccuuuugugguguaaacagugacacuguggguuggucuuggccagacggugcugaguugccauuuaccauugacaaguaa

SEQ ID NO: 52190 - RNA, 1410 nt, Artificial Sequence; identical to SEQ ID NO: 52181
  derived and/or modified CDS sequence (wt) from neuraminidase__InfluenzaA__ADU76347

SEQ ID NO: 52191 - RNA, 1410 nt, Artificial Sequence
  derived and/or modified CDS sequence (wt) from neuraminidase__InfluenzaA__ADV17285
augaauccaaaccaagagauaauaaccauugguucggucuguaugacaauuggaauggcuaacuuaauauuacaaauuggaaacauaaucucaauauggauuagccacucaauucaacuugggaaucaaaaucagauugaaacaugcaaucaaagcgucauuacuuaugaaaacaacacuuggguaaaucagacauauguuaacaucagcaacaccaacuuugcugcuggacagucagugguuuccgugaaauuagcgggcaauuccucucucugcccuguuaguggaugggcuauauacaguaaagacaacaguauaagaaucgguuccaagggggauguguuugucauaagggaaccauucauaucaugcucccccuuggaaugcagaaccuucuucuugacucaaggggccuugcuaaaugacaaacauuccaauggaaccauuaaagacaggagcccauaucgaaccuuaaugagcuguccuauuggugaaguucccucuccauacaacucaagauuugagucagucgcuuggucagcaagugcuugucaugauggcaucaauuggcuaacaauuggaauuucuggcccagacaauggggcaguggcuguguuaaaguacaacggcauaauaacagacacuaucaagaguuggagaaacaauauauugagaacacaagagucugaaugugcauguguaaaugguucuugcuuuacuguaaugaccgauggaccaagugauggacaggccucauacaagaucuucagaauagaaaagggaaagauaguuaaaucagucgaaaugaaugccccuaauuaucacuaugaggaaugcuccuguuauccugauucuagugaaaucacaugugugugcagggauaacuggcauggcucgaaucgaccgugggugucuuucaaccagaaucuggaauaucagauaggauacauaugcagugggauuuucggagacaauccacgcccuaaugauaagacaggcaguugugguccaguaucgucuaauggagcaaauggaguaaaaggauuuucauucagauacggcaaugguguuuggauagggagaacuaaaagcauuaguucaagaaacgguuuugagaugauuugggauccgaacggauggacugggacagacaauaacuucucaauaaagcaagauaucguaggaauaaaugaguggucaggauauagcgggaguuuuguucagcauccagaacuaacagggcuggauuguauaagaccuugcuucuggguugaacuaaucagagggcgacccaaagagaacacaaucuggacuagcgggagcagcauauccuuuugugguguaaacagugacacuguggguuggucuuggccagacggugcugaguugccauuuaccauugacaaguaa

SEQ ID NO: 52192 - RNA, 1410 nt, Artificial Sequence
  derived and/or modified CDS sequence (wt) from neuraminidase__InfluenzaA__ADV17295
augaauccaaaccaaaagauaauaaccauugguucggucuguaugacaauuggaauggcuaacuuaauauuacaaauuggaaacauaaucucaauauggauuagccacucaauucaacuugggaaucaaaaucagauugaaacaugcaaucaaagcgucauuacuuaugaaaacaacacuuggguaaaucagacauauguuaacaucagcaacaccaacuuugcugcuggacagucagugguuuccgugaaauuagcgggcaauuccucucucugcccuguuaguggaugggcuauauacaguaaagacaacaguauaagaaucgguuccaagggggauguguuugucauaagggaaccauucauaucaugcucccccuuggaaugcagaaccuucuucuugacucaaggggccuugcuaaaugacaaacauuccaauggaaccauuaaagacaggagcccauaucgaacccuaaugagcuguccuauuggugaaguucccucuccauacaacucaagauuugagucagucgcuuggucagcaagugcuugucaugauggcaucaauuggcuaacaauuggaauuucuggcccagacaauggggcaguggcuguguuaaaguacaacggcauaauaacagacacuaucaagaguuggagaaacaauauauugagaacacaagagucugaaugugcauguguaaaugguucuugcuuuacuguaaugaccgauggaccaagugauggacaggccucauacaagaucuucagaauagaaaagggaaagauagucaaaucagucgaaaugaaugccccuaauuaucacuaugaggaaugcuccuguuauccugauucuagugaaaucacaugugugugcagggauaacuggcauggcucgaaucgaccgugggugucuuucaaccagaaucuggaauaucagauaggguacauaugcagugggauuuucggagacaauccacgcccuaaugauaagacaggcaguugugguccaguaucgucuaauggagcaaauggaguaaaaggauuuucauucaaauacggcaaugguguuuggauagggagaacuaaaagcauuaguucaagaaacgguuuugagaugauuugggauccgaacggauggacugggacagacaauaacuucucaauaaagcaagauaucguaggaauaaaugaguggucaggauauagcgggaguuuuguucagcauccagaacuaacagggcuggauuguauaagaccuugcuucuggguugaacuaaucagagggcgacccaaagagaacacgaucuggacuagcgggagcagcauauccuuuugcgguguaaacagugacacuguggguuggucuuggccagacggugcugaguugccauuuaccauugacaaguaa

SEQ ID NO: 52193 - RNA, 1410 nt, Artificial Sequence
  derived and/or modified CDS sequence (wt) from neuraminidase__InfluenzaA__ADV17305
augaauccaaaccaaaagauaauaaccauugguucggucuguaugacaauuggaauggcuaacuuaauauuacaaauuggaaacauaaucucaauauggauuagccacucaauucaacuugggaaucaaaaucagauugaaacaugcaaucaaagcgucauuacuuaugaaaacaacacuuggguaaaucagacauauguuaacaucagcaacaccaacuuugcugcuggacagucagugguuuccgugaaauuagcgggcaauuccucucucugcccuguuaguggaugggcuauauacaguaaagacaacaguauaagaaucgguuccaagggggauguguuugucauaagggaaccauucauaucaugcuccuccuuggaaugcagaaccuucuucuugacucaaggggccuugcuaaaugacaaacauuccaauggaaccauuaaagacaggagcccauaucgaacccuaaugagcuguccuauuggugaaguucccucuccauacaacucaagauuugagucagucgcuuggucagcaagugcuugucaugauggcaucaauuggcuaacaauuggaauuucuggcucagacaauggggcaguggcuguguuaaaguacaacggcauaauaacagacacuaucaagaguuggagaaacaauauauugagaacacaagagucugaaugugcauguguaaaugguucuugcuuuacuauaaugaccgauggaccaagugauggacaggccucauacaagaucuucagaauagaaaagggaaagauagucaaaucagucgaaaugaaugccccuaauuaucacuaugaggaaugcuccuguuauccugauucuagugaaaucacaugugugugcagggauaacuggcauggcucgaaucgaccgugggugucuuucaaccagaaucuggaauaucagauaggauacauaugcagugggauuuucggagacaauccacgcccuaaugauaagacaggcaguugugguccaguaucgucuaauggagcaaauggaguaaaaggauuuucauucaaauacggcaaugguguuuggauagggagaacuaaaagcauuaguucaagaaacgguuuugagaugauuugggauccgaacggauggacugggacagacaauaacuucucaauaaagcaagauaucguaggaauaaaugaguggucaggauauagcgggaguuuuguucagcauccagaacuaacagggcuggauuguauaagaccuugcuucuggguugaacuaaucagagggcgacccaaagagaacacaaucuggacuagcgggagcagcauauccuuuugugguguaaacagugacacuguggguuggucuuggccagacggugcugaguugccauuuaccauugacaaguaa

SEQ ID NO: 52194 - RNA, 1410 nt, Artificial Sequence
  derived and/or modified CDS sequence (wt) from neuraminidase__InfluenzaA__ADV17315
augaauccaaaccaaaagauaauaaccauugguucggucuguaugacaauuggaauggcuaacuuaauauuacaaauuggaaacauaaucucaauauggauuagccacucaauucaacuugggaaucaaaaucagauugaaacaugcaaucaaagcgucauuacuuaugaaaacaacacuuggguaaaucagacauauguuaacaucagcaacaccaacuuugcugcuggacagucagugguuuccgugaaauuagcgggcaauuccucucucugcccuguuaguggaugggcuauauacaguaaagacaacaguauaagaaucgguuccaagggggauguguuugucauaagggaaccauucauaucaugcucccccuuggaaugcagaaccuucuucuugacucaaggggccuugcuaaaugacaaacauuccaauggaaccauuaaagacaggagcccauaucgaacccuaaugagcuguccuauuggugaaguucccucuccauacaacucaagauuugagucagucgcuuggucagcaagugcuugucaugauggcaucaauuggcuaacaauuggaauuucuggcccagacaauggggcaguggcuguguuaaaguacaacggcauaauaacagacacuaucaagaguuggagaaacaauauauugagaacacaagagucugaaugugcauguguaaaugguucuugcuuuacuguaaugaccgauggaccaagugauggacaggccucauacaagaucuucagaauagaaaagggaaagauaguuaaaucagucgaaaugaaugccccuaauuaucacuaugaggaaugcuccuguuauccugauucuagugaaaucacaugugugugcagggauaacuggcauggcucgaaucgaccgugggugucuuucaaccagaaucuggaauaucagauaggauacauaugcagugggauuuucggagacaauccacgcccuaaugauaagacaggcaguugugguccaguaucgucuaauggagcaaauggaguaaaaggauuuucauucaaauacggcaaugguguuuggauagggagaacuaaaagcauuaguucaagaaacgguuuugagaugauuugggauccgaacggauggacugggacagacaauaacuucucaauaaagcaagauaucguaggaauaaaugaguggucaggauauagcgggaguuuuguucagcauccagaacuaacagggcuggauuguauaagaccuugcuucuggguugaacuaaucagagggcgacccaaagagaacacaaucuggacuagcgggagcagcauauccuuuugugguguaaacagugacacuguggguuggucuuggccagacggugcugaguugccauuuaccauugacaaguaa

SEQ ID NO: 52195 - RNA, 1410 nt, Artificial Sequence
  derived and/or modified CDS sequence (wt) from neuraminidase__InfluenzaA__ADV17325
augaauccaaaccaaaagauaauaaccauugguucggucuguaugacaauuggaauggcuaacuuaauauuacaaauuggaaacauaaucucaauauggauuagccacucaauucaacuugggaaucaaaaucagauugaaacaugcaaucaaagcgucauuacuuaugaaaacaacacuuggguaaaucagacauauguuaacaucagcaacaccaacuuugcugcuggacagucagugguuuccgugaaauuagcgggcaauuccucucucugcccuguuaguggaugggcuauauacaguaaagacaacaguauaagaaucgguuccaagggggauguguuugucauaagggaaccauucauaucaugcucccccuuggaaugcagaaccuucuucuugacucaaggggccuugcuaaaugacaaacauuccaauggaaccauuaaagacaggagcccauaucgaacccuaaugagcuguccuauuggugaaguucccucuccauacaacucaagauuugagucagucgcuuggucagcaagugcuugucaugauggcaucaauuggcuaacaauuggaauuucuggcccagacaauggggcaguggcuguguuaaaguacaacggcauaauaacagacacuaucaagaguuggagaaacaauauauugagaacacaagagucugaaugugcauguguaaaugguucuugcuuuacuguaaugaccgauggaccaagugauggacaggccucauacaagaucuucagaauagaaaagggaaagauagucaaaucagucgaaaugaaugccccuaauuaucacuaugaggaaugcuccuguuauccugauucuagugaaaucacaugugugugcagggauaacuggcauggcucgaaucgaccgugggugucuuucaaccagaaucuggaauaucagauaggauacauaugcagugggauuuucggagacaauccacgcccuaaugauaagacaggcaguugugguccaguaucgucuaauggagcaaauggaguaaaaggauuuucauucaaauacggcaaugguguuuggauagggagaacuaaaagcauuaguucaagaaacgguuuugagaugauuugggauccgaacggauggacuggaacagacaauagcuucucaauaaagcaagauaucguaggaauaaaugaguggucaggauauagcgggaguuuuguucagcauccagaacuaacagggcuggauuguauaagaccuugcuucuggguugaacuaaucagagggcgacccaaagagaacacaaucuggacuagcgggagcagcauauccuuuugugguguaaacagugacacuguggguuggucuuggccagacggugcugaguugccauuuaccauugacaaguaa

SEQ ID NO: 52196 - RNA, 1410 nt, Artificial Sequence
  derived and/or modified CDS sequence (wt) from neuraminidase__InfluenzaA__ADV17335
augaauccaaaccaaaagauaauaaccauugguucggucuguaugacaauuggaauggcuaacuuaauauuacaaauuggaaacauaaucucaauauggauuagccacucaauucaacuugggaaucaaaaucagauugaaacaugcaaucaaagcgucauuacuuaugaaaacaacacuuggguaaaucagacauauguuaacaucagcaacaccaacuuugcugcuggacagucagugguuuccgugaaauuagcgggcaauuccucucucugcccuguuaguggaugggcuauauacaguaaagacaacaguauaagaaucgguuccaagggggauguguuugucauaagggaaccauucauaucaugcucccccuuggaaugcagaaccuucuucuugacucaaggggccuugcuaaaugacaaacauuccaauggaaccauuaaagacaggagcccauaucgaacccuaaugagcuguccuauuggugaaguucccucuccauacaacucaagauuugagucagucgcuuggucagcaagugcuugucaugauggcaucaauuggcuaacaauuggaauuucuggcccagacaauggggcaguggcuguguuaaaguacaacggcauaauaacagacacuaucaagaguuggagaaacaauauauugagaacacaagagucugaaugugcauguguaaaugguucuugcuuuacuguaaugaccgauggaccaagugauggacaggccucauacaagaucuucagaauagaaaagggaaagauaguuaaaucagucgaaaugaaugccccuaauuaucacuaugaggaaugcuccuguuauccugauucuagugaaaucacaugugugugcagggauaacuggcauggcucgaaucgaccgugggugucuuucaaccagaaucuggaauaucagauaggauacauaugcagugggguuuucggagacaauccacgcccuaaugauaagacaggcaguugugguccaguaucgucuaauggagcaaauggaguaaaaggauuuucauucaaauacggcaaugguguuuggauagggagaacuaaaagcauuaguucaagaaacgguuuugagaugauuugggauccgaacggauggacugggacagacaauaacuucucaauaaagcaagauaucguaggaauaaaugaguggucaggauauagcgggaguuuuguucagcauccagaacuaacagggcuggauuguauaagaccuugcuucuggguugaacuaaucagagggcgacccaaagagaacacaaucuggacuagcgggagcagcauauccuuuugugguguaaacagugacacuguggguuggucuuggccagacggugcugagugcccauuuaccauugacaaguaa

SEQ ID NO: 52197 - RNA, 1410 nt, Artificial Sequence; identical to SEQ ID NO: 49827
  derived and/or modified CDS sequence (wt) from neuraminidase__InfluenzaA__ADV19022

SEQ ID NO: 52198 - RNA, 1410 nt, Artificial Sequence
  derived and/or modified CDS sequence (wt) from neuraminidase__InfluenzaA__ADV41679
augaauccaaaccaaaagauaauaaccauugguucggucuguaugacaauuggaauggcuaacuuaauauuacaaauuggaaacauaaucucaauauggauuagccacucaauucaacuuaggaaucaaaaucagauugaaacaugcaaucaaagcgucauuacuuaugaaaacaacacuuggguaaaucagacauauguuaacaucagcaacaccaacuuugcugcuggacagucagugguuuccgugaaauuagcgggcaauuccucucucugcccuguuaguggaugggcuauauacaguaaagacaacaguauaagaaucgguuccaagggggauguguuugucauaagggaaccauucauaucaugcucccccuuggaaugcagaaccuucuucuugacucaaggggccuugcuaaaugacaaacauuccaauggaaccauuaaagacaggagcccauaucgaacccuaaugagcuguccuauuggugaaguucccucuccauacaacucaagauuugagucagucgcuuggucagcaagugcuugucaugauggcaucaauuggcuaacaauuggaauuucuggcccagacaauggggcaguggcuguguuaaaguacaacggcauaauaacagacacuaucaagaguuggagaaacaauauauugagaacacaagagucugaaugugcauguguaaaugguucuugcuuuacuguaaugaccgauggaccaagugauggacaggccucauacaagaucuucagaauagaaaagggaaagauagucaaaucagucgaaaugaaugccccuaauuaucacuaugaggaaugcuccuguuauccugauucuagugaaaucacaugugugugcagggauaacuggcauggcucgaaucgaccgugggugucuuucaaccagaaucuggaauaucagauaggauacauaugcagugggauuuucggagacaauccacgcccuaaugauaagacaggcaguugugguccaguaucgucuaauggagcaaauggaguaaaaggauuuucauucaaauacggcaaugguguuuggauagggagaacuaaaagcauuaguucaagaaaugguuuugagaugauuugggauccgaacggauggacugggacagacaauaacuucucaauaaagcaagauaucgugggaauaaaugaguggucaggauauagcgggaguuuuguucagcauccagaacuaacagggcuggauuguauaagaccuugcuucuggguugaacuaaucagagggcgacccaaagagaacacaaucuggacuagcgggagcagcauauccuuuugugguguaaacagugacacuguggguuggucuuggccagacggugcugaguugccauuuaccauugacaaguaa

SEQ ID NO: 52199 - RNA, 1410 nt, Artificial Sequence
  derived and/or modified CDS sequence (wt) from neuraminidase__InfluenzaA__ADV76582
augaauccaaaucaaaagauaauaacgauuggcucuguuucucucaccauuuccacaguaugcuucuucaugcaaauugccaucuugauaacuacuguaacauugcauuucaagcaauaugaauucaacucccccccaaacaaccaagugaugcugugugaaccaacaauaauagaaagaaacauaacagagauaguguaucugaccaacaccaccauagagaaggaaauaugccccaaacuagcagaauacagaaauuggucaaagccgcaaugugacauuacaggauuugcaccuuuuucuaaggacaauucgauuaggcuuuccgcugguggggacaucugggugacaagagaaccuuaugugucaugcgauccugacaaguguuaucaauuugcccuuggacagggaacaacacuaaacaacgugcauucaaauaacacaguacgugauaggaccccuuaucggacccuauugaugaaugaguuagguguuccuuuucaucuggggaccaagcaagugugcauagcaugguccagcucaaguugucacgauggaaaagcauggcugcauguuuguauaacgggggaugauaaaaaugcaacugcuagcuucauuuacaaugggaggcuuguagauaguguuguuucaugguccaaagaaauccucaggacccaggagucagaaugcguuuguaucaauggaacuuguacaguaguaaugacugaugggagugcuucaggaaaagcugauacuaaaauacuauucauugaggaggggaaaaucguucauacuagcacauugucaggaagugcucagcaugucgaggagugcucuugcuauccucgauauccuggugucagaugugucugcagagacaacuggaaaggcuccaauaggcccaucguagauauaaacauaaaggaucauagcauuguuuccaguuauguguguucaggacuuguuggagacacacccagaaaaaacgacagcuccagcaguagccauuguuuggauccuaacaaugaagaagguggucauggagugaaaggcugggccuuugaugauggaaaugacguguggaugggaagaacgaucaacgagacgucacgcuuaggguaugaaaccuucaaagucauugaaggcugguccaacccuaaguccaaauugcagauaaauaggcaagucauaguugacaaagguaauagguccgguuauucugguauuuucucuguugaaggcaaaagcugcaucaaucggugcuuuuauguggaguugauuaggggaagaaaagaggaaacugaagucuuguggaccucaaacaguauuguuguguuuuguggcaccucagguacauauggaacaggcucauggccugauggggcggaccucaaucucaugccuauauaa

SEQ ID NO: 52200 - RNA, 1410 nt, Artificial Sequence; identical to SEQ ID NO: 49595
  derived and/or modified CDS sequence (wt) from neuraminidase__InfluenzaA__ADV76590

SEQ ID NO: 52201 - RNA, 1410 nt, Artificial Sequence; identical to SEQ ID NO: 49595
  derived and/or modified CDS sequence (wt) from neuraminidase__InfluenzaA__ADV76601

SEQ ID NO: 52202 - RNA, 1410 nt, Artificial Sequence; identical to SEQ ID NO: 51303
  derived and/or modified CDS sequence (wt) from neuraminidase__InfluenzaA__ADV76612

SEQ ID NO: 52203 - RNA, 1410 nt, Artificial Sequence; identical to SEQ ID NO: 49595
  derived and/or modified CDS sequence (wt) from neuraminidase__InfluenzaA__ADV76623

SEQ ID NO: 52204 - RNA, 1410 nt, Artificial Sequence
  derived and/or modified CDS sequence (wt) from neuraminidase__InfluenzaA__ADV76634
augaauccaaaucaaaagauaauaacuauuggcucuguuucucucaccauuuccacaauaugcuucuucaugcaaauugccaucuugauaacuacuguaacauugcauuucaagcaauaugaauucaacucccccccaaacaaccaagugaugcugugugaaccaacaauaauagaaagaaacauaacagagauaguguaucugaccaacaccaccauagagaaggaaauaugccccaaacuagcagaauacagaaauuggucaaagccgcaaugugacauuacaggguuugcaccuuuuucuaaggacaauucgauuaggcuuuccgcugguggggacaucugggugacaagagaaccuuaugugucaugcgauccugacaaguguuaucaauuugcccuuggacagggaacaacacuaaacaacguacauucaaauaacacaguacgugauaggaccccuuaucggacccuauugaugaaugaguuagguguuccuuuucaucuggggaccaagcaagugugcauagcaugguccagcucaaguugucacgauggaaaagcauggcugcauguuuguauaacgggggaugauaaaaaugcaacugcuagcuucauuuacaaugggaggcuuguagauaguguuguuucaugguccaaagaaauccucaggacccaggagucagaaugcguuuguaucaauggaacuugcacaguaguaaugacugaugggagugcuucaggaaaagcugauacuaaaauacuauucauugaggaggggaaaaucguucauacuagcacauugucaggaagugcucagcaugucgaggagugcuccugcuauccucgauauccuggugucagaugugucugcagagacaacuggaaaggauccaauaggcccaucguggauauaaacauaaaggaucauagcauuguuuccaguuauguguguucaggacuuguuggagacacacccagaaaaaacgacagcuccagcaguagccauuguuuggauccuaacaaugaggaagguggucauggggugaaaggcugggccuuugaugauggaaaugacguguggaugggaagaacgaucagcgagaagucacgcuuaggguaugaaaccuucaaagucauugaaggcugguccaacccuaaguccaaauugcagauaaauaggcaagucauaguugacagagguaauagguccgguuauucugguauuuucucuguugaaggcaaaagcugcaucaaucggugcuuuuauguggaguugauaaggggaagaaaagaggaaacugaagucuuguggaccucaaacaguauuguuguguuuuguggcaccucagguacauauggaacaggcucauggccugauggggcggacaucaaucucaugccuauauaa

SEQ ID NO: 52205 - RNA, 1410 nt, Artificial Sequence; identical to SEQ ID NO: 51478
  derived and/or modified CDS sequence (wt) from neuraminidase__InfluenzaA__ADV76645

SEQ ID NO: 52206 - RNA, 1410 nt, Artificial Sequence
  derived and/or modified CDS sequence (wt) from neuraminidase__InfluenzaA__ADV76667
augaauccaaaucaaaagauaauaacaauuggcucugucucucucaccauugcaacaguaugcuuccucaugcagauugccauccugguaacuacuguaacauugcauuuuaagcaauaugagugcgacucccccgcgagcaaccaaguaaugccgugugaaccaauaauaauagaaaggaacauaacagagauaguguauuugaauaacaccaccauagagaaagagauaugccccaaaguaguggaauacagaaauuggucaaagccgcaaugucaaauuacaggauuugcaccuuuuucuaaggacaauucaauccggcuuucugcugguggggacauuugggugacgagagaaccuuaugugucaugcgaucauggcaaguguuaucaauuugcacucgggcaggggaccacacuagacaacaaacauucaaaugacacaauacaugauagaaucccucaucgaacccuauuaaugaaugaguuggguguuccauuucauuuaggaaccaggcaaguguguauagcaugguccagcucaaguugucacgauggaaaagcauggcugcauguuuguaucacuggggaugacaaaaaugcaacugcuagcuucauuuaugacgggaggcuuguggacaguauugguucauggucucaaaauauccucagaacccaggagucggaaugcguuuguaucaaugggacuugcacaguaguaaugacugauggaagugcuucaggaagagccgauacuagaauacuauucauugaagaggggaaaauuguccauauuagcccauugucaggaagugcucagcauguagaagaguguuccuguuauccuagauauccuggcgucagauguaucugcagagacaacuggaaaggcucuaauaggcccgucguagacauaaauauggaagauuauagcauugauuccaguuaugugugcucagggcuuguuggcgacacaccuagaaacgacgacagaucuagcaauagcaaaagcaggaauccuaacaaugagagagggaaucaaggagugaaaggcugggccuuugacaauggagaugacguguggaugggaagaacgaucagcagggauuuacgcucagguuaugaaacuuucaaagucauuggugguugguccacaccuaauuccaaaucgcagaucaauagacaagucauaguugacagcgauaaucggucagguuacucugguauuuucucuguugagggcaaaagcugcaucaauaggugcuuuuauguggaguugauaaggggaaggaaacaggagacuagagugugguggaccucaaacaguauuguuguguuuuguggcacuucagguaccuauggaacaggcucauggccugauggggcgaacaucaauuucaugccuauauaa

SEQ ID NO: 52207 - RNA, 1410 nt, Artificial Sequence; identical to SEQ ID NO: 51480
  derived and/or modified CDS sequence (wt) from neuraminidase__InfluenzaA__ADV76676

SEQ ID NO: 52208 - RNA, 1410 nt, Artificial Sequence
  derived and/or modified CDS sequence (wt) from neuraminidase__InfluenzaA__ADV76697
augaauccaaaucaaaagauaauaacgauuggcucuguuucucucaccauuuccacaauaugcuucuucaugcaaauugccaucuugauaacuacuguaacauugcauuucaagcaauaugaauucaacucccccccaaacaaccaagugaugcugugugaaccaacaauaauagaaaaaaacauaacagagauaguguaucugaccaacaccaccauagagaaggaaauaugccccaaacuagcagaauacagaaauuggucaaagccgcaaugugacauuacaggguuugcaccuuuuucuaaggacaauucaauuaggcuuuccgcugguggggacaucugggugacaagagaaccuuaugugucaugcgauccugacaaguguuaucaauuugcccuuggacagggaacaacacuaaacaacguacauucaaauaacacaguacgugauaggaccccuuaucggacccuauugaugaaugaguuagguguuccuuuucaucuggggaccaagcaagugugcauagcaugguccagcucaaguugucacgauggaaaagcauggcugcauguuuguauaacgggggaugauaaaaaugcaacugcuagcuucauuuacaaugggaggcuuguagauaguguuguuucaugguccaaagaaauccucaggacccaggagucagaaugcguuuguaucaauggaacuuguacaguaguaaugacugaugggagugcuucaggaaaagcugauacuaaaauacuauucauugaggaggggaaaaucguucauacuagcacauugucaggaagugcucagcaugucgaggagugcuccugcuauccucgauauccuggugucagaugugucugcagagacaacuggaaaggauccaauaggcccaucguagauauaaacauaaaggaucauagcauugucuccaguuauguguguucaggacuuguuggagacacacccagaaaaaacgacagcuccagcaguagccauuguuuggauccuaacaaugaggaagguggucauggggugaaaggcugggccuuugaugauggaaaugacguguggaugggaagaacgaucagcgagaagucacgcuuaggguaugaaaccuucaaagucauugagggcugguccaacccuaaguccaaauugcagauaaauaggcaagucauaguugacagagguaauagguccgguuauucugguauuuucucuguugaaggcaaaagcugcaucaaucggugcuuuuauguggaguugauaaggggaagaaaagaggaaacugaagucuuguggaccucaaacaguauuguuguguuuuguggcaccucagguacauauggaacaggcucauggccugauggggcggacaucaaucucaugccuauauaa

SEQ ID NO: 52209 - RNA, 1410 nt, Artificial Sequence
  derived and/or modified CDS sequence (wt) from neuraminidase__InfluenzaA__ADV76708
augaauccaaaucaaaagauaauaacgauuggcucuguuucucucaccauuuccacaauauguuucuucaugcaaaccgccauccugauaacuacuguaacauugcauuucaagcaaugugaauucaacucccccccaaacaaccaagugaugcugugugaaccaacaauaauagaaagaaacauaacagagauaguguaucugaccaacaucaccauagagaaggaaauaugccccaaacuagcagaauacagaaauuggucaaagccgcaaugugacauuacaggauuugcaccuuuuucuaaggacaauucgauuaggcuuuccgcugguggggacaucugggugacaagagaaccuuaugugucaugcgauccugacaaguguuaucaauuugcccuuggacagggaacaacgcuaaacaacgugcauucaaauaacacaguacgugauaggaccccuuaucggacucuauugaugaaugaguuagguguuccuuuucaucuggggaccaagcaagugugcauagcaugguccagcucaaguugucacgauggaaaagcauggcugcauguuuguauaacgggggaugauaaaaaugcaacugcuaguuucauuuacaaugggaggcuuguagauaguguuguuucaugguccaaagaaauccucaggacccaggagucagaaugcguuuguaucaauggaacuuguacaguaguaaugacugaugggagugcuucaggaaaagcugauacuaaaauacuauucauugaggaggggaaaaucguucauacuagcacauugucaggaagugcucagcaugucgaggagugcuccugcuauccucgauauccuggugucagaugugucugcagagacaacuggaaaggcuccaauaggcccaucguagauauaaacauaaaggaucauagcauuguuuccaguuauguguguucaggacuuguuggagacacacccagaaaaaacgacagcuccagcaguagccauuguuuggauccuaacaaugaagaagguggucauggagugaaaggcugggccuuugaugauggaaaugacguguggaugggaagaacgaucagcgagaaaucacgcuuaggguaugaaaccuucaaagucauugaaggcugguccaacccuaaguccaaauugcagauaaauaggcaagucauaguugacagagguaauagguccgguuauucugguauuuucucuguugaaggcaaaagcugcaucaaucggugcuuuuauguggaguugauaaggggaaggaaagaggaaacugaagucuuguggaccucaaacaguauuguuguguuuuguggcaccucagguacauauggaacaggcucauggccugauggggcggacaucaaucucaugccuauauaa

SEQ ID NO: 52210 - RNA, 1410 nt, Artificial Sequence
  derived and/or modified CDS sequence (wt) from neuraminidase__InfluenzaA__ADV76719
augaauccaaaucaaaagauaauaacgauuggcucuguuucucucaccauuuccacaauaugcuucuucaugcaaauugccaucuugauaacuacuguaacauugcauuucaagcaauaugaauucaacucccccccaaacaaccaagugaugcugugugaaccaacaauaauagaaaaaaacauaacagagauaguguaucugaccaacaccaccauagagaaggaaauaugccccaaacuagcagaauacagaaauuggucaaagccgcaaugugacauuacaggguuugcaccuuuuucuaaggacaauucgauuaggcuuuccgcugguggggacaucugggugacaagagaaccuuaugugucaugcgauccugacaaguguuaucaauuugcccuuggacagggaacaacacuaaacaacguacauucaaauaacacaguacgugauaggaccccuuaucggacccuauugaugaaugaguuagguguuccuuuucaucuggggaccaagcaagugugcauagcaugguccagcucaaguugucacgauggaaaagcauggcugcauguuuguauaacgggggaugauaaaaaugcaacugcuagcuucauuuacaaugggaggcuuguagauaguguuguuucaugguccaaagaaauccucaggacccaggagucagaaugcguuuguaucaauggaacuuguacaguaguaaugacugaugggagugcuucaggaaaagcugacacuaaaauacuauucauugaggaggggaaaaucguucauacuagcacauugucaggaagugcucagcaugucgaggagugcuccugcuauccucgauauccuggugucagaugugucugcagagacaacuggaaaggauccaauaggcccaucguagauauaaacauaaaggaucauagcauugucuccaguuauguguguucaggacuuguuggagacacacccagaaaaaacgacagcuccagcaguagccauuguuuggauccuaacaaugaggaagguggucauggggugaaaggcugggccuuugaugauggaaaugacguguggaugggaagaacgaucagcgagaagucacgcuuaggguaugaaaccuucaaagucauugaaggcugguccaacccuaaguccaaauugcagaugaauaggcaagucauaguugacagagguaauagguccgguuauucugguauuuucucuguugaaggcaaaagcugcaucaaucggugcuuuuauguggaguugauaaggggaagaaaagaggaaacugaagucuuguggaccucaaacaguauuguuguguuuuguggcaccucagguacauauggaacaggcucauggccugauggggcggacaucaaucucaugccuauauaa

SEQ ID NO: 52211 - RNA, 1410 nt, Artificial Sequence
  derived and/or modified CDS sequence (wt) from neuraminidase__InfluenzaA__ADV76730
augaauccaaaucaaaagauaauaacgauuggcucuguuucucucaccauuuccacaauaugcuucuucaugcaaauugccaucuugauaacuacuguaacauugcauuucaagcaauaugaauucaacucccccccaaacaaccaagugaugcugugugaaccaacaauaauagaaagaaacauaacagagauaguguaucugaccaacaccaccauagagaaggaaauaugccccaaacuagcagaauacagaaauuggucaaagccgcaaugugacauuacaggguuugcaccuuuuucuaaggacaauucgauuaggcuuuccgcugguggggacaucugggugacaagagaaccuuaugugucaugcgauccugacaaguguuaucaauuugcccuuggacagggaacaacacuaaacaacguacauucaaauaacacaguacgugauaggaccccuuaucggacccuauugaugaaugaguuagguguuccuuuucaucuggggaccaagcaagugugcauagcaugguccagcucaaguugucacgauggaaaagcauggcugcauguuuguauaacgggggaugauaaaaaugcaacugcuagcuucauuuacaaugggaggcuuguagauaguguuguuucaugguccaaagaaacccucaggacccaggagucagaaugcguuuguaucaauggaacuuguacaguaguaaugacugaugggagugcuucaggaaaagcugauacuaaaauacuauucauugaggaggggaaaaucguucauacuagcacauugucaggaagugcucagcaugucgaggagugcuccugcuauccucgauauccuggugucagaugugucugcagagacaacuggaaaggauccaauaggcccaucguagauauaaacauaaaggaucauagcauugucuccaguuauguguguucaggacuuguuggagacacacccagaaaagacgacagcuccagcaguagccauuguuuggauccuaacaaugaggaagguggucauggggugaaaggcugggccuuugaugauggaaaugacguguggaugggaagaacgaucagcgagaagucacgcuuaggguaugaaaccuucaaagucauugaaggcugguccaacccuaaguccaaauugcagauaaauaggcaagucauaguugacagagguaauagguccgguuauucugguauuuucucuguugaaggcaaaagcugcaucaaucggugcuuuuauguggaguugauaaggggaagaaaagaggaaacugaagucuuguggaccucaaacaguauuguuguauuuuguggcaccucagguacauauggaacaggcucauggccugauggggcggacaucaaucucaugccuauauaa

SEQ ID NO: 52212 - RNA, 1410 nt, Artificial Sequence
  derived and/or modified CDS sequence (wt) from neuraminidase__InfluenzaA__ADV78132
augaauccaaaccaaaagauaauaaccauugguucggucuguaugacaauuggaauggcuaacuuaauauuacaaauuggaaacauaaucucaauauggauuagccacucaauucaacuugggaaucaaagucagauugaaacaugcaaucaaagcgucauuacuuaugaaaacaacacuugguuaaaucagacauauguuaacaucagcaacaccaacuuugcugcuggacagucagugguuuccgugaaauuagcgggcaauuccucucucugcccuguuaguggaugggcuauauacaguaaagacaacaguauaagaaucgguuccaagggggauguguuugucauaagggaaccauucauaucaugcucccccucggaaugcagaaccuucuucuugacucaaggggccuuacuaaaugacaaacauuccaauggaaccauuaaagacaggagcccauaucgaacccuaaugagcuguccuauuggugaaguucccucuccauacaacucaagauuugagucagucgcuuggucagcaagugcuugucaugauggcaucaauuggcuaacaauuggaauuucuggcccagacaauggggcaguggcuguguuaaaguacaacggcauaauaacagacacuaucaagaguuggagaaacaauauauugagaacacaagaaucugaaugugcauguguaaaugguucuugcuuuaccauaaugaccgauggaccaagugauggacaggccucauacaagaucuucagaauagaaaagggaaagauagucaaaucagucggaaugaaugccccuaauuaucacuaugaggaaugcuccuguuauccugauucuagugaaaucacaugugugugcagggauaacuggcauggcucgaaucgaccgugggugucuuucaaccagaaucuggaauaucagauaggauacauaugcagugggauuuucggagacaauccacgcccuaaugauaagacaggcaguugugguccaguaucgucuaauggagcaaauggaguaaaaggauuuucauucaaauacggcaaugguguuuggauagggagaacuaaaagcauuaguucaagaaaagguuuugagaugauuugggauccaaacggauggacugggacagacaauaacuucucaauaaagcaagauaucguaggaauaaaugaguggucaggauauagcgggaguuuuguucagcauccagaacuaacagggcuggauuguauaagaccuugcuucuggguugaacuaaucagagggcgacccaaagagaacacaaucugggcuagcgggagcagcauauccuuuugugguguaaacagugacacuguggguuggucuuggccagacggugcugaguugccauuuaucauugacaaguaa

SEQ ID NO: 52213 - RNA, 1413 nt, Artificial Sequence
  derived and/or modified CDS sequence (wt) from neuraminidase__InfluenzaA__ADW09104
augaacccaaaucaaaagauaauaaccauuggaucaaucaguauagcaaucggaauaauuagucuaauguugcaaauaggaaauauuauuucaauaugggcuagucacucaauccaaacuggaagucaaaacaacacuggaauaugcaaccaaagaaucaucacauaugaaaacagcaccugggugaaucacacauauguuaauauuaacaacacuaauguuguugcuggagaggacaaaacgucagugacauuggccggcaauucaucucuuuguucuaucaguggaugggcuauauacacaaaagacaacagcauaagaauuggcuccaaaggagauguuuuugucauaagagaaccuuucauaucauguucucacuuggaaugcagaaccuuuuuucugacccaaggcgcucuauuaaaugacaaacauucaaaugggaccguaaaggacagaaguccuuauagggccuuaaugagcuguccucuaggugaagcuccguccccauacaauucaaaguucgaaucaguugcauggucagcaagcgcaugccaugauggcaugggcugguugacaaucggaauuucugguccagacaauggagcuguggcuguacuaaaauacaacggaauaauaacuggaaccauaaaaaguuggaaaaagcaaauauuaagaacacaagagucugaaugugucuguaugaacgggucauguuucaccauaaugaccgauggcccgaauaauaaagccgccucguacaaaauuuucaagaucgaaaaggggaagguuacuaaaucaauagaguugaaugcacccaauuuuuauuacgaggaaugcuccuguuacccagacacuggcauagugauguguguaugcagggacaacuggcaugguucaaaucgaccuugggugucuuuuaaucaaaauuuggauuaucaaauaggauacaucugcaguggaguguuuggugacaauccgcgucccgaagauggagagggcagcugcaauccagugacuguugauggagcaaacggaguaaaaggguuuucauacaaauaugguaaugguguuuggauaggaaggaccaaaaguaacagacuuagaaagggguuugagaugauuugggauccuaauggauggacaaauaccgacagugauuucucagugaaacaggauguuguagcaauaacugauuggucaggguacagcggaaguuucguccaacauccugaguugacaggauuggacuguauaagaccuugcuucuggguugaguuagucagagggcugccuagagaaaauacaacaaucuggacuagugggagcagcauuucuuuuuguggcguuaauagugauacugcaaacuggucuuggccagacggugcugaguugccguucaccauugacaaguag

SEQ ID NO: 52214 - RNA, 1413 nt, Artificial Sequence
  derived and/or modified CDS sequence (wt) from neuraminidase__InfluenzaA__ADW09114
augaacccaaaucaaaagauaauaaccauuggaucaaucaguauagcaaucggaauaauuagucuaauguugcaaauaggaaauauuauuucaauaugggcuagucacucaauccaaacuggaagucaaaacaacacuggaauaugcaaccaaagaaucaucacauaugaaaacagcaccugggugaaucacacauauguuaauauuaacaacacuaauguuguugcuggagaggacaaaacgucagugacauuggccggcaauucaucucuuuguucuaucaguggaugggcuauauacacaaaagacaacagcauaagaauuggcuccaaaggagauguuuuugucauaagagaaccuuucauaucauguucucacuuggaaugcagaaccuuuuuucugacccaaggcgcucuauuaaaugacaaacauucaaaugggaccguaaaggacagaaguccuuauagggccuuaaugagcuguccucuaggugaagcuccguccccauacaauucaaaguucgaaucaguugcauggucagcaagcgcaugccaugauggcaugggcugguugacaaucggaauuucugguccagacaauggagcuguggcuguacuaaaauacaacggaauaauaacuggaaccauaaaaaguuggaaaaagcaaauauuaagaacacaagagucugaaugugucuguaugaacgggucauguuucaccauaaugaccgauggcccgaguaauaaagccgccucguacaaaauuuucaagaucgaaaaggggaagguuacuaaaucaauagaguugaaugcacccaauuuuuauuacgaggaaugcuccuguuacccagacacuggcauagugauguguguaugcagggacaacuggcaugguucaaaucgaccuugggugucuuuuaaucaaaauuuggauuaucaaauaggauacaucugcaguggaguguuuggugacaauccgcgucccgaagauggagagggcagcugcaauccagugacuguugauggagcaaacggaguaaaaggguuuucauacaaauaugguaaugguguuuggauaggaaggaccaaaaguaacagacuuagaaagggguuugagaugauuugggauccuaauggauggacaaauaccgacagugauuucucagugaaacaggauguuguagcaauaacugauuggucaggguacagcggaaguuucguccaacauccugaguugacaggauuggacuguauaagaccuugcuucuggguugaguuagucagagggcugccuagagaaaauacaacaaucuggacuagugggagcagcauuucuuuuuguggcguuaauagugauacugcaaacuggucuuggccagacggugcugaguugccguucaccauugacaaguag

SEQ ID NO: 52215 - RNA, 1413 nt, Artificial Sequence
  derived and/or modified CDS sequence (wt) from neuraminidase__InfluenzaA__ADW09123
augaacccaaaucaaaagauaauaaccauuggaucaaucaguauagcaaucggaauaaccagucuaauguugcaaauaggaaauauuauuucaauaugggcuagucacucaauccaaacuggaagucaaaacaacacuggaauaugcaaccaaagaaucaucacauaugaaaacagcaccugggugaaucacacauauguuaauauuaacaacacuaauguuguugcuggagaggacaaaacgucagugacauuggccggcaauucaucucuuuguucuaucaguggaugggcuauauacacaaaagacaacagcauaagaauuggcuccaaaggagauguuuuugucauaagagaaccuuucauaucauguucucacuuggaaugcagaaccuuuuuucugacccaaggcgcucuauuaaaugacaaacauucaaaugggaccguaaaggacagaaguccuuauagggccuuaaugagcuguccucuaggugaagcuccguccccauacaauucaaaguucgaaucaguugcauggucagcaagcgcaugccaugauggcaugggcugguugacaaucggaauuucugguccagacaauggagcuguggcuguacuaaaauacaacggaauaauaacuggaaccauaaaaaguuggaaaaagcaaauauuaagaacacaagagucugaaugugucuguaugaacgggucauguuucaccauaaugaccgauggcccgaguaauaaagccgccucguacaaaauuuucaagaucgaaaaggggaagguuacuaaaucaauagaguugaaugcacccaauuuuuauuacgaggaaugcuccuguuacccagacacuggcauagugauguguguaugcagggacaacuggcaugguucaaaucgaccuugggugucuuuuaaucaaaauuuggauuaucaaauaggauacaucugcaguggaguguuuggugacaauccgcgucccgaagauggagagggcagcugcaauccagugacuguugauggagcagacggaguaaaaggguuuucauacaaauaugguaaugguguuuggauaggaaggaccaaaaguaacagacuuagaaagggguuugagaugauuugggauccuaauggauggacaaauaccgacagugauuucucagugaaacaggauguuguagcaauaacugauuggucaggguacagcggaaguuucguccaacauccugaguugacaggauuggacuguauaagaccuugcuucuggguugaguuagucagagggcugccuagagaaaauacaacaaucuggacuagugggagcagcauuucuuuuuguggcguuaauagugauacugcaaacuggucuuggccagacggugcugaguugccguucaccauugacaaguag

SEQ ID NO: 52216 - RNA, 1413 nt, Artificial Sequence
  derived and/or modified CDS sequence (wt) from neuraminidase__InfluenzaA__ADW09156
augaacccaaaucaaaagauaauaaccauuggaucaaucaguauagcaaucggaauaauuagucuaauguugcaaauaggaaauauuauuucaauaugggcuagucacucaauccaaacuggaagucaaaacaacacuggaauaugcaaccaaagaaucaucacauaugaaaacagcaccugggugaaucacacauauguuaauauuaacaacacuaauguuguugcuggagaggacaaaacgucagugacauuggccggcaauucaucucuuuguucuaucaguggaugggcuauauacacaaaagacaacagcauaagaauuggcuccaaaggagauguuuuugucauaagagaaccuuucauaucauguucucacuuggaaugcagaaccuuuuuucugacccaaggcgcucuauuaaaugacaaacauucaaaugggaccguaaaggacagaaguccuuauagggccuuaaugagcuguccucuaggugaagcuccguccccauacaauucaaaguucgaaucaguugcauggucagcaagcgcaugccaugauggcaugggcugguugacaaucggaauuucugguccagacaauggagcuguggcuguacuaaaauacaacggaauaauaacuggaaccauaaaaaguuggaaaaagcaaauauuaagaacacaagagucugaaugugucuguaugaacgggucauguuucaccauaaugaccgauggcccgaguaauaaagccgccucguacaaaauuuucaagaucgaaaaggggaagguuacuaaaucaauagaguugaaugcacccaauuuuuauuacgaggaaugcuccuguuacccagacacuggcauagugauguguguaugcagggacaacuggcaugguucaaaucgaccuugggugucuuuuaaucaaaauuuggauuaucaaauaggauacaucugcaguggaguguuuggugacaauccgcgucccgaagauggagagggcagcugcaauccagugacuguugauggagcagacggaguaaaaggguuuucauacaaauaugguaaugguguuuggauaggaaggaccaaaaguaacagacuuagaaagggguuugagaugauuugggauccuaauggauggacaaauaccgacagugauuucucagugaaacaggauguuguagcaauaacugauuggucaggguacagcggaaguuucguccaacauccugaguugacaggauuggacuguauaagaccuugcuucuggguugaguuagucagagggcugccuagagaaaauacaacaaucuggacuagugggagcagcauuucuuuuuguggcguuaauagugauacugcaaacuggucuuggccagacggugcugaguugccguucaccauugacaaguag

SEQ ID NO: 52217 - RNA, 1413 nt, Artificial Sequence
  derived and/or modified CDS sequence (wt) from neuraminidase__InfluenzaA__ADW09167
augaacccaaaucaaaagauaauaaccauuggaucaaucaguauagcaaucggaauaauuagucuaauguugcaaauaggaaauauuauuucaauaugggcuagucacucaauccaaacuggaagucaaaacaacacuggaauaugcaaccaaagaaucaucacauaugaaaacagcaccugggugaaucacacauauguuaauauuaacaacacuaauguuguugcuggagaggacaaaacgucagugacauuggccggcaauucaucucuuuguucuaucaguggaugggcuauauacacaaaagacaacagcauaagaauuggcuccaaaggagauguuuuugucauaagagaaccuuucauaucauguucucacuuggaaugcagaaccuuuuuucugacccaaggcgcucuauuaaaugacaaacauucaaaugggaccguaaaggacagaaguccuuauagggccuuaaugagcuguccucuaggugaagcuccguccccauacaauucaaaguucgaaucaguugcauggucagcaagcgcaugccaugauggcaugggcugguugacaaucggaauuucugguccagacaauggagcuguggcuguacuaaaauacaacggaauaauaacuggaaccauaaaaaguuggaaaaagcaaauauuaagaacacaagagucugaaugugucuguaugaacgggucauguuucaccauaaugaccgauggcccgaguaauaaagccgccucguacaaaauuuucaagaucgaaaaggggaagguuacuaaaucaauagaguugaaugcacccaauuuuuauuacgaggaaugcuccuguuacccagacacuggcauagugauguguguaugcagggacaacuggcaugguucaaaucgaccuugggugucuuuuaaucaaaauuuggauuaucaaauaggauacaucugcaguggaguguuuggugacaauccgcgucccgaagauggagagggcagcugcaauccagugacuguuaauggagcagacggagugaaaggguuuucauacaaauaugguaaugguguuuggauaggaaggaccaaaaguaacagacuuagaaagggguuugagaugauuugggauccuaauggauggacaaauaccgacagugauuucucagugaaacaggauguuguagcaauaacugauuggucaggguacagcggaaguuucguccaacauccugaguugacaggauuggacuguauaagaccuugcuucuggguugaguuagucagagggcugccuagagaaaauacaacaaucuggacuagugggagcagcauuucuuuuuguggcguuaauagugauacugcaaacuggucuuggccagacggugcugaguugccguucaccauugacaaguag

SEQ ID NO: 52218 - RNA, 1413 nt, Artificial Sequence
  derived and/or modified CDS sequence (wt) from neuraminidase__InfluenzaA__ADW09178
augaacccaaaucaaaagauaauaaccauuggaucaaucaguauagcaaucggaauaauuagucuaauguugcaaauaggaaauauuauuucaauaugggcuagucacucaauccaaacuggaagucaaaacaacacuggaauaugcaaccaaagaaucaucacauaugaaaacagcaccugggugaaucacacauauguuaauauuaacaacacuaauguuguugcuggagaggacaaaacgucagugacauuggccggcaauucaucucuuuguucuaucaguggaugggcuauauacacaaaagacaacagcauaagaauuggcuccaaaggagauguuuuugucauaagagaaccuuucauaucauguucucacuuggaaugcagaaccuuuuuucugacccaaggcgcucuauuaaaugacaaacauucaaaugggaccguaaaggacagaaguccuuauagggccuuaaugagcuguccucuaggugaagcuccguccccauacaauucaaaguucgaaucaguugcauggucagcaagcgcaugccaugauggcaugggcugguugacaaucggaauuucugguccagacaauggagcuguggcuguacuaaaauacaacggaauaauaacuggaaccauaaaaaguuggaaaaagcaaauauuaagaacacaagagucugaaugugucuguaugaacgggucauguuucaccauaaugaccgauggcccgaguaauaaagccgccucguacaaaauuuucaagaucgaaaaggggaagguuacuaaaucaauagaguugaaugcacccaauuuuuauuacgaggaaugcuccuguuacccagacacuggcauagugauguguguaugcagggacaacuggcaugguucaaaucgaccuugggugucuuuuaaucaaaauuuggauuaucaaauaggauacaucugcaguggaguguuuggugacaauccccgucccgaagauggagagggcagcugcaauccagugacuguugauggagcaaacggaguaaaaggguuuucauacaaauaugguaaugguguuuggauaggaaggaccaaaaguaacagacuuagaaagggguuugagaugauuugggauccuaauggauggacaaauaccgacagugauuucucagugaaacaggauguuguagcaauaacugauuggucaggguacagcggaaguuucguccaacauccugaguugacaggauuggacuguauaagaccuugcuucuggguugaguuagucagagggcugccuagagaaaauacaacaaucuggacuagugggagcagcauuucuuuuugugguguuaauagugauacugcaaacuggucuuggccagacggugcugaguugccguucaccauugacaaguag

SEQ ID NO: 52219 - RNA, 1413 nt, Artificial Sequence; identical to SEQ ID NO: 52214
  derived and/or modified CDS sequence (wt) from neuraminidase__InfluenzaA__ADW09189

SEQ ID NO: 52220 - RNA, 1413 nt, Artificial Sequence
  derived and/or modified CDS sequence (wt) from neuraminidase__InfluenzaA__ADW09211
augaacccaaaucaaaagauaauaaccauuggaucaaucaguauagcaaucggaauaauuagucuaauguugcaaauaggaaauauuauuucaauaugggcuagucacucaauccaaacuggaagucaaaacaacacuggaauaugcaaccaaagaaucaucacauaugaaaacagcaccugggugaaucacacauauguuaauauuaacaacacuaauguuguugcuggagaggacaaaacgucagugacauuggccggcaauucaucucuuuguucuaucaguggaugggcuauauacacaaaagacaacagcauaagaauuggcuccaaaggagauguuuuugucauaagagaaccuuucauaucauguucucacuuggaaugcagaaccuuuuuucugacccaaggcgcucuauuaaaugacaaacauucaaaugggaccguaaaggacagaaguccuuauagggccuuaaugagcuguccucuaggugaagcuccguccccauacaauucaaaguucgaaucaguugcauggucagcaagcgcaugccaugauggcaugggcugguugacaaucggaauuucugguccagacaauggagcuguggcuguacuaaaauacaacggaauaauaacuggaaccauaaaaaguuggaaaaagcaaauauuaagaacacaagagucugaaugugucuguaugaacgggucauguuucaccauaaugaccgauggcccgaguaauaaagccgccucguacaaaauuuucaagaucgaaaaggggaagguuacuaaaucaauagaguugaaugcacccaauuuuuauuacgaggaaugcuccuguuacccagacacuggcauagugauguguguaugcagggacaacuggcaugguucaaaucgaccuugggugucuuuuaaucaaaauuuggauuaucaaauaggauacaucugcaguggaguguuuggugacaauccgcgucccgaagauggagagggcagcugcaauccagugacuguuaauggagcagacggaguaaaaggguuuucauacaaauaugguaaugguguuuggauaggaaggaccaaaaguaacagacuuagaaagggguuugagaugauuugggauccuaauggauggacaaauaccgacagugauuucucagugaaacaggauguuguagcaauaacugauuggucaggguacagcggaaguuucguccaacauccugaguugacaggauuggacuguauaagaccuugcuucuggguugaguuagucagagggcugccuagagaaaauacaacaaucuggacuagugggagcagcauuucuuuuuguggcguuaauagugauacugcaaacuggucuuggccagacggugcugaguugccguucaccauugacaaguag

SEQ ID NO: 52221 - RNA, 1413 nt, Artificial Sequence
  derived and/or modified CDS sequence (wt) from neuraminidase__InfluenzaA__ADW09222
augaacccaaaucaaaagauaauaaccauuggaucaaucaguauagcaaucggaauaauuagucuaauguugcaaauaggaaauauuauuucaauaugggcuagucacucaauccaaacuggaagucaaaacaacacuggaauaugcaaccaaagaaucaucacauaugaaaacagcaccugggugaaucacacauauguuaauauuaacaacacuaauguuguugcuggagaggacaaaacgucagugacauuggccggcaauucaucucuuuguucuaucaguggaugggcuauauacacaaaagacaacagcauaagaauuggcuccaaaggagauguuuuugucauaagagaaccuuucauaucauguucucacuuggaaugcagaaccuuuuuucugacccaaggcgcucuauuaaaugacaaacauucaaaugggaccguaaaggacagaaguccuuauagggccuuaaugagcuguccucuaggugaagcuccguccccauacaauucaaaguucgaaucaguugcauggucagcaagcgcaugccaugauggcaugggcugguugacaaucggaauuucugguccagacaauggagcuguggcuguacuaaaauacaacggaauaauaacuggaaccauaaaaaguuggaaaaagcaaauauuaagaacacaagagucugaaugugucuguaugaacgggucauguuucaccauaaugaccgauggcccgaguaauaaagccgccucguacaaaauuuucaagaucgaaaaggggaagguuacuaaaucaauagaguugaaugcacccaauuucuauuacgaggaaugcuccuguuacccagacacuggcauagugauguguguaugcagggacaacuggcaugguucaaaucgaccuugggugucuuuuaaucaaaauuuggauuaucaaauaggauacaucugcaguggaguguuuggugacaauccgcgucccgaagauggagagggcagcugcaauucagugacuguugauggagcagacggaguaaaaggguuuucauacaaauaugguaaugguguuuggauaggaaggaccaaaaguaacagacuuagaaagggguuugagaugauuugggauccuaauggguggacaaauaccgacagugauuucucagugaaacaggauguuguagcaauaacugauuggucaggguacagcggaaguuucguccaacauccugaguugacaggauuggacuguauaagaccuugcuucuggguugaguuagucagagggcugccuagagaaaauacaacaaucuggacuagugggagcagcauuucuuuuuguggcguuaauagugauacugcaaacuggucuuggccagacggugcugaguugccguucaccauugacaaguag

SEQ ID NO: 52222 - RNA, 1413 nt, Artificial Sequence
  derived and/or modified CDS sequence (wt) from neuraminidase__InfluenzaA__ADW09233
augaacccaaaucaaaagauaauaaccauuggaucaaucaguauagcaaucggaacaauuagucuaauguugcaaauaggaaauauuauuucaauaugggcuagucacucaauccaaacuggaagucaaaacaacacuggaauaugcaaccaaagaaucaucacauaugaaaacagcaccugggugaaucacacauauguuaauauuaacaacacuaauguuguugcuggagaggacaaaacgucagugacauuggccggcaauucaucucuuuguucuaucaguggaugggcuauauacacaaaagacaacagcauaagaauuggcuccaaaggagauguuuuugucauaagagaaccuuucauaucauguucucacuuggaaugcagaaccuuuuuucugacccaaggcgcucuauuaaaugacaaacauucaaaugggaccguaaaggacagaaguccuuauagggccuuaaugagcuguccucuaggugaagcuccguccccauacaauucaaaguucgaaucaguugcauggucagcaagcgcaugccaugauggcaugggcugguugacaaucggaauuucugguccagacaauggagcuguggcuguacuaaaauacaacggaauaauaacuggaaccauaaaaagcuggaaaaagcaaauauuaagaacacaagagucugaaugugucuguaugaacgggucauguuucaccauaaugaccgauggcccgaguaauaaagccgccucguacaaaauuuucaagaucgaaaaggggaagguuacuaaaucaauagaguugaaugcacccaauuuuuauuacgaggaaugcuccuguuacccagacacuggcauagugauguguguaugcagggacaacuggcaugguucaaaucgaccuugggugucuuuuaaucaaaauuuggauuaucaaauaggauacaucugcaguggaguguuuggugacaauccgcgucccgaagauggagagggcagcugcaauccagugacuguugauggagcaaacggaguaaaaggguuuucauacaaauaugguaaugguguuuggauaggaaggaccaaaaguaacagacuuagaaagggguuugagaugauuugggauccuaauggauggacaaauaccgacagugauuucucagugaaacaggauguuguagcaauaacugauuggucaggguacagcggaaguuucguccaacauccugaguugacaggauuggacuguauaagaccuugcuucuggguugaguuagucagagggcugccuagagaaaauacaacaaucuggacuagugggagcagcauuucuuuuuguggcguuaauagugauacugcaaacuggucuuggccagacggugcugaguugccguucaccauugacaaguag

SEQ ID NO: 52223 - RNA, 1413 nt, Artificial Sequence
  derived and/or modified CDS sequence (wt) from neuraminidase__InfluenzaA__ADW09244
augaacccaaaucaaaagauaauaaccauuggaucaaucaguauagcaaucggaauaauuagucuaauguugcaaauaggaaauauuauuucaauaugggcuagucacucaauccaaacuggaagucaaaacaacacuggaauaugcaaccaaagaaucaucacauaugaaaacagcaccugggugaaucacacauauguuaauauuaacaacacuaauguuguugcuggagaggacaaaacgucagugacauuggccggcaauucaucucuuuguucuaucaguggaugggcuauauacacaaaagacaacagcauaagaauuggcuccaaaggagauguuuuugucauaagagaaccuuucauaucauguucucacuuggaaugcagaaccuuuuuucugacccaaggcgcucuauuaaaugacaaacauucaaaugggaccguaaaggacagaaguccuuauagggccuuaaugagcuguccucuaggugaagcuccguccccauacaauucaaaguucgaaucaguugcauggucagcaagcgcaugccaugauggcaugggcugguugacaaucggaauuucugguccagacaauggagcuguggcuguacuaaaauacaacggaauaauaacuggaaccauaaaaaguuggaaaaagcaaauauuaagaacacaagagucugaaugugucuguaugaacgggucauguuucaccauaaugaccgauggcccgaguaauaaagccgccucguacaaaauuuucaagaucgaaaaggggaagguuacuaaaucaauagaguugaaugcacccaauuuuuauuacgaggaaugcuccuguuacccagacacuggcauagugauguguguaugcagggacaacuggcaugguucaaaucgaccuugggugucuuuuaaucaaaauuuggauuaucaaauaggauacaucugcaguggaguguuuggugacaauccgcgucccgaagauggagagggcagcugcaauccagugacuguugauggagcagacggaguaaaaggguuuucauacaaauaugguaaugguguuuggauaggaaggaccaaaaguaacagacuuagaaagggguuugagaugauuugggauccuaauggguggacaaauaccgacagugauuucucagugaaacaggauguuguagcaauaacugauuggucaggguacagcggaaguuucguccaacauccugaguugacaggauuggacuguauaagaccuugcuucuggguugaguuagucagagggcugccuagagaaaauacaacaaucuggacuagugggagcagcauuucuuuuuguggcguuaauagugauacugcaaacuggucuuggccagacggugcugaguugccguucaccauugacaaguag

SEQ ID NO: 52224 - RNA, 1413 nt, Artificial Sequence; identical to SEQ ID NO: 52216
  derived and/or modified CDS sequence (wt) from neuraminidase__InfluenzaA__ADW09255

SEQ ID NO: 52225 - RNA, 1413 nt, Artificial Sequence; identical to SEQ ID NO: 52216
  derived and/or modified CDS sequence (wt) from neuraminidase__InfluenzaA__ADW09266

SEQ ID NO: 52226 - RNA, 1413 nt, Artificial Sequence; identical to SEQ ID NO: 52216
  derived and/or modified CDS sequence (wt) from neuraminidase__InfluenzaA__ADW09277

SEQ ID NO: 52227 - RNA, 1413 nt, Artificial Sequence
  derived and/or modified CDS sequence (wt) from neuraminidase__InfluenzaA__ADW09288
augaacccaaaucaaaagauaauaaccauuggaucaaucaguauagcaaucggaauaauuagucuaauguugcaaauaggaaauauuauuucaauaugggcuagucacucaauccaaacuggaagucaaaacaacacuggaauaugcaaccaaagaaucaucacauaugaaaacagcaccugggugaaucacacauauguuaauauuaacaacacuaauguuguugcuggagaggacaaaacgucagugacauuggccggcaauucaucucuuuguucuaucaguggaugggcuauauacacaaaagacaacagcauaagaauuggcuccaaaggagauguuuuugucauaagagaaccuuucauaucauguucucacuuggaaugcagaaccuuuuuucugacccaaggcgcucuauuaaaugacaaacauucaaaugggaccguaaaggacagaaguccuuauagggccuuaaugagcuguccucuaggugaagcuccguccccauacaauucaaaguucgaaucaguugcauggucagcaagcgcaugccaugauggcaugggcugguugacaaucggaauuucugguccagacaauggagcuguggcuguacuaaaauacaacggaauaauaacuggaaccauaaaaagcuggaaaaagcaaauauuaagaacacaagagucugaaugugucuguaugaacgggucauguuucaccauaaugaccgauggcccgaguaauaaagccgccucguacaaaauuuucaagaucgaaaaggggaagguuacuaaaucaauagaguugaaugcacccaauuuuuauuacgaggaaugcuccuguuacccagacacuggcauagugauguguguaugcagggacaacuggcaugguucaaaucgaccuugggugucuuuuaaucaaaauuuggauuaucaaauaggauacaucugcaguggaguguuuggugacaauccgcgucccgaagauggagagggcagcugcaauccagugacuguugauggagcaaacggaguaaaaggguuuucauacaaauaugguaaugguguuuggauaggaaggaccaaaaguaacagacuuagaaagggguuugagaugauuugggauccuaauggauggacaaauaccgacagugauuucucagugaaacaggauguuguagcaauaacugauuggucaggguacagcggaaguuucguccaacauccugaguugacaggauuggacuguauaagaccuugcuucuggguugaguuagucagagggcugccuagagaaaauacaacaaucuggacuagugggagcagcauuucuuuuuguggcguuaauagugauacugcaaacuggucuuggccagacggugcugaguugccguucaccauugacaaguag

SEQ ID NO: 52228 - RNA, 1413 nt, Artificial Sequence; identical to SEQ ID NO: 52220
  derived and/or modified CDS sequence (wt) from neuraminidase__InfluenzaA__ADW09299

SEQ ID NO: 52229 - RNA, 1413 nt, Artificial Sequence; identical to SEQ ID NO: 52214
  derived and/or modified CDS sequence (wt) from neuraminidase__InfluenzaA__ADW09310

SEQ ID NO: 52230 - RNA, 1413 nt, Artificial Sequence
  derived and/or modified CDS sequence (wt) from neuraminidase__InfluenzaA__ADW09330
augaacccaaaucaaaagauaauaaccauuggaucaaucaguauagcaaucggaauaauuagucuaauguugcaaauaggaaauauuauuucaauaugggcuagucacucaauccaaacuggaagucaaaacaacacuggaauaugcaaccaaagaaucaucacauaugaaaacagcaccugggugaaucacacauauguuaauauuaacaacacuaauguuguugcuggagaggacaaaacgucagugacauuggccggcaauucaucucuuuguucuaucaguggaugggcuauauacacaaaagacaacagcauaagaauuggcuccaaaggagauguuuuugucauaagagaaccuuucauaucauguucucacuuggaaugcagaaccuuuuuucugacccaaggcgcucuauuaaaugacaaacauucaaaugggaccguaaaggacagaaguccuuauagggccuuaaugagcuguccucuaggugaagcuccguccccauacaauucaaaguucgaaucaguugcauggucagcaagcgcaugccaugauggcaugggcugguuaacaaucggaauuucugguccagacaauggagcuguggcuguacuaaaauacaacggaauaauaacuggaaccauaaaaaguuggaaaaagcaaauauuaagaacacaagagucugaaugugucuguaugaacgggucauguuucaccauaaugaccgauggcccgaguaauaaagccgccucguacaaaauuuucaagaucgaaaaggggaagguuacuaaaucaauagaguugaaugcacccaauuuuuauuaugaggaaugcuccuguuacccagacacuggcauagugauguguguaugcagggacaacuggcaugguucaaaucgaccuugggugucuuuuaaucaaaauuuggauuaucaaauaggauacaucugcaguggaguguuuggugacaauccgcgucccgaagauggagagggcagcugcaauccagugacuguugauggagcaaacggaguaaaaggguuuucauacaaauaugguaaugguguuuggauaggaaggaccaaaaguaacagacuuagaaagggguuugagaugauuugggauccuaauggauggacaaauaccgacagugauuucucagugaaacaggauguuguagcaauaacugauuggucaggguacagcggaaguuucguccaacauccugaguugacaggauuggacuguauaagaccuugcuucuggguugaguuagucagagggcugccuagagaaaauacaacaaucuggacuagugggagcagcauuucuuuuuguggcguuaauagugauacugcaaacuggucuuggccagacggugcugaguugccguucaccauugacaaguag

SEQ ID NO: 52231 - RNA, 1413 nt, Artificial Sequence; identical to SEQ ID NO: 52216
  derived and/or modified CDS sequence (wt) from neuraminidase__InfluenzaA__ADW10475

SEQ ID NO: 52232 - RNA, 1413 nt, Artificial Sequence; identical to SEQ ID NO: 52220
  derived and/or modified CDS sequence (wt) from neuraminidase__InfluenzaA__ADW10486

SEQ ID NO: 52233 - RNA, 1413 nt, Artificial Sequence; identical to SEQ ID NO: 52214
  derived and/or modified CDS sequence (wt) from neuraminidase__InfluenzaA__ADW10497

SEQ ID NO: 52234 - RNA, 1413 nt, Artificial Sequence
  derived and/or modified CDS sequence (wt) from neuraminidase__InfluenzaA__ADW10508
augaacccaaaucaaaagauaauaaccauuggaucaaucaguauagcaaucggaauaauuagucuaauguugcaaauaggaaauauuauuucaauaugggcuagucacucaauccaaacuggaagucaaaacaacacuggaauaugcaaccaaagaaucaucacauaugaaaacagcaccugggugaaucacacauauguuaauauuaacaacacuaauguuguugcuggagaggacaaaacguccgugacauuggccggcaauucaucucuuuguucuaucaguggaugggcuauauacacaaaagacaacagcauaagaauuggcuccaaaggagauguuuuugucauaagagaaccuuucauaucauguucucacuuggaaugcagaaccuuuuuucugacccaaggcgcucuaguaaaugacaaacauucaaaugggaccguaaaggacagaaguccuuauagggccuuaaugagcuguccucuaggugaagcuccguccccauacaauucaaaguucgaaucaguugcauggucagcaagcgcaugccaugauggcaugggcugguugacaaucggaauuucugguccagacaauggagcuguggcuguacuaaaauacaacggaauaauaacuggaaccauaaaaaguuggaaaaagcaaauauuaagaacacaagagucugaaugugucuguaugaacgggucauguuucaccauaaugaccgauggcccgaguaauaaagccgccucguacaaaauuuucaagaucgaaaaggggaagguuacuaaauccauagaguugaaugcacccaauuuuuauuacgaggaaugcuccuguuacccagacacuggcauagugauguguguaugcagggacaacuggcaugguucaaaucgaccuugggugucuuuuaaucaaaauuuggauuaucaaauaggauacaucugcaguggaguguuuggugacaauccgcgucccgaagauggagagggcagcugcaauccagugacuguuaauggagcagacggaguaaaaggguuuucauacaaauaugguaaugguguuuggauaggaaggaccaaaaguaacagacuuagaaagggguuugagaugauuugggauccuaauggauggacaaauaccgacagugauuucucagugaaacaggauguuguagcaauaacugauuggucaggguacagcggaaguuucguccaacauccugaguugacaggauuggacuguauaagaccuugcuucuggguugaguuagucagagggcugccuagagaaaauacaacaaucuggacuagugggagcagcauuucuuuuuguggcguuaauagugauacugcaaacuggucuuggccagacggugcugaguugccguucaccauugacaaguag

SEQ ID NO: 52235 - RNA, 1413 nt, Artificial Sequence
  derived and/or modified CDS sequence (wt) from neuraminidase__InfluenzaA__ADW10519
augaacccaaaucaaaagauaauaaccauuggaucaaucaguauagcaaucggaauaauuagucuaauguugcaaauaggaaauauuauuucaauaugggcuagucacucaauccaaacuggaagucaaaacaacacuggaauaugcaaccaaagaaucaucacauaugaaaacagcaccugggugaaucacacauauguuaauauuaacaacacuaauguuguugcuggagaggacaaaacgucagugacauuggccggcaauucaucucuuuguucuaucaguggaugggcuauauacacaaaagacaacagcauaagaauuggcuccaaaggagauguuuuugucauaagagaaccuuucauaucauguucucacuuggaaugcagaaccuuuuuucugacccaaggcgcucuauuaaaugacaaacauucaaaugggaccguaaaggacagaaguccuuauagggccuuaaugagcuguccucuaggugaagcuccguccccauacaauucaaaguucgaaucaguugcauggucagcaagcgcaugccaugauggcaugggcugguugacaaucggaauuucugguccagacaauggagcuguggcuguacuaaaauacaacggaauaauaacuggaaccauaaaaaguuggaaaaagcaaauauuaagaacacaagagucugaaugugucuguaugaacgggucauguuucaccauaaugaccgauggcccgaguaauaaagccgccucguacaaaauuuucaagaucgaaaaggggaagguuacuaaaucaauagaguugaaugcacccaauuuuuauuacgaggaaugcuccuguuacccagacacuggcauagugauguguguaugcagggacaacuggcaugguucaaaucgaccuugggugucuuuuaaucaaaauuuggauuaucaaauaggauacaucugcaguggaguguuuggugacaauccgcgucccgaggauggagagggcagcugcaauccagugacuguugauggagcaaacggaguaaaaggguuuucauacaaauaugguaaugguguuuggauaggaaggaccaaaaguaacagacuuagaaagggguuugagaugauuugggauccuaauggauggacaaauaccgacagugauuucucagugaaacaggauguuguagcaauaacugauuggucaggguacagcggaaguuucguccaacauccugaguugacaggauuggacuguauaagaccuugcuucuggguugaguuagucagagggcugccuagagaaaauacaacaaucuggacuagugggagcagcauuucuuuuuguggcguuaauagugauacugcaaacuggucuuggccagacggugcugaguugccguucaccauugacaaguag

SEQ ID NO: 52236 - RNA, 1413 nt, Artificial Sequence
  derived and/or modified CDS sequence (wt) from neuraminidase__InfluenzaA__ADW10530
augaacccaaaucaaaagauaauaaccauuggaucaaucaguauagcaaucggaauaauuagucuaauguugcaaauaggaaauauuauuucaauaugggcuagucacucaauccaaacuggaagucaaaacaacacuggaauaugcaaccaaagaaucaucacauaugaaaacagcaccugggugaaucacacauauguuaauauuaacaacacuaauguuguugcuggagaggacaaaacgucagugacauuggccggcaauucaucucuuuguucuaucaguggaugggcuauauacacaaaagacaacagcauaagaauuggcuccaaaggagauguuuuugucauaagagaaccuuucauaucauguucucacuuggaaugcagaaccuuuuuucugacccaaggcgcucuauuaaaugacaaacauucaaaugggaccguaaaggacagaaguccuuauagggccuuaaugagcuguccucuaggugaagcuccguccccauacaauucaaaguucgaaucaguugcauggucagcaagcgcaugccaugauggcaugggcugguugacaaucggaauuucugguccagacaauggagcuguggcuguacuaaaauacaacggaauaauaacuggaaccauaaaaaguuggaaaaagcaaauauuaagaacacaagagucugaaugugucuguaugaacgggucauguuucaccauaaugaccgauggcccgaguaauaaagccgccucguacaaaauuuucaagaucgaaaaggggaagguuacuaaaucaauagaguugaaugcacccaauuuuuauuacgaggaaugcuccuguuacccagacacuggcauagugauguguguaugcagggacaacuggcaugguucaaaucgaccuugggugucuuuuaaucaaaauuuggauuaucaaauaggauacaucugcaguggaguuuuuggugacaauccgcgucccgaagauggagagggcagcugcaauccagugacuguugauggagcaaacggaguaaaaggguuuucauacaaauaugguaaugguguuuggauaggaaggaccaaaaguaacagacuuagaaagggguuugagaugauuugggauccuaauggauggacaaauaccgacagugauuucucagugaaacaggauguuguagcaauaacugauuggucaggguacagcggaaguuucguccaacauccugaguugacaggauuggacuguauaagaccuugcuucuggguugaguuagucagagggcugccuagagaaaauacaacaaucuggacuagugggagcagcauuucuuuuuguggcguuaauagugauacugcaaacuggucuuggccagacggugcugaguugccguucaccauugacaaguag

SEQ ID NO: 52237 - RNA, 1413 nt, Artificial Sequence
  derived and/or modified CDS sequence (wt) from neuraminidase__InfluenzaA__ADW10541
augaacccaaaucaaaagauaauaaccauuggaucaaucaguauagcaaucggaauaauuagucuaauguugcaaauaggaaauauuauuucaauaugggcuagucacucaauccaaacuggaagucaaaacaacacuggaauaugcaaccaaagaaucaucacauaugaaaacagcaccugggugaaucacacauauguuaauauuaacaacacuaauguuguugcuggagaggacaaaacgucagugacauuggccggcaauucaucucuuuguucuaucaguggaugggcuauauacacaaaagacaacagcauaagaauuggcuccaaaggagauguuuuugucauaagagaaccuuucauaucauguucucacuuggaaugcagaaccuuuuuucugacccaaggcgcucuauuaaaugacaaacauucaaaugggaccguaaaggacagaaguccuuauagggccuuaaugagcuguccucuaggugaagcuccguccccauacaauucaaaguucgaaucaguugcauggucagcaagcgcaugccaugauggcaugggcugguugacaaucggaauuucugguccagacaauggagcuguggcuguacuaaaauacaacggaauaauaacuggaaccauaaaaagcuggaaaaagcaaauauuaagaacacaagagucugaaugugucuguauggacgggucauguuucaccauaaugaccgauggcccgaguaauaaagccgccucguacaaaauuuucaagaucgaaaaggggaagguuacuaaaucaauagaguugaaugcacccaauuuuuauuacgaggaaugcuccuguuacccagacacuggcauagugauguguguaugcagggacaacuggcaugguucaaaucgaccuugggugucuuuuaaucaaaauuuggauuaucaaauaggauacaucugcaguggaguguuuggugacaauccgcgucccgaagauggagagggcagcugcaauccagugacuguugauggagcaaauggaguaaaaggguuuucauacaaauaugguaaugguguuuggauagggaggaccaaaaguaacagacuuagaaagggguuugagaugauuugggauccuaauggauggacaaauaccgacagugauuucucagugaaacaggauguuguagcaauaacugauuggucaggguacagcggaaguuucguccaacauccugaguugacaggauuggacuguauaagaccuugcuucuggguugaguuagucagagggcugccuagagaaaauacaacaaucuggacuagugggagcagcauuucuuuuuguggcguuaauagugauacugcaaacuggucuuggccagacggugcugaguugccguucaccauugacaaguag

SEQ ID NO: 52238 - RNA, 1413 nt, Artificial Sequence
  derived and/or modified CDS sequence (wt) from neuraminidase__InfluenzaA__ADW10552
augaacccaaaucaaaagauaauaaccauuggaucaaucaguauagcaaucggaauaauuagucuaauguugcaaauaggaaauauuauuucaauaugggcuagucacucaauccaaacuggaagucaaaacaacacuggaauaugcaaccaaagaaucaucacauaugaaaacagcaccugggugaaucacacauauguuaauauuaacaacacuaauguuguugcuggagaggacaaaacgucagugacauuggccggcaauucaucucuuuguucuaucaguggaugggcuauauacacaaaagacaacagcauaagaauuggcuccaaaggagauguuuuugucauaagagaaccuuucauaucauguucucacuuggaaugcagaaccuuuuuucugacccaaggcgcucuauuaaaugacaaacauucaaaugggaccguaaaggacagaaguccuuauagggccuuaaugagcuguccucuaggugaagcuccguccccauacaauucaaaguucgaaucaguugcauggucagcaagcgcaugccaugauggcaugggcugguugacaaucggaauuucugguccagacaauggagcuguggcuguacuaaaauacaacggaauaauaacuggaaccauaaaaaguuggaaaaagcaaauauuaagaacacaagagucugaaugugucuguaugaacgggucauguuucaccauaaugaccgauggcccgaguaauaaagccgccucguacaaaauuuucaagaucgaaaaggggaagguuacuaaaucaauagaguugaaugcacccgauuuuuauuacgaggaaugcuccuguuacccagacacuggcauagugauguguguaugcagggacaacuggcaugguucaaaucgaccuugggugucuuuuaaucaaaauuuggauuaucaaauaggauacaucugcaguggaguguuuggugacaauccgcgucccgaagauggagagggcagcugcaauccagugacuguuaauggagcagacggaguaaaaggguuuucauacaaauaugguaaugguguuuggauaggaaggaccaaaaguaacagacuuagaaagggguuugagaugauuugggauccuaauggauggacaaauaccgacagugauuucucagugaaacaggauguuguagcaauaacugauuggucaggguacagcggaaguuucguccaacauccugaguugacaggauuggacuguauaagaccuugcuucuggguugaguuagucagagggcugccuagagaaaauacaacaaucuggacuagugggagcagcauuucuuuuuguggcguuaauagugauacugcaaacuggucuuggccagacggugcugaguugccguucaccauugacaaguag

SEQ ID NO: 52239 - RNA, 1413 nt, Artificial Sequence
  derived and/or modified CDS sequence (wt) from neuraminidase__InfluenzaA__ADW10563
augaacccaaaucaacggauaauaaccauuggaucaaucaguauagcaaucggaauaauuagucuaauguugcaaauaggaaauauuauuucaauaugggcuagucacucaauccaaacuggaagucaaaacaacacuggaauaugcaaccaaagaaucaucacauaugaaaacagcaccugggugaaucauacauauguuaauauuaacaacacuaauguuguugcuggagaggacaaaacgucagugacauuggccggcaauucaucucuuuguucuaucaguggaugggcuauauacacaaaagacaacagcauaagaauuggcuccaaaggagauguuuuugucauaagagaaccuuucauaucauguucucacuuggaaugcagaaccuuuuuucugacccaaggcgcucuauuaaaugacaaacauucaaaugggaccgcaaaggacagaaguccuuauagggccuuaaugagcuguccucuaggugaagcuccguccccauacaauucaaaguucgaaucaguugcauggucagcaagcgcaugccaugauggcaugggcugguuaacaaucggaauuucugguccagacaauggagcuguggcuguacuaaaauacaacggaauaauaacuggaaccauaaaaaguuggaaaaagcaaauauuaagaacacaagagucugaaugugucuguaugaacgggucauguuucaccauaaugaccgauggcccgaguaauaaggccgccucguacaaaauuuucaagaucgaaaaggggaagguuacuaaaucaauagaguugaaugcacccaauuuuuauuaugaggaaugcuccuguuacccagacacuggcauagugauguguguaugcagggacaacuggcaugguucaaaucgaccuugggugucuuuuaaucaaaacuuggauuaucaaauaggauacaucugcaguggaguguuuggugacaauccgcgucccgaagauggagagggcagcugcaauccggugacuguugauggagcaaacggaguaaaaggguuuucauacaaauaugguaaugguguuuggauaggaaggaccaaaaguaacagacuuagaaagggguuugagaugauuugggauccuaauggauggacaaauaccgacagugauuucucagugaaacaggauguuguagcaauaacugauuggucaggguacagcggaaguuucguccaacacccugaguuaacaggauuggacuguauaagaccuugcuucuggguugaguuagucagagggcugccuagagaaaauacaacaaucuggacuagugggagcagcauuucuuuuuguggcguuaauagugauacugcaaacuggucuuggccagacggugcugaguugccguucaccauugacaaguag

SEQ ID NO: 52240 - RNA, 1413 nt, Artificial Sequence; identical to SEQ ID NO: 51797
  derived and/or modified CDS sequence (wt) from neuraminidase__InfluenzaA__ADW10574

SEQ ID NO: 52241 - RNA, 1413 nt, Artificial Sequence
  derived and/or modified CDS sequence (wt) from neuraminidase__InfluenzaA__ADW10585
augaacccaaaucaaaagauaauaaccauuggaucaaucaguauagcaaucggaauaauuagucuaauguugcaaauaggaaguauuauuucaauaugggcuagucacucaauccaaacuggaagucaaaacaacacuggaauaugcaaccaaagaaucaucacauaugaaaacagcaccugggugaaucacacauauguuaauauuaacaacacuaauguuguugcuggagaggacaaaaaaucagugacauuggccggcaauucaucucuuuguucuaucaguggaugggcuauauacacaaaagacaacaguauaagaauuggcuccaaaggagauguuuuugucauaagagaaccuuucauaucauguucucacuuggaaugcagaaccuuuuuucugacccaaggcgcucuauuaaaugacaaacauucaaaugggaccguaaaggacagaaguccuuauagggccuuaaugagcuguccucuaggugaagcuccguccccauacaauucaaaauucgaaucaguugcauggucagcaagcgcaugccaugauggcaugggcugguuaacaaucggaauuucugguccagacaauggagcuguggcuguacuaaaauacaacggaauaauaacuggaaccauaaaaaguuggaaaaagcaaauauuaagaacacaagagucugaaugugucuguaugaacgggucauguuucaccauaaugaccgauggcccgaguaauaaagccgccucguacaaaauuuucaagaucgaaaaggggaagguuacuaaaucaauagaguugaaugcacccaauuuuuauuaugaggaaugcuccuguuacccagacacuggcauagugauguguguaugcagggacaacuggcaugguucaaaucgaccuugggugucuuuuaaucaaaauuuggaauaucaaauaggauacaucugcaguggaguguuuggugacaauccgcgucccgaagauggagagggcagcugcaauccagugacuguugauggagcaaacggaguaaaaggguuuucauacaaauaugguaaugguguuuggauaggaaggaccaaaaguaacagacuuagaaagggguuugagaugauuugggauccuaauggauggacaaauaccgacagugauuucucagugaaacaggauguuguagcaauaacugauuggucaggguacagcggaaguuucguccaacauccugaguugacaggauuggacuguauaagaccuugcuucuggguugaguuagucagagggcugccuagagaaaauacaacaaucuggacuagugggagcagcauuucuuuuuguggcguuaauagugauacugcaaacuggucuuggccagacggugcugaguugccguucacuauugacaaguag

SEQ ID NO: 52242 - RNA, 1413 nt, Artificial Sequence
  derived and/or modified CDS sequence (wt) from neuraminidase__InfluenzaA__ADW10596
augaacccaaaucaaaagauaauaaccauuggaucaaucaguauagcaaucggaauaauuagucuaauguugcaaauaggaaauauuauuucaauaugggcuagucacucaauccaaacuggaagucaaaacaacacuggaauaugcaaccaaagaaucaucacauaugaaaacagcaccugggugaaucacacauauguuaauauuaacaacacuaauguuguugcuggagaggacaaaacgucagugacauuggccggcaauucaucucuuuguucuaucaguggaugggcuauauacacaaaagacaacagcauaagaauuggcuccaaaggagauguuuuugucauaagagaaccuuucauaucauguucucacuuggaaugcagaaccuuuuuucugacccaaggcgcucuauuaaaugacaaacauucaaaugggaccguaaaggacagaaguccuuauagggccuuaaugagcuguccucuaggugaagcuccguccccauacaauucaaaguucgaaucaguugcauggucagcaagcgcaugccaugauggcaugggcugguugacaaucggaauuucugguccagacaauggagcuguggcuguacuaaaauacaacggaauaauaacuggaaccauaaaaaguuggaaaaagcaaauauuaagaacacaagagucugaaugugucuguaugaacgggucauguuucaccauaaugaccgauggcccgaguaauaaagccgccucguacaaaauuuucaagaucgaaaaggggaagguuacuaaaucaauagaguugaaugcacccaauuuuuauuacgaggaaugcuccuguuacccagacacuggcauagugauguguguaugcagggacaacuggcaugguucaaaucgaccuugggugucuuuuaaccaaaauuuggauuaucaaauaggauacaucugcaguggaguguuuggugacaauccgcgucccgaagauggagagggcagcugcaauccagugacuguuaauggagcagacggagugaaaggguuuucauacaaauaugguaaugguguuuggauaggaaggaccaaaaguaacagacuuagaaagggguuugagaugauuugggauccuaauggauggacaaauaccgacagugauuucucagugaaacaggauguuguagcaauaacugauuggucaggguacagcggaaguuucguccaacauccugaguugacaggauuggacuguauaagaccuugcuucuggguugaguuagucagagggcugccuagagaaaauacaacaaucuggacuagugggagcagcauuucuuuuuguggcguuaauagugauacugcaaacuggucuuggccagacggugcugaguugccguucaccauugacaaguag

SEQ ID NO: 52243 - RNA, 1413 nt, Artificial Sequence; identical to SEQ ID NO: 52223
  derived and/or modified CDS sequence (wt) from neuraminidase__InfluenzaA__ADW10607

SEQ ID NO: 52244 - RNA, 1413 nt, Artificial Sequence
  derived and/or modified CDS sequence (wt) from neuraminidase__InfluenzaA__ADW10618
augaacccaaaucaaaagauaauaaccauuggaucaaucaguauagcaaucggaauaauuagucuaauguugcaaauaggaaauauuauuucaauaugggcuagucacucaauccaaacuggaagucaaaacaacacuggaauaugcaaccaaagaaucaucacauaugaaaacagcaccugggugaaucacacauauguuaauauuaacaacacuaauguuguugcuggagaggacaaaacgucagugacauuggccggcaauucaucucuuuguucuaucaguggaugggcuauauacacaaaagacaacagcauaagaauuggcuccaaaggagauguuuuugucauaagagaaccuuucauaucauguucucacuuggaaugcagaaccuuuuuucugacccaaggcgcucuauuaaaugacaaacauucaaaugggaccguaaaggacagaaguccuuauagggccuuaaugagcuguccucuaggugaagcuccguccccauacaauucaaaguucgaaucaguugcauggucagcaagcgcaugccaugauggcaugggcugguugacaaucggaauuucugguccagacaauggagcuguggcuguacuaaaauacaacggaauaauaacuggaaccauaaaaaguuggaaaaagcaaauauuaagaacacaagagucugaaugugucuguaugaacgggucauguuucaccauaaugaccgauggcccgaguaauaaagccgccucguacaaaauuuucaagaucgaaaaggggaagguuacuaaaucaauagaguugaaugcacccaauuuuuauuacgaggaaugcuccuguuauccagacacuggcauagugauguguguaugcagggacaacuggcaugguucaaaucgaccuugggugucuuuuaaucaaaauuuggauuaucaaauaggauacaucugcaguggaguguuuggugacaauccgcgucccgaagauggagagggcagcugcaauccagugacuguugauggagcagacggaguaaaaggguuuucauacaaauaugguaaugguguuuggauaggaaggaccaaaaguaacagacuuagaaagggguuugagaugauuugggauccuaauggauggacaaauaccgacagugauuucucagugaaacaggauguuguagcaauaacugauuggucaggguacagcggaaguuucguccaacauccugaguugacaggauuggacuguauaagaccuugcuucuggguugaguuagucagagggcugccuagagaaaauacaacaaucuggacuagugggagcagcauuucuuuuuguggcguuaauagugauacugcaaacuggucuuggccagacggugcugaguugccguucaccauugacaaguag

SEQ ID NO: 52245 - RNA, 1413 nt, Artificial Sequence; identical to SEQ ID NO: 52223
  derived and/or modified CDS sequence (wt) from neuraminidase__InfluenzaA__ADW10629

SEQ ID NO: 52246 - RNA, 1413 nt, Artificial Sequence; identical to SEQ ID NO: 52216
  derived and/or modified CDS sequence (wt) from neuraminidase__InfluenzaA__ADW10724

SEQ ID NO: 52247 - RNA, 1413 nt, Artificial Sequence
  derived and/or modified CDS sequence (wt) from neuraminidase__InfluenzaA__ADW10735
augaacccaaaucaaaagauaauaaccauuggaucaaucaguauagcaaucggaauaauuagucuaauguugcaaauaggaaauauuauuucaauaugggcuagucacucaauccaaacuggaagucaaaacaacacuggaauaugcaaccaaagaaucaucacauaugaaaacagcaccugggugaaucacacauauguuaauauuaacaacacuaauguuguugcuggagaggacaaaacgucagugacauuggccggcaauucaucucuuuguucuaucaguggaugggcuauauacacaaaagacaacagcauaagaauuggcuccaaaggagauguuuuugucauaagagaaccuuucauaucauguucucacuuggaaugcagaaccuuuuuucugacccaaggcgcucuauuaaaugacaaacauucaaaugggaccguaaaggacagaaguccuuauagggccuuaaugagcuguccucuaggugaagcuccguccccauacaauucaaaguucgaaucaguugcauggucagcaagcgcaugccaugauggcaugggcugguugacaaucggaauuucugguccagacaauggagcuguggcuguacuaaaauacaacggaauaauaacuggaaccauaaaaaguuggaaaaagcaaauauuaagaacacaagaaucugaaugugucuguaugaacgggucauguuucaccauaaugaccgauggcccgaguaauaaagccgccucguacaaaauuuucaagaucgaaaaggggaagguuacuaaaucaauagaguugaaugcacccaauuuuuauuacgaggaaugcuccuguuacccagacacuggcauagugauguguguaugcagggacaacuggcaugguucaaaucgaccuugggugucuuuuaaccaaaauuuggauuaucaaauaggauacaucugcaguggaguguuuggugacaauccgcgucccgaagauggagagggcagcugcaauccagugacuguuaauggagcagacggagugaaaggguuuucauacaaauaugguaaugguguuuggauaggaaggaccaaaaguaacagacuuagaaagggguuugagaugauuugggauccuaauggauggacaaauaccgacagugauuucucagugaaacaggauguuguagcaauaacugauuggucaggguacagcggaaguuucguccaacauccugaguugacaggauuggacuguauaagaccuugcuucuggguugaguuagucagagggcugccuagagaaaauacaacaaucuggacuagugggagcagcauuucuuuuuguggcguuaauagugauacugcaaacuggucuuggccagacggugcugaguugccguucaccauugacaaguag

SEQ ID NO: 52248 - RNA, 1413 nt, Artificial Sequence; identical to SEQ ID NO: 52247
  derived and/or modified CDS sequence (wt) from neuraminidase__InfluenzaA__ADW10746

SEQ ID NO: 52249 - RNA, 1413 nt, Artificial Sequence
  derived and/or modified CDS sequence (wt) from neuraminidase__InfluenzaA__ADW10757
augaacccaaaucaaaagauaauaaccauuggaucaaucaguauagcaaucggaauaauuagucugauguugcaaauaggaaauauuauuucaauaugggcuagucacucaauccaaacuaggagucaaaacaacacuggaauaugcaaccaaagaaucaucacauaugaaaacagcaccugggugaaucacacauauguuaauauuaacaacacuaauguuguugcuggaggggacaaaacgucagugacauuggccggcaauucaucucuuuguucuaucaguggaugggcuauauacacaaaagacaacagcauaagaauuggcuccaaaggagauguuuuugucauaagagaaccuuucauaucauguucucacuuggaaugcagaaccuuuuuucugacccaaggcgcucuauuaaaugacaaacauucaaaugggaccguaaaggacagaaguccuuauagggccuuaaugagcuguccucuaggugaagcuccguccccauacaauucaaaguucgaaucaguugcauggucagcaagcgcaugccaugauggcaugggcugguuaacaaucggaauuucugguccagacaauggagcuguggcuguacuaaaauacaacggaauaauaacuggaaccauaaaaaguuggaaaaagcaaauauuaagaacacaagagucugaaugugucuguaugaacgggucauguuucacccuaaugaccgauggcccgaguaauaaggccgccucguacaaaauuuucaagaucgaaaaggggaagguuacuaaaucaauagaguugaaugcacccaauuuuuauuaugaggaaugcuccuguuacccagauacuggcauagugauguguguaugcagagacaacuggcaugguucaaaucgaccuugggugucuuuuaaucaaaacuuggauuaucaaauaggauacaucugcaguggaguguuuggugacaauccgcgucccgaagauggagagggcagcugcaauccagugacuguugauggagcaaacggaguaaaaggguuuucauacaaauaugguaaugguguuuggauagggaggaccaaaaguaacagacuuagaaagggguuugagaugauuugggauccuaauggauggacaaauaccgacagugauuucucagugaaacaggauguuguagcaauaacugauuggucaggguacagcggaaguuucguccaacauccugaguuaacaggauuggacuguauaagaccuugcuucuggguugaguuagucagagggcugccuagagaaaauacaacaaucuggacuagugggagcagcauuucuuuuuguggcguuaauagugauacugcaaacuggucuuggccagacggugcugaguugccguucaccauugacaaguag

SEQ ID NO: 52250 - RNA, 1413 nt, Artificial Sequence; identical to SEQ ID NO: 52216
  derived and/or modified CDS sequence (wt) from neuraminidase__InfluenzaA__ADW10768

SEQ ID NO: 52251 - RNA, 1413 nt, Artificial Sequence; identical to SEQ ID NO: 52214
  derived and/or modified CDS sequence (wt) from neuraminidase__InfluenzaA__ADW10779

SEQ ID NO: 52252 - RNA, 1413 nt, Artificial Sequence
  derived and/or modified CDS sequence (wt) from neuraminidase__InfluenzaA__ADW10790
augaacccaaaucaaaagauaauaaccauuggaucaaucaguauagcaaucggaauaauuagucuaauguugcaaauaggaaauauuauuucaauaugggcuagucacucaauccaaacuggaagucaaaacaacacuggaauaugcaaccaaagaaucaucacauaugaaaacagcaccugggugaaucacacauauguuaauauuaacaacacuaauguuguugcuggagaggacaaaacgucagugacauuggccggcaauucaucucuuuguucuaucaguggaugggcuauauacacaaaagacaacagcauaagaauuggcuccaaaggagauguuuuugucauaagagaaccuuucauaucauguucucacuuggaaugcagaaccuuuuuucugacccaaggcgcucuauuaaaugacaaacauucaaaugggaccguaaaggacagaaguccuuauagggccuuaaugagcuguccucuaggugaagcuccguccccauacaauucaaaguucgaaucaguugcauggucagcaagcgcaugccaugauggcaugggcugguugacaaucggaauuucugguccagacaauggagcuguggcuguacuaaaauacaacggaauaauaacuggaaccauaaaaaguuggaaaaagcaaauauuaagaacacaagagucugaaugugucuguaugaacgggucauguuucaccauaaugaccgauggcccgaguaauaaagccgccucguacaaaauuuucaagaucgaaaaggggaagguuacuaaaucaauagaguugaaugcacccaauuuuuauuacgaggaaugcuccuguuacccagacacuggcauagugauguguguaugcagggacaacuggcaugguucaaaucgaccuugggugucuuuuaaucaaaauuuggauuaucaaauaggauacaucugcaguggaguguuuggugacaauccgcgucccgaggauggagagggcagcugcaauccagugacuguugauggagcaaacggaguaaaaggguuuucauacaaauaugguaaugguguuuggauaggaaggaccaaaaguaacagacuuagaaagggguuugagaugauuugggauccuaauggauggacaaauaccgacagugauuucucagugaaacaggauguuguagcaauaacugauuggucaggguacagcggaaguuucguccaacauccugaguugacaggauuggacuguauaauaccuugcuucuggguugaguuagucagagggcugccuagagaaaaugcgacaaucuggacuagugggagcagcauuucuuuuuguggcguuaauagugauacugcaaacuggucuuggccagacggugcugaguugccguucaccauugacaaguag

SEQ ID NO: 52253 - RNA, 1413 nt, Artificial Sequence
  derived and/or modified CDS sequence (wt) from neuraminidase__InfluenzaA__ADW10801
augaacccaaaucaaaagauaauaaccauuggaucaaucaguauagcaaucggaauaauuagucuaauguugcaaauaggaaguauuauuucaauaugggcuagucacucaauccaaacuggaagucaaaacaacacuggaauaugcaaccaaagaaucaucacauaugaaaacagcaccugggugaaucacacauauguuaauauuaacaacacuaauguuguugcuggagaggacaaaacgucagugacauuggccggcaauucaucucuuuguucuaucaguggaugggcuauauacacaaaagacaacagcauaagaauuggcuccaaaggagauguuuuugucauaagagaaccuuucauaucauguucucacuuggaaugcagaaccuuuuuucugacccaaggcgcucuauuaaaugacaaacauucaaaugggaccguaaaggacagaaguccuuauagggccuuaaugagcuguccucuaggugaagcuccguccccauacaauucaaaguucgaaucaguugcauggucagcaagcgcaugccaugauggcaugggcugguuaacaaucggaauuucugguccagacaauggagcuguggcuguacuaaaauacaacggaauaauaacuggaaccauaaaaaguuggaaaaagcaaauauuaagaacacaagagucugaaugugucuguaugaacgggucauguuucaccauaaugaccgauggcccgaguaauaaagccgccucguacaaaauuuucaagaucgaaaaggggaagguuacuaaaucaauagaguugaaugcacccaauuuuuauuaugaggaaugcuccuguuacccagacacuggcauagugauguguguaugcagggacaacuggcaugguucaaaucgaccuugggugucuuuuaaucaaaauuuggauuaucaaauaggauacaucugcaguggaguguuuggugacaauccgcgucccgaagauggagagggcagcugcaauccagugacuguagauggagcaaacggaguaaaaggguuuucauacaaauaugguaaugguguuuggauaggaaggaccaaaaguaacagacuuagaaagggguuugagaugauuugggauccuaauggauggacaaauaccgacagugauuucucagugaaacaggauguuguagcaauaacugauuggucaggguacagcggaaguuucguccaacauccugaauugacaggauuggacuguauaagaccuugcuucuggguugaguuagucagagggcugccuagagaaaauacaacaaucuggacuagugggagcagcauuucuuuuuguggcguuaauagugauacugcaaacuggucuuggccagacggugcugaguugccguucaccauugacaaguag

SEQ ID NO: 52254 - RNA, 1413 nt, Artificial Sequence; identical to SEQ ID NO: 52216
  derived and/or modified CDS sequence (wt) from neuraminidase__InfluenzaA__ADW10812

SEQ ID NO: 52255 - RNA, 1413 nt, Artificial Sequence
  derived and/or modified CDS sequence (wt) from neuraminidase__InfluenzaA__ADW10823
augaacccaaaucaaaagauaauaaccauuggaucaaucaguauagcaaucggaauaauuagucuaauguugcaaauaggaaauauuauuucaauaugggcuagucacucaauccaaacuggaagucaaaacaacacuggaauaugcaaccaaagaaucaucacauaugaaaacagcaccugggugaaucacacauauguuaauauuaacaacacuaauauuguugcuggagaggacaaaacgucagugacauuggccggcaauucaucucuuuguucuaucaguggaugggcuauauacacaaaagacaacagcauaagaauuggcuccaaaggagauguuuuugucauaagagaaccuuucauaucauguucucacuuggaaugcagaaccuuuuuucugacccaaggcgcucuauuaaaugacaaacauucaaaugggaccguaaaggacagaaguccuuauagggccuuaaugagcuguccucuaggugaagcuccguccccauacaauucaaaguucgaaucaguugcauggucagcaagcgcaugccaugauggcaugggcugguugacaaucggaauuucugguccagacaauggagcuguggcuguacuaaaauacaacggaauaauaacuggaaccauaaaaaguuggaaaaagcaaauauuaagaacacaagagucugaaugugucuguaugaacgggucauguuucaccauaaugaccgauggcccgaguaauaaagccgccucguacaaaauuuucaagaucgaaaaggggaagguuacuaaaucaauagaguugaaugcacccaauuuuuauuacgaggaaugcuccuguuacccagacacuggcauagugauguguguaugcagggacaacuggcaugguucaaaucgaccuugggugucuuuuaaucaaaauuuggauuaucaaauaggauacaucugcaguggaguguuuggugacaauccgcgucccgaagauggagagggcagcugcaauccagugacuguuaauggagcagacggaguaaaaggguuuucauacaaauaugguaaugguguuuggauaggaaggaccaaaaguaacagacuuagaaagggguuugagaugauuugggauccuaauggauggacaaauaccgacagugauuucucagugaaacaggauguuguagcaauaacugauuggucaggguacagcggaaguuucguccaacauccugaguugacaggauuggacuguauaagaccuugcuucuggguugaguuagucagagggcugccuagagaaaauacaacaaucuggacuagugggagcagcauuucuuuuuguggcguuaauagugauacugcaaacuggucuuggccagacggugcugaguugccguucaccauugacaaguag

SEQ ID NO: 52256 - RNA, 1413 nt, Artificial Sequence
  derived and/or modified CDS sequence (wt) from neuraminidase__InfluenzaA__ADW10834
augaacccaaaucaaaagauaauaaccauuggaucaaucaguauagcaaucggaauaauuagucuaauguugcaaauaggaaauauuauuucaauaugggcuagucacucaauccaaacuggaagucaaaacaacacuggaauaugcaaccaaagaaucaucacauaugaaaacagcaccugggugaaucacacauauguuaauauuaacaacacuaauguuguugcuggagaggacaaaacgucagugacauuggccggcaauucaucucuuuguucuaucaguggaugggcuauauacacaaaagacaacagcauaagaauuggcuccaaaggagauguuuuugucauaagagaaccuuucauaucauguucucacuuggaaugcagaaccuuuuuucugacccaaggcgcucuauuaaaugacaaacauucaaaugggaccguaaaggacagaaguccuuauagggccuuaaugagcuguccucuaggugaagcuccguccccauacaauucaaaguucgaaucaguugcauggucagcaagcgcaugccaugauggcaugggcugguugacaaucggaauuucugguccagacaauggagcuguggcuguacuaaaauacaacggaauaauaacuggaaccauaaaaaguuggaaaaagcaaauauuaagaacacaagagucugaaugugucuguaugaacgggucauguuucaccauaaugaccgauggcccgaguaauaaagccgccucguacaaaauuuucaagaucgaaaaggggaagguuauuaaaucaauagaguugaaugcacccaauuuuuauuacgaggaaugcuccuguuacccagacacuggcauagugauguguguaugcagggacaacuggcaugguucaaaucgaccuugggugucuuuuaaucaaaauuuggauuaucaaauaggauacaucugcaguggaguguuuggugacaauccgcgucccgaagauggagagggcagcugcaauccagugacuguugauggagcaaacggaguaaaaggguuuucauacaaauaugguaaugguguuuggauaggaaggaccaaaaguaacagacuuagaaagggguuugagaugauuugggauccuaauggauggacaaauaccgacagugauuucucagugaaacaggauguuguagcaauaacugauuggucaggguacagcggaaguuucguccaacauccugaguugacaggauuggacuguauaagaccuugcuucuggguugaguuagucagagggcugccuagagaaaauacaacaaucuggacuagugggagcagcauuucuuuuuguggcguuaauagugauacugcaaacuggucuuggccagacggugcugaguugccguucaccauugacaaguag

SEQ ID NO: 52257 - RNA, 1413 nt, Artificial Sequence; identical to SEQ ID NO: 52220
  derived and/or modified CDS sequence (wt) from neuraminidase__InfluenzaA__ADW10845

SEQ ID NO: 52258 - RNA, 1413 nt, Artificial Sequence
  derived and/or modified CDS sequence (wt) from neuraminidase__InfluenzaA__ADW10856
augaacccaaaucaaaggauaauaaccauuggaucaaucaguauagcaaucggaauaauuagucuaauguugcaaauaggaaauauuauuucaauaugggcuagucacucaauccaaacuggaagucaaaacaacacuggaauaugcaaccaaagaaucaucacauaugaaaacagcaccugggugaaucauacauauguuaauauuaacaacacuaauguuguugcuggagaggacaaaacgucaaugacauuggccggcaauucaucucuuuguucuaucaguggaugggcuauauacacaaaagacaacagcauaagaauuggcuccaaaggagauguuuuugucauaagagaaccuuucauaucauguucucacuuggaaugcagaaccuuuuuucugacccaaggcgcucuauuaaaugacaaacauucaaaugggaccgcaaaggacagaaguccuuauagggccuuaaugagcuguccucuaggugaagcuccguccccauacaauucaaaguucgaaucaguugcauggucagcaagcgcaugccaugauggcaugggcugguuaacaaucggaauuucugguccagacaauggagcuguggcuguacuaaaauacaacggaauaauaacuggaaccauaaaaaguuggaaaaagcaaauauuaagaacacaagagucugaaugugucuguaugaacgggucauguuucaccauaaugaccgauggcccgagcaauaaggccgccucguacaaaauuuucaagaucgaaaaggggaagguuacuaaaucaauagaguugaaugcacccaauuuuuauuaugaggaaugcuccuguuacccagacacuggcauagugauguguguaugcagggacaacuggcaugguucaaaucgaccuugggugucuuuuaaucaaaacuuggauuaucaaauaggauacaucugcaguggaguguuuggugacaauccgcgucccgaagauggagagggcagcugcaauccggugacuguugauggagcaaacggaguaaaaggguuuucauacaaauaugguaaugguguuuggauaggaaggaccaaaaguaacagacuuagaaagggguuugagaugauuugggauccuaauggauggacaaauaccgacagugauuucucagugaaacaggauguuguagcaauaacugauuggucaggguacagcggaaguuucguccaacacccugaguuaacaggauuggacuguauaagaccuugcuucuggguugaguuagucagagggcugccuagagaaaauacaacaaucuggacuagugggagcagcauuucuuuuuguggcguuaauagugauacugcaaacuggucuuggccagacggugcugaguugccguucaccauugacaaguag

SEQ ID NO: 52259 - RNA, 1413 nt, Artificial Sequence; identical to SEQ ID NO: 52216
  derived and/or modified CDS sequence (wt) from neuraminidase__InfluenzaA__ADW10867

SEQ ID NO: 52260 - RNA, 1413 nt, Artificial Sequence; identical to SEQ ID NO: 52216
  derived and/or modified CDS sequence (wt) from neuraminidase__InfluenzaA__ADW10878

SEQ ID NO: 52261 - RNA, 1413 nt, Artificial Sequence; identical to SEQ ID NO: 52216
  derived and/or modified CDS sequence (wt) from neuraminidase__InfluenzaA__ADW10889

SEQ ID NO: 52262 - RNA, 1413 nt, Artificial Sequence
  derived and/or modified CDS sequence (wt) from neuraminidase__InfluenzaA__ADW10900
augaacccaaaucaaaagauaauaaccauuggaucaaucaguauagcaaucggaauaauuagucuaauguugcaaauaggaaauauuauuucaauaugggcuagucacucaauccaaacuggaagucaaaacaacacuggaauaugcaaccaaagaaucaucacauaugaaaacagcaccugggugaaucacacauauguuaauauuaacaacacuaauguuguugcuggagaggacaaaacuucagugacauuggccggcaauucaucucuuuguucuaucaguggaugggcuauauacacaaaagacaacagcauaagaauuggcuccaaaggagauguuuuugucauaagagaaccuuucauaucauguucucacuuggaaugcagaaccuuuuuucugacccaaggcgcucuauuaaaugacaaacauucaaaugggaccguaaaggacagaaguccuuauagggccuuaaugagcuguccucuaggugaagcuccguccccauacaauucaaaguucgaaucaguugcauggucagcaagcgcaugccaugauggcaugggcugguuaacaaucggaauuucugguccagacaauggagcuguggcuguacuaaaauacaacggaauaauaacuggaaccauaaaaaguuggaaaaagcaaauauuaagaacacaagagucugaaugugucugcaugaacgggucauguuucaccauaaugaccgauggcccgaguaauaaggccgccucguacaaaauuuucaagaucgaaaaggggaagguuacuaaaucaauagaguugaaugcacccaauuuuuauuaugaggaaugcuccuguuacccagacacuggcauagugauguguguaugcagggacaacuggcaugguucaaaucgaccuugggugucuuuuaaucaaaacuuggauuaucaaauaggauacaucugcaguggaguauuuggugacaauccgcgucccgaagauggagagggcagcugcaauccagugacuguugauggagcaaacggaguaaaaggguuuucauacaaauaugguaaugguguuuggauaggaaggaccaaaaguaacagacuuagaaagggguuugagaugauuugggauccuaauggauggacaaauaccgacagugauuucucagugaaacaggauguuguagcaauaacugauuggucaggguacagcggaaguuucguccaacauccugaguuaacaggauuggacuguauaagaccuugcuucuggguugaguuagucagagggcugccuagagaaaauacaacaaucuggacuagugggagcagcauuucuuuuuguggcguuaauagugauacugcaaacuggucuuggccagacggugcugaguugccguucaccaucgacaaguag

SEQ ID NO: 52263 - RNA, 1410 nt, Artificial Sequence; identical to SEQ ID NO: 51254
  derived and/or modified CDS sequence (wt) from neuraminidase__InfluenzaA__ADW11155

SEQ ID NO: 52264 - RNA, 1410 nt, Artificial Sequence; identical to SEQ ID NO: 48953
  derived and/or modified CDS sequence (wt) from neuraminidase__InfluenzaA__ADW23530

SEQ ID NO: 52265 - RNA, 1410 nt, Artificial Sequence
  derived and/or modified CDS sequence (wt) from neuraminidase__InfluenzaA__ADW54483
augaauccaaaccaaaagauaauaaccauugguucggucuguaugacaauuggaauggcuaacuuaauguuacaaauuggaaacauaaucucaauauggauuagccacucaauucaacuugggaaucaaagucagauugaaacaugcaaucaaagcgucauuacuuaugaaaacaacacuuggguaaaucagacauauguuaacaucagcaacaccaacuuugcugcuggacagucagugguuuccgugaaauuagcgggcaauuccucucucugcccuguuaguggaugggcuauauacaguaaagacaacaguauaagaaucgguuccaagggggauguguuugucauaagggaaccauucauaucaugcucccccuuggaaugcagaaccuucuucuugacucaaggggccuugcuaaaugacaaacauuccaauggaaccauuaaagacaggagcccauaucgaacccuaaugagcuguccuauuggugaaguucccucuccauacaacucaagauuugagucagucgcuuggucagcaagugcuugucaugauggcaucaauuggcuaacaauuggaauuucuggcccagacaauggggcaguggcuguguuaaaguacaacggcauaauaacagacacuaucaagaguuggagaaacaauauauugagaacacaagagucugaaugugcauguguaaaugguucuugcuuuaccauaaugaccgauggaccaagugauggacaggccucauacaagaucuucagaauagaaaagggaaagauagucaaaucagucgaaaugaaugccccuaauuaucacuaugaggaaugcuccuguuauccugauucuagugaaaucacaugugugugcagggauaacuggcauggcucgaaucgaccgugggugucuuucaaccagaaucuggaauaucagauaggauacauaugcagugggauuuucggagacaauccacgcccuaaugauaagacaggcaguugugguccaguaucgucuaauggagcaaauggaguaaaaggauuuucauucaaauacggcaaugguguuuggauagggagaacuaaaagcauuaguucaagaaaagguuuugagaugauuugggauccaaacggauggacugggacagacaauaacuucucaauaaagcaagauaucguaggaauaaaugaguggucaggauauagcgggaguuuuguucagcauccagaacuaacagggcuggauuguauaagaccuugcuucuggguugaacuaaucagagggcgacccaaagagaacacaaucuggacuagcgggagcagcauauccuuuugugguguaaacagugacacuguggguuggucuuggccagacggugcugaguugccauuuaccauugacaaguaa

SEQ ID NO: 52266 - RNA, 1410 nt, Artificial Sequence
  derived and/or modified CDS sequence (wt) from neuraminidase__InfluenzaA__ADW54494
augaauccaaaucaaaagauaauaaccauugguucggucuguaugacaauuggaauggcuaacuuaauauuacaaauuggaaacauaaucucaauauggauuagccacucaauucaacuugggaaucaaaaucagauugaaacaugcaaucaaagcgucauuacuuaugaaaacaacacuuggguaaaucagacauauguuaacaucagcaacaccaacuuugcugcuggacagucagugguuuccgugaaauuagcgggcaauuccucucucugcccuguuaguggaugggcuauauacaguaaagacaacaguauaagaaucgguuccaagggggauguguuugucauaagggaaccauucauaucaugcucccccuuggaaugcagaaccuucuucuugacucaaggggccuugcuaaaugacaaacauuccaauggaaccauuaaagacaggagcccauaucgaacccuaaugagcuguccuauuggugaaguucccucuccauacaacucaagauuugagucagucgcuuggucagcaagugcuugucaugauggcaucaauuggcuaacaauuggaauuucuggcccagacaauggggcaguggcuguguuaaaguacaacggcauaauaacagacacuaucaagaguuggagaaacaauauauugagaacacaagagucugaaugugcauguguaaaugguucuugcuuuacuguaaugaccgauggaccaagugauggacaggccucauacaagaucuucagaauagaaaagggaaagauagucaaaucagucgaaaugaaugccccuaauuaucacuaugaggaaugcuccuguuauccugauucuagugaaaucacaugugugugcagggauaacuggcauggcucgaaucgaccgugggugucuuucaaccagaaucuggaauaucggauaggauacauaugcagugggauuuucggagacaauccacgcccuaaugauaagacaggcaguugugguccaguaucgucuaauggagcaaauggaguaaaaggauuuucauucaaauacggcaaugguguuuggauagggagaacuaaaagcauuaguucgagaaacgguuuugagaugauuugggauccgaacggauggacugggacagacaauaacuucucaauaaagcaagauaucauaggaauaaaugaguggucaggauauagcgggaguuuuguucagcauccagaacuaacagggcuggauuguauaagaccuugcuuuuggguugaacuaaucagagggcggcccaaagagaauacaaucuggacuagcgggagcagcauauccuuuugugguguaaacagugacacuguggguuggucuuggccagacggugcugaguugccauuuaccauugacaaguaa

SEQ ID NO: 52267 - RNA, 1410 nt, Artificial Sequence
  derived and/or modified CDS sequence (wt) from neuraminidase__InfluenzaA__ADW54514
augaauccaaaccaaaagauaauaaccauugguucggucuguaugacaauuggaauggcuaacuuaauauuacaaauuggaaacauaaucucaauauggauuagccacucaauucaacuugggaaucaaaaucagauugaaacaugcaaucaaagcgucauuacuuaugaaaacaacacuuggguaaaucagacauauguuaacaucagcaacaccaacuuugcugcuggacagucagugguuuccgugaaauuagcgggcaauuccucucucugcccuguuaguggaugggcuauauacaguaaagacaacaguauaagaaucgguuccaagggggauguguuugucauaagggaaccauucauaucaugcucccccuuggaaugcagaaccuucuucuugacucaaggggccuugcuaaaugacaaacauuccaauggaaccauuaaagacaggagcccauaucgaacccuaaugagcuguccuauuggugaaguucccucuccauacaacucaagauuugagucagucgcuuggucagcaagugcuugucaugaugguaucaauuggcuaacaauuggaauuucuggcccagacaauggggcaguggcuguguuaaaguacaacggcauaauaacagacacuaucaagaguuggaaaaacaauauauugagaacacaagagucugaaugugcauguguaaaugguucuugcuuuacuguaaugaccgauggaccaagugauggacaggccucauacaagaucuucagaauagaaaagggaaagauagucaaaucagucgaaaugaaugccccuaauuaucacuaugaggaaugcuccuguuauccugauucuagugaaaucacaugugugugcagggauaacuggcauggcucgaaucgaccgugggugucuuucaaccagaaucuggaauaucggauaggauacauaugcagugggauuuucggagacaauccacgcccuaaugauaagacaggcaguugugguccaguaucgucuaauggagcaaauggaguaaaaggauuuucauucaaauacggcaaugguguuuggauagggagaacuaaaagcauuaguucaagaaacgguuuugagaugauuugggacccgaacggauggacugggacagacaauaacuucucaaaaaagcaagauaucauaggaauaaaugaguggucaggauauagcgggaguuuuguucagcauccagaacuaacagggcuggauuguauaagaccuugcuucuggguugaacuaaucagagggcggcccaaagagaacacaaucuggacuagcgggagcagcauauccuuuugugguguaaacagugacacuguggguuggucuuggccagacggugcugaguugccauuuaccauugacaaguaa

SEQ ID NO: 52268 - RNA, 1410 nt, Artificial Sequence
  derived and/or modified CDS sequence (wt) from neuraminidase__InfluenzaA__ADW54522
augaauccaaaccaaaagauaauaaccauugguucggucuguaugauaauuggaauggcuaacuuaauauuacaaauuggaaacauaaucucaauauggauuagccacucaauucaacuugggaaucaaaaucagauugaaacaugcaaucaaagcgucauuacuuaugaaaacaacacuuggguaaaucagacauauguuaacaucagcaacaccaacuuugcugcuggacagucagugguuuccgugaaauuagcgggcaauuccucucucugcccuguuaguggaugggcuauauacaguaaagacaacaguauaagaaucgguuccaagggggauguguuugucauaagggaaccauucauaucaugcucccccuuggaaugcagaaccuucuucuugacucaaggggccuugcuaaaugacaaacauuccaauggaaccauuaaagacaggagcccauaucgaacccuaaugagcuguccuauuggugaaguucccucuccauacaacucaagauuugagucagucgcuuggucagcaagugcuugucaugauggcaucaauuggcuaacaauuggaauuucuggcccagacaauggggcaguggcuguguuaaaguacaacggcauaauaacagacacuaucaagaguuggagaaacaauagauugagaacacaagagucugaaugugcauguguaaaugguucuugcuuuacuguaaugaccgauggaccaagugauggacaggccucauacaagaucuucagaauagaaaagggaaagauagucaaaucagucgaaaugaaugccccuaauuaucacuaugaggaaugcuccuguuauccugauucuagugaaaucacauguguaugcagggauaacuggcauggcucgaaucgaccgugggugucuuucaaccagaaucuggaauaucagauaggauacauaugcagugggauuuucggagacaauccacgcccuaaugauaagacaggcaguugugguccaguaucgucuaauggagcaaauggaguaaaaggauuuucauucaaauacggcaaugguguuuggauagggagaacuaaaagcauuaguucaagaaaagguuuugagaugauuugggauccgaacggauggacugggacagacaauaacuucucaauaaagcaagauaucguaggaauaaaugaguggucaggauauagcgggaguuuuguucagcauccagaacuaacagggcuggauuguauaagaccuugcuucuggguugaacuaaucagaggacgacccaaagagaacacaaucuggacuagcgggagcagcauauccuuuugugguguaaacagugacacuguggguuggucuuggccagacggugcugaguugccauuuaccauugacaaguaa

SEQ ID NO: 52269 - RNA, 1410 nt, Artificial Sequence
  derived and/or modified CDS sequence (wt) from neuraminidase__InfluenzaA__ADW65826
augaauccaaaccaaaagauaauaaccauugguucggucuguaugacaauuggaauggcuaacuuaauauuacaaauuggaaacauaaucucaauauggauuagccacucaauucaacuugggaaucaaagucagauugaaacaugcaaucaaagcgucauuacuuaugaaaacaacacuuggguaaaucagacauauguuaacaucagcaacaccaacuuugcugcuggacagucagugguuuccgugaaauuagcgggcaauuccucucucugcccuguuaguggaugggcuauauacaguaaagacaacaguauaagaaucgguuccaagggggauguguuugucauaagggaaccauucauaucaugcucccccuuggaaugcagaaccuucuucuugacucaaggggccuugcuaaaugacaaacauuccaauggaaccauuaaagacaggagcccauaucgaacccuaaugagcuguccuauuggugaaguucccucuccauacaacucaagauuugagucagucgcuuggucagcaagugcuugucaugauggcaucaauuggcuaacaauuggaauuucuggcccagacaauggggcaguggcuguguuaaaguacaacggcauaauaacagacacuaucaagaguuggagaaacaauauauugagaacacaagagucugaaugugcauguguaaaugguucuugcuuuaccauaaugaccgauggaccaagugauggacaggccucauacaagaucuucagaauagaaaagggaaagauagucaaaucagucgaaaugaaugccccuaauuaucacuaugaggaaugcuccuguuauccugauucuagugaaaucacaugugugugcagggauaacuggcauggcucgaaucgaccgugggugucuuucaaccagaaucuggaauaucagauaggauacauaugcagugggauuuucggagacaauccacgcccuaaugauaagacaggcaguugugguccaguaucgucuaauggagcaaauggaguaaaaggauuuucauucaaauacggcaaugguguuuggauagggagaacuaaaagcauuaguucaagaaaagguuuugagaugauuugggauccaaacggauggacugggacagacaauaacuuuucaauaaagcaagauaucguaggaauaaaugaguggucaggauauagcgggaguuuuguucagcauccagaacuaacagggcuggauuguauaagaccuugcuucuggguugaacuaaucagagggcgacccaaagagaacacaaucuggacuagcgggagcagcauauccuuuugugguguaaacagugacacuguggguuggucuuggccagacggugcugaguugccauuuaccauugacaaguaa

SEQ ID NO: 52270 - RNA, 1410 nt, Artificial Sequence
  derived and/or modified CDS sequence (wt) from neuraminidase__InfluenzaA__ADW80519
augaauccaaaucaaaagauaauaacuauuggcucuguuucucucaccauuuccacaauaugcuucuucaugcaaauugccaucuugauaacuacuguaacauugcauuucaagcaauaugaauucaacucccccccaaacaaccaagugaugcugugugaaccaacaauaauagaaagaaacauaacagagauaguguaucugaccaacaccaccauagagaaggaaauaugccccaaacuagcagaauacagaaauuggucaaagccgcaaugugacauuacaggguuugcaccuuuuucuaaggacaauucgauuaggcuuuccgcugguggggacaucugggugacaagagaaccuuaugugucaugcgauccugacaaguguuaucaauuugcccuuggacagggaacaacacuaaacaacguacauucaaauaacacaguacgugauaggaccccuuaucggacccuauugaugaaugaguuagguguuccuuuucaucuggggaccaagcaagugugcauagcaugguccagcucaaguugucacgauggaaaagcauggcugcauguuuguauaacgggggaugauaaaaaugcaacugcuagcuucauuuacaaugggaggcuuguagauaguguuguuucaugguccaaagaaauccucaggacccaggagucagaaugcguuuguaucaauggaacuuguacaguaguaaugacugaugggagugcuucaggaaaagcugauacuaaaauacuauucauugaggaggggaaaaucguucauacuagcacauugucaggaagugcucagcaugucgaggagugcuccugcuauccucgauauccuggugucagaugugucugcagagacaacuggaaaggauccaauaggcccaucguagauauaaacauaaaggaucauagcauuguuuccaguuauguguguucaggacuuguuggagacacacccagaaaaaacgacagcuccagcaguagccauuguuuggauccuaacaaugaggaagguggucauggggugaaaggcugggccuuugaugauggaaaugacguguggaugggaagaacgaucagcgagaagucacgcuuaggguaugaaaccuucaaagucauugaaggcugguccaacccuaaguccaaauugcagauaaauaggcaagucauaguugacagagguaauagguccgguuauucugguauuuucucuguugaaggcaaaagcugcaucaaucggugcuuuuauguggaguugauaaggggaagaaaagaggaaacugaagucuuguggaccucaaacaguauuguuguguuuuguggcaccucagguacauauggaacaggcucauggccugauggggcggacaucaaucucaugccuauauaa

SEQ ID NO: 52271 - RNA, 1410 nt, Artificial Sequence
  derived and/or modified CDS sequence (wt) from neuraminidase__InfluenzaA__ADW82127
augaauccaaaucaaaagauaauaacgauuggcucuguuucucucaccauuuccacaauaugcuucuucaugcaaauugccaucuugauaacuacuguaacauugcauuucaagcaauaugaauucaacucccccccaaacaaccaagugaugcugugugaaccaacaauaauagaaagaaacauaacagagauaguguaucugaccaacaccaccauagagaaggaaauaugccccaaacuagcagaauacaggaauuggucaaagccgcaaugugacauuacaggguuugcaccuuuuucuaaggacaauucgauuaggcuuuccgcugguggggacaucugggugacaagagaaccuuauguuucaugcgauccugacaaguguuaucaauuugcccuuggacagggaacaacacuaaacaacguacauucaaauaacacaguacgugauaggaccccuuaucggacccuauugaugaaugaguuagguguuccuuuucaucuggggaccaagcaagugugcauagcaugguccagcucaaguugucacgauggaaaagcauggcugcauguuuguauaacgggggaugauaaaaaugcaacugcuagcuucauuuacaaugggaggcuuguagauaguguuguuucaugguccaaagaaauccucaggacccaggagucagaaugcguuuguaucaauggaacuuguacaguaguaaugacugaugggagugcuucaggaaaagcugauacuaaaauacuauucauugaggaggggaaaaucguucauacuagcacauugucaggaagugcucagcaugucgaggagugcuccugcuauccucgauauccuggugucagaugugucugcagagacaacuggaaaggauccaauaggcccaucguagauauaaacauaaaggaucauagcauugucuccaguuauguguguucaggacuuguuggagacacacccagaaaaaacgacagcuccagcaguagccauuguuuggauccuaacaaugaggaagguggucauggggugaaaggcugggccuuugaugauggaaaugacguguggaugggaagaacgaucagcgagaagucacgcuuaggguaugaaaccuucaaagucauugaaggcugguccaacccuaaguccaaauugcagauaaauaggcaagucauaguugacagagguaauagguccgguuauucugguauuuucucuguugaaggcaaaagcugcaucaaucggugcuuuuauguggaguugauaaggggaagaaaagaagaaacugaagucuuguggaccucaaacaguauuguuguguuuuguggcaccucagguacauauggaacaggcucauggccugauggggcggacaucaaucucaugccuauauaa

SEQ ID NO: 52272 - RNA, 1410 nt, Artificial Sequence; identical to SEQ ID NO: 52271
  derived and/or modified CDS sequence (wt) from neuraminidase__InfluenzaA__ADW82138

SEQ ID NO: 52273 - RNA, 1410 nt, Artificial Sequence; identical to SEQ ID NO: 52271
  derived and/or modified CDS sequence (wt) from neuraminidase__InfluenzaA__ADW82149

SEQ ID NO: 52274 - RNA, 1410 nt, Artificial Sequence; identical to SEQ ID NO: 52271
  derived and/or modified CDS sequence (wt) from neuraminidase__InfluenzaA__ADW82158

SEQ ID NO: 52275 - RNA, 1410 nt, Artificial Sequence; identical to SEQ ID NO: 52271
  derived and/or modified CDS sequence (wt) from neuraminidase__InfluenzaA__ADW82169

SEQ ID NO: 52276 - RNA, 1410 nt, Artificial Sequence; identical to SEQ ID NO: 52271
  derived and/or modified CDS sequence (wt) from neuraminidase__InfluenzaA__ADW82180

SEQ ID NO: 52277 - RNA, 1410 nt, Artificial Sequence; identical to SEQ ID NO: 48750
  derived and/or modified CDS sequence (wt) from neuraminidase__InfluenzaA__ADW82191

SEQ ID NO: 52278 - RNA, 1410 nt, Artificial Sequence; identical to SEQ ID NO: 48750
  derived and/or modified CDS sequence (wt) from neuraminidase__InfluenzaA__ADW82201

SEQ ID NO: 52279 - RNA, 1410 nt, Artificial Sequence; identical to SEQ ID NO: 48750
  derived and/or modified CDS sequence (wt) from neuraminidase__InfluenzaA__ADW82211

SEQ ID NO: 52280 - RNA, 1410 nt, Artificial Sequence; identical to SEQ ID NO: 48750
  derived and/or modified CDS sequence (wt) from neuraminidase__InfluenzaA__ADW82221

SEQ ID NO: 52281 - RNA, 1410 nt, Artificial Sequence; identical to SEQ ID NO: 48750
  derived and/or modified CDS sequence (wt) from neuraminidase__InfluenzaA__ADW82231

SEQ ID NO: 52282 - RNA, 1410 nt, Artificial Sequence; identical to SEQ ID NO: 48750
  derived and/or modified CDS sequence (wt) from neuraminidase__InfluenzaA__ADW82241

SEQ ID NO: 52283 - RNA, 1410 nt, Artificial Sequence; identical to SEQ ID NO: 48750
  derived and/or modified CDS sequence (wt) from neuraminidase__InfluenzaA__ADW82251

SEQ ID NO: 52284 - RNA, 1410 nt, Artificial Sequence; identical to SEQ ID NO: 48750
  derived and/or modified CDS sequence (wt) from neuraminidase__InfluenzaA__ADW82261

SEQ ID NO: 52285 - RNA, 1410 nt, Artificial Sequence; identical to SEQ ID NO: 48750
  derived and/or modified CDS sequence (wt) from neuraminidase__InfluenzaA__ADW82271

SEQ ID NO: 52286 - RNA, 1410 nt, Artificial Sequence
  derived and/or modified CDS sequence (wt) from neuraminidase__InfluenzaA__ADW95306
augaauccaaaccaaaagauaauaaccauugguucggucuguaugacaauuggaauggcuaacuuaauauuacaaauuggaaacauaaucucaauauggauuagccacucaauucaacuugggaaucaaagucagauugaaacaugcaaucaaagcgucauuacuuaugaaaacaacacuuggguaaaucagacauauguuaacaucagcaacaccaacuuugcugcuggacagucagugguuuccgugaaauuagcgggcaauuccucucucugcccuguuaguggaugggcuauauacaguaaagacaacaguauaagaaucgguuccaagggggauguguuugucauaagggaaccauucauaucaugcucccccuuggaaugcagaaccuucuucuugacucaaggggccuugcuaaaugacaaacauuccaauggaaccauuaaagacaggagcccauaucgaacccuaaugagcuguccuauuggugaaguucccucuccauacaacucaagauuugagucagucgcuuggucagcaagugcuugucaugauggcaucaauuggcuaacaauuggaauuucuggcccagacaauggggcaguagcuguguuaaaguacaacggcauaauaacagacacuaucaagaguuggagaaacaauauauugagaacacaagagucugaaugugcauguguaaaugguucuugcuuuaccauaaugaccgauggaccaagugauggacaggccucauacaagaucuucagaauagaaaagggaaagauagucaaaucagucgaaaugaaugccccuaauuaucacuaugaggaaugcuccuguuauccugauucuagugaaaucacaugugugugcagggauaacuggcauggcucgaaucgaccgugggugucuuucaaccagaaucuggaauaucagauaggauacauaugcagugggauuuucggagacaauccacgcccuaaugauaagacaggcaguugugguccaguaucgucuaauggagcaaauggaguaaaaggauuuucauucaaauacggcaaugguguuuggauagggagaacuaaaagcauuaguucaagaaaagguuuugagaugauuugggauccaaacggauggacugggacagacaauaacuucucaauaaagcaagauaucguaggaauaaaugaguggucaggauauagcgggaguuuuguucagcauccagaacuaacagggcuggauuguauaagaccuugcuucuggguugaacuaaucagagggcgacccaaagagaacacaaucuggacuagcgggagcagcauauccuuuugugguguaaacagugacacuguggguuggucuuggccagacggugcugaguugccauuuaccauugacaaguaa

SEQ ID NO: 52287 - RNA, 1410 nt, Artificial Sequence; identical to SEQ ID NO: 52286
  derived and/or modified CDS sequence (wt) from neuraminidase__InfluenzaA__ADW95313

SEQ ID NO: 52288 - RNA, 1410 nt, Artificial Sequence; identical to SEQ ID NO: 52286
  derived and/or modified CDS sequence (wt) from neuraminidase__InfluenzaA__ADW95320

SEQ ID NO: 52289 - RNA, 1410 nt, Artificial Sequence; identical to SEQ ID NO: 52286
  derived and/or modified CDS sequence (wt) from neuraminidase__InfluenzaA__ADW95327

SEQ ID NO: 52290 - RNA, 1410 nt, Artificial Sequence
  derived and/or modified CDS sequence (wt) from neuraminidase__InfluenzaA__ADW95333
augaauccaaaccaaaagauaauaaccauugguucggucuguaugacaauuggaauggcuaacuuaauauuacaaauuggaaacauaaucucaauauggauuagccacucaauucaacuugggaaucaaagucagauugaaacaugcaaucaaagcgucauuacuuaugaaaacaacacuuggguaaaucagacauauguuaacaucagcaacaccaacuuugcugcuggacagucagugguuuccgugaaauuagcgggcaauuccucucucugcccuguuaguggaugggcuauauacaguaaagacaacaguauaagaaucgguuccaagggggauguguuugucauaagggaaccauucauaucaugcucccccuuggaaugcagaaccuucuucuugacucaaggggccuugcuaaaugacaaacauuccaauggaaccauuaaagacaggagcccauaucgaacccuaaugagcuguccuauuggugaaguucccucuccauacaacucaagauuugagucagucgcuuggucagcaagugcuugucaugauggcaucaauuggcuaacaauuggaauuucuggcccagacaauggggcaguagcuguguuaaaguacaacggcauaauaacagacacuaucaagaguuggagaaacaauauauugagaacacaagagucugaaugugcauguguaaaugguucuugcuuuaccauaaugaccgauggaccaagugauggacaggccucuuacaagaucuuccgaauagaaaagggaaagauagucaaaucagucgaaaugaaugccccuaauuaucacuaugaggaaugcuccuguuauccugauucuagugaaaucacaugugugugcagggauaacuggcauggcucgaaucgaccgugggugucuuucaaccagaaucuggaauaucagauaggauacauaugcagugggauuuucggagacaauccacgcccuaaugauaagacaggcaguugugguccaguaucgucuaauggagcaaauggaguaaaaggauuuucauucaaauacggcaaugguguuuggauagggagugcuaaaagcauuaguucaagaaaagcuuuugagaugauuugggauccaaacggauggacugggacagacaauaacuucucaauaaagcaauauauaguaggaauaaaugaguggucaggauauagcgggaguuuuguugagcauccagaacuaacagggcuggauuguauaagaccuugcuucuggguugaacuaaucagagggcgacccaaagagaacacaaucuggacuagcgggagcagcauauccuuuugugguguaaacagugacacuguggguuggucuuggccagacggugcugaguugccauuuaccauugacaaguaa

SEQ ID NO: 52291 - RNA, 1410 nt, Artificial Sequence
  derived and/or modified CDS sequence (wt) from neuraminidase__InfluenzaA__ADX20813
augaauccaaaccaaaagauaauaaccauugguucggucuguaugacaauuggaauggcuaacuuaauauuacaaauuggaaacauaaucucaauauggauuagccacucaauucaacuugggaaucaaaaucagauugaaacaugcaaucaaagcgucauuacuuaugaaaacaacacuuggguaaaucagacauauguuaacaucagcaacaccaacuuugcugcuggacagucagugguuuccgugaaauuagcgggcaauuccucucucugcccuguuaguggaugggcuauauacaguaaagacaacaguauaagaaucgguuccaagggggauguguuugucauaagggaaccauucauaucaugcucccccuuggaaugcagaaccuucuucuugacucaaggagccuugcuaaaugacaaacauuccaauggaaccauuaaagacaggagcccauaucgaacccuaaugagcuguccuauuggugaaguucccucuccauacaacucaagauuugaguuagucgcuuggucagcaagugcuugucaugauggcaucaauuggcuaacaauuggaauuucuggcccagacaauggggcaguggcuguguuaaaguacaacggcauaauaacagacacuaucaagaguuggagaaacaauauauugagaacacaagagucugaaugugcauguguaaaugguucuugcuuuacuguaaugaccgauggaccaagugauggacagaccucauacaagaucuucagaauagaaaagggaaagauagucaaaucagucgaaaugaaugccccuaauuauuacuaugaggaaugcuccuguuauccugauucuagugaaaucacaugugugugcagggauaacuggcauggcucgaaucgaccaugggugucuuucaaccagaaucuggaauaucagauaggauacauaugcagugggauuuucggagacaauccacgcccuaaugauaagacaggcaguugugguccaguaucgucuaauggagcaaauggaguaaaaggauuuucauucaaauacggcaaugguguuuggauagggagaacuaaaagcauuaguucaagaaaagguuuugagaugauuugggauccaaacggauggacugggacagacaauaacuucucaauaaagcaagauaucguaggaauaaaugaguggucaggauauagcgggaguuuuguucagcauccagaacuaacagggcuggauuguauaagaccuugcuucuggguugaacuaaucagagggcgacccaaagagaacacaaucuggacuagcgggagcagcauauccuuuugugguguaaacagugacacuguggguuggucuuggccagacggugcugaguugccauuuaccauugacaaguaa

SEQ ID NO: 52292 - RNA, 1410 nt, Artificial Sequence
  derived and/or modified CDS sequence (wt) from neuraminidase__InfluenzaA__ADX20814
augaauccaaaccaaaagauaauaaccauugguucggucuguaugacaauuggaauggcuaacuuaauauuacaaauuggaaacauaaucucaauauggauuagccacucaauucaacuugggaaucaaagucagauugaaacaugcaaucaaagcgucauuacuuaugaaaacaacacuuggguaaaucagacauauguuaacaucagcaacaccaacuuugcugcuggacagucagugguuuccgugaaauuagcgggcaauuccucucucugcccuguuaguggaugggcuauauacaguaaagacaacaguauaagaaucgguuccaagggggauguguuugucauaagggaaccauucauaucaugcucccccuuggaaugcagaaccuucuucuugacucaaggggccuugcuaaaugacaaacauuccaauggaaccauuaaagacaggagcccauaucgaacccuaaugagcuguccuauuggugaaguucccucuccauacaacucaagauuugagucagucgcuuggucagcaagugcuugucaugauggcaucaauuggcuaacaauuggaauuucuggcccagacaauggggcaguggcuguguuaaaguacaacggcauaauaacagacacuaucaagaguuggagaaacaauauauugagaacacaagagucugaaugugcauguguaaaugguucuugcuuuaccauaaugaccgauggaccaagugauggacaggccucauacaagaucuucagaauagaaaagggaaagauagucaaaucagucgaaaugaaugccccuaauuauuacuaugaggaaugcuccuguuauccugauucuagugaaaucacaugugugugcagggauaacuggcauggcucgaaucgaccgugggugucuuucaaccagaaucuggaauaucagauaggauacauaugcagugggauuuucggagacaauccacgcccuaaugauaagacaggcaguugugguccaguaucgucuaauggagcaaauggaguaaaaggauuuucauucaaauacggcaaugguguuuggauagggagaacuaaaagcauuaguucaagaaaagguuuugagaugauuugggauccaaacggauggacugggacagacaauaacuucucaauaaagcaagauaucguaggaauaaaugaguggucaggauauagcgggaguuuuguucagcauccagaacuaacagggcuggauuguauaagaccuugcuucuggguugaacuaaucagagggcgacccaaagagaacacaaucuggacuagcgggagcagcauauccuuuugugguguaaacagugacacuguggguuggucuuggccagacggugcugaguugccauuuaccauugacaaguaa

SEQ ID NO: 52293 - RNA, 1410 nt, Artificial Sequence; identical to SEQ ID NO: 52271
  derived and/or modified CDS sequence (wt) from neuraminidase__InfluenzaA__ADX21091

SEQ ID NO: 52294 - RNA, 1410 nt, Artificial Sequence; identical to SEQ ID NO: 48750
  derived and/or modified CDS sequence (wt) from neuraminidase__InfluenzaA__ADX21101

SEQ ID NO: 52295 - RNA, 1410 nt, Artificial Sequence
  derived and/or modified CDS sequence (wt) from neuraminidase__InfluenzaA__ADX36112
augaauccaaaucaaaagauaauaacgauuggcucuguuucucucaccauuuccacaauaugcuucuucaugcaaauugccaucuugauaacuacuguaacauugcauuucaagcaauaugaauucaacucccccccaaacaaccaagugaugcugugugaaccaacaauaauagaaagaaacauaacagagauaguguaucugaccaacaccaccauagagaaggaaauaugccccaaacuagcagaauacagaaauuggucaaagccgcaaugugacauuacaggguuugcaccuuuuucuaaggacaauucgauuaggcuuuccgcugguggggacaucugggugacaagagaaccuuaugugucaugcgauccugacaaguguuaucaauuugcccuuggacagggaacaacacuaaacaacguacauucaaauaacacaguacgugauaggaccccuuaucggacccuauugaugaaugaguuagguguuccuuuucaucuggggaccaagcaagugugcauagcaugguccagcucaaguugucacgauggaaaagcauggcugcauguuuguauaacgggggaugauaaaaaugcaacugcuagcuucauuuacaaugggaggcuuguagauaguguuguuucaugguccaaagaaauccucaggacccaggagucagaaugcguuuguaucaauggaacuuguacaguaguaaugacugaugggagugcuucaggaaaagcugauacuaaaauacuauucauugaggaggggaaaaucguucauacuagcacauugucaggaagugcucagcaugucgaggagugcuccugcuauccucgauauccuggugucagaugugucugcagagacaacuggaaaggauccaauaggcccaucguagauauaaacauaaaggaucacagcauugucuccaguuauguguguucaggacuuguuggagacacacccagaaaaaacgacagcuccagcaguagccauuguucggauccuaacaaugaggaagguggucauggggugaaaggcugggccuuugaugauggaaaugacguguggaugggaagaacgaucagcgagaagucacgcuuaggguaugaaaccuucaaagucauugaaggcugguccaacccuaaguccaaauugcagauaaauaggcaagucauaguugacagagguaauagguccgguuauucugguauuuucucuguugaaggcaaaagcugcaucaaucggugcuuuuauguggaguugauaaggggaagaaaagaggaaacugaagucuuguggaccucaaacaguauuguuguguuuuguggcaccucagguacauauggaacaggcucauggccugauggggcggauaucaaucucaugccuauauaa

SEQ ID NO: 52296 - RNA, 1410 nt, Artificial Sequence
  derived and/or modified CDS sequence (wt) from neuraminidase__InfluenzaA__ADX87386
augaauccaaaucaaaggauaauaacgauuggcucuguuucucucaccauuuccacaauaugcuucuucaugcaaauugccaucuugauaacuacuguaacauugcauuucaagcaauaugaauucaacucccccccaaacaaccaagugaugcugugugaaccaacaauaauagaaagaaacauaacagagauaguguaucugaccaacaccaccauagagaaggaaauaugccccaaacuagcagaauacagaaauuggucaaagccgcaaugugacauuacaggguuugcaccuuuuucuaaggacaauucgauuaggcuuuccgcugguggggacaucugggugacaagagaaccuuaugugucaugcgauccugacaaguguuaucaauuugcccuuggacagggaacaacacuaaacaacguacauucaaauaacacaguacgugauaggaccccuuaucggacccuauugaugaaugaguuagguguuccuuuucaucuggggaccaagcaagugugcauagcaugguccagcucaaguugucacgauggaaaagcauggcugcauguuuguauaacgggggaugauaaaaaugcaacugcuagcuucauuuacaaugggaggcuuguagauaguguuguuucaugguccaaagaaauccucaggacccaggagucagaaugcguuuguaucaauggaacuuguacaguaguaaugacugaugggagugcuucaggaaaagcugauacuaaaauauuauucauugaggagggaaaaaucguucauacuagcacauugucaggaagugcucagcaugucgaggagugcuccugcuauccucgauauccuggugucagaugugucugcagagacaacuggaaaggauccaauaggcccaucguagauauaaacauaaaggaucauagcauugucuccaguuauguguguucaggacuuguuggagacacacccagaaaaaacgacagcuccagcaguagccauuguuuggauccuaacaaugaggaagguggucauggggugaaaggcugggccuuugaugauggaaaugacguguggaugggaagaacgaucagcgagaagucacgcuuaggguaugaaaccuucaaagucauugaaggcugguccaacccuaaguccaaauugcagauaaauaggcaagucauaguugacagagguaauagguccgguuauucugguauuuucucuguugaaggcaaaagcugcaucaaucggugcuuuuauguggaguugauaaggggaagaaaagaggaaacugaagucuuguggaccucaaacaguauuguuguguuuuguggcaccucagguacauauggaacaggcucauggccugauggggcggacaucaaucucaugccuguauaa

SEQ ID NO: 52297 - RNA, 1410 nt, Artificial Sequence
  derived and/or modified CDS sequence (wt) from neuraminidase__InfluenzaA__ADX96270
augaauccaaaccaaaagauaauaaccauugguucggucuguaugacaauuggaauggccaacuuaauauuacaaauuggaaacauaaucucaauauggauuagccacucaauucaacuugggaaucaaaaucagauugaaacaugcaaucaaagcaucauuacuuaugaaaacaacacuuggguaaaucagacauauguuaacaucagcaacaccaacuuugcugcuggacagucaguggcuuccgugaaauuagcgggcaauucuucucucugcccuguuaguggaugggcuauauacaguaaagacaacaguguaagaaucgguuccaagggggauguguuugucauaagggaaccauucauaucaugcucccccuuggaaugcagaaccuucuucuugacucaaggggccuugcuaaaugacaaacauuccaaugggaccauuaaagacaggagcccauaucgaacccuaaugagcuguccuauuggugaaguucccucuccauacaacucaagauuugagucagucgcuuggucagcaagugcuugucaugauggcaucaauuggcuaacaauuggaauuucuggcccagacaauggggcaguggcuguguuaaaguacaacggcauaauaacagacacuaucaagaguuggagaaacaauauauugagaacacaagagucugaaugugcauguguaaaugguucuugcuuuacuguaaugaccgauggaccaagugauggacaggccucauacaagaucuucagaauagaaaagggaaagauagucaaaucagucgaaaugaaugccccuaauuaucacuaugaggaaugcuccuguuauccugauucuagugaaaucacaugugugugcagggauaacuggcauggcucgaaucgaccguggguuucuuucaaccagaaucuggaauaucagauaggauacauaugcagugggauuuucggagacaauccacgcccuaaugauaagacaggcaguugugguccaguaucgucuaauggagcaaauggaguaaaaggauuuucauucaaauacggcaaugguguuuggauagggagaacuaaaagcauuaguucaagaaacgguuuugagaugauuugggauccgaacggauggacugggacagacaauaacuucucaauaaagcaagauaucguaggaauaaaugaguggucaggauauagcgggaguuuuguucagcauccagaacuaacagggcuggauuguauaagaccuugcuucuggguugaacuaaucagagggcgacccaaagagaacacaaucuggacuagcgggagcagcauauccuuuugugguguaaacagugacacuguggguuggucuuggccagacggugcugaguugccauuuaccauugacaaguaa

SEQ ID NO: 52298 - RNA, 1410 nt, Artificial Sequence; identical to SEQ ID NO: 52297
  derived and/or modified CDS sequence (wt) from neuraminidase__InfluenzaA__ADX96280

SEQ ID NO: 52299 - RNA, 1410 nt, Artificial Sequence
  derived and/or modified CDS sequence (wt) from neuraminidase__InfluenzaA__ADX96290
augaauccaaaccaaaagauaauaaccauugguucggucuguaugacaauuggaauggccaacuuaauauuacaaauuggaaacauaaucucaauauggauuagccacucaauucaacuugggaaucaaaaucagauugaaacaugcaaucaaagcgucauuacuuaugaaaacaacacuuggguaaaucagacauauguuaacaucagcaacaccaacuuugcugcuggacagucagugguuuccgugaaauuagcaggcaauucuucucucugcccuguuaguggaugggcuauauacaguaaagacaacaguguaagaaucgguuccaagggggauguguuugucauaagggaaccauucauaucaugcucccccuuggaaugcagaaccuucuucuugacucaaggggccuugcuaaaugacaaacauuccaauggaaccauuaaagacaggagcccauaucgaacccuaaugagcuguccuauuggugaaguucccucuccauacaacucaagauuugagucagucgcuuggucagcaagugcuugucaugauggcaucaauuggcuaacaauuggaauuucuggcccagacaauggggcaguggcuguguuaaaguacaacggcauaauaacagacacuaucaagaguuggagaaacaauauauugagaacacaagagucugaaugugcauguguaaaugguucuugcuuuacuguaaugaccgauggaccaagugauggacaggccucauacaagaucuucagaauagaaaagggaaagauagucaaaucagucgaaaugaaugccccuaauuaucacuaugaggaaugcuccuguuauccugauucuagugaaaucacaugugugugcagggauaacuggcauggcucgaaucgaccguggguuucuuucaaccagaaucuggaauaucagauaggauacauaugcagugggauuuucggagacaauccacgcccuaaugauaagacaggcaguugugguccaguaucgucuaauggagcaaauggaguaaaaggauuuucauucaaauacggcaaugguguuuggauagggagaacuaaaagcauuaguucaagaaacgguuuugagaugauuugggauccgaacggauggacugggacagacaauaacuucucaauaaagcaagauaucguaggaauaaaugaguggucaggauauagcgggaguuuuguucagcauccagaacuaacagggcuggauuguauaagaccuugcuucuggguugaacuaaucagagggcgacccaaagagaacacaaucuggacuagcgggagcagcauauccuuuugugguguaaacagugacacuguggguuggucuuggccagacggugcugaguugccauuuaccauugacaaguaa

SEQ ID NO: 52300 - RNA, 1410 nt, Artificial Sequence
  derived and/or modified CDS sequence (wt) from neuraminidase__InfluenzaA__ADX96300
augaauccaaaccaaaagauaauaaccauugguucggucuguaugacaauuggaauggccaacuuaauauuacaaauuggaaacauaaucucaauauggauuagccacucaauucaacuugggaaucaaaaccagauugaaacaugcaaucaaagcgucauuacuuaugaaaacaacacuuggguaaaucagacauauguuaacaucagcaacaccaacuuugcugcuggacagucagugguuuccgugaaauuagcgggcaauuccucucucugcccuguuaguggaugggcuauauacaguaaagacaacaguauaagaaucgguuccaagggggauguguuugucauaagggaaccauucauaucaugcucccccuuggaaugcagaaccuucuucuugacucaaggggccuugcuaaaugacaaacauuccaauggaaccauuaaagacaggagcccauaucgaacccuaaugagcuguccuauuggugaaguucccucuccauacaacucaagauuugagucagucgcuuggucagcaagugcuugucaugauggcaucaauuggcuaacaauuggaauuucuggcccagacaauggggcaguggcuguguuaaaguacaacggcauaauaacagacacuaucaagaguuggagaaacaauauauugagaacacaagagucugaaugugcauguguaaaugguucuugcuuuacuguaaugaccgaugggccaagugauggacaggccucauacaagaucuucagaauagaaaagggaaagauagucaaaucagucgaaaugaaugccccuaauuaucacuaugaggaaugcuccuguuauccugauucuagugaaaucacaugugugugcagggauaacuggcauggcucgaaucgaccgugggugucuuucaaccagaaucuggaauaucagauaggauacauaugcagugggauuuucggagacaauccacgcccuaaugauaagacaggcaguugugguccaguaucgucuaauggagcaaauggaguaaaaggauuuucauucaaauacggcaaugguguuuggauagggagaacuaaaagcauuaguucaagaaacgguuuugagaugauuugggauccgaacggauggacugggacagacaauaacuucucaauaaagcaagauaucguaggaauaaaugaguggucaggauauagcgggaguuuuguucagcauccagaacuaacagggcuggauuguauaagaccuugcuucuggguugaacuaaucagagggcgacccaaagagaacacaaucuggacuagcgggagcagcauauccuuuugugguguaaacagugacacuguggguuggucuuggccagacggugcugaguugccauuuaccauugacaaguaa

SEQ ID NO: 52301 - RNA, 1410 nt, Artificial Sequence; identical to SEQ ID NO: 48750
  derived and/or modified CDS sequence (wt) from neuraminidase__InfluenzaA__ADX96310

SEQ ID NO: 52302 - RNA, 1410 nt, Artificial Sequence
  derived and/or modified CDS sequence (wt) from neuraminidase__InfluenzaA__ADX96330
augaauccaaaccaaaagauaauaaccauugguucggucuguaugacaauuggaauggcuaacuuaauauuacaaauuggaaauggaaucucaauauggauuagccacucaauucaacuugggaaucaaaaucagauugaaacaugcaaucaaagcgucauuacuuaugaaaacaacacuuggguaaaucagacauauguuaacaucagcaacaccaacuuugcugcuggacagucagugguuuccgugaaauuagcgggcaauuccucucucugcccuguuaguggaugggcuauauacaguaaagacaacaguauaagaaucgguuccaagggggauguguuugucauaagggaaccauucauaucaugcucccccuuggaaugcagaaccuucuucuugacucaaggggccuugcuaaaugacaaacauuccaauggaaccauuaaagacaggagcccauaucgaacccuaaugagcuguccuauuggugaaguucccucuccauacaacucaagauuugagucagucgcuuggucagcaagugcuugucaugauggcaucaauuggcuaacaauuggaauuucuggcccagacaauggggcaguggcuguguuaaaguacaacggcauaauaacagacacuaucaagaguuggagaaacaauauauugagaacacaagagucugaaugugcaugcguaaaugguucuugcuuuacuguaaugaccgaugggccaagugauggacaggccucauacaagaucuucagaauagaaaagggaaagauagucaaaucagucgaaaugaaugccccuaauuaucacuaugaggaaugcuccuguuauccugauucuaaugaaaucacaugugugugcagggauaacuggcauggcucgaaucgaccgugggugucuuucaaccagaaucuggaauaucagauaggauacauaugcagugggauuuucggagacaauccacgcccuaaugauaagacaggcaguugugguccaguaucgucuaauggagcaaauggaguaaaaggauuuucauucaaauacggcaaugguguuuggauagggagaacuaaaagcauuaguucaagaaacgguuuugagaugauuugggauccgaacggauggacugggacagacaauaacuucucaauaaagcaagauaucguaggaauaaaugaguggucaggauauagcgggaguuuuguucagcauccagaacuaacagggcuggauuguauaagaccuugcuucuggguugaacuaaucagagggcgacccaaagagaacacaaucuggacuagcgggagcagcauauccuuuugugguguaaacagugacacuguggguuggucuuggccagacggugcugaguugccauuuaccauugacaaguaa

SEQ ID NO: 52303 - RNA, 1410 nt, Artificial Sequence
  derived and/or modified CDS sequence (wt) from neuraminidase__InfluenzaA__ADX96339
augaauccaaaccaaaagauaauaaccauugguucggucuguaugacaauuggaauggcuaacuuaauauuacaaauuggaaacauaaucucaauauggauuagccacucaauucaacuugggaaucaaaaucagauugaaacaugcaaucaaagcgucauuacuuaugaaaacaacacuuggguaaaucagacauauguuaacaucagcaacaccaacuuugcugcuggacagucagugguuuccgugaaauuagcgggcaauuccucucucugcccuguuaguggaugggcuauauacaguaaagacaacaguauaagaaucgguuccaagggggauguguuugucauaagggaaccauucauaucaugcucccccuuggaaugcagaaccuucuucuugacucaaggggccuugcuaaaugacaaacauuccaauggaaccauuaaagacaggagcccauaucgaacccuaaugagcuguccuauuggugaaguucccucuccauacaacucaagauuugagucagucgcuuggucagcaagugcuugucaugauggcaucaauuggcuaacaauuggaauuucuggcccagacaauggggcaguggcuguguuaaaguacaacggcauaauaacagacacuaucaagaguuggagaaacaauauauugagaacacaagagucugaaugugcauguguaaaugguucuugcuuuacuguaaugaccgaugggccaagugauggacaggccucauacaagaucuucagaauagaaaagggaaagauagucaaaucagucgaaaugaaugccccuaauuaucacuaugaggaaugcuccuguuauccugauucuagugaaaucacaugugugugcagggauaacuggcauggcucgaaucgaccgugggugucuuucaaccagaaucuggaauaucagauaggauacauaugcagugggauuuucggagacaauccacgcccuaaugauaagacaggcaguugugguccaguaucgucuaauggagcaaauggaguaaaaggauuuucauucaaauacggcaaugguguuuggauagggagaacuaaaagcauuaguucaagaaacgguuuugagaugauuugggauccgaacggauggacugggacagacaauaacuucucaauaaagcaagauaucguaggaauaaaugaguggucaggauauagcgggaguuuuguucagcauccagaacuaacagggcuggauuguauaagaccuugcuucuggguugaacuaaucagagggcgacccaaagagaacacaaucuggacuagcgggagcagcauauccuuuugugguguaaacagugacacuguggguuggucuuggccagacggugcugaguugccauuuaccauugacaaguaa

SEQ ID NO: 52304 - RNA, 1410 nt, Artificial Sequence
  derived and/or modified CDS sequence (wt) from neuraminidase__InfluenzaA__ADX96349
augaauccaaaccaaaagauaauaaccauugguucggucuguaugacaauuggaauggcuaacuuaauauuacaaauuggaaacauaaucucaauauggauuagccacucaauucaacuugggaaucaaaaucagauugaaacaugcaaucaaagcgucauuacuuaugaaaacaacacuuggguaaaucagacauauguuaacaucagcaacaccaacuuugcugcuggacagucagugguuuccgugaaauuagcgggcaauuccucucucugcccuguuaguggaugggcuauauacaguaaagacaacaguauaagaaucgguuccaagggggauguguuugucauaagggaaccauucauaucaugcucccccuuggaaugcagaaccuucuucuugacucaaggggccuugcuaaaugacaaacauuccaauggaaccauuaaagacaggagcccauaucgaacccuaaugagcuguccuauuggugaaguucccucuccauacaacucaagauuugagucagucgcuuggucagcaagugcuugucaugauggcaucaauuggcuaacaauuggaauuucuggcccagacaauggggcaguggcuguguuaaaguacaacggcauaauaacagacacuaucaagaguuggagaaacaauauauugagaacacaagagucugaaugugcauguguaaaugguucuugcuuuacuguaaugaccgauggaccaagugauggacaggccucauacaagaucuucagaauagaaaagggaaagauagucaaaucagucgaaaugaaugccccuaauuaucacuaugaggaaugcuccuguuauccugauucuaaugaaaucacaugugugugcagggauaacuggcauggcucgaaucgaccgugggugucuuucaaccagaaucuggaauaucagauaggauacauaugcagugggauuuucggagacaauccacgcccuaaugauaagacaggcaguugugguccaguaucgucuaauggagcaaauggaguaaaaggauuuucauucaaauacggcaaugguguuuggauagggagaacuaaaagcauuaguucaagaaacgguuuugagaugauuugggauccgaacggauggacugggacagacaauaacuucucaauaaagcaagauaucguaggaauaaaugaguggucaggauauagcgggaguuuuguucagcauccagaacuaacagggcuggauuguauaagaccuugcuucuggguugaacuaaucagagggcgacccaaagagaacacaaucuggacuagcgggagcagcauauccuuuugugguguaaacagugacacuguggguuggucuuggccagacggugcugaguugccauuuaccauugacaaguaa

SEQ ID NO: 52305 - RNA, 1410 nt, Artificial Sequence
  derived and/or modified CDS sequence (wt) from neuraminidase__InfluenzaA__ADX96359
augaauccaaaccaaaagauaauaaccauugguucggucuguaugacaauuggaauggccaacuuaauauuacaaauuggaaacauaaucucaauauggauuagccacucaauucaacuugggaaucaaaaucagauugaaacaugcaaucaaagcgucauuacuuaugaaaacaacacuuggguaaaucagacauauguuaacaucagcaacaccaacuuugcugcuggacagucagugguuuccgugaaauuagcgggcaauuccucucucugcccuguuaguggaugggcuauauacaguaaagacaacaguauaagaaucgguuccaagggggauguguuugucauaagggaaccauucauaucaugcucccccuuagaaugcagaaccuucuucuugacucaaggggccuugcuaaaugacaaacauuccaauggaaccauuaaagacaggagcccauaucgaacccuaaugagcuguccuauuggugaaguucccucuccauacaacucaagauuugagucagucgcuuggucagcaagugcuugucaugauggcaucaauuggcuaacaauuggaauuucuggcccagacaauggggcaguggcuguguuaaaguacaacggcauaauaacagacacuaucaagaguuggagaaacaauauauugagaacacaagagucugaaugugcauguguaaaugguucuugcuuuacuguaaugaccgauggaccaagugauggacaggccucauacaagaucuucagaauagaaaagggaaagauagucaaaucagucgaaaugaaugccccuaauuaucacuaugaggaaugcuccuguuauccugauucuagugaaaucacaugugugugcagggauaacuggcauggcucgaaucgaccgugggugucuuucaaccagaaucuggaauaucagauaggauacauaugcagugggauuuucggagacaauccacgcccuaaugauaagacaggcaguugugguccaguaucgucuaauggagcaaauggaguaaaaggauuuucauucaaauacggcaaugguguuuggauagggagaacuaaaagcauuaguucaagaaacgguuuugagaugauuugggauccgaacggauggacugggacagacaauaacuucucaauaaagcaagauaucguaggaauaaaugaguggucaggauauagcgggaguuuuguucagcauccagaacuaacagggcuggauuguauaagaccuugcuucuggguugaacuaaucagagggcgacccaaagagaacacaaucuggacuagcgggagcagcauauccuuuugugguguaaacagugacacuguggguuggucuuggccagacggugcugaguugccauuuaccauugacaaguaa

SEQ ID NO: 52306 - RNA, 1410 nt, Artificial Sequence; identical to SEQ ID NO: 52303
  derived and/or modified CDS sequence (wt) from neuraminidase__InfluenzaA__ADX96369

SEQ ID NO: 52307 - RNA, 1410 nt, Artificial Sequence
  derived and/or modified CDS sequence (wt) from neuraminidase__InfluenzaA__ADX96380
augaauccaaaccaaaagauaauaaccauugguucggucuguaugacaauuggaauggcuaacuuaauauuacaaauuggaaacauaaucucaauauggccaguccacucaauucaacuugggaaucaaaaucagauugaaacaugcaaucaaagcgucauuacuuaugaaaacaacacuuggguaaaucagacauauguuaacaucagcaacaccaacuuugcugcuggacagucagugguuuccaugaaauuagcgggcaauuccucucucugcccuguugguggaugggcuauauacaguaaagacaacaguguaagaaucgguuccaagggggauguguuugucauaagggaaccauucauaucaugcucccccuuggaaugcagaaccuucuucuugacucaaggggccuugcuaaaugacaaacauuccaauggaaccauuaaagacaggagcccauaucgaacccuaaugagcuguccuauuggugaaguucccucuccauacaacucaagauuugagucagucgcuuggucagcaagugcuugucaugauggcaucaauuggcuaacaauuggaauuucuggcccagacaauggggcaguggcuguguuaaaguacaacggcauaauaacagacacuaucaagaguuggagaaacaauauauugagaacacaagagucugaaugugcauguguaaaugguucuugcuuuacuguaaugaccgauggaccaagugauggacaggccucauacaagaucuucagaauagaaaagggaaagauagucgaaucagucgaaaugaaugccccuaauuaucacuaugaggaaugcuccuguuauccugauucuagugaaaucacaugugugugcagggauaacuggcauggcucgaaucgaccgugggugucuuucaaccagaaucuggaauaucagauaggauacauaugcagugggauuuucggagacaauccacgcccuaaugauaagacaggcaguugugguccaguaucgucuaauggagcaaauggaguaaaaggauuuucauucaaauacggcaaugguguuuggauagggagaacuaaaagcauuaguucaagaaacgguuuugagaugauuugggauccgaacggauggacugggacagacaauaacuucucaauaaagcaagauaucguaggaauaaaugaguggucaggauauagcgggaguuuuguucagcauccagaacuaacagggcuggauuguauaagaccuugcuucuggguugaacuaaucagagggcgacccaaagagaacacaaucuggacuagcgggagcagcauauccuuuugugguguaaacagugacacuguggguuggucuuggccagacggugcugaguugccauuuaccauugacaaguaa

SEQ ID NO: 52308 - RNA, 1410 nt, Artificial Sequence
  derived and/or modified CDS sequence (wt) from neuraminidase__InfluenzaA__ADX96390
augaauccaaaccaaaagauaauaaccauugguucggucuguaugacaauuggaauggcuaacuuaauauuacaaauuggaaacauaaucucaauauggcucagccacucaauucaacuugggaaucaaaaucagauugaaacaugcaaucaaagcgucauuacuuaugaaaacaacacuuggguaaaucagacauauguuaacaucagcaacaccaacuuugcugcuggacagucagugguuuccgugaaauuagcgggcaauuccucucucugcccuguuaguggaugggcuauauacaguaaagacaacaguauaagaaucgguuccaagggggauguguuugucauaagggaaccauucauaucaugcucccccuuggaaugcagaaccuucuucuugacucaaggggccuugcuaaaugacaaacauuccaauggaaccauuaaagacaggagcccauaucgaacccuaaugagcuguccuauuggugaaguucccucuccauacaacucaagauuugagucagucgcuuggucagcaagugcuugucaugauggcaucaauuggcuaacaauuggaauuucuggcccagacaauggggcaguggcuguguuaaaguacaacggcauaauaacagacacuaucaagaguuggagaaacaauauauugagaacacaagagucugaaugugcauguguaaaugguucuugcuuuacuguaaugaccgauggaccaagugauggacaggccucauacaagaucuucagaauagaaaagggaaagauagucaaaucagucgaaaugaaugccccuaauuaucacuaugaggaaugcuccuguuauccugauucuagugaaaucacaugugugugcagggauaacuggcauggcucgaaucgaccgugggugucuuucaaccagaaucuggaauaucagauaggauacauaugcagugggauuuucggagacaauccacgcccuaaugauaagacaggcaguugugguccaguaucgucuaauggagcaaauggaguaaaaggauuuucauucaaauacggcaaugguguuuggauagggagaacuaaaagcauuaguucaagaaacgguuuugagaugauuugggauccgaacggauggacugggacagacaauaacuucucaauaaagcaagauaucguaggaauaaaugaguggucaggauauagcgggaguuuuguucagcauccagaacuaacagggcuggauuguauaagaccuugcuucuggguugaacuaaucagagggcgacccaaagagaacacaaucuggacuagcgggagcagcauauccuuuugugguguaaacagugacacuguggguuggucuuggccagacggugcugaguugccauuuaccauugacaaguaa

SEQ ID NO: 52309 - RNA, 1410 nt, Artificial Sequence; identical to SEQ ID NO: 52303
  derived and/or modified CDS sequence (wt) from neuraminidase__InfluenzaA__ADX96400

SEQ ID NO: 52310 - RNA, 1410 nt, Artificial Sequence
  derived and/or modified CDS sequence (wt) from neuraminidase__InfluenzaA__ADX96410
augaauccaaaccaaaagauaauaaccauugguucggucuguaugacaauuggaauggcuaacuuaauauuacaaauuggaaacauaaucucaauauggauuagccacucaauucaacuugggaaucaaaaucagauugaaacaugcaaucaaagcgucauuacuuaugaaaacaacacuuggguaaaucagacauauguuaacaucagcaacaccaacuuugcugcuggacagucagugguuuccgugaaauuagcgggcaauuccucucucugcccuguuaguggaugggcuauauacaguaaagacaacaguauaagaaucgguuccaagggggauguguuugucauaagggaaccauucauaucaugcucccccuuggaaugcagaaccuucuucuugacucaaggggccuugcuaaaugacaaacauuccaauggaaccauuaaagacaggagcccauaucgaacccuaaugagcuguccuauuggugaaguucccucuccauacaacucaagauuugagucagucgcuuggucagcaagugcuugucaugauggcaucaauuggcuaacaauuggaauuucuggcccagacaauggggcaguggcuguguuaaaguacaacggcauaauaacagacacuaucaagaguuggagaaacaauauauugagaacacaagagucugaaugugcauguguaaaugguucuugcuuuacuguaaugacugaugggccaagugauggacaggccucauacaagaucuucagaauagaaaagggaaagauagucaaaucagucgaaaugaaugccccuaauuaucacuaugaggaaugcuccuguuauccugauucuagugaaaucacaugugugugcagggauaacuggcauggcucgaaucgaccgugggugucuuucaaccagaaucuggaauaucagauaggauacauaugcagugggauuuucggagacaauccacgcccuaaugauaagacaggcaguugugguccaguaucgucuaauggagcaaauggaguaaaaggauuuucauucaaauacggcaaugguguuuggauagggagaacuaaaagcauuaguucaagaaacgguuuugagaugauuugggauccgaacggauggacugggacagacaauaacuucucaauaaagcaagauaucguaggaauaaaugaguggucaggauauagcgggaguuuuguucagcauccagaacuaacagggcuggauuguauaagaccuugcuucuggguugaacuaaucagagggcgacccaaagagaacacaaucuggacuagcgggagcagcauauccuuuugugguguaaacagugacacuguggguuggucuuggccagacggugcugaguugccauuuaccauugacaaguaa

SEQ ID NO: 52311 - RNA, 1410 nt, Artificial Sequence
  derived and/or modified CDS sequence (wt) from neuraminidase__InfluenzaA__ADX96419
augaauccaaaccaaaagauaauaaccauugguucggucuguaugacaauuggaauggcuaacuuaauauuacaaauuggaaacauaaucucaauauggauuagccacucaauucaacuugggaaucaaaaucagauugaaacaugcaaucaaagcgucauuacuuaugaaaacaacacuuggguaaaucagacauauguuaacaucagcaacaccaacuuugcugcuggacagucagugguuuccgugaaauuagcgggcaauuccucucucugcccuguuaguggaugggcuauauacaguaaagacaacaguauaagaaucgguuccaagggggauguguuugucauaagggaaccauucauaucaugcucccccuuggaaugcagaaccuucuucuugacucaaggggccuugcuaaaugacaaacauuccaauggaaccauuaaggacaggagcccauaucgaacccuaaugagcuguccuauuggugaaguucccucuccauacaacucaagauuugagucagucgcuuggucagcaagugcuugucaugauggcaucaauuggcuaacaauuggaauuucuggcccagacaauggggcaguggcuguguuaaaguacaacggcauaauaacagacacuaucaagaguuggagaaacaauauauugagaacacaagagucugaaugugcauguguaaaugguucuugcuuuacuguaaugaccgauggaccaagugauggacaggccucauacaagaucuucagaauagaaaagggaaagauagucaaaucagucgaaaugaaugccccuaauuaucacuaugaggaaugcuccuguuauccugauucuagugaaaucacaugugugugcagggauaacuggcauggcucgaaucgaccgugggugucuuucaaccagaaucuggaauaucagauaggauacauaugcagugggauuuucggagacaauccacgcccuaaugauaagacaggcaguugugguccaguaucgucuaauggagcaaauggaguaaaaggauuuucauucaaauacggcaaugguguuuggauagggagaacuaaaagcauuaguucaagaaacgguuuugagaugauuugggauccgaacggauggacugggacagacaauaacuucucaauaaagcaagauaucguaggaauaaaugaguggucaggauauagcgggaguuuuguucagcauccagaacuaacagggcuggauuguauaagaccuugcuucuggguugaacuaaucagagggcgacccaaagagaacacaaucuggacuagcgggagcagcauauccuuuugugguguaaacagugacacuguggguuggucuuggccagacggugcugaguugccauuuaccauugacaaguaa

SEQ ID NO: 52312 - RNA, 1410 nt, Artificial Sequence
  derived and/or modified CDS sequence (wt) from neuraminidase__InfluenzaA__ADX96429
augaauccaaaccaaaagauaauaaccauugguucggucuguaugacaauuggaauggcuaacuuaauauuacaaauuggaaacauaaucucaauauggauuagccacucaauucaacuugggaaucaaaaucagauugaaacaugcaaucaaagcgucauuacuuaugaaaacaacacuuggguaaaucagacauauguuaacaucagcaacaccaacuuugcugcuggacagucagugguuuccgugaaauuagcgggcaauuccucucucugcccuguuaguggaugggcuauauacaguaaagacaacaguguaagaaucgguuccaagggggauguguuugucauaagggaaccauucauaucaugcucccccuuggaaugcagaaccuucuucuugacucaaggggccuugcuaaaugacaaacauuccaauggaaccauuaaagacaggagcccauaucgaacccuaaugagcuguccuauuggugaaguucccucuccauacaacucaagauuugagucagucgcuuggucagcaagugcuugucaugauggcaucaauuggcuaacaauuggaauuucuggcccagacaauggggcaguggcuguguuaaaguacaacggcauaauaacagacacuaucaagaguuggagaaacaauauauugagaacacaagagucugaaugugcauguguaaaugguucuugcuuuacuguaaugaccgauggaccaaguaauggacaggccucauacaagaucuucagaauagaaaagggaaagauagucaaaucagucgaaaugaaugccccuaauuaucacuaugaggaaugcuccuguuauccugauucuagugaaaucacaugugugugcagggauaacuggcauggcucgaaucgaccguggguuucuuucaaccagaaucuggaauaucagauaggauacauaugcagugggauuuucggagacaauccacgcccuaaugauaagacaggcaguugugguccaguaucgucuaauggagcaaauggaguaaaaggauuuucauucaaauacggcaaugguguuuggauagggagaacuaaaagcauuaguucaagaaacgguuuugagaugauuugggauccgaacggauggacugggacagacaauaacuucucaauaaagcaagauaucguaagaauaaaugaguggucaggauauagcgggaguuuuguucagcauccagaacuaacagggcuggauuguauaagaccuugcuucuggguugaacuaaucagagggcgacccaaagagaacacaaucuggacuagcgggagcagcauauccuuuugugguguaaacagugacacuguggguuggucuuggccagacggugcugaguugccauuuaccauugacaaguaa

SEQ ID NO: 52313 - RNA, 1410 nt, Artificial Sequence; identical to SEQ ID NO: 51812
  derived and/or modified CDS sequence (wt) from neuraminidase__InfluenzaA__ADX96449

SEQ ID NO: 52314 - RNA, 1410 nt, Artificial Sequence; identical to SEQ ID NO: 48750
  derived and/or modified CDS sequence (wt) from neuraminidase__InfluenzaA__ADX96469

SEQ ID NO: 52315 - RNA, 1410 nt, Artificial Sequence; identical to SEQ ID NO: 48750
  derived and/or modified CDS sequence (wt) from neuraminidase__InfluenzaA__ADX96489

SEQ ID NO: 52316 - RNA, 1410 nt, Artificial Sequence; identical to SEQ ID NO: 51812
  derived and/or modified CDS sequence (wt) from neuraminidase__InfluenzaA__ADX96499

SEQ ID NO: 52317 - RNA, 1410 nt, Artificial Sequence
  derived and/or modified CDS sequence (wt) from neuraminidase__InfluenzaA__ADX96509
augaauccaaaccaaaagauaauaaccauugguucggucuguaugacaauuggaauggcuaacuuaauauuacaaauuggaaacauaaucucaauauggauuagccacucaauucaacuugggaaucaaaaucagauugaaacaugcaaucaaagcgucauuacuuaugaaaacaacacuuggguaaaucagacauauguuaacaucagcaacaccaacuuugcugcuggacagucagugguuuccgugaaauuagcgggcaauuccucucucugcccuguuaguggaugggcuauauacaguaaagacaacaguauaagaaucgguuccaauggggauguguuugucauaagggaaccauucauaucaugcucccccuuggaaugcagaaccuucuucuugacucaaggggccuugcuaaaugacaaacauuccaauggaaccauuaaagacaggagcccauaucgaacccuaaugagcuguccuauuggugaaguucccucuccauacaacucaagauuugagucagucgcuuggucagcaagugcuugucaugauggcaucaauuggcuaacaauuggaauuucuggcccagacaauggggcaguggcuguguuaaaguacaacggcauaauaacagacacuaucaagaguuggagaaacaauauauugagaacacaagagucugaaugugcauguguaaaugguucuugcuuuacuguaaugaccgauggaccaagugauggacaggccucauacaagaucuucagaauagaaaagggaaagauagucaaaucagucgaaaugaaugccccuaauuaucacuaugaggaaugcuccuguuauccugauucuagugaaaucacaugugugugcagggauaacuggcauggcucgaaucgaccgugggugucuuucaaccagaaucuggaauaucagauaggauacauaugcagugggauuuucggagacaauccacgcccuaaugauaagacaggcaguugugguccaguaucgucuaauggagcaaauggaguaaaaggauuuucauucaaauacggcaaugguguuuggauagggagaacuaaaagcauuaguucaagaaacgguuuugagaugauuugggauccgaacggauggacugggacagacaauaacuucucaauaaagcaagauaucguaggaauaaaugaguggucaggauauagcgggaguuuuguucagcauccagaacuaacagggcuggauuguauaagaccuugcuucuggguugaacuaaucagagggcgacccaaagagaacacaaucuggacuagcgggagcagcauauccuuuugugguguaaacagugacacuguggguuggucuuggccagacggugcugaguugccauuuaccauugacaaguaa

SEQ ID NO: 52318 - RNA, 1410 nt, Artificial Sequence; identical to SEQ ID NO: 51004
  derived and/or modified CDS sequence (wt) from neuraminidase__InfluenzaA__ADX96519

SEQ ID NO: 52319 - RNA, 1410 nt, Artificial Sequence; identical to SEQ ID NO: 51004
  derived and/or modified CDS sequence (wt) from neuraminidase__InfluenzaA__ADX96529

SEQ ID NO: 52320 - RNA, 1410 nt, Artificial Sequence
  derived and/or modified CDS sequence (wt) from neuraminidase__InfluenzaA__ADX96539
augaauccaaaccaaaagauaauaaccauugguucggucuguaugacaauuggaauggcuaacuuaauauuacaaauuggaaacauaaucucaauauggauuagccacucaauucaacuugggaaucaaaaucagauugaaacaugcaaucaaagcgucauuacuuaugaaaacaacacuuggguaaaucagacauauguuaacaucagcaacaccaacuuugcugcuggacagucagugguuuccgugaaauuagcgggcaauuccucucucugcccuguuaguggaugggcuauauacaguaaagacaacaguauaagaaucgguuccaagggggauguguuugucauaagggaaccauucauaucaugcucccccuuggaaugcagaaccuucuucuugacucaaggggccuugcuaaaugacaaacauuccaauggaaccauuaaagacaggagcccauaucgaacccuaaugagcuguccuauuggugaaguucccucuccauacaacucaagauuugagucagucgcuuggucagcaagugcuugucaugauggcaucaauuggcuaacaauuggaauuucuggcccagacaauggggcaguggcuguguuaaaguacaacggcauaauaacagacacuaucaagaguuggagaaacaauauauugagaacacaagagucugaaugugcauguguaaaugguucuugcuuuacuguaaugaccgauggaccaagugauggacaggccucauacaagaucuucagaauagaaaagggaaagauagucaaaucagucgaaaugaaugccccuaauuaucacuaugaggaaugcuccuguuauccugauucuagugaaaucacaugugugugcagggauaacuggcauggcucgaaucgaccaugggugucuuucaaccagaaucuggaauaucagauaggauacauaugcagugggauuuucggagacaauccacgcccuaaugauaagacaggcaguugugguccaguaucgucuaauggagcaaauggaguaaaaggauuuucauucaaauacggcaaugguguuuggauagggagaacuaaaagcauuaguucaagaaacgguuuugagaugauuugggauccgaacggauggacugggacagacaauaacuucucaauaaagcaagauaucguaggaauaaaugaguggucaggauauagcgggaguuuuguucagcauccagaacuaacagggcuggauuguauaagaccuugcuucuggguugaacuaaucagagggcgacccaaagagaacacaaucuggacuagcgggagcagcauauccuuuugugguguaaacagugacacuguggguuggucuuggccagacggugcugaguugccauuuaccauugacaaguaa

SEQ ID NO: 52321 - RNA, 1410 nt, Artificial Sequence
  derived and/or modified CDS sequence (wt) from neuraminidase__InfluenzaA__ADX96549
augaauccaaaccaaaagauaauaaccauugguucggucuguaugacaauuggaauggcuaacuuaauauuacaaauuggaaacauaaucucaauauggaucagccacucaauucaacuugggaaucaaaaucagauugaaacaugcaaucaaagcgucauuacuuaugaaaacaacacuuggguaaaucagacauauguuaacaucagcaacaccaacuuugcugcuggacagucagugguuuccguaaaauuagcgggcaauuccucucucugcccuguuaguggaugggcuauauacaguaaagacaacaguauaagaaucgguuccaagggggauguguuugucauaagggaaccauucauaucaugcucccccuuggaaugcagaaccuucuucuugacucaaggggccuugcuaaaugacaaacauuccaauggaaccauuaaagacaggagcccauaucgaacccuaaugagcuguccuauuggugaaguucccucuccauacaacucaagauuugagucagucgcuuggucagcaagugcuugucaugauggcaucaauuggcuaacaauuggaauuucuggcccagacaauggggcaguggcuguguuaaaguacaacggcauaauaacagacacuaucaagaguuggagaaacaauauauugagaacacaagagucugaaugugcauguguaaaugguucuugcuuuacuguaaugaccgauggaccaagugauggacaggccucauacaagaucuucagaauagaaaagggaaagauagucaaaucagucgaaaugaaugccccuaauuaucacuaugaggaaugcuccuguuauccugauucuagugaaaucacaugugugugcagggauaacuggcauggcucgaaucgaccgugggugucuuucaaccagaaucuggaauaucagauaggauacauaugcagugggauuuucggagacaauccacgcccuaaugauaagacaggcaguugugguccaguaucgucuaauggagcaaauggaguaaaaggauuuucauucaaauacggcaaugguguuuggauagggagaacuaaaagcauuaguucaagaaacgguuuugagaugauuugggauccgaacggauggacugggacagacaauaacuucucaauaaagcaagauaucguaggaauaaaugaguggucaggauauagcgggaguuuuguucagcauccagaacuaacagggcuggauuguauaagaccuugcuucuggguugaacuaaucagagggcgacccaaagagaacacaaucuggacuagcgggagcagcauauccuuuugugguguaaacagugacacuguggguuggucuuggccagacggugcugaguugccauuuaccauugacaaguaa

SEQ ID NO: 52322 - RNA, 1410 nt, Artificial Sequence; identical to SEQ ID NO: 48887
  derived and/or modified CDS sequence (wt) from neuraminidase__InfluenzaA__ADX96559

SEQ ID NO: 52323 - RNA, 1410 nt, Artificial Sequence; identical to SEQ ID NO: 48750
  derived and/or modified CDS sequence (wt) from neuraminidase__InfluenzaA__ADX96569

SEQ ID NO: 52324 - RNA, 1410 nt, Artificial Sequence; identical to SEQ ID NO: 48749
  derived and/or modified CDS sequence (wt) from neuraminidase__InfluenzaA__ADX96579

SEQ ID NO: 52325 - RNA, 1410 nt, Artificial Sequence
  derived and/or modified CDS sequence (wt) from neuraminidase__InfluenzaA__ADX96589
augaauccaaaccaaaagauaauaaccauugguucggucuguaugacaauuggaauggccaacuuaauauuacaaauuggaaacauaaucucaauauggauuagccacucaauucaacuugggaaucaaaaucagauugaaacaugcaaucaaagcgucauuacuuaugaaaacaacacuuggguaaaucagacauauguuaacaucagcaacaccaacuuugcugcuggacagucagugguguccgugaaauuagcgggcaauuccucucucugcccuguuaguggaugggcuauauacaguaaagacaacaguauaagaaucgguuccaagggggauguguuugucauaagggaaccauucauaucaugcucccccuuggaaugcagaaccuucuucuugacucaaggggccuugcuaaaugacaaacauuccaauggaaccauuaaagacaggagcccauaucgaacccuaaugagcuguccuauuggugaaguucccucuccauacaacucaagauuugagucagucgcuuggucagcaagugcuugucaugauggcaucaauuggcuaacaauuggaauuucuggcccagacaauggggcaguggcuguguuaaaguacaacggcauaauaacagacacuaucaagaguuggagaaacaauauauugagaacacaagagucugaaugugcauguguaaaugguucuugcuuuacuguaaugaccgauggaccaagugauggacaggccucauacaagaucuucagaauagaaaagggaaagauagucaaaucagucgaaaugaaugccccuaauuaucacuaugaggaaugcuccuguuauccugauucuagugaaaucacaugugugugcagggauaacuggcauggcucgaaucgaccgugggugucuuucaaccagaaucuggaauaucagauaggauacauaugcagugggauuuucggagacaauccacgcccuaaugauaagacaggcaguugugguccaguaucgucuaauggagcaaauggaguaaaaggauuuucauucaaauacggcaaugguguuuggauagggagaacuaaaagcauuaguucaagaaacgguuuugagaugauuugggauccgaacggauggacugggacagacaauaacuucucaauaaagcaagauaucguaggaauaaaugaguggucaggauauagcgggaguuuuguucagcauccagaacuaacagggcuggauuguauaagaccuugcuucuggguugaacuaaucagagggcgacccaaagagaacacaaucuggacuagcgggagcagcauauccuuuugugguguaaacagugacacuguggguuggucuuggccagacggugcugaguugccauuuaccauugacaaguaa

SEQ ID NO: 52326 - RNA, 1410 nt, Artificial Sequence; identical to SEQ ID NO: 48953
  derived and/or modified CDS sequence (wt) from neuraminidase__InfluenzaA__ADX96599

SEQ ID NO: 52327 - RNA, 1410 nt, Artificial Sequence
  derived and/or modified CDS sequence (wt) from neuraminidase__InfluenzaA__ADX96609
augaauccaaaccaaaagauaauaaccauugguucggucuguaugacaauuggaauggcuaacuuaauauuacaaauuggaaacauaaucucaauauggauuagccacucaauucaacuugggaaucaaaaucagauugaaacaugcaaucaaagcgucauuacuuaugaaaacaacacuuggguaaaucagacauauguuaacaucagcaacaccaacuuugcugcuggacagucagugguuuccgugaaauuagcaggcaauuccucucucugcccuguugguggaugggcuauauacaguaaagacaacaguguaagaaucgguuccaagggggauguguuugucauaagggaaccauucauaucaugcucccccuuggaaugcagaaccuucuucuugacucaaggggccuugcuaaaugacaaacauuccaauggaaccauuaaagacaggagcccauaucgaacccuaaugagcuguccuauuggugaaguucccucuccauacaacucaagauuugagucagucgcuuggucagcaagugcuugucaugauggcaucaauuggcuaacaauuggaauuucuggcccagacaauggggcaguggcuguguuaaaguacaacggcauaauaacagacacuaucaagaguuggagaaacaauauauugagaacacaagagucugaaugugcauguguaaaugguucuugcuuuacuguaaugaccgauggaccaaguaauggacaggccucauacaagaucuucagaauagaaaagggaaagauagucaaaucagucgaaaugaaugccccuaauuaucacuaugaggaaugcuccuguuauccugauucuagugaaaucacaugugugugcagggauaacuggcauggcucgaaucgaccgugggugucuuucaaccagaaucuggaauaucagauaggauacauaugcagugggauuuucggagacaauccacgcccuaaugauaagacaggcaguugugguccaguaucgucuaauggagcaaauggaguaaaaggauuuucauucaaauacggcgaugguguuuggauagggagaacuaaaagcauuaguucaagaaacgguuuugagaugauuugggauccgaacggauggacugggacagacaauaacuucucaauaaagcaagauaucguaggaauaaaugaguggucaggauauagcgggaguuuuguucagcauccagaacuaacagggcuggauuguauaagaccuugcuucuggguugaacuaaucagagggcgacccaaagagaacacaaucuggacuagcgggagcagcauauccuuuugugguguaaacagugacacuguggguuggucuuggccagacggugcugaguugccauuuaccauugacaaguaa

SEQ ID NO: 52328 - RNA, 1410 nt, Artificial Sequence; identical to SEQ ID NO: 48761
  derived and/or modified CDS sequence (wt) from neuraminidase__InfluenzaA__ADX96619

SEQ ID NO: 52329 - RNA, 1410 nt, Artificial Sequence; identical to SEQ ID NO: 48750
  derived and/or modified CDS sequence (wt) from neuraminidase__InfluenzaA__ADX96629

SEQ ID NO: 52330 - RNA, 1410 nt, Artificial Sequence; identical to SEQ ID NO: 48814
  derived and/or modified CDS sequence (wt) from neuraminidase__InfluenzaA__ADX96639

SEQ ID NO: 52331 - RNA, 1410 nt, Artificial Sequence; identical to SEQ ID NO: 51812
  derived and/or modified CDS sequence (wt) from neuraminidase__InfluenzaA__ADX96649

SEQ ID NO: 52332 - RNA, 1410 nt, Artificial Sequence; identical to SEQ ID NO: 48749
  derived and/or modified CDS sequence (wt) from neuraminidase__InfluenzaA__ADX96659

SEQ ID NO: 52333 - RNA, 1410 nt, Artificial Sequence; identical to SEQ ID NO: 48750
  derived and/or modified CDS sequence (wt) from neuraminidase__InfluenzaA__ADX96669

SEQ ID NO: 52334 - RNA, 1410 nt, Artificial Sequence; identical to SEQ ID NO: 49772
  derived and/or modified CDS sequence (wt) from neuraminidase__InfluenzaA__ADX96679

SEQ ID NO: 52335 - RNA, 1410 nt, Artificial Sequence; identical to SEQ ID NO: 48947
  derived and/or modified CDS sequence (wt) from neuraminidase__InfluenzaA__ADX96689

SEQ ID NO: 52336 - RNA, 1410 nt, Artificial Sequence; identical to SEQ ID NO: 48750
  derived and/or modified CDS sequence (wt) from neuraminidase__InfluenzaA__ADX96699

SEQ ID NO: 52337 - RNA, 1410 nt, Artificial Sequence
  derived and/or modified CDS sequence (wt) from neuraminidase__InfluenzaA__ADX96709
augaauccaaaccaaaagauaauaaccauugguucggucuguaugacaauuggaauggcuaacuuaauauuacaaauuggaaacauaaucucaauauggauuagccacucaauucaacuugggaaucaaaaucagauugaaacaugcaaucaaagcgucauuacuuaugaaaacaacacuuggguaaaucagacauauguuaacaucagcaacaccaacuuugcugcuggacagucagugguuuccgugaaauuagcgggcaauuccucucucugcccuguuaguggaugggcuauauacaguaaagacaacaguauaagaaucgguuccaagggggauguguuugucauaagggaaccauucauaucaugcucccccuuggaaugcagaaccuucuucuugacucaaggggccuugcuaaaugacaaacauuccaauggaaccauuaaagacaggagcccauaucgaacccuaaugagcuguccuauuggugaaguucccucuccauacaacucaagauuugagucagucgcuuggucagcaagugcuugucaugauggcaucaauuggcuaacaauuggaauuucuggcccagacaauggggcaguggcuguguuaaaguacaacggcauaauaacagacacuaucaagaguuggagaaacaauauauugagaacacaagagucugaaugugcauguguaaaugguucuugcuuuacuguaaugaccgauggaccaagugauggacaggccucauacaagaucuucagaauagaaaagggaaagauagucaaaucagucgaaauaaaugccccuaauuaucacuaugaggaaugcuccuguuauccugauucuagugaaaucacaugugugugcagggauaacuggcauggcucgaaucgaccgugggugucuuucaaccagaaucuggaauaucagauaggauacauaugcagugggauuuucggagacaauccacgcccuaaugaugagacaggcaguugugguccaguaucgucuaauggagcaaauggaguaaaaggauuuucauucaaauacggcaaugguguuuggauagggagaacuaaaagcauuaguucaagaaacgguuuugagaugauuugggauccgaacggauggacugggacagacaauaacuucucaauaaagcaagauaucguaggaauaaaugaauggucaggauauagcgggaguuuuguucagcauccagaacuaacagggcuggauuguauaagaccuugcuucuggguugaacuaaucagagggcgacccaaagagaacacaaucuggacuagcgggagcagcauauccuuuugugguguaaacagugacacuguggguuggucuuggccagacggugcugaguugccauuuaccauugacaaguaa

SEQ ID NO: 52338 - RNA, 1410 nt, Artificial Sequence
  derived and/or modified CDS sequence (wt) from neuraminidase__InfluenzaA__ADX96719
augaauccaaaccaaaagauaauaaccauugguucggucuguaugacaauuggaauggcuaacuuaauauuacaaauuggaaacauaaucucaauauggauuagccacucaauucaacuugggaaucaaaaucagauugaaacaugcaaucaaagcgucauuacuuaugaaaacaacacuuggguaaaucagacauauguuaacaucagcaacaccaacuuugcugcuggacagucagugguuuccgugaaauuugcgggcaauuccucucucugcccuguuaguggaugggcuauauacaguaaagacaacaguauaagaaucgguuccaagggggauguguuugucauaagggaaccauucauaucaugcucccccuuggaaugcagaaccuucuucuugacucaaggggccuugcuaaaugacaaacauuccaauggaaccauuaaagacaggagcccauaucgaacccuaaugagcuguccuauuggugaaguucccucuccauacaacucaagauuugagucagucgcuuggucagcaagugcuugucaugauggcaucaauuggcuaacaauuggaauuucuggcccagacaauggggcaguggcuguguuaaaguacaacggcauaauaacagacacuaucaagaguuggagaaacaauauauugagaacacaagagucugaaugugcauguguaaaugguucuugcuuuacuguaaugaccgauggaccaagugauggacaggccucauacaagaucuucagaauagaaaagggaaagauagucaaaucagucgaaaugaaugccccuaauuaucacuaugaggaaugcuccuguuauccugauucuagugaaaucacaugugugugcagggauaacuggcauggcucgaaucgaccgugggugucuuucaaccagaaucuggaauaucagauaggauacauaugcagugggauuuucggagacaauccacgcccuaaugauaagacaggcaguugugguccaguaucgucuaauggagcaaauggaguaaaaggauuuucauucaaauacggcaaugguguuuggauagggagaacuaaaagcauuaguucaagaaacgguuuugagaugauuugggauccgaacggauggacugggacagacaauaacuucucaauaaagcaagauaucguaggaauaaaugaguggucaggauauagcgggaguuuuguucagcauccagaacuaacagggcuggauuguauaagaccuugcuucuggguugaacuaaucagagggcgacccaaagagagcacagucuggacuagcgggagcagcauauccuuuugugguguaaacagugacacuguggguuggucuuggccagacggugcugaguugccauuuaccauugacaaguaa

SEQ ID NO: 52339 - RNA, 1410 nt, Artificial Sequence
  derived and/or modified CDS sequence (wt) from neuraminidase__InfluenzaA__ADX96729
augaauccaaaccaaaagauaauaaccauugguucggucuguaugacaauuggaauggcuaacuuaauauuacaaauuggaaacauaaucucaauauggauuagccacucaauucaacuugggaaucaaaaucagauugaaacaugcaaucaaagcgucauuacuuaugaaaacaacacuuggguaaaucagacuuauguuaacaucagcaacaccaacuuugcugcuggacagucagugguuuccgugaaauuagcgggcaauuccucucucugcccuguuaguggaugggcuauauacaguaaagacaacaguauaagaaucgguuccaagggggauguguuugucauaagggaaccauucauaucaugcucccccuuggaaugcagaaccuucuucuugacucaaggggccuugcuaaaugacaaacauuccaauggaaccauuaaagacaggagcccauaucgaacccuaaugagcuguccuauuggugaaguucccucuccauacaacucaagauuugagucagucgcuuggucagcaagugcuugucaugauggcaucaauuggcuaacaauuggaauuucuggcccagacaauggggcaguggcuguguuaaaguacaacggcauaauaacagacacuaucaagaguuggagaaacaauauauugagaacacaagagucugaaugugcauguguaaaugguucuugcuuuacuguaaugaccgauggaccaagugauggacaggccucauacaagaucuucagaauagaaaagggaaagauagucaaaucagucgaaaugaaugccccuaauuaucacuaugaggaaugcuccugcuauccugauucuagugaaaucacaugugugugcagggauaacuggcauggcucgaaucgaccgugggugucuuucaaccagaaucuggaauaucagauaggauacauaugcagugggauuuucggagacaauccacgcccuaaugauaagacaggcaguugugguccaguaucgucuaauggagcaaauggaguaaaaggauuuucauucaaauacggcaaugguguuuggauagggagaacuaaaagcauuaguucaagaaacgguuuugagaugauuugggauccgaacggauggacugggacagacaauaacuucucaauaaagcaagauaucguaggaauaaaugaguggucaggauauagcgggaguuuuguucagcauccagaacuaacagggcuggauuguauaagaccuugcuucuggguugaacuaaucagagggcgacccaaagagaacacaaucuggacuagcgggagcagcauauccuuuugugguguaaacagugacacuguggguuggucuuggccagacggugcugaguugccauuuaccauugacaaguaa

SEQ ID NO: 52340 - RNA, 1410 nt, Artificial Sequence
  derived and/or modified CDS sequence (wt) from neuraminidase__InfluenzaA__ADX96739
augaauccaaaccaaaagauaauaaccauugguucggucuguaugacaauuggaauggcuaacuuaauauuacaaauuggaaacauaaucucaauauggauuagccacucaauucaacuugggaaucaaaaucagauugaaacaugcaaucaaagcgucauuacuuaugaaaacaacacuuggguaaaucagacauauguuaacaucagcaacaccaacuuugcugcuggacagucagugguuuccgugaaauuagcgggcaauuccucucucugcccuguuaguggaugggcuauauacaguaaagacaacaguauaagaaucgguuccaagggggauguguuugucauaagggaaccauucauaucaugcucccccuuggaaugcagaaccuucuucuugacucaaggggccuugcuaaaugacaaacauuccaauggaaccauuaaagacaggagcccauaucgaacccuaaugagcuguccuauuggugaaguucccucuccauacaacucaagauuugagucagucgcuuggucagcaagugcuugucaugauggcaucaauuggcuaacaauuggaauuucuggcccagacaauggggcaguggcuguguuaaaguacaacggcauaauaacagacacuaucaagaguuggagaaacaauauauugagaacacaagagucugaaugugcauguguaaaugguucuugcuuuacuguaaugaccgauggaccaagugauggacaggccucauacaagaucuucagaauagaaaagggaaagauagucaaaucagucgaaaugaaugccccuaauuaucacuaugaggaaugcuccuguuauccugauucuagugaaaucacauguguaugcagggauaacuggcauggcucgaaucgaccgugggugucuuucaaccagaaucuggaauaucagauaggauacauaugcagugggauuuucggagacaauccacgcccuaaugauaagacaggcaguugugguccaguaucgucuaauggagcaaauggaguaaaaggauuuucauucaaauacggcaaugguguuuggauagggagaacuaaaagcauuaguucaagaaacgguuuugagaugauuugggauccgaacggauggacugggacagacaauaacuucucaauaaagcaagauaucguaggaauaaaugaguggucaggauauagcgggaguuuuguucagcauccagaacuaacagggcuggauuguauaagaccuugcuucuggguugaacuaaucagagggcgacccaaagagaacacaaucuggacuagcgggagcagcauauccuuuugugguguaaaaagugacacuguggguuggucuuggccagacggugcugaguugccauuuaccauugacaaguaa

SEQ ID NO: 52341 - RNA, 1410 nt, Artificial Sequence; identical to SEQ ID NO: 48750
  derived and/or modified CDS sequence (wt) from neuraminidase__InfluenzaA__ADX96749

SEQ ID NO: 52342 - RNA, 1410 nt, Artificial Sequence
  derived and/or modified CDS sequence (wt) from neuraminidase__InfluenzaA__ADX96759
augaauccaaaccaaaagauaauaaccauugguucggucuguaugacaauuggaauggcuaacuuaauauuacaaauuggaaacauaaucucaauauggauuagccacucaauucaacuugggaaucaaaaucagauugaaacaugcaaucaaagcgucauuacuuaugaaaacaacacuuggguaaaucagacauauguuaacaucagcaacaccaacuuugcugcuggacagucagugguuuccgugaaauuagcgggcaauuccucucucugcccuguuaguggaugggcuauauacaguaaagacaacaguauaagaaucgguuccaagggggauguguuugucauaagggaaccauucauaucaugcucccccuuggaaugcagaaccuucuucuugacucaaggggccuugcuaaaugacaaacauuccaauggaaccauuaaagacaggagcccauaucgaacccuaaugagcuguccuauuggugaaguucccucuccauacaacucaagauuugagucagucgcuuggucagcaagugcuugucaugauggcaucaauuggcuaacaauuggaauuucuggcccagacaauggggcaguggcuguguuaaaguacaacggcauaauaacagacacuaucaagaguuggagaaacaauauauugagaacacaagagucugaaugugcauguguaaaugguucuugcuuuacuguaaugaccgauggaccaagugauggacaggccucauacaagaucuucagaauagaaaagggaaagauagucaaaucagucgaaaugaaugccccuaauuaucacuaugaggaaugcuccuguuauccugauucuagugaaaucacaugugugugcagggauaacuggcauggcucgaaucgaccgugggugucuuucaaccagaaucuggaauaucagauaggauacauaugcagugggauuuucggagacaauccacgcccuaaugacaagacaggcaguugugguccaguaucgucuaauggagcaaauggaguaaaaggauuuucauucaaauacggcaaugguguuuggauagggagaacuaaaagcauuaguucaagaaacgguuuugagaugauuugggauccgaacggauggacugggacagacaauaacuucucaauaaaacaagauaucguaggaauaaaugaguggucaggauauagcgggaguuuuguucagcauccagaacuaacagggcuggauuguauaagaccuugcuucuggguugaacuaaucagagggcgacccaaagagaacacaaucuggacuagcgggagcagcauauccuuuugugguguaaacagugacacuguggguuggucuuggccagacggugcugaguugccauuuaccauugacaaguaa

SEQ ID NO: 52343 - RNA, 1410 nt, Artificial Sequence; identical to SEQ ID NO: 51207
  derived and/or modified CDS sequence (wt) from neuraminidase__InfluenzaA__ADX96769

SEQ ID NO: 52344 - RNA, 1410 nt, Artificial Sequence; identical to SEQ ID NO: 48814
  derived and/or modified CDS sequence (wt) from neuraminidase__InfluenzaA__ADX96779

SEQ ID NO: 52345 - RNA, 1410 nt, Artificial Sequence
  derived and/or modified CDS sequence (wt) from neuraminidase__InfluenzaA__ADX96789
augaauccaaaccaaaagauaauaaccauugguucggucuguaugacaauuggaauggcuaacuuaauauuacaaauuggaaacauaaucucaauauggauuagccacucaauucaacuugggaaucaaaaucagauugaaacaugcaaucaaagcgucauuacuuaugaaaacaacacuuggguaaaucagacauauguuaacaucagcaacaccaacuuugcugcuggacagucagugguuuccuugaaauuagcgggcaauuccucucucugcccuguuaguggaugggcuauauacaguaaagacaacaguauaagaaucgguuccaagggggauguguuugucauaagggaaccauucauaucaugcucccccuuggaaugcagaaccuucuucuugacucaaggggccuugcuaaaugacaaacauuccaauggaaccauuaaagacaggagcccauaucgaacccuaaugagcuguccuauuggugaaguucccucuccauacaacucaagauuugagucagucgcuuggucagcaagugcuugucaugauggcaucaauuggcuaacaauuggaauuucuggcccagacaauggggcaguggcuguguuaaaguacaacggcauaauaacagacacuaucaagaguuggagaaacaauauauugagaacacaagagucugaaugugcauguguaaaugguucuugcuuuacuguaaugaccgauggaccaagugauggacaggccucauacaagaucuucagaauagaaaagggaaagauagucaaaucagucgaaaugaaugccccuaauuaucacuaugaggaaugcuccuguuauccugauucuagugaaaucacaugugugugcagggauaacuggcauggcucgaaucgaccgugggugucuuucaaccagaaucuggaauaucagauaggauacauaugcagugggauuuucggagacaauccacgcccuaaugauaagacaggcaguugugguccaguaucgucuaauggagcaaauggaguaaaaggauuuucauucaaauacggcaaugguguuuggauagggagaacuaaaagcauuaguucaagaaacgguuuugagaugauuugggauccgaacggauggacugggacagacaauaacuucucaauaaagcaagauaucguaggaauaaaugaguggucaggauauagcgggaguuuuguccagcauccagaacuaacagggcuggauuguauaagaccuugcuucuggguugaacuaaucagagggcgacccaaagagaacacaaucuggacuagcgggagcagcauauccuuuugugguguaaacagugacacuguggguuggucuuggccagacggugcugaguugccauuuaccauugacaaguaa

SEQ ID NO: 52346 - RNA, 1410 nt, Artificial Sequence; identical to SEQ ID NO: 48750
  derived and/or modified CDS sequence (wt) from neuraminidase__InfluenzaA__ADX96799

SEQ ID NO: 52347 - RNA, 1410 nt, Artificial Sequence
  derived and/or modified CDS sequence (wt) from neuraminidase__InfluenzaA__ADX96809
augaauccaaaccaaaagauaauaaccauugguucggucuguaugacaauuggaauggccaacuuaauauuacaaauuggaaacauaaucucaauauggauuagccacucaauucaacuugggaaucaaaaucagauugaaacaugcaaucaaagcgucauuacuuaugaaaacaacacuuggguaaaucagacauauguuaacaucagcaacaccaacuuugcugcuggacagucagugguuuccgugaaauuagcgggcaauuccucucucugcccuguuaguggaugggcuauauacaguaaagacaacaguauaagaaucgguuccaagggggauguguuugucauaagggaaccauucauaucaugcucccccuuggaaugcagaaccuucuucuugacucaaggggccuugcuaaaugacaaacauuccaauggaaccauuaaagacaggagcccauaucgaacccuaaugagcuguccuauuggugaaguucccucuccauacaacucaagauuugagucagucgcuuggucagcaagugcuugucaugauggcaucaauuggcuaacaauuggaauuucuggcccagacaauggggcaguggcuguguuaaaguacaacggcauaauaacagacacuaucaagaguuggagaaacaauauauugagaacacaagagucugaaugugcauguguaaaugguucuugcuuuacuguaaugaccgauggaccaaguaauggacaggccucauacaagaucuucagaauagaaaagggaaagauagucaaaucagucgaaaugaaugccccuaauuaucacuaugaggaaugcuccuguuauccugauucuagugaaaucacaugugugugcagggauaacuggcauggcucgaaucgaccaugggugucuuucaaccagaaucuggaauaucagauaggauacauaugcagugggauuuucggagacaauccacgcccuaaugauaagacaggcaguugugguccaguaucgucuaauggagcaaauggaguaaaaggauuuucauucaaauacggcaaugguguuuggauagggagaacuaaaagcauuaguucaagaaacgguuuugagaugauuugggauccgaacggauggacugggacagacaauaacuucucaauaaagcaagauaucguaggaauaaaugaguggucaggauauagcgggaguuuuguucagcauccagaacuaacagggcuagauuguauaagaccuugcuucuggguugaacuaaucagagggcgacccaaagagaacacaaucuggacuagcgggagcagcauauccuuuugugguguaaacagugacacuguggguuggucuuggccagacggugcugaguugccauuuaccauugacaaguaa

SEQ ID NO: 52348 - RNA, 1410 nt, Artificial Sequence; identical to SEQ ID NO: 48953
  derived and/or modified CDS sequence (wt) from neuraminidase__InfluenzaA__ADX96819

SEQ ID NO: 52349 - RNA, 1410 nt, Artificial Sequence; identical to SEQ ID NO: 49973
  derived and/or modified CDS sequence (wt) from neuraminidase__InfluenzaA__ADX96829

SEQ ID NO: 52350 - RNA, 1410 nt, Artificial Sequence
  derived and/or modified CDS sequence (wt) from neuraminidase__InfluenzaA__ADX96839
augaauccaaaccaaaagauaauaaccauugguucggucuguaugacaauuggaauggccaacuuaauauuacaaauuggaaacauaaucucaauauggauuagccacucaauucaacuugggaaucaaaaucagauugaaacaugcaaucaaagcgucauuacuuaugaaaacaacacuuggguaaaucagacauauguuaacaucagcaacaccaacuuugcugcuggacagucagugguuuccgugaaauuagcgggcaauucuucucucugcccuguuaguggaugggcuauauacaguaaagacaacaauguaagaaucgguuccaagggggauguguuugucauaagggaaccauucauaucaugcucccccuuggaaugcagaaccuucuucuugacucaaggggccuugcuaaaugacaaacauuccaauggaaccauuaaagacaggagcccauaucgaacccuaaugagcuguccuauuggugaaguucccucuccauacaacucaagauuugagucagucgcuuggucagcaagugcuugucaugauggcaucaauuggcuaacaauuggaauuucuggcccagacaauggggcaguggcuguguuaaaguacaacggcauaauaacagacacuaucaagaguuggagaaacaauauauugagaacacaagaguccgaaugugcauguguaaaugguucuugcuuuacuguaaugaccgauggaccaagugauggacaggccucauacaagaucuucagaauagaaaagggaaagauagucaaaucagucgaaaugaaugccccuaauuaucacuaugaggaaugcuccuguuauccugauucuagugaaaucacaugugugugcagggauaacuggcauggcucgaaucgaccguggguuucuuucaaccagaaucuggaauaucagauaggauacauaugcagugggauuuucggagacaauccacgcccuaaugauaagacaggcaguugugguccaguaucgucuaauggagcaaauggaguaaaaggauuuucauucaaauacggcaaugguguuuggauagggagaacuaaaagcauuaguucaagaaacgguuuugagaugauuugggauccgaacggauggacugggacagacaauaacuucucaauaaagcaagauaucguaggaauaaaugaguggucaggauauagcggaaguuuuguucagcauccagaacuaacagggcuggauuguauaagaccuugcuucuggguugaacuaaucagagggcgacccaaagagaacacaaucuggacuagcgggagcagcauauccuuuugugguguaaacagugacacuguggguuggucuuggccagacggugcugaguugccauuuaccauugacaaguaa

SEQ ID NO: 52351 - RNA, 1410 nt, Artificial Sequence; identical to SEQ ID NO: 52320
  derived and/or modified CDS sequence (wt) from neuraminidase__InfluenzaA__ADX96849

SEQ ID NO: 52352 - RNA, 1410 nt, Artificial Sequence
  derived and/or modified CDS sequence (wt) from neuraminidase__InfluenzaA__ADX96859
augaauccaaaccaaaagauaauaaccauugguucggucuguaugacaauuggaauggcuaacuuaauauuacaaauuggaaacauaaucucaauauggauuagccacucaauucaacuugggaaucaaaaucagauugaaacaugcaaucaaagcgucauuacuuaugaaaacaacacuuggguaaaucagacauauguuaacaucagcaacaccaacuuugcugcuggacagucagugguuuccgugaaauuagcgggcaauuccucucucugcccuguuaguggaugggcuauauacaguaaagacaacaguauaagaaucgguuccaagggggauguguuugucauaagggaaccauucauaucaugcucccccuuggaaugcagaaccuucuucuugacucaaggggccuugcuaaaugacaaacauuccaauggaaccauuaaagacaggagcccauaucgaacccuaaugagcuguccuauuggugaaguucccucuccauacaacucaagauuugagucagucgcuuggucagcaagugcuugucaugauggcaucaauuggcuaacaauuggaauuucuggcccagacaauggggcaguggcuguguuaaaguacaacggcauaauaacagacacuaucaagaguuggagaaacaauauauugagaacacaagaaucugaaugugcauguguaaaugguucuugcuuuacuguaaugaccgauggaccaagugauggacaggccucauacaagaucuucagaauagaaaagggaaagauagucaaaucagucgaaaugaaugccccuaauuaucacuaugaggaaugcuccuguuauccugauucuagugaaaucacaugugugugcagggauaacuggcauggcucgaaucgaccgugggugucuuucaaccagaaucuggaauaucagauaggauacauaugcagugggauuuucggagacaauccacgcccuaaugauaagacaggcaguugugguccaguaucgucuaauggagcaaauggaguaaaaggauuuucauucaaauacggcaaugguguuuggauagggagaacuaaaagcauuaguucaagaaacgguuuugagaugauuugggauccgaacggauggacugggacagacaauaacuucucaauaaagcaagauaucguaggaauaaaugaguggucaggauauagcgggaguuuuguucagcauccagaacuaacagggcuggauuguauaagaccuugcuucuggguugaacuaaucagagggcgacccaaagagaacacaaucuggacuagcgggagcagcauauccuuuugugguguaaacagugacacuguggguuggucuuggccagacggugcugaguugccauuuaccauugacaaguaa

SEQ ID NO: 52353 - RNA, 1410 nt, Artificial Sequence
  derived and/or modified CDS sequence (wt) from neuraminidase__InfluenzaA__ADX96869
augaauccaaaccaaaagauaauaaccauugguucggucuguaugacaauuggaauggcuaacuuaauauuacaaauuggaaacauaaucucaauauggauuagccacucaauucaacuugggaaucaaaaucagauugaaacaugcaaucaaagcgucauuacuuaugaaaacaacacuuggguaaaucagacauauguuaacaucagcaacaccaacuuugcugcuggacagucagugguuuccgugaaauuagugggcaauuccucucucugcccuguuaguggaugggcuauauacaguaaagacaacaguguaagaaucgguuccaagggggauguguuugucauaagggaaccauucauaucaugcucccccuuggaaugcagaaccuucuucuugacucaaggggccuugcuaaaugacaaacauuccaauggaaccauuaaggacaggagcccauaucgaacccuaaugagcuguccuauuggugaaguucccucuccauacaacucaagauuugagucagucgcuuggucagcaagugcuugucaugauggcaucaauuggcuaacaauuggaauuucuggcccagacaauggggcaguggcuguguuaaaguacaacggcauaauaacagacacuaucaagaguuggagaaacaauauauugagaacacaagagucugaaugugcauguguaaaugguucuugcuuuacuguaaugaccgauggaccaaguaauggacaggccucauacaagaucuucagaauagaaaagggaaagauagucaaaucagucgaaaugaaugccccuaauuaucacuaugaggaaugcuccuguuauccugauucuagugaaaucacaugugugugcagggauaacuggcauggcucgaaucgaccgugggugucuuucaaccagaaucuggaauaucagauaggauacauaugcagugggauuuucggagacaauccacgcccuaaugauaagacaggcaguugugguccaguaucgucuaauggagcaaauggaguaaaaggauuuucauucaaauacggcaaugguguuuggauagggagaacuaaaagcauuaguucaagaaacgguuuugagaugauuugggauccgaacggauggacugggacagacaauaacuucucaauaaagcaagauaucguaggaauaaaugaguggucaggauauagcgggaguuuuguucagcauccagaacuaacagggcuggauuguauaagaccuugcuucuggguugaacuaaucagagggcgacccaaagagaacacaaucuggacuagcgggagcagcauauccuuuugugguguaaacagugacacuguggguuggucuuggccagacggugcugaguugccauuuaccauugacaaguaa

SEQ ID NO: 52354 - RNA, 1410 nt, Artificial Sequence; identical to SEQ ID NO: 52303
  derived and/or modified CDS sequence (wt) from neuraminidase__InfluenzaA__ADX96879

SEQ ID NO: 52355 - RNA, 1410 nt, Artificial Sequence; identical to SEQ ID NO: 52310
  derived and/or modified CDS sequence (wt) from neuraminidase__InfluenzaA__ADX96899

SEQ ID NO: 52356 - RNA, 1410 nt, Artificial Sequence
  derived and/or modified CDS sequence (wt) from neuraminidase__InfluenzaA__ADX96909
augaauccaaaccaaaagauaauaaccauugguucggucuguaugacaauuggaauggcuaacuugauauuacaaauuggaaacauaaucucaauauggauuagccacucaauucaacuugggaaucaaaaucagauugaaacaugcaaucaaagcgucauuacuuaugaaaacaacacuuggguaaaucagacauauguuaacaucagcaacaccaacuuugcugcuggacagucagugguuuccgugaaauuagcgggcaauuccucucucugcccuguuaguggaugggcuauauacaguaaagacaacaguauaagaaucgguuccaagggggauguguuugucauaagggaaccauucauaucaugcucccccuuggaaugcagaaccuucuucuugacucaaggggccuugcuaaaugacaaacauuccaauggaaccauuaaagacaggagcccauaucgaacccuaaugagcuguccuauuggugaaguucccucuccauacaacucaagauuugagucagucgcuuggucagcaagugcuugucaugauggcaucaauuggcuaacaauuggaauuucuggcccagacaauggggcaguggcuguguuaaaguacaacggcauaauaacagacacuaucaagaguuggagaaacgauauauugagaacacaagagucugaaugugcauguguaaaugguucuugcuuuacuguaaugaccgauggaccaagugauggacaggccucauacaagaucuucagaauagaaaagggaaagauagucaaaucagucgaaauaaaugccccuaauuaucacuaugaggaaugcuccuguuauccugauucuagugaaaucacaugugugugcagggauaacuggcauggcucgaaucgaccgugggugucuuucaaccagaaucuggaauaucagauaggauacauaugcagugggauuuucggagacaauccacgcccuaaugauaagacaggcaguugugguccaguaucgucuaauggagcaaauggaguaaaaggauuuucauucaaauacggcaaugguguuuggauagggagaacuaaaagcauuaauucaagaaacgguuuugagaugauuugggauccgaacggauggacugggacagacaauaacuucucaauaaagcaagauaucguaggaauaaaugaguggucaggauauagcgggaguuuuguucagcauccagaacuaacagggcuggauuguauaagaccuugcuucuggguugaacuaaucagagggcgacccaaagagaacacaaucuggacuagcgggagcagcauauccuuuugugguguaaacagugacacuguggguuggucuuggccagacggugcugaguugccauuuaccauugacaaguaa

SEQ ID NO: 52357 - RNA, 1410 nt, Artificial Sequence
  derived and/or modified CDS sequence (wt) from neuraminidase__InfluenzaA__ADX96919
augaauccaaaccaaaagauaauaaccauugguucggucuguaugacaauuggaauggcuaacuuaauauuacaaauuggaaacauaaucucaauauggauuagccacucaauucaacuugggaaucaaaaucagauugaaacaugcaaucaaagcgucauuacuuaugaaaacaacacuuggguaaaucagacauauguuaacaucagcaacaccaacuuugcugcuggacagucagugguuuccgugaaauuagcgggcaauuccucucucugcccuguuaguggaugggcuauauacaguaaagacaacaguauaagaaucgguuccaagggggauguguuugucauaagggaaccauucauaucaugcucccccuuggaaugcagaaccuucuucuugacucaaggggccuugcuaaaugacaaacauuccaauggaaccauuaaagacaggagcccauaucgaacccuaaugagcuguccuauuggugaaguucccucuccauacaacucaagauuugagucagucgcuuggucagcaagugcuugucaugauggcaucaauuggcuaacaauuggaauuucuggcccagacaauggggcaguggcuguguuaaaguacaacggcauaauaacagacacuaucaagaguuggagaaacaauauauugagaacacaagagucugaaugugcauguguaaaugguucuugcuuuacuguaaugaccgauggaccaagugauggacaggccucauacaagaucuucagaauagaaaagggaaagauagucaaaucagucgaaaugaaugccccuaauuaucacuaugaggaaugcuccuguuauccugauucuagugaaaucacaugugugugcagggauaacuggcauggcucgaaucgaccguggguaucuuucaaccagaaucuggaauaucagauaggauacauaugcagugggauuuucggagacaauccacgcccuaaugacaagacaggcaguugugguccaguaucgucuaauggagcaaauggaguaaaaggauuuucauucaaauacggcaaugguguuuggauagggagaacuaaaagcauuaguucaagaaacgguuuugagaugauuugggauccgaacggauggacugggacagacaauaacuucucaauaaagcaagauaucguaggaauaaaugaguggucaggauauagcgggaguuuuguucagcauccagaacuaacagggcuggauuguauaagaccuugcuucuggguugaacuaaucagagggcgacccaaagagaacacaaucuggacuagcgggagcagcauauccuuuugugguguaaacagugacacuguggguuggucuuggccggacggugcugaguugccauuuaccauugacaaguaa

SEQ ID NO: 52358 - RNA, 1410 nt, Artificial Sequence; identical to SEQ ID NO: 52357
  derived and/or modified CDS sequence (wt) from neuraminidase__InfluenzaA__ADX96929

SEQ ID NO: 52359 - RNA, 1410 nt, Artificial Sequence; identical to SEQ ID NO: 49215
  derived and/or modified CDS sequence (wt) from neuraminidase__InfluenzaA__ADX96939

SEQ ID NO: 52360 - RNA, 1410 nt, Artificial Sequence
  derived and/or modified CDS sequence (wt) from neuraminidase__InfluenzaA__ADX96949
augaauccaaaccaaaagauaauaaccauugguucggucuguaugacaauuggaauggccaacuuaauauuacaaauuggaaacauaaucucaauauggauuagccacucaauucaacuugggaaucaaaaucagauugaaacaugcaaucaaagcgucauuacuuaugaaaacaacacuuggguaaaucagacauauguuaacaucagcaacaccaacuuugcugcuggacagucagugguuuccgugaaauuagcgggcaauuccucucucugcccuguuaguggaugggcuauauacaguaaagacaacaguguaagaaucgguuccaagggggauguguuugucauaagggaaccauucauaucaugcucccccuuggaaugcagaaccuucuucuugacucaaggggccuugcuaaaugacaaacauuccaauggaaccauuaaagacaggagcccauaucgaacccuaaugagcuguccuauuggugaaguucccucuccauacaacucaagauuugagucagucgcuuggucagcaagugcuugucaugauggcaucaauuggcuaacaauuggaauuucuggcccagacaauggggcaguggcuguguuaaaguacaacggcauaauaacagacacuaucaagaguuggagaaacaauauauugagaacacaagagucugaaugugcauguguaaaugguucuugcuuuacuguaaugaccgaugggccaagugauggacaggccucauacaagaucuucagaauagaaaagggaaagauagucaaaucagucgaaaugaaugccccuaauuaucacuaugaggaaugcuccuguuauccugauucuagugaaaucacaugugugugcagggauaacuggcauggcucgaaucgaccgugggugucuuucaaccagaaucuggaauaucagauaggauacauaugcagugggauuuucggagacaauccacgcccuaaugauaagacaggcaguugugguccaguaucgucuaauggagcaaauggaguaaaaggauuuucauucaaauacggcaaugguguuuggauagggagaacuaaaagcauuaguucaagaaacgguuuugagaugauuugggauccgaacggauggacugggacagacaauaacuucucaauaaagcaagauaucguaggaauaaaugaguggucaggauauagcgggaguuuuguucagcauccagaacuaacagggcuggauuguauaagaccuugcuucuggguugaacuaaucagagggcgacccaaagagaacacaaucuggacuagcgggagcagcauauccuuuugugguguaaacagugacacuguggguuggucuuggccagacggugcugaguugccauuuaccauugacaaguaa

SEQ ID NO: 52361 - RNA, 1410 nt, Artificial Sequence
  derived and/or modified CDS sequence (wt) from neuraminidase__InfluenzaA__ADX96959
augaauccaaaccaaaagauaauaaccauugguucggucuguaugacaauuggaauggccaacuuaauauuacaaauuggaaacauaaucucaauauggauuagccacucaauucaacuugggaaucaaaaucagauugaaacaugcaaucaaagcgucauuacuuaugaaaacaacacuuggguaaaucagacauauguuaacaucagcaacaccaacuuugcugcuggacagucagugguuuccgugaaauuagcgggcaauuccucucucugcccuguuaguggaugggcuauauacaguaaagacaacaguauaagaaucgguuccaagggggauguguuugucauaagggaaccauucauaucaugcucccccuuggaaugcagaaccuucuucuugacucaaggggccuugcuaaaugacaaacauuccaauggaaccauuaaagacaggagcccauaucgaacccuaaugagcuguccuauuggugaaguucccucuccauacaacucaagauuugagucagucgcuuggucagcaagugcuugucaugauggcaucaauuggcuaacaauuggaauuucuggcccagacaauggggcaguggcuguguuaaaguacaacggcauaauaacagacacuaucaagaguuggagaaacaauauauugagaacacaagagucugaaugugcauguguaaaugguucuugcuuuacuguaaugacugaugggccaagugauggacaggccucauacaagaucuucagaauagaaaagggaaagauagucaaaucagucgaaaugaaugccccuaauuaucacuaugaggaaugcuccuguuauccugauucuagugaaaucacaugugugugcagggauaacuggcauggcucgaaucgaccgugggugucuuucaaccagaaucuggaauaucagauaggauacauaugcagugggauuuucggagacaauccacgcccuaaugauaagacaggcaguugugguccaguaucgucuaauggagcaaauggaguaaaaggauuuucauucaaauacggcaaugguguuuggauagggagaacuaaaagcauuaguucaagaaacgguuuugagaugauuugggauccgaacggauggacugggacagacaauaacuucucaauaaagcaagauaucguaggaauaaaugaguggucaggauauagcgggaguuuuguucagcauccagaacuaacagggcuggauuguauaagaccuugcuucuggguugaacuaaucagagggcgacccaaagagaacacaaucuggacuagcgggagcagcauauccuuuugugguguaaacagugacacuguggguuggucuuggccagacggugcugaguugccauuuaccauugacaaguaa

SEQ ID NO: 52362 - RNA, 1410 nt, Artificial Sequence
  derived and/or modified CDS sequence (wt) from neuraminidase__InfluenzaA__ADX96969
augaauccaaaccaaaugauaauaaccauugguucggucuguaugacaauuggaauggccaacuuaauauuacaaauuggaaacauaaucucaauauggauuagccacucaauucaacuugggaaucaaaaccagauugaaacaugcaaucaaagcgucauuacuuaugaaaacaacacuuggguaaaucagacauauguuaacaucagcaacaccaacuuugcugcuggacagucagugguuuccgugaaauuagcgggcaauuccucucucugcccuguuaguggaugggcuauauacaguaaagacaacaguguaagaaucgguuccaagggggauguguuugucauaagggaaccauucauaucaugcucccccuuggaaugcagaaccuucuucuugacucaaggggccuugcuaaaugacaaacauuccaauggaaccauuaaagacaggagcccauaucgaacccuaaugagcuguccuauuggugaaguucccucuccauacaacucaagauuugagucagucgcuuggucagcaagugcuugucaugauggcaucaauuggcuaacaauuggaauuucuggcccagacaauggggcaguggcuguguuaaaguacaacggcauaauaacagacacuaucaagaguuggagaaacaauauauugagaacacaagagucugaaugugcauguguaaaugguucuugcuuuacuguaaugaccgauggaccaaguaauggacaggccucauacaagaucuucagaauagaaaagggaaagauagucaaaucagucgaaaugaaugccccuaauuaucacuaugaggaaugcuccuguuauccugauucuagugaaaucacaugugugugcagggauaacuggcauggcucgaaucgaccaugggugucuuucaaccagaaucuggaauaucagauaggauacauaugcagugggauuuucggagacaauccacgcccuaaugauaagacaggcaguugugguccaguaucgucuaauggagcaaauggaguaaaaggauuuucauucaaauacggcaaugguguuuggauagggagaacuaaaagcauuaguucaagaaacgguuuugagaugauuugggauccgaacggauggacugggacagacaauaacuucucaauaaagcaagauaucguaggaauaaaugaguggucaggauauagcgggaguuuuguucagcauccagaacuaacagggcuagauuguauaagaccuugcuucuggguugaacuaaucagagggcgacccaaagagaacacaaucuggacuagcgggagcagcauauccuuuugugguguaaacagugacacuguggguuggucuuggccagacggugcugaguugccauuuaccauugacaaguaa

SEQ ID NO: 52363 - RNA, 1410 nt, Artificial Sequence; identical to SEQ ID NO: 49973
  derived and/or modified CDS sequence (wt) from neuraminidase__InfluenzaA__ADX96979

SEQ ID NO: 52364 - RNA, 1410 nt, Artificial Sequence; identical to SEQ ID NO: 49973
  derived and/or modified CDS sequence (wt) from neuraminidase__InfluenzaA__ADX96989

SEQ ID NO: 52365 - RNA, 1407 nt, Artificial Sequence
  derived and/or modified CDS sequence (wt) from neuraminidase__InfluenzaA__ADX96999
augaauccaaaccaaaagauaauaaccauugguucggucuguaugacaauuggaauggcuaacuuaauauuacaaauuggcauaaucucaauauggauuagccacucaauucaacuugggaaucaaaaucagauugaaacaugcaaucaaagcgucauuacuuaugaaaacaacacuuggguaaaucagacauauguuaacaucagcaacaccaacuuugcugcuggacagucagugguuuccgugaaauuagcgggcaauuccucucucugcccuguuaguggaugggcuauauacaguaaagacaacaguauaagaaucgguuccaagggggauguguuugucauaagggaaccauucauaucaugcucccccuuggaaugcagaaccuucuucuugacucaaggggccuugcuaaaugacaaacauuccaauggaaccauuaaagacaggagcccauaucgaacccuaaugagcuguccuauuggugaaguucccucuccauacaacucaagauuugagucagucgcuuggucagcaagugcuugucaugauggcaucaauuggcuaacaauuggaauuucuggcccagacaauggggcaguggcuguguuaaaguacaacggcauaauaacagacacuaucaagaguuggagaaacaauauauugagaacacaagagucugaaugugcauguguaaaugguucuugcuuuacuguaaugaccgauggaccaaguaauggacaggccucauacaagaucuucagaauagaaaagggaaagauagucaaaucagucgaaaugaaugccccuaauuaucacuaugaggaaugcuccuguuauccugauucuagugaaaucacaugugugugcagggauaacuggcauggcucgaaucgaccgugggugucuuucaaccagaaucuggaauaucagauaggauacauaugcagugggauuuucggagacaauccacgcccuaaugauaagacaggcaguugugguccaguaucgucuaauggagcaaauggaguaaaaggauuuucauucaaauacggcaaugguguuuggauagggagaacuaaaagcauuaguucaagaaacgguuuugagaugauuugggauccgaacggauggacugggacagacaauaacuucucaauaaagcaagauaucguaggaauaaaugaguggucaggauauagcgggaguuuuguucagcauccagaacuaacagggcuggauuguauaagaccuugcuucuggguugaacuaaucagagggcgacccaaagagaacacaaucuggacuagcgggagcagcauauccuuuugugguguaaacagugacacuguggguuggucuuggccagacggugcugaguugccauuuaccauugacaaguaa

SEQ ID NO: 52366 - RNA, 1410 nt, Artificial Sequence; identical to SEQ ID NO: 52303
  derived and/or modified CDS sequence (wt) from neuraminidase__InfluenzaA__ADX97009

SEQ ID NO: 52367 - RNA, 1410 nt, Artificial Sequence; identical to SEQ ID NO: 48905
  derived and/or modified CDS sequence (wt) from neuraminidase__InfluenzaA__ADX97020

SEQ ID NO: 52368 - RNA, 1410 nt, Artificial Sequence
  derived and/or modified CDS sequence (wt) from neuraminidase__InfluenzaA__ADX97030
augaauccaaaccaaaagauaauaaccauugguucggucuguaugauaauuggaauggcuaacuuaauguuacaaauuggaaacauaaucucaauauggauuagccacucaauucaacuugggaaucaaaaucagauugaaacaugcaaucaaagcgucauuacuuaugaaaacaacacuuggguaaaucagacauauguuaacaucagcaacaccaacuuugcugcuggacagucagugguuuccgugaaauuagcaggcaauucuucucucugcccuguuaguggaugggcuauauacaguaaagacaacaguguaagaaucgguuccaagggggauguguuugucauaagggaaccauucauaucaugcucccccuuggaaugcagaaccuucuucuugacucaaggggccuugcuaaaugacaaacauuccaauggaaccauuaaagacaggagcccauaucgaacccuaaugagcuguccuauuggugaaguucccucuccauacaacucaagauuugagucagucgcuuggucagcaagugcuugucaugauggcaucaauuggcuaacaauuggaauuucuggcccagacaauggggcaguggcuguguuaaaguacaacggcauaauaacagacacuaucaagaguuggagaaacaauauauugagaacacaagagucugaaugugcauguguaaaugguucuugcuuuacuguaaugaccgauggaccaagugauggacaggccucauacaagaucuucagaauagaaaagggaaagauagucaaaucagucgaaaugaaugccccuaauuaucacuaugaggaaugcuccuguuauccugauucuagugaaaucacaugugugugcagggauaacuggcauggcucgaaucgaccguggguuucuuucaaccagaaucuggaauaucagauaggauacauaugcagugggauuuucggagacaauccacgcccuaaugauaagacaggcaguugugguccaguaucgucuaauggagcaaauggaguaaaaggauuuucauucaaauacggcaaugguguuuggauagggagaacuaaaagcauuaguucaagaaacgguuuugagaugauuugggauccgaacggauggacugggacagacaauaacuucucaauaaagcaagauaucguaggaauaaaugaguggucaggauauagcgggaguuuuguucagcauccagaacuaacagggcuggauuguauaagaccuugcuucuggguugaacuaaucagagggcgacccaaagagaacacaaucuggacuagcgggagcagcauauccuuuugugguguaaacagugacacuguggguuggucuuggccagacggugcugaguugccauuuaccauugacaaguaa

SEQ ID NO: 52369 - RNA, 1410 nt, Artificial Sequence; identical to SEQ ID NO: 50298
  derived and/or modified CDS sequence (wt) from neuraminidase__InfluenzaA__ADX98643

SEQ ID NO: 52370 - RNA, 1410 nt, Artificial Sequence
  derived and/or modified CDS sequence (wt) from neuraminidase__InfluenzaA__ADX98653
augaauccaaaccaaaagauaauaaccauugguucggucuguaugacaauuggaauggcuaacuuaauauuacaaauuggaaacauaaucucaauauggauuagccacucaauucaacuugggaaucaaaaucagauugaaacaugcaaucaaagcgucauuacuuaugaaaacaacacuuggguaaaucagacauauguuaauaucagcaacaccaacuuugcugcuggacagucagugguuuccgugaaauuagcgggcaauuccucucucugcccuguuaguggaugggcuauauacaguaaagacaacaguauaagaaucgguuccaagggggauguguuugucauaagggaaccauucauaucaugcucccccuuggaaugcagaaccuucuucuugacucaaggggccuugcuaaaugacaaacauuccaauggaaccauuaaagacaggagcccauaucgaacccuaaugagcuguccuauuggugaaguucccucuccauacaacucaagauuugagucagucgcuuggucagcaagugcuugucaugauggcaucaauuggcuaacaauuggaauuucuggcccagacaauggggcaguggcuguguuaaaguacaacggcauaauaacagacacuaucaagaguuggagaaacaauauauugagaacacaagagucugaaugugcauguguaaaugguucuugcuuuacuguaaugaccgauggaccaagugauggacaggccucauacaagaucuucagaauagaaaagggaaagauagucaaaucagucgaaaugaaugccccuaauuaucacuaugaggaaugcuccuguuauccugauucuagugaaaucacaugugugugcagggauaacuggcauggcucgaaucgaccgugggugucuuucaaccagaaucuggaauaucagauaggauacauaugcagugggauuuucggagacaauccacgcccuaaugauaagacaggcaguugugguccaguaucgucuaauggagcaaauggaguaaaaggauuuucauucaaauacggcaaugguguuuggauagggagaacuaaaagcauuaguucaagaaacgguuuugagaugauuugggauccgaacggauggacugggacagacaauaacuucucaauaaagcaagauaucguaggaauaaaugaguggucaggauauagcgggaguuuuguucagcauccagaacuaacagggcuggauuguauaagaccuugcuucuggguugaacuaaucagagggcgacccaaagagaacacaaucuggacuagcgggagcagcauauccuuuugugguguaaacagugacacuguggguuggucuuggccagacggugcugaguugccauuuaccauugacaaguaa

SEQ ID NO: 52371 - RNA, 1410 nt, Artificial Sequence
  derived and/or modified CDS sequence (wt) from neuraminidase__InfluenzaA__ADX98668
augaauccaaaccaaaagauaauaaccauugguucgaucuguauuacaauuggaauggcuaacuuaauauuacaaauuggaaacauaaucucaauauggauuagccacucaauucaacuugggaaucaaaaucagauugaaacaugcaaucaaagcgucauuacuuaugaaaacaacacuuggguaaaucagacauauguuaacaucagcaacaccaacuuugcugcuggacagucagugguuuccgugaaauuagcgggcaauuccucucucugcccuguuaguggaugggcuauauacaguaaagacaacaguauaagaaucgguuccaagggggauguguuugucauaagggaaccauucauaucaugcucccccuuggaaugcagaaccuucuucuugacucaaggggccuugcuaaaugacaaacauuccaauggaaccauuaaagacaggagcccauaucgaacccuaaugagcuguccuauuggugaaguucccucuccauacaacucaagauuugagucagucgcuuggucagcaagugcuugucaugauggcaucaauuggcuaacaauuggaauuucuggcccagacaauggggcaguggcuguguuaaaguacaacggcauaauaacagacacuaucaagaguuggagaaacaauauauugagaacacaagagucugaaugugcauguguaaaugguucuugcuuuacuguaaugaccgauggaccaagugauggacaggccucauacaagaucuucagaauagaaaagggaaagauagucaaaucagucgaaaugaaugccccuaauuaucacuaugaggaaugcuccuguuauccugauucuagugaaaucacaugugugugcagggauaacuggcauggcucgaaucgaccgugggugucuuucaaccagaaucuggaauaucagauaggauacauaugcagugggaucuucggagacaauccacgcccuaaugauaagacaggcaguugugguccaguaucgucuaauggagcaaauggaguaaaaggauuuucauucaaauacggcaaugguguuuggauagggagaacuaaaagcauuaguucaagaaacgguuuugagaugauuugggauccgaacggauggacugggacagacaauaacuucucaauaaagcaagauaucguaggaauaaaugaguggucaggauauagcgggaguuuuguucagcauccagaacuaacagggcuggauuguauaagaccuugcuucuggguugaacuaaucagagggcgacccaaagagaacacaaucuggacuagcgggagcagcauauccuuuugugguguaaacagugacacuguggguuggucuuggccagacggugcugaguugccauuuaccauugacaaguaa

SEQ ID NO: 52372 - RNA, 1410 nt, Artificial Sequence
  derived and/or modified CDS sequence (wt) from neuraminidase__InfluenzaA__ADX98678
augaauccaaaccaaaagauaauaaccauugguucggucuguaugacaauuggaauggcuaacuuaauauuacaaauuggaaacauaaucucaauauggauuagccacucaauucaacuugggaaucaaaaucagauugaaacaugcaaucaaagcgucauuacuuaugaaaacaacacuuggguaaaucagacauauguuaacaucagcaacaccaacuuugcugcuggacagucagugguuuccgugaaauuagcgggcaauuccucucucugcccuguuaguggaugggcuauauacaguaaagacaacaguauaagaaucgguuccaagggggauguguuugucauaagggaaccauucauaucaugcucccccuuggaaugcagaaccuucuucuugacucaaggggccuugcuaaaugacaaacauuccaauggaaccauuaaagacaggagcccauaucgaacccuaaugagcuguccuauuggugaaguucccucuccauacaacucaagauuugagucagucgcuuggucagcaagugcuugucaugauggcaucaauuggcuaacaauuggaauuucuggcccagacaauggggcaguggcuguguuaaaguacaacggcauaauaacagacacuaucaagaguuggagaaacaauauauugagaacgcaagagucugaaugugcauguguaaaugguucuugcuuuacuguaaugaccgauggaccaagugauggacaggccucauacaagaucuucagaauagaaaagggaaagauagucaaaucagucgaaaugaaugccccuaauuaucacuaugaggaaugcuccuguuauccugauucuagugaaaucacaugugugugcagggauaacuggcauggcucgaaucgaccgugggugucuuucaaccagaaucuggaauaucagauaggauacauaugcagugggauuuucggagacaauccacgcccuaaugauaagacaggcaguugugguccaguaucgucuaauggagcaaauggaguaaaaggauuuucauucaaauacggcaaugguguuuggauagggagaacuaaaagcauuaguucaagaaacgguuuugagaugauuugggauccgaacggauggacugggacagacaauaacuucucaauaaagcaagauaucguaggaauaaaugaauggucaggauauagcgggaguuuuguucagcauccagaacuaacagggcuggauuguauaagaccuugcuucuggguugaacuaaucagagggcgacccaaagagaacacaaucuggacuagcgggagcagcauauccuuuugugguguaaacagugacacuguggguuggucuuggccagacggugcugaguugccauuuaccauugacaaguaa

SEQ ID NO: 52373 - RNA, 1410 nt, Artificial Sequence
  derived and/or modified CDS sequence (wt) from neuraminidase__InfluenzaA__ADX98698
augaauccaaaccaaaagauaauaaccauugguucggucuguaugacaauuggaauggcuaacuuaauauuacaaauuggaaacauaaucucaauauggauuagccacucaauucaacuugggaaucaaaaucagauugaaacaugcaaucaaagcgucauuacuuaugaaaacaacacuuggguaaaucagacauauguuaacaucagcaacaccaacuuugcugcuggacagucagugguuuccgugaaauuagcgggcaauuccucucucugcccuguuaguggaugggcuauauacagcaaagacaacaguauaagaaucgguuccaagggggauguguuugucauaagggaaccauucauaucaugcucccccuuggaaugcagaaccuucuucuugacucaaggggccuugcuaaaugacaaacauuccaauggaaccauuaaagacaggagcccauaucgaacccuaaugagcuguccuauuggugaaguucccucuccauacaacucaagauuugagucagucgcuuggucagcaagugcuugucaugauggcaucaauuggcuaacaauuggaauuucuggcccagacaauggggcaguggcuguguuaaaguacaacggcauaauaacagacacuaucaagaguuggagaaacaauauauugagaacacaagagucugaaugugcauguguaaaugguucuugcuuuacuguaaugaccgauggaccaagugauggacaggccucauacaagaucuucagaauagaaaagggaaagauagucaaaucagucgaaaugaaugccccuaauuaucacuaugaggaaugcuccuguuauccugauucuagugaaaucacaugugugugcagggauaacuggcauggcucgaaucgaccgugggugucuuucaaccagaaucuggaauaucagauaggauacauaugcagugggauuuucggagacaauccacgcccuaaugauaagacaggcaguugugguccaguaucgucuaauggagcaaauggaguaaaaggauuuucauucaaauacggcaaugguguuuggauagggagaacuaaaagcauuaguucaagaaacgguuuugagaugauuugggauccgaacggauggacugggacagacaauaacuucucaauaaagcaagauaucguaggaauaaaugaauggucaggauauagcgggaguuuuguucagcauccagaacuaacagggcuggauuguauaagaccuugcuucuggguugaacuaaucagagggcgacccaaagagaacacaaucuggacuagcgggagcagcauauccuuuugugguguaaacagugacacuguggguuggucuuggccagacggugcugaguugccauuuaccauugacaaguaa

SEQ ID NO: 52374 - RNA, 1410 nt, Artificial Sequence
  derived and/or modified CDS sequence (wt) from neuraminidase__InfluenzaA__ADX98708
augaauccaaaccaaaagauaauaaccauugguucggucuguaugacaauuggaauggcuaacuuaauauuacaaauuggaaacauaaucucaauauggauuagccacucaauucaacuugggaaucaaaaucagauugaaacaugcaaucaaagcgucauuauuuaugaaaacaacacuuggguaaaucagacauauguuaacaucagcaacaccaacuuugcugcuggacagucagugguuuccgugaaauuagcgggcaauuccucucucugcccuguuaguggaugggcuauauacaguaaagacaacaguauaagaaucgguuccaagggggauguguuugucauaagggaaccauucauaucaugcucccccuuggaaugcagaaccuucuucuugacucaaggggccuugcuaaaugacaaacauuccaauggaaccauuaaagacaggagcccauaucgaacccuaaugagcuguccuauuggugaaguucccucuccauacaacucaagauuugagucagucgcuuggucagcaagugcuugucaugauggcaucaauuggcuaacaauuggaauuucuggcccagacaauggggcaguggcuguguuaaaguacaacggcauaauaacagacacuaucaagaguuggagaaacaauauauugagaacacaagagucugaaugugcauguguaaaugguucuugcuucacuguaaugaccgauggaccaagugauggacaggccucauacaagaucuucagaauagaaaagggaaagauagucaaaucagucgaaaugaaugccccuaauuaucacuaugaggaaugcuccuguuauccugauucuagugaaaucacaugugugugcagggauaacuggcauggcucgaaucgaccguggguaucuuucaaccagaaucuggaauaucagauaggauacauaugcagugggauuuucggagacaauccacgcccuaaugauaagacaggcaguugugguccaguaucgucuaauggagcaaauggaguaaaaggauuuucauucaaauacggcaaugguguuuggauagggagaacuaaaagcauuaguucaagaaacgguuuugagaugauuugggauccgaacggauggacugggacagacaauaacuucucaauaaagcaagauaucguaggaauaaaugaguggucaggauauagcgggaguuuuguucaacauccagaacuaacagggcuggauuguauaagaccuugcuucuggguugaacuaaucagagggcgacccaaagagaacacaaucuggacuagcgggagcagcauauccuuuugugguguaaacagugacacuguggguuggucuuggccggacggugcugaguugccauuuaccauugacaaguaa

SEQ ID NO: 52375 - RNA, 1410 nt, Artificial Sequence; identical to SEQ ID NO: 48750
  derived and/or modified CDS sequence (wt) from neuraminidase__InfluenzaA__ADX98722

SEQ ID NO: 52376 - RNA, 1410 nt, Artificial Sequence; identical to SEQ ID NO: 48750
  derived and/or modified CDS sequence (wt) from neuraminidase__InfluenzaA__ADX98732

SEQ ID NO: 52377 - RNA, 1410 nt, Artificial Sequence
  derived and/or modified CDS sequence (wt) from neuraminidase__InfluenzaA__ADX98742
augaauccaaaccaaaagauaauaaccauugguucggucuguaugacaauuggaauggcuaacuuaauauuacaaauuggaaacauaaucucaauauggauuagccacucaauucaacuugggaaucaaaaucagauugaaacaugcaaucaaagcgucauuacuuaugaaaacaacacuuggguaaaucagacauauguuaacaucagcaacaccaacuuugcugcuggacagucagugguuuccgugaaauuagcgggcaauuccucucucugcccuguuaguggaugggcuauauacaguaaagacaacaguauaagaaucgguuccaagggggauguguuugucauaagggaaccauucauaucaugcucccccuuggaaugcagaaccuucuucuugacucaaggggccuugcuaaaugacaaacauuccaauggaaccauuaaagacaggagcccauaucgaacccuaaugagcuguccuauuggugaaguucccucuccauacaacucaagauuugagucagucgcuuggucagcaagugcuugucaugauggcaucaauuggcuaacaauuggaauuucuggcccagacaauggggcaguggcuguguuaaaguacaacggcauaauaacagacacuaucaagaguuggagaaacaauauauugagaacacaagagucugaaugugcauguguaaaugguucuugcuucacuguaaugaccgauggaccaagugauggacaggccucauacaagaucuucagaauagaaaagggaaagauagucaaaucagucgaaaugaaugccccuaauuaucacuaugaggaaugcuccuguuauccugauucuagugaaaucacaugugugugcagggauaacuggcauggcucgaaucgaccguggguaucuuucaaccagaaucuggaauaucagauaggauacauaugcagugggauuuucggagacaauccacgcccuaaugauaagacaggcaguugugguccaguaucgucuaauggagcaaauggaguaaaaggauuuucauucaaauacggcaaugguguuuggauagggagaacuaaaagcauuaguucaagaaacgguuuugagaugauuugggauccgaacggauggacugggacagacaauaacuucucaauaaagcaagauaucguaggaauaaaugaguggucaggauauagugggaguuuuguucagcauccagaacuaacagggcuggauuguauaagaccuugcuucuggguugaacuaaucagagggcgacccaaagagaacacaaucuggacuagcgggagcagcauauccuuuugugguguaaacagugacacuguggguuggucuuggccggacggugcugaguugccauuuaccauugacaaguaa

SEQ ID NO: 52378 - RNA, 1410 nt, Artificial Sequence; identical to SEQ ID NO: 50709
  derived and/or modified CDS sequence (wt) from neuraminidase__InfluenzaA__ADX98751

SEQ ID NO: 52379 - RNA, 1410 nt, Artificial Sequence; identical to SEQ ID NO: 50304
  derived and/or modified CDS sequence (wt) from neuraminidase__InfluenzaA__ADX98761

SEQ ID NO: 52380 - RNA, 1410 nt, Artificial Sequence
  derived and/or modified CDS sequence (wt) from neuraminidase__InfluenzaA__ADX98770
augaauccaaaccaaaagauaauaaccauugguucggucuguaugacaauuggaauggcuaacuuaauauuacaaauuggaaacauaaucucaauauggauuagccacucaauucaacuugggaaucaaaaucagauugaaacaugcaaucaaagcgucauuacuuaugaaaacaacacuuggguaaaucagacauauguuaacaucagcaacaccaacuuugcugcuggacagucagugguuuccgugaaauuagcgggcaauuccucucucugcccuguuaguggaugggcuauauacaguaaagacaacaguauaagaaucgguuccaagggggauguguuugucauaagggaaccauucauaucaugcucccccuuggaaugcagaaccuucuucuugacucaaggggccuuacuaaaugacaaacauuccaauggaaccauuaaagacaggagcccauaucgaacccuaaugagcuguccuauuggugaaguucccucuccauacaacucaagauuugagucagucgcuuggucagcaagugcuugucaugauggcaucaauuggcuaacaauuggaauuucuggcccagacaauggggcaguggcuguguuaaaguacaacggcauaauaacagacacuaucaagaguuggagaaacaauauauugagaacacaagagucugaaugugcauguguaaaugguucuugcuuuacuguaaugaccgauggaccaagugauggacaggccucauacaagaucuucagaauagaaaagggaaagauagucaaaucagucgaaaugaaugccccuaauuaucacuaugaggaaugcuccuguuauccugauucuagugaaaucacauguguaugcagggauaacuggcauggcucgaaucgaccgugggggucuuucaaccagaaucuggaauaucagauaggauacauaugcagugggauuuucggagacaauccacgcccuaaugauaagacaggcaguugugguccaguaucgucuaauggagcaaauggaguaaaaggauuuucauucaaauacggcaaugguguuuggauagggagaacuaaaagcauuaguucaagaaacgguuuugagaugauuugggauccgaacggauggacugggacagacaauaacuucucaauaaagcaagauaucguaggaauaaaugaguggucaggauauagcgggaguuuuguucaacauccagaacuaacagggcuggauuguauaagaccuugcuucuggguugaacuaaucagagggcgacccaaagagaacacaaucuggacuagcgggagcagcauauccuuuugugguguaaacagugacacuguggguuggucuuggccagacggugcugaguugccauuuaccauugacaaguaa

SEQ ID NO: 52381 - RNA, 1410 nt, Artificial Sequence
  derived and/or modified CDS sequence (wt) from neuraminidase__InfluenzaA__ADX98780
augaauccaaaccaaaagauaauaaccauugguucggucuguaugacaauuggaauggcuaacuuaauauuacaaauuggaaacauaaucucaauauggauuagccacucaauucaacuugggaaucaaaaucagauugaaacaugcaaucaaagcgucauuacuuaugaaaacaacacuuggguaaaucagacauauguuaacaucagcaacaccaacuuugcugcugggcagucagugguuuccgugaaauuagcgggcaauuccucucucugcccuguuaguggaugggcuauauacaguaaagacaacaguauaagaaucgguuccaagggggauguguuugucauaagggaaccauucauaucaugcucccccuuggaaugcagaaccuucuucuugacucaaggggccuugcuaaaugacaaacauuccaauggaaccauuaaagacaggagcccauaucgaacccuaaugagcuguccuauuggugaaguucccucuccauacaacucaagauuugagucagucgcuuggucagcaagugcuugucaugauggcaucaauuggcuaacaauuggaauuucuggcccagacaauggggcaguggcuguguuaaaguacaacggcauaauaacagacacuaucaagaguuggagaaacaauauauugagaacacaagagucugaaugugcauguguaaaugguucuugcuuuacuguaaugaccgauggaccaagugauggacaggccucauacaagaucuucagaauagaaaagggaaagauagucaaaucagucgaaaugaaugccccuaauuaucacuaugaggaaugcuccuguuauccugauucuagugaaaucacaugugugugcagggauaacuggcauggcucgaaucgaccguggguaucuuucaaccagaaucuggaauaucagauaggauacauaugcagugggauuuucggagacaauccacgcccuaaugauaagacaggcaguugugguccaguaucgucuaauggagcaaauggaguaaaaggauuuucauucaaauacggcaaugguguuuggauagggagaacuaaaagcauuaguucaagaaacgguuuugagaugauuugggauccgaacggauggacugggacagacaauaacuucucaauaaagcaagauaucguaggaauaaaugaguggucaggauauagcgggaguuuuguucagcauccagaacuaacagggcuggauuguauaagaccuugcuucuggguugaacuaaucagagggcgacccaaagagaacacaaucuggacuagcgggagcagcauuuccuuuugugguguaaacagugacacuguggguuggucuuggccagacggugcugaguugccauuuaccauugacaaguaa

SEQ ID NO: 52382 - RNA, 1410 nt, Artificial Sequence
  derived and/or modified CDS sequence (wt) from neuraminidase__InfluenzaA__ADX98788
augaauccaaaccaaaagauaauaaccauugguucggucuguaugacaauuggaauggcuaacuuaguauuacaaauuggaaacauaaucucaauauggauuagccacucaauucaacuugggaaucaaaaucagauugaaacaugcaaucaaagcgucauuacuuaugaaaacaacacuuggguaaaucagacauauguuaacaucagcaacaccaacuuugcugcuggacagucagugguuuccgugaaauuagcgggcaauuccucucucugcccuguuaguggaugggcuauauacaguaaagacaacaguauaagaaucggcuccaagggggauguguuugucauaagggaaccauucauaucaugcucccccuuggaaugcagaaccuucuucuugacucaaggggccuugcuaaaugacaaacauuccaauggaaccauuaaagacaggagcccauaucgaacccuaaugagcuguccuauuggugaaguucccucuccauacaacucaagauuugagucagucgcuuggucagcaagugcuugucaugauggcaucaauuggcuaacaauuggaauuucuggcccagacaauggggcaguggcuguguuaaaguacaacggcauaauaacagacacuaucaagaguuggagaaacaauauauugagaacacaagagucugaaugugcauguguaaaugguucuugcuuuacuguaaugaccgauggaccaagugauggacaggccucauacaagaucuucagaauagaaaagggaaagauagucaaaucagucgaaaugaaugccccuaauuaucacuaugaggaaugcuccuguuauccugauucuagugaaaucacaugugugugcagggauaacuggcauggcucgaaucggccguggguaucuuucaaccagaaucuggaauaucagauaggauacauaugcagugggauuuucggagacaauccacgcccuaaugauaagacaggcaguugugguccaguaucgucuaauggagcaaauggaguaaaaggauuuucauucaaauacggcaaugguguuuggauagggagaacuaaaagcauuaguucaagaaacgguuuugagaugauuugggauccgaacggauggacugggacagacaauaaauucucaauaaagcaagauaucguaggaauaaaugaguggucaggauauagcgggaguuuuguucagcauccagaacuaacagggcuggauuguauaagaccuugcuucuggguugaacuaaucagagggcgacccaaagagaacacaaucuggacuagcgggagcagcauauccuuuugugguguaaacagugacacuguggguuggucuuggccagacggugcugaguugccauuuaccauugacaaguaa

SEQ ID NO: 52383 - RNA, 1410 nt, Artificial Sequence
  derived and/or modified CDS sequence (wt) from neuraminidase__InfluenzaA__ADX98809
augaauccaaaccaaaagauaauaaccauugguucggucuguaugacaauuggaauggcuaacuuaauauuacaaauuggaaacauaaucuuaauauggauuagccacucaauucaacuugggaaucaaaaucagauugaaacaugcaaucaaagcgucauuacuuaugaaaacaacacuuggguaaaucagacauauguuaacaucagcaacaccaacuuugcugcuggacagucagugguuuccgugaaauuagcgggcaauuccucucuuugcccuguuaguggaugggcuauauacaguaaagacaacaguauaagaaucgguuccaagggggauguguuugucauaagggaaccauucauaucaugcucccccuuggaaugcagaaccuucuucuugacucaaggggccuugcuaaaugacaaacauuccaauggaaccauuaaagacaggagcccauaucgaacccuaaugagcuguccuauuggugaaguucccucuccauacaacucaagauuugagucagucgcuuggucagcaagugcuugucaugauggcaucaauuggcuaacaauuggaauuucuggcccagacaauggggcaguggcuguguuaaaguacaacggcauaauaacagacacuaucaagaguuggagaaacaauauauugagaacacaagagucugaaugugcauguguaaaugguucuugcuuuacuguaaugaccgauggaccaagugauggacaggccucauacaagaucuucagaauagaaaagggaaagauagucaaaucagucgaaaugaaugccccuaauuaucacuaugaggaaugcuccuguuauccugauucuagugaaaucacaugugugugcagggauaacuggcauggcucgaaucgaccgugggugucuuucaaccagaaucuggaauaucagauaggauacauaugcagugggauuuucggagacaauccacgcccuaaugauaagacaggcaguugugguccaguaucgucuaauggagcaaauggaguaaaaggauuuucauucaaauacggcaaugguguuuggauagggagaacuaaaagcauuaguucaagaaacgguuuugagaugauuugggauccgaacggauggacugggacagacaauaacuucucaauaaagcaagauaucguaggaauaaaugaguggucaggauauagcgggaguuuuguccagcauccagaacuaacagggcuggauuguauaagaccuugcuucuggguugaacuaaucagagggcgacccaaagagaacacaaucuggacuagcgggagcagcauauccuuuugugguguaaacagugacacuguggguuggucuuggccagacggugcugaguugccauuuaccauugacaaguaa

SEQ ID NO: 52384 - RNA, 1410 nt, Artificial Sequence; identical to SEQ ID NO: 51365
  derived and/or modified CDS sequence (wt) from neuraminidase__InfluenzaA__ADX98821

SEQ ID NO: 52385 - RNA, 1410 nt, Artificial Sequence; identical to SEQ ID NO: 48750
  derived and/or modified CDS sequence (wt) from neuraminidase__InfluenzaA__ADX98846

SEQ ID NO: 52386 - RNA, 1410 nt, Artificial Sequence
  derived and/or modified CDS sequence (wt) from neuraminidase__InfluenzaA__ADX98856
augaauccaaaccaaaagauaaugaccauugguucggucuguaugacaauuggaauggcuaacuuaauauuacaaauuggaaacauaaucucaauauggauuagccacucaauucaacuugggauucaaaaucagauugaaacaugcaaucaaagcgucauuacuuaugaaaacaacacuuggguaaaucagacauauguuaacaucagcaacaccaacuuugcugcuggacagucagugguuuccgugaaauuagcgggcaauuccucucucugcccuguuaguggaugggcuauauacaguaaagacaacaguauaagaaucgguuccaagggggauguguuugucauaagggaaccauucauaucaugcucccccuuggaaugcagaaccuucuucuugacucaaggggccuugcuaaaugacaaacauuccaauggaaccauuaaagacaggagcccauaucgaacccuaaugagcuguccuauuggugaaguucccucuccauacaacucaagauuugagucagucgcuuggucagcaagugcuugucaugauggcaucaauuggcuaacaauuggaauuucuggcccagacaauggggcaguggcuguguuaaaguacaacggcauaauaacagacacuaucaagaguuggagaaacaauauauugagaacacaagagucugaaugugcauguguaaaugguucuugcuuuacuguaaugaccgauggaccaagugauggacaggccucauacaagaucuucagaauagaaaagggaaagauagucaaaucagucgaaaugaaugccccuaauuaucacuaugaggaaugcuccuguuauccugauucuagugaaaucacaugugugugcagggauaacuggcauggcucgaaucgaccgugggugucuuucaaccagaaucuggaauaucagauaggauacauaugcagugggauuuucggagacaauccacgcccuaaugauaagacaggcaguugugguccaguaucgucuaauggagcaaauggaguaaaaggauuuucauucaaauacggcaaugguguuuggauagggagaacuaaaagcauuaguucaagaaacgguuuugagaugauuugggauccgaacggauggacugggacagacaauaacuucucaauaaagcaagauaucguaggaauaaaugaauggucaggauauagcgggaguuuuguucagcauccagaacuaacagggcuggauuguauaagaccuugcuucuggguugaacuaaucagagggcgacccaaagagaacacaaucuggacuagcgggagcagcauauccuuuugugguguaaacagugacacuguggguuggucuuggccagacggugcugaguugccauuuaccauugacaaguaa

SEQ ID NO: 52387 - RNA, 1410 nt, Artificial Sequence
  derived and/or modified CDS sequence (wt) from neuraminidase__InfluenzaA__ADX98863
augaauccaaaccaaaagauaauaaccauugguucggucuguaugacaauuggaauggcuaacuuaauauuacaaauuggaaacauaaucucaauauggauuagccacucaauucaacuugggaaucaaaaucagauugaaacaugcaaucaaagcgucauuacuuaugaaaacaacacuuggguaaaucagacauauguuaacaucagcaacaccaacuuugcugcuggacagucagugguuuccgugaaauuagcgggcaauuccucucucugcccuguuaguggaugggcuauauacaguaaagacaacaguauaagaaucgguuccaagggggauguguuugucauaagggaaccauucauaucaugcucccccuuggaaugcagaaccuucuucuugacucaaggggccuugcuaaaugacaaacauuccaauggaaccauuaaagacaggagcccauaucgaacccuaaugagcuguccuauuggugaaguucccucuccauacaacucaagauuugagucagucgcuuggucagcaagugcuugucaugauggcaucaauuggcuaacaauuggaauuucuggcccagacaauggggcaguggcuguguuaaaguacaacggcauaauaacagacacuaucaagaguuggagaaacaauauauugagaacacaagagucugaaugugcauguguaaaugguucuugcuuuacuguaaugaccgauggaccaagugauggacaggccucauacaagaucuucagaauagaaaagggaaagauagucaaaucagucgaaaugaaugccccuaauuaucacuaugaggaaugcuccuguuauccugauucuagugaaaucacaugugugugcagggauaacuggcauggcucgaaucgaccgugggugucuuucaaccagaaucuggaauaucagauaggauacauaugcagugggauuuucggagauaauccacgcccuaaugauaagacaggcaguugugguccaguaucgucuaauggagcaaauggaguaaaaggauuuucauucaaauacggcaaugguguuuggauagggagaacuaaaagcauuaguucaagaaacgguuuugagaugauuugggauccgaacggauggacugggacagacaauaacuucucaauaaagcaagauaucguaggaauaaaugaauggucaggauauagcgggaguuuuguucagcauccagaacuaacagggcuggauuguauaagaccuugcuucuggguugaacuaaucagagggcgacccaaagagaacacaaucuggacuagcgggagcagcauauccuuuugugguguaaacagugacacuguggguuggucuuggccagacggugcugaguugccauuuaccauugacaaguaa

SEQ ID NO: 52388 - RNA, 1410 nt, Artificial Sequence; identical to SEQ ID NO: 48750
  derived and/or modified CDS sequence (wt) from neuraminidase__InfluenzaA__ADX98873

SEQ ID NO: 52389 - RNA, 1410 nt, Artificial Sequence
  derived and/or modified CDS sequence (wt) from neuraminidase__InfluenzaA__ADX98883
augaauccaaaccaaaagauaauaaccauugguucggucuguaugacaauuggaauggcuaacuuaauauuacaaauuggaaacauaaucucaauauggauuagccacucaauucaacuugggaaucaaaaucagauugaaacaugcaaucaaagcgucauuacuuaugaaaacaacacuuggguaaaucagacauauguuaacaucagcaacaccaacguugcugcuggacagucagugguuuccgugaaauuagcgggcaauuccucucucugcccuguuaguggaugggcuauauacaguaaagacaacaguauaagaaucgguuccaagggggaugcguuugucauaagggaaccauucauaucaugcucccccuuggaaugcagaaccuucuucuugacucaaggggccuugcuaaaugacaaacauuccaauggaaccauuaaagacaggagcccauaucgaacccuaaugagcuguccuauuggugaaguucccucuccauacaacucaagauuugagucagucgcuuggucagcaagugcuugucaugauggcaucaauuggcuaacaauuggaauuucuggcccagacaauggggcaguggcuguguuaaaguacaacggcauaauaacagacacuaucaagaguuggagaaacaauauauugagaacacaagagucugaaugugcauguguaaaugguucuugcuuuacuguaaugaccgauggaccaagugauggacaggccucauacaagaucuucagaauagaaaagggaaagauagucaaaucagucgaaaugaaugccccuaauuaucacuaugaggaaugcuccuguuauccugauucuagugaaaucacaugugugugcagggauaacuggcauggcucgaaucgaccgugggugucuuucaaccagaaucuggaauaucagauaggauacauaugcagugggauuuucggagacaauccacgcccuaaugauaagacaggcaguugugguccaguaucgucuaauggagcaaauggaguaaaaggauuuucauucaaauacggcaaugguguuuggauagggagaacuaaaagcauuaguucaagaagcgguuuugagaugauuugggauccgaacggauggacugggacagacaauaacuucucaauaaagcaagauaucguaggaauaaaugaguggucaggauauagcgggaguuuuguucagcauccagaacuaacagggcuggauuguauaagaccuugcuucuggguugaacuaaucagagggcgacccaaagagaacacaaucuggacuagcgggagcagcauauccuuuugugguguaaacagugacacuguggguuggucuuggccagacggugcugaguugccauuuaccauugacaaguaa

SEQ ID NO: 52390 - RNA, 1410 nt, Artificial Sequence; identical to SEQ ID NO: 48750
  derived and/or modified CDS sequence (wt) from neuraminidase__InfluenzaA__ADX98893

SEQ ID NO: 52391 - RNA, 1410 nt, Artificial Sequence; identical to SEQ ID NO: 48750
  derived and/or modified CDS sequence (wt) from neuraminidase__InfluenzaA__ADX98903

SEQ ID NO: 52392 - RNA, 1410 nt, Artificial Sequence; identical to SEQ ID NO: 50303
  derived and/or modified CDS sequence (wt) from neuraminidase__InfluenzaA__ADX98913

SEQ ID NO: 52393 - RNA, 1410 nt, Artificial Sequence; identical to SEQ ID NO: 51489
  derived and/or modified CDS sequence (wt) from neuraminidase__InfluenzaA__ADX98923

SEQ ID NO: 52394 - RNA, 1410 nt, Artificial Sequence; identical to SEQ ID NO: 50187
  derived and/or modified CDS sequence (wt) from neuraminidase__InfluenzaA__ADX98933

SEQ ID NO: 52395 - RNA, 1410 nt, Artificial Sequence; identical to SEQ ID NO: 48750
  derived and/or modified CDS sequence (wt) from neuraminidase__InfluenzaA__ADX98943

SEQ ID NO: 52396 - RNA, 1410 nt, Artificial Sequence
  derived and/or modified CDS sequence (wt) from neuraminidase__InfluenzaA__ADX98953
augaauccaaaccaaaagauaauaaccauugguucggucuguaugacaauuggaauggcuaacuuaauauuacaaauuggaaacauaaucucaauauggauuagccacucaauucaacuugggaaucaaaaucagauugaaacaugcaaucaaagcgucauuacuuaugaaaacaacacuuggguaaaucagacauauguuaacaucagcaacaccaacuuugcugcuggacagucagugguuuccgugaaauuagcgggcaauuccucucucugcccuguuaguggaugggcuauauacaguaaagacaacaguauaagaaucgguuccaagggggauguguuugucauaagggaaccauucauaucaugcucccccuuggaaugcagaaccuucuucuugacucaaggggccuugcuaaaugacaaacauuccaauggaaccauuaaagacaggagcccauaucgaacccuaaugagcuguccuauuggugaaguucccucuccauacaacucaagauuugagucagucgcuuggucagcaagugcuugucaugauggcaucaauuggcuaacaauuggaauuucuggcccagacaauggggcaguggcuguguuaaaguacaacggcauaauaacagacacuaucaagaguuggagaaacaauauauugagaacacaagagucugaaugugcauguguaaaugguucuugcuuuacuguaaugaccgauggaccaagugauggacaggccucauauaagaucuucagaauagaaaagggaaagauagucaaaucagucgaaaugaaugccccuaauuaucacuaugaggaaugcuccuguuauccugauucuaguaaaaucacaugugugugcagggauaacuggcauggcucgaaucgaccgugggugucuuucaaccagaaucuggaauaucagauaggauacauaugcagugggauuuucggagacaauccacgcccuaaugauaagacaggcaguugugguccaguaucgucuaauggagcaaauggaguaaaaggauuuucauucaaauacggcaaugguguuuggauagggagaacuaaaagcauuaguucaagaaacgguuuugagaugauuugggauccgaacggauggacugggacagacaauaacuucucaauaaagcaagauaucguaggaauaaaugaguggucaggauauagcgggaguuuuguccagcauccagaacuaacagggcuggauuguauaagaccaugcuucuggguugaacuaaucagagggcgacccaaagagaacacaaucuggacuagcgggagcagcauauccuuuugugguguaaacagugacacuguggguuggucuuggccagacggugcugaguugccauuuaccauugacaaguaa

SEQ ID NO: 52397 - RNA, 1410 nt, Artificial Sequence; identical to SEQ ID NO: 49215
  derived and/or modified CDS sequence (wt) from neuraminidase__InfluenzaA__ADX98963

SEQ ID NO: 52398 - RNA, 1410 nt, Artificial Sequence
  derived and/or modified CDS sequence (wt) from neuraminidase__InfluenzaA__ADX98973
augaauccaaaccaaaagauaauaaccauugguucggucuguaugacaauuggaauggcuaacuuaauauuacaaauuggaaacauaaucucaauauggauuagccacucaauucaacuugggaaucaaaaucagauugaaacaugcaaucaaagcgucauuacuuaugaaaacaacacuuggguaaaucagacauauguuaacaucagcaacaccaacuuugcugcuggacagucagugguuuccgugaaauuagcgggcaauuccucucucugcccuguuaguggaugggcuauauacaguaaagacaacaguauaagaaucgguuccaagggggauguguuugucauaagggaaccauucauaucaugcucccccuuggaaugcagaaccuucuucuugacucaaggggccuugcuaaaugacaaacauuccaauggaaccauuaaagacaggagcccauaucgaacccuaaugaucuguccuauuggugaaguucccucuccauacaacucaagauuugagucagucgcuuggucagcaagugcuugucaugauggcaucaauuggcuaacaauuggaauuucuggcccagacaauggggcaguggcuguguuaaaguacaacggcauaauaacagacacuaucaagaguuggagaaacaauauauugagaacacaagagucugaaugugcauguguaaaugguucuugcuuuacuguaaugaccgauggaccaagugauggacaggccucauacaagaucuucagaauagaaaagggaaagauagucaaaucagucgaaaugaaugccccuaauuaucacuaugaggaaugcuccuguuauccugauucuagugaaaucacaugugugugcagggauaacuggcauggcucgaaucgaccgugggugucuuucaaccagaaucuggaauaucagauaggauacauaugcagugggauuuucggagacaauccacgcccuaaugauaagacaggcaguugugguccaguaucgucuaauggagcaaauggaguaaaaggauuuucauucaaauacggcaaugguguuuggauagggagaacuaaaagcauuaguucaagaaacgguuuugagaugauuugggauccgaacggauggacugggacagacaauaacuucucaauaaagcaagauaucguaggaauaaaugaguggucaggauauagcgggaguuuuguccagcauccagaacuaacagggcuggauuguauaagaccuugcuucuggguugaacuaaucagagggcgacccaaagagaacacaaucuggacuagcgggagcagcauauccuuuugugguguaaacagugacacuguggguuggucuuggccagacggugcugaguugccauuuaccauugacaaguaa

SEQ ID NO: 52399 - RNA, 1410 nt, Artificial Sequence
  derived and/or modified CDS sequence (wt) from neuraminidase__InfluenzaA__ADX98983
augaauccaaaccaaaagauaauaaccauugguucggucuguaugacaauuggaauggcuaacuuaauauuacaaauuggaaacauaaucucaauauggauuagccacucaauucaacuugggaaucaaaaucagauugaaacaugcaaucaaagcgucauuacuuaugaaaacaacacuuggguaaaucagacauauguuaacaucagcaacaccaacuuugcugcuggacagucagugguuuccgugaaauuagcgggcaauuccucucucugcccuguuaguggaugggcuauauacaguaaagacaacaguauaagaaucgguuccaaaggggauguguuugucauaagggaaccauucauaucaugcucccccuuggaaugcagaaccuucuucuugacucaaggggccuugcuaaaugacaaacauuccaauggaaccauuaaagacaggagcccauaucgaacccuaaugagcuguccuauuggugaaguucccucuccauacaacucaagauuugagucagucgcuuggucagcaagugcuugucaugauggcaucaauuggcuaacaauuggaauuucuggcccagacaauggggcaguggcuguguuaaaguacaacggcauaauaacagacacuaucaagaguuggaggaacaauauauugagaacacaagagucugaaugugcauguguaaaugguucuugcuuuacuguaaugaccgauggaccaagugauggacaggccucauacaagaucuucagaauagaaaagggaaagauagucaaaucagucgaaaugaaugccccuaauuaucacuaugaggaaugcuccuguuauccugauucuagugaaaucacaugugugugcagggauaacuggcauggcucgaaucgaccgugggugucuuucaaccagaaucuggaauaucagauaggauacauaugcagugggauuuucggagacaauccacgcccuaaugauaagacaggcaguugugguccaguaucgucuaauggagcaaauggaguaaaaggauuuucauucaaauacggcaaugguguuuggauagggagaacuaaaagcauuaguucaagaaacgguuuugagaugauuugggauccaaacggauggacugggacagacaauaacuucucaauaaagcaagauaucguaggaauaaaugaauggucaggauauagcgggaguuuuguucagcauccagaacuaacagggcuggauuguauaagaccuugcuucuggguugaacuaaucagagggcgacccaaagagaacacaaucuggacuagcgggagcagcauauccuuuugugguguaaacagugacacuguggguuggucuuggccagacggugcugaguugccauuuaccauugacaaguaa

SEQ ID NO: 52400 - RNA, 1410 nt, Artificial Sequence; identical to SEQ ID NO: 49794
  derived and/or modified CDS sequence (wt) from neuraminidase__InfluenzaA__ADX98993

SEQ ID NO: 52401 - RNA, 1410 nt, Artificial Sequence; identical to SEQ ID NO: 49794
  derived and/or modified CDS sequence (wt) from neuraminidase__InfluenzaA__ADX99003

SEQ ID NO: 52402 - RNA, 1365 nt, Artificial Sequence
  derived and/or modified CDS sequence (wt) from neuraminidase__InfluenzaA__ADX99584
augaauccaaaucagaaaauaacaaccauuggaucaaucugucugguagucggacuaauuagccuaauauugcaaauagggaauauaaucucaauauggauuagccauucaauucaaacuggaagucaaaaccauacuggaauaugcaaccaaaacaucauuaccuauaaaaauagcaccuggguaaaggacacaacuucagugauauuaaccggcaauucaucucuuugucccauccgugggugggcuauauacagcaaagacaauagcauaagaauugguuccaaaggagacguuuuugucauaagagagcccuuuauuucauguucucacuuggaaugcaggaccuuuuuucugacccaaggugccuuacugaaugacaagcauucaaaugggacuguuaaggacagaagcccuuauagggccuuaaugagcugcccugucggugaagcuccguccccguacaauucaagauuugaaucgguugcuuggucagcaagugcaugucaugauggcaugggcuggcuaacaaucggaauuucagguccagauaauggagcaguggcuguauuaaaauacaacggcauaauaacugaaaccauaaaaaguuggaggaagaaaauauugaggacacaagagucugaaugugccuguguaaaugguucauguuuuacuauaaugacugauggcccgagugaugggcuggccucguacaaaauuuucaagaucgaaaaggggaagguuacuaaaucaauagaguugaaugcaccuaauucucacuaugaggaauguuccuguuacccugauaccggcaaagugaugugugugugcagagacaacuggcaugguucgaaccggccaugggugucuuucgaucaaaaccuggauuaucaaauaggauacaucugcagugggguuuucggugacaacccgcgucccgaagauggaacaggcagcugugguccaguguauguugauggagcaaacggaguaaagggauuuucauauagguaugguaaugguguuuggauaggaaggaccaaaagucacaguuccagacauggguuugagaugauuugggauccuaauggauggacagagacugauaguaaguucucuguuaggcaagauguuguggcaaugacugauuggucaggguauagcggaaguuucguucaacauccugagcuaacagggcuagacuguaugaggccgugcuucuggguugaauuaaucaggggacgaccuaaagaaaaaacaaucuggacuagugcgagcagcauuucuuuuuguggcgugaauagugauacuguagauuggucuuggccagacggugcugaguugccauucagcauugacaaguag

SEQ ID NO: 52403 - RNA, 1365 nt, Artificial Sequence; identical to SEQ ID NO: 52402
  derived and/or modified CDS sequence (wt) from neuraminidase__InfluenzaA__ADX99595

SEQ ID NO: 52404 - RNA, 1365 nt, Artificial Sequence; identical to SEQ ID NO: 52402
  derived and/or modified CDS sequence (wt) from neuraminidase__InfluenzaA__ADX99606

SEQ ID NO: 52405 - RNA, 1365 nt, Artificial Sequence; identical to SEQ ID NO: 52402
  derived and/or modified CDS sequence (wt) from neuraminidase__InfluenzaA__ADX99617

SEQ ID NO: 52406 - RNA, 1365 nt, Artificial Sequence; identical to SEQ ID NO: 52402
  derived and/or modified CDS sequence (wt) from neuraminidase__InfluenzaA__ADX99628

SEQ ID NO: 52407 - RNA, 1365 nt, Artificial Sequence; identical to SEQ ID NO: 52402
  derived and/or modified CDS sequence (wt) from neuraminidase__InfluenzaA__ADX99639

SEQ ID NO: 52408 - RNA, 1365 nt, Artificial Sequence; identical to SEQ ID NO: 47731
  derived and/or modified CDS sequence (wt) from neuraminidase__InfluenzaA__ADX99650

SEQ ID NO: 52409 - RNA, 1365 nt, Artificial Sequence; identical to SEQ ID NO: 47731
  derived and/or modified CDS sequence (wt) from neuraminidase__InfluenzaA__ADX99672

SEQ ID NO: 52410 - RNA, 1365 nt, Artificial Sequence; identical to SEQ ID NO: 47731
  derived and/or modified CDS sequence (wt) from neuraminidase__InfluenzaA__ADX99683

SEQ ID NO: 52411 - RNA, 1365 nt, Artificial Sequence; identical to SEQ ID NO: 47731
  derived and/or modified CDS sequence (wt) from neuraminidase__InfluenzaA__ADX99694

SEQ ID NO: 52412 - RNA, 1365 nt, Artificial Sequence; identical to SEQ ID NO: 47731
  derived and/or modified CDS sequence (wt) from neuraminidase__InfluenzaA__ADX99705

SEQ ID NO: 52413 - RNA, 1365 nt, Artificial Sequence; identical to SEQ ID NO: 47731
  derived and/or modified CDS sequence (wt) from neuraminidase__InfluenzaA__ADX99846

SEQ ID NO: 52414 - RNA, 1365 nt, Artificial Sequence; identical to SEQ ID NO: 47731
  derived and/or modified CDS sequence (wt) from neuraminidase__InfluenzaA__ADX99857

SEQ ID NO: 52415 - RNA, 1365 nt, Artificial Sequence; identical to SEQ ID NO: 47731
  derived and/or modified CDS sequence (wt) from neuraminidase__InfluenzaA__ADX99868

SEQ ID NO: 52416 - RNA, 1365 nt, Artificial Sequence; identical to SEQ ID NO: 47731
  derived and/or modified CDS sequence (wt) from neuraminidase__InfluenzaA__ADX99879

SEQ ID NO: 52417 - RNA, 1365 nt, Artificial Sequence; identical to SEQ ID NO: 47731
  derived and/or modified CDS sequence (wt) from neuraminidase__InfluenzaA__ADX99890

SEQ ID NO: 52418 - RNA, 1365 nt, Artificial Sequence; identical to SEQ ID NO: 47731
  derived and/or modified CDS sequence (wt) from neuraminidase__InfluenzaA__ADX99901

SEQ ID NO: 52419 - RNA, 1365 nt, Artificial Sequence
  derived and/or modified CDS sequence (wt) from neuraminidase__InfluenzaA__ADX99912
augaauccaaaucagaaaauaauaaccauuggaucaaucugucugguagucggacuaauuagccuaauauugcaaauagggaauauaaucucaauauggauuagccauucaauucaaacuggaagucaaaaccauacuggaauaugcaaccaaaacaucauuaccuauaaaaauagcaccuggguaaaggacacaacuucagugauauuaaccggcaauucaucucuuugucccauccgugggugggcuauauacagcaaagacaauagcauaagaauugguuccaaaggagacguuuuuaucauaagagagcccuuuauuucauguucucacuuggaaugcaggaccuuuuuucugacccaaggugccuuacugaaugacaagcauucaagugggacuguuaaggacagaagcccuuauagggccuuaaugagcugcccugucggugaagcuccguccccguacaauucaagauuugaaucgguugcuuggucagcaagugcaugucaugauggcaugggcuggcuaacaaucggaauuucagguccagauaauggagcaguggcuguauuaaaauacaacggcauaauaacugaaaccauaaaaaguuggaggaagaaaauauugaggacacaagagucugaaugugccuguguaaaugguucauguuuuacuauaaugacugauggcccgagugaugggcuggccucguacaaaauuuucaagaucgaaaaggggaagguuacuaaaucaauagaguugaaugcaccuaauucucacuaugaggaauguuccuguuacccugauaccggcaaagugaugugugugugcagagacaauuggcaugguucgaaccggccaugggugucuuucgaucaaaaccuggauuaucaaauaggauacaucugcagugggguuuucggugacaacccgcgucccgaagauggaacaggcagcugugguccaguguauguugauggagcaaacggaguaaagggauuuucauauagguaugguaaugguguuuggauaggaaggaccaaaagucacaguuccagacauggguuugagaugauuugggauccuaauggauggacagagacugauaguaaguucucugugaggcaagauguuguggcaaugacugauuggucaggguauagcggaaguuucguucaacauccugagcugacagggcuagacuguaugaggccgugcuucuggguugaauuaaucaggggacgaccuaaagaaaaaacaaucuggacuagugcgagcagcauuucuuuuuguggcgugaauagugauacuguagauuggucuuggccagacggugcugaguugccauucagcauugacaaguag

SEQ ID NO: 52420 - RNA, 1365 nt, Artificial Sequence; identical to SEQ ID NO: 47731
  derived and/or modified CDS sequence (wt) from neuraminidase__InfluenzaA__ADX99923

SEQ ID NO: 52421 - RNA, 1365 nt, Artificial Sequence; identical to SEQ ID NO: 47731
  derived and/or modified CDS sequence (wt) from neuraminidase__InfluenzaA__ADX99934

SEQ ID NO: 52422 - RNA, 1365 nt, Artificial Sequence; identical to SEQ ID NO: 47731
  derived and/or modified CDS sequence (wt) from neuraminidase__InfluenzaA__ADX99956

SEQ ID NO: 52423 - RNA, 1365 nt, Artificial Sequence; identical to SEQ ID NO: 47731
  derived and/or modified CDS sequence (wt) from neuraminidase__InfluenzaA__ADX99967

SEQ ID NO: 52424 - RNA, 1365 nt, Artificial Sequence; identical to SEQ ID NO: 47731
  derived and/or modified CDS sequence (wt) from neuraminidase__InfluenzaA__ADX99978

SEQ ID NO: 52425 - RNA, 1365 nt, Artificial Sequence; identical to SEQ ID NO: 47731
  derived and/or modified CDS sequence (wt) from neuraminidase__InfluenzaA__ADX99989

SEQ ID NO: 52426 - RNA, 1365 nt, Artificial Sequence; identical to SEQ ID NO: 47731
  derived and/or modified CDS sequence (wt) from neuraminidase__InfluenzaA__ADY00001

SEQ ID NO: 52427 - RNA, 1365 nt, Artificial Sequence; identical to SEQ ID NO: 47731
  derived and/or modified CDS sequence (wt) from neuraminidase__InfluenzaA__ADY00012

SEQ ID NO: 52428 - RNA, 1365 nt, Artificial Sequence; identical to SEQ ID NO: 47731
  derived and/or modified CDS sequence (wt) from neuraminidase__InfluenzaA__ADY00023

SEQ ID NO: 52429 - RNA, 1413 nt, Artificial Sequence
  derived and/or modified CDS sequence (wt) from neuraminidase__InfluenzaA__ADY04729
augaauccaaaucaaaaaauaauaaccauuggaucaaucaguauagcaaucggaauaauuagccuaauguugcaaauaggaaacauuauuucaauaugggcuagucacucaauccaaacuggaagucaaaaccacacuggaguaugcaaccaaagaaucaucacauaugaaaacagcaccugggugaaucacacauauguuaauauuaacaacaccaauguuauugcuggaaaggacaaaacuucagugacaauggccggcaauucaucucuuuguucuaucaguggaugggcuauauacacaaaagacaacagcauaagaauugguuccaaaggagauguuuuugucauaagagagccuuucauaucauguucucacuuggaaugcagaaccuuuuuucugacccaaggugcucuauuaaaugacaaacauucaaaugggaccguuaaggacagaagccccuauagggcuuuaaugagcuguccucuaggugaagcuccauccccauacaauucaaaguuugaaucaguugcuuggucggcaagcgcaugccaugauggcaugggcugguuaacaaucggaauuucugguccagacaauggagcaguggcuguacuaaaauacaacggcauaauaacugaaaccauaaaaaguuggaaaaagcaaauauuaagaacacaggagucugaaugugucugugugaacgggucauguuucaccauaaugaccgauggcccgaguaauggggccgccucguacaaaaucuucaagaucgaaaagggaaagguuacuaaaucaauagaguugaaugcacccaauuuucauuaugaggaauguuccuguuacccagacacuggcacagugauguguguaugcagggacaacuggcaugguucaaaucgacccugggugucuuuuaaucaaaaccuggauuaucaaauaggauacaucugcagugggguguucggugacaauccgcgucccaaagauggagagggcagcuguaauccagugacuguugauggagcaaacggaguaaagggguuuucauacaaauaugguaaugguguuuggauaggaaggacuaaaaguaacagacuuagaaagggguuugagaugauuugggauccuaauggauggacagauaccgacagugauuucucagugaaacaggauguuguggcaauaacugauuggucuggguacagcggaaguuucguucaacauccugaguuaacaggauuggacuguauaagaccuugcuucuggguugaguuagucagaggacugccaaaagaaaauacaacaaucuggacuagugggagcagcauuucuuuuuguggcguaaauagugauacugcaaacuggucuuggccagacggugcugaguugccguuuaccauugacaaguaa

SEQ ID NO: 52430 - RNA, 1410 nt, Artificial Sequence
  derived and/or modified CDS sequence (wt) from neuraminidase__InfluenzaA__ADY11828
augaauccaaaucaaaagauaauaacgauuggcucuguuucucucaccauuuccacaauaugcuucuucaugcaaauugccaucuugauaacuacuguaacauugcauuucaagcaauaugaauucaacucccccccaaacaaccaagugaugcugugugaaccaacaauaauagaaagaaacauaacagagauaguguaucugaccaacaccaccauagagaaggaaauaugccccaaacuagcagaauacagaaauuggucaaaaccgcaaugugacauuacaggauuugcaccuuuuucuaaggacaauucgauuaggcuuuccgcugguggggacaucugggugacaagagaaccuuaugugucaugcgauccugacaaguguuaucaauuugcccuuggacagggaacaacacuaaacaacgugcauucaaauaacacaguacgugauaggaccccuuaucggacccuauugaugaaugaguuagguguuccuuuucaucuggggaccaagcaagugugcauagcaugguccagcucaaguugucacgauggaaaagcauggcugcauguuuguauaacgggggaugauaaaaaugcaacugcaagcuucauuuacaaugggaggcuuguagauaguguuguuucaugguccaaagaaauucucaggacccaggagucagaaugcguuuguaucaauggaacuuguacaguaguaaugacugauggaagugcuucaggaaaagcugauacuaaaauacuauucauugaggaggggaaaaucguucauacuagcacauugucaggaagugcucagcaugucgaggagugcucuugcuauccucgauauccuggugucagaugugucugcagagacaacuggaaaggcuccaauaggcccaucguagauauaaacauaaaggaucauagcauuguuuccaguuauguguguucaggacuuguuggagacacacccagaaaaaacgacagcuccagcaguagccauuguuuggauccuaacaaugaagaagguggucauggagugaaaggcugggccuuugaugauggaaaugacguguggaugggaagaacaaucaacgagacgucacgcuuaggguaugaaaccuucaaagucauugaaggcugguccaacccuaaguccaaauugcagauaaauaggcaagucauaguugacagagguaauagguccgguuauucugguauuuucucuguugaaggcaaaagcugcaucaaucggugcuuuuauguggaguugauuaggggaagaaaagaggaaacugaagucuuguggaccucaaacaguauuguuguguuuuguggcaccucagguacauauggaacaggcucauggccugauggggcggaccucaaucucaugccuauauaa

SEQ ID NO: 52431 - RNA, 1410 nt, Artificial Sequence; identical to SEQ ID NO: 49595
  derived and/or modified CDS sequence (wt) from neuraminidase__InfluenzaA__ADY11839

SEQ ID NO: 52432 - RNA, 1410 nt, Artificial Sequence; identical to SEQ ID NO: 49595
  derived and/or modified CDS sequence (wt) from neuraminidase__InfluenzaA__ADY17657

SEQ ID NO: 52433 - RNA, 1410 nt, Artificial Sequence; identical to SEQ ID NO: 49595
  derived and/or modified CDS sequence (wt) from neuraminidase__InfluenzaA__ADY17668

SEQ ID NO: 52434 - RNA, 1410 nt, Artificial Sequence; identical to SEQ ID NO: 49595
  derived and/or modified CDS sequence (wt) from neuraminidase__InfluenzaA__ADY17679

SEQ ID NO: 52435 - RNA, 1410 nt, Artificial Sequence; identical to SEQ ID NO: 49595
  derived and/or modified CDS sequence (wt) from neuraminidase__InfluenzaA__ADY17690

SEQ ID NO: 52436 - RNA, 1410 nt, Artificial Sequence; identical to SEQ ID NO: 49595
  derived and/or modified CDS sequence (wt) from neuraminidase__InfluenzaA__ADY17701

SEQ ID NO: 52437 - RNA, 1410 nt, Artificial Sequence; identical to SEQ ID NO: 48949
  derived and/or modified CDS sequence (wt) from neuraminidase__InfluenzaA__ADY38722

SEQ ID NO: 52438 - RNA, 1410 nt, Artificial Sequence; identical to SEQ ID NO: 50499
  derived and/or modified CDS sequence (wt) from neuraminidase__InfluenzaA__ADY38723

SEQ ID NO: 52439 - RNA, 1410 nt, Artificial Sequence; identical to SEQ ID NO: 49197
  derived and/or modified CDS sequence (wt) from neuraminidase__InfluenzaA__ADY38734

SEQ ID NO: 52440 - RNA, 1410 nt, Artificial Sequence
  derived and/or modified CDS sequence (wt) from neuraminidase__InfluenzaA__ADY38753
augaauccaaaccaaaagauaauaaccauugguucggucuguaugacaauuggaauggcuaacuuaauauuacaaauuggaaacauaaucucaauauggauuagccacucaauucaacuugggaaucaaaaucagauugaaacaugcaaucaaagcgucauuacuuaugaaaacaacacuuggguaaaucagacauauguuaacaucagcaacaccaacuuugcugcuggacagucagugguuuccgugaaauuagcgggcaauuccucucucugcccuguuaguggaugggcuauauacaguaaagacaacaguauaagaaucgguuccaagggggauguguuugucauaagagaaccauucauaucaugcucccccuuggaaugcagaaccuucuucuugacucaaggggccuugcuaaaugacaaacauuccaauggaaccauuaaagacaggagcucauaucgaacccuaaugagcuguccuauuggugaaguucccucuccauacaacucaagauuugagucagucgcuuggucagcaagugcuugucaugauggcaucaauuggcuaacaauuggaauuucuggcccagacaauggggcaguggcuguguuaaaguacaacggcauaauaacagacacuaucaagaguuggagaaacaauauauugagaacacaagagucugaaugugcauguguaaaugguucuuguuuuacuguaaugaccgauggaccaagugauggacaggccucauacaagaucuucagaauagaaaagggaaagauagucaaaucagucgaaaugaaugccccuaauuaucacuaugaggaaugcuccuguuauccugauucuagugaaaucacaugugugugcagggauaacuggcauggcucgaaucgaccgugggugucuuucaaccagaaucuggaauaucagauaggauacauaugcagugggauuuucggagacaauccacgcccuaaugauaagacaggcaguugugguccaguaucgucuaauggagcaaauggaguaaaaggauuuucauucaaauacggcaaugguguuuggauagggagaacuaaaagcauuaguucaagaaacgguuuugagaugauuugggauccgaacggauggacugggacagacaauaacuucucaauaaagcaagauaucguaggaauaaaugaguggucaggauauagcgggaguuuuguucagcauccagaacuaacagggcuggauuguauaagaccuugcuucuggguugaacuaaucagagggcgacccaaagagaacacaaucuggacuagcgggagcagcauauccuuuugugguguaaacagugacacuguggguuggucuuggccagacggugcugaguugccauuuaccauugacaaguaa

SEQ ID NO: 52441 - RNA, 1410 nt, Artificial Sequence; identical to SEQ ID NO: 49794
  derived and/or modified CDS sequence (wt) from neuraminidase__InfluenzaA__ADY38763

SEQ ID NO: 52442 - RNA, 1410 nt, Artificial Sequence; identical to SEQ ID NO: 48750
  derived and/or modified CDS sequence (wt) from neuraminidase__InfluenzaA__ADZ04600

SEQ ID NO: 52443 - RNA, 1410 nt, Artificial Sequence; identical to SEQ ID NO: 48750
  derived and/or modified CDS sequence (wt) from neuraminidase__InfluenzaA__ADZ04610

SEQ ID NO: 52444 - RNA, 1410 nt, Artificial Sequence; identical to SEQ ID NO: 48750
  derived and/or modified CDS sequence (wt) from neuraminidase__InfluenzaA__ADZ04693

SEQ ID NO: 52445 - RNA, 1410 nt, Artificial Sequence; identical to SEQ ID NO: 48750
  derived and/or modified CDS sequence (wt) from neuraminidase__InfluenzaA__ADZ04701

SEQ ID NO: 52446 - RNA, 1410 nt, Artificial Sequence; identical to SEQ ID NO: 48750
  derived and/or modified CDS sequence (wt) from neuraminidase__InfluenzaA__ADZ04711

SEQ ID NO: 52447 - RNA, 1410 nt, Artificial Sequence
  derived and/or modified CDS sequence (wt) from neuraminidase__InfluenzaA__ADZ05393
augaauccaaaccaaaagauaauaaccauugauucggucuguaugacaauuggaauggcuaacuuaauauuacaaauuggaaacauaaucucaauauggauuagccacucaauucaacuugggaaucaaaaucagauugaaacaugcaaucaaagcgucauuacuuaugaaaacaacacuuggguaaaucagacauauguuaacaucagcaacaccaacuuugcugcuggacagucagugguuuccgugaaauuagcgggcaauuccucucucugcccuguuaguggaugggcuauauacaguaaagacaacaguguaagaaucgguuccaagggggauguguuugucauaagggaaccauucauaucaugcucccccuuggaaugcagaaccuucuucuugacucaaggggccuugcuaaaugacaaacauuccaauggaaccauuaaagacaggagcccauaucgaacccuaaugagcuguccuauuggugaaguucccucuccauacaacucaagauuugagucagucgcuuggucagcaagugcuugucaugauggcaucaauuggcuaacaauuggaauuucuggcccagacaauggggcaguggcuguguuaaaguacaacggcauaauaacagacacuaucaagaguuggagaaacaauauauugagaacacaagagucugaaugugcauguguaaaugguucuugcuuuacuguaaugaccgauggaccaaguaauggacaggccucauacaagaucuuuagaauagaaaagggaaagauagucaaaucagucgaaaugaaugccccuaauuaucacuaugaggaaugcuccuguuauccugauucuagugaaaucacaugugugugcagggauaacuggcauggcucgaaucgaccgugggugucuuucaaccagaaucuggaauaucagauaggauacauaugcagugggauuuucggagacaauccacgcccuaaugauaagacaggcaguugugguccaguaucgucuaauggagcaaauggaguaaaaggauuuucauucaaauacggcaaugguguuuggauagggagaacuaaaagcauuaguucaagaaacgguuuugagaugauuugggauccgaacggauggacugggacagacaauaacuucucaauaaagcaagauaucguaggaauaaaugaguggucaggauauagcgggaguuuuguucagcauccagaacuaacagggcuggauuguauaagaccuugcuucuggguugaacuaaucagagggcgacccaaagagaacacaaucuggacuagcgggagcagcauauccuuuugugguguaaacagugacacuguggguuggucuuggccagacggugcugaguugccauuuaccauugacaaguaa

SEQ ID NO: 52448 - RNA, 1413 nt, Artificial Sequence
  derived and/or modified CDS sequence (wt) from neuraminidase__InfluenzaA__ADZ05837
augaacccaaaucaaaagauaauaaccauuggaucaaucaguauagcaaucggaauaauuagucuaauguuacaaauaggaaauauuauuucaauaugggcuagucacucaauccaaacuggaagucaaaacaacacuggaauaugcaaccaaagaaucaucacaugugaaaacagcaccugggugaaucacacauauguuaauauuaacaacacuaauguuguugcuggagaggacaaaacuucagugacauuggccggcaauucaucucuuuguucuaucaguggaugggcuauauacacaaaagacaacagcauaagaauuggcuccaaaggagauguuuuugucauaagagaaccuuucauaucauguucucacuuggaaugcagaaccuuuuuucugacccaaggcgcucuauuaaaugacaaacauucaaaugggaccguaaaggacagaaguccuuauagggccuugaugagcuguccucuaggugaagcuccguccccauacaauucaaaguucgaaucaguugcauggucagcaagcgcaugccaugauggcaugggcugguuaacaaucggaauuucugguccagacaauggagcuguggcuguacuaaaauacaacggaauaauaacugggaccauaaaaaguuggaaaaagcaaauauuaagaacacaagagucugaaugugucuguaugaacgggucauguuucaccauaaugaccgauggcccgaguaauaaggccgccucguacaaaauuuucaagaucgaaaaggggaagguuacuaaaucaauagaguugaaugcacccaauuuuuauuaugaggaaugcuccuguuacccagacacuggcauagugauguguguaugcagggacaacuggcaugguucaaaucgaccuugggugucuuuuaaucaaaacuuggauuaucaaauaggauacaucugcaguggaguguuuggugacaauccgcgucccgaagauggagagggcagcugcaauccagugacuguugauggagcaaacggaguaaaaggguuuucauacaaauaugguaaugguguuuggauaggaaggaccaaaaguaacagacuuagaaagggguuugagaugauuugggacccuaauggauggacaaauaccgacagugauuucucagugaaacaggauguuguagcaacaacugauuggucaggguacagcggaaguuucguccaacauccugaguuaacaggauuggacuguauaagaccuugcuucuggguugaguuagucagagggcugccuagagaaaauacaacaaucuggacuagugggagcagcauuucuuuuuguggcguuaauagugauacugcaaacuggucuuggccagacggugcugaguugccguucaccaucgacaaguag

SEQ ID NO: 52449 - RNA, 1413 nt, Artificial Sequence; identical to SEQ ID NO: 50945
  derived and/or modified CDS sequence (wt) from neuraminidase__InfluenzaA__ADZ05848

SEQ ID NO: 52450 - RNA, 1410 nt, Artificial Sequence; identical to SEQ ID NO: 50944
  derived and/or modified CDS sequence (wt) from neuraminidase__InfluenzaA__ADZ05858

SEQ ID NO: 52451 - RNA, 1410 nt, Artificial Sequence; identical to SEQ ID NO: 48814
  derived and/or modified CDS sequence (wt) from neuraminidase__InfluenzaA__ADZ47841

SEQ ID NO: 52452 - RNA, 1410 nt, Artificial Sequence; identical to SEQ ID NO: 48750
  derived and/or modified CDS sequence (wt) from neuraminidase__InfluenzaA__ADZ47851

SEQ ID NO: 52453 - RNA, 1410 nt, Artificial Sequence
  derived and/or modified CDS sequence (wt) from neuraminidase__InfluenzaA__ADZ47861
augaauccaaaccaaaagauaauaaccauugguucggucuguaugacaauuggauuggcuaacuuaauauuacaaauuggaaacauaaucucaauauggauuagccacucaauucaacuuggaaaucaaaaucagauugaaacaugcaaucaaagcgucauuacuuaugaaaacaacacuuggguaaaucagacauauguuaacaucagcaacaucaacuuugcugcuggacagucagugguuuccgugaaauuagcgggcaauuccucucucugcccuguuaguggaugggcuauauacaguaaagacaacaguguaagaauugguuccaagggggauguguuugucauaagggaaccauucauaucaugcucccccuuggaaugcagaaccuucuucuugacucaaggggccuugcuaaaugacaaacauuccaauggaaccauuaaagacaggagcccauaucgaacccuaaugagcuguccuauuggugaaguucccucuccauacaacucaagauuugagucagucgcuuggucagcaagugcuugucaugauggcaucaauuggcuaacaauuggaauuucuggcccagacaauggggcaguggcuguguuaaaguacaacggcauaauaacagacacuaucaagaguuggagaaacaauauauugagaacacaagagucugaaugugcauguguaaaugguucuugcuuuacuguaaugaccgauggaccaagugauggacaggccucauacaagaucuucagaauagaaaagggaaagauagucaaaucagucgaaaugaaugccccuaauuaucacuaugaggaaugcuccuguuauccugauucuagugaaaucacaugugugugcagggauaacuggcauggcucgaaucgaccgugggugucuuucaaccagaaucuggaauaucggauaggauacauaugcagugggauuuucggagacaauccacgcccuaaugauaagacaggcaguugugguccaguaucgucuaauggagcaaauggaguaaaaggauuuucauucaaauacggcaaugguguuuggauagggagaacuaaaagcauuaguucaagaaacgguuuugagaugauuugggauccgaacggauggacugggacagacaaaaacuucucaauaaagcaagauaucguaggaauaaaugaguggucaggauauagcgggaguuuuguucagcauccagaacuaacagggcuggauuguauaagaccuugcuucuggguugaacuaaucagagggcgacccaaagagaacacaaucuggacuagcgggagcagcauauccuuuugugguguaaacagugacacuguggguuggucuuggccagacggugcugaguugccauuuaccauugacaaguaa

SEQ ID NO: 52454 - RNA, 1413 nt, Artificial Sequence
  derived and/or modified CDS sequence (wt) from neuraminidase__InfluenzaA__ADZ53101
augaacccaaaucaaaagauaauaaccauuggaucaaucaguauagcaaucgggauaauuagucuaauguugcaaauaggaaauauuauuucaauaugggcuagucacucaauccaaacuggaagucaaaacaacacuggaauaugcaaccaaagaaucaucacauaugaaaacagcaccugggugaaucacacauauguuaauauuaacaacacuaaaguuguugcuggagaggacaaaacuucagugacauuggccggcaauucaucucuuuguucuaucaguggaugggcuauaaacacaaaagacaacagcauaagaauuggcuccaaaggagauguuuuugucauaagagaaccuuucauaucauguucucacuuggaaugcagaaccuuuuuucugacccaaggcgcucuauuaaaugacaaacauucaaaugggaccguaaaggacagaaguccuuauagggccuuaaugagcuguccucuaggugaagcuccguccccauacaauucaaaguucgaaucaguugcauggucagcaagcgcaugccaugauggcaugggcugguuaacaaucggaauuucugguccagacaauggagcuguggcuguacuaaaauacaacggaauaauaacuggaaccauaaaaaguuggaaaaagcaaauauuaagaacacaagagucugaaugugucuguaugaacgggucauguuuuaccauaaugaccgauggcccgaguaauaaggccgccucguacaaaauuuucaagaucgaaaaagggaagguuacuaaaucaauagaguugaaugcacccaauuuuuauuaugaggaaugcuccuguuacccagacacuggcauagugauguguguaugcagggacaacuggcaugguucaaaucgaccuugggugucuuuuaaucaaaacuuggauuaucaaauaggauacaucugcaguggaguguuuggugacaauccgcgucccgaagauggagagggcagcugcaauccagugacuguugauggagcaaacggaguaaaaggguuuucauacaaauaugguaaugggguuuggauaggaaggaccaaaaguaacagacuuagaaagggguuugagaugauuugggauccuaauggauggacaaauaccgacagugauuucucagugaaacaggauguuguagcaauaacugauuggucaggauacagcgggaguuucguccaacauccugaguuaacaggauuggacuguauaagaccuugcuucuggguugaguuagucagagggcugccuagagaaaauacaacaaucuggacuagugggagcagcauuucuuuuuguggcguuaauagugauacugcaaacuggucuuggccagacggugcugaguugccguucaccaucgacaaguag

SEQ ID NO: 52455 - RNA, 1410 nt, Artificial Sequence
  derived and/or modified CDS sequence (wt) from neuraminidase__InfluenzaA__ADZ53124
augaauccaaaccaaaagauaauaaccauugguucggucuguaugacaauuggaauggcuaacuuaauauuacaaauuggaaacauaaucucaauauggauuagccacucaauucaacuugggaaucaaaaucagauugaaacaugcaaucaaagcgucauuacuuaugaaaacaacacuuggguaaaucagacauauguuaacaucagcaacaccaacuuugcugcuggacagucagugguuuccgugaaauuagcgggcaauuccucucucugcccuguuaguggaugggcuauauacaguaaagacaacaguauaagaaucgguuccaagggggauguguuugucauaagggaaccauucauaucaugcucccccuuggaaugcagaaccuucuucuugacucaaggggccuugcuaaaugacaaacauuccaauggaaccauuaaagacaggagcccauaucgaacccuaaugagcuguccuauuggugaaguucccucuccauacaacucaagauuugagucagucgcuuggucagcaagugcuugucaugauggcaucaauuggcuaacaauuggaauuucuggcccagacaauggggcaguggcuguguuaaaguacaacggcauaauaacagacacuaucaagaguuggagaaacaauauauugagaacacaagagucugaaugugcauguguaaaugguucuugcuuuacuguaaugaccgauggaccaagugauggacaggccucauacaagaucuucagaauagaaaagggaaagauagucaaaucagucgaaaugaaugccccuaauuauuacuaugaggaaugcuccuguuauccugauucuagugaaaucacaugugugugcagggauaacuggcauggcucgaaucgaccgugggugucuuucaaccagaaucuggaauaucagauaggauacauaugcagugggauuuucggagacaauccacgcccuaaugauaagacaggcaguugugguccaguaucgucuaauggagcaaauggaguaaaaggauuuucauucaaauacggcaaugguguuuggauagggagaacuaaaagcauuaguucaagaaacgguuuugagaugauuugggauccgaacggauggacugggacagacaaugacuucucaauaaagcaagauaucguaggaauaaaugaguggucaggauauagcgggaguuuuguucagcauccagaacuaacagggcuggauuguauaagaccuugcuucuggguugaauuaaucagagggcgacccaaagagaacacaaucuggacuagcgggagcagcauauccuuuugugguguaaacagugacacuguggguuggucuuggccagacggugcugaguugccauuuaccauugacaaguaa

SEQ ID NO: 52456 - RNA, 1410 nt, Artificial Sequence; identical to SEQ ID NO: 48750
  derived and/or modified CDS sequence (wt) from neuraminidase__InfluenzaA__ADZ53130

SEQ ID NO: 52457 - RNA, 1410 nt, Artificial Sequence; identical to SEQ ID NO: 48749
  derived and/or modified CDS sequence (wt) from neuraminidase__InfluenzaA__ADZ53132

SEQ ID NO: 52458 - RNA, 1410 nt, Artificial Sequence; identical to SEQ ID NO: 48750
  derived and/or modified CDS sequence (wt) from neuraminidase__InfluenzaA__ADZ53134

SEQ ID NO: 52459 - RNA, 1410 nt, Artificial Sequence; identical to SEQ ID NO: 48750
  derived and/or modified CDS sequence (wt) from neuraminidase__InfluenzaA__ADZ53136

SEQ ID NO: 52460 - RNA, 1410 nt, Artificial Sequence
  derived and/or modified CDS sequence (wt) from neuraminidase__InfluenzaA__ADZ53137
augaauccaaaccaaaagauaauaaccauugguucggucuguaugacaauuggaauggcuaacuuaauauuacaaauuggaaacauaaucucaauauggauuagccacucaauucaacuugggaaucaaaaucagauugaaacaugcaaucaaagcgucauuacuuaugaaaacaacacuuggguaaaucagacauauguuaacaucagcaacaccaacuuugcugcuggacagucagugguuuccgugaaauuagcgggcaauuccucucucugcccuguuaguggaugggcuauauacaguaaagacaacaguauaagaaucgguuccaagggggauguguuugucauaagggaaccauucauaucaugcucccccuuggaaugcagaaccuucuucuugacucaaggggccuugcuaaaugacaaacauuccaauggaaccauuaaagacaggagcccauaucgaacccuaaugagcuguccuauuggugaaguucccucuccauacaacucaagauuugagucagucgcuuggucagcaagugcuugucaugauggcaucaauuggcuaacaauuggaauuucuggcccagacaauggggcaguggcuguguuaaaguacaacggcauaauaacagacacuaucaagaguuggagaaacaauauauugagaacacaagagucugaaugugcauguguaaaugguucuugcuuuacuguaaugaccgauggaccaagugauggacaggccucauacaagaucuucagaauagaaaagggaaagauagucaaaucagucgaaaugaaugccccuaauuauuacuaugaggaaugcuccuguuauccugauucuagugaaaucacauguguaugcagggauaacuggcauggcucgaaucgaccgugggugucuuucaaccagaaucuggaauaucagauaggauacauaugcagugggauuuucggagacaauccacgcccuaaugauaagacaggcaguugugguccaguaucgucuaauggagcaaauggaguaaaaggauuuucauucaaauacggcaaugguguuuggauagggagaacuaaaagcauuaguucaagaaacgguuuugagaugauuugggauccgaacggauggacugggacagacaauaacuucucaauaaagcaagauaucguaggaauaaaugaguggucaggauauagcgggaguuuuguucagcauccagaacuaacagggcuggauuguauaagaccuugcuucuggguugaacuaaucagagggcgacccaaagagaacacaaucuggacuagcgggagcagcauauccuuuugugguguaaacagugacacuguggguuggucuuggccagacggugcugaguugccauuuaccauugacaaguaa

SEQ ID NO: 52461 - RNA, 1410 nt, Artificial Sequence; identical to SEQ ID NO: 48750
  derived and/or modified CDS sequence (wt) from neuraminidase__InfluenzaA__ADZ53139

SEQ ID NO: 52462 - RNA, 1410 nt, Artificial Sequence
  derived and/or modified CDS sequence (wt) from neuraminidase__InfluenzaA__ADZ53141
augaauccaaaccaaaagauaauaaccauugguucggucuguaugacaauuggaauggcuaacuuaauauuacaaauuggaaacauaaucucaauauggauuagccacucaauucaacuugggaaucaaaaucagauugaaacaugcaaucaaagcgucauuacuuaugaaaacaacacuuggguaaaucagacauauguuaacaucagcaacaccaacuuugcugcuggacagucagugguuuccgugaaauuagcgggcaauuccucucucugcccuguuaguggaugggcuauauacaguaaagacaacaguauaagaaucgguuccaagggggauguguuugucauaagggaaccauucauaucaugcucccccuuggaaugcagaaccuucuucuugacucaaggggccuugcuaaaugacaaacauuccaauggaaccauuaaagacaggagcccauaucgaacccuaaugagcuguccuauuggugaaguucccucuccauacaacucaagauuugagucagucgcuuggucagcaagugcuugucaugauggcaucaauuggcuaacaauuggaauuucuggcccagacaauggggcaguggcuguguuaaaguacaacggcauaauaacagacacuaucaagaguuggagaaacaauauauugagaacacaagagucugaaugugcauguguaaaugguucuugcuuuacuguaaugaccgauggaccaagugauggacaggccucauacaagaucuucagaauagaaaagggaaagauagucaaaucagucgaaaugaaugccccuaauuaucacuaugaggaaugcuccuguuauccugauucuagugaaaucacaugugugugcagggauaacuggcauggcucgaaucgaccgugggugucuuucaaccagaaucuggaauaucagauaggauacauaugcagugggauuuucggagacaauccacgcccuaaugauaagacaggcaguugugguccaguaucgucuaauggagcaaauggaguaaaaggauuuucauucaaauacggcaaugguguuuggauagggagaacuaaaagcauuaguucaagaaacgguuuugagaugauuugggauccgaacggauggacugggacagacaaugacuucucaauaaagcaagauaucguaggaauaaaugaguggucaggauauagcgggaguuuuguucagcauucagaacuaacagggcuggauuguauaagaccuugcuucuggguugaauuaaucagagggcgacccaaagagaacacaaucuggacuagcgggagcagcauauccuuuugugguguaaacagugacacuguggguuggucuuggccagacggugcugaguugccauuuaccauugacaaguaa

SEQ ID NO: 52463 - RNA, 1410 nt, Artificial Sequence; identical to SEQ ID NO: 51225
  derived and/or modified CDS sequence (wt) from neuraminidase__InfluenzaA__AEA03712

SEQ ID NO: 52464 - RNA, 1410 nt, Artificial Sequence; identical to SEQ ID NO: 48611
  derived and/or modified CDS sequence (wt) from neuraminidase__InfluenzaA__AEA03722

SEQ ID NO: 52465 - RNA, 1410 nt, Artificial Sequence
  derived and/or modified CDS sequence (wt) from neuraminidase__InfluenzaA__AEA03744
augaauccaaaucaaaagauaauaacgauuggcucuguuucucucaccauuuccacaauaugcuucuucaugcaaauugccaucuugauaacuacuguaacauugcauuucaagcaauaugaauucaacucccccccaaacaaccaagugaugcugugugaaccaacaauaauagaaagaaacauaacagagauaguguaucugaccaacaccaccauagagaaggaaauaugccccaaacuagcagaauacagaaauuggucaaagccgcaaugugacauuacaggauuugcaccuuuuucuaaggacaauucgauuaggcuuuccgcugguggggacaucugggugacaagagaaccuuaugugucaugcgauccugacaaguguuaucaauuugcccuuggacagggaacaacacuaaacaacgugcauucaaauaacacaguacgugauaggaccccuuaucggacccuauugaugaaugaguuagguguuccuuuucaucuggggaccaagcaagugugcauagcaugguccagcucaaguugucacgauggaaaagcauggcugcauguuuguauaacgggggaugauaaaaaugcaacugcuagcuucauuuacaaugggaggcuuguagauaguguuguuucaugguccaaagaaauccucaggacccaggagucagaaugcguuuguaucaauggaacuuguacaguaguaaugacugaugggagugcuucaggaaaagcugauacuaaaauacuauucauugaggaggggaaaaucguucauacuagcacauugucaggaagugcucagcaugucgaggagugcuccugcuauccucgauauccuggugucagaugugucugcagagacaacuggaaaggcuccaauaggcccaucguagauauaaacauaaaggaucauagcauuguuuccaguuauguguguucaggacuuguuggagacacacccagaaaaaacgacagcuccagcaguagccauuguuuggauccuaacaaugaagaaggcggucauggagugaaaggcugggccuuugaugauggaaaugacguguggaugggaagaacgaucagcgagaagucacgcuuaggguaugaaaccuucaaagucauugaaggcugguccaacccuaaguccaaauugcagauaaauaggcaagucauaguugacagagguaauagguccgguuauucugguauuuucucuguugaaggcaaaagcugcaucaaucggugcuuuuauguggaguugauaaggggaagaaaagaggaaacugaagucuuguggaccucaaacaguauuguuguguuuuguggcaccucagguacauauggaacaggcucauggccugauggggcggacaucaaucucaugccuauauaa

SEQ ID NO: 52466 - RNA, 1410 nt, Artificial Sequence
  derived and/or modified CDS sequence (wt) from neuraminidase__InfluenzaA__AEA03755
augaauccaaaucaaaagauaauaacgauuggcucuguuucucucaccauuuccacaauaugcuucuucaugcaaauugccaucuugauaacuacuguaacauugcauuucaagcaauaugaauucaacucccccccaaacaaccaagugaugcugugugaaccaacaauaauagaaagaaacauaacagagauaguguaucugaccaacaccaccauagagaaggaaauaugccccaaacuagcagaauacagaaauuggucaaagccgcaaugugacauuacaggauuugcaccuuuuucuaaggacaauucgauuaggcuuuccgcugguggggacaucugggugacaagagaaccuuaugugucaugcgauccugacaaguguuaucaauuugcccuuggacagggaacaacacuaaacaacgugcauucaaauaacacaguacgugguaggaccccuuaucggacccuauugaugaaugaguuagguguuccuuuucaucuggggaccaagcaagugugcauagcaugguccagcucaaguugucacgauggaaaagcauggcugcauguuuguauaacgggggaugauaaaaaugcaacugcuagcuucaucuacaaugggaggcuuguagauaguguuguuucaugguccaaagaaauccucaggacccaggagucagaaugcguuuguaucaauggaacuuguacaguaguaaugacugaugggagugcuucaggaaaagcugauacuaaaauacuauucauugaggaggggaaaaucguucauacuagcacauugucaggaagugcucagcaugucgaggagugcuccugcuauccucgauauccuggugucagaugugucugcagagacaacuggaaaggcuccaauaggcccaucguagauauaaacauaaaggaucauagcauuguuuccaguuauguguguucaggacuuguuggagacacacccagaaaaaacgacagcuccagcaguagccauuguuuggauccuaacaaugaagaagguggucauggagugaaaggcugggccuuugaugauggaaaugacguguggaugggaagaacgaucagcgagaagucacgcuuaggguaugaaaccuucaaagucauugaaggcugguccaacccuaaguccaaauugcagauaaauaggcaagucauaguugacagagguaauagguccgguuauucugguauuuucucuguugaaggcaaaaguugcaucaaucggugcuuuuauguggaguugauaaggggaagaaaagaggaaacugaagucuuguggaccucaaacaguauuguuguguuuuguggcaccucagguacauauggaacaggcucauggccugauggggcggacaucaaucucaugccuauauaa

SEQ ID NO: 52467 - RNA, 1410 nt, Artificial Sequence
  derived and/or modified CDS sequence (wt) from neuraminidase__InfluenzaA__AEA03766
augaauccaaaucaaaagauaauaacgauuggcucuguuucucucaccauuuccacaauaugcuucuucaugcaaauugccaucuugauaacuacuguaacauugcauuucaagcaauaugaauucaacucccccccaaacaaccaagugaugcugugugaaccaacaauaauagaaagaaacauaacagagauaguguaucugaccaacaccaccauagagaaggaaauaugccccaaacuagcagaauacagaaauuggucaaagccgcaaugugacauuacaggauuugcaccuuuuucuaaggacaauucgauuaggcuuuccgcugguggggacaucugggugacaagagaaccuuaugugucaugcgauccugacaaguguuaucaauuugcccuuggacagggaacaacacuaaacaacgugcauucaaauaacacaguacgugauaggaccccuuaucggacccuauugaugaaugaguuagguguuccuuuucaucuggggaccaagcaagugugcauagcaugguccagcucaaguugucacgauggaaaagcauggcugcauguuuguauaacgggggaugauaaaaaugcaacugcuagcuucauuuacaaugggaggcuuguagacaguguuguuucaugguccaaagaaauccucaggacccaggagucagaaugcguuuguaucaauggaacuuguacaguaguaaugacugaugggagugcuucaggaaaagcugauacuaaaauacuauucauugaggaggggaaaaucguucauacuagcacauugucaggaagugcucagcaugucgaggagugcuccugcuauccucgauauccuggugucagaugugucugcagagacaacuggaaaggcuccaauaggcccaucguagauauaaacauaaaggaucauagcauuguuuccaguuauguguguucaggacuuguuggagacacacccagaaaaaacgacagcuccagcaguagccauuguuuggaucccaacaaugaagaagguggucauggagugaaaggcugggccuuugaugauggaaaugacguguggaugggaagaacgaucagcgagaagucacgcuuaggguaugaaaccuucaaagucauugaaggcugguccaacccuaaguccaaauugcagauaaauaggcaagucauaguugacagagguaauagguccgguuauucugguauuuucucuguugaaggcaaaagcugcaucaaucggugcuuuuauguggaguugauaaggggaagaaaagaggaaacugaagucuuguggaccucaaacaguauuguuguguuuuguggcaccucagguacauauggaacaggcucauggccugauggggcggacaucaaucucaugccuauauaa

SEQ ID NO: 52468 - RNA, 1410 nt, Artificial Sequence; identical to SEQ ID NO: 51225
  derived and/or modified CDS sequence (wt) from neuraminidase__InfluenzaA__AEA03796

SEQ ID NO: 52469 - RNA, 1410 nt, Artificial Sequence; identical to SEQ ID NO: 48611
  derived and/or modified CDS sequence (wt) from neuraminidase__InfluenzaA__AEA03806

SEQ ID NO: 52470 - RNA, 1410 nt, Artificial Sequence
  derived and/or modified CDS sequence (wt) from neuraminidase__InfluenzaA__AEA03817
augaauccaaaucaaaagauaauaacgauuggcucuguuucucucaccauuuccacaauaugcuucuucaugcaaauugccaucuugauaacuacuguaacauugcauuucaagcaauaugaauucaacucccccccaaacaaccaagugaugcugugugaaccaacaauaauagaaagaaacauaacagagauaguguaucugaccaacaccaccauagagaaggaaauaugccccaaacuagcagaauacagaaauuggucaaagccgcaaugugacauuacaggauuugcaccuuuuucuaaggacaauucgauuaggcuuuccgcugguggggacaucugggugacaagagaaccuuaugugucaugcgauccugacagguguuaucaauuugcccuuggacagggaacaacacuaaacaacgugcauucaaauaacacaguacgugauaggaccccuuaucggacccuauugaugaaugaguuagguguuccuuuucaucuggggaccaagcaagugugcauagcaugguccagcucaaguugucacgauggaaaagcauggcugcauguuuguauaacgggggaugauaaaaaugcaacugcuagcuucauuuacaaugggaggcuuguagauaguguuguuucaugguccaaagaaauccucaggacccaggagucagaaugcguuuguaucaauggaacuuguacaguaguaaugacugaugggagugcuucaggaaaagcugauacuaaaauacuauucauugaggaggggaaaaucguucauacuagcacauugucaggaagugcucagcaugucgaggagugcuccugcuauccucgauauccuggugucagaugugucugcagagacaacuggaaaggcuccaauaggcccaucguagauauaaacauaaaggaucauagcauuguuuccaguuaugugugcucaggacuuguuggagacacacccagaaaaaacgacagcuccagcaguagccauuguuuggauccuaacaaugaagaagguggucauggagugaaaggcugggccuuugaugauggaaaugacguguggaugggaagaacgaucagcgagaagucacgcuuaggguaugaaaccuucaaagucauugaaggcugguccaacccuaaguccaaauugcagauaaauaggcaagucauaguugacagagguaauagguccgguuauucugguauuuucucuguugaaggcaaaagcugcaucaaucggugcuuuuauguggaguugauaaggggaagaaaagaggaaacugaagucuuguggaccucaaacaguauuguuguguuuuguggcaccucagguacauauggaacaggcucauggccugauggggcggacaucaaucucaugccuauauaa

SEQ ID NO: 52471 - RNA, 1410 nt, Artificial Sequence; identical to SEQ ID NO: 51225
  derived and/or modified CDS sequence (wt) from neuraminidase__InfluenzaA__AEA03828

SEQ ID NO: 52472 - RNA, 1410 nt, Artificial Sequence; identical to SEQ ID NO: 51225
  derived and/or modified CDS sequence (wt) from neuraminidase__InfluenzaA__AEA03838

SEQ ID NO: 52473 - RNA, 1410 nt, Artificial Sequence
  derived and/or modified CDS sequence (wt) from neuraminidase__InfluenzaA__AEA03849
augaauccaaaucaaaagauaauaacgauuggcucuguuucucucaccauuuccacaauaugcuucuucaugcaaauugccaucuugauaacuacuguaacauugcauuucaagcaauaugaauucaacucccccccaaacaaccaagugaugcugugugaaccaacaauaauagaaagaaacauaacagagauaguguaucugaccaacaccaccauagagaaggaaauaugccccaaacuagcagaauacagaaauuggucaaagccgcaaugugacauuacaggauuugcaccuuuuucuaaggacaauucgauuaggcuuuccgcugguggggacaucugggugacaagagaaccuuaugugucaugcgauccugacaaguguuaucaauuugcccuuggacagggaacaacacuaaacaacgugcauucaaauaacacaguacgugauaggaccccuuaucggacccuauugaugaaugaguuagguguuccuuuucaucuggggaccaagcaagugugcauagcaugguccagcucaaguugucacgauggaaaagcauggcugcauguuuguauaacgggggaugauaaaaaugcaacugcuagcuucauuuacaaugggaggcuuguagauaguguuguuucaugguccaaagaaauccucaggacccaggagucagaaugcguuuguaucaauggaacuuguacaguaguaaugacugaugggagugcuucaggaaaagcugauacuaaaauacuauucauugaggaggggaaaaucguucauacuagcacauugucaggaagugcucagcaugucgaggagugcuccugcuauccucgauauccuggugucagaugugucugcagagacaacuggaaaggcuccaauaggcccaucguagauauaaacauaaaggaucauagcauuguuuccaguuauguguguucaggacuuguuggagacacacccagaaaaaacgacagcuccagcaguagccauuguuuggauccuaacaaugaagaagguggucauggagugaaaggcugggccuuugaugauggaaaugacguguggaugggaaggacgaucagcgagaagucacgcuuaggguaugaaaccuucaaagucauugaaggcugguccaacccuaaguccaaauugcagauaaauaggcaagucauaguugacagagguaauagguccgguuauucugguauuuucucuguugaaggcaaaagcugcaucaaucggugcuuuuauguggaguugauaaggggaagaaaagaggaaacugaugucuuguggaccucaaacaguauuguuguguuuuguggcaccucagguacauauggaacaggcucauggccugauggggcggacaucaaucucaugccuauauaa

SEQ ID NO: 52474 - RNA, 1410 nt, Artificial Sequence; identical to SEQ ID NO: 48611
  derived and/or modified CDS sequence (wt) from neuraminidase__InfluenzaA__AEA03860

SEQ ID NO: 52475 - RNA, 1410 nt, Artificial Sequence
  derived and/or modified CDS sequence (wt) from neuraminidase__InfluenzaA__AEA03871
augaauccaaaucaaaagauaauaacgauuggcucuguuucucucaccauuuccacaauaugcuucuucaugcaaauugccaucuugauaacuacuguaacauugcauuucaagcaauaugaauucaacucccccccaaacaaccaagugaugcugugugaaccaacaauaauagaaagaaacauaacagagauaguguaucugaccaacaccaccauagagaaggaaauaugccccaaacuagcugaauacagaaauuggucaaagccgcaaugugacauuacaggauuugcaccuuuuucuaaggacaauucgauuaggcuuuccgcugguggggacaucugggugacaagagaaccuuaugugucaugcgauccugacaaguguuaucaauuugcccuuggacagggaacaacacuaaacaacgugcauucaaauaacacaguacgugauaggaccccuuaucggacccuauugaugaaugaguuagguguuccuuuucaucuggggaccaagcaagugugcauagcaugguccagcucaaguugucacgauggaaaagcauggcugcauguuuguauaacgggggaugauaaaaaugcaacugcuagcuucauuuacaaugggaggcuuguagauaguguuguuucaugguccaaagaaauccucaggacccaggagucagaaugcguuuguaucaauggaacuuguacaguaguaauaacugaugggagugcuucaggaaaagcugauacuaaaauacuauucauugaggaggggaaaaucguucauacuagcacauugucaggaagugcucagcaugucgaggagugcuccugcuauccucgauauccuggugucagaugugucugcagagacaacuggaaaggcuccaauaggcccaucguagauauaaacauaaaggaucauagcauuguuuccaguuauguguguucaggacuuguuggagacacacccagaaaaaacgacagcuccagcaguagccauuguuuggauccuaacaaugaagaagguggucauggagugaaaggcugggccuuugaugauggaaaugacguguggaugggaagaacgaucagcgagaagucacgcuuaggguaugaaaccuucaaagucauugaaggcugguccaacccuaaguccaaauugcagauaaauaggcaagucauaguugacagagguaauagguccgguuauucugguauuuucucuguugaaggcaaaagcugcaucaaucggugcuuuuauguggaguugauaaggggaagaaaagaggaaacugaagucuuguggaccucaaacaguauuguuguguuuuguggcaccucagguacauauggaacaggcucauggccugauggggcggacaucaaucucaugccuauauaa

SEQ ID NO: 52476 - RNA, 1410 nt, Artificial Sequence; identical to SEQ ID NO: 51225
  derived and/or modified CDS sequence (wt) from neuraminidase__InfluenzaA__AEA03879

SEQ ID NO: 52477 - RNA, 1410 nt, Artificial Sequence
  derived and/or modified CDS sequence (wt) from neuraminidase__InfluenzaA__AEA03889
augaauccaaaucaaaagauaauaacgauuggcucuguuucucucaccauuuccacaauaugcuucuucaugcaaauugccaucuugauaacuacuguaacauugcauuucaagcaauaugaauucaacucccccccaaacaaccaagugaugcugugugaaccaacaauaauagaaagaaacauaacagagauaguguaucugaccaacaccaccauagagaaggaaauaugccccaaacuagcugaauacagaaauuggucaaagccgcaaugugacauuacaggauuugcaccuuuuucuaaggacaauucgauuaggcuuuccgcugguggggacaucugggugacaagagaaccuuaugugucaugcgauccugacaaguguuaucaauuugcccuuggacagggaacaacacuaaacaacgugcauucaaauaacaaaguacgugauaggaccccuuaucggacccuauugaugaaugaguuagguguuccuuuucaucuggggaccaagcaagugugcauagcaugguccagcucaaguugucacgauggaaaagcauggcugcauguuuguauaacgggggaugauaaaaaugcaacugcuagcuucauuuacaaugggaggcuuguagauaguguuguuucaugguccaaagaaauccucaggacccaggagucagaaugcguuuguaucaauggaacuuguacaguaguaaugacugaugggagugcuucaggaaaagcugauacuaaaauacuauucauugaggaggggaaaaucguucauacuagcacauugucaggaagugcucagcaugucgaggagugcuccugcuauccucgauauccuggugucagaugugucugcagagacaacuggaaaggcuccaauaggcccaucguagauauaaacauaaaggaucauagcauuguuuccaguuauguguguucaggacuuguuggagacacacccagaaaaaacgacagcuccagcaguagccauuguuuggauccuaacaaugaagaagguggucauggagugaaaggcugggccuuugaugauggaaaugacguguggaugggaagaacgaucagcgagaagucacgcuuaggguaugaaaccuucaaagucauugaaggcugguccaacccuaaguccaaauugcagauaaauaggcaagucauaguugacagagguaauagguccgguuauucugguauuuucucuguugaaggcaaaagcugcaucaaucggugcuuuuauguggaguugauaaggggaagaaaagaggaaacugaagucuuguggaccucaaacaguauuguuguguuuuguggcaccucagguacauauggaacaggcucauggccugauggggcggacaucaaucucaugccuauauaa

SEQ ID NO: 52478 - RNA, 1410 nt, Artificial Sequence
  derived and/or modified CDS sequence (wt) from neuraminidase__InfluenzaA__AEA03898
augaauccaaaucaaaagauaauaacgauuggcucuguuucucucaccauuuccacaauaugcuucuucaugcaaauugccaucuugauaacuacuguaacauugcauuucaagcaauaugaauucaacucccccccaaacaaccaagugaugcugugugaaccaacaauaauagaaagaaacauaacagagauaguguaucugaccaacaccaccauagagaaggaaauaugccccaaacuagcagaauacagaaauuggucaaagccgcaaugugacauuacaggauuugcaccuuuuucuaaggacaauucgauuaggcuuuccgcugguggggacaucugggugacaagagaaccuuaugugucaugcgauccugacaaguguuaucaauuugcccuuggacagggaacaacacuaaacaacgugcauucaaauaacacaguacgugauaggaccccuuaucggacccuauugaugaaugaguuagguguuccuuuucaucuggggaccaagcaagugugcauagcaugguccagcucaaguugucacgauggaaaagcauggcugcauguuuguauaacgggggaugauaaaaaugcaacugcuagcuucauuuacaaugggaggcuuguagauaguguuguuucaugguccaaagaaauccucaggacccaggagucagaaugcguuuguaucaauggaacuuguacaguaguaaugacugaugggagugcuucaggaaaagcugauacuaaaauacuauucauugaggaggggaaaaucguucauacuagcacauugucaggaagugcucagcaugucgaggagugcuccugcuauccucgauauccuggugucagaugugucugcagagacaacuggaaaggcuccaauaggcccaucguagauauaaacauaaaggaucauagcauuguuuccaguuauguguguucaggacuuguuggagacacacccagaaaaagcgacagcuccagcaguagccauuguuuggauccuaacaaugaagaaggcggucauggagugaaaggcugggccuuugaugauggaaaugacguguggaugggaagaacgaucagcgagaagucacgcuuaggguaugaaaccuucaaagucauugaaggcugguccaacccuaaguccaaauugcagauaaauaggcaagucauaguugacagagguaauagguccgguuauucugguauuuucucuguugaaggcaaaagcugcaucaaucggugcuuuuauguggaguugauaaggggaagaaaagaggaaacugaagucuuguggaccucaaacaguauuguuguguuuuguggcaccucagguacauauggaacaggcucauggccugauggggcggacaucaaucucaugccuauauaa

SEQ ID NO: 52479 - RNA, 1410 nt, Artificial Sequence
  derived and/or modified CDS sequence (wt) from neuraminidase__InfluenzaA__AEA03909
augaauccaaaucaaaagauaauaacgauuggcucuguuucucucaccauuuccacaauaugcuucuucaugcaaauugccaucuugauaacuacuguaacauugcauuucaagcaauaugaauucaacucccccccaaacaaccaagugaugcugugugaaccaacaauaauagaaagaaacauaacagagauaguguaucugaccaacaccaccauagagaaggaaauaugccccaaacuagcugaauacagaaauuggucaaagccgcaaugugacauuacaggauuugcaccuuuuucuaaggacaauucgauuaggcuuuccgcugguggggacaucugggugacaagagaaccuuaugugucaugcgauccugacaaguguuaucaauuugcccuuggacagggaacaacacuaaacaacgugcauucaaauaacacaguacgugauaggaccccuuaucggacccuauugaugaaugaguuagguguuccuuuucaucuggggaccaagcaagugugcauagcaugguccagcucaaguugucacgauggaaaagcauggcugcauguuuguauaacgggggaugauaaaaaugcaacugcuagcuucauuuacaaugggaggcuuguagauaguguuguuucaugguccaaagaaauccucaggacccaggagucagaaugcguuuguaucaauggaacuuguacaguaguaaugacugaugggagugcuucaggaaaagcugauacuaaaauacuauucauugaggaggggaaaaucguucauacuagcacauugucaggaagugcucagcaugucgaggagugcuccugcuauccucgauauccuggugucagaugugucugcagagacaacuggaaaggcuccaauaggcccaucguagauauaaacauaaaggaucauagcauuguuuccaguuauguguguucaggacuuguuggagacacacccagaaaaaacgacagcuccagcaguagccauuguuuggauccuaacaaugaagaagguggucauggagugaaaggcugggccuuugaugauggaaaugacguguggaugggaagaacgaucagcgagaagucacgcuuaggguaugaaaccuucaaagucauugaaggcugguccaacccuaaguccaaauugcagauaaauaggcaagucauaguugacagagguaauagguccgguuauucugguauuuucucuguugaaggcaaaagcugcaucaaucggugcuuuuauguggaguugauaaggggaagaaaagaggaaacugaagucuuguggaccucaaacaguauuguuguguuuuguggcacgucagguacauauggaacaggcucauggccugauggggcggacaucaaucucaugccuauauaa

SEQ ID NO: 52480 - RNA, 1410 nt, Artificial Sequence
  derived and/or modified CDS sequence (wt) from neuraminidase__InfluenzaA__AEA03924
augaauccaaaucaaaagauaauaacgauuggcucuguuucucucaccauuuccacaauaugcuucuucaugcaaauugccaucuugauaacuacuguaacauugcauuucaagcaauaugaauucaacucccccccaaacaaccaagugaugcugugugaaccaacaauaauagaaagaaacauaacagagauaguguaucugaccaacaccaccauagagaaggaaauaugccccaaacuagcugaauacagaaauuggucaaagccgcaaugugacauuacaggauuugcaccuuuuucuaaggacaauucgauuaggcuuuccgcugguggggacaucugggugacaagagaaccuuaugugucaugcgauccugacaaguguuaucaauuugcccuuggacagggaacaacacuaaacaacgugcauucaaauaacacaguacgugauaggaccccuuaucggacccuauugaugaaugaguuagguguuccuuuucaucuggggaccaagcaagugugcauagcaugguccagcucaaguugucacgauggaaaagcauggcugcauguuuguauaacgggggaugauaaaaaugcaacugcuagcuucauuuacaaugggaggcuuguagauaguguuguuucaugguccaaagaaauccucaggacccaggagucagaaugcguuuguaucaauggaacuuguacaguaguaaugacugaugggagugcuucaggaaaagcugauacuaaaauacuauucauugaggaggggaaaaucauucauacuagcacauugucaggaagugcucagcaugucgaggagugcuccugcuauccucgauauccuggugucagaugugucugcagagacaacuggaaaggcuccaauaggcccaucguagauauaaacauaaaggaucauagcauuguuuccaguuauguguguucaggacuuguuggagacacacccagaaaaaacgacagcuccagcaguagccauuguuuggauccuaacaaugaagaagguggucauggagugaaaggcugggcauuugaugauggaaaugacguguggaugggaagaacgaucagcgagaagucacgcuuaggguaugaaaccuucaaagucauugaaggcugguccaacccuaaguccaaauugcagauaaauaggcaagucauaguugacagagguaauagguccgguuauucugguauuuucucuguugaaggcaaaagcugcaucaaucggugcuuuuauguggaguugauaaggggaagaaaagaggaaacugaagucuuguggaccucaaacaguauuguuguguuuuguggcaccucagguacauauggaacaggcucauggccugauggggcggacaucaaucucaugccuauauaa

SEQ ID NO: 52481 - RNA, 1410 nt, Artificial Sequence; identical to SEQ ID NO: 49263
  derived and/or modified CDS sequence (wt) from neuraminidase__InfluenzaA__AEA03935

SEQ ID NO: 52482 - RNA, 1410 nt, Artificial Sequence
  derived and/or modified CDS sequence (wt) from neuraminidase__InfluenzaA__AEA03946
augaauccaaaucaaaagauaauaacgauuggcucuguuucucucaccauuuccacaauaugcuucuucaugcaaauugccaucuugauaacuacuguaacauugcauuucaagcaauaugaauucaacucccccccaaacaaccaagugaugcugugugaaccaacaauaauagaaagaaacauaacagagauaguguaucugaccaacaccaccauagagaaggaaauaugccccaaacuagcagaauacagaaauuggucaaagccgcaaugugacauuacaggauuugcaccuuuuucuaaggacaauucgauuaggcuuuccgcugguggggacaucugggugacaagagaaccuuaugugucaugcgauccugacaaguguuaucaauuugcccuuggacagggaacaacacuaaacaacgugcauucaaauaacacaguacgugauaggaccccuuaucggacccuauugaugaaugaguuagguguuccuuuucaucuggggaccaagcaagugugcauagcaugguccagcucaaguugucacgauggaaaagcauggcugcauguuuguauaacgggggaugauaaaaaugcaacugcuagcuucauuuacaaugggaggcuuguagauaguguuguuucaugguccgaagaaauccucaggacccaggagucagaaugcguuuguaucaauggaacuuguacaguaguaaugacugaugggagugcuucaggaaaagcugauacuaaaauacuauucauugaggaggggaaaaucguucauacuagcacauugucaggaagugcucaacaugucgaggagugcuccugcuauccucgauauccuggugucagaugugucugcagagacaacuggaaaggcuccaauaggcccaucguagauauaaacauaaaggaucauagcauuguuuccaguuauguguguucaggacuuguuggagacacacccagaaaaaacgacagcuccagcaguagccauuguuuggauccuaacaaugaagaagguggucauggagugaaaggcugggccuuugaugauggaaaugacguguggaugggaagaacaaucagcgagaagucacgcuuaggguaugaaaccuucaaagucauugaaggcugguccaacccuaaguccaaauugcagauaaauaggcaagucauaguugacagagguaauagguccgguuauucugguauuuucucuguugaaggcaaaagcugcaucaaucggugcuuuuauguggaguugauaaggggaagaaaagaggaaacugaagucuuguggaccucaaacaguauuguuguguuuuguggcaccucagguacauauggaacaggcucauggccugauggggcggacaucaaucucaugccuauauaa

SEQ ID NO: 52483 - RNA, 1410 nt, Artificial Sequence
  derived and/or modified CDS sequence (wt) from neuraminidase__InfluenzaA__AEA03957
augaauccaaaucaaaagauaauaacgauuggcucuguuucucucaccauuuccacaauaugcuucuucaugcaaauugccaucuugauaacuacuguaacauugcauuucaagcaauaugaauucaacucccccccaaacaaccaagugaugcugugugaaccaacaauaauagaaagaaacauaacagagauaguguaucugaccaacaccaccauagagaaggaaauaugccccaaacuagcugaauacagaaauuggucaaagccgcaaugugacauuacaggauuugcaccuuuuucuaaggacaauucgauuaggcuuuccgcugguggggacaucugggugacaagagaaccuuaugugucaugcgauccugacaaguguuaucaauuugcccuuggacagggaacaacacuaaacaacgugcauucaaauaacacaguacgugauaggaccccuuaucggacccuauugaugaaugaguuagguguuccuuuucaucuggggaccaagcaagugugcauagcaugguccagcucaaguugucacgauggaaaagcauggcugcauguuuguauaacgggggaugauaaaaaugcaacugcuagcuucauuuacaaugggaggcuuguagauaguguuguuucaugguccaaagaaauccucaggacccaggagucagaaugcguuuguaucaauggaacuuguacaguaguaaugacugaugggagugcuucaggaaaagcugauacuaaaauacuauucauugaggaggggaaaaucguucauacuagcacauugucaggaagugcucagcaugucgaggagugcuccugcuauccucgauauccuggugucagaugugucugcagagacaacuggaaaggcuccaauaggcccaucguagauauaaacauaaaggaucauagcauuguuuccaguuauguguguucaggacuuguuggagacacacccagaaaaaacgacagcuccagcaguagccauuguuuggauccuaacaaugaagaagguggucauggagugaaaggcugggccuuugaugauggaaaugauguguggaugggaagaacgaucagcgagaagucacgcuuaggguaugaaaccuucaaagucauugaaggcugguccaacucuaaguccaaauugcagauaaauaggcaagucauaguugacagagguaauagguccgguuauucugguauuuucucuguugaaggcaaaagcugcaucaaucggugcuuuuauguggaguugauaaggggaagaaaagaggaaacugaagucuuguggaccucaaacaguauuguuguguuuuguggcaccucagguacauauggaacaggcucauggccugauggggcggacaucaaucucaugccuauauaa

SEQ ID NO: 52484 - RNA, 1410 nt, Artificial Sequence
  derived and/or modified CDS sequence (wt) from neuraminidase__InfluenzaA__AEA03989
augaauccaaaucaaaagauaauaacgauuggcucuguuucucucaccauuuccacaauaugcuucuucaugcaaauugccaucuugauaacuacuguaacauugcauuucaagcaauaugaauucaacucccccccaaacaaccaagugaugcugugugaaccaacaauaauagaaagaaacauaacagagauaguguaucugaccaacaccaccauagagaaggaaauaugccccaaacuagcagaauacagaaauuggucaaagccgcaaugugacauuacaggauuugcaccuuuuucuaaggacaauucgauuaggcuuuccgcugguggggacaucugggugacaagagaaccuuaugugucaugcgauccugacaaguguuaucaauuugcccuuggacagggaacaacacuaaacaacgugcauucaaauaacacaguacgugauaggaccccuuaucggacccuauugaugaaugaguuagguguuccuuuucaucuggggaccaagcaagugugcauagcaugguccagcucaaguugucacgauggaaaagcauggcugcauguuuguauaacgggggaugauaaaaaugcaacugcuagcuucaucuacaaugggaggcuuguagauaguguuguuucaugguccaaagaaauccucaggacccaggagucagaaugcguuuguaucaauggaacuuguacaguaguaaugacugaugggagugcuucaggaaaagcugauacuaaaauacuauucauugaggaggggaaaaucguucauacuagcacauugucaggaagugcucagcaugucgaggagugcuccugcuauccucgauauccuggugucagaugugucugcagagacaacuggaaaggcuccaauaggcccaucguagauauaaacauaaaggaucauagcauuguuuccaguuauguguguucaggacuuguuggagacacacccagaaaaaacgacagcuccagcaguagccauuguuuggauccuaacaaugaagaagguggucauggagugaaaggcugggccuuugaugauggaaaugacguguggaugggaagaacgaucagcgagaagucacgcuuaggguaugaaaccuucaaagucauugaaggcugguccaacccuaaguccaaauugcagauaaauaggcaagucauaguugacagagguaauagguccgguuauucugguauuuucucuguugaaggcaaaaguugcaucaaucggugcuuuuauguggaguugauaaggggaagaaaagaggaaacugaagucuuguggaccucaaacaguauuguuguguuuuguggcaccucagguacauauggaacaggcucauggccugauggggcggacaucaaucucaugccuauauaa

SEQ ID NO: 52485 - RNA, 1410 nt, Artificial Sequence; identical to SEQ ID NO: 52473
  derived and/or modified CDS sequence (wt) from neuraminidase__InfluenzaA__AEA04000

SEQ ID NO: 52486 - RNA, 1410 nt, Artificial Sequence; identical to SEQ ID NO: 52465
  derived and/or modified CDS sequence (wt) from neuraminidase__InfluenzaA__AEA04011

SEQ ID NO: 52487 - RNA, 1410 nt, Artificial Sequence; identical to SEQ ID NO: 52473
  derived and/or modified CDS sequence (wt) from neuraminidase__InfluenzaA__AEA04022

SEQ ID NO: 52488 - RNA, 1410 nt, Artificial Sequence; identical to SEQ ID NO: 52465
  derived and/or modified CDS sequence (wt) from neuraminidase__InfluenzaA__AEA04033

SEQ ID NO: 52489 - RNA, 1410 nt, Artificial Sequence; identical to SEQ ID NO: 52465
  derived and/or modified CDS sequence (wt) from neuraminidase__InfluenzaA__AEA04044

SEQ ID NO: 52490 - RNA, 1410 nt, Artificial Sequence; identical to SEQ ID NO: 52465
  derived and/or modified CDS sequence (wt) from neuraminidase__InfluenzaA__AEA04049

SEQ ID NO: 52491 - RNA, 1410 nt, Artificial Sequence; identical to SEQ ID NO: 52465
  derived and/or modified CDS sequence (wt) from neuraminidase__InfluenzaA__AEA04059

SEQ ID NO: 52492 - RNA, 1410 nt, Artificial Sequence
  derived and/or modified CDS sequence (wt) from neuraminidase__InfluenzaA__AEA04070
augaauccaaaucaaaagauaauaacgauuggcucuguuucucucaccauuuccacaauaugcuucuucaugcaaauugccaucuugauaacuacuguaacauugcauuucaagcaauaugaauucaacucccccccaaacaaccaagugaugcugugugaaccaacaauaauagaaagaaacauaacagagauaguguaucugaccaacaccaccauagagaaggaaauaugccccaaacuagcagaauacagaaauuggucaaagccgcaaugugacauuacaggauuugcaccuuuuucuaaggacaauucgauuaggcuuuccgcugguggggacaucugggugacaagagaaccuuaugugucaugcgauccugacaaguguuaucaauuugcccuuggacagggaacaacacuaaacaacgugcauucaaauaacacaguacgugauaggaccccuuaucggacccuauugaugaaugaguuagguguuccuuuucaucuggggaccaagcaagugugcauagcaugguccagcucaaguugucacgauggaaaagcauggcugcauguuuguauaacgggggaugauaaaaaugcaacugcuagcuucauuuacaaugggaggcuuguagauaguguuguuucaugguccaaagaaauccucaggacccaggagucagaaugcguuuguaucaauggaacuuguacaguaguaaugacugaugggagugcuucaggaaaagcugauacuaaaauacuauucauugaggaggggaaaaucguucauacuagcacauugucaggaagugcucagcaugucgaggagugcuccugcuauccucgauauccuggugucagaugugucugcagagacaacuggaaaggcuccaauaggcccaucguagauauaaacauaaaggaucauagcauuguuuccaguuauguguguucaggacuuguuggagacacacccagaaaaaacgacagcuccagcaguagccauuguuuggauccuaacaaugaagaaggcggucauggagugaaaggcugggccuuugaugauggaaaugacguguggaugggaagaacgaucagcgagaagucacgcuuaggguaugaaaccuucaaagucauugaaggcugguccaacccaaaguccaaauugcagauaaauaggcaagucauaguugacagagguaauagguccgguuauucugguauuuucucuguugaaggcaaaagcugcaucaaucggugcuuuuauguggaguugauaaggggaagaaaagaggaaacugaagucuuguggaccucaaacaguauuguuguguuuuguggcaccucagguacauauggaacaggcucauggccugauggggcggacaucaaucucaugccuauauaa

SEQ ID NO: 52493 - RNA, 1410 nt, Artificial Sequence
  derived and/or modified CDS sequence (wt) from neuraminidase__InfluenzaA__AEA04081
augaauccaaaucaaaagauaauaacgauuggcucuguuucucucaccauuuccacaauaugcuucuucaugcaaauugccaucuugauaacuacuguaacauugcauuucaagcaauaugaauucaacucccccccaaacaaccaagugaugcugugugaaccaacaauaauagaaagaaacauaacagagauaguguaucugaccaacaccaccauagagaaggaaauaugccccaaacuagcagaauacagaaauuggucaaagccgcaaugugacauuacaggauuugcaccuuuuucuaaggacaauucgauuaggcuuuccgcugguggggacaucugggugacaagagaaccuuaugugucaugcgauccugacaaguguuaucaauuugcccuuggacagggaacaacacuaaacaacgugcauucaaauaacacaguacgugauaggaccccuuaucggacccuauugaugaaugaguuagguguuccuuuucaucuggggaccaagcaagugugcauagcaugguccagcucaaguugucacgauggaaaagcauggcugcauguuuguauaacgggggaugauaaaaaugcaacugcuagcuucauuuacaaugggaggcuuguagauaguguuguuucaugguccaaagaaauccucaggacccaggagucagaaugcguuuguaucaauggaacuuguacaguaguaaugacugaugggagugcuucaggaaaagcugauacuaaaauacuauucauugaggaggggaaaaucguucauacuagcacauugucaggaagugcucagcaugucgaggagugcuccugcuauccucgauauccuggugucagaugugucugcagagacaacuggaaaggcuccaauaggcccaucguagauauaaacauaaaggaucauagcauuguuuccaguuauguguguucaggacuuguuggagacacacccagaaaaaacgacagcuccagcaguagccauuguuuggauccuaacaaugaagaagguggucauggagugaaaggcugggccuuugaugauggaaaugacguguggaugggaaggacgaucagcgagaagucacgcuuaggguaugaaaccuucaaagucauugaaggcugguccaacccaaaguccaaauugcagauaaauaggcaagucauaguugacagagguaauagguccgguuauucugguauuuucucuguugaaggcaaaagcugcaucaaucggugcuuuuauguggaguugauaaggggaagaaaagaggaaacugaugucuuguggaccucaaacaguauuguuguguuuuguggcaccucagguacauauggaacaggcucauggccugauggggcggacaucaaucucaugccuauauaa

SEQ ID NO: 52494 - RNA, 1410 nt, Artificial Sequence
  derived and/or modified CDS sequence (wt) from neuraminidase__InfluenzaA__AEA04092
augaauccaaaucaaaagauaauaacgauuggcucuguuucucucaccauuuccacaauaugcuucuucaugcaaauugccaucuugauaacuacuguaacauugcauuucaagcaauaugaauucaacucccccccaaacaaccaagugaugcugugugaaccaacaauaauagaaagaaacauaacagagauaguguaucugaccaacaccaccauagagaaggaaauaugccccaaacuagcagaauacagaaauuggucaaagccgcaaugugacauuacaggauuugcaccuuuuucuaaggacaauucgauuaggcuuuccgcugguggggacaucugggugacaagagaaccuuaugugucaugcgauccugacaaguguuaucaauucgcccuuggacagggaacaacacuaaacaacgugcauucaaauaacacaguacgugauaggaccccuuaucggacccuauugaugaaugaguuagguguuccuuuucaucuggggaccaagcaagugugcauagcaugguccagcucaaguugucacgauggaaaagcauggcugcauguuuguauaacgggggaugauaaaaaugcaacugcuagcuucauuuacaaugggaggcuuguagauaguguuguuucaugguccaaagaaauccucaggacccaggagucagaaugcguuuguaucaauggaacuuguacaguaguaaugacugaugggagugcuucaggaaaagcugauacuaaaauacuauucauugaggaggggaaaaucguucauacuagcacauugucaggaagugcucagcaugucgaggagugcuccugcuauccucgauauccuggugucagaugugucugcagagacaacuggaaaggcuccaauaggcccaucguagauauaaacauaaaggaucauagcauuguuuccaguuauguguguucaggacuuguuggagacacacccagaaaaaacgacagcuccagcaguagccauuguuuggauccuaacaaugaagaagguggucauggagugaaaggcugggccuuugaugauggaaaugacguguggaugggaagaacgaucagcgagaagucacgcuuaggguaugaaaccuucaaagucauugaaggcugguccaacccuaaguccaaauugcagauaaauaggcaagucauaguugacagagguaauagguccgguuauucugguauuuucucuguugaaggcaaaagcugcaucaaucggugcuuuuauguggaguugauaaggggaagaaaagaggaaacugaagucuuguggaccucaaacaguauuguuguguuuuguggcaccucagguacauauggaacaggcucauggccugauggggcggacaucaaucucaugccuauauaa

SEQ ID NO: 52495 - RNA, 1410 nt, Artificial Sequence; identical to SEQ ID NO: 52492
  derived and/or modified CDS sequence (wt) from neuraminidase__InfluenzaA__AEA04103

SEQ ID NO: 52496 - RNA, 1410 nt, Artificial Sequence; identical to SEQ ID NO: 49263
  derived and/or modified CDS sequence (wt) from neuraminidase__InfluenzaA__AEA04125

SEQ ID NO: 52497 - RNA, 1410 nt, Artificial Sequence; identical to SEQ ID NO: 52484
  derived and/or modified CDS sequence (wt) from neuraminidase__InfluenzaA__AEA04133

SEQ ID NO: 52498 - RNA, 1410 nt, Artificial Sequence
  derived and/or modified CDS sequence (wt) from neuraminidase__InfluenzaA__AEA04144
augaauccaaaucaaaagauaauaacgauuggcucuguuucucucaccauuuccacaauaugcuucuucaugcaaauugccaucuugauaacuacuguaacauugcauuucaagcaauaugaauucaacucccccccaaacaaccaagugaugcugugugaaccaacaauaauagaaagaaacauaacagagauaguguaucugaccaacaccaccauagagaaggaaauaugccccaaacuagcugaauacagaaauuggucaaagccgcaaugugacauuacaggauuugcaccuuuuucuaaggacaauucgauuaggcuuuccgcugguggggacaucugggugacaagagaaccuuaugugucaugcgauccugacaaguguuaucaauuugcccuuggacagggaacaacacuaaacaacgugcauucaaauaacacaguacgugauaggaccccuuaucggacccuauugaugaaugaguuagguguuccuuuucaucuggggaccaagcaagugugcauagcaugguccagcucaaguugucacgauggaaaagcauggcugcauguuuguauaacgggggaugauaaaaaugcaacugcuagcuucauuuacaaugggaggcuuguagauaguguuguuucaugguccaaagaaauccucaggacccaggagucagaaugcguuuguaucaauggaacuuguacaguaguaaugacugaugggagugcuucaggaaaagcugauacuaaaauacuauucauugaggaggggaaaaucauucauacuagcacauugucaggaagugcucagcaugucgaggagugcuccugcuauccucgauauccuggugucagaugugucugcagagacaacuggaaaggcuccaauaggcccaucguagauauaaacauaaaggaucauagcauuguuuccaguuauguguguucaggacuuguuggagacacacccagaaaaaacgacagcuccagcaguagccauuguuuggauccuaacaaugaagaagguggucauggagugaaaggcugggccuuugaugauggaaaugacguguggaugggaagaacgaucagcgagaagucacgcuuaggguaugaaaccuucaaagucauugaaggcugguccaacccuaaguccaaauugcagauaaauaggcaagucauaguugacagagguaauagguccgguuauucugguauuuucucuguugaaggcaaaagcugcaucaaucggugcuuuuauguggaguugauaaggggaagaaaagaggaaacugaagucuuguggaccucaaacaguauuauuguguuuuguggcaccucagguacauauggaacaggcucauggccugauggggcggacaucaaucucaugccuauauaa

SEQ ID NO: 52499 - RNA, 1410 nt, Artificial Sequence
  derived and/or modified CDS sequence (wt) from neuraminidase__InfluenzaA__AEA04155
augaauccaaaucaaaagauaauaacaauuggcucuguuucucucaccauuuccacaauaugcuucuucaugcaaauugccaucuugauaacuacuguaacauugcauuucaagcaauaugaauucaacucccccccaaacaaccaagugaugcugugugaaccaacaauaauagaaagaaacauaacagagauaguguaucugaccaacaccaccauagagaaggaaauaugccccaaacuagcugaauacagaaauuggucaaagccgcaaugugacauuacaggauuugcaccuuuuucuaaggacaauucgauuaggcuuuccgcugguggggacaucugggugacaagagaaccuuaugugucaugcgauccugacaaguguuaucaauuugcccuuggacagggaacaacacuaaacaacgugcauucaaauaacacaguacgugauaggaccccuuaucggacccuauugaugaaugaguuagguguuccuuuucaucuggggaccaagcaagugugcauagcaugguccagcucaaguugucacgauggaaaagcauggcugcauguuuguauaacgggggaugauaaaaaugcaacugcuagcuucauuuacaaugggaggcuuguagauaguguuguuucaugguccaaagaaauccucaggacccaggagucagaaugcguuuguaucaauggaacuuguacaguaguaaugacugaugggagugcuucaggaaaagcugauacuaaaauacuauucauugaggaggggaaaaucguucauacuagcacauugucaggaagugcucagcaugucgaggagugcuccugcuauccucgauauccuggugucagaugugucugcagagauaacuggaaaggcuccaauaggcccaucguagauauaaacauaaaggaucauagcauuguuuccaguuauguguguucaggacuuguuggagacacacccagaaaaaacgacagcuccagcaguagccauuguuuggauccuaacaaugaagaagguggucauggagugaaaggcugggccuuugaugauggaaaugacguguggaugggaagaacgaucagcgagaagucacgcuuaggguaugaaaccuucaaagucauugaaggcugguccaacccuaaguccaaauugcagauaaauaggcaagucauaguugacagagguaauagguccgguuauucugguauuuucucuguugaaggcaaaagcugcaucaaucggugcuuuuauguggaguugauaaggggaagaaaagaggaaacugaagucuuguggaccucaaacaguauuguuguguuuuguggcaccucagguacauauggaacaggcucauggccugauggggcggacaucaaucucaugccuauauaa

SEQ ID NO: 52500 - RNA, 1410 nt, Artificial Sequence
  derived and/or modified CDS sequence (wt) from neuraminidase__InfluenzaA__AEA04166
augaauccaaaucaaaagauaauaacgauuggcucuguuucucucaccauuuccacaauaugcuucuucaugcaaauugccaucuugauaacuacuguaacauugcauuucaagcaauaugaauucaacucccccccaaacaaccaagugaugcugugugaaccaacaauaauagaaagaaacauaacagagauaguguaucugaccaacaccaccauagagaaggaaauaugccccaaacuagcugaauacagaaauuggucaaagccgcaaugugacauuacaggauuugcaccuuuuucuaaggacaauucgauuaggcuuuccgcugguggggacaucugggugacaagagaaccuuaugugucaugcgauccugacaaguguuaucaauuugcccuuggacagggaacaacacuaaacaacgugcauucaaauaacacaguacgugauaggaccccuuaucggacccuauugaugaaugaguuagguguuccuuuucaucuggggaccaagcaagugugcauagcaugguccagcucaaguugucacgauggaaaagcauggcugcauguuuguauaacgggggaugauaaaaaugcaacugcuagcuucauuuacaaugggaggcuuguagauaguguuguuucaugguccaaagaaauccucaggacccaggagucagaaugcguuuguaucaauggaacuuguacaguaguaaugacugaugggagugcuucaggaaaagcugauacuaaaauacuauucauugaggaggggaaaaucguucauacuagcacauugucaggaagugcucagcaugucgaggagugcuccugcuauccucgauauccuggugucagaugugucugcagagauaacuggaaaggcuccaauaggcccaucguagauauaaacauaaaggaucauagcauuguuuccaguuauguguguucaggacuuguuggagacacacccagaaaaaacgacagcuccagcaguagccauuguuuggauccuaacaaugaagaagguggucauggagugaaaggcugggccuuugaugauggaaaugacguguggaugggaagaacgaucagcgagaagucacgcuuaggguaugaaaccuucaaagucauugaaggcugguccaacccuaaguccaaauugcagauaaauaggcaagucauaguugacagagguaauagguccgguuauucugguauuuucucuguugaaggcaaaagcugcaucaaucggugcuuuuauguggaguugauaaggggaagaaaagaggaaacugaagucuuguggaccucaaacaguauuguuguguuuuguggcaccucagguacauauggaacaggcucauggccugauggggcggacaucaaucucaugccuauauaa

SEQ ID NO: 52501 - RNA, 1410 nt, Artificial Sequence
  derived and/or modified CDS sequence (wt) from neuraminidase__InfluenzaA__AEA04177
augaauccaaaucaaaagauaauaacgauuggcucuguuucucucaccauuuccacaauaugcuucuucaugcaaauugccaucuugauaacuacuguaacauugcauuucaagcaauaugaauucaacucccccccaaacaaccaagugaugcugugugaaccaacaauaauagaaagaaacauaacagagauaguguaucugaccaacaccaccauagagaaggaaauaugccccaaacuagcagaauacagaaauuggucaaagccgcaaugugacauuacaggauuugcaccuuuuucuaaggacaauucgauuaggcuuuccgcugguggggacaucugggugacaagagaaccuuaugugucaugcgauccugacaaguguuaucaauuugcccuuggacagggaacaacacuaaacaacgugcauucaaauaacacaguacguaauaggaccccuuaucggacccuauugaugaaugaguuagguguuccuuuucaucuggggaccaagcaagugugcauagcaugguccagcucaaguugucacgauggaaaagcauggcugcauguuuguauaacgggggaugauaaaaaugcaacugcuagcuucauuuacaaugggaggcuuguagauaguguuguuucaugguccaaagaaauccucaggacccaggagucagaaugcguuuguaucaauggaacuuguacaguaguaaugacugaugggagugcuucaggaaaagcugauacuaaaauacuauucauugaggaggggaaaaucguucauacuagcacauugucaggaagugcucaacaugucgaggagugcuccugcuauccucgauauccuggugucagaugugucugcagagacaacuggaaaggcuccaauaggcccaucguagauauaaacauaaaggaucauagcauuguuuccaguuauguguguucaggacuuguuggagacacacccagaaaaaacgacagcuccagcaguagccauuguuuggauccuaacaaugaagaagguggucauggagugaaaggcugggccuuugaugauggaaaugacguguggaugggaagaacgaucagcgagaagucacgcuuaggguaugaaaccuucaaagucauugaaggcugguccaacccuaaguccaaauugcagauaaauaggcaagucauaguugacagagguaauagguccgguuauucugguauuuucucuguugaaggcaaaagcugcaucaaucggugcuuuuauguggaguugauaaggggaagaaaagaggaaacugaagucuuguggaccucaaacaguauuguuguguuuuguggcaccucagguacauauggaacaggcucauggccugauggggcggacaucaaucucaugccuauauaa

SEQ ID NO: 52502 - RNA, 1410 nt, Artificial Sequence
  derived and/or modified CDS sequence (wt) from neuraminidase__InfluenzaA__AEA04188
augaauccaaaucaaaagauaauaacgauuggcucuguuucucucaccauuuccacaauaugcuucuucaugcaaauugccaucuugauaacuacuguaacauugcauuucaagcaauaugaauucaacucccccccaaacaaccaagugaugcugugugaaccaacaauaauagaaagaaacauaacagagauaguguauuugaccaacaccaccauagagaaggaaauaugccccaaacuagcugaauacagaaauuggucaaagccgcaaugugacauuacaggauuugcaccuuuuucuaaggacaauucgauuaggcuuuccgcugguggggacaucugggugacaagagaaccuuaugugucaugcgauccugacaaguguuaucaauuugcccuuggacagggaacaacacuaaauaacgugcauucaaauaacacaguacgugauaggaccccuuaucggacccuauugaugaaugaguuagguguuccuuuucaucuggggaccaagcaagugugcauagcaugguccagcucaaguugucacgauggaaaagcauggcugcauguuuguauaacgggggaugauaaaaaugcaacugcuagcuucauuuacaaugggaggcuuguagauaguguuguuucaugguccaaagaaauccucaggacccaggagucagaaugcguuuguaucaauggaacuuguacaguaguaaugacugaugggagugcuucaggaaaagcugauacuaaaauacuauucauugaggaggggaaaaucguucauacuagcacauugucaggaagugcucagcaugucgaggagugcuccugcuauccucgauauccuggugucagaugugucugcagagacaacuggaaaggcuccaauaggcccaucguagauauaaacauaaaggaucauagcauuguuuccaguuauguguguucaggacuuguuggagacacacccagaaaaaacgacagcuccagcaguagccauuguuuggauccuaacaaugaagaagguggucauggagugaaaggcugggccuuugaugauggaaaugacguguggaugggaagaacgaucagcgagaagucacgcuuaggguaugaaaccuucaaagucauugaaggcugguccaacccuaaguccaaauugcagauaaauaggcaagucauaguugacagagguaauagguccgguuauucugguauuuucucuguugaaggcaaaagcugcaucaaucggugcuuuuauguggaguugauaaggggaagaaaagaggaaacugaagucuuguggaccucaaacaguauuguuguguuuuguggcaccucagguacauauggaacaggcucauggccugauggggcggacaucaaucucaugccuauauaa

SEQ ID NO: 52503 - RNA, 1410 nt, Artificial Sequence
  derived and/or modified CDS sequence (wt) from neuraminidase__InfluenzaA__AEA04199
augaauccaaaucaaaagauaauaacgauuggcucuguuucucucaccauuuccacaauaugcuucuucaugcaaaccgccauccugauaacuacuguaacauugcauuucaagcaaugugaauucaacucccccccaaacaaccaagugaugcugugugaaccaacaauaauagaaagaaacauaacagagauaguguaucugaccaacaccaccauagagaaggaaauaugccccaaacuagcagaauacagaaauuggucaaagccgcaaugugacauuacaggauuugcaccuuuuucuaaggacaauucgauuaggcuuuccgcugguggggacaucugggugacaagagaaccuuaugugucaugcgauccugacaaguguuaucaauuugcccuuggacagggaacaacgcuaaacaacgugcauucaaauaacacaguacgugauaggaccccuuaucggacucuauugaugaaugaguuagguguuccuuuucaucuggggaccaagcaagugugcauagcaugguccagcucaaguugucacgauggaaaagcauggcugcauguuuguauaacgggggaugauaaaaaugcaacugcuagcuucauuuacaaugggaggcuuguagauaguguuguuucaugguccaaagaaauccucaggacccaggagucagaaugcguuuguaucaauggaacuuguacaguaguaaugacugaugggagugcuucaggaaaagcugauacuaaaauacuauucauugaggaggggaaaaucguucauacuagcacauugucaggaagugcucagcaugucgaggagugcuccugcuauccucgauauccuggugucagaugugucugcagagacaacuggaaaggcuccaauaggcccaucguagauauaaacauaaaggaucauagcauuguuuccaguuauguguguucaggacuuguuggagacacacccagaaaaaacgacagcuccagcaguagccauuguuuggauccuaacaaugaagaagguggucauggagugaaaggcugggccuuugaugauggaaaugacguguggaugggaagaacgaucagcgagaagucacgcuuaggguaugaaaccuucaaagucauugaaggcugguccaacccuaaguccaaauugcagauaaauaggcaagucauaguugacagagguaauagguccgguuauucugguauuuucucuguugaaggcaaaagcugcaucaaucggugcuuuuauguggaguugauaaggggaaggaaagaggaaacugaagucuuguggaccucaaacaguauuguuguguuuuguggcaccucagguacauauggaacaggcucauggccugauggggcggacaucaaucucaugccuauauaa

SEQ ID NO: 52504 - RNA, 1410 nt, Artificial Sequence; identical to SEQ ID NO: 51225
  derived and/or modified CDS sequence (wt) from neuraminidase__InfluenzaA__AEA04210

SEQ ID NO: 52505 - RNA, 1410 nt, Artificial Sequence
  derived and/or modified CDS sequence (wt) from neuraminidase__InfluenzaA__AEA04229
augaauccaaaucaaaagauaauaacgauuggcucuguuucucucaccauuuccacaauaugcuucuucaugcaaaccgccauccugauaacuacuguaacauugcauuucaagcaaugugaauucaacucccccccaaacaaccaagugaugcugugugaaccaacaauaauagaaagaaacauaacagagauaguguaucugaccaacaccaccauagagaaggaaauaugccccaaacuagcagaauacagaaauuggucaaagccgcaaugugacauuacaggauuugcaccuuuuucuaaggacaauucgauuaggcuuuccgcugguggggacaucugggugacaagagaaccuuaugugucaugcgauccugacaaguguuaucaauuugcccuuggacagggaacaacgcuaaacaacgugcauucaaauaacacaguacgugauaggaccccuuaucggacucuauugaugaaugaguuagguguuccuuuucaucuggggaccaagcaagugugcauagcaugguccagcucaaguugucacgauggaaaagcauggcugcauguuuguauaacgggggaugauaaaaaugcaacugcuagcuucauuuacaaugggaggcuuguagauaguguuguuucaugguccaaagaaauccucaggacccaggagucagaaugcguuuguaucaauggaacuuguacaguaguaaugacugaugggagugcuucaggaaaagcugauacuaaaauacuauucauugaggaggggaaaaucguucauacuagcacauugucaggaagugcucagcaugucgaggagugcuccugcuauccucgauauccuggugucagaugugucugcagagacaacuggaaaggcuccaauaggcccaucguagauauaaacauaaaggaucauagcauuguuuccaguuauguguguucaggacuuguuggagacacacccagaaaaaacgacagcuccagcaguagccauuguuuggauccuaacaaugaagaagguggucauggagugaaaggcugggccuuugaugauggaaaugacguguggaugggaagaacgaucagcgagaaaucacgcuuaggguaugaaaccuucaaagucauugaaggcugguccaacccuaagucaaaauugcagauaaauaggcaagucauaguugacagagguaauagguccgguuauucugguauuuucucuguugaaggcaaaagcugcaucaaucggugcuuuuauguggaguugauaaggggaaggaaagaggaaacugaagucuuguggaccucaaacaguauuguuguguuuuguggcaccucagguacauauggaacaggcucauggccugauggggcggacaucaaucucaugccuauauaa

SEQ ID NO: 52506 - RNA, 1410 nt, Artificial Sequence; identical to SEQ ID NO: 52505
  derived and/or modified CDS sequence (wt) from neuraminidase__InfluenzaA__AEA04239

SEQ ID NO: 52507 - RNA, 1410 nt, Artificial Sequence
  derived and/or modified CDS sequence (wt) from neuraminidase__InfluenzaA__AEA04250
augaauccaaaucaaaagauaauaacgauuggcucuguuucucucaccauuuccacaauaugcuucuucaugcaaaccgccauccugauaacuacuguaacauugcauuucaagcaaugugaauucaacucccccccaaacaaccaagugaugcugugugaaccaacaauaauagaaagaaacauaacagagauaguguaucugaccaacaccaccauagagaaggaaauaugccccaaacuagcagaauacagaaauuggucaaagccgcaaugugacauuacaggauuugcaccuuuuucuaaggacaauucgauuaggcuuuccgcugguggggacaucugggugacaagagaaccuuaugugucaugcgauccugacaaguguuaucaauuugcccuuggacagggaacaacacuaaacaacgugcauucaaauaacacaguacguguuaggaccccuuaucggacucuauugaugaaugaguuagguguuccuuuucaucuggggaccaagcaagugugcauagcaugguccagcucaaguugucacgauggaaaagcauggcugcauguuuguauaacgggggaugacaaaaaugcaacugcuagcuucauuuacaaugggaggcuuguagauaguguuguuucaugguccaaagaaauccucaggacccaggagucagaaugcguuuguaucaauggaacuuguacaguaguaaugacugaugggagugcuucaggaaaagcugauacuaaaauacuauucauugaggaggggaaaaucguucauacuagcacauugucaggaagugcucagcaugucgaggagugcuccugcuauccucgauauccuggugucagaugugucugcagagacaacuggaaaggcuccaauaggcccaucguagauauaaacauaaaggaucauagcauuguuuccaguuauguguguucaggacuuguuggagacacacccagaaaaaacgacagcuccagcaguagccauuguuuggauccuaacaaugaagaagguggucauggaguaaaaggcugggccuuugaugauggaaaugacguguggaugggaagaacgaucagcgagaaaucacgcuuaggguaugaaaccuucaaagucauugaaggcugguccaacccuaaguccaaauugcagauaaauaggcaagucauaguugacagagguaauagguccgguuauucugguauuuucucuguugaaggcaaaagcugcaucaaucggugcuuuuauguggaguugauaaggggaaggaaagaggaaacugaagucuuguggaccucaaacaguauuguuguguuuuguggcaccucagguacauauggaacaggcucauggccugauggggcggacaucaaucucaugccuauauaa

SEQ ID NO: 52508 - RNA, 1410 nt, Artificial Sequence
  derived and/or modified CDS sequence (wt) from neuraminidase__InfluenzaA__AEA04260
augaauccaaaucaaaagauaauaacgauuggcucuguuucucucaccauuuccacaauaugcuucuucaugcaaaccgccauccugauaacuacuguaacauugcauuucaagcaaugugaauucaacucccccccaaacaaccaagugaugcugugugaaccaacaauaauagaaagaaacauaacagagauaguguaucugaccaacaccaccauagagaaggaaauaugccccaaacuagcagaauacagaaauuggucaaagccgcaaugugacauuacaggauuugcaccuuuuucuaaggacaauucgauuaggcuuuccgcugguggggacaucugggugacaagagaaccuuaugugucaugcgauccugacaaguguuaucaauuugcccuuggacagggaacaacgcuaaacaacgugcauucaaauaacacaguacgugauaggaccccuuaucggacucuauugaugaaugaguuagguguuccuuuucaucuggggaccaagcaagugugcauagcaugguccagcucaaguugucacgauggaaaagcauggcugcauguuuguauaacgggggaugauaaaaaugcaacugcuagcuucauuuacaaugggaggcuuguagauaguguuguuucaugguccaaagaaauccucaggacccaggagucagaaugcguuuguaucaauggaacuuguacaguaguaaugacugaugggagugcuucaggaaaagcugauacuaaaauacuauucauugaggaggggaaaaucguucauacuagcacauugucaggaagugcucagcaugucgaggagugcuccugcuauccucgauauccuggugucagaugugucugcagagacaacuggaaaggcuccaauaggcccaucguagauauaaacauaaaggaucauagcauuguuuccaguuauguguguucaggacuuguuggagacacacccagaaaaaacgacagcuccagcaguagccauuguuuggauccuaacaaugaagaagguggucauggagugaaaggcugggccuuugaugauggaaaugacguguggaugggaagaacgaucagcgagaaaucacgcuuaggguaugaaaccuucaaagucauugaaggcugguccaacccuaagucaaaauugcagauaaauaggcaagucauaguugacagagguaauagguccgguuauucugguauuuucucuguugaaggcaaaagcugcaucaaucggugcuuuuauguggaguugauaaggggaaggaaagaggaaacugaagucuuguggaccucaaacaguauuguuguguuuuguggcaccucagguacauauggcacaggcucauggccugauggggcggacaucaaucucaugccuauauaa

SEQ ID NO: 52509 - RNA, 1410 nt, Artificial Sequence
  derived and/or modified CDS sequence (wt) from neuraminidase__InfluenzaA__AEA04268
augaauccaaaucaaaagauaauaacgauuggcucuguuucucucaccauuuccacaauaugccucuucaugcaaaccgccauccugauaacuacuguaacauugcauuucaagcaaugugaauucaacucccccccaaacaaccaagcgaugcugugugaaccaacaauaauagaaagaaacauaacagagauaguguaucugaccaacaccaccauagagaaggaaauaugccccaaacuagcagaauacagaaauuggucaaagccgcaaugugacauuacaggauuugcaccuuuuucuaaggacaauucgauuaggcuuuccgcugguggggacaucugggugacaagagaaccuuaugugucaugcgauccugacaaguguuaucaauuugcccuuggacagggaacaacacuaaacaacgugcauucaaauaacacaguacgugauaggaccccuuaucggacucuauugaugaaugaguuagguguuccuuuucaucuggggaccaagcaagugugcauagcaugguccagcucaaguugucacgauggaaaagcauggcugcauguuuguauaacgggggaugauaaaaaugcaacugcuagcuucauuuacaaugggaggcuuguagauaguguuguuucaugguccaaagaaauccucaggacccaggagucagaaugcguuuguaucaauggaacuuguacaguaguaaugacugaugggagugcuucaggaaaagcugauacuaaaauacuauucauugaggaggggaaaaucguucauacuagcacauugucaggaagugcucagcaugucgaggagugcuccugcuauccucgauauccuggugucagaugugucugcagagacaacuggaaaggcuccaauaggcccaucguagauauaaacauaaaggaucauagcauuguuuccaguuauguguguucaggacuuguuggagacacacccagaaaaaacgacagcuccagcaguagccauuguuuggauccuaacaaugaagaagguggucauggagugaaaggcugggccuuugaugauggaaaugacguguggaugggaagaacgaucagcgagaaaucacgcuuaggguaugaaaccuucaaagucauugaaggcugguccaacccuaaguccaaauugcagauaaauaggcaagucauaguugacagagguaauagguccgguuauucugguauuuucucuguugaaggcaaaagcugcaucaaucggugcuuuuauguggaguugauaaggggaaggaaagaggaaacugaagucuuguggaccucaaacaguauuguuguguuuuguggcaccucagguacauauggaacaggcucauggccugauggggcggacaucaaucucaugccuauauaa

SEQ ID NO: 52510 - RNA, 1410 nt, Artificial Sequence; identical to SEQ ID NO: 52505
  derived and/or modified CDS sequence (wt) from neuraminidase__InfluenzaA__AEA04276

SEQ ID NO: 52511 - RNA, 1410 nt, Artificial Sequence; identical to SEQ ID NO: 52505
  derived and/or modified CDS sequence (wt) from neuraminidase__InfluenzaA__AEA04287

SEQ ID NO: 52512 - RNA, 1410 nt, Artificial Sequence; identical to SEQ ID NO: 52505
  derived and/or modified CDS sequence (wt) from neuraminidase__InfluenzaA__AEA04298

SEQ ID NO: 52513 - RNA, 1410 nt, Artificial Sequence
  derived and/or modified CDS sequence (wt) from neuraminidase__InfluenzaA__AEA04307
augaauccaaaucaaaagauaauaacgauuggcucuguuucucucaccauuuccacaauaugcuucuucaugcaaaccgccauccugauaacuacuguaacauugcauuucaagcaaugugaauucaacucccccccaaacaaccaagugaugcugugugaaccaacaauaauagaaagaaacauaacagagauaguguaucugaccaacaccaccauagagaaggaaauaugccccaaacuagcagaauacagaaauuggucaaagccgcaaugugacauuacaggauuugcaccuuuuucuaaggacaauucgauuaggcuuuccgcugguggggacaucugggugacaagagaaccuuaugugucaugcgauccugacaaguguuaucaauuugcccuuggacagggaacaacgcuaaacaacgugcauucaaauaacacaguacgugauaggaccccuuaucggacucuauugaugaaugaguuagguguuccuuuucaucuggggaccaagcaagugugcauagcaugguccagcucaaguugucacgauggaaaagcauggcugcauguuuguauaacgggggaugauaaaaaugcaacugcuagcuucauuuacaaugggaggcuuguagauaguguuguuucaugguccaaagaaauccucaggacccaggagucagaaugcguuuguaucaauggaacuuguacaguaguaaugacugaugggagugcuucaggaaaagcugauacuaaaauacuauucauugaggaggggaaaaucguucauacuagcacauugucaggaagugcucagcaugucgaggagugcuccugcuauccucgauauccugaugucagaugugucugcagagacaacuggaaaggcuccaauaggcccaucguagauauaaacauaaaggaucauagcauuguuuccaguuauguguguucaggacuuguuggagacacacccagaaaaaacgacagcuccagcaguagccauuguuuggauccuaacaaugaagaagguggucauggagugaaaggcugggccuuugaugauggaaaugacguguggaugggaagaacgaucagcgagaaaucacgcuuaggguaugaaaccuucaaagucauugaaggcugguccaacccuaagucaaaauugcagauaaauaggcaagucauaguugacagagguaauagguccgguuauucugguauuuucucuguugaaggcaaaagcugcaucaaucggugcuuuuauguggaguugauaaggggaaggaaagaggaaacugaagucuuguggaccucaaacaguauuguuguguuuuguggcaccucagguacauauggaacaggcucauggccugauggggcggacaucaaucucaugccuauauaa

SEQ ID NO: 52514 - RNA, 1395 nt, Artificial Sequence
  derived and/or modified CDS sequence (wt) from neuraminidase__InfluenzaA__AEA04357
augaauccaaaucagaaaauaauaaccauuggaucaaucuguaugguagucggaauaauuagccuaauauugcaaauagggaauauugucucaauauggauuagccauucaauucaaacuggaaaucaaaaccauacuggaacuugcgaccaaagcaucauuaccuauaaaaauagcaccuggguaaaucaaacauaugucaacguuguugcugggaaggauacaacuucagugauauuagccggcaauucaucucuuugcccuauccgugggugggcuauauacagcaaagauaauggcguaagaauugguuccaaaggagauguuuuugucauaagagaacccuuuauuucauguucucacuuggaaugcaggaccuuuuuucugacccaaggcgcccuguugaaugacaagcauucaaaugggaccguuaaggacagaagcccuuauagggccuuaaugagcugcccuguuggugaagcuccguccccguacaacucaagguuugaaucgguugcuuggucagcaagugcaugucaugauggcaugggcuggcuaacaaucggaauuucugguccagaugauggagcaguggcuguguuaaaauacaacggcauaauaacugaaaccauaaaaaguuggaggaaggaaauauugagaacacaagagucugaaugugucugcguaaaugguucauguuucacuauaaugaccgacggcccgaguggugggccggccucguacaaaauuuucaagaucgagaaggggaagguuacuaaaucaauagaguuggaugcaccuaauucucacuacgaggaauguuccuguuacccugauaccagcaaagugaugugugugugcagagacaauuggcacgguucgaaccgaccaugggugucuuucgaucaaaaucuggauuaucaaaugggauacaucugcagugggguuuucggugacaauccgcgucccaaagauggaaaaggcagcugugguccaguguauguugauggagcaaacggaguaaagggauuuucauacaaguaugguaaugguguuuggauagggaggacuaaaaguaucaguuccagacagggguucgagaugauuugggauccuaauggguggacagagacugauaguaauuucuuuacgaaacaagauguaguggcaguaaccgauuggucaggguacagcggaaguuucguucaacauccugagcuaacagggcuggacuguaugaggccuugcuucuggguugaauuaaucaggggacgaccuaaagaaaauacaaucuggaccagugggagcagcauuucuuuuuguggugugaauagugauacuguagauuggucuuggccagacggugccgaguugccauucaccauugacaaguag

SEQ ID NO: 52515 - RNA, 1410 nt, Artificial Sequence; identical to SEQ ID NO: 48479
  derived and/or modified CDS sequence (wt) from neuraminidase__InfluenzaA__AEA04368

SEQ ID NO: 52516 - RNA, 1410 nt, Artificial Sequence
  derived and/or modified CDS sequence (wt) from neuraminidase__InfluenzaA__AEA04379
augaauccaaaucaaaagacaauaacaauuggcucugucucucucaccauugaaacaguaugcuuccucaugcagauugccauccuggcaacuacugugacauugcauuuuaagcaacaugagugcgacucccccgcgagcaaccaaguaaugccaugugaaccaauaauaauagaaaggaacauaacagagauaguguauuugaauaacaccaccauagagaaagagauuugccccgaaguaguggaauacagaaauuggucaaagccgcaaugucaaauuacaggauuugcaccuuuuucuaaggacaauucaauccggcuuucugcugguggggacauuugggugacgagagaaccuuaugugucaugcgauccuggcaaguguuaucaauuugcacucgggcaggggaccacacuagacaacaaacauucaaauggcacaauacaugauagaaucccucaucgaacccuauuaaugaaugaguuggguguuccauuucauuuaggaaccaaacaaguguguguagcaugguccagcucaaguugucacgauggaaaagcaugguugcauguuugugucacuggggaugauagaaaugcaacugcuagcuucauuuaugacgggaggcuuguggacaguauugguucauggucucaaaauauccucaggacccaggagucggaaugcguuuguaucaaugggacuugcacaguaguaaugacugauggaagugcaucaggaagagccgauacuagaauacuauucauuaaagaggggaaaauuguccauauuagcccauugucaggaagugcucagcauauagaggaguguuccuguuacccucgauauccugacgucagauguaucugcagagacaacuggaaaggcucuaauaggcccguuauagacauaaauauggaagauuauagcauugauuccaguuaugugugcucagggcuuguuggcgacacacccaggaacgacgacagcucuagcaauagcaaaagcagggauccuaacaaugagagagggaauccaggagugaaaggcugggccuuugacaauggagaugauguauggaugggaagaacaaucagcaaagauucacgcucagguuaugaaacuuucaaagucauuggugguugguccacaccuaauuccaaaucgcaggucaauagacaggucauaguugacaacaauaauuggucugguuacucugguauuuucucuguugagggcaaaagcugcaucaauaggugcuuuuauguggaguugauaaggggaaggccacaggagacuagaguaugguggaccucaaacaguauuguuguguuuuguggcacuucagguacuuauggaacaggcucauggccugauggggcgaacaucaauuucaugccuauauaa

SEQ ID NO: 52517 - RNA, 1413 nt, Artificial Sequence; identical to SEQ ID NO: 52216
  derived and/or modified CDS sequence (wt) from neuraminidase__InfluenzaA__AEA10295

SEQ ID NO: 52518 - RNA, 1410 nt, Artificial Sequence; identical to SEQ ID NO: 50591
  derived and/or modified CDS sequence (wt) from neuraminidase__InfluenzaA__AEA10306

SEQ ID NO: 52519 - RNA, 1410 nt, Artificial Sequence
  derived and/or modified CDS sequence (wt) from neuraminidase__InfluenzaA__AEA10316
augaauccaaaccaaaagauaauaaccauugguucggucuguaugacaauuggaauggccaacuuaauauuacaaauuggaaacauaaucucaauauggauuagccacucaauucaacuugggaaucaaaaucagauugaaacaugcaaucaaagcaucauuacuuaugaaaacaacacuuggguaaaucagacauauguuaacaucagcaacaccaacuuugcugcuggacagucagugguuuccgugaaauuagcgggcaauuccucucucugcccuguuaguggaugggcuauauacaguaaagacaacaguauaagaaucgguuccaagggggauguguuugucauaagggaaccauucauaucaugcucccccuuggaaugcagaaccuucuucuugacucaaggggccuugcuaaaugacaaacauuccaauggaaccauuaaagacaggagcccauaucgaacccuaaugagcuguccuauuggugaaguucccucuccauacaacucaagauuugagucagucgcuuggucagcaagugcuugucaugauggcaucaauuggcuaacaauuggaauuucuggcccagacaauggggcaguggcuguguuaaaguacaacggcauaauaacagacacuaucaagaguuggagaaacaauauauugagaacacaagaaucugaaugugcauguguaaaugguucuugcuuuacuguaaugaccgauggaccaagugauggacaggccucauacaagaucuucagaauagaaaagggaaagauagucaaaucagucgaaaugaaugccccuaauuaucacuaugaggaaugcuccuguuauccugauucuagugaaaucacaugugugugcagggauaacuggcauggcucgaaucgaccgugggugucuuucaaccagaaucuggaauaucagauaggauacauaugcagugggauuuucggagacaauccacgcccuaaugauaagacaggcaguugugguccaguaucgucuaauggagcaaauggaguaaaaggauuuucauucaaauacggcaaugguguuuggauagggagaacuaaaagcauuaguucaagaagcgguuuugagaugauuugggauccgaacggauggacugggacagacaauaacuucucaauaaagcaagauaucguaggaauaaaugaguggucaggauauagcgggaguuuuguucagcauccagaacuaacagggcuggauuguauaagaccuugcuucuggguugaacuaaucagagggcgacccaaagagaacacaaucuggacuagcgggagcagcauauccuuuugugguguaaacagugacacuguggguuggucuuggccagacggugcugaguugccauuuaccauugacaaguaa

SEQ ID NO: 52520 - RNA, 1410 nt, Artificial Sequence
  derived and/or modified CDS sequence (wt) from neuraminidase__InfluenzaA__AEA10326
augaauccaaaccaaaagauaauaaccauugguucggucuguaugacaauuggaauggcuaacuuaauauuacaaauuggaaacauaaucucaauauggauuagccacucaauucaacuugggaaucaaaaucagauugaaacaugcaaucaaagcgucauuacuuaugaaaacaacacuuggguaaaucagacauauguuaacaucagcaacaccaacuuugcugcuggacagucagugguuuccgugaaauuagcgggcaauuccucucucugcccuguuaguggaugggcuauauacaguaaagacaacaguauaagaaucgguuccaagggggauguguuugucauaagggaaccauucauaucaugcucccccuuggaaugcagaaccuucuucuugacucaaggggccuugcuaaaugacaaacauuccaauggaaccauuaaagacaggagcccauaucgaacccuaaugagcuguccuauuggugaaguucccucuccauacaacucaagauuugagucagucgcuuggucagcaagugcuugucaugauggcaucaauuggcuaacaauuggaauuucuggcccagacaauggggcaguggcuguguuaaaguacaacggcauaauaacagacacuaucaagaguuggagaaacaauauauugagaacacaagagucugaaugugcauguguaaaugguucuugcuuuacuguaaugaccgauggaccaagugauggacaggccucauacaagaucuucagaauagaaaagggaaagauagucaaaucagucgaaaugaaugccccuaauuaucacuaugaggaaugcuccuguuauccugauucuagugaaaucacaugugugugcagggauaacuggcauggcucgaaucgaccgugggugucuuucaaccagaaucuggaauaucagauaggauacauaugcagugggauuuucggagacaauccacgcccuaaugauaagacaggcaguugugguccaguaucaucuaauggagcaaauggaguaaaaggauuuucauucaaauacggcaaugguguuuggauagggagaacuaaaagcauuaguucaagaaacgguuuugagaugauuugggauccgaacggauggacugggacagacaauaacuucucaauaaagcaagauaucguaggaauaaaugaauggucaggauauagcgggaguuuuguucagcauccagaacuaacagggcuggauuguauaagaccuugcuucuggguugaacuaaucagagggcgacccaaagagaacacaaucuggacuagcgggagcagcauauccuuuugugguguaaacagugacacuguggguuggucuuggccagacggugcugaguugccauuuaccauugacaaguaa

SEQ ID NO: 52521 - RNA, 1410 nt, Artificial Sequence
  derived and/or modified CDS sequence (wt) from neuraminidase__InfluenzaA__AEA10335
augaauccaaaccaaaagauaauaaccauugguucggucuguaugacaauuggaauggcuaacuuaauauuacaaauuggaaacauaaucucaauauggauuagccacucaauucaacuugggaaucaaaaucagauugaaacaugcaaucaaagcgucauuacuuaugaaaacaacacuuggguaaaucagacauauguuaacaucaguaacaccaacuuugcugcuggacagucagugguuuccgugaaguuagcgggcaauuccucucucugcccuguuaguggaugggcuauauacaguaaagacaacaguauaagaaucgguuccaagggggauguguuugucauaagggaaccauucauaucaugcucccccuuggaaugcagaaccuucuucuugacucaaggggccuugcuaaaugacaaacauuccaauggaaccauuaaagacaggagcccauaucgaacccuaaugagcuguccuauuggugaaguucccucuccauacaacucaagauuugagucagucgcuuggucagcaagugcuugucaugauggcaucaauuggcuaacaauuggaauuucuggcccagacaauggggcaguggcuguguuaaaguacaacggcauaauaacagacacuaucaagaguuggagaaacaacauauugagaacacaagagucugaaugugcauguguaaaugguucuugcuuuacuguaaugaccgauggaccaagugauggacaggccucauacaagaucuucagaauagaaaagggaaagauagucaaaucagucgaaaugaaugccccuaauuaucacuaugaggaaugcuccuguuauccugauucuagugaaaucacaugugugugcagggauaacuggcauggcucgaaucgaccgugggugucuuucaaccagaaucuggaauaucagauaggauacauaugcagugggauuuucggagacaauccacgcccuaaugauaagaaaggcaguugugguccaguaucgucuaauggagcaaauggaguaaaaggauuuucauucaaauacggcaaugguguuuggauagggagaacuaaaagcauuaguucaagaaacgguuuugagaugauuugggauccgaacggauggacugggacagacaauaacuucucaauaaagcaagauaucguaggaauaaaugaauggucaggauauagcgggaguuuuguucagcauccagaacuaacagggcuggauuguauaagaccuugcuucuggguugaacuaaucagagggcgacccaaagagaacacaaucuggacuagcgggagcagcauauccuuuugugguguaaacagugacacuguggguuggucuuggccagacggugcugaguugccauuuaccauugacaaguaa

SEQ ID NO: 52522 - RNA, 1410 nt, Artificial Sequence
  derived and/or modified CDS sequence (wt) from neuraminidase__InfluenzaA__AEA10342
augaauccaaaccaaaagauaauaaccauugguucggucuguaugacaauuggaauggcuaacuuaauauuacaaauuggaaacauaaucucaauauggauuagccacucaauucaacuugggaaucaaaaucagauugaaacaugcaaucaaagcgucauuacuuaugaaaacaacacuuggguaaaucagacauauguuaacaucagcaacaccaacuuugcugcuggacagucagugguuuccgugaaauuagcgggcaauuccucucucugcccuguuaguggaugggcuauauacaguaaagacaacaguauaagaaucgguuccaagggggauguguuugucauaagggaaccauucauaucaugcucccccuuggaaugcagaaccuucuucuugacucaaggggccuugcuaaaugacaaacauuccaauggaaccauuaaagacaggagcccauaucgaacccuaaugagcuguccuauuggugaaguucccucuccauacaacucaagauuugagucagucgcuuggucagcaagugcuugucaugauggcaucaauuggcuaacaauuggaauuucuggcccagacaauggggcaguggcugucuuaaaguacaacggcauaauaacagacacuaucaagaguuggagaaacaauauauugagaacacaagagucugaaugugcauguguaaaugguucuugcuuuacuguaaugaccgauggaccaagugauggacaggccucauacaagaucuucagaauagaaaagggaaagauagucaaaucagucgaaaugaaugccccuaauuaucacuaugaggaaugcuccuguuauccugauucuagugaaaucacaugugugugcagggauaacuggcauggcucgaaucgaccguggguaucuuucaaccagaaucuggaauaucagauaggauacauaugcagugggauuuucggagacaauccacgcccuaaugauaagacaggcaguugugguccaguaucgucuaauggagcaaauggaguaaaaggauuuucauucaaauacggcaaugguguuuggauagggagaacuaaaagcauuaguucaagaaacgguuuugagaugauuugggauccgaacggauggacugggacagacaauaacuucucaauaaagcaagauaucguaggaauaaaugaguggucaggauauagcgggaguuuuguucagcauccagaacuaacagggcuggauuguauaagaccuugcuucuggguugaacuaaucagagggcgacccaaagagaacacaaucuggacuagcgggagcagcauauccuuuugugguguaaacagugacacuguggguuggucuuggccggacggugcugaguugccauuuaccauugacaaguaa

SEQ ID NO: 52523 - RNA, 1410 nt, Artificial Sequence
  derived and/or modified CDS sequence (wt) from neuraminidase__InfluenzaA__AEA10352
augaauccaaaccaaaagauaauaaccauugguucggucuguaugacaauuggaauggcuaacuuaauauuacaaauuggaaacauaaucucaauauggauuagccacucaauucaacuugggaaucaaaaucagauugaaacaugcaaucaaagcgucauuacuuaugaaaacaacacuuggguaaaucagacauauguuaacaucagcaacaccaacuuugcugcuggacagucagugguuuccgugaaauuagcgggcaauuccucucucugcccuguuaguggaugggcuauauacaguaaagacaacaguauaagaaucgguuccaagggggauguguuugucauaagggaaccauucauaucaugcucccccuuggaaugcagaaccuucuucuugacucaaggggccuugcuaaaugacaaacauuccaauggaaccauuaaagacaggagcccauaucgaacccuaaugagcuguccuauuggugaaguucccucuccauacaacucaagauuugagucagucgcuuggucagcaagugcuugucaugauggcaucaauuggcuaacaauuggaauuucuggcccagacaauggggcaguggcuguguuaaaguacaacggcauaauaacagacacuaucaagaguuggagaaacaauauauugagaacacaagagucugaaugugcauguauaaaugguucuugcuuuacuguaaugaccgauggaccaagugauggacaggccucauacaagaucuucagaauagaaaagggaaagauagucaaaucagucgaaaugaaugccccuaauuaucacuaugaggaaugcuccuguuauccugauucuagugaaaucacaugugugugcagggauaacuggcauggcucgaaucgaccgugggugucuuucaaccagaaucuggaauaucagauaggauacauaugcagugggauuuucggagacaauccacgcccuaaugauaagacaggcaguuguaguccaguaucgucuaauggagcaaauggaguaaaaggauuuucauucaaauacggcaaugguguuuggauagggagaacuaaaagcauuaguucaagaaacgguuuugagaugauuugggauccgaacggauggacugggacagacaauaacuucucaauaaagcaagauaucguaggaauaaaugaguggucaggauauagcgggaguuuuguucagcauccagaacuaacagggcuggauuguauaagaccuugcuucuggguugaacuaaucagagggcgacccaaagagaacacaaucuggacuagcgggagcagcauauccuuuugugguguaaacagugacacuguggguuggucuuggccagacggugcugaguugccauuuaccauugacaaguaa

SEQ ID NO: 52524 - RNA, 1410 nt, Artificial Sequence; identical to SEQ ID NO: 49794
  derived and/or modified CDS sequence (wt) from neuraminidase__InfluenzaA__AEA48991

SEQ ID NO: 52525 - RNA, 1410 nt, Artificial Sequence
  derived and/or modified CDS sequence (wt) from neuraminidase__InfluenzaA__AEA72707
augaauccaaaucaaaagauaauaacgauuggcucuguuucucucaccauuuccacaauaugcuucuucaugcaaauugccaucuugauaacuacuguaacauugcauuucaagcaauauaaauucaacucccccccaaacaaccaagugaugcugugugaaccaacaauaauagaaagaaacauaacagagauaguguaucugaccaacaccaccauagagaaggaaauaugccccaaacuagcagaauacagaaauuggucaaaaccgcaaugugacauuacgggauuugcaccuuuuucuaaggacaauucgauuaggcuuuccgcugguggggacaucugggugacaagagaaccuuaugugucaugcgauccugacaaguguuaucaauuugcccuuggacagggaacaacacuaaacaacgugcauucaaauaacacaguacgugauaggaccccuuaucggacccuauugaugaaugaguuagguguuccuuuucaucuggggaccaagcaagugugcauagcuugguccagcucgaguugucacgauggaaaagcauggcugcauguuuguauaacgggggaugauaaaaaugcaacugcuagcuucauuuacaaugggaggcuuguagauaguguuguuucaugguccaaagaaauucucaggacccaggagucagaaugcguuuguaucaauggaacuuguacaguaguaaugacugauggaagugcuucaggaaaagcugauacuaaaauacuauucauugaggaggggaaaauuguucauacuagcacauugucaggaagugcucagcaugucgaggagugcucuugcuauccucgauauccuggugucagaugugucugcagagacaacuggaaaggcuccaauaggcccaucguagauauaaacauaaaggaucauagcauuguuuccaguuauguguguucaggacuuguuggagacacacccagaaaaaacgacagcuccagcaguagccauuguuuggauccuaacaaugaagaagggggucauggagugaaaggcugggccuuugaugauggaaaugacguguggaugggaagaacaaucaacgagacgucacgcuuaggguaugaaaccuucaaagucauugaaggcugguccaacccuaaguccaaauugcagauaaauaggcaagucauaguugacagagguaauagguccgguuauucugguauuuucucuguugaaggcaaaagcugcaucaaucggugcuuuuauguggaguugauuaggggaagaaaagaggaaacugaagucuuguggaccucaaacaguauuguuguguuuuguggcaccucagguacauauggaacaggcucauggccugauggggcggaccucaaucucaugccuauauaa

SEQ ID NO: 52526 - RNA, 1410 nt, Artificial Sequence; identical to SEQ ID NO: 51422
  derived and/or modified CDS sequence (wt) from neuraminidase__InfluenzaA__AEA72718

SEQ ID NO: 52527 - RNA, 1410 nt, Artificial Sequence; identical to SEQ ID NO: 51422
  derived and/or modified CDS sequence (wt) from neuraminidase__InfluenzaA__AEA72729

SEQ ID NO: 52528 - RNA, 1410 nt, Artificial Sequence
  derived and/or modified CDS sequence (wt) from neuraminidase__InfluenzaA__AEA72742
augaauccaaaccaaaagauaauaaccauugguucggucuguaugacaauuggaauggcuaacuuaauauuacaaauuggaaacauaaucucaauauggauuagccacucaauucaacuugggaaucaaagucagauugaaacaugcaaucaaagcgucauuacuuaugaaaacaacacuuggguaaaucagacauauguuaacaucagcaacaccaacuuugcugcuggacagucagugguuuccgugaaauuagcgggcaauuccucucucugcccuguuaguggaugggcuauauacaguaaagacaacaguauaagaaucgguuccaaaggggauguguuugucauaagggaaccauucauaucaugcucccccuuggaaugcagaaccuucuucuugacucaaggggccuugcuaaaugacaaacauuccaauggaaccauuaaagacaggagcccauaucgaacccuaaugagcuguccuauuggugaaguucccucuccauacaacucaagauuugagucagucgcuuggucagcaagugcuugucaugauggcaucaauuggcuaacaauuggaauuucuggcccagacaauggggcaguggcuguguuaaaguacaacggcauaauaacagacacuaucaagaguuggagaaacaauauauugagaacacaagagucugaaugugcauguguaaaugguucuugcuuuaccauaaugaccgauggaccaagugauggacaggccucauacaagaucuucagaauagaaaagggaaagauagucaaaucagucgaaaugaaugccccuaauuaucacuaugaggaaugcuccuguuauccugauucuagugaaaucacaugugugugcagggauaacuggcauggcucgaaucgaccgugggugucuuucaaccagaaucuggaauaucagauaggauacauaugcagugggauuuucggagacaauccacgcccuaaugauaagacaggcaguugugguccaguaucgucuaauggagcaaauggaguaaaaggauuuucauucaaauacggcaaugguguuuggauagggagaacuaaaagcauuaguucaagaaacgguuuugagaugauuugggauccgaacggauggacugggacagacaauaacuucucaauaaagcaagauaucguaggaauaaaugaguggucaggauauagcgggaguuuuguucagcauccagaacuaacagggcuggauuguauaagaccuugcuucuggguugaacuaaucagagggcgacccaaagagaacacaaucuggacuagcgggagcagcauauccuuuugugguguaaacagugacacuguggguuggucuuggccagacggugcugaguugccauuuaccauugacaaguaa

SEQ ID NO: 52529 - RNA, 1410 nt, Artificial Sequence
  derived and/or modified CDS sequence (wt) from neuraminidase__InfluenzaA__AEA72779
augaauccaaaccaaaagauaauaaccauugguucggucuguaugacaauuggaauggcuaacuuaauauuacaaauugggaacauaaucucaauauggauuagccacucaauucaacuugggaauaaaaaucagauugaaacaugcaaucaaagcgucauuacuuaugaaaacaacacuuggguaaaucagacauauguuaacaucagcaacaccaacuuugcugcuggacagucagugguuuccgugaaauuagcgggcaauuccucucucugcccuguuaguggaugggcuauauacaguaaagacaacaguauaagaaucgguuccaagggggauguguuugucauaagggaaccauucauaucaugcucccccuuggaaugcagaaccuucuucuugacucaaggggccuugcuaaaugacaaacauuccaauggaaccauuaaagacaggagcccauaucgaacccuaaugagcuguccuauuggugaaguucccucuccauacaacucaagauuugagucagucgcuuggucagcaagugcuugucaugauggcaucaauuggcuaacaauuggaauuucuggcccagacaauggggcaguggcuguguuaaaguacaacggcauaauaacagacacuaucaagaguuggagaaacaauauauugagaacacaagagucugaaugugcauguguaaaugguucuugcuuuacuguaaugaccgauggaccaagugauggacaggccucauacaagaucuucaggauagaaaagggaaagauagucaaaucagucgaaaugaaugccccuaauuaucacuaugaggaaugcuccuguuauccugauucuagugaaaucacaugugugugcagggauaacuggcauggcucgaaucgaccgugggugucuuucaaccagaaucuggaauaucagauaggauacauaugcagugggauuuucggagacaauccacgcccuaaugauaagaaaggcaguugugguccaguaucgucuaauggagcaaauggaguaaaaggauuuucauucaaauacggcaaugguguuuggauagggagaacuaaaagcauuaguucaagaaacgguuuugagaugauuugggauccgaacggauggacugggacagacaauaacuucucaauaaagcaagauaucguaggaauaaaugaauggucaggauauagcgggaguuuuguucagcauccagaacuaacagggcuggauuguauaagaccuugcuucuggguugaacuaaucagagggcgacccaaagagaacacaaucuggacuagcgggagcagcauauccuuuugugguguaaacagugacacuguggguuggucuuggccagacggugcugaguugccauuuaccauugacaaguaa

SEQ ID NO: 52530 - RNA, 1410 nt, Artificial Sequence
  derived and/or modified CDS sequence (wt) from neuraminidase__InfluenzaA__AEA72789
augaauccaaaccaaaagauaauaaccauugguucggucuguaugacaauuggaauggcuaacuuaauauuacaaauuggaaacauaaucucaauauggauuagccacucaauucaacuugggaaucaaagucagauugaaacaugcaaucaaagcgucauuacuuaugaaaacaacacuuggguaaaucagacauauguuaacaucagcaacaccaacuuugcugcuggacagucagugguuuccgugaaauuagcgggcaauuccucucucugcccuguuaguggaugggcuauauacaguaaagacgacaguauaagaaucgguuccaagggggauguguuugucauaagggaaccauucauaucaugcucccccuuggaaugcagaaccuucuucuugacucaaggggccuugcuaaaugacaaacauuccaauggaaccauuaaagacaggagcccauaucgaacccuaaugagcuguccuauuggugaaguucccucuccauacaacucaagauuugagucagucgcuuggucagcaagugcuugucaugauggcaucaauuggcuaacaauuggaauuucuggcccagacaauggggcaguggcuguguuaaaguacaacggcauaauaacagacacuaucaagaguuggagaaacaauauauugagaacacaagagucugaaugugcauguguaaaugguucuugcuuuacuguaaugaccgauggaccaagugauggacaggccucauacaagaucuucagaauagaaaagggaaagauagucaaaucagucgaaaugaaugccccuaauuaucacuaugaggaaugcuccuguuauccugauucuagugaaaucacaugugugugcagggauaacuggcauggcucgaaucgaccgugggugucuuucaaccagaaucuggaauaucagauaggauacauaugcagugggauuuucggagacaauccacgcccuaaugauaagacaggcaguugugguccaguaucgucuaauggagcaaauggaguaaaaggauuuucauucaaauacggcaaugguguuuggauagggagaacuaaaagcauuaguucaagaaacgguuuugagaugauuugggauccgaacggauggacugggacagacaauaacuucucaauaaagcaagauaucguaggaauaaaugaguggucaggauauagcgggaguuuuguucagcauccagaacuaacagggcuggauuguauaagaccuugcuucuggguugaacuaaucagagggcgacccaaagagaacacaaucuggacuagcgggagcagcauauccuuuugugguguaaacagugacacuguggguuggucuuggccagacggugcugaguugccauuuaccauugacaaguaa

SEQ ID NO: 52531 - RNA, 1410 nt, Artificial Sequence; identical to SEQ ID NO: 51422
  derived and/or modified CDS sequence (wt) from neuraminidase__InfluenzaA__AEA73291

SEQ ID NO: 52532 - RNA, 1410 nt, Artificial Sequence; identical to SEQ ID NO: 51422
  derived and/or modified CDS sequence (wt) from neuraminidase__InfluenzaA__AEA73302

SEQ ID NO: 52533 - RNA, 1410 nt, Artificial Sequence; identical to SEQ ID NO: 51422
  derived and/or modified CDS sequence (wt) from neuraminidase__InfluenzaA__AEA73313

SEQ ID NO: 52534 - RNA, 1410 nt, Artificial Sequence; identical to SEQ ID NO: 51422
  derived and/or modified CDS sequence (wt) from neuraminidase__InfluenzaA__AEA73324

SEQ ID NO: 52535 - RNA, 1410 nt, Artificial Sequence
  derived and/or modified CDS sequence (wt) from neuraminidase__InfluenzaA__AEA73335
augaauccaaaucaaaagauaauaacgauuggcucuguuucucucaccauuuccacaauaugcuucuucaugcaaauugccaucuugauaacuacuguaacauugcauuucaagcaauauaaauucaacucccccccaaacaaccaagugaugcugugugaaccaacaauaauagaaagaaacauaacagagauaguguaucugaccaacaccaccauagagaaggaaauaugccccaaacuagcagaauacagaaauuggucaaaaccgcaaugugacauuacgggauuugcaccuuuuucuaaggacaauucgauuaggcuuuccgcugguggggacaucugggugacaagagaaccuuaugugucaugcgauccugacaaguguuaucaauuugcccuuggacagggaacaacacuaaacaacgugcauucaaauaacacaguacgugauaggaccccuuaucggacccuauugaugaaugaguuagguguuccuuuucaucuggggaccaagcaaguaugcauagcaugguccagcucgaguugucacgauggaaaagcauggcugcauguuuguauaacgggggaugauaaaaaugcaacugcuagcuucauuuacaaugggaggcuuguagauaguguuguuucaugguccaaagaaauucucaggacccaggagucagaaugcguuuguaucaauggaacuuguacaguaguaaugacugauggaagugcuucaggaaaagcugauacuaaaauacuauucauugaggaggggaaaauuguucauacuagcacauugucaggaagugcucagcaugucgaggagugcucuugcuauccucgauauccuggugucagaugugucugcagagacaacuggaaaggcuccaauaggcccaucguagauauaaacauaaaggaucauagcauuguuuccaguuauguguguucaggacuuguuggagacacacccagaaaaaacgacagcuccagcaguagccauuguuuggauccuaacaaugaagaagguggucauggagugaaaggcugggccuuugaugauggaaaugacguguggaugggaagaacaaucaacgagacgucacgcuuaggguaugaaaccuucaaagucauugaaggcugguccaacccuaaguccaaauugcagauaaauaggcaagucauaguugacagagguaauagguccgguuauucugguauuuucucuguugaaggcaaaagcugcaucaaucggugcuuuuauguggaguugauuaggggaagaaaagaggaaacugaagucuuguggaccucaaacaguauuguuguguuuuguggcaccucagguacauauggaacaggcucauggccugauggggcggaccucaaucucaugccuauauaa

SEQ ID NO: 52536 - RNA, 1410 nt, Artificial Sequence; identical to SEQ ID NO: 51422
  derived and/or modified CDS sequence (wt) from neuraminidase__InfluenzaA__AEA73346

SEQ ID NO: 52537 - RNA, 1410 nt, Artificial Sequence; identical to SEQ ID NO: 51422
  derived and/or modified CDS sequence (wt) from neuraminidase__InfluenzaA__AEA73357

SEQ ID NO: 52538 - RNA, 1410 nt, Artificial Sequence; identical to SEQ ID NO: 51422
  derived and/or modified CDS sequence (wt) from neuraminidase__InfluenzaA__AEA73368

SEQ ID NO: 52539 - RNA, 1410 nt, Artificial Sequence; identical to SEQ ID NO: 51422
  derived and/or modified CDS sequence (wt) from neuraminidase__InfluenzaA__AEA73379

SEQ ID NO: 52540 - RNA, 1410 nt, Artificial Sequence; identical to SEQ ID NO: 51422
  derived and/or modified CDS sequence (wt) from neuraminidase__InfluenzaA__AEA73390

SEQ ID NO: 52541 - RNA, 1410 nt, Artificial Sequence; identical to SEQ ID NO: 51422
  derived and/or modified CDS sequence (wt) from neuraminidase__InfluenzaA__AEA73401

SEQ ID NO: 52542 - RNA, 1410 nt, Artificial Sequence; identical to SEQ ID NO: 51422
  derived and/or modified CDS sequence (wt) from neuraminidase__InfluenzaA__AEA73412

SEQ ID NO: 52543 - RNA, 1410 nt, Artificial Sequence; identical to SEQ ID NO: 51422
  derived and/or modified CDS sequence (wt) from neuraminidase__InfluenzaA__AEA73423

SEQ ID NO: 52544 - RNA, 1410 nt, Artificial Sequence; identical to SEQ ID NO: 51422
  derived and/or modified CDS sequence (wt) from neuraminidase__InfluenzaA__AEA73455

SEQ ID NO: 52545 - RNA, 1410 nt, Artificial Sequence; identical to SEQ ID NO: 51422
  derived and/or modified CDS sequence (wt) from neuraminidase__InfluenzaA__AEA73466

SEQ ID NO: 52546 - RNA, 1410 nt, Artificial Sequence
  derived and/or modified CDS sequence (wt) from neuraminidase__InfluenzaA__AEA73477
augaauccaaaucaaaagauaauaacgauuggcucuguuucucucaccauuuccacaauaugcuucuucaugcaaauugccaucuugauaacuacuguaacauugcauuucaagcaauauaaauucaacucccccccaaacaaccaagugaugcugugugaaccaacaauaauagaaagaaacauaacagagauaguguaucugaccaacaccaccauagagaaggaaauaugccccaaacuagcagaauacagaaauuggucaaaaccgcaaugugacauuacgggauuugcaccuuuuucuaaggacaauucgauuaggcuuuccgcugguggggacaucugggugacaagagaaccuuaugugucaugcgauccugacaaguguuaucaauuugcccuuggacagggaacaacacuaaacaacgugcauucaaauaacacaguacgugauaggaccccuuaucggacccuauugaugaaugaguuagguguuccuuuucaucuggggaccaagcaagugugcauagcaugguccagcucgaguugucacgauggaaaagcauggcugcauguuuguauaacgggggaugauaaaaaugcaacugcuagcuucauuuacaaugggaggcuuguagauaguguuguuucaugguccaaagaaauucucaggacccaggagucagaaugcguuuguaucaauggaacuuguacaguaguaaugacugauggaagugcuucaggaaaagcugauacuaaaauacuauucauugaggaggggaaaauuguucauacuagcacauugucaggaagugcucagcaugucgaggagugcucuugcuauccucgauauccuggugucagaugugucugcagagacaacuggaaaggcuccaauaggcccaucguagauauaaacauaaaggaucauagcauuguuuccaguuauguguguucaggacuuguuggagacacacccagaaaaaacgacagcuccagcaguagccauuguuuggauccuaacaaugaagaagguggucauggagugaaaggcugggccuuugaugauggaaaugacguguggaugggaagaacaaucaacgagacgucacgcuuaggguaugaaaccuucaaagucauugaaggcugguccaacccuaaguccaaauugcagauaaauaggcaagucauaguugacagagguaauagguccgguuauucugguauuuucucuguugaaggcaaaagcugcaucaaucggugcuuuuauguggaguugauuaggggaagaaaagaggaaacuaaagucuuguggaccucaaacaguauuguuguguuuuguggcaccucagguacauauggaacaggcucauggccugauggggcggaccucaaucucaugccuauauaa

SEQ ID NO: 52547 - RNA, 1410 nt, Artificial Sequence
  derived and/or modified CDS sequence (wt) from neuraminidase__InfluenzaA__AEA73488
augaauccaaaucaaaagauaauaacgauuggcucuguuucucucaccauuuccacaauaugcuucuucaugcaaauugccaucuugauaacuacuguaacauugcauuucaagcaauauaaauucaacucccccccaaacaaccaagugaugcugugugaaccaacaauaauagaaagaaacauaacagagauaguguaucugaccaacaccaccauagagaaggaaauaugccccaaacuagcagaauacagaaauuggucaaaaccgcaaugugacauuacgggauuugcaccuuuuucuaaggacaauucgauuaggcuuuccgcugguggggacaucugggugacaagagaaccuuaugugucaugcgauccugacaaguguuaucaauuugcccuuggacagggaacaacacuaaacaacgugcauucaaauaacacaguacgugauaggaccccuuaucggacccuauugaugaaugaguuagguguuccuuuucaucuggggaccaagcaagugugcauagcuugguccagcucgaguugucacgauggaaaagcauggcugcauguuuguauaacgggggaugauaaaaaugcaacugcuagcuucauuuacaaugggaggcuuguagauaguguuguuucaugguccaaagaaauucucaggacccaggagucagaaugcguuuguaucaauggaacuuguacaguaguaaugacugauggaagugcuucaggaaaagcugauacuaaaauacuauucauugaggaggggaaaauuguucauacuagcacauugucaggaagugcucagcaugucgaggagugcucuugcuauccucgauauccuggugucagaugugucugcagagacaacuggaaaggcuccaauaggcccaucguagauauaaacauaaaggaucauagcauuguuuccaguuauguguguucaggacuuguuggagacacacccagaaaaaacgacagcuccagcaguagccauuguuuggauccuaacaaugaagaagguggucauggagugaaaggcugggccuuugaugauggaaaugacguguggaugggaagaacaaucaacgagacgucacgcuuaggguaugaaaccuucaaagucauugaaggcugguccaacccuaaguccaaauugcagauaaauaggcaagucauaguugacagagguaauagguccgguuauucugguauuuucucuguugaaggcaaaagcugcaucaaucggugcuuuuauguggaguugauuaggggaagaaaagaggaaacugaagucuuguggaccucaaacaguauuguuguguuuuguggcaccucagguacauauggaacaggcucauggccugauggggcggaccucaaucucaugccuauauaa

SEQ ID NO: 52548 - RNA, 1410 nt, Artificial Sequence
  derived and/or modified CDS sequence (wt) from neuraminidase__InfluenzaA__AEA73499
augaauccaaaucaaaagauaauaacgauuggcucuguuucucucaccauuuccacaauaugcuucuucaugcaaauugccaucuugauaacuacuguaacauugcauuucaagcaauauaaauucaacucccccccaaacaaccaagugaugcugugugaaccaacaauaauagaaagaaacauaacagagauaguguaucugaccaacaccaccauagagaaggaaauaugccccaaacuagcagaauacagaaauuggucaaaaccgcaaugugacauuacgggauuugcaccuuuuucuaaggacaauucgauuaggcuuuccgcugguggggacaucugggugacaagagaaccuuaugugucaugcgauccugacaaguguuaucaauuugcccuuggacagggaacaacaauaaacaacgugcauucaaauaacacaguacgugauaggaccccuuaucggacccuauugaugaaugaguuagguguuccuuuucaucuggggaccaagcaagugugcauagcaugguccagcucgaguugucacgauggaaaagcauggcugcauguuuguauaacgggggaugauaaaaaugcaacugcuagcuucauuuacaaugggaggcuuguagauaguguuguuucaugguccaaagaaauucucaggacccaggagucagaaugcguuuguaucaauggaacuuguacaguaguaaugacugauggaagugcuucaggaaaagcugauacuaaaauacuauucauugaggaggggaaaauuguucauacuagcacauugucaggaagugcucagcaugucgaggagugcucuugcuauccucgauauccuggugucagaugugucugcagagacaacuggaaaggcuccaauaggcccaucguagauauaaacauaaaggaucauagcauuguuuccaguuauguguguucaggacuuguuggagacacacccagaaaaaacgacagcuccagcaguagccauuguuuggauccuaacaaugaagaagguggucauggagugaaaggcugggccuuugaugauggaaaugacguguggaugggaagaacaaucaacgagacgucacgcuuaggguaugaaaccuucaaagucauugaaggcugguccaacccuaaguccaaauugcagauaaauaggcaagucauaguugacagagguaauagguccgguuauucugguauuuucucuguugaaggcaaaagcugcaucaaucggugcuuuuauguggaguugauuaggggaagaaaagaggaaacugaagucuuguggaccucaaacaguauuguuguguuuuguggcaccucagguacauauggaacaggcucauggccugauggggcggaccucaaucucaugccuauauaa

SEQ ID NO: 52549 - RNA, 1410 nt, Artificial Sequence
  derived and/or modified CDS sequence (wt) from neuraminidase__InfluenzaA__AEA73510
augaauccaaaucaaaagauaauaacgauuggcucuguuucucucaccauuuccacaauaugcuucuucaugcaaauugccaucuugauaacuacuguaacauugcauuucaagcaauauaaauucaacucccccccaaacaaccaagugaugcugugugaaccaacaauaauagaaagaaacauaacagagauaguguaucugaccaacaccaccauagagaaggaaauaugccccaaacuagcagaauacagaaauuggucaaaaccgcaaugugacauuacgggauuugcaccuuuuucuaaggacaauucgauuaggcuuuccgcugguggggacaucugggugacaagagaaccuuaugugucaugcgauccugacaaguguuaucaauuugcccuuggacagggaacaacacuaaacaacgugcauucaaauaacacaguacgugauaggaccccuuaucggacccuauugaugaaugaguuagguguuccuuuucaucuggggaccaagcaagugugcauagcaugguccagcucgaguugucacgauggaaaagcauggcugcauguuuguauaacgggggaugauaaaaaugcaacugcuagcuucauuuacaaugggaggcuuguagauaguguuguuucaugguccaaagaaauucucaggacccaggagucagaaugcguuuguaucaauggaacuuguacaguaguaaugacugauggaagugcuucaggaaaagcugauacuaaaauacuauucauugaggaggggaaaauuguucauacuagcacauugucaggaagugcucagcaugucgaggagugcucuugcuauccucgauauccuggugucagaugugucugcagagacaacuggaaaggcuccaauaggcccaucguagauauaaacauaaaggaucauagcauuguuuccagcuauguguguucaggacuuguuggagacacacccagaaaaaacgacagcuccagcaguagccauuguuuggauccuaacaaugaagaagguggucauggagugaaaggcugggccuuugaugauggaaaugacguguggaugggaagaacaaucaacgagacgucacgcuuaggguaugaaaccuucaaagucauugaaggcugguccaacccuaaguccaaauugcagauaaauaggcaagucauaguugacagagguaauagguccgguuauucugguauuuucucuguugaaggcaaaagcugcaucaaucggugcuuuuauguggaguugauuaggggaagaaaagaggaaacugaagucuuguggaccucaaacaguauuguuguguuuuguggcaccucagguacauauggaacaggcucauggccugauggggcggaccucaaucucaugccuauauaa

SEQ ID NO: 52550 - RNA, 1410 nt, Artificial Sequence; identical to SEQ ID NO: 51422
  derived and/or modified CDS sequence (wt) from neuraminidase__InfluenzaA__AEA73521

SEQ ID NO: 52551 - RNA, 1410 nt, Artificial Sequence
  derived and/or modified CDS sequence (wt) from neuraminidase__InfluenzaA__AEA73532
augaauccaaaucaaaagauaauaacgauuggcucuguuucucucaccauuuccacaauaugcuucuucaugcaaauugccaucuugauaacuacuguaacauugcauuucaagcaauauaaauucaacucccccccaaacaaccaagugaugcugugugaaccaacaauaauagaaagaaacauaacagagauaguguaucugaccaacaccaccauagagaaggaaauaugccccaaacuagcagaauacagaaauuggucaaaaccgcaaugugacauuacgggauuugcaccuuuuucuaaggacaauucgauuaggcuuuccgcugguggggacaucugggugacaagagaaccuuaugugucaugcgauccugacaaguguuaucaauuugcccuuggacagggaacaacacuaaacaacgugcauucaaauaacacaguacgugauaggaccccuuaucggacccuauugaugaaugaguuagguguuccuuuucaucuggggaccaagcaagugugcauagcaugguccagcucgaguugucacgauggaaaagcauggcugcauguuuguauaacgggggaugauaaaaaugcaacugcuagcuucauuuacaaugggaggcuuguagauaguguuguuucaugguccaaagaaauucucaggacccaggagucagaaugcguuuguaucaauggaacuuguacaguaguaaugacugauggaagugcuucaggaaaagcugauacuaaaauacuauucauugaggaggggaaaauuguucauacuagcacauugucaggaagugcucagcaugucgaggagugcucuugcuauccucgauauccuggugucagaugugucugcagagacaacuggaaaggcuccaauaggcccaucguagauauaaacauaaaggaucauagcauuguuuccaguuauguguguucaggacuuguuggagacacacccagaaaaaacgacagcuccagcaguagccauuguuuggauccuaacaaugaagaagguggucauggagugaaaggcugggccuuugaugauggaaaugacguguggaugggaagaacaaucaacgagacgucacgcuuaggguaugaaaccuucaaagucauugaaggcugguccaacccuaaguccaaauugcagauaaauaggcaagucauaguugacagagguaauaggucagguuauucugguauuuucucuguugaaggcaaaagcugcaucaaucggugcuuuuauguggaguugauuaggggaagaaaagaggaaacugaagucuuguggaccucaaacaguauuguuguguuuuguggcaccucagguacauauggaacaggcucauggccugauggggcggaccucaaucucaugccuauauaa

SEQ ID NO: 52552 - RNA, 1410 nt, Artificial Sequence; identical to SEQ ID NO: 51422
  derived and/or modified CDS sequence (wt) from neuraminidase__InfluenzaA__AEA73543

SEQ ID NO: 52553 - RNA, 1410 nt, Artificial Sequence; identical to SEQ ID NO: 51422
  derived and/or modified CDS sequence (wt) from neuraminidase__InfluenzaA__AEA73554

SEQ ID NO: 52554 - RNA, 1410 nt, Artificial Sequence; identical to SEQ ID NO: 51425
  derived and/or modified CDS sequence (wt) from neuraminidase__InfluenzaA__AEA73565

SEQ ID NO: 52555 - RNA, 1413 nt, Artificial Sequence
  derived and/or modified CDS sequence (wt) from neuraminidase__InfluenzaA__AEA73576
augaacccaaaucaaaagauaauaaccauuggaucaaucaguauagcaaucggaauaauuagucuaauguugcaaauaggaaauauuauuucaauaugggcuagucacucaauccaaacuggaagucaaaacaacacuggaauaugcaaccaaagaaucaucacauaugaaaacagcaccugggugaaucacacauauguuaauauuaacaacacuaauguuguugcuggagaggacaaaacgucagugacauuggccggcaauucaucucuuuguucuaucaguggaugggcuauauacacaaaagacaacagcauaagaauuggcuccaaaggagauguuuuugucauaagagaaccuuucauaucauguucucacuuggaaugcagaaccuuuuuucugacccaaggcgcucuauuaaaugacaaacauucaaaugggaccguaaaggacagaaguccuuauagggccuuaaugagcuguccucuaggugaagcuccguccccauacaauucaaaguucgaaucaguugcauggucagcaagcgcaugccaugauggcaugggcugguuaacaaucggaauuucugguccagacaauggagcuguggcuguacuaaaauacaacggaauaauaacuggaaccauaaaaaguuggaaaaagcaaauauuaagaacacaagagucugaaugugucuguaugaacgggucauguuucaccauaaugaccgaugguccgaguaauaaagccgccucguacaaaauuuucaagaucgaaaaggggaagguuacuaaaucaauagaguugaaugcacccaauuuuuauuaugaggaaugcuccuguuacccagacacuggcauagugauguguguaugcagggacaacuggcaugguucaaaucgacccugggugucuuuuaaucaaaacuuggauuaucaaauaggauacaucugcaguggaguguuuggugacaauccgcgucccgaagauggagagggcagcugcaauccagugacuguugauggagcaaacggaguaaaaggguuuucauacaaauaugguaaugguguuuggauaggaaggaccaaaaguaacagacuuagaaagggguuugagaugauuugggauccuaauggauggacaaauaccgacagugauuucucagugaaacaggauguuguagcaauaacugauuggucaggguacagcggaaguuucguccaacauccugaguuaacaggauuggacuguauaagaccuugcuucuggguugaguuagucagagggcugccuagagaaaauacaacaaucuggacuagugggagcagcauuucuuuuuguggcguuaauagugauacugcaaacuggucuuggccagacggugcugaguugccguucaccauugacaaguag

SEQ ID NO: 52556 - RNA, 1413 nt, Artificial Sequence
  derived and/or modified CDS sequence (wt) from neuraminidase__InfluenzaA__AEA73587
augaacccaaaucaaaagauaauaaccauuggaucaaucaguauagcaaucggaauaauuagucuaauguugcaaauaggaaauauuauuucaauaugggcuagucacucaauccaaacuggaagucaaaacaacacuggaauaugcaaccaaagaaucaucacauaugaaaacagcaccugggugaaucacacauauguuaauauuaacaacacuaauguuguugcuggagaggacaaaacgucagugacauuggccggcaauucaucucuuugcucuaucaguggaugggcuauauacacaaaagacaacagcauaagaauuggcuccaaaggagauguuuuugucauaagagaaccuuucauaucauguucucacuuggaaugcagaaccuuuuuucugacccaaggcgcucuauuaaaugacaaacauucaaaugggaccguaaaggacagaaguccuuauagggccuuaaugagcuguccucuaggugaagcuccguccccauacaauucaaaguucgaaucaguugcauggucagcaagcgcaugccaugauggcaugggcugguugacaaucggaauuucugguccagacaauggagcuguggcuguacuaaaauacaacggaauaauaacuggaaccauaaaaaguuggaaaaagcaaauauuaagaacacaagagucugaaugugucuguaugaacgggucauguuucaccauaaugaccgauggcccgaguaauaaagccgccucguacaaaauuuucaagaucgaaaaggggaagguuacuaaaucaauagaguugaaugcacccaauuuuuauuacgaggaaugcuccuguuacccagacacuggcauagugauguguguaugcagggacaacuggcaugguucaaaucgaccuuggguguccuuuaaucaaaauuuggauuaucaaauaggauacaucugcaguggaguguuuggugacaauccgcgucccgaagauggagagggcagcugcaauccagugacuguugauggagcaaacggaguaaaaggguuuucauacaaauaugguaaugguguuuggauaggaaggaccaaaaguaacagacuuagaaagggguuugagaugauuugggauccuaauggauggacaaauaccgacagugauuucucagugaaacaggauguuguagcaauaacugauuggucaggguacagcggaaguuucguccaacauccugaguugacaggauuggacuguauaagaccuugcuucuggguugaguuagucagagggcugccuagagaaaauacaacaaucuggacuagugggagcagcauuucuuuuuguggcguuaauagugauacugcaaacuggucuuggccagacggugcugaguugccguucaccauugacaaguag

SEQ ID NO: 52557 - RNA, 1413 nt, Artificial Sequence
  derived and/or modified CDS sequence (wt) from neuraminidase__InfluenzaA__AEA73598
augaacccaaaucaaaagauaauaaccauuggaucaaucaguauagcaaucggaauaauuagucuaauguugcaaauaggaaauauuauuucaauaugggcuagucacucaauccaaacuggaagucaaaacaacacuggaauaugcaaccaaagaaucaucacauaugaaaacagcaccugggugaaucacacauauguuaauauuaacaacacuaauguuguugcuggagaggacaaaacgucagugacauuggccggcaauucaucucuuuguucuaucaguggaugggcuauauacacaaaagacaacagcauaagaauuggcuccaaaggagauguuuuugucauaagagaaccuuucauaucauguucucacuuggaaugcagaaccuuuuuucugacccaaggcgcucuauuaaaugacaaacauucaaaugggaccguaaaggacagaaguccuuauagggccuuaaugagcuguccucuaggugaagcuccguccccauacaauucaaaguucgaaucaguugcauggucagcaagcgcaugccaugauggcaugggcugguugacaaucggaauuucugguccagacaauggagcuguggcuguacuaaaauacaacggaauaauaacuggaaccauaaaaaguuggaaaaagcaaauauuaagaacacaagagucugaaugugucuguaugaacgggucauguuucaccauaaugaccgauggcccgaguaauaaagccgccucguacaaaauuuucaagaucgaaaaggggaagguuacuaaaucaauagaauugaaugcacccaauuuuuauuacgaggaaugcuccuguuacccagacacuggcauagugauguguguaugcagggacaacuggcaugguucaaaucgaccuugggugucuuuuaaucaaaauuuggauuaucaaauaggauacaucugcaguggaguguuuggugacaauccgcgucccgaagauggagagggcagcugcaauccagugacuguugauggagcagacggaguaaaaggguuuucauacaaauaugguaaugguguuuggauaggaaggaccaaaaguaacagacuuagaaagggguuugagaugauuugggauccuaauggauggacaaauaccgacagugauuucucagugaaacaggauguuguagcaauaacugauuggucaggguacagcggaaguuucguccaacauccugaguugacaggauuggacuguauaagaccuugcuucuggguugaguuagucagagggcugccuagagaaaauacaacaaucuggacuagugggagcagcauuucuuuuuguggcguuaauagugauacugcaaacuggucuuggccagacggugcugaguugccguucaccauugacaaguag

SEQ ID NO: 52558 - RNA, 1413 nt, Artificial Sequence
  derived and/or modified CDS sequence (wt) from neuraminidase__InfluenzaA__AEA73609
augaacccaaaucaaaagauaauaaccauuggaucaaucaguauagcaaucggaauaauuagucuaauguugcaaauaggaaauauuauuucaauaugggcuagucacucaauccaaacuggaagucaaaacaacacuggaauaugcaaccaaagaaucaucacauaugaaaacagcaccugggugaaucacacauauguuaauauuaacaacacuaauguuguugcuggagaggacaaaacgucagugacauuggccggcaauucaucucuuuguucuaucaguggaugggcuauauacacaaaagacaacagcauaagaauuggcuccaaaggagauguuuuugucauaagagaaccuuucauaucauguucucacuuggaaugcagaaccuuuuuucugacccaaggcgcucuauuaaaugacaaacauucaaaugggaccguaaaggacagaaguccuuauagggccuuaaugagcuguccucuaggugaagcuccguccccauacaauucaaaguucgaaucaguugcauggucagcaagcgcaugccaugauggcaugggcugguuaacaaucggaauuucugguccagacaauggagcuguggcuguacuaaaauacaacggaauaauaacuggaaccauaaaaaguuggaaaaagcaaauauuaagaacacaagagucugaaugugucuguaugaacgggucauguuucaccauaaugaccgauggcccgaguaauaaagccgccucguacaaaauuuucaagaucgaaaaggggaagguuacuaaaucaauagaguugaaugcacccaauuuuuauuaugaggaaugcuccuguuacccagacacuggcauagugauguguguaugcagggacaacuggcaugguucaaaucgaccuugggugucuuuuaaucaaaauuuggauuaucaaauaggauacaucugcaguggaguguuuggugacaauccgcgucccgaagauggagagggcagcugcaauccagugacuguugauggagcaaacggaguaaaaggguuuucauacaaauaugguaaugguguuuggauaggaaggaccaaaaguaacagacuuagaaagggguuugagaugauuugggauccuaauggauggacaaauaccgacagugauuucucagugaaacaggauguuguagcaauaacugauuggucaggguacagcggaaguuucguucaacauccugaguugacaggauuggacuguauaagaccuugcuucuggguugaguuagucagagggcugccuagagaaaauacaacaaucuggacuagugggagcagcauuucuuuuuguggcguuaauagugauacugcaaacuggucuuggccagacggugcugaguugccguucaccauugacaaguag

SEQ ID NO: 52559 - RNA, 1413 nt, Artificial Sequence; identical to SEQ ID NO: 52214
  derived and/or modified CDS sequence (wt) from neuraminidase__InfluenzaA__AEA73620

SEQ ID NO: 52560 - RNA, 1413 nt, Artificial Sequence
  derived and/or modified CDS sequence (wt) from neuraminidase__InfluenzaA__AEA73631
augaacccaaaucaaaagauaauaaccauuggaucaaucaguauagcaaucggaauaauuagucuaauguugcaaauaggaaauauuauuucaauaugggcuagucacucaauccaaacuggaagucaaaacaacacuggaauaugcaaccaaagaaucaucacauaugaaaacagcaccugggugaaucacacauauguuaauauuaacaacacuaauguuguugcuggagaggacaaaacgucagugacauuggccggcaauucaucucuuuguucuaucaguggaugggcuauauacacaaaagacaacagcauaagaauuggcuccaaaggagauguuuuugucauaagagaaccuuucauaucauguucucacuuggaaugcagaaccuuuuuucugacccaaggcgcucuauuaaaugacaaacauucaaaugggaccguaaaggacagaaguccuuauagggccuuaaugagcuguccucuaggugaagcuccguccccauacaauucaaaguucgaaucaguugcauggucagcaagcgcaugccaugauggcaugggcugguugacaaucggaauuucugguccagacaauggagcuguggcuguacuaaaauacaacggaauaauaacuggaaccauaaaaaguuggaaaaagcaaauauuaagaacacaagagucugaaugugucuguaugaacgggucauguuucaccauaaugaccgauggcccgaguaauaaagccgccucguacaaaauuuucaagaucgaaaaggggaagguuacuaaaucaauagaguugaaugcacccaauuuuuauuacgaggaaugcuccuguuacccagacacuggcauagugauguguguaugcagggacaacuggcaugguucaaaucgaccuugggugucuuuuaaucaaaauuuggauuaucaaauaggauacaucugcaguggaguguuuggugacaauccgcgucccgaagauggagagggcagcugcaauccagugacuguugauggagcaaacggaguaaaaggguuuucauacaaauaugguaaugguguuuggauaggaaggaucaaaaguaacagacuuagaaagggguuugagaugauuugggauccuaauggauggacaaauaccgacagugauuucucagugaaacaggauguuguagcaauaacugauuggucaggguacagcggaaguuucguccaacauccugaguugacaggauuggacuguauaagaccuugcuucuggguugaguuagucagagggcugccuagagaaaauacaacaaucuggacuagugggagcagcauuucuuuuuguggcguuaauagugauacugcaaacuggucuuggccagacggugcugaguugccguucaccauugacaaguag

SEQ ID NO: 52561 - RNA, 1413 nt, Artificial Sequence
  derived and/or modified CDS sequence (wt) from neuraminidase__InfluenzaA__AEA73642
augaacccaaaucaacggauaauaaccauuggaucaaucaguauagcaaucggaauaauuagucugauguugcaaauaggaaauauuauuucaauaugggcuagucacucaauccaaacuggaagucaaaacaacacuggaauaugcaaacaaagaaucaucacauaugaaaacagcaccugggugaaucauacauauguuaauauuaacaacacuaauguuguugcuggagaggacaaaacgucagugacauuggccggcaauucaucucuuuguucuaucaguggaugggcuauauacacaaaagacaacagcauaagaauuggcuccaaaggagauguuuuugucauaagagaaccuuucauaucauguucucacuuggaaugcagaaccuuuuuucugacccaaggcgcucuauuaaaugacaaacauucaaaugggaccgcaaaggacagaaguccuuauagggccuuaaugagcuguccucuaggugaagcuccguccccauacaauucaaaguucgaaucaguugcauggucagcaagcgcaugccaugauggcaugggcugguuaacaaucggaauuucugguccagacaauggagcuguggcuguacuaaaauacaacggaauaauaacuggaaccauaaaaaguuggaaaaagcaaauauuaagaacacaagagucugaaugugucuguaugaacgggucauguuucaccauaaugaccgauggcccgaguaauaaggccgccucguacaaaauuuucaagaucgaaaaggggaagguuacuaaaucaauagaguugaaugcacccaauuuuuauuaugaggaaugcuccuguuacccagacacuggcauagugauguguguaugcagggacaacuggcaugguucaaaucgaccuugggugucuuuuaaucaaaacuuggauuaucaaauaggauacaucugcaguggaguguuuggugacaauccgcgucccgaagauggagagggcagcugcaauccggugacuguugauggagcaaacggaguaaaaggguuuucauacaaauaugguaaugguguuugguuaggaaggaccaaaaguaacagacuuagaaagggguuugagaugauuugggauccuaauggauggacaaauaccgacagugauuucucagugaaacaggauguuguagcaauaacugauuggucaggguacagcggaaguuucguccaacacccugaguuaacaggauuggacuguauaagaccuugcuucuggguugaguuagucagagggcugccuagagaaaauacaacaaucuggacuagugggagcagcauuucuuuuuguggcguuaauagugauacugcaaacuggucuuggccagacggugcugaguugccguucaccauugacaaguag

SEQ ID NO: 52562 - RNA, 1413 nt, Artificial Sequence; identical to SEQ ID NO: 52214
  derived and/or modified CDS sequence (wt) from neuraminidase__InfluenzaA__AEA73653

SEQ ID NO: 52563 - RNA, 1413 nt, Artificial Sequence
  derived and/or modified CDS sequence (wt) from neuraminidase__InfluenzaA__AEA73664
augaacccaaaucaaaagauaauaaccauuggaucaaucaguauagcaaucggaauaauuagucuaauguugcaaauaggaaauauuauuucaauaugggcuagucacucaauccaaacuggaagucaaaacaacacuggaauaugcaaccaaagaaucaucacauaugaaaacagcaccugggugaaucacacauauguuaauauuaacaacacuaauguuguugcuggagaggacaaaacgucagugacauuggccggcaauucaucucuuuguucuaucaguggaugggcuauauacacaaaagacaacagcauaagaauuggcuccaaaggagauguuuuugucauaagagaaccuuucauaucauguucucacuuggaaugcagaaccuuuuuucugacccaaggcgcucuauuaaaugacaaacauucaaaugggaccguaaaggacagaaguccuuauagggccuuaaugagcuguccucuaggugaagcuccguccccauacaauucaaaguucgaaucaguugcauggucagcaagcgcaugccaugauggcaugggcugguugacaaucggaauuucugguccagacaauggagcuguggcuguacuaaaauacaacggaauaauaacuggaaccauaaaaaguuggaaaaagcaaauauuaagaacacaagagucugaaugugucuguaugaacgggucauguuucaccauaaugaccgauggcccgaguaauaaagccgccucguacaaaauuuucaagaucgaaaaggggaagguuacuaaaucaauagaguugaaugcacccaauuuuuauuacgaggaaugcuccuguuacccagacacuggcauagugauguguguaugcagggacaacuggcaugguucaaaucgaccuugggugucuuuuaaucaaaauuuggauuaucaaauaggauacaucugcaguggaguguuuggugacaauccgcgucccgaagauggagagggcagcugcaauccagugacuguuaauggagcagacggagugaaaggguuuucauacaaauaugguaaugguguuuggauaggaaggaccaaaaguaacagacuuagaaagggguuugagaugauuugggauccuaauggauggacaaauaccgacagugauuucucagugaaacaggauguuguagcaauaacugauuggucaggguacagcggaaguuucguccaacauccugaguugacaggauuggacuguauaagaccuugcuucuggguugaguuagucagagggcugccuaaagaaaauacaacaaucuggacuagugggagcagcauuucuuuuuguggcguuaauagugauacugcaaacuggucuuggccagacggugcugaguugccguucaccauugacaaguag

SEQ ID NO: 52564 - RNA, 1413 nt, Artificial Sequence
  derived and/or modified CDS sequence (wt) from neuraminidase__InfluenzaA__AEA73675
augaacccaaaucaaaagauaauaaccauuggaucaaucaguauagcaaucggaauaauuagucuaauguugcaaauaggaaauauuauuucaauaugggcuagucacucaauccaaacuggaagucaaaacaacacuggaauaugcaaccaaagaaucaucacauaugaaaacagcaccugggugaaucacacauauguuaauauuaacaacacuaauguuguugcuggagaggacaaaacgucagugacauuggccggcaauucaucucuuuguucuaucaguggaugggcuauauacacaaaagacaacagcauaagaauuggcuccaaaggagauguuuuugucauaagagaaccuuucauaucauguucucacuuggaaugcagaaccuuuuuucugacccaaggcgcucuauuaaaugacaaacauucaaaugggaccguaaaggacagaaguccuuauagggccuuaaugagcuguccucuaggugaagcuccguccccauacaauucaaaguucgaaucaguugcauggucagcaagcgcaugccaugauggcaugggcugguugacaaucggaauuucugguccagacaauggagcuguggcuguacuaaaauacaacggaauaauaacuggaaccauaaaaaguuggaaaaagcaaauauuaagaacacaagagucugaaugugucuguaugaacgggucauguuucaccauaaugaccgauggcccgaguaauaaagccgccucguacaaaauuuucaagaucgaaaaggggaagguuacuaaaucaauagaguugaaugcaccuaauuuuuauuacgaggaaugcuccuguuacccagacacuggcauagugauguguguaugcagggacaacuggcaugguucaaaucgaccuugggugucuuuuaaucaaaauuuggauuaucaaauaggauacaucugcaguggaguguuuggugacaauccgcgucccgaagauggagagggcagcugcaauccagugacuguugauggagcagacggaguaaaaggguuuucauacaaauaugguaaugguguuuggauaggaaggaccaaaaguaacagacuuagaaagggguuugagaugauuugggauccuaauggauggacaaauaccgacagugauuucucagugaaacaggauguuguagcaauaacugauuggucaggguacagcggaaguuucguccaacauccugaguugacaggauuggacuguauaagaccuugcuucuggauugaguuagucagagggcugccuagagaaaauacaacaaucuggacuagugggagcagcauuucuuuuuguggcguuaauagugauacugcaaacuggucuuggccagacggugcugaguugccguucaccauugacaaguag

SEQ ID NO: 52565 - RNA, 1413 nt, Artificial Sequence; identical to SEQ ID NO: 52223
  derived and/or modified CDS sequence (wt) from neuraminidase__InfluenzaA__AEA73686

SEQ ID NO: 52566 - RNA, 1413 nt, Artificial Sequence
  derived and/or modified CDS sequence (wt) from neuraminidase__InfluenzaA__AEA73697
augaacccaaaucaaaagauaauaaccauuggaucaaucaguauagcaaucggaauaauuagucuaauguugcaaauaggaaauauuauuucaauaugggcuagucacucaauccaaacuggaagucaaaacaacacuggaauaugcaaccaaagaaucaucacauaugaaaacagcaccugggugaaucacacauauguuaauauuaacaacacuaauauuguugcuggagaggacaaaacgucagugacauuggccggcaauucaucucuuuguucuaucaguggaugggcuauauacacaaaagacaacagcauaagaauuggcuccaaaggagauguuuuugucauaagagaaccuuucauaucauguucucacuuggaaugcagaaccuuuuuucugacccaaggcgcucuauuaaaugacaaacauucaaaugggaccguaaaggacagaaguccuuauagggccuuaaugagcuguccucuaggugaagcuccguccccauacaauucaaaguucgaaucaguugcauggucagcaagcgcaugccaugauggcaugggcugguugacaaucggaauuucugguccagacaauggagcuguggcuguacuaaaauacaacggaauaauaacuggaaccauaaaaaguuggaaaaagcaaauauuaagaacacaagagucugaaugugucuguaugaacgggucauguuucaccauaaugaccgauggcccgaguaauaaagccgccucguacaaaauuuucaagaucgaaaaggggaagguuacuaaaucaguagaguugaaugcacccaauuuuuauuacgaggaaugcuccuguuacccagacacuggcauagugauguguguaugcagggacaacuggcaugguucaaaucgaccuugggugucuuuuaaucaaaauuuggauuaucaaauaggauacaucugcaguggaguguuuggugacaauccgcgucccgaagauggagagggcagcugcaauccagugacuguuaauggagcagacggaguaaaaggguuuucauacaaauaugguaaugguguuuggauaggaaggaccaaaaguaacagacuuagaaagggguuugagaugauuugggauccuaauggauggacaaauaccgacagugauuucucagugaaacaggauguuguagcaauaacugauuggucaggguacagcggaaguuucguccaacauccugaguugacaggauuggacuguauaagaccuugcuucuggguugaguuagucagagggcugccuagagaaaauacaacaaucuggacuagugggagcagcauuucuuuuuguggcguuaauagugauacugcaaacuggucuuggccagacggugcugaguugccguucaccauugacaaguag

SEQ ID NO: 52567 - RNA, 1413 nt, Artificial Sequence; identical to SEQ ID NO: 52220
  derived and/or modified CDS sequence (wt) from neuraminidase__InfluenzaA__AEA73708

SEQ ID NO: 52568 - RNA, 1413 nt, Artificial Sequence; identical to SEQ ID NO: 52214
  derived and/or modified CDS sequence (wt) from neuraminidase__InfluenzaA__AEA73719

SEQ ID NO: 52569 - RNA, 1413 nt, Artificial Sequence; identical to SEQ ID NO: 52214
  derived and/or modified CDS sequence (wt) from neuraminidase__InfluenzaA__AEA73730

SEQ ID NO: 52570 - RNA, 1413 nt, Artificial Sequence; identical to SEQ ID NO: 52214
  derived and/or modified CDS sequence (wt) from neuraminidase__InfluenzaA__AEA73741

SEQ ID NO: 52571 - RNA, 1413 nt, Artificial Sequence; identical to SEQ ID NO: 52214
  derived and/or modified CDS sequence (wt) from neuraminidase__InfluenzaA__AEA73752

SEQ ID NO: 52572 - RNA, 1413 nt, Artificial Sequence
  derived and/or modified CDS sequence (wt) from neuraminidase__InfluenzaA__AEA73763
augaacccaaaucaaaagauaauaaccauuggaucaaucaguauagcaaucggaauaauuagucuaauguugcaaauaggaaauauuauuucaauaugggcuagucacucaauccaaacuggaagucaaaacaacacuggaauaugcaaccaaagaaucaucacauaugaaaacagcaccugggugaaucacacauauguuaauauuaacaacacuaauguuguugcuggagaggacaaaacgucagugacauuggccggcaauucaucucuuuguucuaucaguggaugggcuauauacacaaaagacaacagcauaagaauuggcuccaaaggagauguuuuugucauaagagaaccuuucauaucauguucucacuuggaaugcagaaccuuuuuucugacccaaggcgcucuauuaaaugacaaacauucaaaugggaccguaaaggacagaaguccuuauagggccuuaaugagcuguccucuaggugaagcuccguccccauacaauucaaaguucgaaucaguugcauggucagcaagcgcaugccaugauggcaugggcugguugacaaucggaauuucugguccagacaauggagcuguggcuguauuaaaauacaacggaauaauaacuggaaccauaaaaaguuggaaaaagcaaauauuaagaacacaagagucugaaugugucuguaugaacgggucauguuucaccauaaugaccgauggcccgaguaauaaagccgccucguacaaaauuuucaagaucgaaaaggggaagguuacuaaaucaauagaguugaaugcacccaauuuuuauuacgaggaaugcuccuguuacccagacacuggcauagugauguguguaugcagggacaacuggcaugguucaaaucgaccuugggugucuuuuaaucaaaauuuggauuaucaaauaggauacaucugcaguggaguguuuggugacaauccgcgucccgaagauggagagggcagcugcaauccagugacuguugauggagcagacggaguaaaaggguuuucauacaaauaugguaaugguguuuggauaggaaggaccaaaaguaacagacuuagaaagggguuugagaugauuugggauccuaauggauggacaaauaccgacagugauuucucagugaaacaggauguuguagcaauaacugauuggucaggguacagcggaaguuucguccaacauccugaguugacaggauuggacuguauaagaccuugcuucuggguugaguuagucagagggcugccuagagaaaauacaacaaucuggacuagugggagcagcauuucuuuuuguggcguuaauagugauacugcaaacuggucuuggccagacggugcugaguugccguucaccauugacaaguag

SEQ ID NO: 52573 - RNA, 1410 nt, Artificial Sequence; identical to SEQ ID NO: 48750
  derived and/or modified CDS sequence (wt) from neuraminidase__InfluenzaA__AEA73774

SEQ ID NO: 52574 - RNA, 1410 nt, Artificial Sequence
  derived and/or modified CDS sequence (wt) from neuraminidase__InfluenzaA__AEA73784
augaauccaaaccaaaagauaauaaccauugguucggucuguaugacaauuggaauggcuaacuuaauauuacaaauuggaaacauaaucucaauauggauuagccacucaauucaacuugggaaucaaaaucagauugaaacaugcaaucaaagcgucauuacuuaugaaaacaacacuuggguaaaucagacauauguuaacaucagcaacaccaacuuugcugcuggacagucagugguuuccgugaaauuagcgggcaauuccucucucugcccuguuaguggaugggcuauauacaguaaagacaacaguauaagaaucgguuccaagggggauguguuugucauaagggaaccauucauaucaugcucccccuuggaaugcagaaccuucuucuugacucaaggggccuugcuaaaugacaaacauuccaauggaaccauuaaagacaggagcccauaucgaacccuaaugagcuguccuauuggugaaguucccucuccauacaacucaagauuugagucagucgcuuggucagcaagugcuugucaugauggcaucaauuggcuaacaauuggaauuucuggcccagacaauggggcaguggcuguguuaaaguacaacggcauaauaacagacacuaucaagaguuggagaaacaauauauugagaacacaagagucugaaugugcauguguaaaugguucuugcuuuacuguaaugaccgauggaccaagugauggacaggccucauacaagaucuucagaauagaaaagggaaagauagucaaaucagucgaaaugaaugccccuaauuaucacuaugaggaaugcuccuguuauccugauucuagugaaaucacaugugugugcagggauaacuggcauggcucgaaucgaccgugggugucuuucaaccagaaucuggaauaucagauaggauacauaugcaguggaauuuucggagacaauccacgcccuaaugauaagacaggcaguugugguccaguaucgucuaauggagcaaauggaguaaaaggauuuucauucaaauacggcaaugguguuuggauagggagaacuaaaagcauuaguucaagaaacgguuuugagaugauuugggauccgaacggauggacugggacagacaauaacuucucaauaaagcaagauaucguaggaauaaaugaauggucaggauauagcgggaguuuuguucagcauccagaacuaacagggcuggauuguauaagaccuugcuucuggguugaacuaaucagagggcgacccaaagagaacacaaucuggacuagcgggagcagcauauccuuuugugguguaaacagugacacuguggguuggucuuggccagacggugcugaguugccauuuaccauugacaaguaa

SEQ ID NO: 52575 - RNA, 1410 nt, Artificial Sequence; identical to SEQ ID NO: 48750
  derived and/or modified CDS sequence (wt) from neuraminidase__InfluenzaA__AEA73794

SEQ ID NO: 52576 - RNA, 1410 nt, Artificial Sequence; identical to SEQ ID NO: 49544
  derived and/or modified CDS sequence (wt) from neuraminidase__InfluenzaA__AEA73804

SEQ ID NO: 52577 - RNA, 1410 nt, Artificial Sequence; identical to SEQ ID NO: 48750
  derived and/or modified CDS sequence (wt) from neuraminidase__InfluenzaA__AEA73814

SEQ ID NO: 52578 - RNA, 1410 nt, Artificial Sequence; identical to SEQ ID NO: 48750
  derived and/or modified CDS sequence (wt) from neuraminidase__InfluenzaA__AEA73824

SEQ ID NO: 52579 - RNA, 1410 nt, Artificial Sequence
  derived and/or modified CDS sequence (wt) from neuraminidase__InfluenzaA__AEA73834
augaauccaaaccaaaagauaauaaccauugguucgaucuguaugacaauuggaauggcuaacuuaauauuacaaauuggaaacauaaucucaauauggauuagccacucaauucaacuugggaaucaaaaucagauugaaacaugcaaucaaagcgucauuacuuaugaaaacaacacuuggguaaaucagacauauguuaacaucagcaacaccaacuuugcugcuggacagucagugguuuccgugaaauuagcgggcaauuccucucucugcccuguuaguggaugggcuauauacaguaaagacaacaguauaagaaucgguuccaagggggauguguuugucauaagggaaccauucauaucaugcucccccuuggaaugcagaaccuucuucuugacucaaggggccuugcuaaaugacaaacauuccaauggaaccauuaaagacaggagcccauaucgaacccuaaugagcuguccuauuggugaaguucccucuccauacaacucaagauuugagucagucgcuuggucagcaagugcuugucaugauggcaucaauuggcuaacaauuggaauuucuggcccagacaauggggcaguggcuguguuaaaguacaacggcauaauaacagacacuaucaagaguuggaaaaacaauaucuugagaacacaagagucugaaugugcauguguaaaugguucuugcuuuacuguaaugaccgauggaccaagugauggacaggccucauacaagaucuucagaauagaaaagggaaagauagucaaaucagucgaaaugaaugccccuaauuaucacuaugaggaaugcuccuguuauccugauucuagugaaaucacaugugugugcagggauaacuggcauggcucgaaucgaccgugggugucuuucaaccagaaucuggaauaucagauaggauacauaugcagugggauuuucggagacaauccacgcccuaaugauaagacaggcaguugugguccaguaucgucuaauggagcaaauggaguaaaaggauuuucauucaaauacggcaaugguguuuggauagggagaacuaaaagcauuaguucaagaaacgguuuugagaugauuugggauccgaacggauggacugggacagacaauaacuucucaauaaagcaagauaucguaggaauaaaugaauggucaggauauagcgggaguuuuguucagcauccagaacuaacagggcuggauuguauaagaccuugcuucuggguugaacuaaucagagggcgacccaaagagaacacaaucuggacuagcgggagcagcauauccuuuugugguguaaacagugacacuguggguuggucuuggccagacggugcugaguugccauuuaccauugacaaguaa

SEQ ID NO: 52580 - RNA, 1410 nt, Artificial Sequence
  derived and/or modified CDS sequence (wt) from neuraminidase__InfluenzaA__AEA73844
augaauccaaaccaaaagauaauaaccauugguucggucuguaugacaauuggaauggcuaauuuaauauuacaaauuggaaacauaaucucaauauggauuagccacucaauucaacuugggaaucaaaaucagauugaaacaugcaaucaaagcgucauuacuuaugaaaacaacacuuggguaaaucagacauauguuaacaucagcaacaccaacuuugcugcuggacagucagugguuuccgugaaauuagcgggcaauuccucucucugcccuguuaguggaugggcuauauacaguaaagacaacaguauaagaaucgguuccaagggggauguguuugucauaagggaaccauucauaucaugcucccccuuggaaugcagaaccuucuucuugacucaaggggccuugcuaaaugacaaacauuccaauggaaccauuaaagacaggagcccauaucgaacccuaaugagcuguccuauuggugaaguucccucuccauacaacucaagauuugagucagucgcuuggucagcaagugcuugucaugauggcaucaauuggcuaacaauuggaauuucuggcccagacaauggggcaguggcuguguuaaaguacaacggcauaauaacagacacuaucaagaguuggagaaacaauauauugagaacacaagagucugaaugugcauguguaaaugguucuugcuuuacuguaaugaccgauggaccaagugauggacaggccucauacaagaucuucagaauagaaaagggaaagauagucaaaucagucgaaaugaaugccccuaauuaucacuaugaggaaugcuccuguuauccugauucuagugaaaucacaugugugugcagggauaacuggcauggcucgaaucgaccgugggugucuuucaaccagaaucuggaauaucagauaggauacauaugcagugggauuuucggagacaauccacgcccuaaugauaagacaggcaguugugguccaguaucgucuaauggagcaaauggaguaaaaggauuuucauucaaauacggcaaugguguuuggauagggagaacuaaaagcaugaguucaagaaacgguuuugagaugauuugggauccgaacggauggacugggacagacaauaacuucucaauaaagcaagauaucguaggaauaaaugaguggucaggauauagcgggaguuuuguucagcauccagaacuaacagggcuggauuguauaagaccuugcuucuggguugaacuaaucagagggcgacccaaagagaacacaaucuggacuagcgggagcagcauauccuuuugugguguaaacagugacacuguggguuggucuuggccagacggugcugaguugccauuuaccauugacaaguaa

SEQ ID NO: 52581 - RNA, 1410 nt, Artificial Sequence; identical to SEQ ID NO: 49794
  derived and/or modified CDS sequence (wt) from neuraminidase__InfluenzaA__AEA73854

SEQ ID NO: 52582 - RNA, 1410 nt, Artificial Sequence
  derived and/or modified CDS sequence (wt) from neuraminidase__InfluenzaA__AEA73864
augaauccaaaccaaaagauaauaaccauugguucggucuguaugacaauuggaauggcuaacuuaauauuacaaauuggaaacauaaucucaauauggauuagccacucaauucaacuugggaaucaaaaucagauugaaacaugcaaucaaagcgucauuacuuaugaaaacaacacuuggguaaaucagacauauguuaacaucagcaacaccaacuuugcugcuggacagucagugguuuccgugaaauuagcgggcaauuccucucucugcccuguuaguggaugggcuauauacaguaaagacaacaguauaagaaucgguuccaagggggauguguuugucauaagggaaccauucauaucaugcucccccuuggaaugcagaaccuucuucuugacucaaggggccuugcuaaaugacaaacauuccaauggaaccauuaaagacaggagcccauaucgaacccuaaugagcuguccuauuggugaaguucccucuccauacaacucaagguuugagucagucgcuuggucagcaagugcuugucaugauggcaucaauuggcuaacaauuggaauuucuggcccagacaauggggcaguggcuguguuaaaguacaacggcauaauaacagacacuaucaagaguuggagaaacaauauauugagaacacaagagucugaaugugcauguguaaaugguucuugcuuuacuguaaugaccgauggaccaagugauggacaggccucauacaagaucuucagaauagaaaagggaaagauagucaaaucagucgaaaugaaugccccuaauuaucacuaugaggaaugcuccuguuauccugauucuagugaaaucacaugugugugcagggauaacuggcauggcucgaaucgaccgugggugucuuucaaccagaaucuggaauaucagauaggauacauaugcagugggauuuucggagacaauccacgcccuaaugauaagacaggcaguugugguccaguaucgucuaauggagcaaauggaguaaaaggauuuucauucaaauacggcaaugguguuuggauagggagaacuaaaagcauuaguucaagaaacgguuuugagaugauuugggauccgaacggauggacugggacagacaauaacuucucaauaaagcaagauaucguaggaauaaaugaguggucaggauauagcgggaguuuuguccagcauccagaacuaacagggcuggauuguauaagaccuugcuucuggguugaacuaaucagagggcgacccaaagagaacacaaucuggacuagcgggagcagcauauccuuuugugguguaaacagugacacuguggguuggucuuggccagacggugcugaguugccauuuaccauugacaaguaa

SEQ ID NO: 52583 - RNA, 1410 nt, Artificial Sequence; identical to SEQ ID NO: 50634
  derived and/or modified CDS sequence (wt) from neuraminidase__InfluenzaA__AEA73874

SEQ ID NO: 52584 - RNA, 1410 nt, Artificial Sequence; identical to SEQ ID NO: 50634
  derived and/or modified CDS sequence (wt) from neuraminidase__InfluenzaA__AEA73884

SEQ ID NO: 52585 - RNA, 1410 nt, Artificial Sequence; identical to SEQ ID NO: 52112
  derived and/or modified CDS sequence (wt) from neuraminidase__InfluenzaA__AEA73894

SEQ ID NO: 52586 - RNA, 1410 nt, Artificial Sequence
  derived and/or modified CDS sequence (wt) from neuraminidase__InfluenzaA__AEA73904
augaauccaaaccaaaagauaauaaccauugguucggucuguaugacaauuggaauggcuaacuuaguauuacaaauuggaaacauaaucucaauauggauuagccacucaauucaacuugggaaucaaaaucagauugaaacaugcaaucaaagcgucauuacuuaugaaaacaacacuuggguaaaucagacauauguuaacaucagcaacaccaacuuugcugcuggacagucagugguuuccgugaaauuagcgggcaauuccucucucugcccuguuaguggaugggcuauauacaguaaagacaacaguauaagaaucgguuccaagggggauguguuugucauaagggaaccauucauaucaugcucccccuuggaaugcagaaccuucuucuugacucaaggggccuugcuaaaugacaaacauuccaauggaaccauuaaagacaggagcccauaucgaacccuaaugagcuguccuauuggugaaguucccucuccauacaacucaagauuugagucagucgcuuggucagcaagugcuugucaugauggcaucaauuggcuaacaauuggaauuucuggcccagacaauggggcaguggcuguguuaaaguacaacggcauaauaacagacacuaucaagaguuggagaaacaauauauugagaacacaagagucugaaugugcauguguaaaugguucuugcuuuacuguaaugaccgauggaccaagugauggacaggccucauacaagaucuucagaauagaaaagggaaagauagucaaaucagucgaaaugaaugccccuaauuaucacuaugaggaaugcuccuguuauccugauucuagugaaaucacaugugugugcagggauaacuggcauggcucgaaucgaccgugggugucuuucaaccagaaucuggaauaucagauaggauacauaugcagugggauuuucggagacaauccacgcccuaaugauaagacaggcaguugugguccaguaucgucuaauggagcaaauggaguaaaaggauuuucauucaaauacggcaaugguguuuggauagggagaacuaaaagcauuaguucaagaaacgguuuugagaugauuugggauccgaacggauggacugggacagacaauaacuucucaauaaagcaagauaucauaggaauaaaugaguggucaggauauagcgggaguuuuguccagcauccagaacuaacagggcuggauuguauaagaccuugcuucuggguugaacuaaucagagggcgacccaaagagaaaacaaucuggacuagcgggagcagcauauccuuuugugguguaaacagugacacuguggguuggucuuggccagacggugcugaguugccauuuaccauugacaaguaa

SEQ ID NO: 52587 - RNA, 1410 nt, Artificial Sequence; identical to SEQ ID NO: 50171
  derived and/or modified CDS sequence (wt) from neuraminidase__InfluenzaA__AEA73914

SEQ ID NO: 52588 - RNA, 1410 nt, Artificial Sequence; identical to SEQ ID NO: 50634
  derived and/or modified CDS sequence (wt) from neuraminidase__InfluenzaA__AEA73924

SEQ ID NO: 52589 - RNA, 1410 nt, Artificial Sequence
  derived and/or modified CDS sequence (wt) from neuraminidase__InfluenzaA__AEA73934
augaauccaaaccaaaagauaauaaccauugguucggucuguaugacaauuggaauggcuaacuuaauauuacaaauuggaaacauaaucucaauauggauuagccacucaauucaacuugggaaucaaaaucagauugaaacaugcaaucaaagcgucauuacuuaugaaaacaacacuuggguaaaucagacauauguuaacaucagcaacaccaacuuugcugcuggacagucagugguuuccgugaaauuagcgggcaauuccucucucugcccuguuaguggaugggcuauauacaguaaagacaacaguauaagaaucgguuccaagggggauguguuugucauaagggaaccauucauaucaugcucccccuuggaaugcagaaccuucuucuugacucaaggggccuugcuaaaugacaaacauuccaauggaaccauuaaagacaggagcccauaucgaacccuaaugagcuguccuauuggugaaguucccucuccauacaacucaagauuugagucagucgcuuggucagcaagugcuugucaugauggcaucaauuggcuaacaauuggaauuucuggcccagacaauggggcaguggcuguguuaaaguacaacggcauaauaacagacacuaucaagaguuggagaaacaauauauugagaacacaagagucugaaugugcauguguaaaugguucuugcuuuacuguaaugaccgauggaccaagugauggacaggccucauacaagaucuucagaauagaaaagggaaagauagucaaaucagucgaaaugaaugccccuaauuaucacuaugaggaaugcuccuguuauccugauucuagugaaaucacaugugugugcagggauaacuggcauggcucgaaucgaccgugggugucuuucaaccagaaucuggaauaucagauaggauacauaugcagugggauuuucggagacaauccacgcccuaaugauaagacaggcaguugugguccaguaucgucuaauggagcaaauggaguaaaaggauuuucauucaaauacggcaaugguguuuggauagggagaacuaaaagcauuaguucaagaaacgguuuugagaugauuugggauccgaacggauggacugagacagacaauaacuucucaauaaagcaagauaucguaggaauaaaugaauggucaggauauagcgggaguuuuguucagcauccagaacuaacagggcuggauuguauaagaccuugcuucuggguugaacuaaucagagggcgacccaaagagaacacaaucuggacuagcgggagcagcauauccuuuugugguguaaacagugacacuguggguuggucuuggccagacggugcugaguugccauuuaccauugacaaguaa

SEQ ID NO: 52590 - RNA, 1410 nt, Artificial Sequence
  derived and/or modified CDS sequence (wt) from neuraminidase__InfluenzaA__AEA73944
augaauccaaaccaaaagauaauaaccauugguucggucuguaugacaauuggaauggcuaacuuaauauuacaaguuggaaacauaaucucaauauggauuagccacucaauucaacuugggaaucaaaaucagauugaaacaugcaaucaaagcgucauuacuuaugaaaacaacacuuggguaaaucagacauauguuaacaucagcaacaccaacuuugcugcuggacagucagugguuuccgugaaauuagcgggcaauuccucucucugcccuguuaguggaugggcuauauacaguaaagacaacaguauaagaaucgguuccaagggggauguguuugucauaagggaaccauucauaucaugcucccccuuggaaugcagaaccuucuucuugacucaaggggccuugcuaaaugacaaacauuccaauggaaccauuaaagacaggagcccauaucgaacccuaaugagcuguccuauuggugaaguucccucuccauacaacucaagauuugagucagucgcuuggucagcaagugcuugucaugauggcaucaauuggcuaacaauuggaauuucuggcccagacaauggggcaguggcuguguuaaaguacaacggcauaauaacagacacuaucaagaguuggagaaacaauauauugagaacacaagagucugaaugugcauguguaaaugguucuugcuuuacuguaaugaccgauggaccaagugauggacaggccucauacaagaucuucagaauagaaaagggaaagauagucaaaucagucgaaaugaaugccccuaauuauuacuaugaggaaugcuccuguuauccugauucuagugaaaucacaugugugugcagggauaacuggcauggcucgaaucgaccgugggugucuuucaaccagaaucuggaauaucagauaggauacauaugcagugggauuuucggagacaauccacgcccuaaugauaagacaggcaguugugguccaguaucgucuaauggagcaaauggaguaaaaggauuuucauucaaauacggcaaugguguuuggauagggagaacuaaaagcauuaguucaagaaacgguuuugagaugauuugggauccgaacggauggacugggacagacaauaacuucucaauaaagcaagauaucguaggaauaaaugaguggucaggauauagcgggaguuuuguucagcauccagaacuaacagggcuggacuguauaagaccuugcuucuggguugaacuaaucagagggcgacccaaagagaacacaaucuggacuagcgggagcagcauauccuuuugugguguaaacagugacacuguggguuggucuuggccagacggugcugaguugccauuuaccauugacaaguaa

SEQ ID NO: 52591 - RNA, 1410 nt, Artificial Sequence
  derived and/or modified CDS sequence (wt) from neuraminidase__InfluenzaA__AEA73954
augaauccaaaccaaaagauaauaaccauugguucggucuguaugacaauuggaauggcuaacuuaauauuacaaauuggaaacauaaucucaauauggauuagccacucaauucaacuugggaaucaaaaucagauugaaacaugcaaucaaagcgucauuacuuaugaaaacaacacuuggguaaaucagacauauguuaacaucagcaacaccaacuuugcugcuggacagucagugguuuccgugaaauuagcgggcaauuccucucucugcccuguuaguggaugggcuauauacaguaaagacaacaguauaagaaucgguuccaagggggauguguuugucauaagggaaccauucauaucaugcucccccuuggaaugcagaaccuucuucuugacucaaggggccuugcuaaaugacaaacauuccaauggaaccauuaaagacaggagcccauaucgaacccuaaugagcuguccuauuggugaaguuccuucuccauacaacucaagauuugagucagucgcuuggucagcaagugcuugucaugauggcaucaauuggcuaacaauuggaauuucuggcccagacaauggggcaguggcuguguuaaaguacaacggcauaauaacagacacuaucaagaguuggagaaacaauauauugagaacacaagagucugaaugugcauguguaaaugguucuugcuuuacuguaaugaccgauggaccaagugauggacaggccucauacaagaucuucagaauagaaaagggaaagauagucaaaucagucgaaaugaaugccccuaauuaucacuaugaggaaugcuccuguuauccugauucuagugaaaucacaugugugugcagggauaacuggcauggcucgaaucgaccgugggugucuuucaaccagaaucuggaauaucagauaggauacauaugcagugggauuuucggagacaauccacgcccuaaugacaagacaggcaguugugguccaguaucgucuaauggagcaaauggaguaaaaggauuuucauucaaauacggcaaugguguuuggauagggagaacuaaaagcauuaguucaagaaacgguuuugagaugauuugggauccgaacggauggacugggacagacaauaacuucucaauaaagcaagauaucguaggaauaaaugaguggucaggauauagcgggaguuuuguucagcauccagaacuaacagggcuggauuguauaagaccuugcuucuggguugaacuaaucagagggcgacccaaagagaacacaaucuggacuagcgggagcagcauauccuuuugugguguaaacagugacacuguggguuggucuuggccagacggugcugaguugccauuuaccauugacaaguaa

SEQ ID NO: 52592 - RNA, 1410 nt, Artificial Sequence; identical to SEQ ID NO: 49794
  derived and/or modified CDS sequence (wt) from neuraminidase__InfluenzaA__AEA73964

SEQ ID NO: 52593 - RNA, 1410 nt, Artificial Sequence
  derived and/or modified CDS sequence (wt) from neuraminidase__InfluenzaA__AEA73974
augaauccaaaccaaaagauaauaaccauugguucggucuguaugacaauuggaauggcuaacuuaauauuacaaauuggaaacauaaucucaauauggauuagccacucaauucaacaugggaaucaaaaucagauugaaacaugcaaucaaagcgucauuacuuaugaaaacaacacuuggguaaaucagacauauguuaacaucagcaacaccaacuuugcugcuggacagucagugguuuccgugaaauuagcgggcaauuccucucucugcccuguuaguggaugggcuauauacaguaaagacaacaguauaagaaucgguuccaagggggauguguuugucauaagggaaccauucauaucaugcucccccuuggaaugcagaaccuucuucuugacucaaggggccuugcuaaaugacaaacauuccaauggaaccauuaaagacaggagcccauaucgaacccuaaugagcuguccuauuggugaaguucccucuccauacaacucaagauuugagucagucgcuuggucagcaagugcuugucaugauggcaucaauuggcuaacaauuggaauuucuggcccagacaauggggcaguggcuguguuaaaguacaacggcauaauaacagacacuaucaagaguuggagaaacaauauauugagaacacaagagucugaaugugcauguguaaaugguucuugcuuuacuguaaugaccgauggaccaagugauggacaggccucauacaagaucuucagaauagaaaagggaaagauagucaaaucagucgaaaugaaugccccuaauuaucacuaugaggaaugcuccuguuauccugauucuagugaaaucacauguguaugcagggauaacuggcauggaucgaaucgaccgugggugucuuucaaccagaaucuggaauaucagauaggauacauaugcagugggauuuucggagacaauccacgcccuaaugauaagacaggcaguugugguccaguaucgucuaauggagcaaauggaguaaaaggauuuucauucaaauacggcaaugguguuuggauagggagaacuaaaagcauuaguucaagaaacgguuuugagaugauuugggauccgaacggauggacugggacagacaauaacuucucaauaaagcaagauaucguaggaauaaaugaguggucaggauauagcgggaguuuuguucagcauccagaacuaacagggcuggauuguauaagaccuugcuucuggguugaacuaaucagagggcgacccaaagagaacacaaucuggacuagcgggagcagcauauccuuuugugguguaaacagugacacuguggguuggucuuggccagacggugcugaguugccauuuaccauugacaaguaa

SEQ ID NO: 52594 - RNA, 1410 nt, Artificial Sequence; identical to SEQ ID NO: 49794
  derived and/or modified CDS sequence (wt) from neuraminidase__InfluenzaA__AEA73984

SEQ ID NO: 52595 - RNA, 1410 nt, Artificial Sequence; identical to SEQ ID NO: 50176
  derived and/or modified CDS sequence (wt) from neuraminidase__InfluenzaA__AEA73994

SEQ ID NO: 52596 - RNA, 1410 nt, Artificial Sequence
  derived and/or modified CDS sequence (wt) from neuraminidase__InfluenzaA__AEA74004
augaauccaaacaaaaagauaauaaucauugguucggucuguaugacaauuggaauggcuaacuuaauauuacaaauuggaaacauaaucucaauauggauuagccacucaauucaacuugggaaucaaaaucagauugaaacaugcaaucaaagcgucauuacuuaugaaaacaacacuuggguaaaucagacauauguuaacaucagcaacaccaacuuugcugcuggacagucagugguuuccgugaaauuagcgggcaauuccucucucugcccuguuaguggaugggcuauauacaguaaagacaacaguauaagaaucgguuccaagggggauguguuugucauaagggaaccauucauaucaugcucccccuuggaaugcagaaccuucuucuugacucaaggggccuugcuaaaugacaaacauuccaauggaaccauuaaagacaggagcccauaucgaacccuaaugagcuguccuauuggugaaguucccucuccauacaacucaagauuugagucagucgcuuggucagcaagugcuugucaugauggcaucaauuggcuaacaauuggaauuucuggcccagacaauggggcaguggcuguguuaaaguacaacggcauaauaacagacacuaucaagaguuggagaaacaauauauugagaacacaagagucugaaugugcauguguaaaugguucuugcuuuacuguaaugaccgauggaccaagugauggacaggccucauacaagaucuucagaauagaaaagggaaagauagucaaaucagucgaaaugaaugccccuaauuaucacuaugaggaaugcuccuguuauccugauucuagugaaaucacaugugugugcagggauaacuggcauggcucgaaucgaccgugggugucuuucaaccagaaucuggaauaucagauaggauacauaugcagugggauuuucggagacaauccacgcccuaaugauaagacaggcaguugugguccaguaucgucuaauggagcaaauggaguaaaaggauuuucauucaaauacggcaaugguguuuggauagggagaacuaaaagcauuaguucaagaaacgguuuugagaugauuugggauccgaacggauggacugggacagacaauaacuucucaauaaagcaagauaucguaggaauaaaugaguggucaggauauagcgggaguuuuguucagcauccagaacuaacagggcuggauuguauaagaccuugcuucuggguugaacuaaucagagggcgacccaaagagaacacaaucuggacuagcgggagcagcauauccuuuugugguguaaacagugacacuguggguuggucuuggccagacggugcugaguugccauuuaccauugacaaguaa

SEQ ID NO: 52597 - RNA, 1410 nt, Artificial Sequence
  derived and/or modified CDS sequence (wt) from neuraminidase__InfluenzaA__AEA74014
augaauccaaaccaaaagauaauaaccauugguucggucuguaugacaauuggaauggcuaacuuaauauuacaaauuggaaacauaaucucaauauggauuagccacucaauucaacuugggaaucaaaaucagauugaaacaugcaaucaaagcgucauuacuuaugaaaacaacacuuggguaaaucagacauauguuaacaucagcaacaccaacuuugcugcuggacagucagugguuuccgugaaauuagcgggcaauuccucucucugcccuguuaguggaugggcuauauacaguaaagacaacaguauaagaaucgguuccaagggggauguguuugucauaagggaaccauucauaucaugcucccccuuggaaugcagaaccuucuucuugacucaaggggccuugcuaaaugacaaacauuccaauggaaccauuaaagacaggagcccauaucgaacacuaaugagcuguccuauuggugaaguucccucuccauacaacucaagauuugagucagucgcuuggucagcaagugcuugucaugauggcaucaauuggcuaacaauuggaauuucuggcccagacaauggggcaguggcuguguuaaaguacaacggcauaauaacagacacuaucaagaguuggagaaacaauauauugagaacacaagagucugaaugugcauguguaaaugguucuugcuuuacuguaaugaccgauggaccaagugauggacaggccucauacaagaucuucagaauagaaaagggaaagauagucaaaucagucgaaaugaaugccccuaauuaucacuaugaggaaugcuccuguuacccugauucuagugaaaucacaugugugugcagggauaacuggcauggcucgaaucgaccgugggugucuuucaaccagaaucuggaauaucagauaggauacauaugcagugggauuuucggagacaauccacgcccuaaugauaagacaggcaguugugguccaguaucgucuaauggagcaaauggaguaaaaggauuuucauucaaauacggcaaugguguuuggauagggagaacuaaaagcauuaguucaagaaacgguuuugagaugauuugggauccgaacggauggacugggacagacaauaaauucucaauaaagcaagauaucguaggaauaaaugaguggucaggauauagcgggaguuuuguucagcauccagaacuaacagggcuggauuguauaagaccuugcuucuggguugaacuaaucagagggcgacccaaagagaacacaaucuggacuagcgggagcagcauauccuuuugugguguaaacagugacacuguggguuggucuuggccagacggugcugaguugccauuuaccauugacaaguaa

SEQ ID NO: 52598 - RNA, 1410 nt, Artificial Sequence; identical to SEQ ID NO: 52597
  derived and/or modified CDS sequence (wt) from neuraminidase__InfluenzaA__AEA74024

SEQ ID NO: 52599 - RNA, 1410 nt, Artificial Sequence
  derived and/or modified CDS sequence (wt) from neuraminidase__InfluenzaA__AEA74032
augaauccaaaccaaaagauaauaaccauugguucggucuguaugacaauuggaauggccaacuuaauauuacaaauuggaaacauaaucucaauauggauuagccacucaauucaacuugggaaucaaaaucagauugaaacaugcaaucaaagcgucauuacuuaugaaaacaacacuuggguaaaucagacauauguuaacaucagcaacaccaacuuugcugcuggacagucagugguuuccgugaaauuagcgggcaauuccucucucugcccuguuaguggaugggcuauauacaguaaagacaacaguauaagaaucgguuccaagggggauguguuugucauaagggaaccauucauaucaugcucccccuuggaaugcagaaccuucuucuugacucaaggggcccuacuaaaugacaaacauuccaauggaaccauuaaagacaggagcccauaucgaacccuaaugagcuguccuauuggugaaguucccucuccauacaacucaagauuugagucagucgcuuggucagcaagugcuugucaugauggcaucaauuggcuaacaauuggaauuucuggcccagacaauggggcaguggcuguguuaaaguacaacggcauaauaacagacacuaucaagaguuggagaaacaauauauugagaacacaagagucugaaugugcauguguaaaugguucuugcuuuacuguaaugaccgauggaccaagugauggacaggccucauacaagaucuucagaauagaaaagggaaagauagucaaaucagucgaaaugaaugccccuaauuaucacuaugaggaaugcuccuguuauccugauucuagugaaaucacaugugugugcagggauaacuggcauggcucgaaccgaccgugggugucuuucaaccagaaucuggaauaucagauaggauacauaugcagugggauuuucggagacaauccacguccuaaugacaagacaggcaguugugguccaguaucgucuaauggagcaaauggaguaaaaggauuuucauucaaauacggcaaugguguuuggauagggagaacuaaaagcauuaguucaagaaacgguuuugagaugauuugggauccgaacggauggacugggacagacaauaacuucucaauaaagcaagauaucguaggaauaaacgaguggucaggauauagcgggaguuuuguucagcauccagaacuaacagggcuggauuguauaagaccuugcuucuggguugaacuaaucagagggcgacccaaagagaacacaaucuggacuagcgggagcagcauauccuuuugugguguaaacagugacacuguugguuggucuuggccagacggugcugaguugccauuuaccauugacaaguaa

SEQ ID NO: 52600 - RNA, 1410 nt, Artificial Sequence; identical to SEQ ID NO: 52599
  derived and/or modified CDS sequence (wt) from neuraminidase__InfluenzaA__AEA74034

SEQ ID NO: 52601 - RNA, 1410 nt, Artificial Sequence
  derived and/or modified CDS sequence (wt) from neuraminidase__InfluenzaA__AEA77302
augaauccaaaucaaaagauaauaacgauuggcucuguuucucucaccauuuccacaauaugcuucuucaugcaaauugccaucuugauaacuacuguaacauugcauuucaagcaauaugaauucaacucccccccaaacaaccaagugaugcugugugaaccaacaauaauagaaagaaacauaacagagauaguguaucugaccaacaccaccauagagaaggaaaaaugccccaaacuagcagaauacagaaauuggucaaagccgcaaugugacauuacaggauuugcaccuuuuucuaaggacaauucgauuaggcuuuccgcugguggggacaucugggugacaagagaaccuuaugugucaugcgauccugacaaguguuaucaauuugcccuuggacagggaacaacacuaaacaacgugcauucaaauaacacaguacgugauaggaccccuuaucggacccuauugaugaaugaguuagguguuccuuuucaucuggggaccaagcaagugugcauagcaugguccagcucaaguugucacgauggaaaagcauggcugcauguuuguauaacgggggaugauaaaaaugcaacugcuagcuucauuuacaaugggaggcuuguagauaguguuguuucaugguccaaagaaauccucaggacccaggagucagaaugcguuuguaucaauggaacuuguacaguaguaaugacugaugggagugcuucaggaaaagcugauacuaaaauacuauucauugaggaggggaaaaucguucauacuagcacauugucaggaagugcucagcaugucgaggagugcuccugcuauccucgauauccuggugucagaugugucugcagagacaacuggaaagguuccaauaggcccaucguagauauaaacauaaaggaucauagcauuguuuccaguuauguguguucaggacuuguuggagacacacccaaaaaaaacgacagcuccagcaguagccauuguuuggauccuaacaaugaagaagguggucauggagugaaaggcugggccuuugaugauggaaaugacguguggaugggaagaacgaucagcgagaagucacgcuuaggguaugaaaccuucaaagucauugaaggcugguccaacccuaagucaaaauugcagauaaauaggcaagucauaguugacagagguaauagguccgguuauucugguauuuucucuguugaaggcaaaagcugcaucaaucggugcuuuuauguggaguugauaaggggaagaaaagaggaaacugaagucuuguggaccucaaacaguauuguuguguuuuguggcaccucagguacauauggaacaggcucauggccugauggggcggacaucaaucucaugccuauauaa

SEQ ID NO: 52602 - RNA, 1410 nt, Artificial Sequence
  derived and/or modified CDS sequence (wt) from neuraminidase__InfluenzaA__AEB21318
augaauccaaaccaaaagauaauaaccauugguucggucuguaugacaauuggaauggcuaacuuaauauuacaaauuggaaacauaaucucaauauggauuagccacucaauucaacuugggaaucaaagucagauugaaacaugcaaucaaagcgucauuacuuaugaaaacaacacuuggguaaaucagacauauguuaacaucagcaacaccaacuuugcugcuggacagucagugguuuccgugaaauuagcgggcaauuccucucucugcccuguuaguggaugggcuauauacaguaaagacaacaguauaagaaucgguuccaagggggauguguuugucauaagggaaccauucauaucaugcucccccuuggaaugcagaaccuucuucuugacucaaggggccuugcuaaaugacaaacauuccaauggaaccauuaaagacaggagcccauaucgaacccuaaugagcuguccuauuggugaaguucccucuccauacaacucaagauuugagucagucgcuuggucagcaagugcuugucaugauggcaucaauuggcuaacaauuggaauuucuggcccagacaauggggcaguggcuguguuaaaguacaacggcauaauaacagacacuaucaagaguuggagaaacaauauauugagaacacaagagucugaaugugcauguguaaaugguucuugcuuuaccauaaugaccgauggaccaagugauggacaggccucauacaagaucuucagaauagaaaagggaaagauagucaaaucagucgaaaugaaugccccuaauuaucacuaugaggaaugcuccuguuauccugauucuagugaaaucacaugugugugcagggauaacuggcauggcucgaaucgaccgugggugucuuucaaccagaaucuggaauaucagauaggauacauaugcagugggauuuucggagacaauccacgcccuaaugauaagacaggcaguugugguccaguaucgucuaauggagcaaauggaguaaaaggauuuucauucaaauacggcaaugguguuuggauagggagaacuaaaagcauuaguucaagaaaagguuuugagaugauuugggauccaaacggauggacugggacagacaauaacuucucaauaaagcaagauaucguaggaauaaaugaguggucaggauauagcgggaguuuuguucagcauccagaacuaacagggcuggauuguauaagaccuugcuucuggguugaacuaaucagagggcgacccaaagagaacacaaucuggacuagcgggagcagcauauccuuuugugguguaaacagugacacuguggguuggucuuggccagacggugcugaguugccauuuaccauugacaaguaa

SEQ ID NO: 52603 - RNA, 1410 nt, Artificial Sequence
  derived and/or modified CDS sequence (wt) from neuraminidase__InfluenzaA__AEB21328
augaauccaaaccaaaagauaauaaccauugguucggucuguaugacaauuggaauggcuaacuuaauauuacaaauuggaaacauaaucucaauauggauuagccacucaauucaacuugggaaucaaagucagauugaaacaugcaaucaaagcgucauuacuuaugaaaacaacacuuggguaaaucagacauauguuaacaucagcaacaccaacuuugcugcuggacagucagugguuuccgugaaauuagcgggcaauuccucucucugcccuguuaguggaugggcuauauacaguaaagacaacaguauaagaaucgguuccaagggggauguguuugucauaagggaaccauucauaucaugcucccccuuggaaugcagaaccuucuucuugacucaaggggccuugcuaaaugacaaacauuccaauggaaccauuaaagacaggagcccauaucgaacccuaaugagcuguccuauuggugaaguucccucuccauacaacucaagauuugagucagucgcuuggucagcaagugcuugucaugauggcuucaauuggcuaacaauuggaauuucuggcccagacaauggggcaguggcuguguuaaaguacaacggcauaauaacagacacuaucaagaguuggagaaacaauauauugagaacacaagagucugaaugugcauguguaaaugguucaugcuuuaccauaaugaccgauggaccaagugauggacaggccucauacaagaucuucagaauagaaaagggaaagauagucaaaucagucgaaaugaaugccccuaauuaucacuaugaggaaugcuccuguuauccugauucuagugaaaucacaugugugugcagggauaacuggcauggcucgaaucgaccgugggugucuuucaaccagaaucuggaauaucagauaggauacauaugcagugggauuuucggagacaauccacgcccuaaugauaagacaggcaguugugguccaguaucgucuaauggagcaaauggaguaaaaggauuuucauucaaauacggcaaugguguuuggauagggagaacuaaaagcauuaguucaagaaaagguuuugagaugauuugggauccaaacggauggacugggacagacaauaacuucucaauaaagcaagauaucguaggaauaaaugaguggucaggauauagcgggaguuuuguucagcauccagaacuaacagggcuggauuguauaagaccuugcuucuggguugaacuaaucagagggcgacccaaagagaacacaaucuggacuagcgggagcagcauguccuuuugugguguaaacagugacacuguggguuggucuuggccagacggugcugaguugccauuuaccauugacaaguaa

SEQ ID NO: 52604 - RNA, 1410 nt, Artificial Sequence; identical to SEQ ID NO: 52602
  derived and/or modified CDS sequence (wt) from neuraminidase__InfluenzaA__AEB21340

SEQ ID NO: 52605 - RNA, 1410 nt, Artificial Sequence
  derived and/or modified CDS sequence (wt) from neuraminidase__InfluenzaA__AEB21350
augaauccaaaccaaaagauaauaaccauugguucggucuguaugacaauuggaauggcuaacuuaauauuacaaauuggaaacauaaucucaauauggauuagccacucaauucaacuugggaaucaaagucagauugaaacaugcaaucaaagcgucauuacuuaugaaaacaacacuuggguaaaucagacauauguuaacaucagcaacaccaacuuugcugcuggacagucagugguuuccgugaaauuagcgggcaauuccucucucugcccuguuaguggaugggcuauauacaguaaagacaacaguauaagaaucgguuccaagggggauguguuugucauaagggaaccauucauaucaugcucccccucggaaugcagaaccuucuucuugacucaaggggccuugcuaaaugacaaacauuccaauggaaccauuaaagacaggagcccauaucgaacccuaaugagcuguccuauuggugaaguucccucuccauacaacucaagauuugagucagucgcuuggucagcaagugcuugucaugauggcaucaauuggcuaacaauuggaauuucuggcccagacaauggggcaguggcuguguuaaaguacaacggcauaauaacagacacuaucaagaguuggagaaacaauauauugagaacacaagagucugaaugugcauguguaaaugguucuugcuuuaccauaaugaccgauggaccaagugauggacaggccucauacaagaucuucagaauagaaaagggaaagauagucaaaucagucgaaaugaaugccccuaauuaucacuaugaggaaugcuccuguuauccugauucuagugaaaucacaugugugugcagggauaacuggcauggcucgaaucgaccgugggugucuuucaaccagaaucuggaauaucagauaggauacauaugcagugggauuuucggagacaauccacgcccuaaugauaagacaggcaguugugguccaguaucgucuaauggagcaaauggaguaaaaggauuuucauucaaauacggcaaugguguuuggauagggagaacuaaaagcauuauuucaagaaaagguuuugagaugauuugggauccaaacggauggacugggacagacaauaacuucucaauaaagcaagauaucguaggaauaaaugaguggucaggauauagcgggaguuuuguucagcauccagaacuaacagggcuggauuguauaagaccuugcuucuggguugaacuaaucagagggcgacccaaagagaacacaaucuggacuagcgggagcagcauauccuuuugugguguaaacagugacacuguggguuggucuuggccagacggugcugaguugccauuuaccauugacaaguaa

SEQ ID NO: 52606 - RNA, 1410 nt, Artificial Sequence
  derived and/or modified CDS sequence (wt) from neuraminidase__InfluenzaA__AEB21360
augaauccaaaccaaaagauaauaaccauugguucggucuguaugacaauuggaauggcuaacuuaauauuacaaauuggaaacauaaucucaauauggauuagccacucaauucaacuugggaaucaaagucagauugaaacaugcaaucaaagcgucauuacuuaugaaaacaacacuuggguaaaucagacauauguuaacaucagcaacaccaacuuugcugcuggacagucagugguuuccgugaaauuagcgggcaauuccucucucugcccuguuaguggaugggcuauauacaguaaagacaacaguauaagaaucgguuccaagggggauguguuugucauaagggaaccauucauaucaugcucccccuuggaaugcagaaccuucuucuugacucaaggggccuugcuaaaugacaaacauuccaauggaaccauuaaagacaggagcccauaucgaacccuaaugagcuguccuauuggugaaguucccucuccauacaacucaagauuugagucagucgcuuggucagcaagugcuugucaugauggcaucaauuggcuaacaauuggaauuucuggcccagacaauggggcaguggcuguguuaaaguacaacggcauaauaacagacacuaucaagaguuggagaaacaauauauugagaacacaagagucugaaugugcauguguaaaugguucuugcuuuaccauaaugaccgauggaccaagugauggacaggccucauacaagaucuucagaauagaaaagggaaagauagucaaaucagucgaaaugaaugccccuaauuaucacuaugaggaaugcuccuguuauccugauucuagugaaaucacaugugugugcagggauaacuggcauggcucgaaucgaccgugggugucuuucaaccagaaucuggaauaucagauaggauacauaugcagugggauuuucggagacaauccacgcccuaaugauaagacaggcaguugugguccaguaucgucuaauggagcaaauggaguaaaaggauuuucauucaaauacggcaaugguguuuggauagggagaacuaaaagcauuaguucaagaaaagguuuugagaugauuugggauccaaauggauggacugggacagacaauaacuucucaauaaagcaagauaucguaggaauaaaugaguggucaggauauagcgggaguuuuguucagcauccagaacuaacagggcuggauuguauaagaccuugcuucuggguugaacuaaucagagggcgacccaaagagaacacaaucuggacuagcgggagcagcauauccuuuugugguguaaacagugacacuguggguuggucuuggccagacggugcugaguugccauuuaccauugacaaguaa

SEQ ID NO: 52607 - RNA, 1410 nt, Artificial Sequence; identical to SEQ ID NO: 52295
  derived and/or modified CDS sequence (wt) from neuraminidase__InfluenzaA__AEB40209

SEQ ID NO: 52608 - RNA, 1410 nt, Artificial Sequence; identical to SEQ ID NO: 49595
  derived and/or modified CDS sequence (wt) from neuraminidase__InfluenzaA__AEB66898

SEQ ID NO: 52609 - RNA, 1413 nt, Artificial Sequence
  derived and/or modified CDS sequence (wt) from neuraminidase__InfluenzaA__AEB71103
augaauccaaaucagaaaauaauaaccauaggcuccguaucauugggacugguuguauucaauguucuauuacaugucgugagcaucauaguaacaguagugguccuggggaaugacgggggcaauggaauauguaaugggacgguagugaaggaauacaaugagacagucagaauagaaagggugauucaauggcacaacacuaguguaguugaauacauaccauauuugaauggaggcaccuacaccaacaauacagaaucaguaugugacgucaagggcuuugcaccuuucucaaaggacaacggaguaagaauuggcucuaggggacauguuuuugucauaagggaaccuuuugucuccuguucgcccagggagugcagaacuuucuuccucacccagggguccuuacucaaugacaaacacucgaauggaacagugaaggauagaagcccauucaaaacucuuaugagugucgaaguaggucaaucacccaauguauaccaagccagguuugaagcuguagcguggucagcgaccgccugccaugaugggaagaaguggaugacgauugguguaacagggccugauuccaaagcaguggcaguaguccauuaugggggggugccuacugauaucauuaauuccugggcaggagauauuuugagaacucaagagucauccugcacuugcauacagggugauugcuacugggugaugacugacggcccugccaacaggcaggcgcaguacagaauauacaaaucuaaucaaggcaagauaauuggucagauggauaucaacuuuaaugggggucauauugaagaguguucuugcuacccuaaugauggcaagguggaaugcguuuguagagacaacuggacagggaccaaccggccugugcuggugauuucgccugaucucucuuacaaaguuggguauuugugugcagggcugccaagcgacaccccaagaggggaggaugcccaauucuccgguucuugcaccagucccguggggggucaaggguaugguguaaaagguuuuggauuccgacagggaaaugauguauggauggggaggacaauuagucgaaccuccaggucaggauuugagguaauaagaguaaagaaugguuggacacagacaaguaaagaacagauuagaaaacaaguaguuguugauaauuugaauuggucgggguacaguggaucuuuuacccugccaauagaauugucugggaaaagcuguuugguucccuguuuuuggguagaaacgaucagagguaaaccugaggagaaaacaaucuggaccuccagcagcuccauugugauguguggaguugauuaugaagucgccgauuggucguggcacgauggagcuauucuuccuuuugacaucgauaagauguaa

SEQ ID NO: 52610 - RNA, 1413 nt, Artificial Sequence; identical to SEQ ID NO: 52253
  derived and/or modified CDS sequence (wt) from neuraminidase__InfluenzaA__AEB71899

SEQ ID NO: 52611 - RNA, 1410 nt, Artificial Sequence
  derived and/or modified CDS sequence (wt) from neuraminidase__InfluenzaA__AEB71910
augaauccaaaccaaaagauaauaaccauugguucggucuguaugacaauuggaauggcuaacuuaauauuacaaauuggaaacauaaucucaauauggauuagccacucaauucaacuugggaaucaaaaucagauugaaacaugcaaucaaagcgucauuacuuaugaaaacaacacuuggguaaaucagacauauguuaacaucagcaacaccuacuuugcugcuggacagucagugguuuccgugaaauuagcgggcaauuccucucucugcccuguuaguggaugggcuauauacaguaaagacaacaguauaagaaucgguuccaagggggauguguuugucauaagggaaccauucauaucaugcucccccuuggaaugcagaaccuucuucuugacucaaggggccuugcuaaaugacaaacauuccaauggaaccauuaaagacaggagcccauaucgaacccuaaugagcuguccuauuggugaaguucccucuccauacaacucaagauuugagucagucgcuuggucagcaagugcuugucaugauggcaucaauuggcuaacaauuggaauuucuggcccagacaauggggcaguggcuguguuaaaguacaacggcauaauaacagacacuaucaagaguuggagaaacaauauauugagaacacaagagucugaaugugcauguguaaaugguucuugcuuuacuguaaugaccgauggaccaagugauggacaggccucauacaagaucuucagaauagaaaagggaaagauagucaaaucagucgaaaugaaugccccuaauuaucacuaugaggaaugcuccuguuauccugauucuagugaaaucacaugugugugcagggauaacuggcauggcucgaaucgaccgugggugucuuucaaccagaaucuggaauaucagauaggauacauaugcagugggauuuucggagacaauccacgcccuaaugauaagacaggcaguugugguccaguaucgucuaauggagcaaauggaguaaaaggauuuucauucaaauacggcaaugguguuuggauagggagaacuaaaagcauuaguucaagaaacgguuuugagaugauuugggauccgaacggauggacugggacagacaauaacuucucaauaaagcaagauaucguaggaauaaaugaauggucaggauauagcgggaguuuuguucagcauccagaacuaacagggcuggauuguauaagaccuugcuucuggguugaacuaaucagagggcgacccaaagagaacacaaucuggacuagcgggagcagcauauccuuuugugguguaaacagugacacuguggguuggucuuggccagacggugcugaguugccauuuaccauugacaaguaa

SEQ ID NO: 52612 - RNA, 1410 nt, Artificial Sequence; identical to SEQ ID NO: 48750
  derived and/or modified CDS sequence (wt) from neuraminidase__InfluenzaA__AEB71919

SEQ ID NO: 52613 - RNA, 1410 nt, Artificial Sequence
  derived and/or modified CDS sequence (wt) from neuraminidase__InfluenzaA__AEB71928
augaauccaaaucaaaagauaauaacgauuggcucuguuucucucaccauuuccacaauaugcuucuucaugcaaauugccaucuugguaacuacuguaacauugcauuucaagcaauaugaauucaacucccccccaaacaaccaagugaugcugugugaaccaacaauaauagaaagaaacauaacagagauaguguaucugaccaacaccaccauagagaaggaaauaugccccaaacuagcagaauacagaaauuggucaaagccgcaaugugacauuacaggauuugcaccuuuuucuaaggacaauucgauuaggcuuuccgcugguggggacaucugggugacaagagaaccuuaugugucaugcgaucccgacaaguguuaucaauuugcccuuggacagggaacaacacuaaacaacgugcauucaaauaacacaguacgugauaggaccccuuaucggacccuauugaugaaugaguuagguguuccuuuucaucuggggaccaagcaagugugcauagcaugguccagcucaaguugucacgauggaaaagcauggcugcauguuuguauaacgggggaugauaaaaaugcaacugcuagcuucauuuacaaugggaggcuuguagauaguguuguuucaugguccaaagacauccucaggacccaggagucagaaugcguuuguaucaauggaacuuguacaguaguaaugacugaugggagugcuucaggaaaagcugauacuaaaauacuauucauugaggaggggaaaaucguucauacuagcacauugucaggaagugcucagcaugucgaggagugcuccugcuauccucgauauccuggugucagaugugucugcagagacaacuggaaaggcuccaauaggcccaucguagauauaaacauaaaggaucauagcauuguuuccaguuauguguguucaggacuuguuggagacacacccagaaaaaacgacagcuccagcaguagccauuguuuggauccuaacaaugaagaagguggucauggagugaaaggcugggccuuugaugauggaaaugacguguggaugggaagaacgaucagcgagaagucacgcuuaggguaugaaaccuucaaagucauugaaggcugguccaacccuaaguccaaauugcagauaaauaggcaagucauaguugacagagguaauagguccgguuauucugguauuuucucuguugaaggcaaaagcugcaucaaucggugcuuuuauguggaguugauaaggggaagaaaagaggaaacugaagucuuguggaccucaaacaguauuguuguguuuuguggcaccucagguacauauggaacaggcucauggccugauggggcgaacaucaaucucaugccuauauaa

SEQ ID NO: 52614 - RNA, 1410 nt, Artificial Sequence
  derived and/or modified CDS sequence (wt) from neuraminidase__InfluenzaA__AEB71939
augaauccaaaucaaaagauaauaacgauuggcucuguuucucucaccauuuccgcaauaugcuucuucaugcaaauugccaucuugauaacuacuguaacauugcauuucaagcaauaugaauucaacucccccccaaacaaccaagugaugcugugugaaccaacaauaauagaaagaaacauaacagagauaguguaucugaccaacaccaccauagagaaggaaauaugccccaaacuagcagaauacagaaauuggucaaagccgcaaugugacauuacaggauuugcaccuuuuucuaaggacaauucgauuaggcuuuccgcugguggggacaucugggugacaagagaaccuuaugugucaugcgauccugacaaguguuaucaauuugcccuuggacagggaacaacacuaaacaacgugcauucaaauaacacaguacgugauaggaccccuuaucggacccuauugaugaaugaguuagguguuccuuuucaucuggggaccaagcaagugugcauagcaugguccagcucaaguugucacgauggaaaagcauggcugcauguuuguauaacgggggaugauaaaaaugcaacugcuagcuucauuuacaaugggaggcuuguagauaguguuguuucaugguccaaagaaauccucaggacccaggagucagaaugcgucuguaucaauggaacuuguacaguaguaaugacugaugggagugcuucaggaaaagcugauacuaaaauacuauucauugaggaggggaaaaucguucauacuagcacauugucaggaagugcucagcaugucgaggagugcucuugcuauccucgauauccuggugucagaugugucugcagagacaacuggaaaggcuccaauaggcccaucguagauauaaacauaaaggaucauagcauuguuuccaguuauguguguucaggacuuguuggagacacacccagaaaaaacgacagcuccagcaguagccauuguuuggauccuaacaaugaagaagguggucauggagugaaaggcugggccuuugaugauggaaaugacguguggaugggaagaacgauuagcgagaagucacgcuuaggguaugaaacuuucaaagucauugaaggcugguccaaccauaaguccaaauugcagauaaauaggcaagucauaguugacagagguaauagguccgguuauucugguauuuucucuguugaaggcaaaagcugcaucaaucggugcuuuuauguggaguugauuaggggaagaaaagaggaaacugaagucuuguggaccucgaacaguauuguuguguuuuguggcaccucagguacauauggaacaggcucauggccugauggggcggaccucaaucucaugccuauauaa

SEQ ID NO: 52615 - RNA, 1410 nt, Artificial Sequence
  derived and/or modified CDS sequence (wt) from neuraminidase__InfluenzaA__AEB71950
augaauccaaaucaaaagauaauaacgauuggcucuguuucucucaccauuuccacaauaugcuucuucaugcaaauugccaucuugauaacuacuguaacauugcauuucaagcaauaugaauucaacucccccccaaacaaccaagugaugcugugugaaccaacaauaauagaaagaaacauaacagagauaguguaucugaccaacaccaccauagagaaggaaauaugccccaaacuagcagaauacagaaauuggucaaagccgcaaugugacauuacaggauuugcaccuuuuucuaaggacaauucgauuaggcuuuccgcugguggggacaucugggugacaagagaaccuuaugugucaugcgauccugacaaguguuaucaauuugcccuuggacagggaacaacacuaaacaacgugcauucaaauaacacaguacgugauaggaccccuuaucggacccuauugaugaaugaguuagguguuccuuuucaucuggggaccaagcaagugugcauagcaugguccagcucaaguugucacgauggaaaagcauggcugcauguuuguauaacgggggaugauaaaaaugcaacugcuagcuucauuuacaaugggaggcuuguagauaguguuguuucaugguccaaagaaauccucaggacccaggagucagaaugcgucuguaucaauggaacuuguacaguaguaaugacugauggaagugcuucaggaaaagcugauacuaaaauacuauucauugaggaggggaaaaucguucauacuagcacauugucaggaagugcucagcaugucgaggagugcucuugcuauccucgauauccuggugucagaugugucugcagagacaacuggaaaggcuccaauaggcccaucguagauauaaacauaaaggaucauagcauuguuuccaguuauguguguucaggacuuguuggagacacacccagaaaaaacgacagcuccagcaguagccauuguuuggauccuaacaaugaagaaggugaucauggagugaaaggcugggccuuugaugauggaaaugacguguggaugggaagaacgaucagcgagaagucacgcuuaggguaugaaaccuucaaagucauugaaggcugguccaaccauaaguccaaauugcagauaaauaggcaagucauaguugacagagguaauagguccgguuauucugguauuuucucuguugaaggcaaaagcugcaucaaucggugcuuuuauguggaguugauuaggggaagaaaagaggaaacugaagucuuguggaccucaaacaguauuguuguguuuuguggcaccucagguacauauggaacaggcucauggccugauggggcggaccucaaucucaugccuauauaa

SEQ ID NO: 52616 - RNA, 1413 nt, Artificial Sequence
  derived and/or modified CDS sequence (wt) from neuraminidase__InfluenzaA__AEB71961
augaacccaaaucaacggauaauaaccauuggaucaaucaguauagcaaucggaauaauuagucugauguugcaaauaggaaauauuauuucaauaugggcuagucacucaauccaaacuggaagucaaaacaacacuggaauaugcaaccaaagaaucaucacauaugaaaacagcaccugggugaaucauacauauguuaauauuaacaacacuaauguuguugcuggagaggacaaaacgucagugacauuggccggcaauucaucucuuuguucuaucaguggaugggcuauauacacaaaagacaacagcauaagaauuggcuccaaaggagauguuuuugucauaagagaaccuuucauaucauguucucacuuggaaugcagaaccuuuuuucugacccaaggcgcucuauuaaaugacaaacauucaaaugggaccgcaaaggacagaaguccuuauagggccuuaaugagcuguccucuaggugaagcuccguccccauacaauucaaaguucgaaucaguugcauggucagcaagcgcaugccaugauggcaugggcugguuaacaaucggaauuucugguccagacaauggagcuguggcuguauuaaaauacaacggaauaauaacuggaaccauaaaaaguuggaaaaagcaaauauuaagaacacaagagucugaaugugucuguaugaacgggucauguuucaccauaaugaccgauggcccgaguaauaaggccgccucguacaaaauuuucaagaucgaaaaggggaagguuacuaaaucaauagaguugaaugcacccaauuuuuauuaugaggaaugcuccuguuacccagacacuggcauagugauguguguaugcagggacaacuggcaugguucaaaucgaccuugggugucuuuuaaucaaaacuuggauuaucaaauaggauacaucugcaguggaguguuuggugacaauccgcgucccgaagauggagagggcagcugcaauccggugacuguugauggagcaaacggaguaaaaggguuuucauacaaauaugguaaugguguuuggauaggaaggaccaaaaguaacagacuuagaaagggguuugagaugauuugggauccuaauggauggacaaauaccgacagugauuucucagugaaacaggauguuguagcaauaacugauuggucaggguacagcggaaguuucguccaacacccugaguuaacaggauuggacuguauaagaccuugcuucuggguugaguuagucagagggcugccuagagaaaauacaacaaucuggacuagugggagcagcauuucuuuuuguggcguuaauagugauacugcaaacuggucuuggccagacggugcugaguugccguucaccauugacaaguag

SEQ ID NO: 52617 - RNA, 1410 nt, Artificial Sequence
  derived and/or modified CDS sequence (wt) from neuraminidase__InfluenzaA__AEB71972
augaauccaaaucaaaagauaauaacgauuggcucuguuucucucaccauuuccacaauaugcuucuucaugcaaauugccaucuugauaacuacuguaacauugcauuucaagcaauaugaauucaacucccccccaaacaaccaagugaugcugugugaaccaacaauaauagaaagaaacauaacagagauaguguaucugaccaacaccaccauagugaaggaaauaugccccaaacuagcagaauacagaaauuggucaaagccgcaaugugacauuacaggguuugcaccuuuuucuaaggacaauucgauuaggcuuuccgcugguggggacaucugggugacaagagaaccuuaugugucaugcgauccugacaaguguuaucaauuugcccuuggacagggaacaacacuaaacaacguacauucaaauaacacaguacgugauaggaccccuuaucggacccuauugaugaaugaguuagguguuccuuuucaucuggggaccaagcaagugugcauagcaugguccagcucaaguugucacgauggaaaagcauggcugcauguuuguauaacgggggaugauaaaaaugcaacugcuagcuucauuuacaaugggaggcuuguagauaguguuguuucaugguccaaagaaauccucaggacccaggagucagaaugcguuuguaucaauggaacuuguacaguaguaaugacugaugggagugcuucaggaaaagcugauacuaaaauacuauucauugaggaggggaaaaucguucauacuagcacauugucaggaagugcucagcaugucgaggagugcuccugcuauccucgauauccuggugucagaugugucugcagagacaacuggaaaggauccaauaggcccaucguagauauaaacauaaaggaucauagcauugucuccaguuauguguguucaggacuuguuggagacacacccagaaaaaacgacagcuccagcaguagccauuguuuggauccuaacaaugaggaagguggucauggggugaaaggcugggccuuugaugauggaaaugacguguggaugggaagaacgaucagcgagaagucacgcuuaggguaugaaaccuucaaagucauugaaggcugguccaacccuaaguccaaauugcagauaaauaggcaagucauaguugacagagguaauagguccgguuauucugguauuuucucuguugaaggcaaaagcugcaucaaucggugcuuuuauguggaguugauaaggggaagaaaagaggaaacugaagucuuguggaccucaaacaguauuguuguguuuuguggcaccucagguacauauggaacaggcucauggccugauggggcggacaucaaucucaugccuauauaa

SEQ ID NO: 52618 - RNA, 1410 nt, Artificial Sequence
  derived and/or modified CDS sequence (wt) from neuraminidase__InfluenzaA__AEB71983
augaauccaaaucaaaagauaauaacgauuggcucuguuucucucaccauuuccacaauaugcuucuucaugcaaauugccaucuugauaacuacuguaacauugcauuucaagcaauaugaauucaacucccccccaaacaaccaagugaugcugugugaaccaacaauaauagaaagaaacauaacagagauaguguaucugaccaacaccaccauagagaaggaaauaugccccaaacuagcagaauacagaaauuggucaaagccgcaaugugacauuacaggguuugcaccuuuuucuaaggacaauucgauuaggcuuuccgcugguggggacaucugggugacaagagaaccuuaugugucaugcgauccugacaaguguuaucaauuugcccuuggacagggaacaacacuaaacaacguacauucaaauaacacaguacgugauaggaccccuuaucggacccuauugaugaaugaguuagguguuccuuuucaucuggggaccaagcaagugugcauagcaugguccagcucaaguugucacgauggaaaagcauggcugcauguuuguauaacgggggaugauaaaaaugcaacugcuagcuucauuuacaaugggaggcuuguagauaguguuguuucaugguccaaagaaauccucaggacccaggagucagaaugcguuuguaucaauggaacuuguacaguaguaaugacugaugggagugcuucaggaaaagcugauacuaaaauacuauucauugaggaggggaaaaucguucauacuagcacauugucaggaagugcucagcaugucgaggagugcucuugcuauccucgauauccuggugucagaugugucugcagagacaacuggaaaggauccaauaggcccaucguagauauaaacaugaaggaucauagcauuguuuccaguuauguguguucaggacuuguuggagacacacccagaagaaacgacagcuccagcaguagccauuguuuggauccuaacaaugaagaagguggucauggagugaaaggcugggccuuugaugauggaaaugacguguggaugggaagaacgaucagcgagaagucacgcuuaggguaugaaaccuucaaagucauugaaggcugguccaacccuaaguccaaauugcagauaaauaggcaagucauaguugacagagguaauagguccgguuauucugguauuuucucuguugaaggcaaaagcugcaucaaucggugcuuuuauguggaguugauaaggggaagaaaagaggaaacugaagucuuguggaccucaaacaguauuguuguguuuuguggcaccucagguacauauggaacaggcucauggccugauggggcggacaucaaucucaugccuauauaa

SEQ ID NO: 52619 - RNA, 1413 nt, Artificial Sequence
  derived and/or modified CDS sequence (wt) from neuraminidase__InfluenzaA__AEB71995
augaacccaaaucaaaagauaauaaccauuggaucaaucaguauagcaaucggaauaauuagucuaauguugcaaauaggaaauauuauuucaauaugggcuagucacucaauccaaacuggaagucaaaacaacacuggaauaugcaaccaaagaaucaucacauaugaaaacagcaccugggugaaucacacauauauuaauauuaacaacacuaauguuguugcuggagaggacaaaacgucagugacauuggccggcaauucaucucuuuguucuaucaguggaugggcuauauacacaaaagacaacagcauaagaauuggcuccaaaggagauguuuuugucauaagagaaccuuucauaucauguucucacuuggaaugcagaaccuuuuuucugacccaaggcgcucuauuaaaugacaaacauucaaaugggaccguaaaggacagaaguccuuauagggccuuaaugagcuguccucuaggugaagcuccguccccauacaauucaaaguucgaaucaguugcauggucagcaagcgcaugccaugauggcaugggcugguugacaaucggaauuucugguccagacaauggagcuguggcuguacuaaaauacaacggaauaauaacuggaaccauaaaaaguuggaaaaagcaaauauuaagaacacaagagucugaaugugucuguaugaacgggucauguuucaccauaaugaccgauggcccgaguaauaaagccgccucguacaaaauuuucaagaucgaaaaggggaagguuacuaaaucaauagaguugaaugcacccaauuuuuauuacgaggaaugcuccuguuacccagacacuggcauagugauguguguaugcagggacaacuggcaugguucaaaucgaccuugggugucuuuuaaucaaaauuuggauuaucaaauaggauacaucugcaguggaguguuuggugacaauccgcgucccgaagauggagagggcagcugcaauccaguaacuguuaauggagcagacggaguaaaaggguuuucauacaaauaugguaaugguguuuggauaggaaggaccaaaaguaacagacuuagaaagggguuugagaugauuugggauccuaauggauggacaaauaccgacagugauuucucagugaaacaggauguuguagcaauaacugauuggucaggguacagcggaaguuucguccaacauccugaguugacaggauuggaauguauaagaccuugcuucuggguugaguuagucagagggcugccuagagaaaauacaacaaucuggacuagugggagcagcauuucuuuuuguggcguuaauagugauacugcaaacuggucuuggccagacggugcugaguugccguucaccauugacaaguag

SEQ ID NO: 52620 - RNA, 1413 nt, Artificial Sequence; identical to SEQ ID NO: 52217
  derived and/or modified CDS sequence (wt) from neuraminidase__InfluenzaA__AEC13316

SEQ ID NO: 52621 - RNA, 1410 nt, Artificial Sequence; identical to SEQ ID NO: 48953
  derived and/or modified CDS sequence (wt) from neuraminidase__InfluenzaA__AEC53262

SEQ ID NO: 52622 - RNA, 1410 nt, Artificial Sequence; identical to SEQ ID NO: 48953
  derived and/or modified CDS sequence (wt) from neuraminidase__InfluenzaA__AEC53272

SEQ ID NO: 52623 - RNA, 1410 nt, Artificial Sequence; identical to SEQ ID NO: 48953
  derived and/or modified CDS sequence (wt) from neuraminidase__InfluenzaA__AEC53282

SEQ ID NO: 52624 - RNA, 1410 nt, Artificial Sequence; identical to SEQ ID NO: 48953
  derived and/or modified CDS sequence (wt) from neuraminidase__InfluenzaA__AEC53292

SEQ ID NO: 52625 - RNA, 1410 nt, Artificial Sequence
  derived and/or modified CDS sequence (wt) from neuraminidase__InfluenzaA__AEC53302
augaauccaaaccaaaagauaauaaccauugguucggucuguaugacaauuggaauggcuaacuuaauauuacaaauuggaaacauaaucucaauauggauuagccacucaauucaacuugggaaucaaaaucagauugaaacaugcaaucaaagcgucauuacuuaugaaaacaacacuuggguaaaucagacauauguuaacaucagcaacaccaacuuugcugcuggacagucagugguuuccgugaaauuagcgggcaauuccucucucugcccuguuaguggaugggcuauauacaguaaagacaacaguauaagaaucgguuccaagggggauguguuugucauaagggaaccauucauaucaugcucccccuuggaaugcagaaccuucuucuugacucaaggggccuugcuaaaugacaaacauuccaauggaaccauuaaagacaggagcccauaucgaacccuaaugagcuguccuauuggugaaguucccucuccauacaacucaagauuugagucagucgcuuggucagcaagugcuugucaugauggcaucaauuggcuaacaauuggaauuucuggcccagacaauggggcaguggcuguguuaaaguacaacggcauaauaacagacauuaucaagaguuggagaaacaauauauugagaacacaagagucugaaugugcauguguaaaugguucuugcuuuacuguaaugaccgauggaccaagugauggacaggccucauacaagaucuucagaauagaaaagggaaagauagucaaaucagucgaaaugaaugccccuaauuaucacuaugaggaaugcuccuguuauccugauucuagugaaaucacaugugugugcagggauaacuggcauggcucgaaucgaccgugggugucuuucaaccagaaucuggaauaucagauaggauacauauguagugggauuuucggagacaauccacgcccuaaugauaagacaggcaguugugguccaguaucgucuaauggagcaaauggaguaaaaggauuuucauucaaauacggcaaugguguuuggauagggagaacuaaaagcauuaguucaagaaacgguuuugagaugauuugggauccgaacggauggacugggacagacaauaacuucucaauaaagcaagauaucguaggaauaaaugaguggucaggauauagcgggaguuuuguucagcauccagaacuaacagggcuggauuguauaagaccuugcuucuggguugaacuaaucagagggcgacccaaagagaacacaaucuggacuagcgggagcagcauauccuuuugugguguaaacagugacacuguggguuggucuuggccagacggugcugaguugccauuuaccauugacaaguaa

SEQ ID NO: 52626 - RNA, 1410 nt, Artificial Sequence; identical to SEQ ID NO: 48953
  derived and/or modified CDS sequence (wt) from neuraminidase__InfluenzaA__AEC53350

SEQ ID NO: 52627 - RNA, 1410 nt, Artificial Sequence; identical to SEQ ID NO: 49647
  derived and/or modified CDS sequence (wt) from neuraminidase__InfluenzaA__AEC53407

SEQ ID NO: 52628 - RNA, 1410 nt, Artificial Sequence; identical to SEQ ID NO: 48947
  derived and/or modified CDS sequence (wt) from neuraminidase__InfluenzaA__AEC53427

SEQ ID NO: 52629 - RNA, 1410 nt, Artificial Sequence; identical to SEQ ID NO: 50408
  derived and/or modified CDS sequence (wt) from neuraminidase__InfluenzaA__AED99967

SEQ ID NO: 52630 - RNA, 1410 nt, Artificial Sequence; identical to SEQ ID NO: 48749
  derived and/or modified CDS sequence (wt) from neuraminidase__InfluenzaA__AEE27161

SEQ ID NO: 52631 - RNA, 1410 nt, Artificial Sequence; identical to SEQ ID NO: 48750
  derived and/or modified CDS sequence (wt) from neuraminidase__InfluenzaA__AEE27170

SEQ ID NO: 52632 - RNA, 1410 nt, Artificial Sequence; identical to SEQ ID NO: 51575
  derived and/or modified CDS sequence (wt) from neuraminidase__InfluenzaA__AEE27180

SEQ ID NO: 52633 - RNA, 1410 nt, Artificial Sequence
  derived and/or modified CDS sequence (wt) from neuraminidase__InfluenzaA__AEE27190
augaauccaaaccaaaagauaauaaccauugguucggucuguaugacaauuggaauggcuaacuuaauauuacaaauuggaaacauaaucucaauauggauuagccacucaauucaacuugggaaucaaaaucagauugaaacaugcaaucaaagcgucauuacuuaugaaaacaacacuuggguaaaucagacauauguuaacaucagcaacaccaacuuugcugcuggacagucagugguuuccgugaaauuagcgggcaauuccucucucugcccuguuaguggaugggcuauauacaguaaagacaacaguguaagaaucgguuccaagggggauguguuugucauaagggaaccauucauaucaugcucccccuuggaaugcagaaccuucuucuugacucaaggggccuugcuaaaugacaaacauuccaauggaaccauuaaagacaggagcccauaucgaacccuaaugagcuguccuauuggugaaguucccucuccauacaacucaagauuugagucagucgcuuggucagcaagugcuugucaugauggcaucaauuggcuaacaauuggaauuucuggcccagacaauggggcaguggcuguguuaaaguacaacggcguaauaacagacacuaucaagaguuggagaaacaauauauugagaacacaagagucugaaugugcauguguaaaugguucuugcuuuacuguaaugaccgauggaccaaguaauggacaggccucauacaagaucuucaaaauagaaaagggaaagauagucaaaucagucgaaaugaaugccccuaauuaucacuaugaggaaugcuccuguuauccugauucuagugaaaucacaugugugugcagggauaacuggcauggcucgaaucgaccgugggugucuuucaaccagaaucuggaauaucagauaggauacauaugcagugggauuuucggagacaauccacgcccuaaugauaagacaggcaguugugguccaguaucgucuaauggagcaaauggaguaaaaggauuuucauucaaauacggcaaugguguuuggauagggagaacuaaaagcauuaguucaagaaacgguuuugagaugauuugggauccgaacggauggacugggacagacaauaacuucucaauaaagcaagauaucguaggaauaaaugaguggucaggauauagcgggaguuuuguucagcauccagaacuaacagggcuggauuguauaagaccuugcuucuggguugaacuaaucagagggcgacccaaagagaacacaaucuggacuagcgggagcagcauauccuuuugugguguaaacagugacacuguggguuggucuuggccagacggugcugaguugccauuuaccauugacaaguaa

SEQ ID NO: 52634 - RNA, 1410 nt, Artificial Sequence; identical to SEQ ID NO: 49973
  derived and/or modified CDS sequence (wt) from neuraminidase__InfluenzaA__AEE27200

SEQ ID NO: 52635 - RNA, 1410 nt, Artificial Sequence
  derived and/or modified CDS sequence (wt) from neuraminidase__InfluenzaA__AEG64755
augaauccaaaccaaaagauaauaaccauugguucggucuguaugacaauuggaauggcuaacuuaauauuacaaauuggaaacauaaucucaauauggauuagccacucaauucaacuugggaaucaaaaucagauugaaacaugcaaucaaagcgucauuacuuaugaaaacaacacuuggguaaaucagacauauguuaacaucagcaacaccaacuuugcugcuggacagucagugguuuccgugaaauuagcgggcaauuccucucucugcccuguuaguggaugggcuauauacaguaaagacaacaguguaagaaucgguuccaagggggauguguuugucauaagggaaccauucauaucaugcucccccuuggaaugcagaaccuucuucuugacucaaggggccuugcuaaaugauaaacauuccaauggaaccauuaaagacaggagcccauaucgaacccuaaugagcuguccuauuggugaaguucccucuccauacaacucaagauuugagucagucgcuuggucagcaagugcuugucaugauggcaucaauuggcuaacaauuggaauuucuggcccagacaauggggcaguggcuguguuaaaguacaacggcauaauaacagacacuaucaagaguuggagaaacaauauauugagaacacaagagucugaaugugcguguguaaaugguucuugcuuuacuguaaugaccgauggaccaaguaauggacaggccucauacaagaucuucagaauagaaaagggaaagauagucaaaucagucgaaaugaaugccccuaauuaucacuaugaggaaugcuccuguuauccugauucuagugaaaucacaugugugugcagggauaacuggcauggcucgaaucgaccgugggugucuuucaaccagaaucuggaauaucagauaggauacauaugcagugggauuuucggagacaauccacgcccuauugauaagacaggcaguugugguccaguaucgucuaauggagcaaauggaguaaaaggauuuucauucaaauacggcaaugguguuuggauagggagaacuaaaagcauuaguucaagaaacgguuuugagaugauuugggauccgaacggauggacugggacagacaauaacuucucaauaaagcaagauaucguaggaauaaaugaguggucaggauauagcggaaguuuuguucagcauccggaacuaacagggcuggauuguauaagaccuugcuucuggguugaacuaaucagagggcgacccaaagagaacacaaucuggacuagcgggagcagcauauccuuuugugguguaaacagugacacuguggguuggucuuggccagacggugcugaguugccauuuaccauugacaaguaa

SEQ ID NO: 52636 - RNA, 1362 nt, Artificial Sequence
  derived and/or modified CDS sequence (wt) from neuraminidase__InfluenzaA__AEG64765
augaauccaaaccagaaaauaauaaccauugggucaaucuguaugguagucggaauaauuagccuaauauugcaaauagggaauauaaucucaauauggauuagccauucaauucaaaccggaaaucaaaaccauacuggaauaugcaaccaaggcaucauuaccuauaacguuguugcugggcaggacucaacuucagugauauuaaccggcaauucaucucuuugucccauccgugggugggcuauacacagcaaagacaauggcauaagaauugguuccaaaggagacguuuuugucauaagagagccuuuuauuucauguucucacuuggaaugcaggaccuuuuuucugacucaaggcgccuuacugaaugacaagcauucaaaugggaccguuaaggacagaagcccuuauagggccuuaaugagcugcccugucggugaagcuccguccccguacaauucaagguuugaaucgguugcuuggucagcaagugcaugucaugauggcaugggcuggcuaacaaucggaauuucugguccagauaauggagcaguggcuguauuaaaauacaacggcauaauaacugaaaccauaaaaaguuggaggaagaaaauauugagaacacaagagucugaauguaccuguguaaaugguucauguuuuaccauaaugaccgauggcccaagugaugggcuggccucguacaaaauuuucaagaucgagaaggggaagguuacuaaaucaauagaguugaaugcaccuaauucucacuacgaggaauguuccuguuacccugauaccggcaaagugaugugugugugcagagacaauuggcacgguucgaaccgaccauggguguccuucgaccaaaaccuagauuaucaaauaggauacaucugcagugggguuuucggugacaacccgcgucccaaagauggaacaggcagcuguggcccagugucugcugauggagcaaacggaguaaagggauuuucauauagguaugguaaugguguuuggauaggaaggacuaaaagugacaguuccagacauggguuugagaugauuugggauccuaauggauggacagagacugauaguagguucucugugagacaagauguuguggcaaugacugaucggucaggguacagcggaaguuucguucaacauccugagcuaacagggcuagacuguaugaggccuugcuucuggguugaauuaaucaggggacgaccugaggagaaaacaaucuggacuagugggagcaucauuucuuuuuguggcgugaauagugauacuguagauuggucuuggccagacggugcugaguugccguucaccauugacaaguag

SEQ ID NO: 52637 - RNA, 1410 nt, Artificial Sequence
  derived and/or modified CDS sequence (wt) from neuraminidase__InfluenzaA__AEG64787
augaauccaaaccaaaagauaauaaccauugguucggucuguaugacaauuggaauggcuaacuuaauauuacaaauuggaaacauaaucucaauauggauuagccacucaauucaacuugggaaucaaaaucagauugaaacaugcaaucaaagcgucauuacuuaugaaaacaacacuuggguaaaucagacauauguuaacaucagcaacaccaacuuugcugcuggacagucagugguuuccgugaaauuagcgggcaauuccucucucugcccuguuaguggaugggcuauauacaguaaagacaacaguauaagaaucgguuccaagggggauguguuugucauaagggaaccauucauaucaugcucccccuuggaaugcagaaccuucuucuugacucaaggggccuugcuaaaugacaaacauuccaauggaaccauuaaagacaggagcccauaucgaacccuaaugagcuguccuauuggugaaguucccucuccauacaacucaagauuugagucagucgcuuggucagcaagugcuugucaugauggcaucaauuggcuaacaauuggaauuucuggcccagacaauggggcaguggcuguguuaaaguacaacggcauaauaacagacacuaucaagaguuggagaaacaauagauugagaacacaagagucugaaugugcauguguaaaugguucuugcuuuacuguaaugaccgauggaccaagugauggacaggccucauacaagaucuucagaauagaaaagggaaagauagucaaaucagucgaaaugaaugccccuaauuaucacuaugaggaaugcuccuguuauccugauucuagugaaaucacaugugugugcagggauaacuggcauggcucgaaucgaccgugggugucuuucaaccagaaucuggaauaucagauaggauacauaugcagugggauuuucggagacaauccacgcccuaaugauaagacaggcaguugugguccaguaucgucuaauggagcaaauggaguaaaaggauuuucauucaaauacggcaaugguguuuggauagggagaacuaaaagcauuaguucaagaaacgguuuugagaugauuugggacccgaacggauggacugggacagacaaugacuucucaauaaagcaagauaucguaggaauaaaugaguggucaggauauagcgggaguuuuguucagcauccagaacuaacagggcuggauuguauaagaccuugcuucuggguugaauuaaucagagggcgacccaaagagaacacaaucuggacuagcgggagcagcauauccuuuugugguguaaacagugacacuguggguuggucuuggccagacggugcugaguugccauucaccauugacaaguaa

SEQ ID NO: 52638 - RNA, 1410 nt, Artificial Sequence
  derived and/or modified CDS sequence (wt) from neuraminidase__InfluenzaA__AEG64837
augaauccaaaucaaaagauaauaacgauuggcucuguuucucucaccauuuccacaauaugcuucuucaugcaaauugccaucuugauaacuacuguaacauugcauuucaagcaauaugaauucaacucccccccaaacaaccaagugaugcugugugaaccaacaauaauagaaagaaacauaacagagauaguguaucugaccaacaccaccauagagaaggaaauaugccccaaacuagcagaauacagaaauuggucaaaaccgcaaugugacauuacaggauuugcacccuuuucuaaggacaauucgauuaggcuuuccgcugguggggacaucugggugacaagagaaccuuaugugucaugcgauccugacaaguguuaucaauuugcccuuggacagggaacaacacuaaacaacgugcauucaaauaacacaguacgugauaggaccccuuaucggacccuauugaugaacgaguuagguguuccuuuucaucuggggaccaagcaagugugcaucgcaugguccagcucaaguugucacgauggaaaagcauggcugcauguuuguauaacgggagaugauaaaaaugcaacugcuagccucauuuacaaugggaggcuuguagauaguguuguuucaugguccaaagaaauucucaggacccaggagucagaaugcguuuguaucaauggaacuuguacaguaguaaugacugauggaagugcuucaggaaaagcugauacuaaaauacuauucauugaggaggggaaaaucguucauacuagcacauugucaggaagugcucagcaugucgaggagugcucuugcuauccucgauauccuggugucagaugugucugcagagacaacuggaaaggcuccaauaggcccaucguagauauaaacauaaaggaucauagcauuguuuccaguuauguguguucaggacuuguuggagacacacccagaaaaaacgacagcuccagcaguagccauuguuuggauccuaacaaugaagaagguggucauggagugaaaggcugggccuuugaugauggaaaugacguguggaugggaagaacaaucaacgagacgucacgcuuaggguaugaaaccuucaaagucauugaaggcugguccaacccuaaguccaaauugcagauaaauaggcaagucauaguugacagagguaauagguccgguuauucugguauuuucucuguugaaggcaaaagcugcaucaaucggugcuuuuauguggaguugauuaggggaagaaaagaggaaacugaagucuuguggaccucaaacaguauuguuguguuuuguggcaccucagguacauauggaacaggcucauggccugauggggcggaccucaaucucaugccuauauaa

SEQ ID NO: 52639 - RNA, 1410 nt, Artificial Sequence
  derived and/or modified CDS sequence (wt) from neuraminidase__InfluenzaA__AEG64848
augaacccaaaucaaaagauaauaacgauuggcucuguuucucucaccauuuccacaauaugcuucuucaugcaaauugccaucuugauaacuacuguaacauugcauuucaagcaauaugaauucuacucccccccaaacaaccaagugaugcugugugaaccaacaauaauagaaagaaacauaacagagauaguguaucugaccaacaccaccauagagaaggaaauaugccccaaacuagcagaauacagaaauugguuaaagccgcaaugugacauuacaggauuugcaccuuuuucuaaggacaauucgauuaggcuuuccgcugguggggacaucugggugacaagagaaccuuaugugucaugcgauccugacaaguguuaucaauuugcccuuggacagggaacaacacuaaacaacgugcauucaaauaacacaguacgugauaggaccccuuaucggacccuauugaugaaugaguuagguguuccuuuucaucuggggaccaagcaagugugcauagcaugguccagcucaaguugucacgauggaaaagcauggcugcauguuuguauaacgggggaugauaaaaaugcaacugcuagcuucauuuacaaugggaggcuuguagauaguguuguuucaugguccaaagaaauccucaggacccaggagucagaaugcguuuguaucaauggaacuuguacaguaguaaugacugaugggagugcuucaggaaaagcugauacuaaaauacuauucauugaggaggggaaaaucguucauacuagcacauugucaggaagugcucagcaugucgaggagugcucuugcuauccucgauauccuggugucagaugugucugcagagacaacuggaaaggcuccaauaggcccaucguugauauaaacauaaaggaucauagcauuguuuccaguuauguguguucaggacuuguuggagacacacccagaaaaaacgacagcuccagcaguagccauuguuuggauccuaacaaugaagaagguggucauggagugaaaggcugggccuuugaugauggaaaugacguguggaugggaagaacgaucaacgagacgucacgcuuaggguaugaaaccuucaaagucauugaaggcugguccaacccuaaguccaaauugcagauaaauaagcaagucauaguugacagagguaauagguccgguuauucugguauuuucucuguugaaggcaagagcugcaucaaucggugcuuuuauguggaguugauuaggggaagaaaagaggaaacugaagucuuguggaccucaaacaguauuguuguguuuuguggcaccucagguacauauggaacaggcucauggccugauggggcggaccucaaucucaugccuauauaa

SEQ ID NO: 52640 - RNA, 1410 nt, Artificial Sequence; identical to SEQ ID NO: 46245
  derived and/or modified CDS sequence (wt) from neuraminidase__InfluenzaA__AEG64859

SEQ ID NO: 52641 - RNA, 1410 nt, Artificial Sequence; identical to SEQ ID NO: 46181
  derived and/or modified CDS sequence (wt) from neuraminidase__InfluenzaA__AEG64870

SEQ ID NO: 52642 - RNA, 1410 nt, Artificial Sequence
  derived and/or modified CDS sequence (wt) from neuraminidase__InfluenzaA__AEG64881
augaauccaaaucaaaagauaauaacgauuggcucuguuucucucaccauugccacaauaugcuuccuuaugcaaauugccauccugguaacuacuguaacauugcauuucaagcaauaugaaugcaacucccccccaaacaaccaagugaugcugugugaaccaacaauaauagaaagaaacauaacagagauaguauaucugaccaacaccaccauagagaaggaaauaugccccaaacuagcagaauacagaaauuggucaaagccgcaauguaacauuacaggauuugcaccuuuuucuaaggacaauucgauucggcuuuccgcugguggggacaucugggugacaagagaaccuuaugugucaugcgauccugacaaguguuaucaauuugcccuuggacagggaacaacacuaaacaacgggcauucaaaugacacaguacaugauaggaccccuuaucgaacccuauugaugaaugaguuggguguuccauuucauuugggaaccaagcaagugugcauagcaugguccagcucaaguugucacgauggaaaagcauggcugcauguuuguguaacgggggaugaugaaaaugcaacugcuagcuucauuuacaaugggaggcuuguagauaguauugguucaugguccaaaaaaauccucaggacccaggagucggaaugcguuuguaucaauggaacuuguacaguaguaaugacugaugggagugcuucaggaaaagcugauacuaaaauacuauucauugaggaggggaaaaucguucauacuagcucauugucaggaagugcucagcaugucgaggagugcuccuguuauccucgauauccuggugucagaugugucugcagagacaacuggaaaggcuccaauaggcccaucguagauauaaauguaaaggauuauagcauuguuuccaguuaugugugcucaggacuuguuggagacacacccagaaaaaacgacagcuccagcaguagccauugcuuggauccuaacaaugaggaagguggucauggagugaaaggcugggccuuugaugauggaaaugacguguggaugggaagaacgaucagcgagaaguuacgcucaggauaugaaaccuucaaagucauugaaggcugguccaaaccuaauuccaaauugcagauaaauaggcaagucauaguugacagagguaauagguccgguuauucugguauuuucucuguugaaggcaaaagcugcaucaaucggugcuuuuauguggaguugauaaggggaaggaaacaggaaacugaagucuuguggaccucaaacaguauuguuguguuuuguggcaccucagguacauauggaacaggcucauggccugauggggcggacaucaaucucaugccuauauaa

SEQ ID NO: 52643 - RNA, 1410 nt, Artificial Sequence; identical to SEQ ID NO: 46181
  derived and/or modified CDS sequence (wt) from neuraminidase__InfluenzaA__AEG64892

SEQ ID NO: 52644 - RNA, 1410 nt, Artificial Sequence
  derived and/or modified CDS sequence (wt) from neuraminidase__InfluenzaA__AEG64914
augaauccaaaucaaaagauaauaacaauuggcucuguuucucucaccauugccacaauaugcuuccuuaugcaaauugccauccugguaacuacuguaacauugcauuucaagcagcaugaaugcaacucccccccaaacaaccaaguaaugcugugugaaccaacaauaauagaaagaaacauaacagagauaguguaucugaccaacaccaccauagagaaggaaauaugccccaaacuagcagaauacagaaauuggucaaagccgcaauguaacauuacaggauuugcaccuuuuucuaaggacaauucgauucggcuuuccgcugguggugacaucugggugacaagagaaccuuaugugucaugcgauccugacaaguguuaucaauuugcccuugggcagggaacaacacuaaacaacgggcauucaaaugacacaguacaugauaggaccccuuaccggacccuauugaugaaugaauuggguguuccauuucauuugggaaccaggcaagugugcauagcaugguccagcucgaguugucacgauggaaaagcauggcugcauguuuguguaacuggggaugauaaaaaugcaacugcuagcuucauuuacaaugggaggcuuguagauaguauugguucaugguccaaaaaaauacucagaacccaggagucggaaugcguuuguaucaauggaacuuguacaguaguaaugacugaugggagcgcuucaggaaaagcugauacuaaaauacuauucauugaggaggggaaaaucguucauauuagcacauugucaggaagugcucagcaugucgaggaguguuccuguuauccucgauauccuggugucagaugugucugcagagacaacuggaaaggcuccaauaggcccauuguagauauaaauguaaaggauuauagcauuguuuccaguuaugugugcucaggacuuguuggagacacacccagaaaaaacgacagcuccagcaguagccauugccuagauccuaacaaugaggaagguggucauggagugaaaggcugggccuuugaugauggaaaugacguguggaugggaagaacgaucagcgagaaguuacgcucagguuaugaaaccuucaaagucaucgaaggcugguccaaaccuaacuccaaauuacagauaaauaggcaaguuauaguugaaagagguaacagguccgguuauucugguauuuucuccguugaaggcaaaagcugcaucaaucggugcuuuuauguggaguugauaaggggaaggaaagaggaaacugaagucugguggaccucaaacaguauuguuguguuuuguggcaccucagguacauauggaacaggcucauggccugauggggcggacaucaaucucaugccuauauaa

SEQ ID NO: 52645 - RNA, 1410 nt, Artificial Sequence; identical to SEQ ID NO: 46154
  derived and/or modified CDS sequence (wt) from neuraminidase__InfluenzaA__AEG64925

SEQ ID NO: 52646 - RNA, 1410 nt, Artificial Sequence
  derived and/or modified CDS sequence (wt) from neuraminidase__InfluenzaA__AEG64936
augaauccaaaucaaaagauaauaacaauuggcucuguuucucucaccauugccacaauaugcuuccuuaugcaaauugccauccugguaacuacuguaacauugcauuucaagcagcaugaaugcaacucccccccaaacaaccaaguaaugcugugugaaccaacaauaauagaaagaaacauaacagagauaguguaucugaccaacaccaccauagagaaggaaauaugccccaaacuagcagaauacagaaauuggucaaagccgcaauguaacauuacaggauuugcaccuuuuucuaaggacaauucgauucggcuuuccgcugguggugacaucugggugacaagagaaccuuaugugucaugcgauccugacaaguguuaucaauuugcccuugggcagggaacaacacuaaacaacgggcauucaaaugacacaguacaugauaggaccccuuaccggacccuauugaugaaugaauuggguguuccauuucauuugggaaccaggcaagugugcauagcaugguccagcucaaguugucacgauggaaaagcauggcugcauguuuguguaacuggggaggauaaaaaugcaacugcuagcuucauuuacaaugggaggcuuguagauaguauugguucaugguccaaaaaaauacucagaacccaggagucggaaugcguuuguaucaauggaacuuguacaguaguaaugacugaugggagcgcuucaggaaaagcugauacuaaaauacuauucauugaggaggggaaaaucguucauauuagcacauugucaggaagugcucagcaugucgaggaguguuccuguuauccucgauaucccggugucagaugugucugcagagacaacuggaaaggcuccaauaggcccauuguagauauaaauguaaaggauuauagcauuguuuccaguuaugugugcucaggacuuguuggagacacacccagaaaaaacgacagcuccagcaguagccauugccuagauccuaacaaugaggaagguggucauggagugaaaggcugggccuuugaugaugggaaugacguguggaugggaagaacgaucagcgagaaguuacgcucagguuaugaaaccuucaaagucaucgaaggcugguccaaaccuaacuccaaauuacagauaaauaggcaaguuauaguugaaagagguaacagguccgguuauucugguauuuucuccguugaaggcaaaagcugcaucaaucggugcuuuuauguggaguugauaaggggaaggaaagaggaaacugaagucugguggaccucaaacaguauuguuguguuuuguggcaccucagguacauauggaacaggcucauggccugauggggcggacaucaaucucaugccuauauaa

SEQ ID NO: 52647 - RNA, 1410 nt, Artificial Sequence
  derived and/or modified CDS sequence (wt) from neuraminidase__InfluenzaA__AEG64947
augaauccaaaucaaaagauaauaacaauuggcucuguuucucucaccauugccacaauaugcuuccuuaugcaaauugccauccugguaacuacuguaacauugcauuucaagcagcaugaaugcaacucccccccaaacaaccaaguaaugcugugugaaccaacaauaauagaaagaaacauaacagagauaguguaucugaccaacaccaccauagagagggaaauaugccccaaacuagcagaauacagaaauuggucaaagccgcaauguaacauuacaggauuugcaccuuuuucuaaggacaauucgauucgacuuuccgcugguggugacaucugggugacaagagaaccuuaugugucaugcgauccugacaaguguuaucaauuugcccuugggcagggaacaacacuaaacaacgggcauucaaaugacacaguacaugauaggaccccuuaccggacccuauugaugaaugaauuggguguuccauuucauuugggaaccaggcaagugugcauagcaugguccagcucaaguugucacgauggaaaagcauggcugcauguuuguguaacuggggaugauaaaaaugcaacugcuagcuucauuuacaaugggaggcuuguagauaguauugguucaugguccaaaaaaauacucagaacccaggagucggaaugcguuuguaucaauggaacuuguacaguaguaaugacugaugggagcgcuucaggaaaagcugauacuaaaauacuauucauugaggaggggaaaaucguucauauuagcacauugucaggaagugcucagcaugucgaggaguguuccuguuauccucgauauccuggugucagaugugucugcagagacaacuggaaaggcuccaauaggcccauuguagauauaaauguaaaggauuauagcauuguuuccaguuaugugugcucaggacuuguuggagacacacccagaaaaaacgacagcuccagcaguagccauugccuagauccuaacaaugaggaggguggucauggagugaaaggcugggccuuugaugauggaaaugacguguggaugggaagaacgaucagcgagaaguuacgcucagguuaugaaaccuucaaagucaucgaaggcugguccaaaccuaacuccaaauuacagauaaauaggcaaguuauaguugaaagagguaacagguccgguuauucugguauuuucuccguugaaggcaaaagcugcaucaaucggugcuuuuauguggaguugauaaggggaaggaaagaggaaacugaagucugguggaccucaaacaguauuguuguguuuuguggcaccucagguacauauggaacaggcucauggccugauggggcggacaucaaucucaugccuauauaa

SEQ ID NO: 52648 - RNA, 1410 nt, Artificial Sequence
  derived and/or modified CDS sequence (wt) from neuraminidase__InfluenzaA__AEG64958
augaauccaaaucaaaagauaauaacaauuggcucuguuucucucaccauugccacaauaugcuuccuuaugcaaauugccauccugguaacuacuguaacauugcauuucaagcagcaugaaugcaacucccccccaaacaaccaaguaaugcugugugaaccaacaauaauagaaagaaacauaacagagauaguguaucugaccaacaccaccauagagaaggaaauaugccccaaacuagcagaauacagaaauuggucaaagccgcaauguaacauuacaggauuugcaccuuuuucuaaggacaauucgauucggcuuuccgcugguggugacaucugggugacaagagaaccuuaugugucaugcgauccugacaaguguuaucaauuugcccuugggcagggaacaacacuaaacaacgggcauucaaaugacacaguacaugauaggaccccuuaccggacccuauugaugaaugaauuggguguuccauuucauuugggaaccaggcaagugugcauagcaugguccagcucaaguugucacgauggaaaagcauggcugcauguuuguguaacuggggaugauaaaaaugcaacugcuagcuucauuuacaaugggaggcuuguagauaguauugguucaugguccaaaaaaauacucagaacccaggagucggaaugcguuuguaucaauggaacuuguacaguaguaaugacugaugggagcgcuucaggaaaagcugauacuaaaauacuauucauugaggaggggaaaaucguucauauuagcacauugucaggaagugcucagcaugucgaggaguguuccuguuauccucgauauccuggugucagaugugucugcagagacaacuggaaaggcuccaauaggcccauuguagauauaaauguuaaggauuauagcauuguuuccaguuaugugugcucaggacuuguuggagacacacccagaaaaaacgacagcuccagcaguagccauugccuagauccuaacaaugaggaagguggucauggagugaaaggcugggccuuugaugauggaaaugacguguggaugggaagaacgaucagcgagaaguuacgcucagguuaugaaaccuucaaagucaucgaaggcugguccaaaccuaacuccaaauuacagauaaauaggcaaguuauaguugaaagagguaacagguccgguuauucugguauuuucuccguugaaggcaaaagcugcaucaaucggugcuuuuauguggaguugauaaggggaaggaaagaggaaacugaagucugguggaccucaaacaguauuguuguguuuuguggcaccucagguacauauggaacaggcucauggccugauggggcggacaucaaucucaugccuauauaa

SEQ ID NO: 52649 - RNA, 1410 nt, Artificial Sequence
  derived and/or modified CDS sequence (wt) from neuraminidase__InfluenzaA__AEG64969
augaauccaaaucaaaagauaauaacaauuggcucuguuucucucaccauugccacaauaugcuuccuuaugcaaauugccauccugguaacuacuguaacauugcauuucaagcagcaugaaugcaacucccccccaaacaaccaaguaaugcugugugaaccaacaauaauagaaagaaacauaacagagauaguguaucugaccaacaccaccauagagaaggaaauaugccccaaacuagcagaauacagaaauuggucaaagccgcaauguaacauuacaggauuugcaccuuuuucuaaggacaauucgauucggcuuuccgcugguggugacaucugggugacaagagaaccuuaugugucaugcgauccugacaaguguuaucaauuugcccuugggcagggaacaacacuaaacaacgggcauucaaaugacacaguacaugauaggaccccuuaccggacccuauugaugaaugaauuggguguuccauuucauuugggaaccaggcaagugugcauagcaugguccagcucaaguugucacgauggaaaagcauggcugcauguuuguguaacuggggaugacaaaaaugcaacugcuagcuucauuuacaaugggaggcuuguagauaguauugguucaugguccaaaaaaauacucagaacccaggagucagaaugcguuuguaucaauggaacuuguacaguaguaaugacugaugggagcgcuucaggaaaagcugauacuaaaauacuauucauugaggaggggaaaaucguucauauuagcacauugucaggaagugcucagcaugucgaggaguguuccuguuauccucgauauccuggugucagaugugucugcagagacaacuggaaaggcuccaauaggcccauuguagauauaaauguaaaggauuauagcauuguuuccaguuaugugugcucaggacuuguuggagacacacccagaaaaaacgacagcuccagcaguagccauugccuagauccuaacaaugaggaagguggucauggagugaaaggcugggccuuugaugauggaaaugacguguggaugggaagaacgaucagcgagaaguuacgcucagguuaugaaaccuucaaagucaucgaaggcugguccaaaccuaacuccaaauuacagauaaauaggcaaguuauaguugaaagagguaacagguccgguuauucugguauuuucuccguugaaggcaaaagcugcaucaaucggugcuuuuauguggaguugauaaggggaaggaaagaggaaacugaagucugguggaccucaaacaguauuguuguguuuuguggcaccucagguacauauggaacaggcucauggccugauggggcggacaucaaucucaugccuauauaa

SEQ ID NO: 52650 - RNA, 1410 nt, Artificial Sequence
  derived and/or modified CDS sequence (wt) from neuraminidase__InfluenzaA__AEG64980
augaauccaaaucaaaagauaauaacaauuggcucuguuucucucaccauugccacaauaugcuuccuuaugcaaauugccauccugguaacuacuguaacauugcauuucaagcagcaugaaugcaacucccccccaaacaaccaaguaaugcugugugaaccaacaauaauagaaagaaacauaacagagauaguguaucugaccaacaccaccauagagaaggaaauaugccccaaacuagcagaauacagaaauuggucaaagccgcaauguaacauuacaggauuugcaccuuuuucuaaggacaauucgauucggcuuuccgcugguggugacaucugggugacaagagaaccuuaugugucaugcgauccugacaaguguuaucaauuugcccuugggcagggaacaacacuaaacaacgggcauucaaaugacacaguacaugauaggaccccuuaccggacccuauugaugaaugaauuggguguuccauuucauuugggaaccaggcaagugugcauagcaugguccagcucaaguugucacgauggaaaagcauggcugcauguuuguguaacuggggaugauaaaaaugcaacugccagcuucauuuacaaugggaggcuuguagauaguauugguucaugguccaaaaaaauacucagaacccaggagucggaaugcguuuguaucaauggaacuuguacaguaguaaugacugaugggagcgcuucaggaaaagcugauacuaaaauacuauuuauugaggaggggaaaaucguucauauuagcacauugucaggaagugcucagcaugucgaggaguguuccuguuauccucgauauccuggugucagaugugucugcagagacaacuggaaaggcuccaauaggcccauuguagauauaaauguaaaggauuauagcauuguuuccaguuaugugugcucaggacuuguuggagacacacccagaaaaaacgacagcuccagcaguagccauugccuagauccuaacaaugaggaagguggucauggagugaaaggcugggccuuugaugauggaaaugacguguggaugggaagaacgaucagcgagaaguuacgcucagguuaugaaaccuucaaagucaucgaaggcugguccaaaccuaacuccaaauuacagauaaauaggcaaguuauaguugaaagagguaacagguccgguuauucugguauuuucuccguugaaggcaaaagcugcaucaaucggugcuuuuauguggaguugauaaggggaaggaaagaggaaacugaagucugguggaccucaaacaguauuguuguguuuuguggcaccucagguacauauggaacaggcucauggccugauggggcggacaucaaucucaugccuauauaa

SEQ ID NO: 52651 - RNA, 1410 nt, Artificial Sequence
  derived and/or modified CDS sequence (wt) from neuraminidase__InfluenzaA__AEG64991
augaauccaaaucaaaagauaauaacgauuggcucuguuucucucaccauuuccacaauaugcuucuucaugcaaauugccaucuugauaacuacuguaacauugcauuucaagcaauaugaauccaacucccccccaaacaaccaagugaugcugugugaaccaacaauaauagaaagaaacauaacagagauaguguaucugaccaacaccaccauagagaaggaaauaugccccaaacuagcagaauacagaaauuggucaaagccgcaauguaacauuacaggauuugcaccuuuuucuaaggacaauucgauuaggcuuuccgcugguggggacaucugggugacaagagaaccuuaugugucaugcgauccugacaaguguuaucaauuugcccuuggacagggaacaacacuaaacaacgugcauucaaaugacacaguacaugauaggaccccuuaucggacccuauugaugaaugaguuagguguuccauuucaucuggggaccaagcaagugugcauagcaugguccagcucaaguugucacgauggaaaagcauggcugcauguuuguguaacgggggaugauaaaaaugcaacugcuagcuucauuuacaaugggaggcuuguagauaguauuguuucaugguccaaagaaauccucaggacccaggagucagaaugcguuuguaucaauggaacuuguacaguaguaaugacugaugggagugcuucaggaaaagcugauacuaaaauacuauucauugaggaggggaaaaucguucauacuagcacauugucaggaagugcucagcaugucgaggagugcuccugcuauccucgauauccuggugucagaugugucugcagagacaacuggaaaggcuccaauaggcccauaguagauauaaacauaaaggauuauagcauuguuuccaguuaugugugcucaggacuuguuggagacacacccagaaaaaacgacagcuccagcaguagccauugcuuggauccuaacaaugaagaagguggucauggagugaaaggcugggccuuugaugauggaaaugacguguggaugggaagaacgaucagcgagaaguuacgcucaggauaugaaaccuucaaagucauugaaggcugguccaacccuaauuccaaauugcagacaaauaggcaagucauaguugacagagguaauagguccgguuauucuggcauuuucucuguugaaggcaaaagcugcaucaaucggugcuuuuauguggaguugauaaggggaagaaaagaggaaacugaagucuuguggaccucaaacaguauuguuguguucuguggcaccucagguacauauggaacaggcucauggccugauggggcggacaucaaucucaugccuauauaa

SEQ ID NO: 52652 - RNA, 1410 nt, Artificial Sequence
  derived and/or modified CDS sequence (wt) from neuraminidase__InfluenzaA__AEG65002
augaauccaaaucaaaagauaauaacgauuggcucuguuucucucaccauuuccacaauaugcuucuuuaugcaaauugccaucuugauaacuacuguaacauuacauuucaagcaauaugaauucaacucccccccaaacaaccaagugaugcugugugaaccaacaauaauagaaagaaacauaacagagauaguguaucugaccaacaccaccauagagaaggaaauaugccccaaacuagcagaauacagaaauuggucaaagccgcaaugugacauuacaggauuugcaccuuuuucuaaggacaauucgauuaggcuuuccgcugguggggacaucugggugacaagagaaccuuaugugucaugcgauccugacaaauguuaucaauuugcccuuggacagggaacaacacuaaacaacgugcauucaaaugacacaguacaugauaggaccccuuaucggacccuauugaugaaugaguuagguguuccauuucaucuggggacuaagcaagugugcauagcaugguccagcucaaguugucacgauggaaaagcauggcugcauguuuguguaacgggggaugauaaaaaugcaacugcuagcuucauuuacaaugggaggcuuguagauaguauuguuucaugguccaaagaaauccucagaacccaggagucagaaugcguuuguaucaauggaacuuguacaguaguaaugacugaugggagugcuucaggaaaagcugauacuaaaauacuauucauugaggaggggaaaaucguucauacuagcacauugucaggaagugcccagcaugucgaggagugcuccugcuauccucgauauccuggugucagaugugucugcagagacaacuggaaaggcuccaauaggcccaucguagauauaaacauaaaggauuauagcauuguuuccaguuaugugugcucaggacuuguuggagacacacccagaaaaaacgacagcuccagcaguagccauugcuuggauccuaacaaugaagaagguggucauggagugaaaggcugggccuuugaugauggaaaugacguguggaugggaagaacgaucagcgagaaguuacgcucaggauaugaaaccuucaaagucauugaaggcugguccaacccuaauuccaaauugcagauaaauaggcaagucauaguugacagagguaauagauccgguuauucugguauuuucucuguugaaggcaaaagcugcaucaaucggugcuuuuauguggaguugauaaggggaagaaaagaggaaacugaagucuuguggaccucaaacaguauuguuguguuuuguggcaccucagguacauauggaacaggcucauggccugauggagcggacaucaaucucaugccuauauaa

SEQ ID NO: 52653 - RNA, 1410 nt, Artificial Sequence
  derived and/or modified CDS sequence (wt) from neuraminidase__InfluenzaA__AEG65013
augaauccaaaucaaaagauaauaacgauuggcucuguuucucucaccauuuccacaauaugcuucuucaugcaaauugccaucuugauaacuacuguaacauugcauuucaagcaauaugaauucaacucccccccaaacaaccaagugaugcugugugaaccaacaauaauagaaagaaacauaacagagauaguguaucugaccaacaccaccauagagaaggaaauaugccccaaacuagcagaauacagaaauuggucaaagccgcaaugugacauuacaggauuugcaccuuuuucuaaggacaauucgauuaggcuuuccgcugguggggacaucugggugacaagagaaccuuaugugucaugcgauccugacaaguguuaucaauuugcccuuggacagggaacaacacuaaacaacgugcauucaaaugacacaguacaugauaggaccccuuaucggacccuauugaugaaugaguuagguguuccauuccaucuggggaccaagcaagugugcauagcaugguccagcucaaguugucacgauggaaaagcauggcugcauguuuguguaacgggggaugauaaaaaugcaacugcuagcuucauuuacaaugggaggcuuguagauaguauuguuucaugguccaaagauauccucaggacccaggagucagaaugcguuuguaucaauggaacuuguacaguaguaaugacugaugggagugcuucaggaaaagcugauacuaaaauacuauucauugaggaggggaaaaucguucauacuagcacauugucaggaagugcucagcaugucgaggagugcuccugcuauccucgauauccuggugucagaugugucugcagagacaacuggaaaggcuccaauaggcccauuguagauauaaacauaaaggauuauagcauuguuuccaguuaugugugcucaggacuuguuggagacacacccagaaaaaacgacagcuccagcaguagccauugcuuggauccuaacaaugaagaagguggucauggagugaaaggcugggccuuugaugauggaaaugacguguggaugggaagaacgaucagcgagaaguugcgcuuaggauaugaaaccuucaaagucauugaaggcugguccaacccuaauuccaaauugcagacaaauaggcaagucauaguugaaagagguaauagguccgguuauucuggcauuuucucuguugaaggcaaaagcugcaucaaucggugcuuuuauguggaguugauaaggggaagaaaagaggaaacugaagucuuguggaccucaaacaguauuguuguguuuuguggcaccucagguacauauggaacaggcucauggccugauggggcggacaucaaucucaugccuauauaa

SEQ ID NO: 52654 - RNA, 1410 nt, Artificial Sequence
  derived and/or modified CDS sequence (wt) from neuraminidase__InfluenzaA__AEG65024
augaauccaaaucaaaagauaauaacgauuggcucuguuucucucaccauuuccacaauaugcuucuuuaugcaaauugccaucuugauaacuacuguaacauugcauuucaagcaauaugaauucaacucccccccaaacaaccacgugaugcugugugaaccaacaauaauagaaagaaacauaacagagauaguguaucugaccaacaccaccauagagaaggaaauaugccccaaacuagcagaauacagaaauuggucaaagccgcaaugugacauuacaggauuugcaccuuuuucuaaggacaauucgauuaggcuuuccgcugguggggacaucugggugacaagagaaccuuaugugucaugcgauccugacaaauguuaucaauuugcccuuggacagggaacaacacuaaacaacgugcauucaaaugacacaguacaugauaggaccccuuaucggacccuauugaugaaugaguuagguguuccauuucaucuggggacuaagcaagugugcauagcaugguccagcucaaguugucacgauggaaaagcauggcugcauguuuguguaacgggggaugauaaaaaugcaacugcuagcuucauuuacaaugggaggcuuguagauaguauuguuucaugguccaaagaaauccucagaacccaggagucagaaugcguuuguaucaauggaacuuguacaguaguaaugacugaugggagugcuucaggaaaagcugauacuaaaauacuauucauugaggaggggaaaaucguucauacuagcacauugucaggaagugcccagcaugucgaggagugcuccugcuauccucgauauccuggugucagaugugucugcagagacaacuggaaaggcuccaauaggcccaucguagauauaaacauaaaggauuauagcauuguuuccaguuaugugugcucaggacuuguuggagacacacccagaaaaaacgacagcuccagcaguagccauugcuuggauccuaacaaugaagaagguggucauggagugaaaggcugggccuuugaugauggaaaugacguguggaugggaagaacgaucagcgagaaguuacgcuuaggauaugaaaccuucaaagucauugaaggcugguccaacccuaauuccaaauugcagauaaauaggcaagucauaguugacagagguaauagauccgguuauucugguauuuucucuguugaaggcaaaagcugcaucaaucggugcuuuuauguggaguugauaaggggaagaaaagaggaaacugaagucuuguggaccucaaacaguauuguuguguuuuguggcaccucagguacauauggaacaggcucauggccugauggggcggacaucaaucucaugccuauauaa

SEQ ID NO: 52655 - RNA, 1410 nt, Artificial Sequence
  derived and/or modified CDS sequence (wt) from neuraminidase__InfluenzaA__AEG65035
augaauccaaaucaaaagauaauaacgauuggcucuguuucucucaccauuuccacaauaugcuucuucaugcaaauugccaucuugauaacuacuguaacauugcauuucaagcaauaugaauucaacucccccccaaacaaccaagugaugcugugugaaccaacaauaauagaaagaaacauaacagagauaguguaucugaccaacaccaccauagagaaggaaguaugccccaaacuagcagaauacagaaauuggucaaagccgcaauguaacauuacaggauuugcaccuuuuucuaaggacaauucgauuaggcuuuccgcugguggggacaucugggugacaagagaaccuuaugugucaugcgaucuugacaaguguuaucaauuugcccuuggacagggaacaacacuaaacaacgugcauucaaaugacacaguacaugauaggaccccuuaucggacccuauugaugaaugaguuagguguuccauuucaucuggggaccaagcaagugugcauagcaugguccagcucaaguugucacgauggaaaagcauggcugcauguuuguguaacgggggaugauaaaaaugcaacugcuagcuucauuuacaaugggaggcuuguagauaguauuguuucaugguccaaagaaauccucaggacccaggagucagaaugcguuuguaucaauggaacuuguacaguaguaaugacugaugggagugcuucaggaaaagcugauacuaaaauacuauucauugaggaggggaaaaucguucauacuagcacauugucaggaagugcucaacaugucgaggagugcuccugcuauccucgauauccuggugucagaugugucugcagagacaacuggaaaggcuccaauaggcccauaguagauauaaacauaaaggauuauagcauuguuuccaguuaugugugcucaggacuuguuggagacacacccagaaaaaacgacagcuccagcaguagccauugcuuggauccuaacaaugaagaagguggucauggagugaaaggcugggccuuugaugauggaaaugacguguggaugggaagaacgaucagcgagaaguuacgcucaggauaugaaaccuuuaaagucauugaaggcugguccaacccuaauuccaaauugcagauaaauaggcaagucauaguugacagagguaauagguccgguuauucugguauuuucucuguugaaggcaaaagcugcaucaaucggugcuuuuauguggaguugauaaggggaagaaaagaggaaaaugaagucuuguggaccucaaacaguauuguuguguuuuguggcaccucagguacauauggaacaggcucauggccugauggggcggacaucaaucuuaugccuauauaa

SEQ ID NO: 52656 - RNA, 1410 nt, Artificial Sequence
  derived and/or modified CDS sequence (wt) from neuraminidase__InfluenzaA__AEG65057
augaauccaaaucaaaagauaauaacgauuggcucuguuucucucaccauuuccacaauaugcuucuucaugcaaauugccaucuugauaacuacuguaacauugcauuucaagcaauaugaauucaacucccccccaaacaaccaagugaugcugugugaaccaacaauaauagaaagaaacauaacagagauaguguaucugaccaacaccaccauagagaaggaaauaugccccaaacuagcagaauacagaaauuggucaaaaccgcaauguaacauuacaggauuugcaccuuuuucuaaggacaauucgauuaggcuuuccgcugguggggacaucugggugacaagagaaccuuaugugucaugcgauccugacaaguguuaucaauuugcccuuggacagggaacaacacuaaacaacgugcauucaaaugacacaguacaugauaggaccccuuaucggacccuauugaugaaugaguuagguguuccauuucaucuggggaccaagcaagugugcauagcaugguccagcucaaguugucacgauggaaaagcauggcugcauguuuguguaacgggggaugauaaaaaugcaacugcuagcuuuauuuacaaugggaggcuuguagauaguauuguuucaugguccaaagaaauccucaggacccaggagucagaaugcguuuguaucaauggaacuuguacaguaguaaugacugaugggagugcuucaggaaaagcugauacuaaaauacuauucauugaggaggggaaaaucguucauacuagcacauugucaggaagugcucagcaugucgaggaguguuccugcuauccucgauauccuggugucagaugugucugcagagacaacuggaaaggcuccaauaggcccauaguagauauaaacauaaaggauuauagcauuguuuccaguuaugugugcucaggacuuguuggagacacacccagaaaaaacgacagcuccagcaguagccauugcuuggauccuaacaaugaagaagguggucauggagugaaaggcugggccuuugaugauggaaaugacguguggaugggaagaacgaucagcgagaaguuacgcucaggauaugaaaccuucaaagucauugaaggcugguccaacccuaauuccaaauugcagauaaauaggcaagucauaguugacagagguaauagguccgguuauucugguauuuucucuguugaaggcaaaagcugcaucaaucggugcuuuuauguggaguugauaaggggaagaaaagaggaaacugaagucuuguggaccucaaacaguauuguuguguuuuguggcaccucagguacauauggaacaggcucauggccugauggggcggauaucaaucucaugccuauauaa

SEQ ID NO: 52657 - RNA, 1410 nt, Artificial Sequence; identical to SEQ ID NO: 48584
  derived and/or modified CDS sequence (wt) from neuraminidase__InfluenzaA__AEG65068

SEQ ID NO: 52658 - RNA, 1410 nt, Artificial Sequence
  derived and/or modified CDS sequence (wt) from neuraminidase__InfluenzaA__AEG65079
augaauccaaaucaaaagauaauaacgauuggcucuguuucucucaccauuuccacaauaugcuucuucaugcaaauugccaucuugauaacuacuguaacauugcauuucaagcaauaugaauucaacucccccccaaacaaccaagugaugcugugugaaccaacaauaauagaaagaaacauaacagagauaguguaucugaccaacaccaccauagagaaggaaauaugccccaaacuagcagaauacagaaauuggucaaagccgcaauguaacauuacaggauuugcaccuuuuucuaaggacaauucgauuaggcuuuccgcugguggggacaucugggugacaagagaaccuuaugugucaugcgauccugacaaguguuaucaauuugcccuuggacagggaacaacacuaaacaacgugcauucaaaugacacaguacaugauaggaccccuuaucggacccuauugaugaaugaguuagguguuccauuucaucuggggaccaagcaagugugcauagcaugguccagcucaaguugucacgauggaaaagcauggcugcauguuuguguaacgggggaugauaaaaaugcaacugcuagcuucauuuacaaugggaggcuuguagauaguauuguuucaugguccaaagaaauccucaggacccaggagucagaaugcguuuguaucaauggaacuuguacaguaguaaugacugaugggagugcuucaggaaaagcugauacuaaaauacuauucauugaggaggggaaaaucguucauacuagcacauugucaggaagugcuaagcaugucgaggagugcuccugcuauccucgauauccuggugucagaugugucugcagagacaacuggaaaggcuccaauaggcccauaguagauauaaacauaaaggauuauagcauuguuuccaguuaugugugcucaggacuuguuggagacacacccagaaaaaacgacagcuccagcaguggccauugcuuggauccuaacaaugaagaagguggucauggagugaaaggcugggccuuugaugauggaaaugacguguggaugggaagaacgaucagcgagaaguuacgcucaggauaugaaaccuucaaagucauugaaggcugguccaacccuaauuccaaauugcagauaaauaggcaagucauaguugacagagguaauagguccgguuauucugguauuuucucuguugaaggcaaaagcugcaucaaucggugcuuuuauguggaguugauaaggggaagaaaagaggaaacugaagucuuguggaccucaaacaguauuguuguguuuuguggcaccucagguacauauggaacaggcucauggccugauggggcggacaucaaucucaugccuauauaa

SEQ ID NO: 52659 - RNA, 1410 nt, Artificial Sequence
  derived and/or modified CDS sequence (wt) from neuraminidase__InfluenzaA__AEG65090
augaauccaaaucaaaagauaauaacgauuggcucuguuucucucaccauuuccacaauaugcuucuucaugcaaauugccaucuugauaacuacuguaacauugcauuucaagcaauaugaauucaacucccccccaaacaaccaagugaugcugugugaaccaacaauaauagaaagaaacauaacagagauaguguaucugaccaacaccaccauagagaaggaaauaugccccaaacuagcagaauacagaaauuggucaaagccgcaauguaacauuacaggguuugcaccuuuuucuaaggacaauucgauuaggcuuuccgcugguggggacaucugggugacaagagaaccuuaugugucaugcgauccugacaaauguuaucaauuugcccuuggacagggaacaacacuaaacaacgugcacucaaaugacacaguacaugauaggaccccuuaucggacccuauugaugaaugaguuagguguuccauuucaucuggggaccaagcaagugugcauagcaugguccagcucaaguugucacgauggaaaagcauggcugcauguuuguguaacgggggaugauaaaaaugcaacugcuagcuucauuuacaaugggaggcuuguagauaguauuguuucaugguccaaagaaauccucaggacccaggagucagaaugcguuuguaucaauggaacuuguacaguaguaaugacugaugggagugcuucaggaaaagcugauacuaaaauacuauucauugaggaggggaaaaucauucauacuagcacauugucaggaagugcucagcaugucgaggagugcuccugcuauccucgauauccuggugucagaugugucugcagagacaacuggaaaggcuccaauaggcccauaguagauauaaacauaaaggauuauagcauuguuuccaguuaugugugcucaggacuuguuggagacacacccagaaaaaacgacagcuccagcaguagccauugcuuggauccuaacaaugaagaagguggucauggagugaaaggcugggccuuugaugaugggaaugacguguggaugggaagaacgaucagcgagaaguuacgcucaggauaugaaaccuucaaagucauugaaggcugguccaacccuaauuccaaauugcagauaaauaggcaagucauaguugacagagguaauagguccgguuauucugguauuuucucuguugaaggcaaaagcugcaucaaucggugcuuuuauguggaguugauaaggggaagaaaagaggaaacugaagucuuguggaccucaaacaguauuguuguguuuuguggcaccucagguacauauggaacaggcucauggccugauggggcggacaucagucucaugccuauauaa

SEQ ID NO: 52660 - RNA, 1410 nt, Artificial Sequence
  derived and/or modified CDS sequence (wt) from neuraminidase__InfluenzaA__AEG65101
augaauccaaaucaaaagauaauaacgauuggcucuguuucucucaccauuuccacaauaugcuucuucaugcaaauugccaucuugauaacuacuguaacauugcauuucaagcaauaugaauucaacucccccccagacaaccaagugaugcugugugaaccaacaauaauagaaagaaacauaacagagauaguguaucugaccaacaccaccauagagaaggaaauaugccccaaacuagcagaauacagaaauuggucaaagccgcaaugugacauuacaggauuugcaccuuuuucuaaggacaauucgauuaggcuuuccgcugguggggacaucugggugacaagagaaccuuaugugucaugcgauccugacaaguguuaucaauuugcccuuggacagggaacaacacuaaacaacgugcauucaaacgacacaguacaugauaggaccccuuaucggacccuauugaugaaugaguuagguguuccauuucaucuggggaccaagcaagugugcauagcaugguccagcucaaguugucacgauggaaaagcauggcugcauguuuguguaacgggggaugauaaaaaugcaacugcuagcuucauuuacaaugggaggcuuguagauaguguuguuucaugguccaaagauauccucaggacccaggagucagaaugcguuuguaucaauggaacuuguacaguaguaaugacugaugggagugcuucaggaaaagcugauacuaaaauacuauucauugaggaggggaaaaucguucauacuagcacauugucaggaagugcucagcaugucgaggagugcuccugcuauccucgauauccuggugucagaugugucugcagagacaacuggaaaggcuccaauaggcccauuguagauauaaacauaaaaaauuauagcauuguuuccaguuaugugugcucaggacuuguuggagacacacccagaaaaaccgacagcuccagcaguagccauugcuuggauccuaacaaugaagaagguggucauggagugaaaggcugggccuuugaugauggaaaugacguguggaugggaagaacgaucagcgagaaguuacgcuuaggauaugaaaccuucaaagucauugaaggcugguccaacccuaauuccaaauugcagauaaauaggcaagucauaguugacagagguaauagguccgguuauucugguauuuucucuguugaaggcaaaagcugcaucaaucggugcuuuuauguggaguugauaaggggaagaaaagaggaaacugaagucuuguggaccucaaacaguauuguuguauuuuguggaaccucagguacauauggaacaggcucauggccugauggggcggacaucaaucucaugccuauauaa

SEQ ID NO: 52661 - RNA, 1410 nt, Artificial Sequence
  derived and/or modified CDS sequence (wt) from neuraminidase__InfluenzaA__AEG65123
augaauccaaaucaaaagauaauaacgauuggcucuguuucucucaccauuuccacaauaugcuucuucaugcaaauugccaucuugauaacuacuguaacauugcauuucaagcaauaugaauucaacucccccccaaacaaccaagugaugcugugugaaccaacaacaauagaaagaaacauaacagagauaguguaucugaccaacaccaccauagagaaggaaauaugccccaaacuagcagaauacagaaauuggucaaagccgcaaugugacauuacaggauuugcaccuuuuucuaaggacaauucgauuaggcuuuccgcugguggggacaucugggugacaagagaacccuaugugucaugcgauccugacaaguguuaucaauuugcccuuggacagggaacaacacuaaacaacgugcauucaaacgacacaguacaugauaggaccccuuaucggacccuauugaugaaugaguuagguguuccauuucaucuggggaccaagcaagugugcauagcaugguccagcucaaguugucacgauggaaaagcauggcugcauguuuguguaacgggggaugauaaaaaugcaacugcuagcuucauuuacaaugggaggcuuguagauaguguuguuucaugguccaaagauauccucaggacccaggagucagaaugcguuuguaucaauggaacuuguacaguaguaaugacugaugggagugcuucaggaaaagcugauacuaaaauacuauucauugaggaggggaaaaucguucauacuagcacauugucaggaagugcucagcauguugaggagugcuccugcuauccucgauauccuggugucagaugugucugcagagacaacuggaaaggcuccaauaggcccauuguagauauaaacauaaagaauuauagcauuguuuccaguuaugugugcucaggacuuguuggagacacacccagaaaaaccgacagcuccagcaguagccauugcuuggauccuaacaaugaagaagguggucauggagugaaaggcugggccuuugaugauggaaaugacguguggaugggaagaacgaucagcgagaaguuacgcuuaggauaugaaaccuucaaagucauugaaggcugguccaacccuaauuccaaauugcagauaaauaggcaagucauaguugacagagguaauagguccgguuauucugguauuuucucuguugaaggcaaaagcugcaucaaucggugcuuuuauguggaguugauaaggggaagaaaagaggaaaaugaagucuuguggaccucaaacaguauuguuguauuuuguggaaccucagguacauauggaacaggcucauggccugauggggcggacaucaaucucaugccuauauaa

SEQ ID NO: 52662 - RNA, 1410 nt, Artificial Sequence
  derived and/or modified CDS sequence (wt) from neuraminidase__InfluenzaA__AEG65134
augaauccaaaucaaaagauaauaacgauuggcucuguuucucucaccauuuccacaauaugcuucuucaugcaaauugccaucuugauaacuacuguaacauugcauuucaagcaauaugaauucaacucccccccaaacaaccaagugaugcugugugaaccaacaauaauagaaagaaacauaacagagauaguguaucugaccaacaccaccauagagaaggaaauaugccccaaacuagcagaauacagaaauuggucaaagccgcaaugugacauuacaggauuugcaccuuuuucuaaggacaauucgauuaggcuuuccgcugguggggacaucugggugacaagagaaccuuaugugucaugcgauccugacaaguguuaucaauuugcccuuggacagggaacaacacuaaacaacgugcauucaaacgacacaguacaugauaggaccccuuaucggacccuauugaugaaugaguuagguguuccauuucaucuggggaccaagcaagugugcauagcaugguccagcucaaguugucacgauggaaaagcauggcugcauguuuguguaacgggggaugauaaaaaugcaacugcuagcuucauuuacaaugggaggcuuguagauaguguuguuucaugguccaaagauauccucaggacccaggagucagaaugcguuuguaucaauggaacuuguacaguaguaaugacugaugggagugcuucaggaaaagcugauacuaaaauacuauucauugaggaggggaaaaucguucauacuagcacauugucaggaagugcucagcaugucgaggagugcuccugcuauccucgauauccuggugucagaugugucugcagagacaacuggaaaggcuccaauaggcccauuguagauauaaacauaaaaaauuauagcauuguuuccaguuaugugugcucaggacuuguuggagacacacccagaaaaaccgacagcuccagcaguagccauugcuuggauccuaacaaugaagaagguggucauggagugaaaggcugggccuuugaugauggaaaugacguguggaugggaagaacgaucagcgagaaguuacgcuuaggauaugaaaccuucaaagucauugaaggcugguccaacccuaauuccaaauugcagauaaauaggcaagucauaguugacagagguaauagguccgguuauucugguauuuucucuguugaaggcaaaagcugcaucaaucggugcuuuuauguggaguugauaaggggaagaaaagaggaaacugaagucuuguggaccucaaacaguauuguuguauuuuguggaaccucagguacauauggaacaggcucauggccugauggggcggacaucaaucucaugccuauauaa

SEQ ID NO: 52663 - RNA, 1410 nt, Artificial Sequence
  derived and/or modified CDS sequence (wt) from neuraminidase__InfluenzaA__AEG65145
augaauccaaaucaaaagauaauaacaauuggcucuguuucucucaccauugccacaauaugcuuccuuaugcaaauugccauccugguaacuacuguaacauugcauuucaagcaguaugaaugcaacucccccccaaacaaccaaguaaugcugugugaaccaacaauaauagaaagaaacauaacagagauaguguaucugaccaacaccaccauagagaaggaaauaugccccaaacuagcagaauacagaaauuggucaaagccgcaauguaacauuacaggauuugcaccuuuuucuaaggacaauucgauucggcuuuccgcugguggggacaucugggugacaagagaaccuuaugugucaugcgauccugacaaguguuaucaauuugcccuugggcagggaacaacacuaaacaacgggcauucaaaugacacaguacaugauaggaccccuuaccggacccuauugaugaaugaauuggguguuccauuucauuugggaaccaggcaagugugcauagcaugguccagcucaaguugucacgauggaaaagcauggcugcauguuuguguaacuggggaugaugaaaaugcaacugcuagcuucauuuacaaugggaggcuuguagauaguauugguucaugguccaaaaaaauacucagaacccaggagucggaaugcguuuguaucaauggaacuuguacaguaguaaugacugaugggagcgcuucaggaaaagcugauacuaaaauacuauucauugaggaggggaaaaucguucauauuagcacauugucaggaagugcccagcaugucgaggagugcuccuguuauccucgauauccuggugucagaugugucugcagagacaacuggaaaggcuccaauaggcccaucguagauauaaauguaaaggauuauagcauuguuuccaguuaugugugcucaggacuuguuggagacacacccagaaaaaacgacagcuucagcaauagccauugccuagauccuaacaaugaggaagguggucauggagugaaaggcugggccuuugaugauggaaaugacguguggaugggaagaacgaucagcgagaaguuacgcucagguuaugaaaccuucaaagucaucgaaggcugguccaaaccuaacuccaaauuacagauaaauaggcaagucauaguugaaagagguaacagguccgguuauucugguauuuucuccguugaaggcaaaagcugcaucaaucggugcuuuuauguggaguugauaaggggaaggaaagaggaaacugaagucugguggaccucaaacaguauuguuguguuuuguggcaccucagguacauauggaacaggcucauggccugauggggcggauaucaaucucaugccuauauaa

SEQ ID NO: 52664 - RNA, 1410 nt, Artificial Sequence
  derived and/or modified CDS sequence (wt) from neuraminidase__InfluenzaA__AEG65156
augaauccaaaucaaaagauaauaacaauuggcucuguuucucucaccauugccacaauaugcuuccuuaugcaaauugccauccugguaacuacuguaacauugcauuucaagcaguaugaaugcaacucccccccaaacaaccaaguaaugcugugugaaccaacaauaauagaaagaaacauaacagagauaguguaucugaccaacaccaccauagagaaggaaauaugccccaaacuagcagaauacagaaauuggucaaagccgcaauguaacauuacaggauuugcaccuuuuucuaaggacaauucgauucggcuuuccgcugguggggacaucugggugacaagagaaccuuaugugucaugcgauccugacaaguguuaucaauuugcccuugggcagggaacaacacuaaacaacgggcauucaaaugacacaguacaugauaggaccccuuaccggacccuauugaugaaugaauuggguguuccauuucauuugggaaccaggcaagugugcauagcaugguccagcucaaguugucacgauggaaaagcauggcugcauguuuguguaacuggggaugaugaaaaugcaacugcuagcuucauuuacaaugggaggcuuguagauaguauugguucaugguccaaaaaaauacucagaacccaggagucggaaugcguuuguaucaauggaacuuguacaguaguaaugacugaugggagcgcuucaggaaaagcugauacuaaaauacuauucauugaggaggggaaaaucguucauacuagcacauugucaggaagugcucagcaugucgaggagugcuccuguuauccucgauauccuggugucagaugugucugcagagacaacuggaaaggcuccaauaggcccaucguagauauaaauguaaaggauuauagcauuguuuccaguuaugugugcucaggacuuguuggagacacacccagaaaaaacgacagcuucagcaguagccauugccuagauccuaacaaugaggaagguggucauggagugaaaggcugggccuuugaugauggaaaugacguguggaugggaagaacgaucagcgagaaguuacgcucagguuaugaaaccuucaaagucaucgaaggcugguccaaaccuaacuccaaauuacagauaaauaggcaagucauaguugaaagagguaacagguccgguuauucugguauuuucuccguugaaggcaaaagcugcaucaaucggugcuuuuauguggaguugauaaggggaaggaaagaggaaacugaagucugguggaccucaaacaguauuguuguguuuuguggcaccucagguacauauggaacaggcucauggccugauggggcggauaucaaucucaugccuauauaa

SEQ ID NO: 52665 - RNA, 1410 nt, Artificial Sequence
  derived and/or modified CDS sequence (wt) from neuraminidase__InfluenzaA__AEG65167
augaauccaaaucaaaagauaauaacaauuggcucuguuucucucaccauugccacaauaugcuuccuuaugcaaauugccauccugguaacuacuguaacauugcauuucaagcaguaugaaugcaacucccccccaaacaaccaaguaaugcugugugaaccaacaauaauagaaagaaacauaacagagauaguguaucugaccaacaccaccauagagaaggaaauaugccccaaacuagcagaauacagaaauuggucaaagccgcaauguaacauuacaggauuugcaccuuuuucuaaggacaauucgauucggcuuuccgcugguggggacaucugggugacaagagaaccuuaugugucaugcgauccugacaaguguuaucaauuugcccuugggcagggaacaacacuaaacaacgggcauucaaaugacacaguacaugauaggacccccuaccggacccuauugaugaaugaauuggguguuccauuucauuugggaaccaggcaagugugcauagcaugguccagcucaaguugucacgacggaaaagcauggcugcauguuuguguaacuggggaugaugaaaaugcaacugcuagcuucauuuacaaugggaggcuuguagauaguauugguucaugguccaaaaaaauacucagaacccaggagucggaaugcguuuguaucaauggaacuuguacaguaguaaugacugaugggagcgcuucaggaaaagcugauacuaaaauacuauucauugaggaggggaaaaucguucauauuagcacauugucaggaagugcucggcaugucgaggagugcuccuguuauccucgauauccuggugucagaugugucugcagagacaacuggaaaggcuccaauaggcccaucguagauauaaauguaaaggauuauagcauuguuuccaguuaugugugcucaggacuuguuggagacacacccagaaaaaacgacagcuucagcaguagccauugccuagauccuaacaaugaggaagguggucauggagugaaaggcugggccuuugaugauggaaaugacguguggaugggaagaacgaucagcgagaaguuacgcucagguuaugaaaccuucaaagucaucgaaggcugguccaaaccuaacuccaaauuacagauaaauaggcaagucauaguugaaagagguaacagguccgguuauucugguauuuucuccguugaaggcaaaagcugcaucaaucggugcuuuuauguggaguugauaaggggaaggaaagaggaaacugaagucugguggaccucaaacaguauuguuguguuuuguggcaccucagguacauauggaacaggcucauggccugauggggcggauaucaaucucaugccuauauaa

SEQ ID NO: 52666 - RNA, 1410 nt, Artificial Sequence
  derived and/or modified CDS sequence (wt) from neuraminidase__InfluenzaA__AEG65178
augaauccaaaucaaaagauaauaacaauuggcucuguuucucucaccauugccacaauaugcuuccuuaugcaaauugccauccugguaacuacuguaacuuugcauuucaagcagcaugaaugcaacucccccccaaacaaccaaguaaugcugugugaaccaacaauaauagaaagaaacauaacagagauaguguaucugaccaacaccaccauagagaaggaaauaugccccaaacuagcagaauacagaaauuggucaaagccgcaauguaacauuacaggauuugcaccuuuuucuaaggacaauucgauucggcuuuccgcugguggggacaucugggugacaagagaaccuuaugugucaugcgauccugacaaguguuaucaauuugcccuugggcagggaacaacacuaaacaacgggcauucaaauaacacaguacaugauaggaccccuuaccggacccuauugaugaaugaauuggguguuccauuucauuugggaaccaggcaagugugcauagcaugguccagcucaaguugucacgauggaaaagcauggcugcauguuuguguaacuggggaugauaaaaaugcaacugcuagcuucauuuacaaugggaggcuuguagauaguauugguucaugguccaaaaauauacucagaacccaggagucggaaugcguuuguaucaauggaacuuguacaguaguaaugacugaugggagcgcuucaggaaaagcugauacuaaaauacuauucauugaggaggggaaaaucguucauauuagcacauugucaggaagugcucagcaugucgaggagugcuccuguuauccucgauauccuggugucagaugugucugcagagacaacuggaaaggcuccaauaggcccauuguagauauaaauguaaaggauuauagcauuguuuccaguuaugugugcucaggacuuguuggagacacacccagaaaaaacgacagcuucagcaguagccauugccuagauccuaacaaugaggaagguggucauggagugaaaggcugggccuuugaugauggaaaugacguguggaugggaagaacgaucagcgagaaguuacgcucagguuaugaaaccuucaaagucaucgaaggcugguccaaaccuaacuccaaauuacagauaaauaggcaaguuauaguugaaagagguaacagguccgguuauucugguauuuucuccguugaaggcaaaagcugcaucaaucggugcuuuuauguggaguugauaaggggaaggaaagaggaaacugaagucugguggaccucaaacaguauuguuguguuuuguggcaccucagguacauauggaacaggcucauggccugauggggcggauaucaaucucaugccuauauaa

SEQ ID NO: 52667 - RNA, 1410 nt, Artificial Sequence
  derived and/or modified CDS sequence (wt) from neuraminidase__InfluenzaA__AEG65189
augaauccaaaucaaaagauaauaacgauuggcucuguuucucucaccauuuccacaauaugcuucuucaugcaaauugccaucuugauaacuacuguaacauugcauuucaagcaauaugaauucaacucccccccaaacaaccaagugaugcugugugaaccaacaauaauagaaagaaacauaacagagauaguguaucugaccaacaccaccauagagaaggaaauaugccccaaacuagcagaauacagaaauuggucaaagccgcaaugugacauuacaggauuugcaccuuuuucuaaggacaauucgauuaggcuuucugcugguggggacaucugggugacaagagaaccuuaugugucaugcgauccugacaaguguuaucaauuugcccuuggacagggaacaacacuaaacaacgugcauucaaaugacacaguacaugauaggaccccuuaucggacccuauugaugaaugaguuagguguuccauuucaucuggggaccaagcaagugugcauagcaugguccagcucaaguugucacgauggaaaagcauggcugcauguuuguguaacgggggaugauaaaaaugcaacugcuagcuucauuuacaaugggaggcuuguagauaguauuguuucaugguccaaagaaauccucagaacccaggagucagaaugcguuuguaucaauggaacuuguacaguaguaaugacugaugggagugcuucaggaaaagcugauacuaaaauacuauucauugaggaggggaaaaucguucauacuagcacauugucaggaagugcucagcaugucgaggagugcuccugcuauccucgauauccuggugucagaugugucugcagagacaacuggaaaggcuccaauaggcccaucguagauauaaacauaaaugauuauagcauuguuuccaguuaugugugcucaggacuuguuggagacacacccagaaaaaacgacagcuccagcaguagccauugcuuggauccuaacaaugaagaagguggucauggagugaaaggcugggccuuugaugauggaaaugacguguggaugggaagaacgaucagcgagaaguuacgcucaggauaugaaaccuucaaagucauugaaggcugguccaacccuaauuccaaauugcagauaaauaggcaagucauaguugacagagguaauagguccgguuauucugguauuuucucuguugaaggcaaaagcugcaucaaucggugcuuuuauguggaguugauaaggggaagaaaagaggaaacugaagucuuguggaccucaaacaguauuguuguguuuuguggcaccucagguacauauggaacaggcucauggccugauggggcggacaucaaucucaugccuauauaa

SEQ ID NO: 52668 - RNA, 1410 nt, Artificial Sequence
  derived and/or modified CDS sequence (wt) from neuraminidase__InfluenzaA__AEG65200
augaauccaaaucaaaagauaauaacgauuggcucuguuucucucaccauuuccacaauaugcuucuucaugcaaauugccaucuugauaacuacuguaacauugcauuucaagcaauaugaauucaacucccccccaaacaaccaagugaugcuaugugaaccaacaauaauagaaagaaacauaacagagauaguguaucugaccaacaccaccauagagaaggaaauaugccccaaacuagcagaauacagaaauuggucaaagccgcaaugugacauuacaggauuugcaccuuuuucuaaggacaauucgauuaggcuuuccgcugguggggacaucugggugacaagagaaccuuaugugucaugcgauccugacaaguguuaucaauuugcccuuggacagggaacaacacuaaacaacgugcauucaaaugacacaguacaugauaggaccccuuaucggacccuauugaugaaugaguuagguguuccauuucaucuggggaccaagcaagugugcauagcaugguccagcucaaguugucacgauggaaaggcauggcugcauguuuguguaacgggggaugauaaaaaugcaacugcuagcuucauuuacaaugggaggcuuguagauaguauuguuucaugguccaaagaaguccucaggacccaggagucagaaugcguuuguaucaauggaacuuguacaguaguaaugacugaugggagugcuucaggaaaagcugauacuaaaauacuauucauugaggaggggaaaaucguucauacuagcacauugucaggaagugcucagcaugucgaggagugcuccugcuauccucgauauccuggugucagaugugucugcagagacaacuggaaaggcuccaauaggcccaucguagauauaaacauaaaggauuauagcauuguuuccaguuaugugugcucaggacuuguuggagacacacccagaaaaaacgacagcuccagcaguagccauugcuuggauccuaacaaugaagaagguggucauggagugaaaggcugggccuuugaugauggaaaugacguguggaugggaagaacgaucagcgagaaguuacgcucaggauaugaaaccuucaaagucauugaaggcugguccaacccuaauuccaaauugcagacaaauaggcaagucauaguugacagagguaauagguccgguuauucugguauuuucucuguugaaggcaaaagcugcaucaaucggugcuuuuauguggaguugauaaggggaagaaaagaggaaacugaagucuuguggaccucaaacaguauuguuguguuuuguggcaccucagguacauauggaacaggcucauggccugauggggcggacaucaaucucaugccuauauaa

SEQ ID NO: 52669 - RNA, 1410 nt, Artificial Sequence; identical to SEQ ID NO: 47744
  derived and/or modified CDS sequence (wt) from neuraminidase__InfluenzaA__AEG65211

SEQ ID NO: 52670 - RNA, 1410 nt, Artificial Sequence; identical to SEQ ID NO: 48710
  derived and/or modified CDS sequence (wt) from neuraminidase__InfluenzaA__AEG65222

SEQ ID NO: 52671 - RNA, 1410 nt, Artificial Sequence
  derived and/or modified CDS sequence (wt) from neuraminidase__InfluenzaA__AEG65233
augaauccaaaucaaaagauaauaacgauuggcucuguuucucucaccauuuccacaauaugcuucuucaugcaaauugccaucuugauaacuacuguaacauugcauuucaagcaauaugaauucaacucccccccaaacaaccaagugaugcugugugaaccaacaauaauagaaagaaacauaacagagauaguguaucugaccaacaccaccauagaaaaggaaauaugccccaaacuagcagaauacagaaauuggucaaagccgcaaugugacauuacaggauuugcaccuuuuucuaaggacaauucgauuaggcuuuccgcugguggggacaucugggugacaagagaaccuuaugugucaugcgauccugacaaguguuaucaauuugcccuuggacagggaacaacacuaaacaacgugcauucaaaugacacaguacaugauaggaccccuuaucggacccuauugaugaaugaguuagguguuccauuucaucuggggaccaagcaagugugcauagcaugguccagcucaaguugucacgauggaaaagcauggcugcauguuuguguaacgggggaugauaaaaaugcaacugcuagcuucauuuacaaugggaggcuuguagauaguauuguuucaugguccaaaaaaauccucaggacccaggagucagaaugcguuuguaucaauggaacuuguacaguaguaaugacugaugggagugcuucaggaaaagcugauacuaaaauacuauucauugaggaggggaaaaucguucauacuagcacauugucaggaagugcucagcaugucgaggagugcuccugcuauccucgauauccuggugucagaugugucugcagagacaacuggaaaggcuccaauaggcccaucauagauauaaacauaaaggauuauagcauuguuuccaguuaugugugcucaggacuuguuggagacacacccagaaaaaacgacagcuccagcaguagccauugcuuggauccuaacaaugaagaagguggucauggagugaaaggcugggccuuugaugauggaaaugacguguggaugggaagaacgaucagcgagaaguuacgcucaggauaugaaaccuucaaagucauugaaggcugguccaacccuaauuccaaauugcagauaaauaggcaagucauaguugacagagguaauagguccgguuauucugguauuuucucuguugaaggcaaaagcugcaucaaucggugcuuuuauguggaguugauaaggggaagaaaagaggaaacugaagucuuguggaccucaaacaguauuguuguguuuuguggcaccucagguacauauggaacaggcucauggccugauggggcggacaucaaucucaugccuauauaa

SEQ ID NO: 52672 - RNA, 1410 nt, Artificial Sequence
  derived and/or modified CDS sequence (wt) from neuraminidase__InfluenzaA__AEG65244
augaauccaaaucaaaagauaauaacgauuggcucuguuucccucaccauuuccacaauaugcuucuucaugcaaauugccauccugauaacuacuguaacauugcauuucaagcaauaugaauucaacucccccccaaacaaccaagugaugcugugugaaccaacaauaauagaaagaaacauaacagagauaguguaucugaccaacaccaccauagagaaggaaauaugccccaaacuagcagaauacagaaauuggucaaagccgcaauguaacaucacaggauuugcaccuuuuucuaaggacaauucgauucggcuuuccgcugguggggacaucugggugacaagagaaccuuaugugucaugcgauccugacaaguguuaucaauuugcccuuggacagggaacaacacuaaacaacgugcauucaaaugacacaguacaugauaggaccccuuaucggacccuauugaugaaugaguuggguguuccauuucaucuggggacccagcaagugugcauagcaugguccagcucaaguugucacgauggaaaagcauggcugcauguuuguguaacgggggaugaugaaaaugcaacugcuagcuucauuuacaaugggaggcuuguagauaguauuguuucaugguccaaaaaaauccucaggacccaggagucagaaugcguuuguaucaauggaacuuguacaguaguaaugacugaugggagugcuucaggaaaagcugauacuaagauacuauucauugaggaagggaaaauuguucauacuagcacauuaucaggaagugcucagcaugucgaggagugcuccuguuauccucgauauccuggugucagaugugucugcagagacaacuggaaaggcuccaauaggcccaucguagauauaaacauuaaggauuauagcauugcuuccaguuaugugugcucaggacuuguuggagacacacccagaaaaaacgacagcuccagcaguagccauugcuuggauccaaacaaugaggaagguggucauggagugaaaggcugggccuuugaugauggaaaugacguguggaugggaagaacgaucagcgagaaguuacgcucaggauaugaaaccuucaaagucauugaaggcugguccaacccuaacuccaaauugcagauaaauaggcaagucauaguugacagagguaacagguccgguuauucugguauuuucucuguugaaggcaaaagcugcaucaaucggugcuuuuauguggaguugauaaggggaagaaaccaggaaacugaagucuuguggaccucaaacaguauuguuguguuuuguggcaccucagguacauauggaacaggcucauggccugauggggcggacaucaaucucaugccuauauaa

SEQ ID NO: 52673 - RNA, 1410 nt, Artificial Sequence
  derived and/or modified CDS sequence (wt) from neuraminidase__InfluenzaA__AEG65255
augaauccaaaucaaaagauaauaacgauuggcucuguuucucucaccauuuccacaauaugcuucuucaugcaaauugccaucuugauaacuacuguaacauugcauuucaagcaauaugaauucaacucccccccaaacaaccaagugaugcugugugaaccaacaauaauagaaagaaacauaacagagauaguguaucugaccaacaccaccauagagaaggaaauaugccccaaacuagcagaauacagaaauuggucaaagccgcaaugugacauuacaggauuugcaccuuuuucuaaggacaauucgauuaggcuuuccgcugguggggacaucugggugacaagagaaccuuaugugucaugcgauccugacaaguguuaucaauuugcccuuggacagggaacaacacuaaacaacgugcauucaaaugacacaguacaugauaggaccccuuaucggacccuauugaugaaugaguuagguguuccauuucaucuggggaccaagcaagugugcauagcaugguccagcucaaguugucacgauggaaaagcauggcugcauguuuguguaacgggggaugauaaaaaugcaacugcuagcuucauuuacaaugggaggcuuguagauaguauuguuucaugguccaaaaaaauccucaggacccaggagucagaaugcguuuguaucaauggaacuuguacaguaguaaugacugaugggagugcuucaggaaaagcugauaccaaaauacuauucauugaggaggggaaaaucguucauacuagcacauugucaggaagugcucagcaugucgaggagugcuccugcuauccucgauauccuggugucagaugugucugcagagacaacuggaaaggcuccaauaggcccaucguagauauaaacauaaaggauuauagcauuguuuccaguuaugugugcucaggacuuguuggagacacacccagaaaaaacgacagcuccagcaguagccauugcuuggauccuaacaaugaagaagguggucauggagugaaaggcugggccuuugaugauggaaaugacguguggaugggaagaacgaucagcgagaaguuacgcucaggauaugaaaccuucaaagucauugaaggcugguccaacccuaauuccaaauugcagauaaauaggcaagucauaguugacagagguaauagguccgguuauucugguauuuucucuguugaaggcaaaagcugcaucaaucggugcuuuuauguggaguugauaaggggaagaaaagaggaaacugaagucuuguggaccucaaacaguauuguuguguuuuguggcaccucagguacauauggaacaggcucauggccugauggggcggacaucaaucucaugccuauauaa

SEQ ID NO: 52674 - RNA, 1410 nt, Artificial Sequence; identical to SEQ ID NO: 46603
  derived and/or modified CDS sequence (wt) from neuraminidase__InfluenzaA__AEG65266

SEQ ID NO: 52675 - RNA, 1410 nt, Artificial Sequence; identical to SEQ ID NO: 46603
  derived and/or modified CDS sequence (wt) from neuraminidase__InfluenzaA__AEG65277

SEQ ID NO: 52676 - RNA, 1410 nt, Artificial Sequence
  derived and/or modified CDS sequence (wt) from neuraminidase__InfluenzaA__AEG65288
augaauccaaaucaaaagauaauaacaauuggcucuguuucucucaccauugccacaauaugcuuccuuaugcaaauugccauccugguaacuacuguaacauugcauuucaagcagcaugaaugcaacucccccccaaacaaccaaguaaugcugugugaaccaacaauaauagaaagaaacauaacagagauaguguaucugaccaacaccaccauagagaaggaaauaugccccaaacuaguagaauacagaaauuggucaaagccgcaauguaacauuacaggauuugcaccuuuuucuaaggacaauucgauucggcuuuccgcugguggggacaucugggugacaagagaaccuuaugugucaugcgauccugacaaguguuaucaauuugcccuugggcagggaacaacacuaaacaacgggcauucaaaugacacaguacaugauaggaccccuuaccggacccuauugaugaaugaauuggguguuccauuucauuugggaaccaggcaagugugcauagcaugguccagcucaaguugucacgauggaaaagcauggcugcauguuuguguaacuggggaugauaaaaaugcaacugcuagcuucauuuacaaugggaggcuuguagauaguauugguucaugguccaaaaaaauacucagaacccaggagucggaaugcguuuguaucaauggaacuuguacaguaguaaugacugaugggagcgcuucaggaaaagcugauacuaaaauacuauucauugaggaggggaaaaucguucauauuagcacauugucaggaagugcucagcaugucgaggagugcuccuguuauccucgauauccuggugucagaugugucugcagagacaacuggaaaggcuccaauaggcccauuguagauauaaauguaaaggauuauagcauuguuuccaguuaugugugcucaggacuuguuggagacacacccagaaaaaacaacagcuucagcaguagccauugccuagauccuaacaaugaggaagguggucauggagugaaaggcugggccuuugaugauggaaaugacguguggaugggaagaacgaucagcgagaaguuacgcucagguuaugaaaccuucaaagucaucgaaggcugguccaaaccuaacuccaaauuacagauaaauaggcaaguuauaguugaaagagguaacagguccgguuauucugguauuuucuccguugaaggcaaaagcugcaucaaucggugcuuuuauguggaguugauaaggggaaggaaagaggaaacugaagucugguggaccucaaacaguauuguuguguuuuguggcaccucagguacauauggaacaggcucauggccugauggggcggauaucaaucucaugccuauauaa

SEQ ID NO: 52677 - RNA, 1410 nt, Artificial Sequence; identical to SEQ ID NO: 46603
  derived and/or modified CDS sequence (wt) from neuraminidase__InfluenzaA__AEG65299

SEQ ID NO: 52678 - RNA, 1410 nt, Artificial Sequence; identical to SEQ ID NO: 52673
  derived and/or modified CDS sequence (wt) from neuraminidase__InfluenzaA__AEG65310

SEQ ID NO: 52679 - RNA, 1410 nt, Artificial Sequence; identical to SEQ ID NO: 52673
  derived and/or modified CDS sequence (wt) from neuraminidase__InfluenzaA__AEG65321

SEQ ID NO: 52680 - RNA, 1410 nt, Artificial Sequence; identical to SEQ ID NO: 48710
  derived and/or modified CDS sequence (wt) from neuraminidase__InfluenzaA__AEG65332

SEQ ID NO: 52681 - RNA, 1410 nt, Artificial Sequence; identical to SEQ ID NO: 48710
  derived and/or modified CDS sequence (wt) from neuraminidase__InfluenzaA__AEG65354

SEQ ID NO: 52682 - RNA, 1410 nt, Artificial Sequence; identical to SEQ ID NO: 48710
  derived and/or modified CDS sequence (wt) from neuraminidase__InfluenzaA__AEG65365

SEQ ID NO: 52683 - RNA, 1410 nt, Artificial Sequence
  derived and/or modified CDS sequence (wt) from neuraminidase__InfluenzaA__AEG65376
augaauccaaaucaaaagauaauaacgauuggcucuguuucccucaccauuuccacaauaugcuucuucaugcaaauugccauccugauaacuacuguaacauugcauuucaagcaauaugaauucaacucccccccaaacaaccaagugaugcugugugaaccaacaauaauagaaagaaacauaacagagauaguguaucugaccaacaccaccauagagaaggaaauaugccccaaacuagcagaauacagaaauuggucaaagccgcaauguaacauuacaggauuugcaccuuuuucuaaggacaauucgauucggcuuuccgcugguggggacaucugggugacaagagaaccuuaugugucaugcgauccugacaaguguuaucaauuugcccuuggacagggaacaacacuaaacaacgugcauucaaaugacacaguacaugauaggaccccuuaucggacccuauugaugaaugaguuggguguuccauuucaucuggggacccagcaagugugcauagcaugguccagcucaaguugucacgauggaaaagcauggcugcauguuuguguaacgggggaugaugaaaaugcaacugcuagcuucauuuacaaugggaggcuuguagauaguauuguuucaugguccaaaaaaauccucaggacccaggagucagaaugcguuuguaucaauggaacuuguacaguaguaaugacugaugggagugcuucaggaaaagcugauacuaagauacuauucauugaggaagggaaaauuguucauacuagcacauuaucaggaagugcucagcaugucgaggagugcuccuguuauccucgauauccuggugucagaugugucugcagagacaacuggaaaggcuccaauaggcccaucguagauauaaacauuaaggauuauagcauuguuuccaguuaugugugcucaggacuuguuggagacacacccagaaaaaacgacagcuccagcaguagccauugcuuggauccaaacaaugaggaagguggucauggagugaaaggcugggccuuugaugauggaaaugacguguggaugggaagaacgaucagcgagaaguuacgcucaggauaugaaaccuucaaagucauugaaggcugguccaacccuaacuccaaauugcagauaaauaggcaagucauaguugacagagguaacagguccgguuauucugguauuuucucuguugaaggcaaaagcugcaucaaucggugcuuuuauguggaguugauaaggggaagaaaccaggaaacugaagucuuguggaccucaaacaguauuguuguguuuuguggcaccucagguacauauggaacaggcucauggccugauggggcggacaucaaucucaugccuauauaa

SEQ ID NO: 52684 - RNA, 1410 nt, Artificial Sequence; identical to SEQ ID NO: 46603
  derived and/or modified CDS sequence (wt) from neuraminidase__InfluenzaA__AEG65387

SEQ ID NO: 52685 - RNA, 1410 nt, Artificial Sequence; identical to SEQ ID NO: 46603
  derived and/or modified CDS sequence (wt) from neuraminidase__InfluenzaA__AEG65398

SEQ ID NO: 52686 - RNA, 1410 nt, Artificial Sequence; identical to SEQ ID NO: 46603
  derived and/or modified CDS sequence (wt) from neuraminidase__InfluenzaA__AEG65409

SEQ ID NO: 52687 - RNA, 1410 nt, Artificial Sequence; identical to SEQ ID NO: 46603
  derived and/or modified CDS sequence (wt) from neuraminidase__InfluenzaA__AEG65420

SEQ ID NO: 52688 - RNA, 1410 nt, Artificial Sequence; identical to SEQ ID NO: 46603
  derived and/or modified CDS sequence (wt) from neuraminidase__InfluenzaA__AEG65431

SEQ ID NO: 52689 - RNA, 1410 nt, Artificial Sequence; identical to SEQ ID NO: 46740
  derived and/or modified CDS sequence (wt) from neuraminidase__InfluenzaA__AEG65442

SEQ ID NO: 52690 - RNA, 1410 nt, Artificial Sequence
  derived and/or modified CDS sequence (wt) from neuraminidase__InfluenzaA__AEG65453
augaauccaaaucaaaagauaauaacgauuggcucuguuucucucaccauuuccacaauaugcuucuucaugcaaauugccaucuugauaacuacuguaacauugcacuuuaagcaauaugaauucaacucccccccaaacaaccaagugaugcugugugaaccaacaauaauagaaagaaacauaacagagauaguguaucugaccaacaccaccauagagaaggaaauaugccccaaacuagcagaauacaggaauuggucaaagccgcaaugugacauuacaggauuugcaccuuuuucuaaggacaauucgauuaggcuuuccgcugguggggacaucugggugacaagagaaccuuaugugucaugcgauccugacaaguguuaucaauuugcccuuggacagggaacaacacuaaacaacgugcauucaaaugacacaguacaugauaggaccccuuaucggacccuauugaugaaugaguuagguguuccauuucaucuggggaccaagcaagugugcauagcaugguccagcucaaguugucacgauggaaaagcauggcugcauguuuguguaacgggggaugauaaaaaugcaacugcuagcuucauuuacaaugggaggcuuguagauaguauuguuucaugguccaaaaaaauccucaggacccaggagucagaaugcguuuguaucaauggaacuuguacaguaguaaugacugaugggagugcuucaggaaaagcugauacuaaaauacuauucauugaggaggggaaaaucguucauacuagcacauugucaggaagugcucagcaugucgaggagugcuccugcuauccucgauauccuggugucagaugugucugcagagacaacuggaaaggcuccaauaggcccaucguagauauaaacauaaaggauuauagcauuguuuccaguuaugugugcucaggacuuguuggagacacacccagaaaaaacgacagcuccagcaguagccauugcuuggauccuaacaaugaagaagguggucauggagugaaaggcugggccuuugaugauggaaaugacguguggaugggaagaacgaucagcgagaaguuacgcucaggauaugaaaccuucaaagucauugaaggcugguccaacccuaauuccaaauugcagauaaauaggcaagucauaguugacagagguaauagguccgguuauucugguauuuucucuguugaaggcaaaagcugcaucaaucggugcuuuuauguggaguugauaaggggaagaaaagaggaaacugaagucuuguggaccucaaacaguauuguuguguuuuguggcaccucagguacauauggaacaggcucauggccugauggggcggacaucaaucucaugccuauauaa

SEQ ID NO: 52691 - RNA, 1410 nt, Artificial Sequence; identical to SEQ ID NO: 52690
  derived and/or modified CDS sequence (wt) from neuraminidase__InfluenzaA__AEG65464

SEQ ID NO: 52692 - RNA, 1410 nt, Artificial Sequence; identical to SEQ ID NO: 52690
  derived and/or modified CDS sequence (wt) from neuraminidase__InfluenzaA__AEG65475

SEQ ID NO: 52693 - RNA, 1410 nt, Artificial Sequence
  derived and/or modified CDS sequence (wt) from neuraminidase__InfluenzaA__AEG65486
augaauccaaaucaaaagauaauaacgauuggcucuguuucucucaccauuuccacaauaugcuucuucaugcaaauugccaucuugauaacuacuguaacauugcacuuuaagcaauaugaauucaacucccccccaaacaaccaagugaugcugugugaaccaacaauaauagaaagaaacauaacagagauaguguaucugaccaacaccaccauagagaaggaaauaugccccaaacuagcagaacacaggaauuggucaaagccgcaaugugacauuacaggauuugcaccuuuuucuaaggacaauucgauuaggcuuuccgcugguggggacaucugggugacaagagaaccuuaugugucaugcgauccugacaaguguuaucaauuugcccuuggacagggaacaacacuaaacaacgugcauucaaaugacacaguacaugauaggaccccuuaucggacccuauugaugaaugaguuagguguuccauuucaucuggggaccaagcaagugugcauagcaugguccagcucaaguugucacgauggaaaagcauggcugcauguuuguguaacgggggaugauaaaaaugcaacugcuagcuucauuuacaaugggaggcuuguagauaguauuguuucaugguccaaaaaaauccucaggacccaggagucagaaugcguuuguaucaauggaacuuguacaguaguaaugacugaugggagugcuucaggaaaagcugauacuaaaauacuauucauugaggaggggaaaaucguucauacuagcacauugucaggaagugcucagcaugucgaggagugcuccugcuauccucgauauccuggugucagaugugucugcagagacaacuggaaaggcuccaauaggcccaucguagauauaaacauaaaggauuauagcauuguuuccaguuaugugugcucaggacuuguuggagacacacccagaaaaaacgacagcuccagcaguagccauugcuuggauccuaacaaugaagaagguggucauggagugaaaggcugggccuuugaugauggaaaugacguguggaugggaagaacgaucagcgagaaguuacgcucaggauaugaaaccuucaaagucauugaaggcugguccaacccuaauuccaaauugcagauaaauaggcaagucauaguugacagagguaauagguccgguuauucugguauuuucucuguugaaggcaaaagcugcaucaaucggugcuuuuauguggaguugauaaggggaagaaaagaggaaacugaagucuuguggaccucaaacaguauuguuguguuuuguggcaccucagguacauauggaacaggcucauggccugauggggcggacaucaaucucaugccuauauaa

SEQ ID NO: 52694 - RNA, 1410 nt, Artificial Sequence; identical to SEQ ID NO: 52690
  derived and/or modified CDS sequence (wt) from neuraminidase__InfluenzaA__AEG65497

SEQ ID NO: 52695 - RNA, 1410 nt, Artificial Sequence; identical to SEQ ID NO: 52690
  derived and/or modified CDS sequence (wt) from neuraminidase__InfluenzaA__AEG65508

SEQ ID NO: 52696 - RNA, 1410 nt, Artificial Sequence; identical to SEQ ID NO: 52690
  derived and/or modified CDS sequence (wt) from neuraminidase__InfluenzaA__AEG65519

SEQ ID NO: 52697 - RNA, 1410 nt, Artificial Sequence; identical to SEQ ID NO: 52690
  derived and/or modified CDS sequence (wt) from neuraminidase__InfluenzaA__AEG65530

SEQ ID NO: 52698 - RNA, 1410 nt, Artificial Sequence; identical to SEQ ID NO: 52690
  derived and/or modified CDS sequence (wt) from neuraminidase__InfluenzaA__AEG65541

SEQ ID NO: 52699 - RNA, 1410 nt, Artificial Sequence
  derived and/or modified CDS sequence (wt) from neuraminidase__InfluenzaA__AEG65563
augaauccaaaucaaaagauaauaacgauuggcucuguuucucucaccauuuccacaauaugcuucuucaugcaaauugccaucuugauaacuacuguaacauugcauuuuaagcaauaugaauucaacucccccccaaacaaccaagugaugcugugugaaccaacaauaauagaaagaaacauaacagagauaguguaucugaccaacaccaccauagagaaggaaauaugccccaaacuagcagaauacaggaauuggucaaagccacaaugugacauuacaggauuugcaccuuuuucuaaggacaauucgauuaggcuuuccgcugguggggacaucugggugacaagagaaccuuaugugucaugcgauccugacagguguuaucaauuugcccuuggacagggaacuacacuaaacaacgugcauucaaaugacacaguacaugauaggaccccuuaucggacccuauugaugaaugaguuagguguuccauuucaucuggggaccaagcaagugugcauagcaugguccagcucaaguugucacgauggaaaagcauggcugcauguuuguguaacgggggaugauaaaaaugcaacugcuagcuucauuuacaaugggaggcuuguagauaguauuguuucaugguccaaaaaaauccucaggacccaggagucagaaugcguuuguaucaauggaacuuguacaguaguaaugacugaugggagugcuucaggaaaagcugauacuaaaauacuauucauugaggaggggaaaaucguucauacuagcacauugucaggaagugcucagcaugucgaggagugcuccugcuauccucgauauccuggugucagaugugucugcagagacaacuggaaaggcuccaauaggcccaucguagauauaaacauaaaggauuauagcauuguuuccaguuaugugugcucaggacuuguuggagacacacccagaaaaaacgacagcuccagcaguagccauugcuuggauccuaacaaugaagaagguggucauggagugaaaggcugggccuuugaugauggaaaugacguguggaugggaagaacgaucagcgagaaguuacgcucaggauaugaaaccuucaaagucauugaaggcugguccaacccuaauuccaaauugcagauaaauaggcaagucauaguugacagagguaauagguccgguuauucugguauuuucucuguugaaggcaaaagcugcaucaaucggugcuuuuauguggaguugauaaggggaagaaaagaggaaacugaagucuuguggaccucaaacaguauuguuguguuuuguggcaccucagguacauauggaacaggcucauggccugauggggcggacaucaaucucaugccuauauaa

SEQ ID NO: 52700 - RNA, 1410 nt, Artificial Sequence
  derived and/or modified CDS sequence (wt) from neuraminidase__InfluenzaA__AEG65574
augaauccaaaucaaaagauaauaacgauuggcucuguuucucucaccauuuccacaauaugcuucuucaugcaaauugccaucuugauaacuacuguaacauugcauuuuaagcaauaugaauucaacucccccccaaacaaccaagugaugcugugugaaccaacaauaauagaaagaaacauaacagagauaguguaucugaccaacaccaccauagagaaggaaauaugccccaaacuagcagaauacaggaguuggucaaagccacaaugugacauuacaggauuugcaccuuuuucuaaggacaauucgauuaggcuuuccgcugguggggacaucugggugacaagagaaccuuaugugucaugcgauccugacagguguuaucaauuugcccuuggacagggaacuacacuaaacaacgugcauucaaaugacacaguacaugauaggaccccuuaucggacccuauugaugaaugaguuagguguuccauuucaucuggggaccaagcaagugugcauagcaugguccagcucaaguugucacgauggaaaagcauggcugcauguuuguguaacgggggaugauaaaaaugcaacugcuagcuucauuuacaaugggaggcuuguagauaguauuguuucaugguccaaaaaaauccucaggacccaggagucagaaugcguuuguaucaauggaacuuguacaguaguaaugacugaugggagugcuucaggaaaagcugauacuaaaauacuauucauugaggaggggaaaaucguucauacuagcacauugucaggaagugcucagcaugucgaggagugcuccugcuauccucgauauccuggugucagaugugucugcagagacaacuggaaaggcuccaauaggcccaucguagauauaaacauaaaggauuauagcauuguuuccaguuaugugugcucaggacuuguuggagacacacccagaaaaaacgacagcuccagcaguagccauugcuuggauccuaacaaugaagaagguggucauggagugaaaggcugggccuuugaugauggaaaugacguguggaugggaagaacgaucagcgagaaguuacgcucaggauaugaaaccuucaaagucauugaaggcugguccaacccuaauuccaaauugcagauaaauaggcaagucauaguugacagagguaauagguccgguuauucugguauuuucucuguugaaggcaaaagcugcaucaaucggugcuuuuauguggaguugauaaggggaagaaaagaggaaacugaagucuuguggaccucaaacaguauuguuguguuuuguggcaccucagguacauauggaacaggcucauggccugauggggcggacaucaaucucaugccuauauaa

SEQ ID NO: 52701 - RNA, 1410 nt, Artificial Sequence; identical to SEQ ID NO: 52699
  derived and/or modified CDS sequence (wt) from neuraminidase__InfluenzaA__AEG65585

SEQ ID NO: 52702 - RNA, 1410 nt, Artificial Sequence; identical to SEQ ID NO: 52699
  derived and/or modified CDS sequence (wt) from neuraminidase__InfluenzaA__AEG65596

SEQ ID NO: 52703 - RNA, 1410 nt, Artificial Sequence
  derived and/or modified CDS sequence (wt) from neuraminidase__InfluenzaA__AEG65607
augaauccaaaucaaaagauaauaacgauuggcucuguuucucucaccauuuccacaauaugcuucuucaugcaaauugccaucuugauaacuacuguaacauugcauuuuaagcaauaugaauucaacucccccccaaacaaccaagugaugcugugugaaccaacaauaauagaaagaaacauaacagagauaguguaucugaccaacaccaccauagagaaggaaauaugccccaaacuagcagaauacagaaauuggucaaagccgcaaugugacauuacaggauuugcaccuuuuucuaaggacaauucgauuaggcuuuccgcugguggggacaucugggugacaagagaaccuuaugugucaugcgauccugacaaguguuaucaauuugcccuuggacagggaacaacacuaaacaacgugcauucaaaugacacaguacaugauaggaccccuuaucggacccuauugaugaaugaguuagguguuccauuucaucuggggaccaagcaagugugcauagcaugguccagcucaaguugucacgauggaaaagcauggcugcauguuuguguaacgggggacgauaaaaaugcaacugcuagcuucauuuacaaugggaggcuuguagauaguauuguuucaugguccaaaaaaauccucaggacccaggagucagaaugcguuuguaucaauggaacuuguacaguaguaaugaccgaugggagugcuucaggaaaagcugauacuaaaauacuauucauugaggaggggaaaaucguucauacuagcacauugucaggaagugcucagcaugucgaggagugcuccugcuauccucgauauccuggugucagaugugucugcagagacaacuggaaaggcuccaauaggcccaucguagauauaaacauaaaggauuauagcauugcuuccaguuaugugugcucaggacuuguuggagacacacccagaaaaaacgacagcuccagcaguagccauugcuuggauccuaacaaugaagaagguggucauggagugaaaggcugggccuuugaugauggaaaugacguguggaugggaagaacgaucagcgagaaguuacgcucaggguaugaaaccuucaaagucauugaaggcugguccaacccuaauuccaaauugcagauaaauaggcaagucauaguugacagagguaauagguccgguuauucugguauuuucucuguugaaggcaaaagcugcaucaaucggugcuuuuauguggaguugauaaggggaagaaaagaggaaacugaagucuuguggaccucaaacaguauuguuguguuuuguggcaccucagguacauauggaacaggcucauggccugauggggcggacaucaaucucaugccuauauaa

SEQ ID NO: 52704 - RNA, 1410 nt, Artificial Sequence
  derived and/or modified CDS sequence (wt) from neuraminidase__InfluenzaA__AEG65629
augaauccaaaccaaaagauaauaacgauuggcucuguuucucucaccauuuccacaauaugcuucuucaugcaaauugccaucuugauaacuacuguaacauugcauuucaagcaauaugaauucaacucccccccaaacaaccaagugaugcugugugaaccaacaauaauagaaagaaacauaacagagauaguguaucugaccaacaccaccauagagaaggaaauaugccccaaacuagcagaauacagaaauuggucaaagccgcaaugugacauuacaggauuugcaccuuuuucuaaggacaauucgauuaggcuuuccgcugguggggacaucugggugacaagagaaccuuaugugucaugcgauccugacaaguguuaucaauuugcccuuggacagggaacaacacuaaacaacgugcauucaaaugacacaguacaugauaggaccccuuaucggacccuauugaugaaugaguuagguguuccauuucaucuggggaccaagcaagugugcauagcaugguccagcucaaguugucacgauggaaaagcauggcugcauguuuguguaacgggggaugauaaaaaugcaacugcuagcuucauuuacaaugggaggcuuguagauaguauuguuucaugguccaaagaaauccucaggacccaggagucagaaugcguuuguaucaauggaacuuguacaguaguaaugacugaugggagcgcuucaggaaaagcugauacuaaaauacuauucauugaggaggggaaaaucguucauacuagcacauugucaggaagugcucagcaugucgaggagugcuccugcuauccucgauauccuggugucagaugugucugcagagacaacuggaaaggcuccaauaggcccaucguagauauaaacauaaaggauuauagcauuguuuccaguuaugugugcucaggacuuguuggagacacacccagaaaaaacgacagcuccagcaguagccauugcuuggauccuaacgaugaggaagguggucauggagugaaaggcugggccuuugaugauggaaaugacguguggaugggaagaacgaucagcgagaaguuacgcucaggauaugaaaccuucaaagucauugaaggcugguccaacccuaauuccaaauugcagauaaauaggcaagucauaguugacagagguaauagguccgguuauucugguauuuucucuguugaaggcaaaagcugcaucaaucggugcuuuuauguggaguugauaaggggaagaaaagaggaaauugaagucuuguggaccucaaacaguauuguuguguuuuguggcaccucagguacauauggaacaggcucauggccugauggggcggacaucaaucucaugccuauauaa

SEQ ID NO: 52705 - RNA, 1410 nt, Artificial Sequence; identical to SEQ ID NO: 52704
  derived and/or modified CDS sequence (wt) from neuraminidase__InfluenzaA__AEG65640

SEQ ID NO: 52706 - RNA, 1410 nt, Artificial Sequence; identical to SEQ ID NO: 46152
  derived and/or modified CDS sequence (wt) from neuraminidase__InfluenzaA__AEG65651

SEQ ID NO: 52707 - RNA, 1410 nt, Artificial Sequence; identical to SEQ ID NO: 48710
  derived and/or modified CDS sequence (wt) from neuraminidase__InfluenzaA__AEG65662

SEQ ID NO: 52708 - RNA, 1410 nt, Artificial Sequence; identical to SEQ ID NO: 48710
  derived and/or modified CDS sequence (wt) from neuraminidase__InfluenzaA__AEG65673

SEQ ID NO: 52709 - RNA, 1410 nt, Artificial Sequence; identical to SEQ ID NO: 48710
  derived and/or modified CDS sequence (wt) from neuraminidase__InfluenzaA__AEG65684

SEQ ID NO: 52710 - RNA, 1410 nt, Artificial Sequence; identical to SEQ ID NO: 52683
  derived and/or modified CDS sequence (wt) from neuraminidase__InfluenzaA__AEG65695

SEQ ID NO: 52711 - RNA, 1410 nt, Artificial Sequence
  derived and/or modified CDS sequence (wt) from neuraminidase__InfluenzaA__AEG65706
augaauccaaaucaaaagauaauaacgauuggcucuguuucucucaccauuuccacaauaugcuucuucaugcaaauugccaucuugauaacuacuguaacauugcauuucaagcaauaugaauucaacucccccccaaacaaccaagugaugcugugugaaccaacaauaauagaaagaaacauaacagagauaguguaucugaccaacaccaccauagagaaggaaauaugccccaaacuagcagaauacagaaauuggucaaagccgcaauguaacauuacaggauuugcaccuuuuucuaaggacaauucgauuaggcuuuccgcugguggggacaucugggugacaagagaaccuuaugugucaugcgauccugacaaguguuaucaauuugcccuuggacagggaacaacacuaaacaacgugcauucaaaugacacaguacaugauaggaccccuuaucggacccuauugaugaaugaguuagguguuccauuucaucuggggaccaagcaagugugcauagcaugguccagcucaaguugucacgauggaaaagcauggcugcauguuuguguaacgggggaugauaaaaaugcaacugcuagcuucauuuacaaugggaggcuuguagauaguauuguuucaugguccaaggaaauccucaggacccaggagucagaaugcguuuguaucaauggaacuuguacaguaguaaugacugaugggagugcuucaggaaaagcugauacuaaaauacuauucauugaggaggggaaaaucguucauacuagcacauugucaggaagugcucagcaugucgaggagugcuccugcuauccucgauauccuggugucagaugugucugcagagacaacuggaaaggcuccaauaggcccauaguagauauaaacauaaaggauuauagcauuguuuccaguuaugugugcucaggacuuguuggagacacacccagaaaaaacgacagcuccagcaguagccauugcuuggauccuaacaaugaagaagguggucauggagugaaaggcugggccuuugaugauggaaaugacguguggaugggaagaacgaucagcgagaaguuacgcucaggauaugaaaccuucaaagucauugaaggcugguccaacccuaauuccaaauugcagauaaauaggcaagucauaguugacagagguaauagguccgguuauucugguauuuucucuguugaaggcaaaagcugcaucaaucggugcuuuuauguggaguugauaaggggaagaaaagaggaaaaugaagucuuguggaccucaaacaguauuguuguguuuuguggcaccucagguacauauggaacaggcucauggccugauggggcggacaucaaucuuaugccuauauaa

SEQ ID NO: 52712 - RNA, 1410 nt, Artificial Sequence
  derived and/or modified CDS sequence (wt) from neuraminidase__InfluenzaA__AEG65728
augaauccaaaucaaaagauaauaacgauuggcucuguuucucucaccauuuccacaauaugcuucuucaugcaaauugccaucuugauaacuacuguaacauugcauuucaagcaauaugaauucaacucccccccaaacaaccaagugaugcugugugaaccaacaauaauagaaagaaacauaacagagauaguguaucugaccaacaccaccauagagaaggaaauaugccccaaacuagcagaauacagaaauuggucaaagccgcaauguaacauuacaggauuugcaccuuuuucuaaggacaauucgauuaggcuuuccgcugguggggacaucugggugacaagagaaccuuaugugucaugcgauccugacaaguguuaucaauuugcccuuggacagggaacaacacuaaacaacgugcauucaaaugacacaguacaugauaggaccccuuaucggacccuauugaugaaugaguuagguguuccauuucaccuggggaccaagcaagugugcauagcaugguccagcucaaguugucacgauggaaaagcauggcugcauguuuguguaacgggggaugauaaaaaugcaacugcuagcuucauuuacaaugggaggcuuguagauaguauuguuucaugguccaaagaaauccucaggacccaggagucagaaugcguuuguaucaauggaacuuguacaguaguaaugacugaugggagugcuucaggaaaagcugauacuaaaauacuauucauugaggaggggaaaaucguucauacuagcacauugucaggaagugcucagcaugucgaggagugcuccugcuauccucgauauccuggugucagaugugucugcagagacaacuggaaaggcuccaauaggcccauaguagauauaaacauaaaggauuauagcauuguuuccaguuaugugugcucaggacuuguuggagacacacccagaaaaaacgacagcuccagcaguagccauugcuuggauccuaacaaugaagaagguggucauggagugaaaggcugggccuuugaugauggaaaugacguguggaugggaagaacgaucagcgagaaguuacgcucaggauaugaaaccuucaaagucauugaaggcugguccaacccuaauuccaaauugcagauaaauaggcaagucauaguugacagagguaauagguccgguuauucugguauuuucucuguugaaggcaaaagcugcaucaaucggugcuuuuauguggaguugauaaggggaagaaaagaggaaacugaagucuuguggaccucaaacaguauuguuguguuuuguggcaccucagguacauauggaacaggcucauggccugauggggcggaaaucaaucucaugccuauauaa

SEQ ID NO: 52713 - RNA, 1410 nt, Artificial Sequence
  derived and/or modified CDS sequence (wt) from neuraminidase__InfluenzaA__AEG65739
augaauccaaaucaaaagauaauaacgauuggcucuguuucucucaccauuuccacaauaugcuucuucaugcaaauugccaucuugauaacuacuguaacauugcauuucaaacaauaugaauucagcucccccccaaacaaccaagugaugccgugugaaccaacaauaauagaaagaaacauaacagagauaguguaucugaccaacaccaccauagagaaggaaauaugccccaaacuagcagaauacagaaauuggucaaagccgcaaugugacauuacaggauuugcaccuuuuucuaaggacaauucgauuagacuuuccgcugguggggacaucugggugacaagagaaccuuaugugucaugcgauccugacaaguguuaucaauuugcccuuggacagggaacaacacuaaacaacgugcauucaaaugacacaguacaugauaggaccccuuaucggacccuauugaugaaugaguuagguguuccauuucaucuggggaccaagcaagugugcauagcaugguccagcucaaguugucacgauggaaaagcauggcugcauguuuguguaacgggggaugauaaaaaugcaacugcuagcuucauuuacaaugggaggcuuguagauaguauuguuucaugguccaaagaaauccucagaacccaggagucagaaugcguuuguaucaauggaacuuguacaguaguaaugacugaugggagugcuucaggaaaagcugauacuaaaauacuauucauugaggaggggaaaaucguccauacuagcacauugucaggaagugcucaacaugucgaggagugcuccugcuauccucgauauccuggugucagaugugucugcagagacaacuggaaaggcuccaauaggcccaucguagauauaaacaugaaggauuauagcauuguuuccaguuaugugugcucaggacuuguuggagacacacccagaaaaaacgacagcuccagcaguagccauugcuuggauccuaacaaugaagaagguggucauggagugaaaggcugggccuuugaugauggaaaugacguguggaugggaagaacgaucagcgagaaguuacgcucaggauaugaaaccuucaaagucauugaaggcugguccaacccuaauuccaaauugcagauaaauaggcaagucauaguugacagagguaauagguccgguuauucugguauuuucucuguugaaggcaaaagcugcaucaaucggugcuuuuauguggaguugauaaggggaagaaaagaggaaacugaagucuuguggaccucaaacaguauuguuguguuuuguggcaccucagguacauauggaacaggcucauggccugauggggcggacaucaaucucaugccuauauaa

SEQ ID NO: 52714 - RNA, 1410 nt, Artificial Sequence
  derived and/or modified CDS sequence (wt) from neuraminidase__InfluenzaA__AEG65750
augaauccaaaucaaaagauaauaacgauuggcucuguuucucucaccauuuccacaauaugcuucuucaugcaaauugccaucuugauaacuacuguaacauugcauuucaagcaauaugaauucaacucccccccaaacaaccaagugaugcugugugaaccaacaauaauagaaagaaacauaacagagauaguguaucugaccaacaccaccauagagaaggaaauaugccccaaacuagcagaauacagaaauuggucaaagccgcaauguaacauuacaggauuugcacccuuuucuaaggacaauucgauuaggcuuuccgcugguggggacaucugggugacaagagaaccuuaugugucaugcgauccugacaaguguuaucaauuugcccuuggacagggaacaacacuaaacaacgugcauucaaaugacacaguacaugauaggaccccuuaucggacccuauugaugaaugaguuagguguuccauuucaucuggggaccaagcaagugugcauagcaugguccagcucaaguugucacgauggaaaagcauggcugcauguuuguguaacgggggaugauaaaaaugcaacugcuagcuucauuuacaaugggaggcuuguagauaguauuguuucaugguccaaagaaauccucaggacccaggagucagaaugcguuuguaucaauggaacuuguacaguaguaaugacugaugggagugcuucaggaaaagcugauacuaaaauacuauucauugaggaggggaaaaucguucauacuagcacauugucaggaagugcucagcaugucgaggagugcuccugcuauccucgauauccuggugucagaugugucugcagagacaacuggaaaggcuccaauaggcccauaguagauauaaacauaaaggauuauagcauuguuuccaguuaugugugcucaggacuuguuggagacacacccagaaaaaacgacagcuccagcaguagccauugcuuggauccuaacaaugaagaagguggucauggagugaaaggcugggccuuugaugauggaaaugacguguggaugggaagaacgaucagcgagaaguuacgcucaggauaugaaaccuucaaagucauugaaggcugguccaacccuaauuccaaauugcagacaaauaggcaagucauaguugacagagguaauagguccgguuauucugguauuuucucuguugaaggcaaaagcugcaucaaucggugcuuuuauguggaguugauaaggggaagaaaagaggaaacugaagucuuguggaccucaaacaguauuguuguguuuuguggcaccucagguacauauggaacaggcucauggccugauggggcggacaucaaucucaugccuauauaa

SEQ ID NO: 52715 - RNA, 1410 nt, Artificial Sequence
  derived and/or modified CDS sequence (wt) from neuraminidase__InfluenzaA__AEG65761
augaauccaaaucaaaagauaauaacgauuggcucuguuucucucaccauuuccacaauaugcuucuucaugcaaauugccaucuugauaacuacuguaacauugcauuucaagcaauaugaauucaacucccccccaaacaaccaagugaugcugugugaaccaacaauaauagaaagaaacauaacagagauaguguaucugaccaacaccaccauagagaaggaaauaugccccaaacuagcagaauacagaaauuggucaaagccgcaauguaacauuacaggauuugcaccuuuuucuaaggacaauucgauuaggcuuuccgcugguggggacaucugggugacaagagaaccuuaugugucaugcgauccugacaaguguuaucaauuugcccuuggacagggaacaacacuaaacaacgugcauucaaaugacacaguacaugauaggaccccuuaucggacccuauugaugaaugaguuagguguuccauuucaucuggggaccaagcaagugugcauagcaugguccagcucaaguugucacgauggaaaagcauggcugcauguuuguguaacgggggaugauaaaaaugcaacugcuagcuucauuuacaaugggaggcuuguagauaguauuguuucaugguccaaagaaauccucaggacccaggagucagaaugcguuuguaucaauggaacuuguacaguaguaaugacugaugggagugcuucaggaaaagcugauacuaaaauacuauucauugaggaggggaaaauuguucauacuagcacauugucaggaagugcucagcaugucgaggagugcuccugcuauccucgauauccuggugucagaugugucugcagagacaacuggaaaggcuccaauaggcccauaguagauauaaacauaaaggauuauagcauuguuuccaguuaugugugcucaggacuuguuggagacacacccagaaaaaacgacagcuccagcaguagccauugcuuggauccuaacaaugaagaagguggucauggagugaaaggcugggccuuugaugauggaaaugacguguggaugggaagaacgaucagcgagaaguuacgcucaggauaugaaaccuucaaagucauugaaggcugguccaacccuaauuccaaauugcagauaaauaggcaagucauaguugacagagguaauagguccgguuauucugguauuuucucuguugaaggcaaaagcugcaucaaucggugcuuuuauguggaguugauaaggggaagaaaagaggaaacugaagucuuguggaccucaaacaguauuguuguguuuuguggcaccucagguacauauggaacaggcucauggccugauggggcggaaaucaaucucaugccuauauaa

SEQ ID NO: 52716 - RNA, 1410 nt, Artificial Sequence
  derived and/or modified CDS sequence (wt) from neuraminidase__InfluenzaA__AEG65772
augaauccaaaucaaaagauaauaacgauuggcucuguuucucuuaccauuuccacaauaugcuuuuucaugcaaacugccaucuugauaacuacuguaacauugcauuucaagcaauaugaauucaacucccccccaaacaaccaagugaugcugugugaaccaacaauaauagaaagaaacauaacagagauaguguaucugaccaacaccaccauagagaaggaaaugugccccaaacuagcagaauacagaaauuggucaaagccgcaaugugacauuacaggauuugcaccuuuuucuaaggacaauucgauuaggcuuuccgcugguggggacaucugggugacaagagaaccuuaugugucaugcgauccugacaaguguuaccaauuugcccuuggacagggaacaacacuaaacaacgugcauucaaaugacacaguacaugauaggaccccuuaucggacccuauugaugaaugaguuagguguuccauuucaucuggggaccaagcaagugugcauagcaugguccagcucaaguugucacgauggaaaagcauggcugcauguuuguguaacgggggaugauaaaaaugcaacugcuagcuucauuuacaaugggaggcuuguagauaguauuguuucaugguccaaaaaaauccucaggacccaggagucagaaugcguuuguaucaauggaacuuguacaguaguaaugacugaugggagugcuucaggaaaagcugauacuaaaauacuauucauugaggaggggaaaaucauucauacuagcacauugucaggaagugcucagcaugucgaggagugcuccugcuauccucgauauccuggugucagaugugucugcagagacaacuggaaaggcuccaauaggcccaucguagauauaaacauaaaggauuauagcauuguuuccaguuaugugugcucaggacuuguuggagacacacccagaaaaaacgacagcuccagcaguagccauugcuuggauccuaacaaugaagaagguggucauggagugaaaggcugggccuuugaugauggaaaugacguguggaugggaagaacgaucagcgagaaguuacgcucaggauaugaaaccuucaaagucauugaaggcugguccaaaccuaauuccaaauugcagauaaauaggcaagucauaguugacagagguaauagguccgguuauucugguauuuucucuguugaaggcaaaagcugcaucaaucggugcuuuuauguggaguugauaaggggaagaaaagaggaaacugaagucuuguggaccucaaacaguauuguuguguuuuguggcaccucagguacauauggaacaggcucauggccugauggggcggacaucaaucucaugccuauauaa

SEQ ID NO: 52717 - RNA, 1410 nt, Artificial Sequence
  derived and/or modified CDS sequence (wt) from neuraminidase__InfluenzaA__AEG65783
augaauccaaaucaaaagauaauaacgauuggcucuguuucucucaccauuuccacaauaugcuucuucaugcaaauugccaucuugauaacuacuguaacauugcauuucaagcaauaugaauucaacucccccccaaacaaccaagugaugcugugugaaccaacaauaauagaaagaaacauaacagagauaguguaucugaccaacaccaccauagagaaggaaauaugccccaaacuagcagaauacagaaauuggucaaagccgcaaugugacauuacaggauuugcaccuuuuucuaaggacaauucgauuaggcuuuccgcugguggggacaucugggugacaagagaaccuuaugugucaugcgauccugacaaguguuaucaauuugcccuuggacagggaacaacacuaaacaacgugcauucaaauaacacaguacgugauaggaccccuuaucggacccuauugaugaaugaguuagguguuccuuuucaucuggggaccaagcaagugugcauagcaugguccagcucaaguugucacgauggaaaagcauggcugcauguuuguauaacgggggaugauaaaaaugcaacugcuagcuucauuuacaaugggaggcuuguagauaguguuguuucaugguccaaagaaauccucaggacccaggagucagaaugcguuuguaucaauggaacuuguacaguaguaaugacugaugggagugcuucaggaaaagcugauacuaaaauacuauucauugaggaggggaaaaucguucauacuagcacauugucaggaagugcucagcaugucgaggagugcucuugcuauccucgauauccuggugucagaugugucugcagagacaacuggaaaggcuccaauaggcccaucguagauauaaacauaaaggaucauagcauuguuuccaguuauguguguucaggacuuguuggagacacacccagaaaaaacgacagcuccagcaguagccauuguuuggauccuaacaaugaagaagguggucauggagugaaaggcugggccuuugaugauggaaaugacguguggaugggaagaacgaucaacgagacgucacguuuaggguaugaaaccuucaaagucauugaaggcugguccaacccuaaguccaaauugcagauaaauaggcaagucauaguugacagagguaauagguccgguuauucugguauuuucucuguugaaggcaaaagcugcaucaaucggugcuuuuauguggaguugauuaggggaagaaaagaggaaacugaagucuuguggaccucaaacaguauuguuguguuuuguggcaccucagguacauauggaacaggcucauggccugauggggcggaccucaaucucaugccuauauaa

SEQ ID NO: 52718 - RNA, 1410 nt, Artificial Sequence
  derived and/or modified CDS sequence (wt) from neuraminidase__InfluenzaA__AEG65794
augaauccaaaucaaaagauaauaacgauuggcucuguuucucucaccauuuccacaauaugcuucuucaugcaaauugccaucuugauaacuacuauaacauugcauuucaagcaauaugaauucaacucccccccaaacaaccaagugaugcugugugaaccgacaauaauagaaagaaacauaacagagauaguguaucugaccaacaccaccauagagaaggaaauaugccccaaacuagcagaauacagaaauuggucaaaaccgcaaugugacauuacaggauuugcaccuuuuucuaaggacaauucgauuaggcuuuccgcugguggggacaucugggugacaagagaaccuuaugugucaugcgauccugacaaguguuaucaauuugcccuuggacagggaacaacacuaaacaacgugcauucaaauaacacaguacgugauaggaccccuuaucggacccuauugaugaaugaguuagguguuccuuuucaucuggggaccaagcaagugugcauagcaugguccagcucaaguugucacgauggaaaagcauggcugcauguuuguauaacgggggaugauaaaaaugcaacugcaagcuucauuuacaaugggaggcuuguagauaguguuguuucaugguccaaagaaauucucaggacccaggagucagaauguguuuguaucaauggaacuuguacaguaguaaugacugauggaagugcuucaggaaaagcugauacuaaaauacuauucauugaggaggggaaaaucguucauacuagcacauugucaggaagugcucagcaugucgaggagugcucuugcuauccucgauauccuggugucagaugugucugcagagacaacuggaaaggcuccaauaggcccaucguagauauaaacauaaaggaucauagcauaguuuccaguuauguguguucaggacuuguuggagacacacccagaaaaaacgacagcuccagcaguagccauuguuuggauccuaacaaugaagaagguggucauggagugaaaggcugggccuuugaugauggaaaugacguguggaugggaagaacaaucaacgagacgucacgcuugggguaugaaaccuucaaagucauugaaggcugguccaacccuaaguccaaauugcagauaaauaggcaagucauaguugacaaagguaauagguccgguuauucugguauuuucucuguugaaggcaaaagcugcaucaaucggugcuuuuauguggaguugauuaggggaagaaaagaggaaacugaagucuuguggaccucaaacaguauuguuguguuuuguggcaccucagguacauauggaacaggcucauggccugauggggcggaccucaaucucaugccuauauaa

SEQ ID NO: 52719 - RNA, 1410 nt, Artificial Sequence; identical to SEQ ID NO: 52717
  derived and/or modified CDS sequence (wt) from neuraminidase__InfluenzaA__AEG65805

SEQ ID NO: 52720 - RNA, 1410 nt, Artificial Sequence
  derived and/or modified CDS sequence (wt) from neuraminidase__InfluenzaA__AEG65816
augaauccaaaucaaaagauaauaacgauuggcucuguuucucucaccauuuccacaauaugcuucuucaugcaaauugccaucuugauaacuacuguaacauugcauuucaagcaauaugaauucaacucccccccaaacaaccaagugaugcugugugaaccaacaauaauagaaagaaacauaacagagauaguguaucugaccaacaccaccauagagaaggaaauaugccccaaacuagcagaauacagaaauuggucaaagccgcaaugugacauuacaggauuugcaccuuuuucuaaggacaauucgauuaggcuuuccgcugguggggacaucugggugacaagagaaccuuaugugucaugcgauccugacaaguguuaucaauuugcccuuggacagggaacaacacuaaacaacgugcauucaaauaacacaguacgugauaggaccccuuaucggacccuauugaugaaugaguuagguguuccuuuucaucuggggaccaagcaagugugcauagcaugguccagcucaaguugucacgauggaaaagcauggcugcauguuuguauaacgggggaugauaaaaaugcaacugcuagcuucauuuacaaugggaggcuuguagauaguguuguuucaugguccaaagaaauccucaggacccaggagucagaaugcguuuguaucaauggaacuuguacaguaguaaugacugaugggagugcuucaggagaagcugauacuaaaauacuauucauugaggaggggaaaaucguucauacuagcacauugucaggaagugcucagcaugucgaggagugcucuugcuauccucgauauccuggugucagaugugucugcagagacaacuggaaaggcuccaauaggcccaucguagauauaaacauaaaggaucauagcauuguuuccaguuauguguguucaggacuuguuggagacacacccagaaaaaacgacagcuccagcaguagccauuguuuggauccuaacaaugaagaagguggucauggagugaaaggcugggccuuugaugauggaaaugacguguggaugggaagaacgaucaacgagacgucacguuuaggguaugaaaccuucaaagucauugaaggcugguccaacccuaaguccaaauugcagauaaauaggcaagucauaguugacagagguaauagguccgguuauucugguauuuucucuguugaaggcaaaagcugcaucaaucggugcuuuuauguggaguugauuaggggaagaaaagaggaaacugaagucuuguggaccucaaacaguauuguuguguuuuguggcaccucagguacauauggaacaggcucauggccugauggggcggaccucaaucucaugccuauauaa

SEQ ID NO: 52721 - RNA, 1410 nt, Artificial Sequence
  derived and/or modified CDS sequence (wt) from neuraminidase__InfluenzaA__AEG79808
augaauccaaaccaaaagauaauaaccauugguucggucuguaugacaauuggaauggcuaacuuaauauuacaaauuggaaacauaaucucaauauggauuagccacucaauucaacuugggaaucaaaaucagauugaaacaugcaaucaaagcgucauuacuuaugaaaacaacacuuggguaaaucagacauauguuaacaucagcaacaccaacuuugcugcuggacagucagugguuuccgugaaauuagcgggcaauuccucucucugcccuguuaguggaugggcuauauacaguaaagacaacaguauaagaaucgguuccaagggggauguguuugucauaagggaaccauucauaucaugcucccccuuggaaugcagaaccuucuucuugacucaaggggccuugcuaaaugacaaacauuccaauggaaccauuaaagauaggagcccauaucgaacccuaaugagcuguccuauuggugaaguucccucuccauacaacucaagauuugagucagucgcuuggucagcaagugcuugucaugauggcaucaauuggcuaacaauuggaauuucuggcccagacaauggggcaguggcuguguuaaaguacaacggcauaauaacagacacuaucaagaguuggagaaacaauauauugagaacacaagagucugaaugugcauguguaaaugguucuugcuuuaccauaaugaccgauggaccaagugauggacaggccucauacaagaucuucagaauagaaaagggaaagauagucaaaucagucgaaaugaaugccccuaauuaucacuaugaggaaugcuccuguuauccugauucuagugaaaucacaugugugugcagggauaacuggcauggcucgaaucgaccgugggugucuuucaaccagaaucuggaauaucagauaggauacauaugcagugggauuuucggagacaauccacgcccuaaugauaagacaggcaguugugguccaguaucgucuaauggagcaaauggaguaaaaggauuuucauucaaauacggcaaugguguuuggauagggagaacuaaaagcauuaguucaagaaaagguuuugagaugauuugggauccaaacggauggacugggacagacaauaacuucucaauaaagcaagauaucguaggaauaaaugaguggucaggauauagcgggaguuuuguucagcauccagaacuaacagggcuggacuguauaagaccuugcuucuggguugaacuaaucagagggcgacccaaagagaacacaauauggacuagcgggagcagcauauccuuuugugguguaaacagugacacuguggguuggucuuggccagacggugcugaguugccauuuaccauugacaaguaa

SEQ ID NO: 52722 - RNA, 1410 nt, Artificial Sequence
  derived and/or modified CDS sequence (wt) from neuraminidase__InfluenzaA__AEG79814
augaauccaaaccaaaagauaauaaccauugguucggucuguaugacaauuggaauggcuaacuuaauauuacaaauuggaaacauaaucucaauauggauuagccacucaauucaacuugggaaucaaaaucagauugaaacaugcaaucaaagcgucauuacuuaugaaaacaacacuuggguaaaucagacauauguuaacaucagcaacaccaacuuugcugcuggacagucagugguuuccgugaaauuagcgggcaauuccucucucugcccuguuaguggaugggcuauauacaguaaagacaacaguauaagaaucgguuccaagggggauguguuugucauaagggaaccauucauaucaugcucccccuuggaaugcagaaccuucuucuugacucaaggggccuugcuaaaugacaaacauuccaauggaaccauuaaagacaggagcccauaucgaacccuaaugagcuguccuauuggugaaguucccucuccauacaacucaagauuugagucagucgcuuggucagcaagugcuugucaugauggcaucaauuggcuaacaauuggaauuucuggcccagacaauggggcaguggcuguguuaaaguacaacggcauaauaacagacacuaucaagaguuggagaaacaauauauugagaacacaagagucugaaugugcauguguaaaugguucuugcuuuaccauaaugaccgauggaccaagugauggacaggccucauacaagaucuucagaauagaaaagggaaagauagucaaaucagucgaaaugaaugccccuaauuaucacuaugaggaaugcuccuguuauccugauucuagugaaaucacauguguaugcagggauaacuggcauggcucgaaucgaccgugggugucuuucaaccagaaucuggaauaucagauaggauacauaugcagugggauuuucggagacaauccacgcccuaaugauaagacaggcaguugugguccaguaucgucuaauggagcaaauggaguaaaaggauuuucauucaaauacggcaaugguguuuggauagggagaacuaaaagcauuaguucaagaaaagguuuugaaaugauuugggauccaaacggauggacugggacagacaauaacuucucaauaaagcaagauaucguaggaauaaaugaguggucaggauauagcgggaguuuuguucagcauccagaacuaacagggcuggauuguauaagaccuugcuucuggguugaacuaaucagagggcgacccaaagagaacacaaucuggacuagcgggagcagcauauccuuuugugguguaaacagugacacuguggguuggucuuggccagacggugcugaguugccauuuaccauugacaaguaa

SEQ ID NO: 52723 - RNA, 1410 nt, Artificial Sequence
  derived and/or modified CDS sequence (wt) from neuraminidase__InfluenzaA__AEG79826
augaauccaaaccaaaagauaauaaccauuaguucggucuguaugacaauuggaauggcuaacuuaauauuacaaauuggaaacauaaucucaauauggauuagccacucaauucaacuugggaaucaaaaucagauugaaacaugcaaucaaagcgucauuacuuaugaaaacaacacuuggguaaaucagacauauguuaacaucagcaacaccaacuuugcugcuggacagucagugguuuccgugaaauuagcgggcaauuccucucucugcccuguuaguggaugggcuauauacaguaaagacaacaguauaagaaucgguuccaagggggauguguuugucauaagggaaccauucauaucaugcucccccuuggaaugcagaaccuucuucuugacucaaggggccuugcuaaaugacaaacauuccaauggaaccauuaaagacaggagcccauaucgaacccuaaugagcuguccuauuggugaaguucccucuccauacaacucaagauuugagucagucgcuuggucagcaagugcuugucaugauggcaucaauuggcuaacaauuggaauuucuggcccagacaauggggcaguggcuguguuaaaguacaacggcauaauaacagacacuaucaagaguuggagaaacaauauauugagaacacaagagucagaaugugcauguguaaaugguucuugcuuuaccauaaugaccgauggaccaagugauggacaggccucauacaagaucuucagaauagaaaagggaaagauagucaaaucagucgaaaugaaugccccuaauuaucacuaugaggaaugcuccuguuauccugauucuagugaaaucacaugugugugcagggauaacuggcauggcucgaaucgaccgugggugucuuucaaccagaaucuggaauaucagauaggauacauaugcagugggauuuucggagacaauccacgcccuaaugauaagacaggcaguugugguccaguaucgucuaauggagcaaauggaguaaaaggauuuucauucaaauacggcaaugguguuuggauagggagaacuaaaagcauuaguucaagaaaagguuuugaaaugauuugggauccaaacggauggacugggacagacaauaacuucucaauaaagcaagauaucguaggaauaaaugaguggucaggauauagcgggaguuuuguucagcauccagaacuaacagggcuggacuguauaagaccuugcuucuggguugaacuaaucagagggcgacccaaagagaacacaaucuggacuagcgggagcagcauauccuuuugugguguaaacagugacacuauggguuggucuuggccagacggugcugaguugccauuuaccauugacaaguaa

SEQ ID NO: 52724 - RNA, 1410 nt, Artificial Sequence
  derived and/or modified CDS sequence (wt) from neuraminidase__InfluenzaA__AEG79830
augaauccaaaccaaaagauaauaaccauuaguucggucuguaugacaauuggaauggcuaacuuaauauuacaaauuggaaacauaaucucaauauggauuagccacucaauucaacuugggaaucaaaaucagauugaaacaugcaaucaaagcgucauuacuuaugaaaacaacacuuggguaaaucagacauauguuaacaucagcaacaccaacuuugcugcuggacagucagugguuuccgugaaauuagcgggcaauuccucucucugcccuguuaguggaugggcuauauacaguaaagacaacaguauaagaaucgguuccaagggggauguguuugucauaagggaaccauucauaucaugcucccccuuggaaugcagaaccuucuucuugacucaaggggccuugcuaaaugacaaacauuccaauggaaccauuaaagacaggagcccauaucgaacccuaaugagcuguccuauuggugaaguucccucuccauacaacucaagauuugagucagucgcuuggucagcaagugcuugucaugauggcaucaauuggcuaacaauuggaauuucuggcccagacaauggggcaguggcuguguuaaaguacaacggcauaauaacagacacuaucaagaguuggagaaacaauauauugagaacacaagagucugaaugugcauguguaaaugguucuugcuuuacuguaaugaccgauggaccaagugauggacaggccucauacaagaucuucagaauagaaaagggaaagauagucaaaucagucgaaaugaaugccccuaauuaucacuaugaggaaugcuccuguuauccugauucuagugaaaucacaugugugugcagggauaacuggcauggcucgaaucgaccgugggugucuuucaaccagaaucuggaauaucagauaggauacauaugcagugggauuuucggagacaauccacgcccuaaugauaagacaggcaguugugguccaguaucgucuaauggagcaaauggaguaaaaggauuuucauucaaauacggcaaugguguuuggauagggagaacuaaaagcauuaguucaagaaaagguuuugagaugauuugggauccaaacggauggacugggacagacaauaacuucucaauaaagcaagauaucguaggaauaaaugaguggucaggauauagcgggaguuuuguucagcauccagaacuaacagggcuggacuguauaagaccuugcuucuggguugaacuaaucagagggcgacccaaagagaacacaaucuggacuagcgggagcagcauauccuuuugugguguaaacagugacacuguggguuggucuuggccagacggugcugaguugccauuuaccauugacaaguaa

SEQ ID NO: 52725 - RNA, 1410 nt, Artificial Sequence
  derived and/or modified CDS sequence (wt) from neuraminidase__InfluenzaA__AEG79836
augaauccaaaccaaaagauaauaaccauugguucggucuguaugacaauuggaauggcuaacuuaauauuacaaauuggaaacauaaucucaauauggauuagccacucaauucaacuugggaaucaaagucagauugaaacaugcaaucaaagcgucauuacuuaugaaaacaacacuuggguaaaucagacauauguuaacaucagcaacaccaacuuugcugcuggacagucagugguuuccgugaaauuagcgggcaauuccucucucugcccuguuaguggaugggcuauauacaguaaagacaacaguauaagaaucgguuccaagggggauguguuugucauaagggaaccauucauaucaugcucccccuuggaaugcagaaccuucuucuugacucaaggggccuugcuaaaugacaaacauuccaauggaaccauuaaagacaggagcccauaucgaacccuaaugagcuguccuauuggugaaguucccucuccauacaacucaagauuugagucagucgcuuggucagcaagugcuugucaugauggcaucaauuggcuaacaauuggaauuucuggcccagacaauggggcaguggcugugcuaaaguacaacggcauaauaacagacacuaucaagaguuggagaaacaauauauugagaacacaagagucugaaugugcauguguaaaugguucuugcuuuaccauaaugaccgauggaccaagugauggacaggccucauacaagaucuucagaauagaaaagggaaagauagucaaaucagucgaaaugaaugccccuaauuaucacuaugaggaaugcuccuguuauccugauucuagugaaaucacaugugugugcagggauaacuggcauggcucgaaucgaccgugggugucuuucaaccagaaucuggaauaucagauaggauacauaugcagugggauuuucggagacaauccacgcccuaaugauaagacaggcaguugugguccaguaucgucuaauggagcaaauggaguaaaaggauuuucauucaaauacggcaaugguguuuggauagggagaacuaaaagcauuaguucaagaaaagguuuugagaugauuugggauccaaacggauggacugggacagacaauaacuucucaauaaagcaagauaucguaggaauaaaugaguggucaggauauagcgggaguuuuguucagcauccagaacuaacagggcuggauuguauaagaccuugcuucuggguugaacuaaucagagggcgacccaaagagaacacaaucuggacuagcgggagcagcauauccuuuugugguguaaacagugacacuguggguuggucuuggccagacggugcugaguugccauuuaccauugacaaguaa

SEQ ID NO: 52726 - RNA, 1410 nt, Artificial Sequence
  derived and/or modified CDS sequence (wt) from neuraminidase__InfluenzaA__AEH59356
augaauccaaaccaaaagauaauaaccauugguucggucuguaugacaauuggaauggcuaacuuaauauuacaaauuggaaacauaaucucaauauggauuagccacucaauucaacuugggaaucaaaaucagauugaaacaugcaaucaaagcgucauuacuuaugaaaacaacacuuggguaaaucagacauauguuaacaucagcaacaccaacuuugcugcuggacagucagugguuucugugaaauuagcgggcaauuccucucucugcccuguuaguggaugggcuauauacaguaaagacaacaguauaagaaucgguuccaagggggauguguuugucauaagggaaccauucauaucaugcucccccuuggaaugcagaaccuucuucuugacucaagggaccuugcuaaaugacaaacauuccaauggaaccauuaaagacaggagcccauaucgaacccuaaugagcuguccuauuggugaaguucccucuccauacaacucaagauuugagucagucgcuuggucagcaagugcuugucaugauggcaucaauuggcuaacaauuggaauuucuggcccagacaauggggcaguggcuguguuaaaguacaacggcauaauaacagacacuaucaagaguuggagaaacaauauauugagaacacaagagucugaaugugcauguguaaaugguucuugcuuuaccauaaugaccgauggaccaagugauggacaggccucauacaagaucuucagaauagaaaagggaaagauagucaaaucagucgaaaugaaugccccuaauuauuacuaugaggaaugcuccuguuauccugauucuagugaaaucacaugugugugcagggauaacuggcauggcucgaaucgaccgugggugucuuucaaucagaaucuggaauaucagauaggauacauaugcagugggauuuucggagacaauccacgcccuaaugauaagacaggcaguugugguccaguaucgucuaauggagcaaauggaguaaaaggauuuucauucaaauacggcaaugguguuuggauagggagaacuaaaagcauuaguucaagaaaagguuuugagaugauuugggauccaaacggauggacugggacagacaauaacuucucaauaaagcaagauaucguaggaauaaaugaguggucaggauauagcgggaguuuuguucagcauccagaacuaacagggcuggauuguauaagaccuugcuucuggguugaacuaaucagagggcgacccaaagagaacacagucuggacuagcgggagcagcauauccuuuugugguguaaacagugacacuguggguuggucuuggccagacggugcugaguugccauuuaccauugacaaguaa

SEQ ID NO: 52727 - RNA, 1410 nt, Artificial Sequence
  derived and/or modified CDS sequence (wt) from neuraminidase__InfluenzaA__AEH59360
augaauccaaaccaaaagauaauaaccauugguucggucuguaugacaauuggaauggcuaacuuaauauuacaaauuggaaacauaaucucaauauggauuagccacucaauucaacuugggaaucaaaaucagauugaaacaugcaaucaaagcgucauuacuuaugaaaacaacacuuggguaaaucagacauauguuaacaucagcaacaccaacuuugcugcuggacagucagugguuuccgugaaauuagcgggcaauuccucucucugcccuguuaguggaugggcuauauacaguaaagacaacaguauaagaaucgguuccaagggggauguguuugucauaagggaaccauucauaucaugcucccccuuggaaugcagaaccuucuucuugacucaaggggccuugcuaaaugacaaacauuccaauggaaccauuaaagacaggagcccauaucgaacccuaaugagcuguccuauuggugaaguucccucuccauacaacucaagauuugagucagucgcuuggucagcaagugcuugucaugauggcaucaauuggcuaacaauuggaauuucuggcccagacaauggggcaguggcuguguuaaaguacaacggcauaauaacagacacuaucaagaguuggagaaacaauauauugagaacacaagagucugaaugugcauguguaaaugguucuugcuuuaccauaaugaccgauggaccaagugauggacaggccucauacaagaucuucagaauagaaaagggaaagauagucaaaucagucgaaaugaaugccccuaauuaucacuaugaggaaugcuccuguuauccugauucuagugaaaucacaugugugugcagggauaacuggcauggcucgaaucgaccgugggugucuuucaaccagaaucuggaauaucagauaggauacauaugcagugggauuuucggagacaauccacgcccuaaugauaagacaggcaguugugguccaguaucgucuaauggagcaaauggaguaaaaggauuuucauucaaauacggcaaugguguuuggauagggagaacuaaaagcauuaguucaagaaaagguuuugagaugauuugggauccaaacggauggacugggacagacaauaacuucucaauaaagcaagauaucguaggaauaaaugaguggucaggauauagcgggaguuuuguucagcauccagaacuaacagggcuggauuguauaaggccuugcuucuggguugaacuaaucagagggcgacccaaagagaacacaaucuggacuagcgggagcagcauauccuuuugugguguaaacagugacacuguggguuggucuuggccagacggugcugaguugccauuuaccaucgacaaguaa

SEQ ID NO: 52728 - RNA, 1410 nt, Artificial Sequence
  derived and/or modified CDS sequence (wt) from neuraminidase__InfluenzaA__AEH59364
augaauccaaaccaaaagauaauaaccauugguucggucuguaugacaauuggaauggcuaacuuaauauuacaaauuggaaacauaaucucaauauggauuagccacucaauucaacuugggaaucaaaaucagauugaaacaugcaaucaaagcgucauuacuuaugaaaacaacacuuggguaaaucagacauauguuaacaucagcaacaccaacuuugcugcuggacagucagugguuuccgugaaauuagcgggcaauucuucucucugcccuguuaguggaugggcuauauacaguaaagacaacaguauaagaaucgguuccaagggggauguguuugucauaagggaaccauucauaucaugcuccccuuuggaaugcagaaccuucuucuugacucaaggggccuugcuaaaugacaaacauuccaauggaaccauuaaagacaggagcccauaucgaacccuaaugagcuguccuauuggugaaguucccucuccauacaacucaagauuugagucagucgcuuggucagcaagugcuugucaugauggcaucaauuggcuaacaauuggaauuucuggcccagacaauggggcaguggcuguguuaaaguacaacggcauaauaacagacacuaucaagaguuggagaaacaauauauugagaacacaagaguccgaaugugcauguguaaauggcucuugcuuuacugugaugaccgauggaccaaaugauggacaggccucauacaagaucuucagaauagaaaagggaaagauagucaaaucagucgaaaugaaugccccuaauuaucacuaugaggaaugcuccuguuauccugauucuagugaaaucacaugugugugcagggauaacuggcauggcgcgaaucgaccgugggugucuuucaaccagaaucuggaauaucagauaggauacauaugcagugggauuuucggagacaauccacgcccuaaugauaagacaggcaguugugguccaguaucgucuaauggagcaaauggaguaaaaggauuuucauucaaauacggcaaugguguuuggauagggagaacuaaaagcauuaguucaagaaacgguuuugagaugauuugggauccgaacggauggacugggacagacaauaacuucucaauaaagcaagauaucguaggaauaaaugaguggucaggauauagcgggaguuuuguucagcauccagaacuaacagggcuggauuguauaagaccuugcuucuggguugaacuaaucagagggcgacccaaagagaacacaaucuggacuagcgggagcagcauauccuuuugugguguaaacagugacacuguggguuggucuuggccagacggugcugaguugccauuuaccauugacaaguaa

SEQ ID NO: 52729 - RNA, 1410 nt, Artificial Sequence
  derived and/or modified CDS sequence (wt) from neuraminidase__InfluenzaA__AEH59366
augaauccaaaccaaaagauaauaaccauugguucggucuguaugacaauuggaauggcuaacuuaauauuacaaauuggaaacauaaucucaauauggauuagccacucaauucaacuugggaaucaaaaucagauugaaacaugcaaucaaagcgucauuacuuaugaaaacaacacuuggguaaaucagacauauguuaacaucagcaacaccaacuuugcugcuggacagucagugguuuccgugaaauuagcgggcaauuccucucucugcccuguuaguggaugggcuauauacaguaaagacaacaguauaagaaucgguuccaagggggauguguuugucauaagggaaccauucauaucaugcucccccuuggaaugcagaaccuucuucuugacucaaggggccuugcuaaaugacaaacauuccaauggaaccauuaaagacaggagcccauaucgaacccuaaugagcugucccauugguggaguucccucuccauacaacucaagauuugagucagucgcuuggucagcaagugcuugucaugauggcaucaauuggcuaacaauuggaauuucuggcccagacaauggggcaguggcuguguuaaaguacaacggcauaauaacagacacuaucaagaguuggagaaacaauauauugagaacacaagagucugaaugugcauguguaaaugguucuugcuuuaccauaaugaccgauggaccaagugauggacaggccucauacaagaucuucagaauagaaaagggaaagauagucaaaucagucgaaaugaaugccccuaauuaucacuaugaggaaugcuccuguuauccugauucuagugaaaucacaugugugugcagggauaacuggcauggcucgaaucgaccgugggugucuuucaaccagaaucuggaauaucagauaggauacauaugcagugggauuuucggagacaauccacgcccuaaugauaagacaggcaguugugguccaguaucgucuaauggagcaaauggaguaaaaggauuuucauucaaauacggcaaugguguuuggauagggagaacuaaaagcauuaguucaagaaaagguuuugagaugauuugggauccaaacggauggacugggacagacaauaacuucucaauaaagcaagauaucguaggaauaaaugaguggucaggauauagcgggaguuuuguucagcauccagaacuaacagggcuggacuguauaagaccuugcuucuggguugaacuaaucagagggcgacccaaagagaacacaaucuggacuagcgggagcagcauauccuuuugugguguaaacagugacacuguggguuggucuuggccagacggugcugaguugccauuuaccauugacaaguaa

SEQ ID NO: 52730 - RNA, 1410 nt, Artificial Sequence
  derived and/or modified CDS sequence (wt) from neuraminidase__InfluenzaA__AEH59368
augaauccaaaccaaaagauaauaaccauugguucggucuguaugacaauuggaauggcuaacuuaauauuacaaauuggaaacauaaucucaauauggauuagccacucaauucaacuugggaaucaaaaucagauugaaacaugcaaucaaagcgucauuacuuaugaaaacaacacuuggguaaaucagacauauguuaacaucagcaacaccaacuuugcugcuggacagucagugguuuccgugaaauuagcggguaauuccucucucugcccuguuaguggaugggcuauauacaguaaagacaacaguauaagaaucgguuccaagggggauguguuugucauaagggaaccauucauaucaugcucccccuuggaaugcagaaccuucuucuugacucaaggggccuugcuaaaugacaaacauuccaauggaaccauuaaagacaggagcccauaucgaacccuaaugagcugucccauuggugaaguucccucuccauacaacucaagauuugagucagucgcuuggucagcaagugcuugucaugauggcaucaacuggcuaacaauuggaauuucuggcccagacaauggggcaguggcuguguuaaaguacaacggcauaauaacagacacuaucaagaguuggagaaacaauauauugagaacacaagagucugaaugugcauguguaaaugguucuugcuuuaccauaaugaccgauggaccaagugauggacaggccucauacaagaucuucagaauagaaaagggaaagauagucaaaucagucgaaaugaaugccccuaauuaucacuaugaggaaugcuccuguuauccugauucuagugaaaucacaugugugugcagggauaacuggcauggcucgaaucgaccgugggugucuuucaaccagaaucuggaauaucagauaggauacauaugcagugggauuuucggagacaauccacgcccuaaugauaagacaggcaguugugguccaguaucgucuaauggagcaaauggaguaaaaggauuuucauucaaauacggcaaugguguuuggauagggagaacuaaaagcauuaguucaagaaaagguuuugagaugauuugggauccaaacggauggacugggacagacaauaacuucucaauaaagcaagauaucguaggaauaaaugaguggucaggauauagcgggaguuuuguucagcauccagaacuaacagggcuggacuguauaagaccuugcuucuggguugaacuaaucagagggcgacccaaagagaacacaaucuggacuagcgggagcagcauauccuuuugugguguaaacagugacacuguggguuggucuuggccagacggugcugaguugccauuuaccauugacaaguaa

SEQ ID NO: 52731 - RNA, 1410 nt, Artificial Sequence
  derived and/or modified CDS sequence (wt) from neuraminidase__InfluenzaA__AEH59370
augaauccaaaccaaaagauaauaaccauugguucggucuguaugacaauuggaauggcuaacuuaauauuacaaauuggaaacauaaucucaauauggauuagccacucaauucaacuugggaaucaaagucagauugaaacaugcaaucaaagcgucauuacuuaugaaaacaacacuuggguaaaucagacauauguuaacaucagcaacaccaacuuugcugcuggacagucagugguuuccgugaaauuagcgggcaauuccucucucugcccuguuaguggaugggcuauauacaguaaagacaacaguauaagaaucgguuccaagggggauguguuugucauaagggaaccauucauaucaugcucccccuuggaaugcagaaccuucuucuugacucaaggggcccugcuaaaugacaaacauuccaauggaaccauuaaagacaggagcccauaucgaaccuuaaugagcuguccuauuggugaaguucccucuccauacaacucaagauuugagucagucgcuuggucagcaagugccugucaugauggcaucaauuggcuaacaauuggaaucucuggcccagacaauggggcaguggcuguguuaaaguacaacggcauaauaacagacacuaucaagaguuggagaaacaauauauugagaacacaagagucugaaugugcauguguaaaugguucuugcuuuaccauaaugaccgauggaccgagugauggacaggccucauacaagaucuucagaauagaaaagggaaagauagucaaaucagucgaaaugaaugccccuaauuaucacuaugaggaaugcuccuguuauccugauucuagugaaaucacaugugugugcagggauaacuggcauggcucgaaucgaccgugggugucuuucaaccagaaucuggaauaucagauaggauacauaugcagugggauuuucggagacaauccacgcccuaaugauaagacaggcaguugugguccaguaucgucuaauggagcaaauggaguaaaaggauuuucauucaaauacggcaaugguguuuggauagggagaacuaaaagcauuaguucaagaaaagguuuugagaugauuugggauccaaacggauggacugggacagacaauaacuucucaauaaagcaagauaucguaggaauaaaugaguggucaggauauagcgggaguuuuguucagcauccagaacuaacagggcuggauuguauaagaccuugcuucuggguugaacuaaucagagggcgacccaaagagaacacaaucuggacuagcgggagcagcauauccuuuugugguguaaacagugacacuguggguuggucuuggccagacggugcugaguugccauuuaccauugacaaguaa

SEQ ID NO: 52732 - RNA, 1410 nt, Artificial Sequence
  derived and/or modified CDS sequence (wt) from neuraminidase__InfluenzaA__AEH59372
augaauccaaaccaaaagauaauaaccauugguucggucuguaugacaauuggaauggcuaacuuaauauuacaaauuggaaacauaaucucaauauggauuagccacucaauucaacuugggaaucaaaaucagauugaaacaugcaaucaaagcgucauuacuuaugaaaacaacacuuggguaaaucagacauauguuaacaucagcaacaccaacuuugcugcuggacagucagugguuuccgugaaauuagcgggcaauucuucucucugcccuguuaguggaugggcuauauacaguaaagacaacaguauaagaaucgguuccaagggggauguguuugucauaagggaaccauucauaucaugcuccccuuuggaaugcagaaccuucuucuugacucaaggggccuugcuaaaugacaaacauuccaauggaaccauuaaagacaggagcccauaucgaacccuaaugagcugcccuauuggugaaguucccucuccauacaacucaagauuugagucagucgcuuggucagcaagugcuugucaugauggcaucaauuggcuaacaauuggaauuucuggcccagacaauggggcaguggcuguguuaaaguacaacggcauaauaacagacacuaucaagaguuggagaaacaauauauugagaacacaagaguccgaaugugcauguguaaauggcucuugcuuuacugugaugaccgauggaccaaaugauggacaggccucauacaagaucuucagaauagaaaagggaaagauagucaaaucagucgaaaugaaugccccuaauuaucacuaugaggaaugcuccuguuauccugauucuagugaaaucacaugugugugcagggauaacuggcauggcgcgaaucgaccgugggugucuuucaaccagaaucuggaauaucagauaggauacauaugcagugggauuuucggagacaauccacgcccuaaugauaagacaggcaguugugguccaguaucgucuaauggagcaaauggaguaaaaggauuuucauucaaauacggcaaugguguuuggauagggagaacuaaaagcauuaguucaagaaacgguuuugagaugauuugggauccgaacggauggacugggacagacaauaacuucucaauaaagcaagauaucguaggaauaaaugaguggucaggauauagcgggaguuuuguucagcauccagaacuaacagggcuggauuguauaagaccuugcuucuggguugaacuaaucagagggcgacccaaagagaacacaaucuggacuagcgggagcagcauauccuuuugugguguaaacagugacacuguggguuggucuuggccagacggugcugaguugccauuuaccauugacaaguaa

SEQ ID NO: 52733 - RNA, 1410 nt, Artificial Sequence; identical to SEQ ID NO: 52728
  derived and/or modified CDS sequence (wt) from neuraminidase__InfluenzaA__AEH59376

SEQ ID NO: 52734 - RNA, 1410 nt, Artificial Sequence
  derived and/or modified CDS sequence (wt) from neuraminidase__InfluenzaA__AEH59378
augaauccaaaccaaaagauaauaaccauugguucggucuguaugacaauuggaauggcuaacuuaauauuacaaauuggaaacauaaucucaauauggauuagccacucaauucaacuugggaaucaaagucagauugaaacaugcaaucaaagcgucauuacuuaugaaaacaacacuuggguaaaucagacauauguuaacaucagcaacaccaacuuugcugcuggacagucagugguuuccgugaaauuagcgggcaauuccucucucugcccuguuaguggaugggcuauauacaguaaagacaacaguauaagaaucgguuccaagggggauguguuugucauaagggaaccauucauaucaugcucccccuuggaaugcagaaccuucuucuugacucaaggggccuugcuaaaugacaaacauuccaauggaaccauuaaagacaggagcccauaucgaacccuaaugagcuguccuauuggugaaguucccucuccauacaacucaagauuugagucagucgcuuggucagcaagugcuugucaugauggcaucaauuggcuaacaauuggaauuucuggcccagacaauggggcaguggcuguguuaaaguacaacggcauaauaacagacacuaucaagaguuggagaaacaauauauugagaacacaagagucugaaugugcauguguaaaugguucuugcuuuaccauaaugaccgauggaccaagugauggacaggccucauacaagaucuucagaauagaaaagggaaagauagucaaaucagucgaaaugaaugccccuaauuaucacuaugaggaaugcuccuguuauccagauucuagugaaaucacaugugugugcagggauaacuggcauggcucgaaucgaccgugggugucuuucaaccagaaucuggaauaucagauaggauacauaugcagugggauuuucggagacaauccacgcccuaaugauaagacaggcaguugugguccaguaucgucuaauggagcaaauggaguaaaaggauuuucauucaaauacggcaauggcguuuggauagggagaacuaaaagcauuaguucaagaaaagguuuugagaugauuugggauccaaacggauggacugggacagacaauaacuucucaauaaagcaagauaucguaggaauaaaugaguggucaggauauagcgggaguuuuguucagcauccagaacuaacagggcuggauuguauaagaccuugcuucuggguugaacuaaucagagggcgacccaaagagaacacaaucuggacuagcgggagcagcauauccuuuugugguguaaacagugacacuguggguuggucuuggccagacggugcugaguugccauuuaccauugacaaguaa

SEQ ID NO: 52735 - RNA, 1410 nt, Artificial Sequence; identical to SEQ ID NO: 52728
  derived and/or modified CDS sequence (wt) from neuraminidase__InfluenzaA__AEH59382

SEQ ID NO: 52736 - RNA, 1410 nt, Artificial Sequence
  derived and/or modified CDS sequence (wt) from neuraminidase__InfluenzaA__AEH59384
augaauccaaaccaaaagauaauaaccauugguucagucuguaugacaauuggaauggcuaacuuaauauuacaaauuggaaacauaaucucaauauggauuagccacucaauucaacuugggaaucaaagucagauugaaacaugcaaucaaagcgucauuacuuaugaaaacaacacuuggguaaaucagacauauguuaacaucagcaacaccaacuuugcugcuggacagucagugguuuccgugaaauuagcgggcaauuccucucucugcccuguuaguggaugggcuauauacaguaaagacaacaguauaagaaucgguuccaagggggauguguuugucauaagggaaccauucauaucaugcucccccuuggaaugcagaaccuucuucuugacucaaggggccuugcuaaaugacaaacauuccaauggaaccauuaaagacaggagcccauaucgaaccuuaaugagcuguccuauuggugaaguucccucuccauacaacucaagauuugagucagucgcuuggucagcaagugcuugucaugauggcaucaauuggcuaacaauuggaauuucuggcccagacaauggggcaguggcuguguuaaaguacaacggcauaauaacagacacuaucaagaguuggagaaacaauauauugagaacacaagagucugaaugugcauguguaaaugguucuugcuuuaccauaaugaccgauggaccaagugauggacaggccucauacaagaucuucagaauagaaaagggaaggauagucaaaucagucgaaaugaaugccccuaauuaucacuaugaggaaugcuccuguuauccugauucuagugaaaucacaugugugugcagggauaacuggcauggcucgaaucgaccgugggugucuuucaaccagaaucuggaauaucagauaggauacauaugcagugggauuuucggagacaauccacgcccuaaugauaagacaggcaguugugguccaguaucgucuaauggagcaaauggaguaaaaggauuuucauucaaauacggcaaugguguuuggauagggagaacuaaaagcauuaguucaagaaaagguuuugagaugauuugggauccaaacggauggacugggacagacaauaacuucucaauaaagcaagauaucguaggaauaaaugaguggucaggauauagcggaaguuuuguucagcauccagaacuaacagggcuggauuguauaagaccuugcuucuggguugaacuaaucagagggcgacccaaagagaacacaaucuggacuagcggaagcagcauauccuuuugugguguaaacagugacacuguggguuggucuuggccagacggugcugaguugccauuuaccauugacaaguaa

SEQ ID NO: 52737 - RNA, 1410 nt, Artificial Sequence
  derived and/or modified CDS sequence (wt) from neuraminidase__InfluenzaA__AEH59386
augaauccaaaccaaaagauaauaaccauugguucggucuguaugacaauuggaauggcuaacuuaauauuacaaauuggaaacauaaucucaauauggauuagccacucaauucaaauugggaaucaaaaucagauugaaacaugcaaucaaagcgucauuacuuaugaaaacaacacuuggguaaaucagacauauguuaacaucagcaacaccaacuuugcugcuggacagucagugguuuccgugaaauuagcgggcaauuccucucucugcccugucaguggaugggcuauauacaguaaagacaacaguauaagaaucgguuccaagggggauguguuugucauaagggaaccauucauaucaugcucccccuuggaaugcagaaccuucuucuugacucaaggggccuugcuaaaugacaaacauuccaauggaaccauuaaagacaggagcccauaucgaacccuaaugagcuguccuauuggugaaguucccucuccauacaacucaagauuugagucagucgcuuggucagcaagugcuugucaugauggcaucaauuggcuaacaauuggaauuucuggcccagacaauggggcaguggcuguguuaaaguacaacggcauaauaacagacacuaucaagaguuggagaaacaauauauugagaacacaagaguccgaaugugcauguguaaaugguucuugcuuuaccauaaugaccgauggaccaagugauggacaggccucauacaagaucuucagaauagaaaagggaaagauagucaaaucagucgaaaugaaugccccuaauuaucacuaugaggaaugcuccuguuauccugauucuagugaaaucacaugugugugcagggauaacuggcauggcucgaaucgaccgugggugucuuucaaccagaaucuggaauaucagauaggauacauaugcagugggauuuucggagacaauccacgcccuaaugauaagacaggcaguugugguccaguaucgucuaauggagcaaauggaguaaaaggauuuucauucaaauacggcaaugguguuuggauagggagaacuaaaagcauuaguucaagaaaagguuuugagaugauuugggauccaaacggauggacugggacagacaauaacuucucaauaaagcaagauaucguaggaauaaaugaguggucaggauauagcgggaguuuuguucagcauccagaacuaacagggcuggauuguauaagaccuugcuucuggguugaacuaaucagagggcgacccaaagagaacacaaucuggacuagcgggagcagcauauccuuuugugguguaaacagugacacuguggguuggucuuggccagacggugcugaguugccauuuaccauugacaaguaa

SEQ ID NO: 52738 - RNA, 1410 nt, Artificial Sequence; identical to SEQ ID NO: 52728
  derived and/or modified CDS sequence (wt) from neuraminidase__InfluenzaA__AEH59388

SEQ ID NO: 52739 - RNA, 1410 nt, Artificial Sequence
  derived and/or modified CDS sequence (wt) from neuraminidase__InfluenzaA__AEH59390
augaauccaaaccaaaagauaauaaccauugguucggucuguaugacaauuggaauggcuaacuuaauauuacaaauuggaaacauaaucucaauauggauuagccacucaauucaacuugggaaucaaagucagauugaaacaugcaaucaaagcgucauuacuuaugaaaacaacacuuggguaaaucagacauauguuaacaucagcaacaccaacuuugcugcuggacagucagugguuuccgugaaauuagcgggcaauuccucucucugcccuguuaguggaugggcuauauacaguaaagacaacaguauaagaaucgguuccaagggggauguguuugucauaagggaaccauucauaucaugcucccccuuggaaugcagaaccuucuucuugacucaaggggcccugcuaaaugacaaacauuccaauggaaccauuaaagacaggagcccauaucgaaccuuaaugagcuguccuauuggugaaguucccucuccauacaacucaagauuugagucagucgcuuggucagcaagugccugucaugauggcaucaauuggcuaacaauuggaauuucuggcccagacaauggggcaguggcuguguuaaaguacaacggcauaauaacagacacuaucaagaguuggagaaacaauauauugagaacacaagagucugaaugugcauguguaaaugguucuugcuuuaccauaaugaccgauggaccgagugauggacaggccucauacaagaucuucagaauagaaaagggaaagauagucaaaucagucgaaaugaaugccccuaauuaucacuaugaggaaugcuccuguuauccugauucuagugaaaucacaugugugugcagggauaacuggcauggcucgaaucgaccgugggugucuuucaaccagaaucuggaauaucagauaggauacauaugcagugggauuuucggagacaauccacgcccuaaugauaagacaggcaguugugguccaguaucgucuaauggagcaaauggaguaaaaggauuuucauucaaauacggcaaugguguuuggauagggagaacuaaaagcauuaguucaagaaaagguuuugagaugauuugggauccaaacggauggacugggacagacaauaacuucucaauaaagcaagauaucguaggacuaaaugaguggucaggauauagcgggaguuuuguucagcauccagaacuaacagggcuggauuguauaagaccuugcuucuggguugaacuaaucagagggcuacccaaagagaacacaaucuggacuagcgggagcagcauauccuuuugugguguaaacagugacacuguggguuggucuuggccagacggugcugaguugccauuuaccauugacaaguaa

SEQ ID NO: 52740 - RNA, 1410 nt, Artificial Sequence
  derived and/or modified CDS sequence (wt) from neuraminidase__InfluenzaA__AEH59392
augaauccaaaccaaaagauaauaaccauugguucggucuguaugacaauuggaauggcuaacuuaauauuacaaauuggaaacauaaucucaauauggauuagccacucaauucaacuugggaaucaaaaucagauugaaacaugcaaucaaagcgucauuacuuaugaaaacaacacuuggguaaaucagacauauguuaacaucagcaacaccaacuuugcugcuggacaaucagugguuuccgugaaauuagcgggcaauucuucucucugcccuguuaguggaugggcuauauacaguaaagacaacaguauaagaaucgguuccaagggggauguguuugucauaagggaaccauucauaucaugcuccccuuuggaaugcagaaccuucuucuugacucaaggggccuugcuaaaugacaaacauuccaauggaaccauuaaagacaggagcccauaucgaacccuaaugagcuguccuauuggugaaguucccucuccauacaacucaagauuugagucagucgcuuggucagcaagugcuugucaugauggcaucaauuggcuaacaauuggaauuucuggcccagacaauggggcaguggcuguguuaaaguacaacggcauaauaacagacacuaucaagaguuggagaaacaauauauugagaacacaagaguccgaaugugcauguguaaauggcucuugcuuuacugugaugaccgauggaccaaaugauggacaggccucauacaagaucuucagaauagaaaagggaaagauagucaaaucagucgaaaugaaugccccuaauuaucacuaugaggaaugcuccuguuauccugauucuagugaaaucacaugugugugcagggauaacuggcauggcgcgaaucgaccgugggugucuuucaaccagaaucuggaauaucagauaggauacauaugcagugggauuuucggggacaauccacgcccuaaugauaagacaggcaguugugguccaguaucgucuaauggagcaaauggaguaaaaggauuuucauucaaauacggcaaugguguuuggauagggagaacuaaaagcauuaguucaagaaacgguuuugagaugauuugggauccgaacggauggacugggacagacaauaacuucucaauaaagcaagauaucguaggaauaaaugaguggucaggauauagcgggaguuuuguucagcauccagaacuaacagggcuggauuguauaagaccuugcuucuggguugaacuaaucagagggcgacccaaagagaacacaaucuggacuagcgggagcagcauauccuuuugugguguaaacagugacacuguggguuggucuuggccagacggugcugaguugccauuuaccauugacaaguaa

SEQ ID NO: 52741 - RNA, 1410 nt, Artificial Sequence; identical to SEQ ID NO: 52728
  derived and/or modified CDS sequence (wt) from neuraminidase__InfluenzaA__AEH59396

SEQ ID NO: 52742 - RNA, 1410 nt, Artificial Sequence
  derived and/or modified CDS sequence (wt) from neuraminidase__InfluenzaA__AEH59398
augaauccaaaccaaaagauaauaaccauugguucggucuguaugacaauuggaguggcuaacuuaauauuacaaauuggaaacauaaucucaauauggauuagccacucaauucaacuugggaaucaaaaucagauugagacaugcaaucaaagcgucauuacuuaugaaaacaacacuuggguaaaucagacauauguuaacaucagcaacaccaacuuugcugcuggacagucagugguuuccgugaaauuagcgggcaauuccucucucugcccuguuaguggaugggcuauauacaguaaagacaacaguauaagaaucgguuccaagggggauguguuugucauaagggaaccauucauaucaugcucccccuuggaaugcagaaccuucuucuugacucaaggggccuugcuaaaugacaaacauuccaauggaaccauuaaagacaggagcccauaucgaacccuaaugagcuguccuauuggugaaguucccucuccauacaacucaagauuugagucagucgcuuggucagcaagugcuugucaugauggcaucaauuggcuaacaauuggaauuucuggcccagacaauggggcaguggcuguguuaaaguacaacggcauaauaacagacacuaucaagaguuggagaaacuauauauugagaacacaagagucugaaugugcauguguaaaugguucuugcuuuaccauaaugaccgauggaccaagugauggacaggccucauacaagaucuucagaauagaaaagggaaagguagucaaaucagucgaaaugaaugccccuaauuaucacuaugaggaaugcuccuguuauccugauucuagugaaaucacaugugugugcagggauaacuggcauggcucgaaucgaccgugggugucuuucaaccagaaucuggaauaucagauaggauacauaugcagugggauuuucggagacaauccacgcccuaaugauaagacaggcaguugugguccaguaucgucuaauggagcaaauggaguaaaaggauuuucauucaaauacggcaaugguguuuggauagggagaacuaaaagcauuaguucaagaaaagguuuugagaugauuugggauccaaacggauggacugggacagacaauaacuucucaauaaagcaagauaucauaggaauaaaugaguggucaggauauagcgggaguuuuguucagcauccagaacuaacagggcuggauuguauaagaccuugcuucuggguugaacuaaucagagggcgacccaaagagaacacaaucuggacuagcgggagcagcauauccuuuugugguguaaacagugacacuguggguuggucuuggccagacggugcugaguugccauuuaccauugacaaguaa

SEQ ID NO: 52743 - RNA, 1410 nt, Artificial Sequence
  derived and/or modified CDS sequence (wt) from neuraminidase__InfluenzaA__AEH59400
augaauccaaaccaaaagauaauaaccauugguucggucuguaugacaauuggaauggcuaacuuaauauuacaaauuggaaacauaaucucaauauggauuagccacucaauucaacuugggaaucaaagucagauugaaacaugcaaucaaagcgucauuacuuaugaaaacaacacuuggguaaaucagacauauguuaacaucagcaacaccaacuuugcugcuggacagucagugguuuccgugaaauuagcgggcaauuccucucucugcccuguuaguggaugggcuauauacaguaaagacaacaguauaagaaucgguuccaagggggauguguuugucauaagggaaccauucauaucaugcucccccuuggaaugcagaaccuucuucuugacucaaggggcccugcuaaaugacaaacauuccaauggaaccauuaaagacaggagcccauaucgaaccuuaaugagcuguccuauuggugaaguucccucuccauacaacucaagauuugagucagucgcuuggucagcaagugccugucaugauggcaucaauuggcuaacaauuggaauuucuggcccagacaauggggcaguggcuguguuaaaguacaacggcauaauaacagacacuaucaagaguuggagaaacaauauauugagaacacaagaguccgaaugugcauguguaaauggcucuugcuuuacugugaugaccgauggaccaaaugauggacaggccucauacaagaucuucagaauagaaaagggaaagauagucaaaucagucgaaaugaaugccccuaauuaucacuaugaggaaugcuccuguuauccugauucuagugaaaucacaugugugugcagggauaacuggcauggcgcgaaucgaccgugggugucuuucaaccagaaucuggaauaucagauaggauacauaugcagugggauuuucggagacaauccacgcccuaaugauaagacaggcaguugugguccaguaucgucuaauggagcaaauggaguaaaaggauuuucauucaaauacggcaaugguguuuggauagggagaacuaaaagcauuaguucaagaaacgguuuugagaugauuugggauccgaacggauggacugggacagacaauaacuucucaauaaagcaagauaucguaggaauaaaugaguggucaggauauagcgggaguuuuguucagcauccagaacuaacagggcuggauuguauaagaccuugcuucuggguugaacuaaucagagggcgacccaaagagaacacaaucuggacuagcgggagcagcauauccuuuugugguguaaacagugacacuguggguuggucuuggccagacggugcugaauugccauuuaccauugacaaguaa

SEQ ID NO: 52744 - RNA, 1410 nt, Artificial Sequence
  derived and/or modified CDS sequence (wt) from neuraminidase__InfluenzaA__AEH59402
augaauccaaaccaaaagauaauaaccauugguucggucuguaugacaauuggaauggcuaacuuaauauuacaaauuggaaacauaaucucaauauggauuagccacucaauucaacuugggaaucaaaaucagauugaaacaugcaaucaaagcgucauuacuuaugaaaacaacacuuggguaaaucagacauauguuaacaucagcaacaccaacuuugcugcuggacagucagugguuuccgugaaauuagcgggcaauucuucucucugcccuguuaguggaugggcuauauacaguaaagacaacaguauaagaaucgguuccaagggggauguguuugucauaagggaaccauucauaucaugcuccccuuuggaaugcagaaccuucuucuugacucaaggggccuugcuaaaugacaaacauuccaauggaaccauuaaagacaggagcccauaucgaacccuaaugagcuguccuauuggugaaguucccucuccauacaacucaagauuugagucagucgcuuggucagcaagugcuugucaugauggcaucaauuggcuaacaauuggaauuucuggcccagacaauggggcaguggcuguguuaaaguacaacggcauaauaacagacacuaucaagaguuggagaaacaauauauugagaacacaagaguccgaaugugcauguguaaauggcucuugcuuuacugugaugaccgauggaccaaaugauggacaggccucauacaagaucuucagaauagaaaagggaaagauagucaaaucagucgaaaugaaugccccuaauuaucacuaugaggaaugcuccuguuauccugauucuagugaaaucacaugugugugcagggauaacuggcauggcgcgaaucgaccgugggugucuuucaaccagaaucuggaauaucagauaggauacauaugcagugggauuuucggagacaauccacgcccuaaugauaagacaggcaguugugguccaguaucgucuaauggagcaaauggaguaaaaggauuuucauucaaauacggcaaugguguuuggauagggagaacuaaaagcauuaguucaagaaacgguuuugagaugauuugggauccgaacggauggacugagacagacaauaacuucucaauaaagcaagauaucguaggaauaaaugaguggucaggauauagcgggaguuuuguucaacauccagaacuaacagggcuggauuguauaagaccuugcuucuggguugaacuaaucagagggcgacccaaagagaacacaaucuggacuagcgggagcagcauauccuuuugugguguaaacagugacacuguggguuggucuuggccagacggugcugaguugccauuuaccauugacaaguaa

SEQ ID NO: 52745 - RNA, 1410 nt, Artificial Sequence
  derived and/or modified CDS sequence (wt) from neuraminidase__InfluenzaA__AEH59404
augaauccaaaccaaaagauaauaaccauugguucggccuguaugacaauuggaauggcuaacuuaauauuacaaauuggaaacauaaucucaauauggauuagccacucaauucaacuugggaaucaaagucagauugaaacaugcaaucaaagcgucauuacuuaugaaaacaacacuuggguaaaucagacauauguuaacaucagcaacaccaacuuugcugcuggacagccagugguuuccgugaaauuagcgggcaauuccucucucugcccuguuaguggaugggcuauauacaguaaagacaacaguauaagaaucgguuccaagggggauguguuugucauaagggaaccauucauaucaugcucccccuuggaaugcagaaccuucuucuugacucaaggggccuugcuaaaugacaaacauuccaauggaaccauuaaagacaggagcccauaucgaacccuaaugagcuguccuauuggugaaguucccucuccauacaacucaagauuugagucagucgcuuggucagcaagugcuugucaugauggcaucaauuggcuaacaauuggaauuucuggcccagacaauggggcaguggcuguguuaaaguacaacggcauaauaacagacacuaucaagaguuggagaaacaauauauugagaacacaagagucugaaugugcauguguaaaugguucuugcuuuaccauaaugaccgauggaccaagugauggacaggccucauacaagaucuucagaauagaaaagggaaagauagucaaaucagucgaaaugaaugccccuaauuaucacuaugaggaaugcuccuguuauccugauucuagugaaaucacaugugugugcagggauaacuggcauggcucgaaucgaccgugggugucuuucaaccagaaucuggaauaucagauaggauacauaugcagugggauuuucggagacaauccacgcccuaaugauaagacaggcaguugugguccaguaucgucuaauggagcaaauggaguaaaaggauuuucauucaaauacggcaaugguguuuggauagggagaacuaaaagcauuagcucaagaaaagguuuugagaugauuugggauccaaacggauggacugggacagacaauaacuucucaauaaagcaagauaucguaggaauaaaugaguggucaggauauagcgggaguuuuguucagcauccagaacuaacagggcuggauuguauaagaccuugcuucuggguugaacuaaucagagggcgacccaaagagaacacaaucuggacuagcgggagcagcauauccuuuugugguguaaacagugacacuguggguuggucuuggccagacggugcugaguugccauuuaccauugacaaguaa

SEQ ID NO: 52746 - RNA, 1410 nt, Artificial Sequence
  derived and/or modified CDS sequence (wt) from neuraminidase__InfluenzaA__AEH59406
augaauccaaaccaaaagauaauaaccauugguucggucuguaugacaauuggaauggcuaacuuaauauuacaaauuggaaacauaaucucaauauggauuagccacucaauucaacuugggaaucaaagucagauugaaacaugcaaucaaagcgucauuacuuaugaaaacaacacuuggguaaaucagacauauguuaacaucagcaacaccaacuuugcugcuggacagucagugguuuccgugaaauuagcgggcaauuccucucucugcccuguuaguggaugggcuauauacaguaaagacaacaguauaagaaucgguuccaagggggauguguuugucauaagggaaccauucauaucaugcucccccuuggaaugcagaaccuucuucuugacucaaggggccuugcuaaaugacaaacauuccaauggaaccauuaaagacaggagcccauaucgaacccuaaugagcuguccuauuggugaaguucccucuccauacaacucaagauuugagucagucgcuuggucagcaagugcuugucaugauggcaucaauuggcuaacaauuggaauuucuggcccagacaauggggcaguggcuguguuaaaguacaacggcauaauaacagacacuaucaagaguuggagaaacaauauauugaggacacaagagucugaaugugcauguguaaaugguucuugcuuuaccauaaugaccgauggaccaagugauggacaggccucauacaagaucuucagaauagaaaagggaaagauagucaaaucagucgaaaugaaugccccuacuuaucacuaugaggaaugcuccuguuauccugauucuagugaaaucacaugugugugcagggauaacuggcauggcucgaaucgaccgugggugucuuucaaccagaaucuggaauaucagauaggauacauaugcagugggauuuucggagacaauccacgcccuaaugauaagacaggcaguugugguccaguaucguuuaauggagcaaauggaguaaaaggauuuucauucaaauacggcaaugguguuuggauagggagaacuaaaagcauuaguucaagaaaagguuuugagaugauuugggauccaaacggauggacugggacagacaauaacuucucaauaaagcaagauaucguaggaauagaugaguggucaggauauagcgggaguuuuguucagcauccagaacuaacagggcuggauuguauaagaccuugcuucuggguugaacuaaucagagggcgacccaaagagaacacaaucuggacuagcgggagcagcauauccuuuugugguguaaacagugacacuguggguuggucuuggccagacggugcugaguugccauuuaccauugacaaguaa

SEQ ID NO: 52747 - RNA, 1410 nt, Artificial Sequence; identical to SEQ ID NO: 52606
  derived and/or modified CDS sequence (wt) from neuraminidase__InfluenzaA__AEH59408

SEQ ID NO: 52748 - RNA, 1410 nt, Artificial Sequence
  derived and/or modified CDS sequence (wt) from neuraminidase__InfluenzaA__AEH59412
augaauccaaaccaaaagauaauaaccauugguucggucuguaugacaauuggaauggcuaacuuaauauuacaaauuggaaacauaaucucaauauggauuagccacucaauucaacuugggaaucaaagucagauugaaacaugcaaucaaagcgucauuacuuaugaaaacaacacuuggguaaaucagacauauguuaacaucagcaacaccaacuuugcugcuggacagucagugguuuccgugaaauuagcgggcaauuccucucucugcccuguuaguggaugggcuauauacaguaaagacaacaguauaagaaucgguuccaagggggauguguuugucauaagggaaccauucauaucaugcucccccuuggaaugcagaaccuucuucuugacucaaggggccuugcuaaaugacaaacauuccaauggaaccauuaaagacaggagcccauaucgaaccuuaaugagcuguccuauuggugaaguucccucuccauacaacucaagauuugagucagucgcuuggucagcaagugcuugucaugauggcaucaauuggcuaacaauuggaauuucuggcccagacaauggggcaguggcuguguuaaaguacaacggcauaauaacagacacuaucaggaguuggagaaacaauauauugagaacacaagagucugaaugugcauguguaaaugguucuugcuuuaccauaaugaccgauggaccaagugauggacaggccucauacaagaucuucagaauagaaaagggaaagauaaucaaaucagucgaaaugaaugccccuaauuaucacuaugaggaaugcuccuguuauccugauucuagugaaaucacaugugugugcagagauaacuggcauggcucgaaucgaccgugggugucuuucaaccagaaucuggaauaucagauaggauacauaugcagugggauuuucggagacaauccacgcccuaaugauaagacaggcaguugugguccaguauugucuaauggagcaaauggaguaaaaggauuuucauucaaauacggcaaugguguuuggauagggagaacuaaaagcauuaguucaagaaaagguuuugagaugauuugggauccaaacggauggacugggacagacaauaacuucucaauaaagcaagauaucguaggaauaaaugaguggucaggauauagcgggaguuuuguucagcauccagaacuaacagggcuggauuguauaagaccuugcuucuggguugaacuaaucagagggcgacccaaagagaacacaaucuggacuagcgggagcagcauauccuuuugugguguaaacagugacacuguggguuggucuuggccagacggugcugaguugccauuuaccauugacaaguaa

SEQ ID NO: 52749 - RNA, 1410 nt, Artificial Sequence
  derived and/or modified CDS sequence (wt) from neuraminidase__InfluenzaA__AEH59416
augaauccaaaccaaaagauaauaaccauugguucggucuguaugacaauuggaauggcuaacuuaauauuacaaauuggaaacauaaucucaauauggauuagccacucaauucaacuugggaaucaaaaucagauugaaacaugcaaucaaagcgucauuacuuaugaaaacaacacuuggguaaaucagacauauguuaacaucagcaacaccaacuuugcugcuggacagucagugguuuccgugaaauuagcgggcaauucuucucucugcccuguuaguggaugggcuauauacaguaaagacaacaguauaagaaucgguuccaagggggauguguuugucauaagggaaccauucauaucaugcuccccuuuggaaugcagaaccuucuucuugacucaaggggccuugcuaaaugacaaacauuccaauggaaccauuaaagacaggagcccauaucgaacccuaaugagcuguccuauuggugaaguucccucuccauacaacucaagauuugagucagucgcuuggucagcaagugcuugucaugauggcaucaauuggcuaacaauuggaauuucuggcccagacaauggggcaguggcuguguuaaaguacaacggcauaauaacagacacuaucaagaguuggagaaacaauauauugagaacacaagagucugaaugugcauguguaaaugguucuugcuuuaccauaaugaccgauggaccaagugauggacaggccucauacaagaucuucagaauagaaaagggaaagauagucaaaucagucgaaaugaaugccccuaauuaucacuaugaggaaugcuccuguuauccugauucuagugaaaucacaugugugugcagggauaacuggcauggcucgaaucgaccgugggugucuuucaaccagaaucuggaauaucagauaggauacauaugcagugggauuuucggagacaauccacgcccuaaugauaagacaggcaguugugguccaguaucgucuaauggagcaaauggaguaaaaggauuuucauucaaauacggcaaugguguuuggauagggagaacuaaaagcauuaguucaagaaaagguuuugagaugauuugggauccaaauggauggacugggacagacaauaacuucucaauaaagcaagauaucguaggaauaaaugaguggucaggauauagcgggaguuuuguucagcauccagaacuaacagggcuggauuguauaagaccuugcuucuggguugaacuaaucagagggcgacccaaagagaacacaaucuggacuagcgggagcagcauauccuuuugugguguaaacagugacacuguggguuggucuuggccagacggugcugaguugccauuuaccauugacaaguaa

SEQ ID NO: 52750 - RNA, 1410 nt, Artificial Sequence
  derived and/or modified CDS sequence (wt) from neuraminidase__InfluenzaA__AEH59584
augaauccaaaccaaaagauaaucaccauugguucggucuguaugacaauuggaauggcuaacuuaauauuacaaauuggaaacauaaucucaauauggauuagccacucaauucaacuugggaaucaaaaucagauugaaacaugcaaucaaagcgucauuacuuaugagaacaacacuuggguaaaucagacauauguuaacaucagcaacaccaacuuugcugcuggacagucagugguuuccgugaaauuagcgggcaauuccucucucugcccuguuaguggaugggcuauauacaguaaagacaacaguauaagaaucgguuccaagggggauguguuugucauaagggaaccauucauaucaugcucccccuuggaaugcagaaccuucuucuugacucaaggggccuugcuaaaugacaaacauuccaauggaaccauuaaagacaggagcccauaucgaacccuaaugagcuguccuauuggugaaguucccucuccauacaacucaagauuugagucagucgcuuggucagcaagugcuugucaugauggcaucaauuggcuaacaauuggaauuucuggcccagacaauggggcaguggcuguguuaaaguacaacggcauaauaacagacacuaucaagaguuggagaaacaauauauugagaacacaagagucugaaugugcauguguaaaugguucuugcuuuacuguaaugaccgauggaccaagugauggacaggccucauacaagaucuucagaauagaaaagggaaagauagucaaaucagucgaaaugaaugccccuaauuaucacuaugaggaaugcuccuguuauccugauucuagugaaaucacaugugugugcagggauaacuggcauggcucgaaucgaccgugggugucuuucaaccagaaucuggaauaucagauaggauacauaugcagugggauuuucggagacaauccacgcccuaaugauaagacaggcaguugugguccaguaucgucuaauggagcaaauggaguaaaaggauuuucauucaaauacggcaaugguguuuggauagggagaacuaaaagcauuaguucaagaaacgguuuugagaugauuugggauccgaacggauggacugggacagacaauaacuucucaauaaagcaagauaucguaggaauaaaugaguggucaggauauagcgggaguuuuguucagcauccagaacuaacagggcuggauuguauaagaccuugcuucuggguugaacuaaucagagggcgacccaaagagaacacaaucuggacuagcgggagcagcauauccuuuugugguguaaacagugacacuguggguuggucuuggccagacggugcugaguugccauuuaccauugacaaguaa

SEQ ID NO: 52751 - RNA, 1410 nt, Artificial Sequence
  derived and/or modified CDS sequence (wt) from neuraminidase__InfluenzaA__AEH59586
augaauccaaaccaaaagauaaucaccauugguucggucuguaugacaauuggaauggcuaacuuaauauuacaaauuggaaacauaaucucaauauggauuagccacucaauucaacuugggaaucaaaaucagauugaaacaugcaaucaaagcgucauuacuuaugaaaacaacacuuggguaaaucagacauauguuaacaucagcaacaccaacuuugcugcuggacagucagugguuuccgugaaauuagcgggcaauuccucucucugcccuguuaguggaugggcuauauacaguaaagacaacaguauaagaaucgguuccaagggggauguguuugucauaagggaaccauucauaucaugcucccccuuggaaugcagaaccuucuucuugacucaaggggccuugcuaaaugacaaacauuccaauggaaccauuaaagacaggagcccauaucgaacccuaaugagcuguccuauuggugaaguucccucuccauacaacucaagauuugagucagucgcuuggucagcaagugcuugucaugauggcaucaauuggcuaacaauuggaauuucuggcccagacaauggggcaguggcuguguuaaaguacaacggcauaauaacagacacuaucaagaguuggagaaacaauauauugagaacacaagagucugaaugugcauguguaaaugguucuugcuuuacuguaaugaccgauggaccaagugauggacaggccucauacaagaucuucagaauagaaaagggaaagauagucaaaucagucgaaaugaaugccccuaauuaucacuaugaggaaugcuccuguuauccugauucuagugaaaucacaugugugugcagggauaacuggcauggcucgaaucgaccgugggugucuuucaaccagaaucuggaauaucagauaggguacauaugcagugggauuuucggagacaauccacgcccuaaugauaagacaggcaguugugguccaguaucgucuaauggagcaaauggaguaaaaggauuuucauucaaauacggcaaugguguuuggauagggagaacuaaaagcauuaguucaagaaacgguuuugagaugauuugggauccgaacggauggacugggacagacaauaacuucucaauaaagcaagauaucguaggaauaaaugaguggucaggauauagcgggaguuuuguucagcauccagaacuaacagggcuggauuguauaagaccuugcuucuggguugaacuaaucagagggcgacccaaagagaacacaaucuggacuagcgggagcagcauauccuuuugcgguguaaacagugacacuguggguuggucuuggccagacggugcugaguugccauuuaccauugacaaguaa

SEQ ID NO: 52752 - RNA, 1410 nt, Artificial Sequence
  derived and/or modified CDS sequence (wt) from neuraminidase__InfluenzaA__AEH59588
augaauccaaaccaaaagauaaucaccauugguucggucuguaugacaauuggaauggcuaacuuaauauuacaaauuggaaacauaaucucaauauggauuagccacucaauucaacuugggaaucaaaaucagauugaaacaugcaaucaaagcgucauuacuuaugaaaacaacacuuggguaaaucagacauauguuaacaucagcaacaccaacuuugcugcuggacagucagugguuuccgugaaauuagcgggcaauuccucucucugcccuguuaguggaugggcuauauacaguaaagacaacaguauaagaaucgguuccaagggggauguauuugucauaagggaaccauucauaucaugcucccccuuggaaugcagaaccuucuucuugacucaaggggccuugcuaaaugacaaacauuccaauggaaccauuaaagacaggagcccauaucgaacccuaaugagcuguccuauuggugaaguucccucuccauacaacucaagauuugagucagucgcuuggucagcaagugcuugucaugauggcaucaauuggcuaacaauuggaauuucuggcccagacaauggggcaguggcuguguuaaaguacaacggcauaauaacagacacuaucaagaguuggagaaacaauauauugaggacacaagagucugaaugugcauguguaaaugguucuugcuuuacuguaaugaccgauggaccaagugauggacaggccucauacaagaucuucagaauagaaaagggaaagauagucaaaucagucgaaaugaaugccccuaauuaucacuaugaggaaugcuccuguuauccugauucuagugaaaucacaugugugugcagggauaacuggcauggcucgaaucgaccgugggugucuuucaaccagaaucuggaauaucagauaggguacauaugcagugggauuuucggagacaauccacgcccuaaugauaagacaggcaguugugguccaguaucgucuaauggagcaaauggaguaaaaggauuuucauucaaauacggcaaugguguuuggauagggagaacuaaaagcauuaguucaagaaacgguuuugaaaugauuugggauccgaacggauggacugggacagacaauaacuucucaauaaagcaagauaucguaggaauaaaugaguggucaggauauagcgggaguuuuguucagcauccagaacuaacagggcuggauuguauaagaccuugcuucuggguugaacuaaucagagggcgacccaaagagaacacaaucuggacuagcgggagcagcauauccuuuugcgguguaaacagugacacuguggguuggucuuggccagacggugcugaguugccauuuaccauugacaaguaa

SEQ ID NO: 52753 - RNA, 1410 nt, Artificial Sequence
  derived and/or modified CDS sequence (wt) from neuraminidase__InfluenzaA__AEH59592
augaauccaaaccaaaagauaaucaccauugguucggucuguaugacaauuggaauggcuaacuuaauauuacaaauuggaaacauaaucucaauauggauuagccacucaauucaacuugggaaucaaaaucagauugaaacaugcaaucaaagcgucauuacuuaugaaaacaacacuuggguaaaucagacauauguuaacaucagcaacaccaacuuugcugcuggacagucagugguuuccgugaaauuagcgggcaauuccucucucugcccuguuaguggaugggcuauauacaguaaagacaacaguauaagaaucgguuccaagggggauguauuugucauaagggaaccauucauaucaugcucccccuuggaaugcagaaccuucuucuugacucaaggggccuugcuaaaugacaaacauuccaauggaaccauuaaagacaggagcccauaucgaacccuaaugagcuguccuauuggugaaguucccucuccauacaacucaagauuugagucagucgcuuggucagcaagugcuugucaugauggcaucaauuggcuaacaauuggaauuucuggcccagacaauggggcaguggcuguguuaaaguacaacggcauaauaacagacacuaucaagaguuggagaaacaauauauugagaacacaagagucugaaugugcauguguaaaugguucuugcuuuacuguaaugaccgauggaccaagugauggacaggccucauacaagaucuucagaauagaaaagggaaagauagucaaaucagucgaaaugaaugccccuaauuaucacuaugaggaaugcuccuguuauccugauucuagugaaaucacaugugugugcagggauaacuggcauggcucgaaucgaccgugggugucuuucaaccagaaucuggaauaucagauaggguacauaugcagugggauuuucggagacaauccacgcccuaaugauaagacaggcaguugugguccaguaucgucuaauggagcaaauggaguaaaaggauuuucauucaaauacggcaaugguguuuggauagggagaacuaaaagcauuaguucaagaaacgguuuugagaugauuugggauccgaacggauggacugggacagacaauaacuucucaauaaagcaagauaucguaggaauaaaugaguggucaggauauagcgggaguuuuguucagcauccagaacuaacagggcuggauuguauaagaccuugcuucuggguugaacuaaucagagggcgacccaaagagaacacgaucuggacuagcgggagcagcauauccuuuugcgguguaaacagugacacuguggguuggucuuggccagacggugcugaguugccauuuaccauugacaaguaa

SEQ ID NO: 52754 - RNA, 1410 nt, Artificial Sequence; identical to SEQ ID NO: 52753
  derived and/or modified CDS sequence (wt) from neuraminidase__InfluenzaA__AEH59594

SEQ ID NO: 52755 - RNA, 1410 nt, Artificial Sequence; identical to SEQ ID NO: 52751
  derived and/or modified CDS sequence (wt) from neuraminidase__InfluenzaA__AEH59596

SEQ ID NO: 52756 - RNA, 1410 nt, Artificial Sequence
  derived and/or modified CDS sequence (wt) from neuraminidase__InfluenzaA__AEH59598
augaauccaaaccaaaagauaaucaccauugguucggucuguaugacaauuggaauggcuaacuuaauauuacaaauuggaaacauaaucucaauauggauuagccacucaauucaacuugggaaucaaaaucagauugaaacaugcaaucaaagcgucauuacuuaugaaaacaacacuuggguaaaucagacauauguuaacaucagcaacaccaacuuugcugcuggacagucagugguuuccgugaaauuagcgggcaauuccucucucugcccuguuaguggaugggcuauauacaguaaagacaacaguauaagaaucgguuccaagggggauguguuugucauaagggaaccauucauaucaugcucccccuuggaaugcagaaccuucuucuugacucaaggggccuugcuaaaugacaaacauuccaauggaaccauuaaagacaggagcccauaucgaacccuaaugagcuguccuauuggugaaguucccucuccauacaacucaagauuugagucagucgcuuggucagcaagugcuugucaugauggcaucaauuggcuaacaauuggaauuucuggcccagacaauggggcaguggcuguguuaaaguacaacggcauaauaacagacacuaucaagaguuggagaaacaauauauugagaacacaagagucugaaugugcauguguaaaugguucuugcuuuacuguaaugaccgauggaccaagugauggacaggccucauacaagaucuucagaauagaaaagggaaagauagucaaaucagucgaaaugaaugccccuaauuaucacuaugaggaaugcuccuguuauccugauucuagugaaaucacaugugugugcagggauaacuggcauggcucgaaucgaccgugggugucuuucaaccagaaucuggaauaucagauaggauacauaugcagugggauuuucggagacaauccacgcccuaaugauaagacaggcaguugugguccaguaucgucuaauggagcaaauggaguaaaaggauuuucauucaaauacggcaaugguguuuggauagggagaacuaaaagcauuaguucaagaaacgguuuugagaugauuugggauccgaacggauggacugggacagacaauaacuucucaauaaagcaagauaucguaggaauaaaugaguggucaggauauagcgggaguuuuguucagcauccagaacuaacagggcuggauuguauaagaccuugcuucuggguugaacuaaucagagggcgacccaaagagaacacaaucuggacuagcgggagcagcauauccuuuugugguguaaacagugacacuguggguuggucuuggccagacggugcugaguugccauuuaccauugacaaguaa

SEQ ID NO: 52757 - RNA, 1410 nt, Artificial Sequence
  derived and/or modified CDS sequence (wt) from neuraminidase__InfluenzaA__AEH59600
augaauccaaaccaaaagauaaucaccauugguucggucuguaugacaauuggaauggcuaacuuaauauuacaaauuggaaacauaaucucaauauggauuagccacucaauucaacuugggaaucaaaaucagauugaaacaugcaaucaaagcgucauuacuuaugaaaacaacacuuggguaaaucagacauauguuaacaucagcaacaccaacuuugcugcuggacagucagugguuuccgugaaauuagcgggcaauuccucucucugcccuguuaguggaugggcuauauacaguaaagacaacaguauaagaaucgguuccaagggggauguguuugucauaagggaaccauucauaucaugcucccccuuggaaugcagaaccuucuucuugacucaaggggccuugcuaaaugacaaacauuccaauggaaccauuaaagacaggagcccauaucgaacccuaaugagcuguccuauuggugaaguucccucuccauacaacucaagauuugagucagucgcuuggucagcaagugcuugucaugauggcaucaauuggcuaacaauuggaauuucuggcccagacaauggggcaguggcuguguuaaaguacaacggcauaauaacagacacuaucaagaguuggagaaacaauauauugagaacacaagagucugaaugugcauguguaaaugguucuugcuuuacgguaaugaccgauggaccaagugauggacaggccucauacaagaucuucagaauagaaaagggaaagauagucaaaucagucgaaaugaaugccccuaauuaucacuaugaggaaugcuccuguuauccugauucuagugaaaucacaugugugugcagggauaacuggcauggcucgaaucgaccgugggugucuuucaaccagaaucuggaauaucagauaggguacauaugcagugggauuuucggagacaauccacgcccuaaugauaagacaggcaguugugguccaguaucgucuaauggagcaaauggaguaaaaggauuuucauucaaauacggcaaugguguuuggauagggagaacuaaaagcauuaguucaagaaacgguuuugagaugauuugggauccgaacggauggacugggacagacaauaacuucucaauaaagcaagauaucguaggaauaaaugaguggucaggauauagcgggaguuuuguucagcauccagaacuaacagggcuggauuguauaagaccuugcuucuggguugaacugaucagagggcgacccaaagagaacacaaucuggacuagcgggagcagcauauccuuuugugguguaaacagugacacuguggguuggucuuggccagacggugcugaguugccauuuaccauugacaaguaa

SEQ ID NO: 52758 - RNA, 1410 nt, Artificial Sequence
  derived and/or modified CDS sequence (wt) from neuraminidase__InfluenzaA__AEH59602
augaauccaaaccaaaagauaaucaccauugguucggucuguaugacaauuggaauggcuaacuuaauauuacaaauuggaaacauaaucucaauauggauuagccacucaauucaacuugggagucaaaaucagauugaaacaugcaaucaaagcgucauuacuuaugaaaacaacacuuggguaaaucagacauauguuaacaucagcaacaccaacuuugcugcuggacagucagugguuuccgugaaauuagcgggcaauuccucucucugcccuguuaguggaugggcuauauacaguaaagacaacaguauaagaaucgguuccaagggggauguguuugucauaagggaaccauucauaucaugcucccccuuggaaugcagaaccuucuucuugacucaaggggccuugcuaaaugacaaacauuccaauggaaccauuaaagacaggagcccauaucgaacccuaaugagcuguccuauuggugaaguucccucuccauacaacucaagauuugagucagucgcuuggucagcaagugcuugucaugauggcaucaauuggcuaacaauuggaauuucuggcccagacaauggggcaguggcuguguuaaaguacaacggcauaauaacagacacuaucaagaguuggagaaacaauauauugagaacacaagagucugaaugugcauguguaaaugguucuugcuuuacuguaaugaccgauggaccaagugauggacaggccucauacaagaucuucagaauagaaaagggaaagauagucaaaucagucgaaaugaaugccccuaauuaucacuaugaggaaugcuccuguuauccugauucuagugaaaucacaugugugugcagggauaacuggcauggcucgaaucgaccgugggugucuuucaaccagaaucuggaauaucagauaggauacauaugcagugggauuuucggagacaauccacgcccuaaugauaagacaggcaguugugguccaguaucgucuaauggagcaaauggaguaaaaggauuuucauucaaauacggcaaugguguuuggauagggagaacuaaaagcauuaguucaagaaacgguuuugagaugauuugggauccgaacggauggacugggacagacaauaacuucucaauaaagcaagauaucguaggaauaaaugaguggucaggauauagcgggaguuuuguucagcauccagaacuaacagggcuggauuguauaagaccuugcuucuggguugaacuaaucagagggcgacccaaagagaacacaaucuggacuagcgggagcagcauauccuuuugugguguaaacagugacacuguggguuggucuuggccagacggugcugaguugccauuuaccauugacaaguaa

SEQ ID NO: 52759 - RNA, 1410 nt, Artificial Sequence; identical to SEQ ID NO: 52753
  derived and/or modified CDS sequence (wt) from neuraminidase__InfluenzaA__AEH59606

SEQ ID NO: 52760 - RNA, 1410 nt, Artificial Sequence
  derived and/or modified CDS sequence (wt) from neuraminidase__InfluenzaA__AEH59616
augaauccaaaccaaaagauaaucaccauugguucggucuguaugacaauuggaauggcuaacuuaauauuacaaauuggaaacauaaucucaauauggauuagccacucaauucaacuugggaaucaaaaucagauugaaacaugcaaucaaagcgucauuacuuaugaaaacaacacuuggguaaaucagacauauguuaacaucagcaacaccaacuuugcugcuggacagucagugguuuccgugaaauuagcgggcaauuccucucucugcccuguuaguggaugggcuauauacaguaaagacaacaguauaagaaucgguuccaagggggauguguuugucauaagggaaccauucauaucaugcucccccuuggaaugcagaaccuucuucuugacucaaggggccuugcuaaaugacaaacauuccaauggaaccauuaaagacaggagcccauaucgaacccuaaugagcuguccuauuggugaaguucccucuccauacaacucaagauuugagucagucgcuuggucagcaagugcuugucaugauggcaucaauuggcuaacaauuggaauuucuggcccagacaauggggcaguggcuguguuaaaguacaacggcauaauaacagacacuaucaagaguuggagaaacaauauauugagaacacaagagucugaaugugcauguguaaaugguucuugcuuuacuguaaugaccgauggaccaagugauggacaggccucauacaagaucuucagaauagaaaagggaaagauagucaaaucagucgaaaugaaugccccuaauuaucacuaugaggaaugcuccuguuauccugauucuagugaaaucacaugugugugcagggauaacuggcauggcucgaaucgaccgugggugucuuucaaccagaaucuggaauaucagauaggguacauaugcagugggauuuucggagacaauccacgcccuaaugauaagacaggcaguugugguccaguaucgucuaauggagcaaauggaguaaaaggauuuucauucaaauacggcaaugguguuuggauagggagaacuaaaagcauuaguucaagaaacgguuuugagaugauuugggauccgaacggauggacugggacagacaauaacuucucaauaaagcaagauaucguaggaauaaaugaguggucaggauauagcgggaguuuuguucagcauccagaacuaacagggcuggauuguauaagaccuugcuucuggguugaacuaaucagagggcgacccaaagagaacacaaucuggacuagcgggagcagcauauccuuuugugguguaaacagugacacuguggguuggucuuggccagacggugcugaguugccauuuaccauugacaaguaa

SEQ ID NO: 52761 - RNA, 1410 nt, Artificial Sequence; identical to SEQ ID NO: 52751
  derived and/or modified CDS sequence (wt) from neuraminidase__InfluenzaA__AEH59626

SEQ ID NO: 52762 - RNA, 1413 nt, Artificial Sequence; identical to SEQ ID NO: 51959
  derived and/or modified CDS sequence (wt) from neuraminidase__InfluenzaA__AEH77262

SEQ ID NO: 52763 - RNA, 1410 nt, Artificial Sequence
  derived and/or modified CDS sequence (wt) from neuraminidase__InfluenzaA__AEH77273
augaauccaaaccaaaagauaauaaccauugguucggucuguaugacaauuggaauggcuaacuuaauauuacaaauuggaaacauaaccucaauauggauuagccacucaauucaacuugggaaucaaaaucagauugaaacaugcaaucaaagcgucauuacuuaugaaaacaacacuuggguaaaucagacauauguuaacaucagcaacaccaacuuugcugcuggacagucagugguuuccgugaaauuagcgggcaauuccucucucugcccuguuaguggaugggcuauauacaguaaagacaacaguauaagaaucgguuccaagggggauguguuugucauaagggaaccauucauaucaugcucccccuuggaaugcagaaccuucuucuugacucaaggggccuugcuaaaugacaaacauuccaauggaaccauuaaagacaggagcccauaucgaacccuaaugagcuguccuauuggugaaguucccucuccauacaacucaagauuugagucagucgcuuggucagcaagugcuugucaugauggcaucaauuggcuaacaauuggaauuucuggcccagacaauggggcaguggcuguguuaaaguacaacggcauaauaacagacacuaucaagaguuggagaaacaauauauugagaacacaagagucugaaugugcauguguaaaugguucuugcuuuacuguaaugaccgauggaccaagugauggacaggccucauacaagaucuucagaauagaaaagggaaagauagucaaaucagucgaaaugaaugccccuaauuaucacuaugaggaaugcuccuguuauccugauucuagugaaaucacaugugugugcagggauaacuggcauggcucgaaucgaccgugggugucuuucaaccagaaucuggaauaucagauaggauacauaugcagugggauuuucggagacaauccacgcccuaaugauaagacaggcaguugugguccaguaucgucuaauggagcaaauggaguaaaaggauuuucauucaaauacggcaaugguguuuggauagggagaacuaaaagcauuaguucaagaaacgguuuugagaugauuugggauccgaacggauggacugggacagacaauaacuucucaauaaagcaagauaucguaggaauaaaugaguggucaggauauagcgggaguuuuguucagcauccagaacuaacagggcuggauuguauaagaccuugcuucuggguugaacuaaucagagggcgacccaaagagaacacaaucuggacuagcgggagcagcauauccuuuugugguguaaacagugacacuguggguuggucuuggccagacggugcugaguugccauuuaccauugacaaguaa

SEQ ID NO: 52764 - RNA, 1410 nt, Artificial Sequence
  derived and/or modified CDS sequence (wt) from neuraminidase__InfluenzaA__AEH77282
augaauccaaaucaaaagauaauaacaauuggcucuguuucucucaccauugccacaauaugcuuccuuaugcaaauugccauccugguaacuacuguaacauugcauuucaagcagcaugaaugcaacucccccccaaacaaccaaguaaugcugugugaaccaacaauaauagaaagaaacauaacagagauaguguaucugaccaacaccaccauagagaaggaaauaugccccaaacuagcagaauacagaaauuggucaaagccgcaauguaacauuacaggauuugcaccuuuuucuaaggacaauucgauucggcuuuccgcugguggugacaucugggugacaagagaaccuuaugugucaugcgauccugacaaguguuaucaauuugcccuugggcagggaacaacacuaaacaacgggcauucaaaugacacaguacaugauaggaccccuuaccggacccuauugaugaaugaauuggguguuccauuucauuugggaaccaggcaagugugcauagcaugguccagcucaaguugucacgauggaaaagcauggcugcauguuuguguaacuggggaugauaaaaaugcaacugcuagcuucauuuacaaugggaggcuuguagauaguauugguucaugguccaaaaaaauacucagaacccaggagucggaaugcguuuguaucaauggaacuuguacaguaguaaugacugaugggagcgcuucaggaaaagcugauacuaaaauacuauucguugaggaggggaaaaucguucauauuagcacauugucaggaagugcucagcaugucgaggaguguuccuguuauccucgauauccuggugucagaugugucugcagagacaacuggaaaggcuccaauaggcccauuguagauauaaauguaaaggauuauagcauuguuuccaguuaugugugcucaggacuuguuggagacacacccagaaaaaacgacagcuccagcaguagccauugccuagauccuaacaaugaggaagguggucauggagugaaaggcugggccuuugaugauggaaaugacguguggaugggaagaacgaucagcgagaaguuacgcucagguuaugaaaccuucaaagucaucgaaggcugguccaaaccuaacuccaaauuacagauaaauaggcaaguuauaguugaaagagguaacagguccgguuauucugguauuuucuccguugaaggcaaaagcugcaucaaucggugcuuuuauguggaguugauaaggggaaggaaagaggaaacugaagucugguggaccucaaacaguauuguuguguuuuguggcaccucagguacauauggaacaggcucauggccugauggggcggacaucaaucucaugccuauauaa

SEQ ID NO: 52765 - RNA, 1410 nt, Artificial Sequence; identical to SEQ ID NO: 50138
  derived and/or modified CDS sequence (wt) from neuraminidase__InfluenzaA__AEI29218

SEQ ID NO: 52766 - RNA, 1410 nt, Artificial Sequence; identical to SEQ ID NO: 50117
  derived and/or modified CDS sequence (wt) from neuraminidase__InfluenzaA__AEI29228

SEQ ID NO: 52767 - RNA, 1410 nt, Artificial Sequence; identical to SEQ ID NO: 46149
  derived and/or modified CDS sequence (wt) from neuraminidase__InfluenzaA__AEI54350

SEQ ID NO: 52768 - RNA, 1410 nt, Artificial Sequence; identical to SEQ ID NO: 46298
  derived and/or modified CDS sequence (wt) from neuraminidase__InfluenzaA__AEI54361

SEQ ID NO: 52769 - RNA, 1410 nt, Artificial Sequence
  derived and/or modified CDS sequence (wt) from neuraminidase__InfluenzaA__AEI54372
augaauccaaaucaaaagauaauaacgauuggcucuguuucucucaccauuuccacaauaugcuucuucaugcaaauugccaucuugauaacuacuguaacauugcauuuuaagcaauaugaauucaacucccccccaaacaaccaagugaugcugugugaaccaacaauaauagaaagaaacauaacagagauaguguaucugaccaacaccaccauagagaaggaaauaugccccaaacuagcagaauacaggaauuggucaaagccgcaaugugacauuacaggauuugcaccuuuuucuaaggacaauucgauuaggcuuuccgcugguggggacaucugggugacaagagaaccuuaugugucaugcgauccugacaaguguuaucaauuugcccuuggacagggaacaacacuaaacaacgugcauucaaaugacacaguacaugauaggaccccuuaucggacccuauugaugaaugaguuagguguuccauuucaucuggggaccaagcaagugugcauagcaugguccagcucaaguugucacgauggaaaagcauggcugcauguuuguguaacgggggaugauaaaaaugcaacugcuagcuucauuuacaaugggaggcuuguagauaguauuguuucaugguccaaaaaaauccucaggacccaggagucagaaugcguuuguaucaauggaacuuguacaguaguaaugacugaugggagugcuucaggaaaagcugacacuaaaauacuauucauugaggaggggaaaaucguucauacuagcacauugucaggaagugcucagcaugucgaggagugcuccugcuauccucgauauccuggugucagaugugucugcagagacaacuggaaaggcuccaauaggcccaucguagauauaaacauaaaggauuauagcauuguuuccaguuaugugugcucaggacuuguuggagacacacccagaaaaaacgacagcuccagcaguagccauugcuuggauccuaacaaugaagaagguggucauggagugaaaggcugggccuuugaugauggaaaugacguguggaugggaagaacgaucagcgagaaguuacgcucaggauaugaaaccuucaaagucauugaaggcugguccaacccuaauuccaaauugcagauaaauaggcaagucauaguugacagagguaauagguccgguuauucugguauuuucucuguugaaggcaaaagcugcaucaaucggugcuuuuauguggaguugauaaggggaagaaaagaggaaacugaagucuuguggaccucaaacaguauuguuguguuuuguggcaccucagguacauauggaacaggcucauggccugauggggcggacaucaaucucaugccuauauaa

SEQ ID NO: 52770 - RNA, 1410 nt, Artificial Sequence; identical to SEQ ID NO: 46603
  derived and/or modified CDS sequence (wt) from neuraminidase__InfluenzaA__AEI54383

SEQ ID NO: 52771 - RNA, 1410 nt, Artificial Sequence; identical to SEQ ID NO: 52690
  derived and/or modified CDS sequence (wt) from neuraminidase__InfluenzaA__AEI54394

SEQ ID NO: 52772 - RNA, 1410 nt, Artificial Sequence
  derived and/or modified CDS sequence (wt) from neuraminidase__InfluenzaA__AEI54416
augaauccaaaucaaaagauaauaacgauuggcucuguuucucucaccauuuccacaauaugcuucuucaugcaaauugccaucuugauaacuacuguaacauugcauuucaagcaauaugaauucaacucccccccaaacaaccaagugaugcugugugaaccaacaauaauagaaagaaacauaacagagauaguguaucugaccaacaccaccauagagaaggaaauaugccccaaacuagcagaauacagaaauuggucaaagccgcaaugugacauuacaggauuugcaccuuuuucuaaggacaauucgauuaggcuuuccgcugguggggacaucugggugacaagagaaccuuaugugucaugcgauccugacaaguguuaucaauuugcccuuggacagggaacaacacuaaacaacgugcauucaaaugacacaguacgugauaggaccccuuaucggacccuauugaugaaugaguuagguguuccuuuucaucuggggaccaagcaagugugcauagcaugguccagcucaaguugucacgauggaaaagcauggcugcauguuuguauaacgggggaugauaaaaaugcaacugcuagcuucauuuacaaugggaggcuuguagauaguauuguuucaugguccaaagaaauccucaggacccaggagucagaaugcguuuguaucaauggaacuuguacaguaguaaugacugaugggagugcuucaggaaaagcugauacuaaaauacuauucauugaggaggggaaaaucguucauacuagcacauugucaggaagugcucagcaugucgaagagugcuccugcuauccucgauauccuggugucagaugugucugcagagacaacuggaaaggcuccaauaggcccaucguagauauaaacauaaaggaucauagcauuguuuccaguuauguguguucaggacuuguuggagacacacccagaaaaaacgacagcuccagcaguagccauuguuuggauccuaacaaugaagaagguggucauggagugaaaggcugggccuuugaugauggaaaugacguguggaugggaagaacgaucagcgagaagucacgcuuaggguaugaaaccuucaaagucauugaaggcugguccaacccuaaguccaaauugcagauaaauaggcaagucauaguugacagagguaauagguccgguuauucugguauuuucucuguugaaggcaaaagcugcaucaaucggugcuuuuauguggaguugauaaggggaagaaaagaggaaacugaagucuuguggaccucaaacaguauuguuguguuuuguggcaccucagguacauauggaacaggcucauggccugauggggcggacaucaaucucaugccuauauaa

SEQ ID NO: 52773 - RNA, 1410 nt, Artificial Sequence; identical to SEQ ID NO: 52716
  derived and/or modified CDS sequence (wt) from neuraminidase__InfluenzaA__AEI54427

SEQ ID NO: 52774 - RNA, 1410 nt, Artificial Sequence
  derived and/or modified CDS sequence (wt) from neuraminidase__InfluenzaA__AEI54438
augaauccaaaucaaaagauaauaacgauuggcucuguuucucucaccauuuccacaauaugcuucuucaugcaaauugccaucuugauaacuacuguaacauugcauuucaagcaauaugaauucaacucccccccaaacaaccaagugaugcugugugaaccaacaauaauagaaagaaacauaacagagauaguguaucugaccaacaccaccauagagaaggaaauaugccccaaacuagcagaauacagaaauuggucaaagccgcaaugugacauuacaggauuugcaccuuuuucuaaggacaauucgauuaggcuuuccgcugguggggacaucugggugacaagagaaccuuaugugucaugcgauccugacaaguguuaucaauuugcccuuggacagggaacaacacuaaacaacgugcauucaaauaacacaguacgugauaggaccccuuauaggacccuauugaugaaugaguuagguguuccuuuucaucuggggaccaagcaagugugcauagcaugguccagcucaaguugucacgauggaaaagcauggcugcauguuuguauaacgggggaugauaaaaaugcaacugcuagcuucauuuacaaugggaggcuuguagauaguguuguuucaugguccaaagaaauccucaggacccaggagucagaaugcguuuguaucaauggaacuuguacaguaguaaugacugaugggagugcuucaggaaaagcugauacuaaaauacuauucauugaggaggggaaaaucguucauacuagcacauugucaggaagugcucagcaugucgaggagugcucuugcuauccucgauauccuggugucagaugugucugcagagacaacuggaaaggcuccaauaggcccaucguagauauaaacauaaaggaucauagcauuguuuccaguuauguguguucaggacuuguuggagacacacccagaaaaaacgacagcuccagcaguagccauuguuuggauccuaacaaugaagaagguggucauggagugaaaggcugggccuuugaugauggaaaugacguguggaugggaagaacgaucaacgagacgucacguuuaggguaugaaacuuucaaagucauugaaggcugguccaacccuaaguccaaauugcagauaaauaggcaagucauaguugacagagguaauagguccgguuauucugguauuuucucuguugaaggcaaaagcugcaucaaucggugcuuuuauguggaguugauuagaggaagaaaagaggaaacugaagucuuguggaccucaaacaguauuguuguguuuuguggcaccucagguacauauggaacaggcucauggccugauggggcggaccucaaucucaugccuauauaa

SEQ ID NO: 52775 - RNA, 1410 nt, Artificial Sequence
  derived and/or modified CDS sequence (wt) from neuraminidase__InfluenzaA__AEI54449
augaauccaaaucaaaagauaauaacgauuggcucuguuucucucaccauuuccacaauaugcuucuucaugcaaauugccaucuugauaacuacuguaacauugcauuucaagcaauaugaauucaacucccccccaaacaaccaagugaugcugugugaaccaacaauaauagaaagaaacauaacagagauaguguaucugaccaacaccaccauagagaaggaaauaugccccaaacuagcagaauacagaaauuggucaaagccgcaaugugacauuacaggauuugcaccuuuuucuaaggacaauucgauuaggcuuuccgcugguggggacaucugggugacaagagaaccuuaugugucaugcgauccugacaaguguuaucaauuugcccuuggacagggaacaacacuaaacaacgugcauucaaauaacacaguacgugauaggaccccuuauaggacccuauugaugaaugaguuagguguuccuuuucaucuggggaccaagcaagugugcauagcaugguccagcucaaguugucacgauggaaaagcauggcugcauguuuguauaacgggggaugauaaaaaugcaacugcuagcuucauuuacaaugggaggcuuguagauaguguuguuucaugguccaaagaaauccucaggacccaggagucagaaugcguuuguaucaauggaacuuguacaguaguaaugacugaugggagugcuucaggaaaagcugauacuaaaauacuauucauugaggaggggaaaaucguucauacuagcacauugucaggaagugcucagcaugucgaggagugcucuugcuauccucgauauccuggugucagaugugucugcagagacaacuggaaaggcuccaauaggcccaucguagauauaaacauaaaggaucauagcauuguuuccaguuauguguguucaggacuuguuggagacacacccagaaaaaacgacagcuccagcaguagccauuguuuggauccuaacaaugaagaagguggucauggagugaaaggcugggccuuugaugauggaaaugacguguggaugggaagaacgaucaacgagacgucacguuuaggguaugaaacuuucaaagucauugaaggcugguccaacccuaaguccaaauugcagauaaauaggcaagucauaguugacagagguaauagguccgguuauucugguauuuuuucuguugaaggcaaaagcugcaucaaucggugcuuuuauguggaguugauuagaggaagaaaagaggaaacugaagucuuguggaccucaaacaguauuguuguguuuuguggcaccucagguacauauggaacaggcucauggccugauggggcggaccucaaucucaugccuauauaa

SEQ ID NO: 52776 - RNA, 1410 nt, Artificial Sequence
  derived and/or modified CDS sequence (wt) from neuraminidase__InfluenzaA__AEI54460
augaauccaaaucaaaagauaauaacgauuggcucuguuucucucaccauuuccacaauaugcuucuucaugcaaauugccaucuugauaacuacuguaacauugcauuucaagcaauaugaauucaacucccccccaaacaaccaagugaugcugugugaaccaacaauaauagaaagaaacauaacagagauaguguaucugaccaacaccaccauagagaaggaaauaugccccaaacuagcagaauacagaaauuggucaaagccgcaaugugacauuacaggauuugcaccuuuuucuaaggacaauucgauuaggcuuuccgcugguggggacaucugggugacaagagaaccuuaugugucaugcgauccugacaaguguuaucaauuugcccuuggacagggaacaacacuaaacaacgugcauucaaauaacacaguacgugauaggaccccuuaucggacccuauugaugaaugaguuagguguuccuuuucaucuggggaccaagcaagugugcauagcaugguccagcucaaguugucacgauggaaaagcauggcugcauguuuguauaacgggggaugauaaaaaugcaacugcuagcuucauuuacaaugggaggcuuguagauaguguuguuucaugguccaaagaaauccucaggacccaggagucagaaugcguuuguaucaauggaacuuguacaguaguaaugacugaugggagugcuucaggaaaagcugauacuaaaauacuauucauugaggaggggaaaaucguucauacuagcacauugucaggaagugcucagcaugucgaggagugcucuugcuauccucgauauccuggugucagaugugucugcagagacaacuggaaaggcuccaauaggcccaucguagauauaaacauaaaggaucauagcauuguuuccaguuauguguguucaggacuuguuggagacacacccagaaaaaacgacagcuccagcaguagccauuguuuggauccuaacaaugaagaagguggucauggagugaaaggcugggccuuugaugauggaaaugacguguggaugggaagaacaaucaacgagacgucacguuuaggguaugaaaccuucaaagucauugaaggcugguccaacccuaaguccaaauugcagauaaauaggcaagucauaguugacagagguaauagguccgguuauucugguauuuucucuguugaaggcaaaagcugcaucaaucggugcuuuuauguggaguugauuaggggaagaaaagaggaaacugaagucuuguggaccucaaacaguauuguuguguuuuguggcaccucagguacauauggaacaggcucauggccugauggggcggaccucaaucucaugccuauauaa

SEQ ID NO: 52777 - RNA, 1410 nt, Artificial Sequence
  derived and/or modified CDS sequence (wt) from neuraminidase__InfluenzaA__AEI54471
augaauccaaaucaaaagauaauaacgauuggcucuguuucucucaccauuuccacaauaugcuucuucaugcaaauugccgucuugauaacuacuguaacauugcauuucaagcaauauaaauucaacucccccccaaacaaccaagugaugcugugugaaccaacaauaauagaaagaaacauaacagagauaguguaucugaccaacaccaccauagagaaggaaauaugccccaaacuagcagaauacagaaauuggucaaaaccgcaaugugacauuacgggauuugcaccuuuuucuaaggacaauucgauuaggcuuuccgcugguggggacaucugggugacaagagaaccuuaugugucaugcgauccugacaaguguuaucaauuugcccuuggacagggaacaacacuaaacaacgugcauucaaauaacacaguacgugauaggaccccuuaucggacccuauugaugaaugaguuagguguuccuuuucaucuggggaccaagcaagugugcauagcaugguccagcucgaguugucacgauggaaaagcauggcugcauguuuguauaacgggggaugauaaaaaugcaacugcuagcuucauuuacaaugggaggcuuguagauaguguuguuucaugguccaaagaaauucucaggacccaggagucagaaugcguuuguaucaauggaacuuguacaguaguaaugacugauggaagugcuucaggaaaagcugauacuaaaauacuauucauugaggaggggaaaauuguucauacuagcacauugucaggaagugcucagcaugucgaggagugcucuugcuauccucgauauccuggugucagaugugucugcagagacaacuggaaaggcuccaauaggcccaucguagauauaaacauaaaggaucauagcauuguuuccaguuauguguguucaggacuuguuggagacacacccagaaaaaacgacagcuccagcaguagccauuguuuggauccuaacaaugaagaagguggucauggagugaaaggcugggccuuugaugauggaaaugacguguggaugggaagaacaaucaacgagacgucacgcuuaggguaugaaaccuucaaagucauugaaggcugguccaacccuaaguccaaauugcagauaaauaggcaagucauaguugacagagguaauaggucagguuauucugguauuuucucuguugaaggcaaaagcugcaucaaucggugcuuuuauguggaguugauuaggggaagaaaagaggaaacugaagucuuguggaccucaaacaguauuguuguguuuuguggcaccucagguacauauggaacaggcucauggccugauggggcggaccucaaucucaugccuauauaa

SEQ ID NO: 52778 - RNA, 1410 nt, Artificial Sequence
  derived and/or modified CDS sequence (wt) from neuraminidase__InfluenzaA__AEI54482
augaauccaaaucaaaagauaauaacgauuggcucuguuucucucaccauuuccacaauaugcuucuucaugcaaauugccaucuugauaacuacuguaacauugcauuucaagcaauauaaauucaacucccccccaaacaaccaagugaugcugugugaaccaacaauaauagaaagaaacauaacagagauaguguaucugaccaacaccaccauagagaaggaaauaugccccaaacuagcagaauacagaaauuggucaaaaccgcaaugugacauuacgggauuugcaccuuuuucuaaggacaauucgauuaggcuuuccgcugguggggacaucugggugacaagagaaccuuaugugucaugcgauccugacaaguguuaucaauuugcccuuggacagggaacaacacuaaacaacgugcauucaaauaacacaguacgugauaggaccccuuaucggacccuauugaugaaugaguuagguguuccuuuucaucuggggaccaagcaagugugcauagcaugguccagcucgaguugucacgauggaaaagcauggcugcauguuuguauaacgggggaugauaaaaaugcaacugcuagcuucauuuacaaugggaggcuuguagauaguguuguuucaugguccaaagaaauucucaggacccaggagucagaaugcguuuguaucaauggaacuuguacaguaguaaugacugauggaagugcuucaggaaaagcugauacuaaaauacuauucauugaggaggggaaaauuguucauacuagcacauugucaggaagugcucagcauguagaggagugcucuugcuauccucgauauccuggugucagaugugucugcagagacaacuggaaaggcuccaauaggcccaucguagauauaaacauaaaggaucauagcauuguuuccaguuauguguguucaggacuuguuggagacacacccagaaaaaacgacagcuccagcaguagccauuguuuggauccuaacaaugaagaagguggucauggagugaaaggcugggccuuugaugauggaaaugacguguggaugggaagaacaaucaacgagacgucacgcuuaggguaugaaaccuucaaagucauugaaggcugguccaacccuaaguccaaauugcagauaaauaggcaagucauaguugacagagguaauagguccgguuauucugguauuuucucuguugaaggcaaaagcugcaucaaucggugcuuuuauguggaguugauuaggggaagaaaagaggaaacugaagucuuguggaccucaaacaguauuguuguguuuuguggcaccucagguacauauggaacaggcucauggccugauggggcggaccucaaucucaugccuauauaa

SEQ ID NO: 52779 - RNA, 1410 nt, Artificial Sequence
  derived and/or modified CDS sequence (wt) from neuraminidase__InfluenzaA__AEI54493
augaauccaaaucaaaagauaauaacgauuggcucuguuucucucaccauuuccacaauaugcuucuucaugcaaauugccaucuugauaacuacuguaacauugcauuucaagcaauaugaauucaacucccccccaaacaaccaagugaugcugugugaaccaacaauaauagaaagaaacauaacagagauaguguaucugaccaacaccaccauagagaaggaaauaugccccaaacuagcagaauacagaaauuggucaaagccgcaaugugacauuacaggauuugcaccuuuuucuaaggacaauucgauuaggcuuuccgcugguggggacaucugggugacaagagaaccuuaugugucaugcgauccugacaaguguuaucaauuugcccuuggacagggaacaacacuaaacaacgugcauucaaauaacacaguacgugauaggaccccuuaucggacccuauugaugaaugaguuagguguuccuuuucaucuggggaccaagcaagugugcauagcaugguccagcucaaguugucacgauggaaaagcauggcugcauguuuguauaacgggggaugauaaaaaugcaacugcuagcuucauuuacaaugggaggcuuguagauaguguuguuucaugguccaaagaaauccucaggacccaggagucagaaugcguuuguaucaauggaacuuguacaguaguaaugacugaugggagugcuucaggaaaagcugauacuaaaauacuauucauugaggaggggaaaaucguucauacuagcacauugucaggaagugcucagcaugucgaggagugcucuugcuauccucgauauccuggugucagaugugucugcagagacaacuggaaaggcuccaauaggcccaucguagauauaaacauaaaggaucauagcauuguuuccaguuauguguguucaggacuuguuggagacacacccagaaaaaacgacagcuccagcaguagccauuguuuggauccuaacaaugaagaagguggucauggagugaaaggcugggccuuugaugauggaaaugacguguggaugggaagaacgaucaacgaaacgucacguuuaggguaugaaaccuucaaagucauugaaggcugguccaacccuaaguccaaauugcagauaaauaggcaagucauaguugacagagguaauagguccgguuauucugguauuuucucuguugaaggcaaaagcugcaucaaucggugcuuuuauguggaguugauuaggggaagaaaagaggaaacugaagucuuguggaccucaaacaguauuguuguguuuuguggcaccucagguacauauggaacaggcucauggccugauggggcggaccucaaucucaugucuauauaa

SEQ ID NO: 52780 - RNA, 1410 nt, Artificial Sequence
  derived and/or modified CDS sequence (wt) from neuraminidase__InfluenzaA__AEI54504
augaauccaaaucaaaagauaauaacgauuggcucuguuucucucaccauuuccacaauaugcuucuucaugcaaauugccaucuugauaacuacuguaacauugcauuucaagcaauaugaauucaacucccccccaaacaaccaagugaugcugugugaaccaacaauaauagaaagaaacauaacagagauaguguaucugaccaacaccaccauagagaaggaaauaugccccaaacuagcagaauacagaaauuggucaaagccgcaaugugacauuacaggauuugcaccuuuuucuaaggacaauucgauuaggcuuuccgcugguggggacaucugggugacaagagaaccuuaugugucaugcgauccugacaaguguuaucaauuugcccuuggacagggaacaacacuaaacaacgugcauucaaauaacacaguacgugauaggaccccuuauaggacccuauugaugaaugaguuagguguuccuuuucaucuggggaccaagcaagugugcauagcaugguccagcucaaguugucacgauggaaaagcauggcugcauguuuguauaacgggggaugauaaaaaugcaacugcuagcuucauuuacaaugggaggcuuguagauaguguuguuucaugguccaaagaaauccucaggacccaggagucagaaugcguuuguaucaauggaacuuguacaguaguaaugacugaugggagugcuucaggaaaagcugauacuaaaauacuauucauugaggaggggaaaaucguucauacuagcacauugucaggaagugcucagcaugucgaggagugcucuugcuauccucgauauccuggugucagaugugucugcagagacaacuggaaaggcuccaauaggcccaucguagauauaaacauaaaggaucauagcauuguuuccaguuauguguguucaggacuuguuggagacacacccagaaaaaacgacagcuccagcaguagccauuguuuggauccuaacaaugaagaagguggucauggagugaaaggcugggccuuugaugauggaaaugacguguggaugggaagaacgaucaacgagacgucacguuuaggguaugaaacuuucaaagucauugaaggcugguccaacccuaaguccaaauugcagauaaauaggcaagucauaguugacagagguaauagguccgguuauucugguauuuucucuguugaaggcaaaagcugcaucaaucggugcuuuuauguggaguugauuaggggaagaaaagaggaaacugaagucuuguggaccucaaacaguauuguuguguuuuguggcaccucagguacauauggaacaggcucauggccugauggggcggaccucaaucucaugccuauauaa

SEQ ID NO: 52781 - RNA, 1410 nt, Artificial Sequence
  derived and/or modified CDS sequence (wt) from neuraminidase__InfluenzaA__AEI59982
augaauccaaaucaaaagauaauaacgauuggcucuguuucucucaccauuuccacaauaugcuucuucaugcaaauugccaucuugauaacuacuguaacauugcauuucaagcaauaugaauucaacucccccccaaacaaccaagugaugcugugugaaccaacaauaauagagagaaacauaacagagauaguguaucugaccaacaccaccauagagaaggaaauaugccccaaacuagcagaauacagaaauuggucaaagccgcaaugugacauuacaggauuugcaccuuuuucuaaggacaauucgauuaggcuuuccgcugguggggacaucugggugacaagagaaccuuaugugucaugcgauccugacaaguguuaucaauuugcccuuggacagggaacaacacuaaacaacgugcauucaaauaacacaguacgugauaggaccccuuaucggacccuauugaugaaugaguuagguguuccuuuucaucuggggaccaagcaagugugcauagcaugguccagcucaaguugucacgauggaaaagcauggcugcauguuuguauaacgggggaugauaaaaaugcaacugcuagcuucauuuacaaugggaggcuuguagauaguguuguuucaugguccaaagaaauccucaggacccaggagucagaaugcgucuguaucaauggaacuuguacaguaguaaugacugaugggagugcuucaggaaaagcugauacuaaaauacuauucauugaggaggggaaaaucguucauacuagcacauugucaggaagugcucagcaugucgaggagugcucuugcuauccucgauauccuggugucagaugugucugcagagacaacuggaaaggcuccaauaggcccaucguagauauaaacauaaaggaucauagcguuguuuccaguuauguguguucaggacuuguuggagacacacccagaaaaaacgacagcuccagcaguagccauuguuuggauccuaacaaugaagaagguggucauggagugaaaggcugggccuuugaugauggaaaugacguguggaugggaagaacgaucagcgagaagucacgcuuaggguaugaaaccuucaaagucauugaaggcugguccaaccauaaguccaaauugcagauaaauaggcaagucauaguugacagagguaauagguccgguuauucugguauuuucucuguugaaggcaaaagcugcaucaaucggugcuuuuauguggaguugauuaggggaagaaaagaggaaacugaagucuuguggaccucaaacaguauuguuguguuuuguggcaccucagguacauauggaacaggcucauggccugauggggcggaccucaaucucaugccuauauaa

SEQ ID NO: 52782 - RNA, 1413 nt, Artificial Sequence; identical to SEQ ID NO: 51948
  derived and/or modified CDS sequence (wt) from neuraminidase__InfluenzaA__AEI59993

SEQ ID NO: 52783 - RNA, 1413 nt, Artificial Sequence; identical to SEQ ID NO: 51944
  derived and/or modified CDS sequence (wt) from neuraminidase__InfluenzaA__AEI60004

SEQ ID NO: 52784 - RNA, 1410 nt, Artificial Sequence
  derived and/or modified CDS sequence (wt) from neuraminidase__InfluenzaA__AEI60015
augaauccaaaucaaaagauaauaacgauuggcucuguuucucucaccauuuccacaauaugcuucuucaugcaaauugccaucuugauaacuacuguaacauugcauuucaagcaauaugaauucaacucccccccaaacaaccaagugaugcugugugaaccaacaauaauagaaagaaacauaacagagauaguguaucugaccaacaccaccauagagaaggaaauaugccccaaacuagcagaauacagaaauuggucaaagccgcaaugugacauuacaggauuugcaccuuuuucuaaggacaauucgauuagacuuuccgcugguggggacaucugggugacaagagaaccuuaugugucaugcgauccugacaaguguuaucaauuugcccuuggacagggaacaacacuaaacaacgugcauucaaauaacacaguacgugauaggaccccuuaucggacccuauugaugaaugaguuagguguucccuuucaucuggggaccaagcaagugugcauagcaugguccagcucaaguugucacgauggaaaagcauggcugcauguuuguauaacgggggaugauaaaaaugcaacugcuagcuucauuuacaaugggaggcuuguagauaguguuguuucaugguccaaagaaauccucaggacccaggagucagaaugcgucuguaucaauggaacuuguacaguaguaaugacugaugggagugcuucaggaaaagcugauacuaaaauauuauucauugaggaggggaaaaucguucauacuagcacauugucaggaagugcucagcaugucgaggagugcucuugcuauccucgauauccuggugucagaugugucugcagagacaacuggaaaggcuccaauaggcccaucguagauauaaacauaaaggaucauagcauuguuuccaguuauguguguucaggacuuguuggagacacacccagaaaaaacgacagcuccagcaguggccauuguuuggauccuaacaaugaagaaggugguaauggagugaaaggcugggccuuugaugauggaaaugacguguggaugggaagaacgaucagcgagaagucacgcuuaggguaugaaaccuucaaagucauugaaggcugguccaaccauaaguccaaauugcagauaaauaggcaagucauaguugacagagguaauagguccgguuauucugguauuuucucuguugaaggcaaaagcugcaucaaucggugcuuuuauguggaguugauuaggggaagaaaagaggaaacugaagucuuguggaccucaaacaguauuguuguguuuuguggcaccucagguacauauggaacaggcucauggccugauggggcggaccucaaucucaugccuauauaa

SEQ ID NO: 52785 - RNA, 1410 nt, Artificial Sequence; identical to SEQ ID NO: 51260
  derived and/or modified CDS sequence (wt) from neuraminidase__InfluenzaA__AEI60026

SEQ ID NO: 52786 - RNA, 1410 nt, Artificial Sequence
  derived and/or modified CDS sequence (wt) from neuraminidase__InfluenzaA__AEI60037
augaauccaaaucaaaagauaauaacgauuggcucuguuucucucaccauuuccacaauaugcuucuucaugcaaauugccaucuugauaacuacuguaacauugcauuucaagcaauaugaauucaacucccccccaaacaaccaagugaugcugugugaaccaacaauaauagaaagaaacauaacagagauaguguaucugaccaacaccaccauagagaaggaaauaugccccaaacuagcagaauacagaaauuggucaaagccgcaaugugacauuacaggauuugcaccuuuuucuaaggacaauucgauuaggcuuuccgcugguggggacaucugggugacaagagaaccuuaugugucaugcgauccugacaaguguuaucaauuugcccuuggacagggaacaacacuaaacaacgugcauucaaauaacacaguacgugauaggaccccuuaucggacccuauugaugaaugaguuagguguuccuuuucaucuggggaccaagcaggugugcauagcaugguccagcucaaguugucacgauggaaaagcauggcugcauguuuguauaacgggggaugauaaaaaugcaacugcuagcuucauuuacaaugggaggcuuguagauaguguuguuucaugguccaaagaaauccucaggacccaggagucagaaugcgucuguaucaauggaacuuguacaguaguaaugacugaugggagugcuucaggaaaagcugauacuaaaauacuauucauugaggaggggaaaaucguucauacuagcacauuaucaggaagugcucagcaugucgaggagugcucuugcuauccucgauauccuggugucagaugugucugcagagacaacuggaaaggcuccaauaggcccaucguagauauaaacauaaaggaucauagcauuguuuccaguuauguguguucaggacuuguuggagacacacccagaagaaacgacagcuccagcaguagccauuguuuggauccuaacaaugaagaagguggucauggagugaaaggcugggccuuugaugauggaaaugacguguggaugggaagaacgaucagcgagaagucacgcuuaggguaugaaaccuucaaagucauugaaggcugguccaaccauaaguccaaauugcagauaaauaggcaagucauaguugacagagguaauagguccgguuauucugguauuuucucuguugaaggcaaaagcugcaucaaucggugcuuuuauguggaguugauuaggggaagaaaagaggaaacugaagucuuguggaccucaaacaguauuguuguguuuuguggcaccucagguacauauggaacaggcucauggccugauggggcggaccucaaucucaugccuauauaa

SEQ ID NO: 52787 - RNA, 1410 nt, Artificial Sequence
  derived and/or modified CDS sequence (wt) from neuraminidase__InfluenzaA__AEI60048
augaauccaaaucaaaagauaauaacgauuggcucuguuucucucaccauuuccacaauaugcuucuucaugcaaauugccaucuugauaacuacuguaacauugcauuucaagcaauaugaauucaacucccccccaaacaaccaagugaugcugugugcaccaacaauaauagaaagaaacauaacagagauaguguaucugaccaacaccaccauagagaaggaaauaugccccaaacuagcagaauacagaaauuggucaaagccgcaaugugacauuacaggguuugcaccuuuuucuaaggacaauucgauuaggcuuuccgcugguggggacaucugggugacaagagaaccuuaugugucaugcgauccugacaaguguuaucaauuugcccuuggacagggaacaacacuaaacaacguacauucaaauaacacaguacgugauaggaccccuuaucggacccuauugaugaaugaguuagguguuccuuuucaucuggggaccaagcaagugugcauagcaugguccagcucaaguugucacgauggaaaagcauggcugcauguuuguauaacgggggaugauaaaaaugcaacugcuagcuucauuuacaaugggaggcuuguagauaguguuguuucaugguccaaagaaauccucaggacccaggagucagaaugcguuuguaucaauggaacuuguacaguaguaaugacugaugggagugcuucaggaaaagcugauacuaaaauauuauucauugaggaggggaaaaucguucauacuagcacauugucaggaagugcucagcaugucgaggagugcuccugcuauccucgauauccuggugucagaugugucugcagagacaacuggaaaggauccaauaggcccaucguagauauaaacauaaaggaucauagcauugucuccaguuauguguguucaggacuuguuggagacacacccagaaaaaacgacagcuccagcaguagccauuguuuggauccuaacaaugaggaagguggucauggggugaaaggcugggccuuugaugauggaaaugacguguggaugggaagaacgaucagcgagaagucacgcuuaggguaugaaaccuucaaagucauugaaggcugguccaacccuaaguccaaauugcagauaaauaggcaagucauaguugacagagguaauagguccgguuauucugguauuuucucuguugaaggcaaaagcugcaucaaucggugcuuuuauguggaguugauaaggggaagaaaagaggaaacugaagucuuguggaccucaaacaguauuguuguguuuuguggcaccucagguacauauggaacaggcucauggccugauggggcggacaucaaucucaugccuauauaa

SEQ ID NO: 52788 - RNA, 1410 nt, Artificial Sequence
  derived and/or modified CDS sequence (wt) from neuraminidase__InfluenzaA__AEI60089
augaauccaaaccaaaagauaauaaccauugguucggucuguaugacaauuggaauggcuaacuuaauauuacaaauuggaaacauaaucucaauauggauuagccacucaauucaacuugggaaucaaaaucagauugaaacaugcaaucaaagcgucauuacuuaugaaaacaacacuuggguaaaucagacauauguuaacaucagcaacaccaacuuugcugcuggacagucagugguuuccgugaaauuagcgggcaauuccucucucugcccuguuaguggaugggcuauauacaguaaagacaacaguauaagaaucgguuccaagggggauguguuugucauaagggaaccauucauaucaugcucccccuuggaaugcagaaccuucuucuugacucaaggggccuugcuaaaugacaaacauuccaauggaaccauuaaagacaggagcccauaucgaacccuaaugagcuguccuauuggugaaguucccucuccauacaacucaagauuugagucagucgcuuggucagcaagugcuugucaugauggcaucaauuggcuaacaauuggaauuucuggcccagacaauggggcaguggcuguguuaaaguacaacggcauaauaacagacacuaucaagaguuggagaaacaauauauugagaacacaagagucugaaugugcauguguaaaugguucuugcuuuaccauaaugaccgauggaccaagugauggacaggccucauacaagaucuucagaauagaaaagggaaagauagucaaaucagucgaaaugaaugccccuaauuauuacuaugaggaaugcuccuguuauccugauucuagugaaaucacaugugugugcagggauaacuggcauggcucgaaucgaccgugggugucuuucaaccagaaucuggaauaucagauaggauacauaugcagugggauuuucggagacaauccacgcccuaaugauaagacaggcaguugugguccaguaucgucuaauggagcaaauggaguaaaaggauuuucauucaaauacggcaaugguguuuggauagggagaacuaaaagcauuaguucaagaaaagguuuugagaugauuugggauccaaacggauggacugggacagacaauaacuucucaauaaagcaagauaucguaggaauaaaugaguggucaggauauagcgggaguuuuguucagcauccagaacuaacagggcuggacuguauaagaccuugcuucuggguugaacuaaucagagggcgacccaaagagaacacaaucuggacuagcgggagcagcauauccuuuugugguguaaacagugacacuguggguuggucuuggccagacggugcugaguugccauuuaccauugacaaguaa

SEQ ID NO: 52789 - RNA, 1410 nt, Artificial Sequence
  derived and/or modified CDS sequence (wt) from neuraminidase__InfluenzaA__AEI60099
augaauccaaaccaaaagauaauaaccauugguucggucuguaugacaauuggaauggcuaacuuaauauuacaaauuggaaacauaaucucaauauggauuagccacucaauucaacuugggaaucaaaaucaaauugaaacaugcaaucaaagcgucauuacuuaugaaaacaacacuuggguaaaucagacauauguuaacaucagcaacaccaacuuugcugcuggacagucagugguuuccgugaaauuagcgggcaauuccucucucugcccuguuaguggaugggcuauauacaguaaagacaacaguauaagaaucgguuccaagggggauguguuugucauaagggaaccauucauaucaugcucccccuuggaaugcagaaccuucuucuugacucaaggggccuugcuaaaugacaaacauuccaauggaaccauuaaagacaggagcccauaucgaacccuaaugagcuguccuauuggugaaguucccucuccauacaacucaagauuugagucagucgcuuggucagcaagugcuugucaugauggcaucaauuggcuaacaauuggaauuucuggcccagacaauggggcaguggcuguguuaaaguacaacggcauaauaacagacacuaucaagaguuggagaaacaauauauugagaacacaagagucugaaugugcauguguaaaugguucuugcuuuaccauaaugaccgauggaccaagugauggacaggccucauacaagaucuucagaauagaaaagggaaagauagucaaaucagucgaaaugaaugccccuaauuaucacuaugaggaaugcuccuguuauccugauucuagugaaaucacaugugugugcagggauaacuggcauggcucgaaucgaccgugggugucuuucaaccagaaucuggaauaucagauaggauacauaugcagugggauuuucggagacaauccacgcccuaaugauaagacaggcaguugugguccaguaucgucuaauggagcaaauggaguaaaaggauuuucauucaaauacggcaaugguguuuggauagggagaacuaaaagcauuaguucaagaaaagguuuugagaugauuugggauccaaacggauggacugggacagacaauaacuucucaauaaagcaagauaucguaggaauaaaugaguggucaggauauagcgggaguuuuguucagcauccagaacuaacagggcuggauuguauaagaccuugcuucuggguugaacuaaucagagggcgacccaaagagaacacaaucuggacuagcgggagcagcauauccuuuugugguguaaacagugacacuguggguuggucuuggccagacggugcugaguugccauuuaccauugacaaguaa

SEQ ID NO: 52790 - RNA, 1410 nt, Artificial Sequence
  derived and/or modified CDS sequence (wt) from neuraminidase__InfluenzaA__AEI60111
augaacccaaaucaaaagauaauaacaauuggcucuauuucucuuaccauugccacaauaugcuuccuuaugcaaauugccauccugguaacuacuguaacauugcauuucaagcaguauaaaugcaacuccccuccaaacaaccgaguaaugcugugugaaccaacaauaauagaaagaaacauaacagagauaguauaucugaccaacaccaccauagagaaggaaauaugccccaaacuagcagaauacaggaauuggucaaagccacaauguaacauuaaaggauuugcaccuuuuucuaaggacaauucgauucggcuuuccgcugguggggacaucugggugacaagagaaccuuauguaucaugcgauccggauaaguguuaucaauuugcccuuggucagggaacaacacuaaacaacgggcauucaaaugacacaguacaugauaggaccccuuaccggacccuauugaugaaugaauuggguguuccauuucauuugggaaccaggcaagugugcauagcaugguccagcucaaguugucaugauggaaaagcauggcugcauguuuguauaacuggagacgaugaaaaugcaacugcuagcuucauuuacaaugggaggcuuguagauaguauugggucaugguccaaaaaaauacucagaacccaggagucggaaugcguuuguaucaauggaacuuguacaguaguaaugacagacgggagcgcuucaggaaaggcugauacuaaaauacuauucauugaagaggggaagaucguucauauuagcacauugucaggaagugcucagcaugucgaggagugcuccuguuauccucgauauccuggugucagauguguuugcagagacaacuggaaaggcuccaauaggcccaucguagauauaaauguaagggauuauagcauuguuuccaguuaugugugcucaggacuuguuggagacacacccagaaaaaacgacagcuucagcaguagccacugccuagauccuaacaaugaggaagguggucauggagugaaaggaugggccuuugaugauggaaaugacguguggaugggaagaacgaucagcgagaaguuacgcucagguuaugaaaccuucaaagucaucgaaggcugguccaaaccuaacuccaaauugcaaguaaauaggcaagucauaguugaaagagguaacagaucagguuauucugguauuuucuccguugaagguaaaagcugcaucaaucggugcuuuuauguggaguugauaaggggaaggaaagaggaaacuaaagucugguggaccucaaacaguauuguuguguuuuguggcaccucagguacauauggaacaggcucauggccugauggggcggauaucaauaucaugccuauauaa

SEQ ID NO: 52791 - RNA, 1410 nt, Artificial Sequence
  derived and/or modified CDS sequence (wt) from neuraminidase__InfluenzaA__AEI73669
augaauccaaaccaaaagauaauaaccauugguucggucuguaugacaauuggaauggcuaacuuaauauuacaaauuggaaacauaaucucaauauggauuagccacucaauucaacuugggaaucaaaaucagauugaaacaugcaaucaaagcgucauuacuuaugaaaacaacacuuggguaaaucagacauauguuaacaucagcaacaccaacuuugcugcuggacagucagugguuuccgugaaauuagcgggcaauuccucucucugccccguuaguggaugggcuauauacaguaaagacaacaguauaagaaucgguuccaagggggauguguuugucauaagggaaccauucauaucaugcucccccuuggaaugcagaaccuucuucuugacucaaggggccuugcuaaaugacaaacauuccaauggaaccauuaaagacaggagcccauaucgaacccuaaugagcuguccuauuggugaaguucccucuccauacaacucaagauuugagucagucgcuuggucagcaagugcuugucaugauggcaucaauuggcuaacaauuggaauuucuggcccagacaauggggcaguggcuguguuaaaguacaacggcauaauaacagacacuaucaagaguuggagaaacaauauauugagaacacaagagucugaaugugcauguguaaaugguucuugcuuuacuguaaugaccgauggaccaagugauggacaggccucauacaagaucuucagaauagaaaagggaaagauagucaaaucagucgaaaugaaugccccuaauuaucacuaugaggaaugcuccuguuauccugauucuagugaaaucacaugugugugcagggauaacuggcauggcucgaaucgaccgugggugucuuucaaccagaaucuggaauaucagauaggauacauaugcagugggauuuucggagacaauccacgcccuaaugauaagacaggcaguugugguccaguaucgucuaauggagcaaauggaguaaaaggauuuucauucaaauacggcaaugguguuuggauagggagaacuaaaagcauuaguucaagaaacgguuuugagaugauuugggauccgaacggauggacugggacagacaauaacuucucaauaaagcaagauaucguaggaauaaaugaguggucaggauauagcgggaguuuuguucagcauccagaacuaacagggcuggacuguauaagaccuugcuucuggguugaacuaaucagagggcgacccaaagagaacacaaucuggacuagcgggagcagcauauccuuuuguggugugaacagugacacuguggguuggucuuggccagacggugcugaguugccauuuaccauugacaaguaa

SEQ ID NO: 52792 - RNA, 1410 nt, Artificial Sequence
  derived and/or modified CDS sequence (wt) from neuraminidase__InfluenzaA__AEI86727
augaauccaaaccaaaagauaauaaccauugguucggucuguauaacaauuggaauggcuaacuuaauauuacaaauuggaaacauaaucucaauauggauuagccacucaauucaacuugggaaucaaaaucagauugaaacaugcaaucaaagcgucauuacuuaugaaaacaacacuuggguaaaucagacauauguuaacaucagcaacaccaacuuugcugcuggacagucagugguuuccgugaaauuagcgggcaauuccucucucugcccuguuaguggaugggcuauauacaguaaagacaacaguauaagaaucgguuccaagggggauguguuugucauaagggaaccauucauaucgugcucccccuuggaaugcagaaccuucuucuugacucaaggggccuugcuaaaugacaaacauuccaauggaaccauuaaagacaggagcccauaucgaacccuaaugagcuguccuauuggugaaguucccucuccauacaacucaaaauuugagucagucgcuuggucagcaagugcuugucaugauggcaucaguuggcuaacaauuggaauuucuggcccagacaauggggcaguggcuguguuaaaguacaacggcauaauaacagacacuaucaagaguuggagaaacaauauauugagaacacaagagucugaaugugcauguguaaaugguucuuguuuuacuguaaugaccgauggaccaagugauggacaggccucauacaagaucuucagaauagaaaagggaaagauagucaaaucagucgaaaugaaugccccuaauuaucacuaugaggaaugcuccuguuauccugauucuagugaaaucacaugugugugcagggauaacuggcauggcucgaaucgaccgugggugucuuucaaccagaaucuggaauaucagauaggauacauaugcagugggauuuucggagacaauccacgcccuaaugauaagacaggcaguugugguccaguaucgucuaauggagcaaauggaguaaaaggauuuucauucaaauacggcaaugguguuuggauagggagaacuaaaagcauuaguucaagaaacgguuuugagaugauuugggauccgaacggauggacugggacagacaauaacuucucaauaaagcaagauaucguaggaauaaaugaguggucaggauauagcggaaguuuuguucagcauccagaacuaacagggcuggauuguauaagaccuugcuucuggguugaacuaaucagagggcgacccaaagagaacacaaucuggacuagcgggagcagcauauccuuuugugguguaaacagugacacuguggguuggucuuggccagacggugcugaguugccauuuaccauugacaaguaa

SEQ ID NO: 52793 - RNA, 1410 nt, Artificial Sequence
  derived and/or modified CDS sequence (wt) from neuraminidase__InfluenzaA__AEI86737
augaauccaaaccaaaagauaauaaccauugguucggucuguaugacaauuggaauggcuaacuuaauauuacaaauuggaaacauaaucucaauauggauuagccacucaauucaacuugggaaucaaaaucagauugaaacaugcaaucaaagcgucauuacuuaugaaaacaaaacuuggguaaaucagacauauguuaacaucagcaacaccaacuuugcugcuggacagucagugguuuccgugaaauuagcgggcaauuccucucucugcccuguuaguggaugggcuauauacaguaaagacaacaguauaagaaucgguuccaagggggauguguuugucauaagggaaccauucauaucaugcucccccuuggaaugcagaaccuucuucuugacucaaggggccuugcuaaaugacaaacauuccaauggaaccauuaaagacaggagcccauaucgaacccuaaugagcuguccuauuggugaaguucccucuccauacaacucaagauuugagucagucgcuuggucagcaagugcuugucaugauggcaucaauuggcuaacaauuggaauuucugguccagacaauggggcaguggcuguguuaaaguacaacggcauaauaacagacacuaucaagaguuggagaaacaauauauugagaacacaagagucugaaugugcauguguaaaugguucuugcuuuacuguaaugaccgauggaccaagugauggacaggccucauacaagaucuucagaauagaaaagggaaagguagucaaaucagucgaaaugaaugccccuaauuaucacuaugaggaaugcuccuguuauccugauucuagugaaaucacaugugugugcagggauaacuggcauggcucgaaucgaccgugggugucuuucaaccagaaucuggaauaucaaauaggauacauaugcagugggauuuucggagacaauccacgcccuaaugauaagacaggcaguugugguccaguaucgucuaauggagcaaauggaguaaaaggauuuucauucaaauacggcaaugguguuuggauagggagaacuaaaagcauuaguucaagaaacgguuuugagaugauuugggauccgaacggauggaccgggacagacaauaacuucucaauaaagcaagauaucguaggaauaaaugaguggucaggauauagcgggaguuuuguucagcauccagaacuaacagggcuggauuguauaagaccuugcuucuggguugaacuaaucagagggcgacccaaagagaacacaaucuggacuagcgggagcagcauauccuuuugugguguaaacagugacacuguggguuggucuuggccagacggugcugaguugccauuuaccauugacaaguaa

SEQ ID NO: 52794 - RNA, 1410 nt, Artificial Sequence
  derived and/or modified CDS sequence (wt) from neuraminidase__InfluenzaA__AEI86757
augaauccaaaccaaaagauaauaaccauugguucggucuguauaacaauuggaauggcuaacuuaauauuacaaauuggaaacauaaucucaauauggauuagccacucaauucaacuugggaaucaaaaucagauugaaacaugcaaucaaagcgucauuacuuaugaaaacaacacuuggguaaaucagacauauguuaacaucagcaacaccaacuuugcugcuggacagucagugguuuccgugaaauuagcgggcaauuccucucucugcccuguuaguggaugggcuauauacaguaaagacaacaguauaagaaucgguuccaagggggauguguuugucauaagggaaccauucauaucaugcucccccuuggaaugcagaaccuucuucuugacucaaggggccuugcuaaaugacaaacauuccaauggaaccauuaaagacaggagcccauaucgaacccuaaugagcuguccuauuggugaaguucccucuccauacaacucaagauuugagucagucgcuuggucagcaagugcuugucaugauggcaucaguuggcuaacaauuggaauuucuggcccagacaauggggcaguggcuguguuaaaguacaacggcauaauaacagacacuaucaagaguuggagaaacaauauauugagaacacaagagucugaaugugcauguguaaaugguucuuguuuuacuguaaugaccgauggaccaagugauggacaggccucauacaagaucuucagaauagaaaagggaaagauagucaaaucagucgaaaugaaugccccuaauuaucacuaugaggaaugcuccuguuauccugauucuagugaaaucacauguguaugcagggauaacuggcauggcucgaaucgaccgugggugucuuucaaccagaaucuggaauaucagauaggauacauaugcagugggauuuucggagacaauccacgcccuaaugauaagacaggcaguugugguccaguaucgucuaauggagcaaauggaguaaaaggauuuucauucaaauacggcaaugguguuuggauagggagaacuaaaagcauuauuucaagaaacgguuuugagaugauuugggauccgaacggauggacugggacagacaauaacuucucaauaaagcaagauaucguaggaauaaaugaguggucaggauauagcgggaguuuuguucagcauccagaacuaacagggcuggauuguauaagaccuugcuucuggguugaacuaaucagagggcgacccaaagagaacacaaucuggacuagcgggagcagcauauccuuuugugguguaaacagugacacuguggguuggucuuggccagacggugcugaguugccauuuaccauugacaaguaa

SEQ ID NO: 52795 - RNA, 1410 nt, Artificial Sequence
  derived and/or modified CDS sequence (wt) from neuraminidase__InfluenzaA__AEI86767
augaauccaaaccaaaagauaauaaccauugguucggucuguauaacaauuggaauggcuaacuuaauauuacaaauuggaaacauaaucucaauauggauuagccacucaauucaacuugggaaucaaaaucagauugaaacaugcaaucaaagcgucauuacuuaugaaaacaacacuuggguaaaucagacauauguuaacaucagcaacaccaacuuugcugcuggacagucagugguuuccgugaaauuagcgggcaauuccucucucugcccuguuaguggaugggcuauauacaguaaagacaacaguauaagaaucgguuccaagggggauguguuugucauaagggaaccauucauaucaugcucccccuuggaaugcagaaccuucuucuugacucaaggggccuugcuaaaugacaaacauuccaauggaaccauuaaagacaggagcccauaucgaacccuaaugagcuguccuauuggugaaguucccucuccauacaacucaagauuugagucagucgcuuggucagcaagugcuugucaugauggcaucaguuggcuaacaauuggaauuucuggcccagacaauggggcaguggcuguguuaaaguacaacggcauaauaacagacacuaucaagaguuggagaaacaauauauugagaacacaagagucugaaugugcauguguaaaugguucuuguuuuacuguaaugaccgauggaccaagugauggacaggccucauacaagaucuucagaauagaaaagggaaagauagucaaaucagucgaaaugaaugccccuaauuaucacuaugaggaaugcuccuguuauccugauucuagugaaaucacaugugugugcagggauaacuggcauggcucgaaucgaccgugggugucuuucaaccauaaucuggaauaucagauaggauacauaugcagugggauuuucggagacaauccacgcccuaaugauaagacaggcaguugugguccaguaucgucuaauggagcaaauggaguaaaaggauuuucauucaaauacggcaaugguguuuggauagggagaacuaaaagcauuaguucaagaaacgguuuugagaugauuugggauccgaacggauggacugggacagacaauaacuucucaauaaagcaagauaucguaggaauaaaugaguggucaggauauagcgggaguuuuguucagcauccagaacuaacagggcuggauuguauaagaccuugcuucuggguugaacuaaucagagggcgacccaaagagaacacaaucuggacuagcgggagcagcauauccuuuugugguguaaacagugacacuguggguuggucuuggccagacggugcugaguugccauuuaccauugacaaguaa

SEQ ID NO: 52796 - RNA, 1410 nt, Artificial Sequence; identical to SEQ ID NO: 52795
  derived and/or modified CDS sequence (wt) from neuraminidase__InfluenzaA__AEI86777

SEQ ID NO: 52797 - RNA, 1410 nt, Artificial Sequence
  derived and/or modified CDS sequence (wt) from neuraminidase__InfluenzaA__AEI86787
augaauccaaaccagaagauaauaaccauugguucggucuguaugacaauuggaauggcuaacuuaauguuacaaauuggaaacauaaucucaauauggauuagccacucaauucaacuugggaaucaaaaucagauugaaacaugcaaucaaagcgucauuacuuaugaaaacaacacuuggguaaaucagacauauguuaacaucagcaacaccaacuuugcugcuggacagucagugguuuccgugaaauuagcgggcaauuccucucucugcccuguuaguggaugggcuauauacaguaaagacaacaguauaagaaucgguuccaagggggauguguuugucauaagggaaccauucauaucaugcucccccuuggaaugcagaaccuucuucuugacucaaggggccuugcuaaaugacaaacauuccaauggaaccauuaaagacaggagcccauaucgaacccuaaugagcuguccuauuggugaaguucccucuccauacaacucaagauuugagucagucgcuuggucagcaagugcuugucaugauggcaucaauuggcuaacaauuggaauuucuggcccagacaauggggcaguggcuguguuaaaguacaacggcauaauaacagacacuaucaagaguuggagaaacaauauauugagaacacaagagucugaaugugcauguguaaaugguucuugcuuuacuguaaugaccgauggaccaagugauggacaggccucauacaagaucuucagaauagaaaagggaaagauagucaaaucagucgaaaugaaugccccuaauuaucacuaugaggaaugcuccuguuauccugauucuagugaaaucacaugugugugcagggauaacuggcauggcucgaaucgaccgugggugucuuucaaccagaaucuggaauaucagauaggauacauaugcagugggauuuucggagacaauccacgcccuaaugauaagacaggcaguugugguccaguaucgucuaauggagcaaauggaguaaaaggauuuucauucaaauacggcaaugguguuuggauagggagaacuaaaagcauuaguucaagaaacgguuuugagaugauuugggauccgaauggauggacugggacagacaauaacuucucaauaaagcaagauaucguaggaauaaaugaguggucaggauauagcgggaguuuuguucagcauccagaacuaacagggcuggauuguauaagaccuugcuucuggguugaacuaaucagggggcgacccaaagagaacacaaucuggacuagcgggagcagcauauccuuuugugguguaaacagugacacuguggguuggucuuggccagacggugcugaguugccauuuaccauugacaaguaa

SEQ ID NO: 52798 - RNA, 1410 nt, Artificial Sequence
  derived and/or modified CDS sequence (wt) from neuraminidase__InfluenzaA__AEI86797
augaauccaaaccaaaagauaauaaccauugguucggucuguauaacaauuggaauggcuaacuuaauauuacaaauuggaaacauaaucucaauauggauuagccacucaauucaacuugggaaucaaaaucagauugaaacaugcaaucaaagcgucauuacuuaugaaaacaacacuuggguaaaucagacauauguuaacaucagcaacaccaacuuugcugcuggacagucagugguuuccgugaaauuagcgggcaauuccucucucugcccuguuaguggaugggcuauauacaguaaagacaacaguauaagaaucgguuccaagggggauguguuugucauaagggaaccauucauaucgugcucccccuuggaaugcagaaccuucuucuugacucaaggggccuugcuaaaugacaaacauuccaauggaaccauuaaagacaggagcccauaucgaacccuaaugagcuguccuauuggugaaguucccucuccauacaacucaagauuugagucagucgcuuggucagcaagugcuugucaugauggcaucaguuggcuaacaauuggaauuucuggcccagacaauggggcaguggcuguguuaaaguacaacggcauaauaacagacacuaucaagaguuggagaaacaauauauugagaacacaagagucugaaugugcauguguaaaugguucuuguuuuacuguaaugaccgauggaccaagugauggacaggccucauacaagaucuucagaauagaaaagggaaagauagucaaaucagucgaaaugaaugccccuaauuaucacuaugaggaaugcuccuguuauccugauucuagugaaaucacaugugugugcagggauaacuggcauggcucgaaucgaccgugggugucuuucaaccagaaucuggaauaucagauaggauacauaugcagugggauuuucggagacaauccacgcccuaaugauaagacaggcaguugugguccaguaucgucuaauggagcaaauggaguaaaaggauuuucauucaaauacggcaaugguguuuggauagggagaacuaaaagcauuaguucaagaaacgguuuugagaugauuugggauccgaacggauggacugggacagacaauaacuucucaauaaagcaagauaucguaggaauaaaugaguggucaggauauagcggaaguuuuguucagcauccagaacuaacagggcuggauuguauaagaccuugcuucuggguugaacuaaucagagggcgacccaaagagaacacaaucuggacuagcgggagcagcauauccuuuugugguguaaacagugacacuguggguuggucuuggccagacggugcugaguugccauuuaccauugacaaguaa

SEQ ID NO: 52799 - RNA, 1410 nt, Artificial Sequence
  derived and/or modified CDS sequence (wt) from neuraminidase__InfluenzaA__AEI86807
augaauccaaaccagaagauaauaaccauugguucggucuguaugacaauuggaauggcuaacuuaauauuacaaauuggaaacauaaucucaauauggauuagccacucaauucaacuugggaaucaaaaucagauugaaacaugcaaucaaagcgucauuacuuaugaaaacaacacuuggguaaaucagacauauguuaacaucagcaacaccaacuuugcugcuggacagucagugguuuccgugaaauuagcgggcaauuccucucucugcccuguuaguggaugggcuauauacaguaaagacaacaguauaagaaucgguuccaagggggauguguuugucauaagggaaccauucauaucaugcucccccuuggaaugcagaaccuucuucuugacucaaggggccuugcuaaaugacaaacauuccaauggaaccauuaaagacaggagcccauaccgaacccuaaugagcuguccuauuggugaaguucccucuccauacaacucaagauuugagucagucgcuuggucagcaagugcuugucaugauggcaucaauuggcuaacaauuggaauuucuggcccagacaauggggcaguggcuguguuaaaguacaacggcauaauaacagacacuaucaagaguuggagaaacaauauauugagaacacaagagucugaaugugcauguguaaaugguucuugcuuuacuguaaugaccgauggaccaagugauggacaggccucauacaagaucuucagaauagaaaagggaaagauagucaaaucagucgaaaugaaugccccuaauuaucacuaugaggaaugcuccuguuauccugauucuaguaaaaucacaugugugugcagggauaacuggcauggcucgaaucgaccgugggugucuuucaaccagaaucuggaauaucagauaggauacauaugcagugggauuuucggagacaauccacgcccuaaugauaagacaggcaguugugguccaguaucgucuaauggagcaaauggaguaaaaggauuuucauucaaauacggcaaugguguuuggauagggagaacuaaaagcauuaguucaagaaacgguuuugagaugauuugggauccgaacggauggacugggacagacaauaacuucucaauaaagcaagauaucguaggaauaaaugaguggucaggauauagcgggaguuuuguucagcauccagaacuaacagggcuggauuguauaagaccuugcuucuggguugaacuaaucagagggcgacccaaagagaacacaaucuggacuagcgggagcagcauauccuuuugugguguaaacagugacacuguggguuggucuuggccagacggugcugaguugccauuuaucauugacaaguaa

SEQ ID NO: 52800 - RNA, 1410 nt, Artificial Sequence; identical to SEQ ID NO: 52795
  derived and/or modified CDS sequence (wt) from neuraminidase__InfluenzaA__AEI86817

SEQ ID NO: 52801 - RNA, 1410 nt, Artificial Sequence
  derived and/or modified CDS sequence (wt) from neuraminidase__InfluenzaA__AEI86827
augaauccaaaccaaaagauaauaaccauugguucggucuguauaacaauuggaauggcuaacuuaauauuacaaauuggaaacauaaucucaauauggauuagccacucaauucaacuugggaaucaaaaucagauugaaacaugcaaucaaagcgucauuacuuaugaaaacaacacuuggguaaaucagacauauguuaacaucagcaacaccaacuuugcugcuggacagucagugguuuccgugaaauuagcgggcaauuccucucucugcccuguuaguggaugggcuauauacaguaaagacaacaguauaagaaucgguuccaagggggauguguuugucauaagggaaccauucauaucaugcucccccuuggaaugcagaaccuucuucuugacucaaggggccuugcuaaaugacaaacauuccaauggaaccauuaaagacaggagcccauaucgaacccuaaugagcuguccuauuggugaaguucccucuccauacaacucaagauuugagucagucgcuuggucagcaagugcuugucaugauggcaucaguuggcuaacaauuggaauuucuggcccagacaauggggcaguggcuguguuaaaguacaacggcauaauaacagacacuaucaagaguuggagaaacaauauauugagaacacaagagucugaaugugcauguguaaaugguucuuguuuuacuguaaugaccgauggaccaagugauggacaggccucauacaaaaucuucagaauagaaaagggaaagauagucaaaucagucgaaaugaaugccccuaauuaucacuaugaggaaugcuccuguuauccugauucuagugaaaucacaugugugugcagggauaacuggcauggcucgaaucgaccgugggugucuuucaaccauaaucuggaauaucagauaggauacauaugcagugggauuuucggagacaauccacgcccuaaugauaagacaggcaguugugguccaguaucgucuaauggagcaaauggaguaaaaggauuuucauucaaauacggcaaugguguuuggauagggagaacuaaaagcacuaguucaagaaacgguuuugagaugauuugggauccgaacggauggacugggacagacaauaacuucucaauaaagcaagauaucguaggaauaaaugaguggucaggauauagcgggaguuuuguucagcauccagaacuaacagggcugaauuguauaagaccuugcuucuggguugaacuaaucagagggcgacccaaagagaacacaaucuggacuagcgggagcagcauauccuuuugugguguaaacagugacacuguggguuggucuuggccagacggugcugaguugccauuuaccauugacaaguaa

SEQ ID NO: 52802 - RNA, 1410 nt, Artificial Sequence
  derived and/or modified CDS sequence (wt) from neuraminidase__InfluenzaA__AEI86837
augaauccaaaccaaaagauaauaaccauugguucggucuguauaacaauuggaauggcuaacuuaauauuacaaauuggaaacauaaucucaauauggauuagccacucaauucaacuugggaaucaaaaucagauugaaacaugcaaucaaagcgucauuacuuaugaaaacaacacuuggguaaaucagacauauguuaacaucagcaacaccaacuuugcugcuggacagucagugguuuccgugaaauuagcgggcaauuccucucucugcccuguuaguggaugggcuauauacaguaaagacaacaguauaagaaucgguuccaagggggauguguuugucauaagggaaccauucauaucaugcucccccuuggaaugcagaaccuucuucuugacucaaggggccuugcuaaaugacaaacauuccaauggaaccauuaaagacaggagcccauaucgaacccuaaugagcuguccuauuggugaaguucccucuccauacaacucaagauuugagucagucgcuuggucagcaagugcuugucaugauggcaucaguuggcuaacaauuggaauuucuggcccagacaauggggcaguggcuguguuaaaguacaacggcauaauaacagacacuaucaagaguuggagaaacaauauauugagaacacaagagucugaaugugcauguguaaaugguucuuguuuuacuguaaugaccgauggaccaagugauggacaggccucauacaagaucuucagaauagaaaagggaaagauagucaaaucagucgaaaugaaugccccuaauuaucacuaugaggaaugcuccuguuauccugauucuagugaaaucacaugugugugcagggauaacuggcauggcucgaaucgaccgugggugucuuucaaccagaaucuggaauaucagauaggauacauaugcagugggauuuucggagacaauccacgcccuaaugauaagacaggcaguugugguccaguaucgucuaauggagcaaauggaguaaaaggauuuucauucaaauacggcaaugguguuuggauagggagaacuaaaagcauuaguucaagaaacgguuuugagaugauuugggauccgaacggauggacugggacagacaauaacuucucaauaaagcaagauaucguaggaauaaaugaguggucaggauauagcggaaguuuuguucagcauccagaacuaacagggcuggauuguauaagaccuugcuucuggguugaacuaaucagagggcgacccaaagagaacacaaucuggacuagcgggagcagcauauccuuuugugguguaaacagugacacuguggguuggucuuggccagacggugcugaguugccauuuaccauugacaaguaa

SEQ ID NO: 52803 - RNA, 1410 nt, Artificial Sequence; identical to SEQ ID NO: 52602
  derived and/or modified CDS sequence (wt) from neuraminidase__InfluenzaA__AEI86847

SEQ ID NO: 52804 - RNA, 1410 nt, Artificial Sequence
  derived and/or modified CDS sequence (wt) from neuraminidase__InfluenzaA__AEI86867
augaauccaaaccaaaagauaauaaccauugguucggucuguaugacaauuggaauggcuaacuuaauauuacaaauuggaaacauaaucucaauauggauuagccacucaauucaacuugggaaucaaaaucagauugaaacaugcaaucaaagcgucauuacuuaugaaaacaacacuuggguaaaucagacauauguuaacaucagcaacaccaacuuggcugcuggacagucagugguuuccgugaaauuagcgggcaauuccucucucugcccuguuaguggaugggcuauauacaguaaagacaacaguauaagaaucgguuccaagggggauguguuugucauaagggaaccauucauaucaugcucccccuuggaaugcagaaccuucuucuugacucaaggggccuugcuaaaugacaaacauuccaauggaaccauuaaagacagaagcccauaucgaacccuaaugagcuguccuauuggugaaguucccucuccauacaacucaaaauuugagucagucgcuuggucagcaagugcuugucaugauggcaucaauuggcuaacaauuggaauuucuggcccagacaauggggcaguggcuguguuaaaguacaacggcauaauaacagacacuaucaagaguuggagaaacaauauauugagaacacaagagucugaaugugcauguguaaaugguucuugcuuuaccauaaugaccgauggaccaagugauggacaggccucauacaagaucuucagaauagaaaagggaaagauagucaaaucagucgaaaugaaugccccuaauuaucacuaugaggaaugcuccuguuauccugauucuagugaaaucacaugugugugcagggauaacuggcauggcucgaaucgaccgugggugucuuucaaccagaaucuggaauaucagauaggauacauaugcagugggauuuucggagacaauccacgcccuaaugauaagacaggcaguugugguccaguaucgucuaauggagcaaauggaguaaaaggauuuucauucaaauacggcaaugguguuuggauagggagaacuaaaagcauuaguucaagaaaagguuuugagaugauuugggauccaaacggauggacugggacagacaauaacuucucaauaaagcaagauaucguaggaauaaaugaguggucaggauauagcgggaguuuuguucagcauccggaacuaacagggcuggacuguauaagaccuugcuucuggguugaacuaaucagagggcgacccaaagagaacacaaucuggacuagcgggagcagcauauccuuuugugguguaaacagugacacuguggguuggucuuggccagacggugcugaguugccauuuaccauugacaaguaa

SEQ ID NO: 52805 - RNA, 1410 nt, Artificial Sequence; identical to SEQ ID NO: 52802
  derived and/or modified CDS sequence (wt) from neuraminidase__InfluenzaA__AEI86887

SEQ ID NO: 52806 - RNA, 1410 nt, Artificial Sequence; identical to SEQ ID NO: 52802
  derived and/or modified CDS sequence (wt) from neuraminidase__InfluenzaA__AEI86897

SEQ ID NO: 52807 - RNA, 1410 nt, Artificial Sequence
  derived and/or modified CDS sequence (wt) from neuraminidase__InfluenzaA__AEI86907
augaauccaaaccaaaagauaauaaccauugguucggucuguaugacaauuggaauggcuaacuuaauauuacaaauuggaaacauaaucucaauauggauuagccacucaauucaacuugggaaucaaaaucagauugaaacaugcaaucaaagcgucauuacuuaugaaaacaacacuuggguaaaucagacauauguuaacaucagcaacaccaacuuugcugcuggacagucagugguuuccgugaaauuagcgggcaauuccucucucugcccuguuaguggaugggcuauauacaguaaagacaacaguauaagaaucgguuccaagggggauguguuugucauaagggaaccauucauaucaugcucccccuuggaaugcagaaccuucuucuugacucaaggggccuugcuaaaugacauacauuccaauggaaccauuaaagacaggagcccauaucgaacccuaaugagcuguccuauuggugaaguucccucuccauacaacucaagauuugagucagucgcuuggucagcaagugcuugucaugauggcaucaauuggcuaacaauuggaauuucuggcccagacaauggggcaguggcuguguuaaaguacaacggcauaauaacagacacuaucaagaguuggagaaacaauauauugagaacacaagagucugaaugugcauguguaaaugguucuugcuuuaccauaaugaccgauggaccaagugauggacaggccucauacaagaucuucagaauagaaaagggaaagauagucaaaucagucgaaaugaaugccccuaauuaucacuaugaggaaugcuccuguuauccugauucuagugaaaucacaugugugugcagggauaacuggcauggcucgaaucgaccgugggugucuuucaaccagaaucuggaauaucagauaggauacauaugcagugggauuuucggagacaauccacgcccuaaugauaagacaggcaguugugguccaguaucgucuaauggagcaaauggaguaaaaggauuuucauucaaauacggcaaugguguuuggauagggagaacuaaaagcauuaguucaagaaaagguuuugagaugauuugggauccaaacggauggacugggacagacaauaacuucucaauaaagcaagauaucguaggaauaaaugaguggucaggauauagcgggaguuuuguucagcauccagaacuaacagggcuggauuguauaagaccuugcuucuggguugaacuaaucagagggcgacccaaagagaacacaaucuggacuagcgggagcagcauauccuuuugugguguaaacagugacacuguggguuggucuuggccagacggugcugaguugccauuuaccauugacaaguaa

SEQ ID NO: 52808 - RNA, 1410 nt, Artificial Sequence
  derived and/or modified CDS sequence (wt) from neuraminidase__InfluenzaA__AEI86917
augaauccaaaccaaaagauaauaaccauugguucgaucuguaugacaauuggaauggcuaacuuaauauuacaaauuggaaacauaaucucaauauggauuagccacucaauucaacuugggaaucaaaaucagauugaaacaugcaaucaaagcgucauuacuuaugaaaacaacacuuggguaaaucagacauauguuaacaucagcaacaccaacuuugcugcuggacagucagugguuuccgugaaauuagcgggcaauuccucucucugcccuguuaguggaugggcuauauacaguaaagacaacaguauaagaaucgguuccaagggggauguguuugucauaagggaaccauucauaucaugcucccccuuggaaugcagaaccuucuucuugacucaaggggccuugcuaaaugacaaacauuccaauggaaccauuaaagacaggagcccauaucgaacccuaaugagcuguccuauuggugaaguucccucuccauacaacucaagauuugagucagucgcuuggucagcaagugcuugucaugauggcaucaauuggcuaacaauuggaauuucuggcccagacaauggggcaguggcuguguuaaaguacaacggcauaauaacagacacuaucaagaguuggagaaacaauauauugagaacacaagagucugaaugugcauguguaaaugguucuugcuuuaccauaaugaccgauggaccaagugauggacaggccucauacaagaucuucagaauagaaaagggaaagauagucaaaucagucgaaaugaaugccccuaauuaucacuaugaggaaugcuccuguuauccugauucuagugaaaucacaugugugugcagggauaacuggcauggcucgaaucgaccgugggugucuuucaaccagaaucuggaauaucagauaggauacauaugcagcgggauuuucggagacaauccacgcccuaaugauaagacaggcaguugugguccaguaucgucuaauggagcaaauggaguaaaaggauuuucauucaaauacggcaaugguguuuggauagggagaacuaaaagcauuaguucaagaaaagguuuugagaugauuugggauccaaacggauggacugggacagacaauaacuucucaauaaagcaagauaucguaggaauaaaugaguggucaggauauagcgggaguuuuguucagcauccagaacuaacagggcuggacuguauaagaccuugcuucuggguugaacuaaucagagggcgacccaaagagaacacaaucuggacuagcgggagcagcauauccuuuugugguguaaacagugacacuguggguuggucuuggccagacggugcugaguugccauuuaccauugacaaguaa

SEQ ID NO: 52809 - RNA, 1410 nt, Artificial Sequence
  derived and/or modified CDS sequence (wt) from neuraminidase__InfluenzaA__AEI86927
augaauccaaaccaaaagauaauaaccauugguucggucuguaugacaauuggaauggcuaacuuaauauuacaaauuggaaacauaaucucaauauggauuagccacucaauucaacuugggaaucaaaaucagauugaaacaugcaaucaaagcgucauuacuuaugaaaacaacacuuggguaaaucagacauauguuaacaucagcaacaccaacuuugcugcuggacagucagugguuuccgugaaauuagcgggcaauuccucucucugcccuguuaguggaugggcuauauacaguaaagacaacaguauaagaaucgguuccaagggggauguguuuguaauaagggaaccauucauaucaugcucccccuuggaaugcagaaccuucuucuugacucaaggggccuugcuaaaugacaaacauuccaauggaaccauuaaagacaggagcccauaucgaacccuaaugagcuguccuauuggugaaguucccucuccauacaacucaagauuugagucagucgcuuggucagcaagugcuugucaugauggcaucaauuggcuaacaauuggaauuucuggcccagacaauggggcaguggcuguguuaaaguacaacggcauaauaacagacacuaucaagaguuggagaaacaauauauugagaacacaagagucugaaugugcauguguaaaugguucuugcuuuaccauaaugaccgauggaccaagugauggacaggccucauacaagaucuucagaauagaaaagggaaagauagucaaaucagucgaaaugaaugccccuaauuaucacuaugaggaaugcuccuguuauccugauucuagugaaaucacaugugugugcagggauaacuggcauggcucgaaucgaccgugggugucuuucaaccagaaucuggaauaucagauaggauacauaugcagugggauuuucggagacaauccacgcccuaaugauaagacaggcaguugugguccaguaucgucuaauggagcaaauggaguaaaaggauuuucauucaaauacggcaaugguguuuggauagggagaacuaaaagcauuaguucaagaaaagguuuugagaugauuugggauccaaacggauggacugggacagacaauaacuucucaauaaagcaagauaucguaggaauaaaugaguggucaggauauagcgggaguuuuguucagcauccagaacuaacagggcuggauuguauaagaccuugcuucuggguugaacuaaucagagggcgacccaaagagaacacaaucuggacuagcgggagcagcauauccuuuugugguguaaacagugacacuguggguuggucuuggccagacggugcugaguugccauuuaccauugacaaguaa

SEQ ID NO: 52810 - RNA, 1410 nt, Artificial Sequence; identical to SEQ ID NO: 52795
  derived and/or modified CDS sequence (wt) from neuraminidase__InfluenzaA__AEI86937

SEQ ID NO: 52811 - RNA, 1410 nt, Artificial Sequence
  derived and/or modified CDS sequence (wt) from neuraminidase__InfluenzaA__AEI86947
augaauccaaaccaaaagauaauaaccauugguucggucuguaugacaauuggaauggcuaacuuaauauuacaaauuggaaacauaaucucaauauggauuagccacucaauucaacuugggaauaaaaaucagauugaaacaugcaaucaaagcgucauuacuuaugaaaacaacacuuggguaaaucagacauauguuaacaucagcaacaccaacuuugcugcuggacagucagugguuuccgugaaauuagcgggcaauuccucucucugcccuguuaguggaugggcuauauacaguaaagacaacaguauaagaaucgguuccaagggggauguguuugucauaagggaaccauucauaucaugcucccccuuggaaugcagaaccuucuucuugacucaaggggccuugcuaaaugacaaacauuccaauggaaccauuaaagacaggagcccauaucgaacccuaaugagcuguccuauuggugaaguucccucuccauacaacucaagauuugagucagucgcuuggucagcaagugcuugucaugauggcaucaauuggcuaacaauuggaauuucuggcccagacaauggggcaguggcuguguuaaaguacaacggcauaauaacagacacuaucaagaguuggagaaacaauauauugagaacacaagagucugaaugugcauguguaaaugguucuugcuuuacuguaaugaccgauggaccaagugauggacaggccucauacaagaucuucagaauagaaaagggaaagauagucaaaucagucgaaaugaaugccccuaauuaucacuaugaggaaugcuccuguuauccugauucuagugaaaucacaugugugugcagggauaacuggcauggcucgaaucgaccgugggugucuuucaaccagaaucuggaauaucagauaggauacauaugcagugggauuuucggagacaauccacgcccuaaugauaagacaggcaguugugguccaguaucgucuaauggagcaaauggaguaaaaggauuuucauucaaauacggcaaugguguuuggauagggagaacuaaaagcauuaguucaagaaacgguuuugagaugauuugggauccgaacggauggacugggacagacaauaacuucucaauaaagcaagauaucguaggaauaaaagaguggucaggauauagcgggaguuuuguucagcauccagaacuaacagggcuggauuguauaagaccuugcuucuggguugaacuaaucagagggcgacccaaagagaacacaaucuggacuagcgggagcagcauauccuuuugugguguaaacagugacacuguggguuggucuuggccagacggugcugaguugccauuuaccauugacaaguaa

SEQ ID NO: 52812 - RNA, 1410 nt, Artificial Sequence
  derived and/or modified CDS sequence (wt) from neuraminidase__InfluenzaA__AEI86967
augaauccaaaccaaaagauaauaaccauugguucggucuguaugacaauuggaauggcuaacuuaauauuacaaauuggaaacauaaucucaauauggauuagccacucaauucaacuugggaaucaaaaucagauugaaacaugcaaucaaagcgucauuacuuaugaaaacaacacuuggguaaaucagacauauguuaacaucagcaacaccaacuuugcugcuggacagucagugguuuccgugaaauuagcgggcaauuccucucucugcccuguuaguggaugggcuauauacaguaaagacaacaguauaagaaucgguuccaagggggaugcguuugucauaagggaaccauucauaucaugcucccccuuggaaugcagaaccuucuucuugacucaaggggccuugcuaaaugacaaacauuccaauggaaccauuaaagacaggagcccauaucgaacccuaaugagcuguccuauuggugaaguucccucuccauacaacucaagauuugagucagucgcuuggucagcaagugcuugucaugauggcaucaauuggcuaacaauuggaauuucuggcccagacaauggggcaguggcuguguuaaaguacaacggcauaauaacagacacuaucaagaguuggagaaacaauauauugagaacacaagagucugaaugugcauguguaaaugguucuugcuuuaccauaaugaccgauggaccaagugauggacaggccucauacaagaucuucagaauagaaaagggaaagauagucaaaucagucgaaaugaaugccccuaauuaucacuaugaggaaugcuccuguuauccugauucuagugaaaucacaugugugugcagggauaacuggcauggcucgaaucgaccgugggugucuuucaaccagaaucuggaauaucagauaggauacauaugcagugggauuuucggagacaauccacgcccuaaugauaagacaggcaguugugguccaguaucgucuaauggagcaaauggaguaaaaggauuuucauucaaauacggcaaugguguuuggauagggagaacuaaaagcauuaguucaagaaaagguuuugagaugauuugggauccaaacggauggacugggacagacaauaacuucucaauaaagcaagauaucguaggaauaaaugaguggucaggauauagcgggaguuuuguucagcauccagaacuaacagggcuggauuguauaagaccuugcuucuggguugaacuaaucagagggcgacccaaagagaacacaaucuggacuagcgggagcagcauauccuuuugugguguaaacagugacacuguggguuggucuuggccagacggugcugaguugccauuuaccauugacaaguaa

SEQ ID NO: 52813 - RNA, 1410 nt, Artificial Sequence
  derived and/or modified CDS sequence (wt) from neuraminidase__InfluenzaA__AEI86977
augaauccaaaccaaaagauaauaaccauugguucggucuguaugacaauuggaauggcuaacuuaauauuacaaauuggaaacauaaucucaauauggauuagccacucaauucaacuugggaaucaaaaucagauuggaacaugcaaucagagcgucauuacuuaugaaaacaacacuuggguaaaucagacauauguuaacaucagcaacaccaacuuugcugcuggacagucagugguuuccgugaaauuagcgggcaauuccucucucugcccuguuaguggaugggcuauauacaguaaagacaacaguauaagaaucgguuccaagggggauguguuugucauaagggaaccauucauaucaugcucccccuuggaaugcagaaccuucuucuugacucaaggggccuugcuaaaugacaaacauuccaauggaaccauuaaagacaggagcccauaucgaacccuaaugagcuguccuauuggugaaguucccucuccauacaacucaagauuugagucagucgcuuggucagcaagugcuugucaugauggcaucaauuggcuaacaauuggaauuucuggcccagacaauggggcaguggcuguguuaaaguacaacggcauaauaacagacacuaucaagaguuggagaaacaauauacugagaacacaagagucugaauguacauguguaaaugguucuugcuuuacuguaaugaccgauggaccaagugauggacaggccucauacaagaucuucaaaauagaaaagggaaagauagucaaaucagucgaaaugaaugccccuaauuaucacuaugaggaaugcuccuguuauccugauucuagugaaaucacaugugugugcagggauaacuggcauggcucgaaucgaccgugggugucuuucaaccagaaucuggaauaucagauaggauacauaugcagugggauuuucggggacaauccacgcccuaaugauaagacaggcaguugugguccaguaucgucuaauggagcaaauggaguaaaaggauuuucauucaaauacggcaaugguguuuggauagggagaacuaaaagcauuaguucaagaaacgguuuugagaugauuugggauccgaacggauggacugggacagacaauaacuucucaauaaagcaagauaucguaggaauaaaugaguggucaggauauagcgggaguuuuguucagcauccagaacuaacagggcuggauuguauaagaccuugcuucuggguugaacuaaucagagggcgacccaaagagaacacaaucuggacuagcgggagcagcauauccuuuugugguguaaacagugacacuguggguuggucuuggccagacggugcugaguugccauuuaccauugacaaguaa

SEQ ID NO: 52814 - RNA, 1410 nt, Artificial Sequence
  derived and/or modified CDS sequence (wt) from neuraminidase__InfluenzaA__AEI86997
augaauccaaaccaaaagauaauaaccauugguucggucuguaugacaauuggaauggcuaacuuaauauuacaaauuggaaacauaaucucaauauggauuagccacucaauucaacuugggaaucaaaaucagauugaaacaugcaaucaaagcgucauuacuuaugaaaacaacacuuggguaaaucagacauauguuaacaucagcaacaccaacuuugcugcuggacagucagugguuuccgugaaauuagcgggcaauuccucucucugcccuguuaguggaugggcuauauacaguaaagacaacaguauaagaaucgguuccaagggggauguguuugucauaagggaaccauucauaucaugcucccccuuggaaugcagaaccuucuucuugacucaaggggccuugcuaaaugacaaacauuccaauggaaccauuaaagacaggagcccauaucgaacccuaaugagcuguccuauuggugaaguucccucuccauacaacucaagauuugagucagucgcuuggucagcaagugcuugucaugauggcaucaauuggcuaacaauuggaauuucuggcccagacaauggggcaguggcuguguuaaaguacaacggcauaauaacagacacuaucaagaguuggagaaacaauauauugagaacacaagagucugaaugugcauguguaaaugguucuugcuuuacuguaaugaccgauggaccaagugauggacaggccucauacaagaucuucagaauagaaaagggaaagauagucaaaucagucgaaaugaaugccccuaauuaucacuaugaggaaugcuccuguuauccugauucuagugaaaucacaugugugugcagggauaacuggcauggcucgaaucgaccgugggugucuuucaaccagaaucuggaauaucagauaggauacauaugcagugggauuuucggagacaauccacgcccuaaugauaagacaggcaguugugguccaguaucgucuaauggagcaaauggaguaaaaggauuuucauucaaauacggcaaugguguuuggauagggagaacuaaaagcauuaguucaagaaacgguuuugagaugauuugggauccgaacggauggacugggacagacaauaacuucucaauaaagcaagauaucguaggaauaaaggaguggucaggauauagcgggaguuuuguucagcauccagaacuaacagggcuggauuguauaagaccuugcuucuggguugaacuaaucagagggcgacccaaagagaacacaaucuggacuagcgggagcaucauauccuuuugugguguaaacagugacacuguggguuggucuuggccagacggugcugaguugccauuuaccauugacaaguaa

SEQ ID NO: 52815 - RNA, 1410 nt, Artificial Sequence
  derived and/or modified CDS sequence (wt) from neuraminidase__InfluenzaA__AEI87007
augaauccaaaccaaaagauaauaaccauugguucggucuguauaacaauuggaauggcuaacuuaauauuacaaauuggaaacauaaucucaauauggauuagccacucaauucaacuugggaaucaaaaucagauugaaacaugcaaucaaagcgucauuacuuaugaaaacaacacuuggguaaaucagacauauguuaacaucagcaacaccaacuuugcugcuggacagucagugguuuccgugaaauuagcgggcaauuccucucucugcccuguuaguggaugggcuauauacaguaaagacaacaguauaagaaucgguuccaagggggauguguuugucauaagggaaccauucauaucaugcuccuccuuggaaugcagaaccuucuucuugacucaaggggccuugcuaaaugacaaacauuccaauggaaccauuaaagacaggagcccauaucgaacccuaaugagcuguccuauuggugaaguucccucuccauacaacucaagauuugagucagucgcuuggucagcaagugcuugucaugauggcaucaguuggcuaacaauuggaauuucuggcccagacaauggggcaguggcuguguuaaaguacaacggcauaauaacagacacuaucaagaguuggagaaacaauauauugagaacacaagagucugaaugugcauguguaaaugguucuuguuuuacuguaaugaccgauggaccaagugauggacaggccucauacaagaucuucagaauagaaaagggaaagauagucaaaucagucgaaaugaaugccccuaauuaucacuaugaggaaugcuccuguuauccugauucuagugaaaucacaugugugugcagggauaacuggcauggcucgaaucgaccgugggugucuuucaaccagaaucuggaauaucagauaggauacauaugcagugggauuuucggagacaauccacgcccuaaugauaagacaggcaguugugguccaguaucgucuaauggagcaaauggaguaaaaggauuuucauucaaauacggcaaugguguuuggauagggagaacuaaaagcauuaguucaagaaacgguuuugagaugauuugggauccgaacggauggacugggacagacaauaacuucucaauaaagcaagauaucguaggaauaaaugaguggucaggauauagcgggaguuuuguucagcauccagaacuaacagggcuggauuguauaagaccuugcuucuggguugaacuaaucagagggcgacccaaagagaacacaaucuggacuagcgggagcagcauauccuuuugugguguaaacagugacacuguggguuggucuuggccagacggugcugaguugccauuuaccauugacaaguaa

SEQ ID NO: 52816 - RNA, 1410 nt, Artificial Sequence
  derived and/or modified CDS sequence (wt) from neuraminidase__InfluenzaA__AEI87017
augaauccaaaccagaagauaauaaccauugguucggucuguaugacaauuggaauggcuaacuuaauauuacaaauuggaaacauaaucucaauauggauuagccacucaauucaacuugggaaucaaaaucagauugaaacaugcaaucaaagcgucauuacuuaugaaaacaacacuuggguaaaucagacauauguuaacaucagcaacaccaacuuugcugcuggacagucagugguuuccgugaaauuagcgggcaauuccucucucugcccuguuaguggaugggcuauauacaguaaagacaacaguauaagaaucgguuccaagggggauguguuugucauaagggaaccauucauaucaugcucccccuuggaaugcagaaccuucuucuugacucaaggggccuugcuaaaugacaaacauuccaauggaaccauuaaagacaggagcccauaucgaacccuaaugagcuguccuauuggugaaguucccucuccauacaacucaagauuugagucagucgcuuggucagcaagugcuugucaugauggcaucaauuggcuaacaauuggaauuucuggcccagacaauggggcaguggcuguguuaaaguacaacggcauaauaacagacacuaucaagaguuggagaaacaauauauugagaacacaagagucugaaugugcauguguaaaugguucuugcuuuacuguaaugaccgauggaccaagugauggacaggccucauacaagaucuucagaauagaaaagggaaagauagucaaaucagucgaaaugaaugccccuaauuaucacuaugaggaaugcuccuguuauccugauucuagugaaaucacaugugugugcagggauaacuggcauggcucgaaucgaccgugggugucuuucaaccagaaucuggaauaucagauaggauacauaugcagugggauuuucggagacaauccacgcccuaaugauaagacaggcaguugugguccaguaucgucuaauggagcaaauggaguaaaaggauuuucauucaaauacggcaaugguguuuggauagggagaacuaaaagcauuaguucaagaaacgguuuugagaugauuugggauccgaauggauggacugggacagacaauaacuucucaauaaagcaagauaucguaggaauaaaugaguggucaggauauagcgggaguuuuguucagcauccagaacuaacagggcuggauuguauaagaccuugcuucuggguugaacuaaucagagggcgacccaaagagaacacaaucuggacuagcgggagcagcauauccuuuugugguguaaacggugacacuggggguuggucuuggccagacggugcugaguugccauuuaccauugacaaguaa

SEQ ID NO: 52817 - RNA, 1410 nt, Artificial Sequence
  derived and/or modified CDS sequence (wt) from neuraminidase__InfluenzaA__AEI87027
augaauccaaaccaaaagauaauaaccauugguucggucuguaugacaauuggaauggcuaacuuaauauuacaaauuggaaacauaaucucaauauggauuagccacucaauucaacuugggaaucaaaaucagauugaaacaugcaaucaaagcgucauuacuuaugaaaacaacacuuggguaaaucagacauauguuaacaucagcaacaccaacuuugcugcuggacagucagugguuuccgugaaauuagcgggcaauuccucucucugcccuguuaguggaugggcuauauacaguaaagacaacaguauaagaaucgguuccaagggggauguguuugucauaagggaaccauucauaucaugcucccccuuggaaugcagaaccuucuucuugacucaaggggccuugcuaaaugacaaacauuccaauggaaccauuaaagacaggagcccauaucgaacccuaaugagcuguccuauuggugaaguucccucuccauacaacucaagauuugagucagucgcuuggucagcaagugcuugucaugauggcaucaauuggcuaacaauuggaauuucuggcccagacaauggggcaguggcuguguuaaaguacaacggcauaauaacagacacuaucaagaguuggagaaacaauauauugagaacacaagagucugaaugugcauguguaaaugguucuugcuuuaccauaaugaccgauggaccaagugauggacaggccucauacaagaucuucagaauagaaaagggaaagauagucaaaucagucgaaaugaaugccccuaauuaucacuaugaggaaugcuccuguuauccugauucuagugaaaucacaugugugugcagggauaacuggcauggcucgaaucgaccgugggugucuuucaaccagaaucuggaauaucagauaggauacauaugcagugggauuuucggagacaauccacgcccuaaugauaagacaggcaguugugguccaguaucgucuaauggagcaaauggaguaaaaggauuuucauucaaauacggcaaugguguuuggauagggagaacuaaaagcauuaguucaagaaaagguuuugagaugauuugggauccaaacggauggacugggacagacaauaacuucucaauaaagcaagauaucguaggaauaaaugaguggucaggauauagcgggaguuuuguucagcauccagaacuaacagggcuggauuguauaagaccuugcuucuggguugaacuaaucagagggcgacccaaagagaacacaaucuggacuagcgggagcagcauauccuuuugugguguaaacagugacacuguggguuggucuuggccagacggugcugaguugccauuuaccauugacaaguaa

SEQ ID NO: 52818 - RNA, 1410 nt, Artificial Sequence
  derived and/or modified CDS sequence (wt) from neuraminidase__InfluenzaA__AEI87037
augaauccaaaccaaaagauaauaaccauugguucggucuguaugacaauuggaauggcuaacuuaauauuacaaauuggaaacauaaucucaauauggauuagccacucaauucaacuugggaaucaaaaucagauugaaacaugcaaucaaagcgucauuacuuaugaaaacaacacuuggguaaaucagacauauguuaacaucagcaacaccaacuuugcugcuggacagucagugguuuccgugaaauuagcgggcaauuccucucucugcccuguuaguggaugggcuauauacaguaaagacaacaguauaagaaucgguuccaagggggauguguuugucauaagggaaccauucauaucaugcucccccuuggaaugcagaaccuucuucuugacucaaggggccuugcuaaaugacaaacauuccaauggaaccauuaaagacaggagcccauaucgaacccuaaugagcuguccuauuggugaaguucccucuccauacaacucaagauuugagucagucgcuuggucagcaagugcuugucaugauggcaucaauuggcuaacaauuggaauuucuggcccagacaauggggcaguggcuguguuaaaguacaacggcauaauaacagacacuaucaagaguuggagaaacaauauauugagaacacaagagucugaaugugcauguguaaaugguucuugcuuuacuguaaugaccgauggaccaagugauggacaggccucauacaagaucuucagaauagaaaagggaaagauagucaaaucagucgaaaugaaugccccuaauuaucacuaugaggaaugcuccuguuauccugauucuagugaaaucacaugugugugcagggauaauuggcauggcucgaaucgaccgugggugucuuucaaccagaaucuggaauaucagauaggauacauaugcagugggauuuucggagacaauccacgcccuaaugauaagacaggcaguugugguccaguaucgucuaauggagcaaauggaguaaaaggauuuucauucaaauacggcaaugguguuuggauagggagaacuaaaagcauuaguucaagaaacgguuuugagaugauuugggauccgaacggauggacugggacagacaauaacuucucaauaaagcaagauaucguaggaauaaaggaguggucaggauauagcgggaguuuuguucagcauccagaacuaacagggcuggauuguauaagaccuugcuucuggguugaacuaaucagagggcgacccaaagagaacacaaucuggacuagcgggagcaucauauccuuuugugguguaaacagugacacuguggguuggucuuggccagacggugcugaguugccauuuaccauugacaaguaa

SEQ ID NO: 52819 - RNA, 1410 nt, Artificial Sequence
  derived and/or modified CDS sequence (wt) from neuraminidase__InfluenzaA__AEI87047
augaauccaaaccaaaagauaauaaccauugguucggucuguauaacaauuggaauggcuaacuuaauauuacaaauuggaaacauaaucucaauauggauuagccacucaauucaacuugggaaucaaaaucagauugaaacaugcaaucaaagcgucauuacuuaugaaaacaacacuuggguaaaucagacauauguuaacaucagcaacaccaacuuugcugcuggacagucagugguuuccgugaaauuagcgggcaauuccucucucugcccuguuaguggaugggcuauauacaguaaagacaacaguauaagaaucgguuccaagggggauguguuugucauaagggaaccauucauaucaugcucccccuuggaaugcagaaccuucuucuugacucaaggggccuugcuaaaugacaaacauuccaauggaaccauuaaagacaggagcccauaucgaacccuaaugagcuguccuauuggugaaguucccucuccauacaacucaagauuugagucagucgcuuggucagcaagugcuugucaugauggcaucaguuggcuaacaauuggaauuucuggcccagacaauggggcaguggcuguguuaaaguacaacggcauaauaacagacacuaucaagaguuggagaaacaauauauugagaacacaagagucugaaugugcauguguaaaugguucuuguuuuacuguaaugaccgauggaccaagugauggacaggccucauacaagaucuucagaauagaaaagggaaagauagucaaaucagucgaaaugaaugccccuaauuaucacuaugaggaaugcuccuguuauccugauucuagugaaaucacaugugugugcagggauaacuggcauggcucgaaucgaccgugggugucuuucaaccagaaucuggaauaucagauaggauacauaugcagugggauuuucggagacaauccacgcccuaaugauaagacaggcaguugugguccaguaucgucuaauggagcaaauggaguaaaaggauuuucauucaaauacggcaaugguguuuggauagggagaacuaaaagcauuaguucaagaaacgguuuugagaugauuugggauccgaacggauggacugggacagacaauaacuucucaauaaagcaagauaucguaggaauaaaugaguggucaggauauagcgggaguuuuguucagcauccagaacuaacagggcuggauuguauaagaccuugcuucuggguugaacuaaucagagggcgacccaaagagaacacaaucuggacuagcgggagcagcauauccuuuugugguguaaacagugacacuguggguuggucuuggccagacggugcugaguugccauuuaccauugacaaguaa

SEQ ID NO: 52820 - RNA, 1410 nt, Artificial Sequence
  derived and/or modified CDS sequence (wt) from neuraminidase__InfluenzaA__AEI87057
augaauccaaaccaaaagauaauaaccauugguucggucuguaugacaauuggaauggcuaacuuaauauuacaaauuggaaacauaaucucaauauggauuagccacucaauucaacuugggaaucaaaaucagauugaaacaugcaaucaaagcgucauuacuuaugaaaacaacacuuggguaaaucagacauauguuaacaucagcaacaccaacuuugcugcuggacagucagugguuuccgugaaauuagcgggcaauuccucucucugcccuguuaguggaugggcuauauacaguaaagacaacaguauaagaaucgguuccaagggggauguguuugucauaagggaaccauucauaucaugcucccccuuggaaugcagaaccuucuucuugacucaaggggccuugcuaaaugacaaacauuccaauggaaccauuaaagacaggagcccauaucgaacccuaaugagcuguccuauuggugaaguucccucuccauacaacucaagauuugagucagucgcuuggucagcaagugcuugucaugauggcaucaauuggcuaacaauuggaauuucuggcccagacaauggggcaguggcuguguuaaaguacaacggcauaauaacagacacuaucaagaguuggagaaacaauauauugagaacacaagagucugaaugugcauguguaaaugguucuugcuuuacuguaaugaccgauggaccaagugauggacaggccucauacaagaucuucagaauagaaaagggaaagauagucaaaucagucgaaaugaaugccccuaauuaucacuaugaggaaugcuccuguuauccugauucuagugaaaucacaugugugugcagggauaacuggcauggcucgaaucgaccgugggugucuuucaaccagaaucuggaauaucagauaggauacauaugcagugggauuuucggagacaauccacgcccuaaugauaagacaggcaguugugguccaguaucgucuaauggagcaaauggaguaaaaggauuuucauucaaauacggcaaugguguuuggauagggagaacuaaaagcauuaguucaagaaacgguuuugagaugauuugggauccgaacggauggacugggacagacaauaacuucucaauaaagcaagauaucguaggaauaaaagaguggucaggauauagcgggaguuuuguucagcauccagaacuaacagggcuggauuguauaagaccuugcuucuggguugaacuaaucagagggcgacccaaagagaacacaaucuggacuagcgggagcagcauauccuuuugugguguaaacagugacacuguggguuggucuuggccagacggugcugaguugccauuuaccauugacaaguaa

SEQ ID NO: 52821 - RNA, 1410 nt, Artificial Sequence; identical to SEQ ID NO: 52602
  derived and/or modified CDS sequence (wt) from neuraminidase__InfluenzaA__AEI87067

SEQ ID NO: 52822 - RNA, 1410 nt, Artificial Sequence
  derived and/or modified CDS sequence (wt) from neuraminidase__InfluenzaA__AEI87077
augaauccaaaccaaaagauaauaaccauugguucgaucuguaugacaauuggaauggcuaacuuaauauuacaaauuggaaacauaaucucaauauggauuagccacucaauucaauuugggaaucaaaaucagauuggaacaugcaaucaaagcgucauuacuuaugaaaacaacacuuggguaaaucagacauauguuaacaucagcaacaccaacuuugcugcuggacagucagugguuuccgugaaauuagcgggcaauuccucucucugcccuguuaguggaugggcuauauacaguaaagacaacaguauaagaaucgguuccaagggggauguguuugucauaagggaaccauucauaucaugcucccccuuggaaugcagaaccuucuucuugacucaaggggccuugcuaaaugacaaacauuccaauggaaccauuaaagacaggagcccauaucgaacccuaaugagcuguccuauuggugaaguucccucuccauacaacucaagauuugagucagucgcuuggucagcaagugcuugucaugauggcaucaauuggcuaacaauuggaauuucuggcccagacaauggggcaguggcuguguuaaaguacaacggcauaauaacagacacuaucaagaguuggagaaacaauauauugagaacacaagagucugaaugugcauguguaaaugguucuugcuuuaccauaaugaccgauggaccaagugauggacaggccucauacaagaucuucagaauagaaaagggaaagauagucaaaucagucgaaaugaaugccccuaauuaucacuaugaggaaugcuccuguuauccugauucuagugaaaucacaugugugugcagggauaacuggcauggcucgaaucgaccgugggugucuuucaaccagaaucuggaauaucagauaggauacauaugcagcgggauuuucggagacaauccacgcccuaaugauaagacaggcaguugugguccaguaucgucuaauggagcaaauggaguaaaaggauuuucauucaaauacggcaaugguguuuggauagggagaacuaaaagcauuaguucaagaaaagguuuugagaugauuugggauccaaacggauggacugggacagacaauaacuucucaauaaagcaagauaucguaggaauaaaugaguggucaggauauagcgggaguuuuguucagcauccagaacuaacagggcuggacuguauaagaccuugcuucuggguugaacuaaucagagggcgacccaaagagaacacaaucuggacuagcgggagcagcauauccuuuugugguguaaacagugacacuguggguuggucuuggccagacggugcugaguugccauuuaccauugacaaguaa

SEQ ID NO: 52823 - RNA, 1410 nt, Artificial Sequence
  derived and/or modified CDS sequence (wt) from neuraminidase__InfluenzaA__AEI87087
augaauccaaaccaaaagauaauaaccauugguucggucuguaugacaauuggaauggcuaacuuaauauuacaaauuggaaacauaaucucaauauggauuagccacucaauucaacuugggaaucaaaaucagauugaaacaugcaaucaaagcgucauuacuuaugaaaacaacacuuggguaaaucagacauauguuaacaucagcaacaccaacuuugcugcuggacagucagugguuuccgugaaauuagcgggcaauuccucucucugcccuauuaguggaugggcuauauacaguaaagacaacaguauaagaaucgguuccaagggggauguguuugucauaagggaaccauucauaucaugcucccccuuggaaugcagaaccuucuucuugacucaaggggccuugcuaaaugacaaacauuccaauggaaccauuaaagacaggagcccauaucgaacccuaaugagcuguccuauuggugaaguucccucuccauacaacucaagauuugagucagucgcuuggucagcaagugcuugucaugauggcaucaauuggcuaacaauuggaauuucuggcccagacaauggggcaguggcuguguuaaaguacaacggcauaauaacagacacuaucaagaguuggagaaacaauauauugagaacacaagagucugaaugugcauguguaaaugguucuugcuuuacuguaaugaccgauggaccaagugauggacaggccucauacaagaucuucagaauagaaaagggaaagauagucaaaucagucgaaaugaaugccccuaauuaucacuaugaggaaugcuccuguuauccugauucuagugaaaucacaugugugugcagggauaacuggcauggcucgaaucgaccgugggugucuuucaaccagaaucuggaauaucagauaggauacauaugcagugggauuuucggagacaauccacgcccuaaugauaagacaggcaguugugguccaguaucgucuaauggagcaaauggaguaaaaggauuuucauucaaauacggcaaugguguuuggauagggagaacuaaaagcauuaguucaagaaacgguuuugagaugauuugggauccgaacggauggacugggacagacaauaacuucucaauaaagcaagauaucguaggaauaaaggaguggucaggauauagcgggaguuuuguucagcauccagaacuaacagggcuggauuguauaagaccuugcuucuggguugaacuaaucagagggcgacccaaagagaacacaaucuggacuagcgggagcaucauauccuuuuguaguguaaacagugacacuguggguuggucuuggccagacggugcugaguugccauuuaccauugacaaguaa

SEQ ID NO: 52824 - RNA, 1410 nt, Artificial Sequence; identical to SEQ ID NO: 52795
  derived and/or modified CDS sequence (wt) from neuraminidase__InfluenzaA__AEI87097

SEQ ID NO: 52825 - RNA, 1410 nt, Artificial Sequence; identical to SEQ ID NO: 52795
  derived and/or modified CDS sequence (wt) from neuraminidase__InfluenzaA__AEI87107

SEQ ID NO: 52826 - RNA, 1413 nt, Artificial Sequence
  derived and/or modified CDS sequence (wt) from neuraminidase__InfluenzaA__AEI91968
augaacccaaaucaaaagauaauaaccauuggaucaaucaguauagcaaucggaauaauuagucuaauguugcaaauaggaaauauuauuucaauaugggcuagucacucaauccaaacugggagucaaaacaacacuggaauaugcaaccaaagaaucaucacauaugaaaacagcaccugggugaaucacacauauguuaauauuaacaacacuaauguuguugcuggagaggacaaaacaucagugacauuggccggcaauucaucucuuuguucuaucaguggaugggcuauauacacaaaagacaacagcauaagaauuggcuccaaaggagauguuuuugucauaagagaaccuuucauaucauguucucacuuggaaugcagaaccuuuuuucugacccaaggcgcucuauuaaaugacaaacauucaaaugggaccguaaaggacagaaguccuuauagggccuuaaugagcuguccucuaggugaagcuccguccccauacaauucaaaguucgaaucaguugcauggucagcaagcgcaugccaugauggcaugggcugguuaacaaucggaauuucugguccugacaauggagcuguggcuguacuaaaauacaacggaauaauaacuggaaccauaaaaaguuggaaaaagcaaauauuaagaacacaagagucugaaugugucuguaugaacgggucauguuucaccauaaugaccgauggcccgaguaauaaggccgccucguacaaaauuuucaagaucgaaaaggggaagguuacuaaaucaauagaguugaaugcacccaauuuuuauuaugaggaaugcuccuguuacccagauacuggcauagugauguguguaugcagggacaacuggcaugguucaaaucgaccuugggugucuuuuaaucaaaacuuggauuaucaaauaggauacaucugcaguggaguguuuggugacaauccgcgucccgaagauggagagggcagcugcaauccagugacuguugauggagcaaacggaguaaaaggguuuucauacaaauaugguaaugguguuuggauagggagaaccaaaaguaacagacuuagaaagggguuugagaugauuugggauccuaauggauggacaaauaccgacagugauuucucagugaaacaggauguuguagcaauaacugauuggucaggguacagcggaaguuucguccaacauccugaguuaacaggauuggacuguauaaaaccuugcuucuggguugaguuagucagagggcugccuagagaaaauacaacaaucuggacuagugggagcagcauuucuuuuuguggcguuaauagugauacugcaaacuggucuuggccagacggugcugaguugccguucaccauugacaaguag

SEQ ID NO: 52827 - RNA, 1410 nt, Artificial Sequence
  derived and/or modified CDS sequence (wt) from neuraminidase__InfluenzaA__AEI91983
augaauccaaaccaaaagauaauaaccauugguucggucuguaugacaauuggaauggcuaacuuaauauuacaaauuggaaacauaaucucaauauggauuagccacucaauucaacuugggaaucaaaaucagauugaaacaugcaaucaaagcgucauuacuuaugaaaacaacacuuggguaaaucagacauauguuaacaucagcaacaccaacuuugcugcuggacagucagugguuuccgugaaauuagcgggcaauuccucucucugcccuguuaguggaugggcuauauacaguaaagacaacaguauaagaaucgguuccaagggggauguguuugucauaagggaaccauucauaucaugcucccccuuggaaugcagaaccuucuucuugacucaaggggccuugcuaaaugacaaacauuccaauggaaccauuaaagacaggagcccauaucgaacccuaaugagcuguccuauuggugaaguucccucuccauacaacucaagauuugagucagucgcuuggucagcaagugcuugucaugauggcaucaauuggcuaacaauuggaauuucuggcccagacaauggggcaguggcuguguuaaaguacaacggcauaauaacagacacuaucaagaguuggagaaacaauauauugagaacacaagagucugaaugugcauguguaaaugguucuugcuuuacuguaaugaccgauggaccaagugauggacaggccucauacaagaucuucagaauagaaaagggaaagauagucaaaucagucgaaaugaaugccccuaauuaucacuaugaggaaugcuccuguuauccugauucuagugaaaucacaugugugugcagggauaacuggcauggcucgaaucgaccgugggugucuuucaaccagaaucuggaauaucagauaggauacauaugcagugggauuuucggagacaauccacgcccuaaugauaagacaggcagcugugguccaguaucgucuaauggagcaaauggaguaaaaggauuuucauucaaauacggcaaugguguuuggauagggagaacuaaaagcauuaguucaagaaacgguuuugagaugauuugggauccgaacggauggacugggacagacaauaacuucucaauaaagcaagauaucguaggaauaaaugaguggucaggauauagcgggaguuuuguucagcauccagaacuaacagggcuggauuguauaagaccuugcuucuggguugaacuaaucagagggcgacccaaagagaacacaaucuggacuagcgggagcagcauauccuuuugugguguaaacagugacacuguggguuggucuuggccagacggugcugaguugccauuuaccauugacaaguaa

SEQ ID NO: 52828 - RNA, 1410 nt, Artificial Sequence; identical to SEQ ID NO: 51236
  derived and/or modified CDS sequence (wt) from neuraminidase__InfluenzaA__AEI91984

SEQ ID NO: 52829 - RNA, 1410 nt, Artificial Sequence
  derived and/or modified CDS sequence (wt) from neuraminidase__InfluenzaA__AEI92004
augaauccaaaccaaaagauaauaaccauugguucggucugcaugacaauuggaauggcuaacuuaauauuacaaauuggaaacauaaucucaauauggauuagccacucaauucaacuugggaaucaaaaucagauugaaacaugcaaucaaagcgucauuacuuaugaaaacaacacuuggguaaaucagacauauguuaacaucagcaacaccaacuuugcugcuggacagucagugguuuccgugaaauuagcgggcaauuccucucucugcccuguuaguggaugggcuauauacaguaaagacaacaguauaagaaucgguuccaagggggauguguuugucauaagggaaccauucauaucaugcucccccuuggaaugcagaaccuucuucuugacucaaggggccuugcuaaaugacaaacauuccaauggaaccauuaaagacaggagcccauaucgaacccuaaugagcuguccuauuggugaaguucccucuccauacaacucaagauuugagucagucgcuuggucagcaagugcuugucaugauggcaucaauuggcuaacaauuggaauuucuggcccagacaauggggcaguggcuguguuaaaguacaacggcauaauaacagacacuaucaagaguuggagaaacaauauauugagaacacaagagucugaaugugcauguguaaaugguucuugcuuuacuguaaugaccgauggaccaagugauggacaggccucauacaagaucuucagaauagaaaagggaaagauagucaaaucagucgaaaugaaugccccuaauuaucacuaugaggaaugcuccuguuauccugauucuagugaaaucacaugugugugcagggauaacuggcauggcucgaaucgaccgugggugucuuucaaccagaaucuggaauaucagauaggauacauaugcagugggauuuucggagacaauccacgcccuaaugauaagacaggcaguugugguccaguaucgucuaauggagcauauggaguaaaaggauuuucauucaaauacggcaaugguguuuggauagggagaacuaaaagcauuaguucaagaaacgguuuugagaugauuugggauccgaacggauggacugggacagacaauaacuucucaauaaagcaagauaucguaggaauaaaugaauggucaggauauagcgggaguuuuguucagcauccagaacuaacagggcuggauuguauaagaccuugcuucuggguugaacuaaucagagggcgacccaaagagaacacaaucuggacuagcgggagcagcauauccuuuugugguguaaacagugacacuguggguuggucuuggccagacggugcugaguugccauuuaccauugacaaguaa

SEQ ID NO: 52830 - RNA, 1413 nt, Artificial Sequence
  derived and/or modified CDS sequence (wt) from neuraminidase__InfluenzaA__AEI92023
augaacccaaaucaaaagauaauaaccauuggaucaaucaguauagcaaucggaauaauuagucuaauguugcaaauaggaaauauuauuucaauaugggcuagucauucaauccaaacuggaagucaaaacaacacuggaauaugcaaccaaaaaaucaucacauaugaaaacagcaccugggugaaucacacauauguuaauauuaacaacacuaauguuguugcuggagaggacaaaacaucagugacauuggccggcaauucaucucuuuguucuaucaguggaugggcuauauacacaaaagacaacagcauaagaauuggcuccaaaggagauguuuuugucauaagagaaccuuucauaucauguucucacuuggaaugcagaacauuuuuucugacccaaggcgcucuauuaaaugacaaacauucaaaugggaccguaaaggacagaaguccuuauagggccuuaaugagcuguccucuaggugaagcuccguccccauacaauucaaaguucgaaucaguugcauggucagcaagcgcaugccaugauggcaugggcugguuaacaaucggaauuucugguccagacaauggagcuguggcuguacuaaaauacaacggaauaauaacuggaaccauaaaaaguuggaaaaagcaaauauuaagaacacaagagucugaaugugucuguaugaacgggucauguuucaccauaaugaccgauggcccgaguaauaaggccgcuucauacaaaauuuucaagaucgaaaaggggaagguuacuaaaucaauagaguugaaugcacccaauuuuuauuaugaggaaugcuccuguuacccagauacuggcauagugauguguguaugcagggacaacuggcaugguucaaaucgaccuugggugucuuuuaaucaaaacuuggauuaucaaauaggauacaucugcaguggaguguuuggugacaauccgcgucccgaagauggagagggcagcugcaauccagugacuguugauggaacaaacggaguaaaaggguuuucauacaaauaugguaaugguguuuggauaggaaggaccaaaaguaacagacuuagaaagggguuugagaugauuugggauccuaauggauggacaaauaccgacagugauuucucagugaaacaggauguuguagcaauaacugauuggucaggguacagcggaaguuucguccaacauccugaguuaacaggauuggacuguauaagaccuugcuucuggguugaguuagucagagggcugccuagagaaaauacaacaaucuggacuagugggagcagcauuucuuuuuguggcguuaauagugauacugcaaacuggucuuggccagacggugcugaguugccguucaccauugacaaguag

SEQ ID NO: 52831 - RNA, 1410 nt, Artificial Sequence
  derived and/or modified CDS sequence (wt) from neuraminidase__InfluenzaA__AEJ10403
augaauccaaaccaaaagauaauaaccauugguucggucuguauaacaauuggaauggcuaacuuaauauuacaaauuggaaacauaaucucaauauggauuagccacucaauucaacuugggaaucaaaaucagauugaaacaugcaaucaaagcgucauuacuuaugaaaacaacacuuggguaaaucagacauauguuaacaucagcaacaccaacuuugcugcuggacagucagugguuuccgugaaauuagcgggcaauuccucucucugcccuguuaguggaugggcuauauacaguaaagacaacaguauaagaaucgguuccaagggggauguguuugucauaagggaaccauucauaucaugcucccccuuggaaugcagaaccuucuucuugacucaaggggccuugcuaaaugacaaacauuccaauggaaccauuaaagacaggagcccauaucgaacccuaaugagcuguccuauuggugaaguucccucuccauacaacucaagauuugagucagucgcuuggucagcaagugcuugucaugauggcaucaguuggcuaacaauuggaauuucuggcccagacaauggggcaguggcuguguuaaaguacaacggcauaauaacagacacuaucaagaguuggagaaacaauauauugagaacacaagagucugaaugugcauguguaaaugguucuuguuuuacuguaaugaccgauggaccaagugauggacaggccucauacaagaucuucagaauagaaaagggaaagauagucaaaucagucgaaaugaaugccccuaauuaucacuaugaggaaugcuccuguuauccugauucuagugaaaucacaugugugugcagggauaacuggcauggcucgaaucgaccgugggugucuuucaaccagaaucuggaauaucagauaggauacauaugcagugggauuuucggagacaauccacgcccuaaugauaagacaggcaguugugguccaguaucggcuaauggagcaaauggaguaaaaggauuuucauucaaauacggcaaugguguuuggauagggagaacuaaaagcauuaguucaagaaacgguuuugagaugauuugggauccgaacggauggacugggacagacaauaacuucucgauaaagcaagauaucguaggaauaaaugaguggucaggauauagcggaaguuuuguucagcauccagaacuaacagggcuggauuguauaagaccuugcuucuggguugaacuaaucagagggcgacccaaagagaacacaaucuggacuagcgggagcagcauauccuuuugugguguaaacagugacacuguggguuggucuuggccagacggugcugaguugccauuuaccauugacaaguaa

SEQ ID NO: 52832 - RNA, 1410 nt, Artificial Sequence
  derived and/or modified CDS sequence (wt) from neuraminidase__InfluenzaA__AEJ10413
augaauccaaaccaaaagauaauaaccauugguucggucuguauaacaauuggaauggcuaacuuaauauuacaaauuggaaacauaaucucaauauggauuagccacucaauucaacuugggaaucaaaaucagauugaaacaugcaaucaaagcgucauuacuuaugaaaacaacacuuggguaaaucagacauauguuaacaucagcaacaccaacuuugcugcuggacagucagugguuuccgugaaauuagcgggcaauuccucucucugcccuguuaguggaugggcuauauacaguaaagacaacaguauaagaaucgguuccaagggggauguguuugucauaagggaaccauucauaucgugcucccccuuggaaugcagaaccuucuucuugacucaaggggccuugcuaaaugacaaacauuccaauggaaccauuaaagacaggagcccauaucgaacccuaaugagcuguccuauuggugaaguucccucuccauacaacucaagauuugagucagucgcuuggucagcaagugcuugucaugauggcaucaguuggcuaacaauuggaauuucuggcccagacaauggggcaguggcuguguuaaaguacaacggcauaauaacagacacuaucaagaguuggagaaacaauauauugagaacacaagagucugaaugugcauguguaaaugguucuuguuuuacuguaaugaccgauggaccaagugauggacaagccucauacaagaucuucagaauagaaaagggaaagauagucaaaucagucgaaaugaaugccccuaauuaucacuaugaggaaugcuccuguuauccugauucuagugaaaucacaugugugugcagggauaacuggcauggcucgaaucgaccgugggugucuuucaaccagaaucuggaauaucagauaggauacauaugcagugggauuuucggagacaauccacgcccuaaugauaagacaggcaguugugguccaguaucgucuaauggagcaaauggaguaaaaggauuuucauucaaauacggcaaugguguuuggauagggagaacuaaaagcauuaguucaagaaacgguuuugagaugauuugggauccgaacggauggacugggacagacaauaacuucucaauaaagcaagauaucguaggaauaaaugaguggucaggauauagcggaaguuuuguucagcauccagaacuaacagggcuggauuguauaagaccuugcuucuggguugaacuaaucagagggcgacccaaagagaacacaaucuggacuagcgggagcagcauauccuuuugugguguaaacagugacacuguggguuggucuuggccagacggugcugaguugccauuuaccauugacaaguaa

SEQ ID NO: 52833 - RNA, 1410 nt, Artificial Sequence
  derived and/or modified CDS sequence (wt) from neuraminidase__InfluenzaA__AEJ10423
augaauccaaaccaaaagauaauaaccauugguucggucuguaugacaauuggaauggcuaacuuaauauuacaaauuggaaacauaaucucaauauggauuagccacucaauucaacuugggaaucaaaaucagauugaaacaugcaaucaaagcgucauuacuuaugaaaacaacacuuggguaaaucagacauauguuaacaucagcaacaccaacuuugcugcuggacagucagugguuuccgugaaauuagcgggcaauuccucucucugcccuguuaguggaugggcuauauacaguaaagacaacaguauaagaaucgguuccaagggggauguguuugucauaagggaaccauucauaucaugcucccccuuggaaugcagaaccuucuucuugacucaaggggccuugcuaaaugacaaacauuccaauggaaccauuaaagacaggagcccauaucgaacccuaaugagcuguccuauuggugaaguucccucuccauacaacucaagauuugagucagucgcuuggucagcaagugcuugucaugauggcaucaauuggcuaacaauuggaauuucuggcccagacaauggggcaguggcuguguuaaaguacaacggcauaauaacagacacuaucaagaguuggagaaacaauauauugagaacacaagagucugaaugugcauguguaaaugguucuugcuuuacuguaaugaccgauggaccaagugauggacaggccucauacaagaucuucagaauagaaaagggaaagauagucaaaucagucgaaaugaaugccccuaauuaucacuaugaggaaugcuccuguuauccugauucuagugaaaucacaugugugugcagggauaacuggcauggcucgaaucgaccgugggugucuuucaaccagaaucuggaauaucagauaggauacauaugcagugggauuuucggagacaauccacgcccuaaugauaagacaggcaguugugguccaguaucgucuaauggagcaaauggaguaaaaggauuuucauucaaauacggcaaugguguuuggauagggagaacuaaaagcauuaguucaagaaacggcuuugagaugauuugggauccgaacggauggacugggacagacaauaacuucucaauaaagcaagauaucguaggaauaaaagaguggucaggauauagcgggaguuuuguucagcauccagaacuaacagggcuggauuguauaagaccuugcuucuggguugaacuaaucagagggcgacccaaagagaacacaaucuggacuagcgggagcagcauauccuuuugugguguaaacagugacacuguggguuggucuuggccagacggugcugaguugccauuuaccauugacaaguaa

SEQ ID NO: 52834 - RNA, 1410 nt, Artificial Sequence
  derived and/or modified CDS sequence (wt) from neuraminidase__InfluenzaA__AEJ10433
augaauccaaaccaaaagauaauaaccauugguucggucuguaugacaauuggaauggcuaacuuaauauuacaaauuggaaacauaaucucaauauggauuagccacucaauucaacuugggaaucaaaaucagauugaaacaugcaaucaaagcgucauuacuuaugaaaacaacacuuggguaaaucagacauauguuaacaucagcaacaccaacuuugcugcuggacagucagugguuuccgugaaauuagcgggcaauuccucucucugcccuguuaguggaugggcuauauacaguaaagacaacaguauaagaaucgguuccaagggggauguguuugucauaagggaaccauucauaucaugcucccccuuggaaugcagaaccuucuucuugacucaaggggccuugcuaaaugacaaacauuccaauggaaccauuaaagacaggagcccauaucgaacccuaaugagcuguccuauuggugaaguucccucuccauacaacucaagauuugagucagucgcuuggucagcaagugcuugucaugauggcaucaauuggcuaacaauuggaauuucuggcccagacaauggggcaguggcuguguuaaaguacaacggcauaauaacagacacuaucaagaguuggagaaacaauauauugagaacacaagagucugaaugugcauguguaaaugguucuugcuuuacuguaaugaccgauggaccaagugauggacaggccucauacaagaucuucagaauagaaaagggaaagauagucaaaucagucgaaaugaaugccccuaauuaucacuaugaggaaugcuccuguuauccugauucuagugaaaucacaugugugugcagggauaacuggcauggcucgaaucgaccgugggugucuuucaaccagaaucuggaauaucggauaggauacauaugcagugggauuuucggagacaauccacgcccuaaugauaagacaggcaguugugguccaguaucgucuaauggagcaaauggaguaaaaggauuuucauucaaauacggcaaugguguuuggauagggagaacuaaaagcauuaguucaagaaacgguuuugagaugauuugggauccgaacggauggacugggacagacaauaacuucucaauaaagcaagauaucauaggaauaaaugaguggucaggauauagcgggaguuuuguucagcauccagaacuaacagggcuggauuguauaagaccuugcuucuggguugaacuaaucagagggcggcccaaagagaacacaaucuggacuagcgggagcagcauauccuuuugugguguaaacaguggcacuguggguuggucuuggccagacggugcugaguugccauuuaccauugacaaguaa

SEQ ID NO: 52835 - RNA, 1410 nt, Artificial Sequence; identical to SEQ ID NO: 52602
  derived and/or modified CDS sequence (wt) from neuraminidase__InfluenzaA__AEJ10443

SEQ ID NO: 52836 - RNA, 1410 nt, Artificial Sequence; identical to SEQ ID NO: 52606
  derived and/or modified CDS sequence (wt) from neuraminidase__InfluenzaA__AEJ10453

SEQ ID NO: 52837 - RNA, 1410 nt, Artificial Sequence
  derived and/or modified CDS sequence (wt) from neuraminidase__InfluenzaA__AEJ10463
augaauccaaaccaaaagauaauaaccauugguucggucuguaugacaauuggaauggcuaacuuaauauuacaaauuggaaacauaaucucaauauggauuagccacucaauucaacuugggaaucaaaaucagauugaaacaugcaaucaaagcgucauuacuuaugaaaacaacacuuggguaaaucagacauauguuaacaucagcaacaccaacuuugcugcuggacagucagugguuuccgugaaauuagcgggcaauuccucucucugcccuguuaguggaugggcuauauacaguaaagacaacaguauaagaaucgguuccaagggggauguguuugucauaagggaaccauucauaucaugcucccccuuggaaugcagaaccuucuucuugacucaaggggccuugcuaaaugacaaacauuccaauggaaccauuaaagacaggagcccauaucgaacccuaaugagcuguccuauuggugaaguucccucuccauacaacucaagauuugagucagucgcuuggucagcaagugcuugucaugauggcaucaauuggcuaacaauuggaauuucuggcccagacaauggggcaguggcuguguuaaaguacaacggcauaauaacagacacuaucaagaguuggagaaacaauauauugagaacacaagagucugaaugugcauguguaaaugguucuugcuuuaccauaaugaccgauggaccaagugauggacaggccucauacaagaucuucagaauagaaaagggaaagauagucaaaucagucgaaaugaaugccccuaauuaucacuaugaggaaugcuccuguuauccugauucuagugaaaucacaugugugugcagggauaacuggcauggcucgaaucgaccgugggugucuuucaaccagaaucuggaauaucagauaggauacauaugcagugggauuuucggagacaauccacgcccuaaugauaagacaggcaguugugguccaguaucgucuaauggagcaaauggaguaaaaggauuuucauucaaauacggcaaugguguuuggauagggagaacuaaaagcauuaguucaagaaaagguuuugagaugauuugggauccaaacggauggacugggacagacaauaacuucucaauaaagcaagauaucguaggaauaaaugaguggucaggauauagcgggaguuuuguucagcauccagaacuaacagggcuggacuguauaagaccuugcuucuggguugaacuaaucagagggcgacccaaagagaacacaaucuggacuagcgggagcagcauauccuuuugugguguaaacagugacacuguggguuggucuuggccagacggugcugaguugccauuuaccauugacaaguaa

SEQ ID NO: 52838 - RNA, 1410 nt, Artificial Sequence
  derived and/or modified CDS sequence (wt) from neuraminidase__InfluenzaA__AEJ10473
augaauccaaaccaaaagauaauaaccauugguucggucuguaugacaauuggaauggcuaacuuaauauuacaaauuggaaacauaaucucaauauggauuagccacucaauucaacuugggaaucaaaaucagauugaaacaugcaaucaaagcgucauuacuuaugaaaacaaaacuuggguaaaucagacauauguuaacaucagcaacaccaacuuugcugcuggacagucagugguuuccgugaaauuagcgggcaauuccucucucugcccuguuaguggaugggcuauauacaguaaagacaacaguauaagaaucgguuccaagggggauguguuugucauaagggaaccauucauaucaugcucccccuuggaaugcagaacuuucuucuugacucaaggggccuugcugaaugacaaacauuccaauggaaccauuaaagacaggagcccauaucgaacccuaaugagcuguccuauuggugaaguucccucuccauacaauucaagauuugagucagucgcuuggucagcaagugcuugccaugauggcaucaauuggcuaacaauuggaauuucuggcccagacaauggggcaguggcuguguuaaaguacaacggcauaauaacagacacuaucaagaguuggagaaacaauauauugagaacacaagagucugaaugugcauguguaaaugguucuugcuuuacuguaaugaccgauggaccaagugauggacaggccucauacaagaucuucagaauagaaaagggaaagauagucaaaucagucgaaaugaaugccccuaauuaucacuaugaggaaugcuccuguuauccugauucuagugaaaucacaugugugugcagggauaacuggcauggcucgaaucgaccgugggugucuuucaaccagaaucuggaauaucagauaggauacauaugcagugggauuuucggagacaauccacgcccuaaugauaagacaggcaguugugguccaguaucgucuaauggagcaaauggaguaaaaggauuuucauucaaauacggcaaugguguuuggauagggagaacuaaaagcauuaguucaagaaacgguuuugagaugauuugggauccgaacggauggaccgggacagacaauaaauucucaauaaagcaagauaucguaggaauaaaugaguggucaggauauagcgggaguuuuguucagcauccagaacuaacagggcugaauuguauaagaccuugcuucuggguugaacuaaucagagggcgacccaaggagaacacaaucuggacuagcgggagcagcauauccuuuugugguguaaacagugacacuguggguuggucuuggccagacggugcugaguugccauuuaccauugacaaguaa

SEQ ID NO: 52839 - RNA, 1410 nt, Artificial Sequence
  derived and/or modified CDS sequence (wt) from neuraminidase__InfluenzaA__AEJ10503
augaauccaaaccaaaagauaauaaccauugguucggucuguaugacaauuggaauggcuaacuuaauauuacaaauuggaaacauaaucucaauauggauuagccacucaauccaacuugggaaucaaagucagauugaaacaugcaaucaaagcgucauuacuuaugaaaacaacacuuggguaaaucagacauauguuaacaucagcaacaccaacuuugcugcuggacagucagugguuucagugaaauuagcgggcaauuccucucucugcccuguuaguggaugggcuauauacaguaaagacaacaguauaagaaucgguuccaagggggauguguuugucauaagggaaccauucauaucaugcucccccuuggaaugcagaaccuucuucuugacucaaggggccuugcuaaaugacaaacauuccaauggaaccauuaaagacaggagcccauaucgaacccuaaugagcuguccuauuggugaaguucccucuccauacaacucaagauuugagucagucgcuuggucagcaagugcuugucaugauggcaucaauuggcuaacaauuggaauuucuggcccagacaauggggcaguggcuguguuaaaguacaacggcauaauaacagacacuaucaagaguuggagaaacaauauauugagaacacaagagucugaaugugcauguguaaaugguucuugcuuuaccauaaugaccgauggaccaagugauggacaggccucauacaagaucuucagaauagaaaagggaaagauagucaaaucagucgaaaugaaugccccuaauuaucacuaugaggaaugcuccuguuauccugauucuagugaaaucacaugugugugcagggauaacuggcauggcucgaaucgaccgugggugucuuucaaccagaaucuggaauaucagauaggauacauaugcagugggauuuucggagacaauccacgcccuaaugauaagacaggcaguugugguccaguaucgucuaauggagcaaauggaguaaaaggauuuucauucaaauacggcaaugguguuuggauagggagaacuaaaagcauuaguucaagaaaagguuuugagaugauuugggauccaaacggauggacugggacagacaauaacuucucaauaaagcaagauauaguaggaauaaaugaguggucaggauauagcgggaguuuuguucagcauccagaacuaacagggcuggauuguauaagaccuugcuucuggguugaacuaaucagagggcgacccaaagagaacacaaucuggacuagcgggagcagcauauccuuuugugguguaaacagugacacuguggguuggucuuggccagacggugcugaguugccauuuaccauugacaaguaa

SEQ ID NO: 52840 - RNA, 1410 nt, Artificial Sequence; identical to SEQ ID NO: 48750
  derived and/or modified CDS sequence (wt) from neuraminidase__InfluenzaA__AEJ10523

SEQ ID NO: 52841 - RNA, 1410 nt, Artificial Sequence; identical to SEQ ID NO: 48750
  derived and/or modified CDS sequence (wt) from neuraminidase__InfluenzaA__AEJ10533

SEQ ID NO: 52842 - RNA, 1410 nt, Artificial Sequence; identical to SEQ ID NO: 48750
  derived and/or modified CDS sequence (wt) from neuraminidase__InfluenzaA__AEJ10543

SEQ ID NO: 52843 - RNA, 1410 nt, Artificial Sequence; identical to SEQ ID NO: 48750
  derived and/or modified CDS sequence (wt) from neuraminidase__InfluenzaA__AEJ10553

SEQ ID NO: 52844 - RNA, 1410 nt, Artificial Sequence
  derived and/or modified CDS sequence (wt) from neuraminidase__InfluenzaA__AEJ10563
augaauccaaaccaaaagauaauaaccauugguucggucuguaugacaauuggaauggcuaacuuaauauuacaaauugggaacauaaucucaauauggauuagccacucaauucaacuugggaauaaaaaucagauugaaacaugcaaucaaagcgucauuacuuaugaaaacaacacuuggguaaaucagacauauguuaacaucagcaacaccaacuuugcugcuggacagucagugguuuccgugaaauuagcgggcaauuccucucucugcccuguuaguggaugggcuauauacaguaaagacaacaguauaagaaucgguuccaagggggauguguuugucauaagggaaccauucauaucaugcuccccccuggaaugcagaaccuucuucuugacucaaggggccuugcuaaaugacaaacauuccaauggaaccauuaaagacaggagcccauaucgaacccuaaugagcuguccuauuggugaaguucccucuccauacaacucaagauuugagucagucgcuuggucagcaagugcuugucaugauggcaucaauuggcuaacaauuggaauuucuggcccagacaauggggcaguggcuguguuaaaguacaacggcauaauaacagacacuaucaagaguuggagaaacaauauauugagaacacaagagucugaaugugcauguguaaaugguucuugcuuuacuguaaugaccgauggaccaagugauggacaggccucauacaagaucuucaggauagaaaagggaaagauagucaaaucagucgaaaugaaugccccuaauuaucacuaugaggaaugcuccuguuauccugauucuagugaaaucacaugugugugcagggauaacuggcauggcucgaaucgaccgugggugucuuucaaccagaaucuggaauaucagauaggauacauaugcagugggauuuucggagacaauccacgcccuaaugauaagaaaggcaguugugguccaguaucgucuaauggagcaaacggaguaaaaggauuuucauucaaauacggcaaugguguuuggauagggagaacuaaaagcauuaguucaagaaacgguuuugagaugauuugggauccgaacggauggacugggacagacaauaacuucucaauaaagcaagauaucguaggaauaaaugaauggucaggauauagcgggaguuuuguucagcauccagaacuaacagggcuggauuguauaagaccuugcuucuggguugaacuaaucagagggcgacccaaagagaacacaaucuggacuagugggagcagcauauccuuuugugguguaaacagugacacuguggguuggucuuggccagacggugcugaguugccauuuaccauugacaaguaa

SEQ ID NO: 52845 - RNA, 1410 nt, Artificial Sequence; identical to SEQ ID NO: 52844
  derived and/or modified CDS sequence (wt) from neuraminidase__InfluenzaA__AEJ10573

SEQ ID NO: 52846 - RNA, 1410 nt, Artificial Sequence; identical to SEQ ID NO: 52844
  derived and/or modified CDS sequence (wt) from neuraminidase__InfluenzaA__AEJ10583

SEQ ID NO: 52847 - RNA, 1410 nt, Artificial Sequence
  derived and/or modified CDS sequence (wt) from neuraminidase__InfluenzaA__AEJ36305
augaauccaaaccaaaagauaauaaccauugguucggucuguaugacaauuggaauggcuaacuuaauauuacaaauuggaaacauaaucucaauauggauuagccacucaauucaacuugggaaucaaaaucagauugaaacaugcaaucaaagcgucauuacuuaugaaaacaacacuuggguaaaucagacauauguuaacaucagcaacaccaacuuugcugcuggacagucagugguuuccgugaaauuagcgggcaauuccucucucugcccuguuaguggaugggcuauauacaguaaagacaacaguauaagaaucgguuccaagggggauguguuugucauaagggaaccauucauaucaugcucccccuuggaaugcagaaccuucuucuugacucaaggggccuugcuaaaugacaaacauuccaauggaaccauuaaagacagaagcccauaucgaacccuaaugagcuguccuauuggugaaguucccucuccauacaacucaagauuugagucagucgcuuggucagcaagugcuugucaugauggcaucaacuggcuaacaauuggaauuucuggcccagacaauggggcaguggcuguguuaaaguacaacggcauaauaacagacacuaucaagaguuggagaaacaauauauugagaacacaagagucugaaugugcauguguaaaugguucuugcuuuacuguaaugaccgauggaccaagugauggacaggccucauacaagaucuucagaauagaaaagggaaagauagucaaaucagucgagaugaaugccccuaauuaucacuaugaggaaugcuccuguuauccugauucuagugaaaucacaugugugugcagggauaacuggcauggcucgaaucgaccgugggugucuuucaaccagaaucuggaauaucagauaggguacauaugcagugggauuuucggagacaauccacgcccuaaugauaagacaggcaguugugguccaguaucgucuaauggagcaaauggaguaaaaggauuuucauucaaauacggcaaugguguuuggauagggagaacuaaaagcacuaguucaagaaacgguuuugagaugauuugggauccgaacggauggacugggacagacaauagcuucucaauaaagcaagauaucguaggaauaaaugaguggucaggauauagcgggaguuuuguucagcauccagaacuaacagggcuggauuguauaagaccuugcuucuggguugaacuaaucagagggcgaccuaaagagaacacaaucuggacuagcgggagcagcauauccuuuugugguguaaacagugacacuguggguuggucuuggccagacggugcugaguugccauuuaccauugacaaguaa

SEQ ID NO: 52848 - RNA, 1410 nt, Artificial Sequence
  derived and/or modified CDS sequence (wt) from neuraminidase__InfluenzaA__AEJ37856
augaauccaaaccaaaagauaauaaccauugguucggucuguaugacaauuggaauggcuaacuuaauauuacaaauuggaaacauaaucucaauauggauuagccacucaauucaacuugggaaucaaaaucagauugaaacaugcaaucaaagcgucauuacuuaugaaaacaacacuuggguaaaucagacauauguuaacaucagcaacaccaacuuugcugcuggacagucagugguuuccgugaaauuagcgggcaauuccucucucugcccuguuaguggaugggcuauauacaguaaagacaacaguauaagaaucgguuccaagggggauguguuugucauaagggaaccauucauaucaugcucccccuuggaaugcagaaccuucuucuugacucaaggggccuugcuaaaugacaaacauuccaauggaaccauuaaagacaggagcccauaucgaacccuaaugagcuguccuauuggugaaguucccucuccguacaacucaagauuugagucagucgcuuggucagcaagugcuugucaugauggcaucaauuggcuaacaauuggaauuucuggcccagacaauggggcaguggcuguguuaaaguacaacggcauaauaacagacacuaucaagaguuggagaaacaauauauugagaacacaagagucugaaugugcauguguaaaugguucuugcuuuacuguaaugaccgauggaccaagugauggacaggcuucauacaagaucuucagaauagaaaagggaaagauagucaaaucagucgaaaugaaugccccuaauuaucacuaugaggaaugcuccuguuauccugauucuagugaaaucacaugugugugcagggauaacuggcauggcucgaaucgaccgugggugucuuucaaccagaaucuggaauaucagauaggauacauaugcagugggauuuucggagacaauccacgcccuaaugauaagacaggcaguugugguccaguaucgucuaauggagcaaauggaguaaaaggauuuucauucaaauacggcaaugguguuuggauagggagaacuaaaagcauuaguucaagaaacgguuuugagaugauuugggauccgaacggauggacugggacagacaauaacuucucaauaaagcaagauaucguaggaauaaaugaauggucaggauauagcgggaguuuuguucagcauccagaacuaacagggcuggauuguauaagaccuugcuucuggguugaacuaaucagagggcgacccaaagagaacacaaucuggacuagugggagcagcauauccuuuugugguguaaacagugacacuguggguuggucuuggccagacggugcugaguugccauuuaccauugacaaguaa

SEQ ID NO: 52849 - RNA, 1410 nt, Artificial Sequence
  derived and/or modified CDS sequence (wt) from neuraminidase__InfluenzaA__AEJ37866
augaauccaaaccaaaagauaauaaccauugguucggucuguaugacaauuggaauggcuaacuuaauauuacaaauuggaaacauaaucucaauauggauuagccacucaauucaacuugggaaucaaaaucagauugaaacaugcaaucaaagcgucauuacuuaugaaaacaacacuuggguaaaucagacauauguuaacaucagcaacaccaacuuugcugcuggacagucagugguuuccgugaaauuagcgggcaauuccucucucugcccuguuaguggaugggcuauauacaguaaagacaacaguauaagaaucgguuccaagggggauguguuugucauaagggaaccauucauaucaugcucccccuuggagugcagaaccuucuucuugacucaaggggccuugcuaaaugacaaacauuccaauggaaccauuaaagacaggagcccauaucgaacccuaaugagcuguccuauuggugaaguucccucuccauacaacucaagauuugagucagucgcuuggucagcaagugcuugucaugauggcaucaauuggcuaacaauuggaauuucuggcccagacaauggggcaguggcuguguuaaaguacaacggcauaauaacagacacuaucaagaguuggagaaacaauauauugagaacacaagagucugaaugugcauguguaaaugguucuugcuuuacuguaaugaccgauggaccaagugauggacaggccucauacaagaucuucagaauagaaaagggaaagauagucaaaucagucgaaaugaaugccccuaauuaucacuaugaggaaugcuccuguuauccugauucuagugaaaucacaugugugugcagggauaacuggcauggcucgaaucgaccgugggugucuuucaaccagaaucuggaauaucagauaggauacauaugcagugggauuuucggagacaauccacgcccuaaugauaagacaggcaguugugguccaguaucgucuaauggagcaaauggaguaaaaggauuuucauucaaauacggcaaugguguuuggauagggagaacuaaaagcauuaguucaagaaacgguuuugagaugauuugggauccgaacggauggacugggacagacaauaacuucucaauaaagcaagauaucguaggaauaaaugaguggucaggauauagcgggaguuuuguucagcauccagaacuaacagggcuggauuguauaagaccuugcuucuggguugaacuaaucagagggcgacccaaagagaacacaaucuggacuagcgggagcagcauauccuuuugugguguaaacagugacacuguggguuggucuuggccagacggugcugaguugccauuuaccauugacaaguaa

SEQ ID NO: 52850 - RNA, 1410 nt, Artificial Sequence
  derived and/or modified CDS sequence (wt) from neuraminidase__InfluenzaA__AEJ37876
augaauccaaaccaaaagauaauaaccauugguucggucuguaugacaauugggauggcuaacuuaauauuacaaauuggaaacauaaucucaauauggauuagccacucaauucaacuugggaaucaaaaucagauugaaacaugcaaucaaagcgucauuacuuaugaaaacaacacuuggguaaaucagacauauguuaacaucagcaacaccaacuuugcugcuggacagucagugguuuccgugaaauuagcgggcaauuccucucucugcccuguuaguggaugggcuauauacaguaaagacaacaguauaagaaucgguuccaagggggauguguuugucauaagggaaccauucauaucaugcucccccuuggagugcagaaccuucuucuugacucaaggggccuugcuaaaugacaaacauuccaauggaaccauuaaagacaggagcccauaucgaacccuaaugagcuguccuauuggugaaguucccucuccauacaacucaagauuugagucagucgcuuggucagcaagugcuugucaugauggcaucaauuggcuaacaauuggaauuucuggcccagacaauggagcaguggcuguguuaaaguacaacggcauaauaacagacacuaucaagaguuggagaaacaauauauugagaacacaagagucugaaugugcauguguaaaugguucuugcuuuacuguaaugaccgauggaccaagugauggacaggccucauacaagaucuucagaauagaaaagggaaagauagucaaaucagucgaaaugaaugccccuaauuaucacuaugaggaaugcuccuguuauccugauucuagugaaaucacaugugugugcagggauaacuggcauggcucgaaucgaccgugggugucuuucaaccagaaucuggaauaucagauaggauacauaugcagugggauuuucggagacaauccacgcccuaaugauaagacaggcaguugugguccaguaucgucuaauggagcaaauggaguaaaaggauuuucauucaaauacggcaaugguguuuggauagggagaacuaaaagcauuaguucaagaaacgguuuugagaugauuugggauccgaacggauggacugggacagacaauaacuucucaauaaagcaagauaucguaggaauaaaugaguggucaggauauagcgggaguuuuguucagcauccagaacuaacagggcuggauuguauaagaccuugcuucuggguugaacuaaucagagggcgacccaaagagaacacaaucuggacuagcgggagcagcauauccuuuugugguguaaacagugacacuguggguuggucuuggccagacggugcugaguugccauuuaccauugacaaguaa

SEQ ID NO: 52851 - RNA, 1410 nt, Artificial Sequence; identical to SEQ ID NO: 52819
  derived and/or modified CDS sequence (wt) from neuraminidase__InfluenzaA__AEJ37886

SEQ ID NO: 52852 - RNA, 1410 nt, Artificial Sequence
  derived and/or modified CDS sequence (wt) from neuraminidase__InfluenzaA__AEJ37896
augaauccaaaccaaaagauaauaaccauugguucggucuguauaacaauuggaauggcuaacuuaauauuacaaauuggaaacauaaucucaauauggauuagccacucaauucaacuugggaaucaaaaucagauugaaacaugcaaucaaagcgucauuacuuaugaaaacaacacuuggguaaaucagacauauguuaacaucagcaacaccaacuuugcugcuggacagucagugguuuccgugaaauuagcgggcaauuccucucucugcccuguuaguggaugggcuauauacaguaaagacaacaguauaagaaucgguuccaagggggauguguuugucauaagggaaccauucauaucaugcucccccuuggaaugcagaaccuucuucuugacucaaggggccuugcuaaaugacaaacauuccaauggaaccauuaaagacaggagcccauaucgaacccuaaugagcuguccuauuggugaaguucccucuccauacaacucaagauuugagucagucgcuuggucagcaagugcuugucaugauggcaucaguuggcuaacaauuggaauuucuggcccagacaauggggcaguggcuguguuaaaguacaacggcauaauaacagacacuaucaagaguuggagaaacaauauauugagaacacaagagucugaaugugcauguguaaaugguucuuguuuuacuguaaugaccgauggaccaagugauggacaggccucauacaagaucuucagaauagaaaagggaaggauagucaaaucagucgaaaugaaugccccuaauuaucacuaugaggaaugcuccuguuauccugauucuagugaaaucacaugugugugcagggauaacuggcauggcucgaaucgaccgugggugucuuucaaccagaaucuggaauaucagauaggauacauaugcagugggauuuucggagacaauccacgcccuaaugauaagacaggcaguugugguccaguaucgucuaauggagcaaauggaguaaaaggauuuucauucaaauacggcaaugguguuuggauagggagaacuaaaagcauuaguucaagaaacgguuuugagaugauuugggauccgaacggauggacugggacagacaauaacuucucaauaaagcaagauaucguaggaauaaaugaguggucaggauauagcgggaguuuuguucagcauccagaacuaacagggcuggauuguauaagaccuugcuucuggguugaacuaaucagagggcgacccaaagagaacacaaucuggacuagcgggagcagcauauccuuuugugguguaaacagugacacuguggguuggucuuggccagacggugcugaguugccauuuaccauugacaaguaa

SEQ ID NO: 52853 - RNA, 1410 nt, Artificial Sequence; identical to SEQ ID NO: 52819
  derived and/or modified CDS sequence (wt) from neuraminidase__InfluenzaA__AEJ37906

SEQ ID NO: 52854 - RNA, 1410 nt, Artificial Sequence; identical to SEQ ID NO: 52819
  derived and/or modified CDS sequence (wt) from neuraminidase__InfluenzaA__AEJ37916

SEQ ID NO: 52855 - RNA, 1410 nt, Artificial Sequence; identical to SEQ ID NO: 52819
  derived and/or modified CDS sequence (wt) from neuraminidase__InfluenzaA__AEJ37926

SEQ ID NO: 52856 - RNA, 1410 nt, Artificial Sequence
  derived and/or modified CDS sequence (wt) from neuraminidase__InfluenzaA__AEJ37936
augaauccaaaucaaaagauaauaaccauugguucggucuguaugacaauuggaauggcuaacuuaauauuacaaauuggaaacauaaucucaauauggauuagccacucaauucaacuugggaaucaaaaucagauugaaacaugcaaucaaagcgucauuacuuaugaaaacaacacuuggguaaaucagacauauguuaacaucagcaacaccaacuuugcugcuggacagucagugguuuccgugaaauuagcgggcaauuccucucucugcccuguuaguggaugggcuauauacaguaaagacaacaguauaagaaucgguuccaagggggauguguuugucauaagggaaccauucauaucaugcucccccuuggagugcagaaccuucuucuugacucaaggggccuugcuaaaugacaaacauuccaauggaaccauuaaagacaggagcccauaucgaacccuaaugagcuguccuauuggugaaguucccucuccauacaacucaagauuugagucagucgcuuggucagcaagugcuugucaugauggcaucaauuggcuaacaauuggaauuucuggcccagacaauggggcaguggcuguguuaaaguacaacggcauaauaacagacacuaucaagaguuggagaaacaauauauugagaacacaagagucugaaugugcauguguaaaugguucuugcuuuacuguaaugaccgauggaccaagugauggacaggccucauacaagaucuucaaaauagaaaagggaaagauagucaaaucagucgaaaugaaugccccuaauuaucacuaugaggaaugcuccuguuauccugauucuagugaaaucacaugugugugcagggauaacuggcauggcucgaaucgaccgugggugucuuucaaccagaaucuggaauaucagauaggauacauaugcagugggauuuucggagacaauccacgcccuaaugauaagacaggcaguugugguccaguaucgucuaauggagcaaauggaguaaaaggauuuucauucaaauacggcaaugguguuuggauagggagaacuaaaagcauuaguucaagaaacgguuuugagaugauuugggauccgaacggauggacugggacagacaauaacuucucaauaaagcaagauaucguaggaauaaaugaguggucaggauauagcgggaguuuuguucagcauccagaacuaacagggcuggauuguauaagaccuugcuucuggguugaacuaaucagagggcgacccaaagagaacacaaucuggacuagcgggagcagcauauccuuuugugguguaaacagugacacuguggguuggucuuggccagacggugcugaguugccauuuaccauugacaaguaa

SEQ ID NO: 52857 - RNA, 1410 nt, Artificial Sequence
  derived and/or modified CDS sequence (wt) from neuraminidase__InfluenzaA__AEJ37946
augaauccaaaccaaaagauaauaaccauugguucggucuguaugacaauugggauggcuaacuuaauauuacaaauuggaaacauaaucucaauauggauuagccacucaauucaacuugggaaucaaaaucagauugaaacaugcaaucaaagcgucauuacuuaugaaaacaacacuuggguaaaucagacauauguuaacaucagcaacaccaacuuugcugcuggacagucagugguuuccgugaaauuagcgggcaauuccucucucugcccuguuaguggaugggcuauauacaguaaagacaacaguauaagaaucgguuccaagggggauguguuugucauaagggaaccauucauaucaugcucccccuuggagugcagaaccuucuucuugacucaaggggccuugcuaaaugacaaacauuccaauggaaccauuaaagacaggagcccauaucgaacccuaaugagcuguccuauuggugaaguucccucuccauacaacucaagauuugagucagucgcuuggucagcaagugcuugucaugauggcaucaauuggcuaacaauuggaauuucuggcccagacaauggagcaguggcuguguuaaaguacaacggcauaauaacagacacuaucaagaguuggagaaacaauauauugagaacacaagagucugaaugugcauguguaaaugguucuugcuuuacuguaaugaccgauggaccaagugauggacaggccucauacaagaucuucagaauagaaaagggaaagauagucaaaucagucgaaaugaaugccccuaauuaucacuaugaggaaugcuccuguuauccugauucuagugaaaucacaugugugugcagggauaacuggcauggcucgaaucgaccgugggugucuuucaaccagaaucuggaauaucagauaggauacauaugcagugggauuuucggagacaauccacgcccuaaugauaagacaggcaguugugguccaguaucgucuaauggagcaaauggaguaaaaggauuuucauucaaauacggcaaugguguuuggauagggagaacuaaaagcauuaguucaagaaacgguuuugagaugauuugggauccgaacggauggacugggacagacaauaacuucucaauaaagcaagauaucguaggaauaaaugaguggucaggauauagcgggaguuuuguucagcauccagaacuaacagggcuggauuguauaagaccuugcuucuggguugagcuaaucagagggcgacccaaagagaacacaaucuggacuagcgggagcagcauauccuuuugugguguaaacagugacacuguggguuggucuuggccagacggugcugaguugccauuuaccauugacaaguaa

SEQ ID NO: 52858 - RNA, 1410 nt, Artificial Sequence; identical to SEQ ID NO: 52819
  derived and/or modified CDS sequence (wt) from neuraminidase__InfluenzaA__AEJ37956

SEQ ID NO: 52859 - RNA, 1410 nt, Artificial Sequence
  derived and/or modified CDS sequence (wt) from neuraminidase__InfluenzaA__AEJ37966
augaauccaaaccaaaagauaauaaccauugguucggucuguauaacaauuggaauggcuaacuuaauauuacaaauuggaaacauaaucucaauauggauuagccacucaauucaacuugggaaucaaaaucagauugaaacaugcaaucaaagcgucauuacuuaugaaaacaacacuuggguaaaucagacauauguuaacaucagcaacaccaacuuugcugcuggacagucagugguuuccgugaaauuagcgggcaauuccucucucugcccuguuaguggaugggcuauauacaguaaagacaacaguauaagaaucgguuccaagggggauguguuugucauaagggaaccauucauaucaugcucccccuuggaaugcagaaccuucuucuugacucaaggggccuugcuaaaugacaaacauuccaauggaaccauuaaagacaggagcccauaucgaacccuaaugagcuguccuauuggugaaguucccucuccauacaacucaagauuugagucagucgcuuggucagcaagugcuugucaugauggcaucaguuggcuaacaauuggaauuucuggcccagacaauggggcaguggcuguguuaaaguacaacggcauaauaacagacacuaucaagaguuggagaaacaauauauugagaacacaagagucugaaugugcauguguaaaugguucuuguuuuacuguaaugaccgauggaccaagugauggacaggccucauacaagaucuucagaauagaaaagggaaagauagucaaaucagucgaaaugaaugccccuaauuaucacuaugaggaaugcuccuguuauccugauucuagugaaaucacaugugugugcagggauaacuggcauggcucgaaucgaccgugggugucuuucaaccagaaucuggaauaucagauaggauacauaugcagugggauuuucggagacaauccacgcccuaaugauaagacaggcaguugugguccaguaucgucuaauggagcaaauggaguaaaaggauuuucauucaaauacggcaaugguguuuggauagggagaacuaaaagcauuaguucaagaaacgguuuugagaugauuugggauccgaacggauggacugggacagacaauaacuucucaauaaagcaagauaucguaggaauuaaugaguggucaggauauagcgggaguuuuguucagcauccagaacuaacagggcuggauuguauaagaccuugcuucuggguugaacuaaucagagggcgacccaaagagaacacaaucuggacuagcgggagcagcauauccuuuugugguguaaacagugacacuguggguuggucuuggccagacggugcugaguugccauuuaccauugacaaguaa

SEQ ID NO: 52860 - RNA, 1410 nt, Artificial Sequence
  derived and/or modified CDS sequence (wt) from neuraminidase__InfluenzaA__AEJ37976
augaauccaaaccaaaagauaauaaccauugguucggucuguaugacaauugggauggcuaacuuaauauuacaaauuggaaacauaaucucaauauggauuagccacucaauucaacuugggaaucaaaaucagauugaaacaugcaaucaaagcgucauuacuuaugaaaacaacacuuggguaaaucagacauauguuaacaucagcaacaccaacuuugcugcuggacagucagugguuuccgugaaauuagcgggcaauuccucucucugcccuguuaguggaugggcuauauacaguaaagacaacaguauaagaaucgguuccaagggggauguguuugucauaagggaaccauucauaucaugcucccccuuggagugcagaaccuucuucuugacucaaggggccuugcuaaaugacaaacauuccaauggaaccauuaaagacaggagcccauaucgaacccuaaugagcuguccuauuggugaaguucccucuccauacaacucaagauuugagucagucgcuuggucagcaagugcuugucaugauggcaucaauuggcuaacaauuggaauuucuggcccagacaauggagcaguggcuguguuaaaguacaacggcauaauaacagacacuaucaagaguuggagaaacaauauauugagaacacaagagucugaaugugcauguguaaaugguucuugcuuuacuguaaugaccgauggaccaagugauggacaggccucauacaagaucuucagaauagaaaagggaaagauagucaaaucagucgaaaugaaugccccuaauuaucacuaugaggaaugcuccuguuauccugauucuagugaaaucacaugugugugcagggauaacuggcauggcucgaaucgaccgugggugucuuucaaccagaaucuggaauaucagauaggauacauaugcagugggauuuucggagacaauccacgcccuaaugauaagacaggcaguugugguccaguaucgucuaauggagcaaauggaguaaaaggauuuucauucaaauacggcaaugguguuuggauagggagaacuaaaagcauuaguucaagaaacgguuuugagaugauuugggauccgaacggauggacugggacagacaauaacuucucaauuaagcaagauaucguaggaauaaaugaguggucaggauauagcgggaguuuuguucagcauccagaacuaacagggcuggauuguauaagaccuugcuucuggguugaacuaaucagagggcgacccaaagagaacacaaucuggacuagcgggagcagcauauccuuuugugguguaaacagugacacuguggguuggucuuggccagacggugcugaguugccauuuaccauugacaaguaa

SEQ ID NO: 52861 - RNA, 1410 nt, Artificial Sequence; identical to SEQ ID NO: 52819
  derived and/or modified CDS sequence (wt) from neuraminidase__InfluenzaA__AEJ37986

SEQ ID NO: 52862 - RNA, 1410 nt, Artificial Sequence; identical to SEQ ID NO: 51422
  derived and/or modified CDS sequence (wt) from neuraminidase__InfluenzaA__AEK21372

SEQ ID NO: 52863 - RNA, 1413 nt, Artificial Sequence
  derived and/or modified CDS sequence (wt) from neuraminidase__InfluenzaA__AEK21383
augaacccaaaucaaaagauaauaaccauuggaucaaucaguauagcaaucggaauaauuagucuaauguugcaaauaggaaauauuauuucaauaugggcuagucacucaauccaaacuggaagucaaaacaacacuggaauaugcaaccaaagaaucaucacauaugaaaacagcaccugggugaaucacacauauguuaauauuaacaacacuaauguuguugcuggagaggacaaaacgucagugacauuggccggcaauucaucucuuugcucuaucaguggaugggcuauauacacaaaagacaacagcauaagaauuggcuccaaaggagauguuuuugucauaagagaaccuuucauaucauguucucacuuggaaugcagaaccuuuuuucugacccaaggcgcucuauuaaaugacaaacauucaaaugggaccguaaaggacagaaguccuuauagggccuuaaugagcuguccucuaggugaagcuccguccccauacaauucaaaguucgaaucaguugcauggucagcaagcgcaugccaugauggcaugggcugguugacaaucggaauuucugguccagacaauggagcuguggcuguacuaaaauacaacggaauaauaacuggaaccauaaaaaguuggaaaaagcaaauauuaagaacacaagagucugaaugugucuguaugaacgggucauguuucaccauaaugaccgauggcccgaguaauaaagccgccucguacaaaauuuucaagaucgaaaaggggaagguuacuaaaucaauagaguugaaugcacccaauuuuuauuacgaggaaugcuccuguuacccagacacuggcauagugauguguguaugcagggacaacuggcaugguucaaaucgaccuugggugucuuuuaaucaaaauuuggauuaucaaauaggauacaucugcaguggaguguuuggugacaauccgcgucccgaagauggagagggcagcugcaauccagugacuguugauggagcagacggaguaaaaggguuuucauacaaauaugguaaugguguuuggauaggaaggaccaaaaguaacagacuuagaaagggguuugagaugauuugggauccuaauggguggacaaauaccgacagugauuucucagugaaacaggauguuguagcaauaacugauuggucaggguacagcggaaguuucguccaacauccugaguugacaggauuggacuguauaagaccuugcuucuggguugaguuagucagagggcugccuagagaaaauacaacaaucuggacuagugggagcagcauuucuuuuuguggcguuaauagugauacugcaaacuggucuuggccagacggugcugaguugccguucaccauugacaaguag

SEQ ID NO: 52864 - RNA, 1410 nt, Artificial Sequence
  derived and/or modified CDS sequence (wt) from neuraminidase__InfluenzaA__AEK21399
augaauccaaaccaaaagauaauaaccauugguucggucuguaugacaauuggaauggcuaacuuaauauuacaaauuggaaacauaaucucaauauggauuagccacucaauucaacuugggaaucaaaaucagauugaaacaugcaaucaaagcgucauuacuuaugaaaacaacacuuggguaaaucagacauauguuaacauuagcaacaccaacuuugcugcuggacagucagugguuuccgugaaauuagcgggcaauuccucucuuugcccuguuaguggaugggcuauauacaguaaagacaacaguauaagaaucgguuccaagggggauguguuugucauaagggaaccauucauaucaugcucccccuuggaaugcagaaccuucuucuugacucaaggggccuugcuaaaugacaaacauuccaauggaaccauuaaagacaggagcccauaucgaacccuaaugagcuguccuauuggugaaguucccuccccauacaacucaagauuugagucagucgcuuggucagcaagugcuugucaugauggcaucaauuggcuaacaauuggaauuucuggcccagacaauggggcaguggcuguguuaaaguacaacggcauaauaacagacacuaucaagaguuggagaaacaauauauugagaacacaagagucugaaugugcauguguaaaugguucuugcuuuacuguaaugaccgauggaccaagugauggacaggccucauacaaaaucuucaaaauagaaaagggaaagauagucaaaucagucgaaaugaaugccccuaauuaucacuaugaggaaugcuccuguuauccugauucuagugaaaucacaugugugugcagggauaacuggcauggcucgaaucgaccgugggugucuuucaaccagaaucuggaauaucagauaggauacauaugcagugggauuuucggggacaauccacgcccuaaugauaagacaggcaguugugguccaguaucgucuaauggagcaaauggaguaaaaggauuuucauucaaauacggcaaugguguuuggauagggagaacuaaaagcauuaguucaagaaacgguuuugagaugauuugggauccgaacggauggacugggacagacaauaacuucucaauaaagcaagauaucguaggaauaaaugaguggucaggauauagcgggaguuuuguucagcauccagaacuaacagggcuggauuguauaagaccuugcuucuggguugaacuaaucagagggcgacccaaagagaacacaaucuggacuagcgggagcagcauauccuuuugugguguaaacagugacacuguggguuggucuuggccagacggugcugaguugccauuuaccauugacaaguaa

SEQ ID NO: 52865 - RNA, 1410 nt, Artificial Sequence
  derived and/or modified CDS sequence (wt) from neuraminidase__InfluenzaA__AEK21409
augaauccaaaccaaaagauaauaaccauugguucggucuguaugacaauuggaauggcuaacuuaauauuacaaauuggaaacauaaucucaauauggauuagccacucaauucaacuugggaaucaaaaucagauugaaacaugcaaucaaagcgucauuacuuaugaaaacaacacuuggguaaaucagacauauguuaacaucagcaacaccaacuuugcugcuggacagucagugguuuccgugaaauuagcgggcaauuccucucucugcccuguuaguggaugggcuauauacaguaaagacaacaguauaagaaucgguuccaagggggauguguuugucauaagggaaccauucauaucaugcucccccuuggaaugcagaaccuucuucuugacucaaggggccuugcuaaaugacaaacauuccaauggaaccauuaaagacaggagcccauaucgaacccuaaugagcuguccuauuggugaaguucccucuccauacaacucaagauuugagucagucgcuuggucagcaagugcuugucaugauggcaucaauuggcuaacaauuggaauuucuggcccagacaauggggcaguggcuguguuaaaguacaacggcauaauaacagacacaaucaagaguuggagaaacaauauauugagaacacaagagucugaaugugcauguguaaaugguucuugcuuuacuguaaugaccgauggaccaagugauggacaggccucauacaagaucuucagaauagaaaagggaaagauagucaaaucagucgaaaugaaugccccuaauuaucacuaugaggaaugcuccuguuauccugauucuagugaaaucacaugugugugcagggauaacuggcauggcucgaaucgaccgugggugucuuucaaccagaaucuggaauaucagauaggauacauaugcagugggauuuucggagacaauccacgcccuaaugauaagacaggcaguugugguccaguaucgucuaauggagcaaauggaguaaaaggauuuucauucaaauacggcaaugguguuuggauagggagaacuaaaagcauuaguucaagaaacgguuuugagaugauuugggauccgaacggauggacugggacagacaauaacuucucaauaaagcaagauaucguaggaauaaaugaguggucaggauauagcgggaguuuuguucagcauccagaacuaacagggcuggauuguauaagaccuugcuucuggguugaacuaaucagagggcgacccaaagagaacacaaucuggacuagcgggagcagcauauccuuuugugguguaaacagugacacuguggguuggucuuggccagacggugcugaguugccauuuaccauugacaaguaa

SEQ ID NO: 52866 - RNA, 1410 nt, Artificial Sequence; identical to SEQ ID NO: 52809
  derived and/or modified CDS sequence (wt) from neuraminidase__InfluenzaA__AEK21419

SEQ ID NO: 52867 - RNA, 1410 nt, Artificial Sequence; identical to SEQ ID NO: 52819
  derived and/or modified CDS sequence (wt) from neuraminidase__InfluenzaA__AEK21429

SEQ ID NO: 52868 - RNA, 1410 nt, Artificial Sequence
  derived and/or modified CDS sequence (wt) from neuraminidase__InfluenzaA__AEK21439
augaauccaaaccaaaagauaauaaccauugguucggucuguaugacaauugggauggcuaacuuaauauuacaaauuggaaacauaaucucaauauggauuagccacucaauucaacuugggaaucaaaaucagauugaaacaugcaaucaaagcgucauuacuuaugaaaacaacacuuggguaaaucagacauauguuaacaucagcaacaccaacuuugcugcuggacagucagugguuuccgugaaauuagcgggcaauuccucucucugcccuguuaguggaugggcuauauacaguaaagacaacaguauaagaaucgguuccaagggggauguguuugucauaagggaaccauucauaucaugcucccccuuggagugcagaaccuucuucuugacucaaggggccuugcuaaaugacaaacauuccaauggaaccauuaaagacaggagcccauaucgaacccuaaugagcuguccuauuggugaaguucccucuccauacaacucaagauuugagucagucgcuuggucagcaagugcuugucaugauggcaucaauuggcuaacaauuggaauuucuggcccagacaauggagcaguggcuguguuaaaguacaacggcauaauaacagacacuaucaagaguuggagaaacaauauauugagaacacaagagucugaaugugcauguguaaaugguucuugcuuuacuguaaugaccgauggaccaagugauggacaggccucauacaagaucuucagaauagaaaagggaaagauagucaaaucagucgaaaugaaugccccuaauuaucacuaugaggaaugcuccuguuauccugauucuagugaaaucacaugugugugcagggauaacuggcauggcucgaaucgaccgugggugucuuucaaccagaaucuggaauaucagauaggauacauaugcagugggauuuucggagacaauccacgcccuaaugauaagacaggcaguugugguccaguaucgucuaauggagcaaauggaguaaaaggauuuucauucaaauacggcaaugguguuuggauagggagaacuaaaagcauuaguucaagaaacgguuuugagaugauuugggauccgaacggauggacugggacagacaauaacuucucaaaaaagcaagauaucguaggaauaaaugaguggucaggauauagcgggaguuuuguucagcauccagaacuaacagggcuggauuguauaagaccuugcuucuggguugaacuaaucagagggcgacccaaagagaacacaaucuggacuagcgggagcagcauauccuuuugugguguaaacagugacacuguggguuggucuuggccagacggugcugaguugccauuuaccauugacaaguaa

SEQ ID NO: 52869 - RNA, 1410 nt, Artificial Sequence
  derived and/or modified CDS sequence (wt) from neuraminidase__InfluenzaA__AEK21449
augaauccaaaccaaaagauaauaaccauugguucggucuguauaacaauuggaauggcuaacuuaauauuacaaauuggaaacauaaucucaauauggauuagccacucaauucaacuugggaaucaaaaucagauugaaacaugcaaucaaagcgucauuacuuaugaaaacaacacuuggguaaaucagacauauguuaacaucagcaacaccaacuuugcugcuggacagucagugguuuccgugaaauuagcgggcaauuccucucucugcccuguuaguggaugggcuauauacaguaaagacaacaguauaagaaucgguuccaagggggauguguuugucauaagggaaccauucauaucaugcucccccuuggaaugcagaaccuucuucuugacucaaggggccuugcuaaaugacaaacauuccaauggaaccauuaaagacaggagcccauaucgaacccuaaugagcuguccuauuggugaaguucccuccccauacaacucaagauuugagucagucgcuuggucagcaagugcuugucaugauggcaucaguuggcuaacaauuggaauuucuggcccagacaauggggcaguggcuguguuaaaguacaacggcauaauaacagacacuaucaagaguuggagaaacaauauauugagaacacaagagucugaaugugcauguguaaaugguucuuguuuuacuguaaugaccgauggaccaagugauggacaggccucauacaagaucuucagaauagaaaagggaaagauagucaaaucagucgaaaugaaugccccuaauuaucacuaugaggaaugcuccuguuauccugauucuagugaaaucacaugugugugcagggauaacuggcauggcucgaaucgaccgugggugucuuucaaccagaaucuggaauaucagauaggauacauaugcagugggauuuucggagacaauccacgcccuaaugauaagacaggcaguugugguccaguaucgucuaauggagcaaauggaguaaaaggauuuucauucaaauacggcaaugguguuuggauagggagaacuaaaagcauuaguucaagaaacgguuuugagaugauuugggauccgaacggauggacugggacagacaauaacuucucaauaaagcaagauaucguaggaauaaaugaguggucaggauauagcgggaguuuuguucagcauccagaacuaacagggcuggauuguauaagaccuugcuucuggguugaacuaaucagagggcgacccaaagagaacacaaucuggacuagcgggagcagcauauccuuuugugguguaaacagugacacuguggguuggucuuggccagacggugcugaguugccauuuaccauugacaaguaa

SEQ ID NO: 52870 - RNA, 1410 nt, Artificial Sequence
  derived and/or modified CDS sequence (wt) from neuraminidase__InfluenzaA__AEK21459
augaauccaaaucaaaagauaauaaccauugguucggucuguaugacaauuggaauggcuaacuuaauauuacaaauuggaaacauaaucucaauauggauuagccacucaauucaacuugggaaucaaaaucagauugaaacaugcaaucaaagcguuauuacuuaugaaaacaacacuuggguaaaucagacauauguuaacaucagcaacaccaacuuugcugcuggacagucagugguuuccgugaaauuagcgggcaauuccucucucugcccuguuaguggaugggcuauauacaguaaagacaacaguauaagaaucgguuccaagggggauguguuugucauaagggaaccauucauaucaugcucccccuuggagugcagaaccuucuucuugacucaaggggccuugcuaaaugacaaacauuccaauggaaccauuaaagacaggagcccauaucgaacccuaaugagcuguccuauuggugaaguucccucuccauacaacucaagauuugagucagucgcuuggucagcaagugcuugucaugauggcaucaauuggcuaacaauuggaauuucuggcccagacaauggggcaguggcuguguuaaaguacaacggcauaauaacagacacuaucaagaguuggagaaacaauauauugagaacacaagagucugaaugugcauguguaaaugguucuugcuuuacuguaaugaccgauggaccaagugauggacaggccucauacaagaucuucaaaauagaaaagggaaagauagucaaaucagucgaaaugaaugccccuaauuaucacuaugaggaaugcuccuguuauccugauucuagugaaaucacaugugugugcagggauaacuggcauggcucgaaucgaccgugggugucuuucaaccagaaucuggaauaucagauaggauacauaugcagugggauuuucggagacaauccacgcccuaaugauaagacaggcaguugugguccaguaucgucuaauggagcaaauggaguaaaaggauuuucauucaaauacggcaaugguguuuggauagggagaacuaaaagcauuaguucaagaaacgguuuugagaugauuugggauccgaacggauggacugggacagacaauaacuucucaauaaagcaagauaucguaggaauaaaugaguggucaggauauagcgggaguuuuguucagcauccagaacuaacagggcuggauuguauaagaccuugcuucuggguugaacuaaucagagggcgacccaaagagaacacaaucuggacuagcgggagcagcauauccuuuugugguguaaacagugacacuguggguuggucuuggccagacggugcugaguugccauuuaccauugacaaguaa

SEQ ID NO: 52871 - RNA, 1410 nt, Artificial Sequence; identical to SEQ ID NO: 52819
  derived and/or modified CDS sequence (wt) from neuraminidase__InfluenzaA__AEK21469

SEQ ID NO: 52872 - RNA, 1410 nt, Artificial Sequence; identical to SEQ ID NO: 52819
  derived and/or modified CDS sequence (wt) from neuraminidase__InfluenzaA__AEK21479

SEQ ID NO: 52873 - RNA, 1410 nt, Artificial Sequence; identical to SEQ ID NO: 52850
  derived and/or modified CDS sequence (wt) from neuraminidase__InfluenzaA__AEK21489

SEQ ID NO: 52874 - RNA, 1410 nt, Artificial Sequence
  derived and/or modified CDS sequence (wt) from neuraminidase__InfluenzaA__AEK28776
augaauccaaaucaaaagauaauaacgauuggcucuguuucucucaccauuuccacaauaugcuucuucaugcaaauugccaucuugauaacuacuguaacauugcauuucaagcaauaugaauucaacucccccccaaacaaccaagugaugcugugugaaccaacaauaauagaaagaaacauaacagagauaguguaucugaccaacaccaccauagagaaggaaauaugccccaaacuagcagaauacagaaauuggucaaagccgcaaugugacauuacaggguuugcaccuuuuucuaaggacaauucgauuaggcuuuccgcugguggggacaucugggugacaagagaaccuuaugugucaugcgauccugacaaguguuaucaauuugcccuuggacagggaacaacacuaaacaacguacauucaaauaacacaguacgugguaggaccccuuaucggacccuauugaugaaugaguuagguguuccuuuucaucuggggaccaagcaagugugcauagcaugguccagcucaaguugucacgauggaaaagcauggcugcauguuuguauaacgggggaugauaaaaaugcaacugcuagcuucauuuacaaugggaggcuuguagauaguguuguuucaugguccaaagaaauccucaggacccaggagucagaaugcguuuguaucaauggaacuuguacaguaguaaugacugaugggagugcuucaggaaaagcugauacuaaaauacuauucauugaggaggggaaaaucguucauacuagcacauugucaggaagugcucagcaugucgaggagugcuccugcuauccucgauauccuggugucagaugugucugcagagacaacuggaaaggauccaauaggcccaucguagauauaaacauaaaggaucauagcauugucuccaguuauguguguucaggacuuguuggagacacacccagaaaaaacgacagcuccagcaguagccauuguuuggauccuaacaaugaggaagguggucauggggugaaaggcugggccuuugaugauggaaaugacguguggaugggaagaacgaucagcgagaagucacgcuuaggguaugaaaccuucaaagucauugaaggcugguccaacccuaaguccaaauugcagauaaauaggcaagucauaguugacagagguaauagguccgguuauucugguauuuucucuguugaaggcaaaagcugcaucaaucgaugcuuuuauguggaguugauaaggggaagaaaagaggaaacugaagucuuguggaccucaaacaguauuguuguguuuuguggcaccucagguacauauggaacaggcucauggccugauggggcggacaucaaucucaugccuauauaa

SEQ ID NO: 52875 - RNA, 1410 nt, Artificial Sequence
  derived and/or modified CDS sequence (wt) from neuraminidase__InfluenzaA__AEK28787
augaacccaaaucaaaagauaauaacgauuggcucuguuucucucaccauuuccacaauaugcuucuucaugcaaauugccaucuugauaacuacuguaacauugcauuucaagcaauaugaauucuacucccccccaaacaaccaagugaugcugugugaaccaacaauaauagaaagaaacauaacagagauaguguaucugaccaacaccaccauagagaaggaaauaugccccaaacuagcagaauacagaaauuggucaaagccgcaaugugacauuacaggauuugcaccuuuuucuaaggacaauucgauuaggcuuuccgcugguggggacaucugggugacaagagaaccuuaugugucaugcgauccugacaaguguuaucaauuugcccuuggacagggaacaacacuaaacaacgugcauucaaauaacacaguacgugauaggaccccuuaucggacccuauugaugaaugaguuagguguuccuuuccaucuggggaccaagcaagugugcauagcaugguccagcucaaguugucacgauggaaaagcauggcugcauguuuguauaacgggggaugauaaaaaugcaacugcuagcuucauuuacaaugggaggcuuguagauaguguuguuucaugguccaaagaaauccucaggacccaggagucagaaugcguuuguaucaauggaacuuguacaguaguaaugacugaugggagugcuucaggaaaagcugauacuaaaauacuauucauugaagaggggaaaaucguucauacuagcacauugucaggaagugcucagcaugucgaggagugcucuugcuauccucgauauccuggugucagaugugucugcagagacaacuggaaaggcuccaauaggcccaucguugauauaaacauaaaggaucauagcauuguuuccaguuauguguguucaggacuuguuggagacacacccagaaaaaacgacagcuccagcaguagccauuguuuggauccuaacaaugaagaagguggucauggagugaaaggcugggccuuugaugauggaaaugacguguggaugggaagaacgaucaacgagacgucacgcuuaggguaugaaaccuucaaagucauugaaggcugguccaacccuaaguccaaauugcagauaaauaggcaagucauaguugacagagguaauagguccgguuauucugguauuuucucuguugaaggcagaagcugcaucaaucggugcuuuuauguggaguugauuaggggaagaaaagaggaaacugaagucuuguggaccucaaacaguauuguuguguuuuguggcaccucagguacauauggaacaggcucauggccugauggggcggaccucaaucucaugccuauauaa

SEQ ID NO: 52876 - RNA, 1410 nt, Artificial Sequence
  derived and/or modified CDS sequence (wt) from neuraminidase__InfluenzaA__AEK28798
augaauccaaaucaaaagauaauaacgauuggcucuguuucucucaccauuuccacaauaugcuucuucaugcaaauugccaucuugauaacuacuguaacauugcauuucaagcaauaugaauucaacucccccccaaacaaccaagugaugcugugugaaccaacaauaauagaaagaaacauaacagagauaguguaccugaccaacaccaccauagagaaggaaauaugccccaaacuagcagaauacagaaauuggucaaagccgcaaugugacauuacaggguuugcaccuuuuucuaaggacaauucgauuaggcuuuccgcugguggggacaucugggugacaagagaaccuuaugugucaugcgauccugacaaguguuaucaauuugcccuuggacagggaacaacacuaaacaacguacauucaaauaacacaguacgugauaggaccccuuaucggacccuauugaugaaugaguuagguguuccuuuucaucuggggaccaagcaagugugcauagcaugguccagcucaaguugucacgauggaaaagcauggcugcauguuuguauaacgggggacgauaaaaaugcaacugcuagcuucauuuacaaugggaggcuuguagauaguguuguuucaugguccaaagaaauccucaggacccaggagucagaaugcguuuguaucaauggaacuuguacaguaguaaugacugaugggaaugcuucaggaaaagcugauacuaaaauacuauucauugaggaggggaaaaucguucauacuagcacauugucaggaagugcucagcaugucgaggagugcuccugcuauccucgauauccuggugucagaugugucugcagagacaacuggaaaggauccaauaggcccaucguagauauaaacauaaaggaucauagcauugucuccaguuauguguguucaggacuuguuggagacacacccagaaaaaacgacagcuccagcaguagccauuguucggauccuaacaaugaagaagguggucauggggugaaaggcugggccuuugaugauggaaaugacguguggaugggaagaacgaucagcgagaagucacgcuuaggauaugaaaccuucaaagucauugaaggcugguccaacccuaaguccaaauugcagauaaauaggcaagucauaguugacagagguaauagguccgguuauucugguauuuucucuguugaaggcaaaagcugcaucaaucggugcuuuuauguggaguugauaaggggaagaaaagaggaaacugaagucuuguggaccucaaacaguauuguuguguuuuguggcaccucagguacauauggaacaggcucauggccugauggggcggauaucaaucucaugccuauauaa

SEQ ID NO: 52877 - RNA, 1410 nt, Artificial Sequence
  derived and/or modified CDS sequence (wt) from neuraminidase__InfluenzaA__AEK28809
augaauccaaaucaaaagauaauaacaauuggcucuguuucucucaccauuuccacaauaugcuucuucaugcaaauugccaucuugauaacuacugugacagugcauuucaagcaauaugaauucaacucccccccaaacaaccaagugaugcugugugaaccaacaauaauagaaagaaacauaacagagauaguguaucugaccaacaccaccauagagaaggaaauaugccccaaacuagcagaauacagaaauuggucaaagccgcaaugugacauuacaggauuugcaccuuuuucuaaggacaauucgauuaggcuuuccgcugguggggacaucugggugacaagagaaccuuaugugucaugcgauccugacaaguguuaucaauuugcccuuggacagggaacaacacuaaacaacgugcauucaaauaacaaaguacgugauaggaccccuuaucggacccuauugaugaaugaguuagguguuccuuuucaucuggggaccaagcaagugugcauagcaugguccagcucaaguugucacgaugggaaagcauggcugcauguuuguauaacgggggaugauaaaaaugcaacugcuagcuucauuuacaaugggaggcuuguagauaguguuguuucaugguccaaagaaauccucaggacccaggagucagaaugcguuuguaucaauggaacuuguacaguaguaaugacugaugggagugcuucaggaaaagcugauacuaaaauacuauucauugaggaggggaaaaucguucauaccagcacauugucaggaagugcucagcaugucgaggagugcuccugcuauccucgauauccuggugucagaugugucugcagagacaacuggaaaggcuccaauaggcccaucguagauauaaacauaaaggaucauagcauuguuuccaguuauguguguucaggacuuguuggagacacacccagaaaaaacgacagcuccagcaguagccauuguuuggauccuaacaaugaggaagguggucauggagugaaaggcugggccuuugaugauggaaaugacguguggaugggaagaacgaucagcgagaagucacgcuuaggguaugaaaccuucaaagucauugaaggcugguccaacccuaaguccaaauugcagauaaauaggcaagucauaguugacagagguaauagguccgguuauucugguauuuucucuguugaaggcaaaagcugcaucaaucggugcuuuuauguggaguugauaaggggaagaaaagaggaaacugaagucuuguggaccucaaacaguauuguuguguuuuguggcaccucagguacauauggaacaggcucauggccugauggggcggacaucaaucucaugccuauauaa

SEQ ID NO: 52878 - RNA, 1410 nt, Artificial Sequence
  derived and/or modified CDS sequence (wt) from neuraminidase__InfluenzaA__AEK28819
augaauccaaaucaaaagauaauaacgauuggcucuguuucucucaccauuuccacaauaugcuucuucaugcaaauugccaucuugauaacuacuguaacauugcauuucaagcaauaugaauucaacuaccccccaaacaaccaagugaugcugugugaaccaacaauaauagaaagaaacauaacagagauaguguaucugaccaacaccaccauagagaaggagauaugccccaaacuagcagaauacagaaauuggucaaagccgcaaugugacauuacaggguuugcaccuuuuucuaaggacaauucgauuaggcuuuccgcugguggggacaucugggugacaagagaaccuuaugugucaugcgauccugacaaguguuaucaauuugcccuuggacagggaacaacacuaaacaacguacauucaaauaacacaguacgugagaggaccccuuaucggacccuauugaugaaugaguuagguguuccuuuucaucuggggaccaagcaagugugcauagcaugguccagcucaaguugucacgauggaaaagcauggcugcauguuuguauaacgggggaugauaaaaaugcaacugcuagcuucauuuacaaugggaggcuuguagauaguguuguuucaugguccaaagaaauccucaggacccaggagucagaaugcguuuguaucaauggaacuuguacaguaguaaugacugaugggagugcuucaggaaaagcugauacuaaaauacuauucauugaggaggggaaaaucguucauacuagcacauugucaggaagugcucagcaugucgaggagugcuccugcuauccucgauauccuggugucagaugugucugcagagacaacuggaaaggauccaauaggcccaucguagauauaaacauaaaggaucauagcauugucuccaguuauguguguucaggacuuguuggagacacacccagaaaaaacgacagcuccagcaguagccauuguuuggauccuaacaaugaggaagguggucauggggugaaaggcugggccuuugaugauggaaaugacguguggaugggaagaacgaucagcgagaagucacgcuuaggguaugaaaccuucaaagucauugaaggcugguccaacccuaaguccaaauugcagauaaauaggcaagucauaguugacagagguaauagguccgguuauucugguauuuucucuguugaaggcaaaagcugcaucaaucggugcuuuuauguggaguugauaaggggaagaaaagaggaaacugaagucuuguggaccucaaacaguauuguuguguuuuguggcaccucagguacauauggaacaggcucauggccugauggggcggacaucaaucucaugccuauauaa

SEQ ID NO: 52879 - RNA, 1410 nt, Artificial Sequence
  derived and/or modified CDS sequence (wt) from neuraminidase__InfluenzaA__AEK28830
augaauccaaaucaaaagauaauaacuauuggcucuguuucucucaccauuuccacaauaugcuucuucaugcaaauugccaucuugauaacuacuguaacauugcauuucaagcaauaugaauucaacucccccccaaacaaccaagugaugcugugugaaccaacaauaauagaaagaaacauaacagagauaguguaucugaccaacaccaccauagagaaggaaauaugccccaaccuagcagaauacagaaauuggucaaagccgcaaugugacauuacaggguuugcaccuuuuucuaaggacaauucgauuaggcuuuccgcugguggggacaucugggugacaagagaaccuuaugugucaugcgauccugacaaguguuaucaauuugcccuuggacagggaacaacacuaaacaacguacauucaaauaacacaguacgugguaggaccccuuaucggacccuauugaugaaugaguuagguguuccuuuucaucuggggaccaagcaagugugcauagcaugguccagcucaaguugucacgauggaaaagcauggcugcauguuuguauaacgggggaugauaaaaaugcaacugcuagcuucauuuacaaugggaggcuuguagauaguguuguuucaugguccaaagaaauccucaggacccaggagucagaaugcguuuguaucaauggaacuuguacaguaguaaugacugaugggagugcuucaggaaaagcugauacuaaaauacuauucauugaggaggggaaaaucguccauacuagcacauugucaggaagugcucagcaugucgaggagugcuccugcuauccucgauauccuggugucagaugugucugcagagacaacuggaaaggauccaauaggcccaucguagauauaaacauaaaggaucauagcauuguuuccaguuauguguguucaggacuuguuggagacacacccagaaaaaacgacagcuccagcaguagccauuguuuggauccuaacaaugaggaagguggucauggggugaaaggcugggccuuugaugauggaaaugacguguggaugggaagaacgaucagcgagaagucacgcuuaggguaugaaaccuucaaagucauugaaggcugguccaacccuaaguccaaauugcagauaaauaggcaagucauaguugacagagguaauagguccgguuauucugguauuuucucuguugaaggcaaaagcugcaucaaucggugcuuuuauguggaguugauaaggggaagaaaagaggaaacugaagucuuguggaccucaaacaguauuguuguguuuuguggcaccucagguacauauggaacaggcucauggccugauggggcggacaucaaucucaugccuauauaa

SEQ ID NO: 52880 - RNA, 1410 nt, Artificial Sequence
  derived and/or modified CDS sequence (wt) from neuraminidase__InfluenzaA__AEK28841
augaauccaaaucaaaagauaauaacgauuggcucuguuucucucaccauuuccacaauaugcuucuucaugcaaauugccaucuugauaacuacuguaacauugcauuucaagcaauaugaauucaacucccccccaaacaaccaagugaugcugugugaaccaacaauaauagaaagaaacauaacagagauaguguaucugaccaacaccaccauagagaaggaaauaugccccaaacuagcagaauacagaaauuggucaaagccgcaaugugacauuacaggauuugcaccuuuuucuaaggacaauucgauuaggcuuuccgcugguggggacaucugggugacaagagaaccuuaugugucaugcgauccugacaaguguuaucaauuugcccuuggacagggaacaacaguaaacaacgugcauucaaauaacacaguacgugguaggaccccuuaucggacccuauugaugaaugaguuagguguuccuuuucaucuggggaccaagcaagugugcauagcaugguccagcucaaguugucacgauggaaaagcauggcugcauguuuguauaacgggggaugauaaaaaugcaacugcuagcuucauuuacaaugggaggcuuguggauaguguuguuucaugguccaaagaaauccucaggacccaggagucagaaugcgucuguaucaauggaacuuguacaguaguaaugacugaugggagugcuucaggaaaagcugauacuaaaauacuauucauugaggaggggaaaaucguucauacuagcacauugucaggaagugcccagcaugucgaggagugcucuugcuauccucgauauccuggugucagaugugucugcagagacaacuggaaaggcuccaauaggcccaucguagauauaaacauaaaggaucauagcauuguuuccaguuauguguguucaggacuuguuggagacacacccagaaaaaacgacagcuccagcaguagccauuguuuggauccuaacaaugaagaagguggucauggagugaaaggcugggccuuugaugauggaaaugacguguggaugggaagaacgaucagcgagaagucacgcuuaggguaugaaacuuucaaagucauugaaggcugguccaaccauaaguccaaauugcagauaaauaggcaagucauaguugacagagguaauagguccgguuauucugguauuuucucuguugaaggcaaaagcugcaucaaucggugcuuuuauguggaguugauuaggggaagaaaagaggaaacugaagucuuguggaccucaaacaguauuguuguguuuuguggcaccucagguacauauggaacaggcucauggccugauggggcggaccucaaucucaugccuauauaa

SEQ ID NO: 52881 - RNA, 1410 nt, Artificial Sequence
  derived and/or modified CDS sequence (wt) from neuraminidase__InfluenzaA__AEK28852
augaauccaaaucaaaagauaauaacgauuggcucuguuucucucaccauuuccacaauaugcuucuucaugcaaauugccaucuugauaacuacuguaacauugcauuucaagcaauaugaauucaacucccccccaaacaaccaagugaugcugugugaaccaacaauaauagaaaaaaacauaacagagauaguguaucugaccaacaccaccauagagaaggaaauaugccccaaacuagcagaauacagaaauuggucaaagccacaaugugacauuacaggauuugcaccuuuuucuaaggacaauucgauuaggcuuuccgcugguggggacaucugggugacaagagaaccuuaugugucaugcgauccugacaaguguuaucaauuugcccuuggacagggaacaacacuaaacaacgugcauucaaauaacagaguacgugauaggaccccuuaucggacccuauugaugaaugaguuagguguuccuuuucaucuggggaccaagcaagugugcauagcaugguccagcucaaguugucacgauggaaaagcauggcugcauguuuguauaacgggggaugauaaaaaugcaacugcuagcuucauuuacaaugggaggcuuguagauaguguuguuucaugguccaaagaaauccucaggacccaggagucagaaugcguuuguaucaauggaacuuguacaguaguaaugacugaugggagugcuucaggaaaagcugauacuaaaauacuauucauugaggaggggaaaaucguucauacuagcacauugucaggaagugcucagcaugucgaggagugcuccugcuauccucgauauccuggugucagaugugucugcagagacaacuggaaaggcuccaauaggcccaucguagauauaaacauaaaggaccauagcauuguuuccaguuauguguguucaggacuuguuggagacacacccagaaaaaacgacagcuccagcaguagccauuguuuggauccuaacaaugaagaagguggucauggagugaaaggcugggccuuugaugauggaaaugacguguggaugggaagaacgaucagcgagaagucacgcuuaggguaugaaaccuucaaagucauugaaggcugguccaacccuaaguccaaauugcagauaaauaggcaagucauaguugacagagguaauagguccgguuauucugguauuuucucuguugaaggcaaaagcugcaucaaucggugcuuuuauguggaguugauaaggggaagaaaagaggaaacugaagucuuguggaccucaaacaguauuguuguguuuuguggcaccucagguacauauggaacaggcucauggccugauggggcggacaucaaucucaugccuauauaa

SEQ ID NO: 52882 - RNA, 1410 nt, Artificial Sequence; identical to SEQ ID NO: 51254
  derived and/or modified CDS sequence (wt) from neuraminidase__InfluenzaA__AEK28863

SEQ ID NO: 52883 - RNA, 1410 nt, Artificial Sequence
  derived and/or modified CDS sequence (wt) from neuraminidase__InfluenzaA__AEK28874
augaauccaaaucaaaagauaauaacgauuggcucuguuucucucaccauuuccacaauaugcuucuucaugcaaauugccaucuugauaacuacuguaacauugcauuucaagcaauaugaauucaacucccccccaaacaaccaagugaugcugugugaaccaacaauaauagaaagaaacauaacagagauaguguaucugaccaacaccaccauagagaaggaaauaugccccaaacuagcagaauacagaaauuggucaaagccgcaaugugacauuacaggauuugcaccuuuuucuaaggacaauucgauuaggcuuuccgcugguggggacaucugggugacaagagaaccuuaugugucaugcgauccugacaaguguuaucaauuugcccuuggacagggaacaacacuaaacaacgugcauucaaauaacaaaguacgugauaggaccccuuaucggacccuauugaugaaugaguuagguguuccuuuucaucuggggaccaagcaagugugcauagcaugguccagcucaaguugucacgauggaaaagcauggcugcauguuuguauaacgggggaugauaaaaaugcaacugcuagcuucauuuacaaugggaggcuuguagauaguguuguuucaugguccaaagaaauccucaggacccaggagucagaaugcgucuguaucaauggaacuuguacaguaguaaugacugaugggagugcuucaggaaaagcugauacuaaaauacuauucauugaggaggggaaaaucguucauacuagcacauugucaggaagugcucagcaugucgaggagugcucuugcuauccucgauauccuggugucagaugugucugcagagacaacuggaaaggcuccaauaggcccaucguagauauaaacauaaaggaucauagcauuguuuccaguuauguguguucaggacuuguuggagacacacccagaaaaaacgacagcuccagcaguagccauuguuuggauccuaacaaugaagaagguggucauggagugaaaggcugggccuuugaugauggaaaugacguguggaugggaagaacgaucagcgagaagucacgcuuaggguaugaaaccuucaaagucauugaaggcugguccaaccauaaguccaaauugcagauaaauaggcaagucauaguugacagagguaauagguccgguuauucugguauuuucucuguugaaggcaaaagcugcaucaaucggugcuuuuauguggaguugauuaggggaagaaaagaggaaacugaagucuuguggaccucaaacaguauuguuguguuuuguggcaccucagguacauauggaacaggcucauggccugauggggcggaccucaaucucaugccuauauaa

SEQ ID NO: 52884 - RNA, 1410 nt, Artificial Sequence
  derived and/or modified CDS sequence (wt) from neuraminidase__InfluenzaA__AEK28885
augaauccaaaucaaaagauaauaacgauuggcucuguuucucucaccauuuccacaauaugcuucuucaugcaaauugccaucuugauaacuacugugacauugcauuucaagcaauaugaauucaaccuccccccaaacaaccaagugaugcugugugaaccaacaauaauagaaagaaacauaacagagauaguguaucugaccaacaccaccauagagaaggaaauaugccccaaacuagcagaauacagaaauuggucaaagccgcaaugugacauuacaggauuugcaccguuuuccaaggacaauucgauuaggcuuuccgcugguggggacaucuggguaacaagagaaccuuaugugucaugcgauccugacaaguguuaucaauuugcccuuggacagggaacaacacuaaacaacgugcauucaaauaacacaguacgugauaggaccccuuaucggacccuauugaugaaugaguuagguguuccuuuucaucuggggaccaagcaagugugcauagcaugguccagcucaaguugucacgauggaaaagcauggcugcauguuuguauaacgggggaugauaaaaaugcaacugcuagcuucauuuacaaugggaggcuuguagauaguguuguuucaugguccaaagaaauccucaggacccaggagucagaaugcguuuguaucaauggaacuuguacaguaguaaugacugaugggagugcuucaggaaaagcugauacuaaaauacuauucauugaggaggggaaaaucguucauacuagcacauugucaggaagugcucagcaugucgaggagugcuccugcuauccucgauauccuggugucagaugugucugcagagacaacuggaaaggcuccaauaggcccaucguagauauaaacauaaaggaucauagcauuguuuccaguuauguguguucaggacuuguuggagacacacccagaaaaaacgacagcuccagcaguagccauuguuuggauccuaacaaugaagaagguggucauggagugaaaggcugggccuuugaugauggaaaugacguguggaugggaagaacgaucagcgagaagucacgcuuaggguaugaaaccuucaaagucauugaaggcugguccaacccuaaguccaaauugcagauaaauaggcaagucauaguugacagagguaauagguccgguuauucugguauuuucucuguugaaggcaaaagcugcaucaaucggugcuuuuauguggaguugauaaggggaagaaaagaggaaacugaagucuuguggaccucaaacaguauuguuguguuuuguggcaccucagguacauauggaacaggcucauggccugauggggcggacaucaaucucaugccuauauaa

SEQ ID NO: 52885 - RNA, 1410 nt, Artificial Sequence
  derived and/or modified CDS sequence (wt) from neuraminidase__InfluenzaA__AEK28896
augaauccaaaucaaaagauaauaacgauuggcucuguuucucucaccauuuccacaauaugcuucuucaugcaaauugccaucuugauaacuacuguaacauugcauuucaagcaauaugaauucaacucccccccaaacaaccaagugaugcugugugaaccaacaauaauagaaaaaaacauaacagagauaguguaucugaccaacaccaccauagagaaggaaauaugccccaaacuagcagaauacagaaauuggucaaagccacaaugugacauuacaggauuugcaccuuuuucuaaggacaauucgauuaggcuuuccgcugguggggacaucugggugacaagagaaccuuaugugucaugcgauccugacaaguguuaucaauuugcccuuggacagggaacaacacuaaacaacgugcauucaaauaacacaguacgugauaggaccccuuaucggacccuauugaugaaugaguuagguguuccuuuucaucuggggaccaagcaagugugcauagcaugguccagcucaaguugucacgauggaaaagcauggcugcauguuuguauaacgggggaugauaaaaaugcaacugcuagcuucauuuacaaugggaggcuuguagauaguguuguuucaugguccaaagaaauccucaggacccaggagucagaaugcguuuguaucaauggaacuuguacaguaguaaugacugaugggagugcuucaggaaaagcugauacuaaaauacuauucauugaggaggggaaaaucguucauacuagcacauugucaggaagugcucagcaugucgaggagugcuccugcuauccucgauauccuggugucagaugugucugcagagacaacuggaaaggcuccaauaggcccaucguagauauaaacauaaaggaccauagcauuguuuccaguuauguguguucaggacuuguuggagacacacccagaaaaaacgacagcuccagcaguagccauuguuuggauccuaacaaugaagaagguggucauggagugaaaggcugggccuuugaugauggaaaugacguguggaugggaagaacgaucagcgagaagucacgcuuaggguaugaaaccuucaaagucauugaaggcugguccaacccuaaguccaaauugcagauaaauaggcaagucauaguugacagagguaauagguccgguuauucugguauuuucucuguugaaggcaaaagcugcaucaaucggugcuuuuauguggaguugauaaggggaagaaaagaggaaacugaagucuuguggaccucaaacaguauuguuguguuuuguggcaccucagguacauauggaacaggcucauggccugauggggcggacaucaaucucaugccuauauaa

SEQ ID NO: 52886 - RNA, 1410 nt, Artificial Sequence
  derived and/or modified CDS sequence (wt) from neuraminidase__InfluenzaA__AEK28907
augaauccaaaucaaaagauaauaacgauuggcucuguuucucucaccauuuccacaauaugcuucuucaugcaaauugccaucuugauaacuacuguaacauugcauuucaagcaauaugaauucaacuccccuccaaacaaccaagugaugcugugugaaccaacaauaauagaaaaaaacauaacagagauaguguaucugaccaacaccaccauagagaaggaaauaugccccagacuagcagaauacagaaauuggucaaagccgcaaugugacauuacaggauuugcaccuuuuucuaaggacaauucgauuaggcuuuccgcugguggggacaucugggugacaagagaaccuuaugugucaugcgauccugacaaguguuaucaauuugcccuuggacagggaacaacacuaaacaacgugcauucaaauaacacaguacgugauaggaccccuuaucggacccuauugaugaaugaguuagguguuccuuuucaucuggggaccaagcaagugugcauagcaugguccagcucaaguugucacgauggaaaagcauggcugcauguuuguauaacgggggaugauaaaaaugcaacugcuagcuucauuuacaaugggaggcuuguagauaguguuguuucaugguccaaagaaauccucaggacccaggagucagaaugcguuuguaucaauggaacuuguacaguaguaaugacugaugggagugcuucaggaaaagcugauacuaaaauacuauucauugaggaggggaaaaucguucauacuagcacauugucaggaagugcucagcaugucgaggagugcuccugcuauccucgauauccuggugucagaugugucugcagagacaacuggaaaggcuccaauaggcccaucguagauauaaacauaaaggaucauagcauuguuuccaguuauguguguucaggacuuguuggagacacacccagaaaaaacgacagcuccagcaguagccauuguuuggauccuaacaaugaagaagguggucauggagugaaaggcugggccuuugaugauggaaaugacguguggaugggaagaacgaucagcgagaagucacgcuugggguaugaaaccuucaaagucauugaaggcugguccaacccuaaguccaaauugcagauaaauaggcaagucauaguugacagagguaauagguccgguuauucugguauuuucucuguugaaggcaaaagcugcaucaaucggugcuuuuauguggaguugauaaggggaagaaaagaggaaacugaagucuuguggaccucaaacaguauuguuguguuuuguggcaccucagguacauauggaacaggcucauggccugauggggcggacaucaaucucaugccuauauaa

SEQ ID NO: 52887 - RNA, 1410 nt, Artificial Sequence
  derived and/or modified CDS sequence (wt) from neuraminidase__InfluenzaA__AEK28918
augaauccaaaucaaaagauaauaacgauuggcucuguuucucucaccauuuccacaauaugcuucuucaugcaaauugccaucuugauaacuacuguaacauugcauuucaagcaauaugaauucaacucccccccaaacaaccaagugaugcugugugaaccaacaauaauagaaagaaacauaacagagauaguguaucugaccaacaccaccauagagaaggaaauaugccccaaacuagcagaauacagaaauuggucaaagccgcaaugugacauuacaggguuugcaccuuuuucuaaggacaauucgauuaggcuuuccgcugguggggacaucugggugacaagagagccuuaugugucaugcgauccugacaaguguuaucaauuugcccucggacagggaacaacacuaaacaacguacauucaaauaacacaguacgugauaggaccccuuaucggacccuauugaugaaugaguuagguguuccuuuucaucuggggaccaagcaagugugcauagcaugguccagcucaaguugucacgauggaaaagcauggcugcauguuuguauaacgggggaugauaaaaaugcaacugcuagcuucauuuacaaugggaggcuuguagauaguguuguuucaugguccaaagaaauucucaggacccaggagucagaaugcguuuguaucaauggaacuuguacaguaguaaugacugaugggagugcuucaggaaaagcugauacuaaaauacuauucauugaggaggggaaaaucguucauacuagcacauugucaggaagugcucagcaugucgaggagugcuccugcuauccucgauauccuggugucagaugugucugcagagacaacuggaaaggauccaauaggcccaucguagauauaaacauaaaggaucauagcauuguuuccaguuauguguguucaggacuuguuggagacacacccagaaaaaacgacagcuccagcaguagccauuguuuggauccuaacaaugaagaagguggucauggagugaaaggcugggccuuugaugauggaaaugacguguggaugggaagaacgaucagcgagaagucacgcuuaggguaugaaaccuucaaagucauugaaggcugguccaacccuaaguccaaauugcagauaaauaggcaagucauaguugacagagguaauagguccgguuauucugguauuuucucuguugaaggcaaaagcugcaucaaucggugcuuuuauguggaguugauaaggggaagaaaagaggaaacugaagucuuguggaccucaaacaguauuguuguguuuuguggcaccucagguacauauggaacaggcucauggccugauggggcggacaucaaucucaugccuauauaa

SEQ ID NO: 52888 - RNA, 1410 nt, Artificial Sequence; identical to SEQ ID NO: 51226
  derived and/or modified CDS sequence (wt) from neuraminidase__InfluenzaA__AEK28929

SEQ ID NO: 52889 - RNA, 1410 nt, Artificial Sequence
  derived and/or modified CDS sequence (wt) from neuraminidase__InfluenzaA__AEK28951
augaauccaaaucaaaagauaauaacgauuggcucuguuucucucaccauuuccacaauaugcuucuucaugcaaauugccaucuugauaacuacuguaacauugcauuucaagcaauaugaauucaacucccccccaaacaaccaagugaugcugugugaaccaacaauaauagaaagaaacauaacagagauaguguaucugaccaacaccaccauagagaaggaaauaugccccaaacuagcagaauacagaaauuggucaaagccgcaaugugacauuacaggauuugcaccuuuuucuaaggacaauucgauuaggcuuuccgcugguggggacaucugggugacaagagaaccuuaugugucaugcgauccugacaaguguuaucaauuugcccuuggacagggaacaacacuaaacaacgugcauucaaauaacacaguacgugauaggaccccuuaucggacccuauugaugaaugaauuagguguuccuuuucaucuggggaccaagcaagugugcauagcaugguccagcucaaguugucacgauggaaaagcauggcugcauguuuguauaacgggggaugauaaaaaugcaacugcuagcuucauuuacaaugggaggcuuguagauaguguuguuucaugguccaaagaaauccucaggacccaggagucagaaugcgucuguaucaauggaacuuguacaguaguaaugacugaugggagugcuucaggaaaagcugauacuaaaauacuauucauugaggaggggaaaaucguucauacuagcacauugucaggaagugcucagcaugucgaggagugcucuugcuauccucgauauccuggugucagaugugucugcagagacaacuggaaaggcuccaauaggcccaucguagauauaaacauaaaggaucauagcauuguuuccaguuauguguguucaggacuuguuggagacacacccagaaaaaacgacagcuccagcaguagccauuguuuggauccuaacaaugaagaagguggucauggagugaaaggcugggccuuugaugauggaaaugacguguggaugggaagaacgaucagcgagaagucacgcucaggguaugaaaccuucaaagucauugaaggcugguccaaccauaaguccaaauugcagauaaauaggcaagucauaguugacagagguaauagguccgguuauucugguauuuucucuguugaaggcaaaagcugcaucaaucggugcuuuuauguggaguugauuaggggaagaaaagaggaaacugaagccuuguggaccucaaacaguauuguuguguuuuguggcaccucagguacauauggaacaggcucauggccugauggggcggaccucaaucucaugccuauauaa

SEQ ID NO: 52890 - RNA, 1410 nt, Artificial Sequence
  derived and/or modified CDS sequence (wt) from neuraminidase__InfluenzaA__AEK28962
augaauccaaaucaaaagauaauaacgauuggcucuguuucucucaccauuuccacaauaugcuucuucaugcaaauugccaucuugauaacuacuguaacauugcauuucaagcaauaugaauucaacucccccccaaacaaccaagugaugcugugugaaccaacaauaauagaaagaaacauaacagagauaguguauccgaccaacaccaccauagagaaggaaauaugccccaaacuagcagaauacagaaauuggucaaagccgcaaugugacauuacaggguuugcaccuuuuucuaaggacaauucgauuaggcuuuccgcugguggggacaucugggugacaagagaaccuuaugugucaugcgauccugacaaguguuaucaauuugcccuuggacagggaacaacacuaaacaacguacauucaaauaacacaguacgugauaggaccccuuaucggacccuauugaugaaugaguuagguguuccuuuucaucuggggaccaagcaagugugcauagcaugguccagcucaaguugucacgauggaaaagcauggcugcauguuuguauaacgggggaugauaaaaaugcaacugcuagcuucauuuacaaugggaggcuuguagauaguguuguuucaugguccaaagaaauacucaggacccaggagucagaaugcguuuguaucaauggaacuuguacaguaguaaugacugaugggagugcuucaggaaaagcugauacuaaaauacuauucauugaggaggggaaaaucguucauacuagcacauugucaggaagugcucagcaugucgaggagugcuccugcuauccucgauauccuggugucagaugugucugcagagacaacuggaaaggauccaauaggcccaucguagauauaaacauaaaggaucauagcauuguuuccaguuauguguguucaggacuuguuggagacacacccagaaaaaacgacagcuccagcagcagccauuguuuggauccuaacaaugaagaagguggucauggagugaaaggcugggccuuugaugauggaaaugacguguggaugggaagaacgaucagcgagaagucacgcuuaggguaugaaaccuucaaagucauugaaggcugguccaacccuaaguccaaauugcagauaaauaggcaagucauaguugacagagguaauagguccgguuauucugguauuuucucuguugaaggcaaaagcugcaucaaucggugcuuuuauguggaguugauaaggggaagaaaagaggaaacugaagucuuguggaccucaaacaguauuguuguguuuuguggcaccucagguacauauggaacaggcucauggccugauggggcggacaucaaucucaugccuauauaa

SEQ ID NO: 52891 - RNA, 1410 nt, Artificial Sequence
  derived and/or modified CDS sequence (wt) from neuraminidase__InfluenzaA__AEK28973
augaauccaaaucaaaagauaauaacgauuggcucuguuucucucaccauuuccacaauaugcuucuucaugcaaauugccaucuugauaacuacuguaacauugcauuucaagcaauaugaauucaacucccccccaaacaaccaagugaugcugugugaaccaacaauaauagaaagaaacauaacagagauaguguaucugaccaacaccaccauagagaaggaaauaugccccaaacuagcagaauacagaaauuggucaaagccgcaaugugacauuacaggauuugcaccuuuuucuaaggacaauucgauuaggcuuuccgcugguggggacaucugggugacaagagaaccuuaugugucaugcgauccugacaaguguuaucaauuugcccuuggacagggaacaacacuaaacaacgugcauucaaauaacacaguacgugauaggaccccuuaucggacccuauugaugaaugaguuagguguuccuuuucaucuggggaccaagcaagugugcauagcaugguccagcucaaguugucacgauggaaaagcauggcugcauguuuguauaacgggggaugauaaaaaugcaacugcuagcuucauuuacaaugggaggcuuguagauaguguuguuucaugguccaaagaaauccucaggacccaggagucagaaugcgucuguaucaauggaacuuguacaguaguaaugacugaugggagugcuucaggaaaagcugauacuaaaauacuauucauugaggaggggaaaaucguucauacuagcacauugucaggaagugcccagcaugucgaggagugcucuugcuauccucgauauccuggugucagaugugucugcagagacaacuggaaaggcuccaauaggcccaucguagauauaaacauaaaggaucauagcauuguuuccaguuauguguguucaggacuuguuggagacacacccagaaaaaacgacagcuccagcaguagccauuguuuggauccuaacaaugaagaagguggucauggagugaaaggcugggccuuugaugauggaaaugacguguggaugggaagaacgaucagcgagaagucacgcuuaggguaugaaacuuucaaagucauugaaggcugguccaaccauaaguccaaauugcagauaaauaggcaagucauaguugacagagguaauagguccgguuauucugguauuuucucuguugaaggcaaaagcugcaucaaucggugcuuuuauguggaguugauuaggggaagaaaagaggaaacugaagucuuguggaccucaaacaguauuguuguguuuuguggcaccucagguacauauggaacaggcucauggccugauggggcggaccucaauuucaugccuauauaa

SEQ ID NO: 52892 - RNA, 1410 nt, Artificial Sequence
  derived and/or modified CDS sequence (wt) from neuraminidase__InfluenzaA__AEK28984
augaauccaaaucaaaagauaauaacgauuggcucuguuucucucaccauuuccacaauaugcuucuucaugcaaauugccaucuugauaacuacuguaacauugcauuucaagcaauaugaauucaacucccccccaaacaaccaagugaugcugugugaaccaacaauaauagaaagaaacauaacagagauaguguaucugaccaacaccaccauagagaaggaaauaugccccaaacuagcagaauacagaaauuggucaaagccgcaaugugacauuacaggauuugcaccuuuuucuaaggacaauucgguuaggcuuuccgcugguggggacaucugggugacaagagaaccuuaugugucaugcgauccugacaaguguuaucaauuugcccuuggacagggaacaacacuaaacaacgugcauucgaauaacacaguacgugauaggaccccuuaucggacccuauugaugaaugaguuagguguuccuuuucaucuggggaccaagcaagugugcauagcaugguccagcucaaguugucacgauggaaaagcauggcugcauguuuguauaacgggggaugauaaaaaugcaacugcuagcuucauuuacaaugggaggcuuguagauaguguuguuucaugguccaaagaaauccucaggacccaggagucagagugcguuuguaucaauggaacuuguacaguaguaaugacugaugggagugcuucaggaaaagcugauacuaaaauacuauucauugaggaggggaaaaucguucauaccagcacauugucaggaagugcucagcaugucgaggagugcuccugcuauccucgauauccuggugucagaugugucugcagagacaacuggaaaggcuccaauaggcccaucguagauauaaacauaaaggaucauagcauuguuuccaguuauguguguucaggacuuguuggagacacacccagaaaaaacgacagcuccagcaguagccauuguuuggauccuaacaaugaagaagguggucauggagugaaaggcugggccuuugaugauggaaaugacguguggaugggaagaacgaucagcgagaagucacgcuuaggguaugaaaccuucaaagucauugaaggcugguccaacccuaaguccaaauugcagauaaauaggcaagucauaguugacagagguaauagguccgguuauucugguauuuucucuguugaaggcaaaagcugcaucaaucggugcuuuuauguggaguugauaaggggaagaaaagaggaaacugaaguuuuguggaccucaaacaguauuguuguguuuuguggcaccucagguacauauggaacaggcucauggccugauggggcggacaucaaucucaugccuauauaa

SEQ ID NO: 52893 - RNA, 1410 nt, Artificial Sequence; identical to SEQ ID NO: 52892
  derived and/or modified CDS sequence (wt) from neuraminidase__InfluenzaA__AEK28995

SEQ ID NO: 52894 - RNA, 1410 nt, Artificial Sequence
  derived and/or modified CDS sequence (wt) from neuraminidase__InfluenzaA__AEK29006
augaauccaaaucaaaagauaauaacgauuggcucuguuucucucaccauuuccacaauaugcuucuucaugcaaauugccaucuugauaacuacuguaacauugcauuucaagcaauaugaauucaacucccccccaaacaaccaagugaugcugugugaaccaacaauaauagaaagaaacauaacagagauaguguaucugaccaacaccaccauagagaaggaaauaugccccaaacuagcagaauacagaaauuggucaaagccgcaaugugacauuacaggauuugcaccuuuuucuaaggacaauucgauuaggcuuuccgcugguggggacaucugggugacaagagaaccuuaugugucaugcgauccugacaaguguuaucaauuugcccuuggacagggaacaacacuaaacaaugugcauucaaauaacacaguacgugauaggaccccuuaucggacccuauugaugaaugaguuagguguuccuuuucaucuggggaccaagcaagugugcauagcaugguccagcucaaguugucacgauggaaaagcauggcugcauguuuguauaacgggggaugauaaaaaugcaacugcuagcuucauuuacaaugggaggcuuguagauaguguuguuucaugguccaaagaaauccucaggacccaggagucagaaugcguuuguaucaauggaacuuguacaguaguaaugacugaugggagugcuucaggaaaagcugauacuaaaauacuauucauugaggaggggaaaaucguucauacuagcacauugucaggaagugcucagcaugucgaggagugcucuugcuauccucgauauccuggugucagaugugucugcagagacaacuggaaaggcuccaauaggcccaucguagauauaaacauaaaggaucauagcauuguuuccaguuauguguguucaggacuuguuggagacacacccagaaaaaacgacagcuccagcaguagccauuguuuggauccuaacaaugaagaagguggucauggagugaaaggcugggccuuugaugauggaaaugacguguggaugggaagaacgaucaacgagacgucacguuuaggguaugaaaccuucaaagucauugaaggcugguccaacccuaaguccaaauugcagauaaauaggcaagucauaguugacagagguaauagguccgguuauucugguauuuucucuguugaaggcaaaagcugcaucaaucggugcuuuuauguggaguugauuaggggaagaaaagaggaaacugaagucuuguggaccucaaacaguauuguuguguuuuguggcaccucagguacauauggaacaggcucauggccugauggggcggaccucaaucucaugccuauauaa

SEQ ID NO: 52895 - RNA, 1410 nt, Artificial Sequence
  derived and/or modified CDS sequence (wt) from neuraminidase__InfluenzaA__AEK29028
augaauccaaaccaaaagauaauaacgauuggcucuguuucccucaccauuuccacaauaugcuucuucaugcaaauugccaucuugauaacuacuguaacauugcauuucaagcaauaugaauucaacucccccccaaacaaccaagugaugcugugugaaccaacaauaauagaaagaaacauaacagagauaguguaucugaccaacaccaccauagagaaggaaauaugccccaaacuagcagaauacagaaauuggucaaagccgcaaugugacauuacaggauuugcaccuuuuucuaaggacaauucgauuaggcuuuccgcugguggggacaucugggugacaagagaaccuuaugugucaugcgauccuaacaaguguuaucaauuugcccuuggacaaggaacaacacuaaacaacgugcauucaaauaacacaguacgugauaggaccccuuaucggacccuauugaugaaugaguuagguguuccuuuucaucuggggaccaagcaagugugcauagcaugguccagcucaaguugucacgauggaaaagcauggcugcauguuuguauaacgggggacgauaaaaaugcaacugcuagcuucauuuacaaugggaggcuuguagauaguguuguuucaugguccaaagaaauccucaggacccaggagucagaaugcguuuguaucaauggaacuuguacaguaguaaugacugaugggagugcuucaggaaaagcugauacuaaaauacuauucaucgaggaggggaaaaucguucauacuagcacauugucaggaagugcucaacaugucgaggagugcuccugcuauccucgauauccuggugucagaugugucugcagagacaacuggaaaggcuccaauaggcccaucguagauauaaacaugaaggaucauagcauuguuuccaguuauguguguucaggacuuguuggagacacacccagaaaaaacgacagcuccagcaguagccauuguuuugauccuaacgaugaagaagguggucauggagugaaaggcugggccuuugaugauggaaaugacguguggaugggaagaacgaucagcgagaagucacgcuuaggguaugaaaccuucaaagucauugaaggcugguccaacccuaaguccaaauugcagauaaauaggcaagucauaguugacagagguaauagguccgguuauucugguauuuucucuguugaaggcaaaagcugcaucaaucggugcuuuuauguggaguugauaaggggaagaaaagaggaaacugaaguauuguggaccucaaacaguauuguuguguuuuguggcaccucagguacauauggaacaggcucauggccugauggggcggacaucaaucucaugccuauauaa

SEQ ID NO: 52896 - RNA, 1410 nt, Artificial Sequence
  derived and/or modified CDS sequence (wt) from neuraminidase__InfluenzaA__AEK29050
augaauccaaaucaaaagauaauaacuauuggcucuguuucucucaccauuuccacaauaugcuucuucaugcaaauugccaucuugauaacuacuguaacauugcauuucaagcaauaugaauucaacccccccccaaacaaccaagugaugcugugugaaccaacaauaauagaaagaaacauaacagagauaguguaucugaccaacaccaccauagagaaggaaauaugccccaaacuagcagaauacagaaauuggucaaagccgcaaugugacauuacaggauuugcaccuuuuucuaaggacaauucgauuaggcuuuccgcugguggggacaucugggugacaagagaaccuuaugugucaugcgauccugacaaguguuaucaauuugcccuuggacagggaacaacacuaaacaacgugcauucaaauaacacaguacgugauaggaccccuuaucggacccuauugaugaaugaguuagguguuccuuuucaucuggggaccaagcaagugugcauagcaugguccagcucaaguugucacgauggaaaagcauggcugcauguuuguauaacgggggaugauaaaaaugcaacugcuagcuucauuuacaaugggaggcuuguagauaguguugucucaugguccaaagaaauccucaggacccaggagucagaaugcguuuguaucaauggaacuuguacaguaguaaugacugaugggagugcuucaggaaaagcugauacuaaaauacuauucauugaggaggggaaaaucguucauacuagcacauugucaggaagugcucagcaugucgaggagugcucuugcuauccucgauauccuggugucagaugugucugcagagacaacuggaaaggcuccaauaggcccaucguagauauaaacauaaaggaucauagcauuguuuccaguuauguguguucaggacuuguuggagacacacccagaaaaaacgacagcuccagcaguagccauuguuuggauccuaacaaugaagaagguggucauggagugaaaggcugggccuuugaugauggaaaugacguguggaugggaagaacgaucaacgagacgucacguuuaggguaugaaaccuucaaagucauugaaggcugguccaacccuaaguccaaauugcagauaaauaggcaagucauaguugacagagguaauagguccgguuauucugguauuuucucuguugaaggcaaaagcugcaucaaucggugcuuuuauguggaguugauuaggggaagaaaagaggaaacugaagucuuguggaccucaaacaguauuguuguguuuuguggcaccucagguacauauggaacaggcucauggccugauggggcggaccucaaucucaugccuauauaa

SEQ ID NO: 52897 - RNA, 1410 nt, Artificial Sequence
  derived and/or modified CDS sequence (wt) from neuraminidase__InfluenzaA__AEK29061
augaacccaaaucaaaagauaauaacaauuggcucuguuucucucaccauuuccacaauaugcuucuucauacaaauugccaucuugauaacuacuguaacauugcauuucaagcaauaugaauucaacucccccccaaacaaccaagugaugcugugugaaccaacaauaauagaaaaaaacauaacagagauaguguaucugaccaacaccaccauagagaaggaaauaugccccaaacuagcagaauacagaaauuggucaaagccgcaaugugacauuacaggguuugcaccuuuuucuaaggacaauucgauuaggcuuuccgcugguggggacaucugggugacaagagaaccuuaugugucaugcgauccugacaaguguuaucaauuugcccuuggacagggaacaacacuaaacaacgugcauucaaauaacauaguacgugauaggaccccuuaucggacccuauugaugaaugaguuagguguuccuuuucaucuggggaccaagcaagugugcauagcaugguccagcucaaguugucacgauggaaaagcauggcugcauguuuguauaacgggggaugauaaaaaugcaacugcuagcuucauuuacaaugggaggcuuguggauaguguuguuucaugguccaaagaaauccucaggacccaggagucagaaugcguuuguaucaauggaacuuguacaguaguaaugacugaugggagugcuucaggaaaagcugauacuaaaauacuauucauugaggaggggaaaaucguucauacuagcacauugucaggaagugcucagcaugucgaggagugcucuugcuauccucgauaucccggugucagaugugucugcagagacaacuggaaaggcuccaauaggcccaucguagauauaaacauaaaggaucauagcauuguuuccaguuauguguguucaggacuuguuggagacacacccagaaaaaacgacagcuccagcagcagccauuguuuggauccuaacaaugaagaagguggucauggagugaaaggcugggccuuugaugauggaaaugacguguggaugggaagaacgaucaacgagacgucacgcuuaggguaugaaaccuucaaagucauugaaggcugguccaacccuaaguccaaauugcagauaaauaggcaagucauaguugacagagguaauagguccgguuauucugguauuuucucuguugaaggcaagagcugcaucaaucggugcuuuuauguggaguugauuaggggaagaaaagaggaaacugaagucuuguggaccucaaacaguauuguuguguuuuguggcaccucagguacauauggaacaggcucauggccugauggggcggaccucaaucucaugccuauauaa

SEQ ID NO: 52898 - RNA, 1410 nt, Artificial Sequence
  derived and/or modified CDS sequence (wt) from neuraminidase__InfluenzaA__AEK29083
augaacccaaaucaaaagauaauaacaauuggcucuguuucucucaccauuuccacaauaugcuucuucauacaaauugccaucuugauaacuacuguaacauugcauuucaagcaauaugaauucaacucccccccaaacaaccaagugaugcugugugaaccaacaauaauagaaaaaaacauaacagagauaguguaucugaccaacaccaccauagagaaggaaauaugccccaaacuagcagaauacagaaauuggucaaagccgcaaugugacauuacaggguuugcaccuuuuucuaaggacaauucgauuaggcuuuccgcugguggggacaucugggugacaagagaaccuuaugugucaugcgauccugacaaguguuaucaauuugcccuuggacagggaacaacacuaaacaacgugcauucaaauaacacaguacgugauaggaccccuuaucggacccuauugaugaaugaguuagguguuccuuuucaucuggggaccaagcaagugugcauagcaugguccagcucaaguugucacgauggaaaagcauggcugcauguuuguauaacgggggaugauaaaaaugcaacugcuagcuucauuuacaaugggaggcuuguggauaguguuguuucaugguccaaagaaauccucaggacccaggagucagaaugcguuuguaucaauggaacuuguacaguaguaaugacugaugggagugcuucaggaaaagcugauacuaaaauacuauucauugaggaggggaaaaucguucauacuagcacauugucaggaagugcucagcaugucgaggagugcucuugcuauccucgauaucccggugucagaugugucugcagagacaacuggaaaggcuccaauaggcccaucguagauauaaacauaaaggaucauagcauuguuuccaguuauguguguucaggacuuguuggagacacacccagaaaaaacgacagcuccagcagcagccauuguuuggauccuaacaaugaagaagguggucauggagugaaaggcugggccuuugaugauggaaaugacguguggaugggaagaacgaucaacgagacgucacgcuuaggguaugaaaccuucaaagucauugaaggcugguccaacccuaaguccaaauugcagauaaauaggcaagucauaguugacagagguaauagguccgguuauucugguauuuucucuguugaaggcaagagcugcaucaaucggugcuuuuauguggaguugauuaggggaagaaaagaggaaacugaagucuuguggaccucaaacaguauuguuguguuuuguggcaccucagguacauauggaacaggcucauggccugauggggcggaccucaaucucaugccuauauaa

SEQ ID NO: 52899 - RNA, 1410 nt, Artificial Sequence
  derived and/or modified CDS sequence (wt) from neuraminidase__InfluenzaA__AEK29094
augaauccaaaucaaaagauaauaacgauuggcucuguuucucucaccauuuccacaauaugcuucuucaugcaaauugccaucuugauaacuacuguaacauugcauuucaagcaauauaaauucaacucccccccaaacaaccaagugaugcugugugaaccaacaauaauagaaagaaacauaacagagauaguguaucugaccaacaccaccauagagaaggaaauaugccccaaacuagcagaauacagaaauuggucaaaaccgcaaugugacauuacgggauuugcaccuuuuucuaaggacaauucgauuaggcuuuccgcugguggggacaucugggugacaagagaaccuuaugugucaugcgauccugacaaguguuaucaauuugcccuuggacagggaacaacacuaaacaacgugcauucaaauaacacaguacgugauaggaccccuuaucggacccuauugaugaaugagcuagguguuccuuuucaucuggggaccaagcaagugugcauagcaugguccagcucgaguugucacgauggaaaagcauggcugcauguuuguauaacgggggaugauaaaaaugcaacugcuagcuucauuuacaaugggaggcuuguagauaguguuguuucaugguccaaagaaauucucaggacccaggagucagaaugcguuuguaucaauggaacuuguacaguaguaaugacugauggaagugcuucaggaaaagcugauacuaaaauacuauucauugaggaggggaaaauuguucauacuagcacauugucaggaagugcucagcaugucgaggagugcucuugcuauccucgauauccuggugucagaugugucugcagagacaacuggaaaggcuccaauaggcccaucguagauauaaacauaaaggaucauagcauuguuuccaguuauguguguucaggacuuguuggagacacacccagaaaaaacgacagcuccagcaguagccauuguuuggauccuaacaaugaagaagguggucauggagugaaaggcugggccuuugaugauggaaaugacguguggaugggaagaacaaucaacgagacgucacgcuuaggguaugaaaccuucaaagucauugaaggcugguccaacccuaaguccaaauugcagauaaauaggcaagucauaguugacagagguaauagguccgguuauucugguauuuucucuguugaaggcaaaagcugcaucaaucggugcuuuuauguggaguugauuaggggaagaaaagaggaaacugaagucuuguggaccucaaacaguauuguuguguuuuguggcaccucagguacauauggaacaggcucauggccugauggggcggaccucaaucucaugccuauauaa

SEQ ID NO: 52900 - RNA, 1410 nt, Artificial Sequence
  derived and/or modified CDS sequence (wt) from neuraminidase__InfluenzaA__AEK29127
augaauccaaaucaaaagauaauaacgauuggcucuguuucucucaccauuuccacaauaugcuucuucaugcaaauugccaucuugauaacuacuguaacauugcauuucaagcaauaugaauucaacucccccccaaacaaccaagugaugcugugugaaccaacaauaauagaaagaaacauaacagagauaguguaucugaccaacaccaccauagagaaggaaauaugccccaaacuagcagaauacagaaauuggucaaagccgcaaugugacauuacaggauuugcaccuuuuucuaaggacaauucgauuaggcuuuccgcugguggggacaucugggugacaagagaaccuuaugugucaugcgauccugacaaguguuaucaauuugcccuuggacagggaacaacacuaaacaacgugcauucaaauaacacaguacgugauaggaccccuuaucggacccuauugaugaaugaguuagguguuccuuuucaucuggggaccaagcaagugugcauagcaugguccagcucaaguugucacgauggaaaagcauggcugcauguuuguauaacgggggaugauaaaaaugcaacugcuagcuucauuuacaaugggaggcuuguagauaguguuguuucaugguccaaagaaauccucaggacccaggagucagaaugcguuuguaucaauggaacuuguacaguaguaaugacugaugggagugcuucaggaaaagcugauacuaaaauacuauucauugaggaggggaaaaucguucauacuagcacauugucaggaagugcucagcaugucgaggagugcucuugcuauccucgauauccuggugucagaugugucugcagagacaacuggaaaggcuccaauaggcccaucguagauauaaacauaaaggaucauagcauugucuccaguuauguguguucaggacuuguuggagacacacccagaaaaaacgacagcuccagcaguagccauuguuuggauccuaacaaugaagaagguggucauggagugaaaggcugggccuuugaugauggaaaugacguguggaugggaagaacgaucaacgagacgucacguuuaggguaugaaaccuucaaagucauugaaggcugguccaacccuaaguccaaauugcagauaaauaggcaagucauaguugacagagguaacagguccgguuauucugguauuuucucuguugaaggcaaaagcugcaucaaucggugcuuuuauguggaguugauuaggggaagaaaagaggaaacugaagucuuguggaccucaaacaguauugugguguuuuguggcaccucagguacauauggaacaggcucauggccugauggggcggaccucaaucucaugccuauauaa

SEQ ID NO: 52901 - RNA, 1410 nt, Artificial Sequence
  derived and/or modified CDS sequence (wt) from neuraminidase__InfluenzaA__AEK29138
augaauccaaaucaaaagauaauaacgauuggcucuguuucucucaccauuuccacaauaugcuucuucaugcaaauugccaucuugauaacuacuguaacauugcauuucaagcaauaugaauucaacucccccccaaacaaccaagugaugcugugugaaccaacaauaauagaaagaaacauaacagagauaguguaucugaccaacaccaccauagagaaggaaauaugccccaaacuagcagaauacagaaauuggucaaagccgcaaugugacauuacaggauuugcaccuuuuucuaaggacaauucgauuaggcuuuccgcugguggggacaucugggugacaagagaaccuuaugugucaugcgauccugacaaguguuaucaauuugcccuuggacagggaacaacacuaaacaacgugcauucaaauaacacaguacgugauaggaccccuuaucggacccuauugaugaaugaguuagguguuccuuuucaucuggggaccaagcaagugugcauagcaugguccagcucaaguugucacgauggaaaagcauggcugcauguuuguauaacgggggaugauaaaaaugcaacugcuagcuucauuuacaaugggaggcuuguagauaguguuguuucaugguccaaagaaauccucaggacccaggagucagaaugcguuuguaucaauggaacuuguacaguaguaaugacugaugggagugcuucaggaaaagcugauacuaaaauacuauucauugaggaggggaaaaucguucauacuagcacauugucaggaagugcucagcaugucgaggagugcucuugcuauccucgauauccuggugucagaugugucugcagagacaacuggaaaggcuccaauaggcccaucguagauauaaacauaaaggaucauagcauugucuccaguuauguguguucaggacuuguuggagacacacccagaaaaaacgacagcuccagcaguagccauuguuuggauccuaacaaugaagaagguggucauggagugaaaggcugggccuuugaugauggaaaugacguguggaugggaagaacgaucaacgagacgucacguuuaggguaugaaaccuucaaagucauugaaggcugguccaacccuaaguccaaauugcagauaaauaggcaagucauaguugacagagguaacagguccgguuauucugguauuuucucuguugaaggcaaaagcugcaucaaucggugcuuuuauguggaguugauuaggggaagaaaagaggaaacugaagucuuguggaccucaaacaguauuguuguguuuuguggcaccucagguacauauggaacaggcucauggccugauggggcggaccucaaucucaugccuauauaa

SEQ ID NO: 52902 - RNA, 1410 nt, Artificial Sequence
  derived and/or modified CDS sequence (wt) from neuraminidase__InfluenzaA__AEK29182
augaauccaaaucaaaagauaauaacgauuggcucuguuucucucaccauuuccacaauaugcuucuucaugcaaauugccaucuugauaacuacuguaacauugcauuucaagcaauaugaauucaacucccccccaaacaaccaagugaugcugugugaaccaacaauaauagaaagaaacauaacagagauaguguaucugaccaacacaaccauagagaaggaaauaugccccaaacuagcagaauacagaaauuggucaaagccgcaaugugacauuacaggauuugcaccuuuuucuaaggacaauucgauuaggcuuuccgcugguggggacaucugggugacaagagaaccuuaugugucaugcgauccugacaaguguuaucaauuugcccuuggacagggaacaacacuaaacaacgugcauucaaauaacacaguacgugauaggaccccuuaucggacccuauugaugaaugaguuagguguuccuuuucaucuggggaccaagcaagugugcauagcaugguccagcucaaguugucacgauggaaaagcauggcugcauguuuguauaacgggggaugauaaaaaugcaacugcuagcuucauuuacaaugggaggcuuguagauaguguuguuucaugguccaaagaaauccucaggacccaggagucagaaugcguuuguaucaauggaacuuguacaguaguaaugacugaugggagugcuucaggaaaagcugauacuaaaauacuauucauugaggaggggaaaaucguucauacuagcacauugucaggaagugcucagcaugucgaggagugcucuugcuacccucgauauccuggugucagaugugucugcagagacaacuggaaaggcuccaauaggcccaucguagauauaaacauaaaggaucauagcauuguuuccaguuauguguguucaggacuuguuggagacacacccagaaaaaacgacagcuccagcaguagccauuguuuggauccuaacaaugaagaagguggucauggagugaaaggcugggccuuugaugauggaaaugacguguggaugggaagaacgaucaacgagacgucacguuuaggguaugaaaccuucaaagucauugaaggcugguccaacccuaaguccaaauugcagguaaauaggcaagucauaguugacagagguaauagguccgguuauucugguauuuucucuguugaaggcaaaagcugcaucaaucggugcuuuuauguggaguugauuaggggaagaaaagaggaaacugaagucuuguggaccucaaacaguauuguuguguuuuguggcaccucagguacauauggaacaggcucauggccugauggggcggaccucaaucucaugccuauauaa

SEQ ID NO: 52903 - RNA, 1410 nt, Artificial Sequence
  derived and/or modified CDS sequence (wt) from neuraminidase__InfluenzaA__AEK29204
augaauccaaaucaaaagauaauaacgauuggcucuguuucucucaccauuuccacaauaugcuucuucaugcaaauugccaucuugauaacuacuguaacauugcauuucaagcaauaugaauucaacucccccccaaacaaccaagugaugcugugugaaccaacaauaauagaaagaaacauaacagagauaguguaucugaccaacaccaccauagagaaggaaauaugccccaaacuagcagaauacagaaauuggucaaagccgcaaugugacauuacaggauuugcaccuuuuucuaaggacaauucgauuaggcuuuccgcugguggggacaucugggugacgagagaaccuuaugugucaugcgauccugacaaguguuaucaauuugcccuuggacagggaacaacacuaaacaacgugcauucaaauaacacaguacgugauaggaccccuuaucggacccuauugaugaaugaguuagguguuccuuuucaucuggggaccaagcaagugugcauagcaugguccagcucaaguugucacgauggaaaagcauggcugcauguuuguauaacgggggaugauaaaaaugcaacugcuagcuucauuuacaaugggaggcuuguagauaguguuguuucaugguccaaagaaauccucaggacccaggagucagaaugcguuuguaucaauggaacuuguacaguaguaaugacugaugggagugcuucaggaaaagcuaauacuaaaguacuauucauugaggaggggaaaaucguucauacuagcacauugucaggaagugcucagcaugucgaggagugcucuugcuauccucgauauccuggugucagaugugucugcagagacaacuggaaaggcuccaauaggcccaucguagauauaaacauaaaggaucauagcauuguuuccaguuauguguguucaggacuuguuggagacacacccagaaaaaacgacagcuccagcaguagccauuguuuggauccuaacaaugaagaagguggucauggagugaaaggcugggccuuugaugauggaaaugacguguggaugggaagaacgaucaacgagacgucacguuuaggguaugaaaccuucaaagucauugaaggcugguccaacccuaaguccaaauugcagauaaauaggcaagucauaguugacagagguaauagguccgguuauucugguauuuucucuguugaaggcaaaagcugcaucaaucggugcuuuuauguggaguugauuaggggaagaaaagaggaaacugaagucuuguggaccucaaacaguauuguuguguuuuguggcaccucagguacauauggaacaggcucauggccugauggggcggaccucaaucucaugccuauauaa

SEQ ID NO: 52904 - RNA, 1410 nt, Artificial Sequence
  derived and/or modified CDS sequence (wt) from neuraminidase__InfluenzaA__AEK29215
augaauccaaaucaaaagauaauaacgauuggcucuguuucucucaccauuuccacaauaugcuucuucaugcaaauugccaucuugauaacuacuguaacauugcauuucaagcaauaugaauucaacucccccccaaacaaccaagugaugcugugugaaccaacaauaauagaaagaaacauaacagagauaguguaucugaccaacaccaccauagagaaggaaauaugccccaaacuagcagaauacagaaauuggucaaagccgcaaugugacauuacaggauuugcaccuuuuucuaaggacaauucgauuaggcuuuccgcugguggggacaucugggugacaagagaaccuuaugugucaugcgauccugacaaguguuaucaauuugcccuuggacagggaacaacacuaaacaacgugcauucaaauaacacaguacguaauaggaccccuuaucggacccuauugaugaaugaguuagguguuccuuuucaucuggggaccaagcaagugugcauagcaugguccagcucaaguugucacgauggaaaagcauggcugcauguuuguauaacgggggaugauaaaaaugcaacugcuagcuucauuuacaaugggaggcuuguagauaguguuguuucaugguccaaagaaauccucaggacccaggagucagaaugcguuuguaucaauggaacuuguacaguaguaaugacugaugggagugcuucaggaaaagcugauacuaaaauacuauucauugaggaggggaaaaucguucauacuagcacauugucaggaagugcucagcaugucgaggagugcucuugcuauccucgauauccuggugucagaugugucugcagagacaacuggaaaggcuccaauaggcccaucguagauauaaacauaaaggaucauagcauuguuuccaguuauguguguucaggacuuguuggagacacacccagaaaaaacgacagcuccagcaguagccauuguuuggauccuaacaaugaagaagguggucauggagugaaaggcugggccuuugaugauggaaaugacguguggaugggaagaacgaucaacgagacgucacguuuaggguaugaaaccuucaaagucauugaaggcugguccaacccuaaguccaaauugcagauaaauaggcaagucauaguugacagaggugauagguccgguuauucugguauuuucucuguugaaggcaaaagcugcaucaaucggugcuuuuauguggaguugauuaggggaagaaaagaggaaacugaagucuuguggaccucaaacaguauuguuguguuuuguggcaccucagguacauauggaacaggcucauggccugauggggcggaccucaaucucaugccuauauaa

SEQ ID NO: 52905 - RNA, 1410 nt, Artificial Sequence; identical to SEQ ID NO: 52903
  derived and/or modified CDS sequence (wt) from neuraminidase__InfluenzaA__AEK29237

SEQ ID NO: 52906 - RNA, 1410 nt, Artificial Sequence; identical to SEQ ID NO: 52717
  derived and/or modified CDS sequence (wt) from neuraminidase__InfluenzaA__AEK29248

SEQ ID NO: 52907 - RNA, 1410 nt, Artificial Sequence
  derived and/or modified CDS sequence (wt) from neuraminidase__InfluenzaA__AEK29259
augaauccaaaucaaaagauaauaacgauuggcucuguuucucucaccauuuccacaauaugcuucuucaugcaaauugccaucuugauaacuacuguaacauugcauuucaagcaauaugaauucaacucccccccaaacaaccaagugaugcugugugaaccaacaauaauagaaagaaacauaacagagauaguguaucugaccaacaccaccauagagaaggaaauaugccccaaacuagcagaauacagaaauuggucaaagccgcaaugugacauuacaggauuugcaccuuuuucuaaggacaauucgauuaggcuuuccgcugguggggacaucugggugacaagagaaccuuaugugucaugcgauccugacaaguguuaucaauuugcccuuggacagggaacaacacuaaacaaugugcauucaaauaacacaguacgugauaggaccccuuaucggacccuauugaugaaugaguuagguguuccuuuucaucuggggaccaagcaagugugcauagcaugguccagcucaaguugucacgauggaaaagcauggcugcauguuuguauaacgggggaugauaaaaaugcaacugcuagcuucauuuacaaugggaggcuuguagauaguguuguuucaugguccaaagaaauccucaggacccaggagucagaaugcguuuguaucaauggaacuuguacaguaguaaugacugaugggagugcuucaggaaaagcugauacuaaaauacuauucauugaggaggggaaaaucguucauacuagcacauugucaggaagugcucagcaugucgaggagugcucuugcuauccucgauauccuggugucagaugugucugcagagacaacuggaaaggcuccaauaggcccaucguagauauaaacauaaaggaucauagcauuguuuccaguuauguguguucaggacuuguuggagacacacccagaaaaaacgacagcuccagcaguagccauuguuuggauccuaacaaugaagaagguggucauggagugaaaggcugggccuuugaugauggaaaugacguguggaugggaagaacgaucaacgagacgucacguuuaggguaugaaaccuucaaagucaucgaaggcugguccaacccuaaguccaaauugcagauaaauaggcaagucauaguugacagagguaauagguccgguuauucugguauuuucucuguugaaggcaaaagcugcaucaaucggugcuuuuauguggaguugauuaggggaagaaaagaggaaacugaagucuuguggaccucaaacaguauuguuguguuuuguggcaccucagguacauauggaacaggcucauggccugauggggcggaccucaaucucaugccuauauaa

SEQ ID NO: 52908 - RNA, 1410 nt, Artificial Sequence; identical to SEQ ID NO: 52907
  derived and/or modified CDS sequence (wt) from neuraminidase__InfluenzaA__AEK29270

SEQ ID NO: 52909 - RNA, 1413 nt, Artificial Sequence
  derived and/or modified CDS sequence (wt) from neuraminidase__InfluenzaA__AEK59839
augaauccaaaucaaaagauaauaaccauuggaucaaucaguauagcaaucggaauaauuagucuaauguugcaaauaggaaauauuauuucaauaugggcuagucacucaauccaaacuggaagucaaaaccacacuggaauaugcaaccaaagaaucaucacauaugaaaacagcaccugggugaaucacacauauguuaauauuaacaacacuaauguuguugcuggaaaggacaaaacuucagugacauuggccggcaauucaucucuuuguucuaucaguggaugggcuauauacacaaaagacaacagcauaagaauuggcuccaaaggagauguuuuugucauaagagaaccuuucauaucauguucucacuuggaaugcagaaccuuuuuucugacccaaggcgcucuauuaaaugacaaacauucaaaugggaccguaaaggacagaaguccuuauagggccuuaaugagcuguccucuaggugaagcuccguccccauacaauucaaaguucgaaucaguugcauggucagcaagcgcaugccaugauggccugggcugguuaacaaucggaauuucugguccagacaauggagcuguggcuguacuaaaauacaauggaauaauaacuggaaccauaaaaaguuggaaaaagcaaauauuaagaacacaagagucugaaugugucuguaugaacgggucauguuucaccauaaugaccgauggcccgaguaauggggccgccucguacaaaauuuucaagaucgaaaaggggaagguuacuaaaucaauagaguugaaugcacccaauuuucauuaugaggaauguuccuguuacccagacacuggcauagugauguguguaugcagggacaacuggcaugguucaaaucgaccuuggguaucuuuuaaucaaaacuuggauuaucaaauaggauacaucugcaguggaguguucggugacaauccgcgucccaaagauggagagggcagcugcaauccagugacuguugauggagcagacggaguaaaaggguuuucauacaaauaugauaaugguguuuggauaggaaggaccaaaaguaacagacuuagaaagggguuugagaugauuugggauccuaauggauggacaaauaccgacagugauuucucagugaaacaggauguuguagcaauaacugauuggucaggguacagcggaaguuucguccaacauccugaguuaacaggauuggauuguauaagaccuugcuucuggguugaguuggucagagggcugccuagagaaaauacaacaaucuggacuagugggagcagcauuucuuucuguggcguuaauagugauacugcaaacuggucuuggccagacggugcugaguugccauucaccauugacaaguag

SEQ ID NO: 52910 - RNA, 1410 nt, Artificial Sequence
  derived and/or modified CDS sequence (wt) from neuraminidase__InfluenzaA__AEK98375
augaauccaaaucaaaagauaauaacgauuggcucuguuucucucaccauuuccacaauaugcuucuucaugcaaauugccaucuugauaacuacuguaacauugcauuucaagcaauaugaauucaacucccccccaaacaaccaagugaugcugugugaaccaacaauaauagaaagaaacauaacagagauaguguaucugaccaacaccaccauagagaaggaaauaugccccaaacuagcagaauacagaaauuggucaaagccgcaaugugacauuacaggauuugcaccuuuuucuaaggacaauucgauuaggcuuuccgcugguggggacaucugggugacaagagaaccuuaugugucaugcgauccugacaaguguuaucaauuugcccuuggacagggaacaacacuaaacaacgugcauucaaaugacacaguacgugauaggaccccuuaucggacccuauugaugaaugaguuagguguuccuuuucaucuggggaccaagcaagugugcauagcaugguccagcucaaguugucacgauggaaaagcauggcugcauguuuguauaacgggggaugauaaaaaugcaacugcuagcuucauuuacaaugggaggcuuguagauaguauuguuucaugguccaaagaaauccucaggacccaggagucagaaugcguuuguaucaauggaacuuguacaguaguaaugacugaugggagugcuucaggagaagcugauacuaaaauacuauucauugaggaggggaaaaucguucauacuagcacauugucaggaagugcucagcaugucgaggagugcuccugcuauccucgauauccuggugucagaugugucugcagagacaacuggaaaggcuccaauaggcccaucguagauauaaacauaaaggaucauagcauuguuuccaguuauguguguucaggacuuguuggagacacacccagaaaaaacgacagcuccagcaguagccauuguuuggauccuaacaaugaagaagguggucauggagugaaaggcugggccuuugaugauggaaaugacguguggaugggaagaacgaucagcgagaagucacgcuuaggguaugaaaccuucaaagucauugaaggcugguccaacccuaaguccaaauugcagacaaauaggcaagucauaguugacagagguaauagguccgguuauucugguauuuucucuguugaaggcaaaagcugcaucaaucggugcuuuuauguggaguugauaaggggaagaaaagaggaaacugaagucuuguggaccucaaacaguauuguuguguuuuguggcaccucagguacauauggaacaggcucauggccugauggggcggacaucaaucucaugccuauauaa

SEQ ID NO: 52911 - RNA, 1410 nt, Artificial Sequence
  derived and/or modified CDS sequence (wt) from neuraminidase__InfluenzaA__AEK98377
augaauccaaaucaaaagauaauaacgauuggcucuguuucucucaccauuuccacaauaugcuucuucaugcaaauugccaucuugauaacuacuguaacauugcauuucaagcaauaugaauucaacucccccccaaacaaccaagugaugcugugugaaccaacaauaauagaaagaaauauaacagagauaguguaucugaccaacaccaccauagagaaggaaauaugucccaaacuagcagaauacagaaauuggucaaagccgcaaugugacauuacaggauuugcaccuuuuucuaaggacaauucgauuaggcuuuccgcugguggggacaucugggugacaagagaaccuuaugugucaugcgauccugacaaguguuaucaauuugcccuuggacagggaacaacacuaaacaacguacauucaaauaacacaguacgugauaggacuccuuaucggacccuauugaugaaugaguuagguguuccuuuucaucuggggaccaagcaagugugcauagcaugguccagcucaaguugucacgauggaaaagcauggcugcauguuuguauaacgggggaugauaaaaaugcaacugcuagcuucauuuacaaugggaggcuuguagauaguguuguuucaugguccaaagaaauccucaggacccaggagucagaaugcguuuguaucaauggaacuuguacaguaguaaugacugaugggagugcuucaggaaaagcugauacuaaaauacuauucauugaggaggggaaaaucguucauacuagcacauugucaggaagugcucagcaugucgaggagugcuccugcuauccucgauauccuggugucagaugugucugcagagacaacuggaaaggcuccaauaggcccaucguagauauaaacauaaaggaucauagcauugucuccaguuauguguguucaggacuuguuggagacacacccagaaaaaacgacagcuccagcaguagccauuguuuggauccuaacaaugaggaagguggucauggggugaaaggcugggccuuugaugauggaaaugacguguggaugggaagaacgaucagcgagaagucacgcuuaggauaugaaaccuucaaagucauugaaggcugguccaacccuaaguccaaauugcagauaaauaggcaagucauaguugacagagguaauagguccgguuauucugguauuuucucuguugaaggcaaaagcugcaucaaucggugcuuuuauguggaguugauaaggggaagaaaagaggaaacugaagucuuguggaccucaaacaguauuguuguguuuuguggcaccucagguacauauggaacaggcucauggccugauggggcggacaucaaucucaugccuauauaa

SEQ ID NO: 52912 - RNA, 1410 nt, Artificial Sequence
  derived and/or modified CDS sequence (wt) from neuraminidase__InfluenzaA__AEK98379
augaauccaaaucaaaagauaauaacgauuggcucuguuucucucaccauuuccacaauaugcuucuucaugcaaauugccaucuugauaacuacuguaacauugcauuucaagcaauaugaauucaacucccccccaaacaaccaagugaugcugugugaaccaacaauaauagaaagaaacauaacagagauaguguaucugaccaacaccaccauagagaaggaaauaugccccaaacuagcagaauacagaaauuggucaaagccgcaaugugacauuacaggauuugcaccuuuuucuaaggacaauucgauuaggcuuuccgcugguggggacaucugggugacaagagaaccuuaugugucaugcgauccugacaaguguuaucaauuugcccuuggacagggaacaacacuaaacaacgugcauucaaaugacacaguacgugauaggaccccuuaucggacccuauugaugaaugaguuagguguuccuuuucaucuggggaccaagcaagugugcauagcaugguccagcucaaguugucacgauggaaaagcauggcugcauguuuguauaacgggggaugauaaaaaugcaacugcuagcuucauuuacaaugggaggcuuguagauaguauuguuucaugguccaaagaaauccucaggacccaggagucagaaugcguuuguaucaauggaacuuguacaguaguaaugacugaugggagugcuucaggagaagcugauacuaaaauacuauucauugaggaggggaaaaucguucauacuagcacauugucaggaagugcucagcaugucgaggagugcuccugcuauccucgauauccuggugucagaugugucugcagagacaacuggaaaggcuccaauaggcccaucguagauauaaacauaaaggaucauagcauuguuuccaguuauguguguucaggacuuguuggagacacacccagaaaaaacgacagcuccagcaguagccauuguuuggauccuaacaaugaagaagguggucauggagugaaaggcugggccuuugaugauggaaaugacguguggaugggaagaacgaucagcgagaagucacgcuuaggguaugaaaccuucaaagucauugaaggcugguccaacccuaaguccaaauugcagauaaauaggcaagucauaguugacagagguaauagguccgguuauucugguauuuucucuguugaaggcaaaagcugcaucaaucggugcuuuuauguggaguugauaaggggaagaaaagaggaaacugaagucuuguggaccucaaacaguauuguuguguuuuguggcaccucagguacauauggaacaggcucauggccugauggagcggacaucaaucucaugccuauauaa

SEQ ID NO: 52913 - RNA, 1410 nt, Artificial Sequence
  derived and/or modified CDS sequence (wt) from neuraminidase__InfluenzaA__AEK98381
augaauccaaaucaaaagauaauaacgauuggcucuguuucucucaccauuuccacaauaugcuucuucaugcaaauugccaucuugauaacuacuguaacauugcauuucaagcaauaugaauucaacucccccccaaacaaccaagugaugcugugugaaccaacaauaauagaaagaaacauaacagagauaguguaucugaccaacaccaccauagagaaggaaauaugccccaaacuagcagaauacagaaauuggucaaagccgcaaugugacauuacaggauuugcaccuuuuucuaaggacaauucgauuaggcuuuccgcugguggggacaucugggugacaagagaaccuuaugugucaugcgauccugacaaguguuaucaauuugcccuuggacagggaacaacacuaaacaacgugcauucaaaugacacaguacgugauaggaccccuuaucggacccuauugaugaaugaguuagguguuccuuuucaucuggggaccaagcaagugugcauagcaugguccagcucaaguugucacgauggagaagcauggcugcauguuuguauaacgggggaugauaaaaaugcaacugcuagcuucauuuacaaugggaggcuuguagauaguauuguuucaugguccaaagaaauccucaggacccaggagucagaaugcguuuguaucaauggaacuuguacaguaguaaugacugaugggagugcuucaggagaagcugauacuaaaauacuauucauugaggaggggaaaaucguucauacuagcacauugucaggaagugcucagcaugucgaggagugcuccugcuauccucgauauccuggugucagaugugucugcagagacaacuggaaaggcuccaauaggcccaucguagauauaaacauaaaggaucauagcauuguuuccaguuauguguguucaggacuuguuggagacacacccagaaaaaacgacagcuccagcaguagccauuguuuggauccuaacaaugaagaagguggucauggagugaaaggcugggccuuugaugauggaaaugacguguggaugggaagaacgaucagcgagaagucacgcuuaggguaugaaaccuucaaagucauugaaggcugguccaacccuaaguccaaauugcagauaaauaggcaagucauaguugacagagguaauagguccgguuauucugguauuuucucuguugaaggcaaaagcugcaucaaucggugcuuuuauguggaguugauaaggggaagaaaagaggaaacugaagucuuguggaccucaaacaguauuguuguguuuuguggcaccucagguacauauggaacaggcucauggccugauggagcggacaucaaucucaugccuauauaa

SEQ ID NO: 52914 - RNA, 1410 nt, Artificial Sequence
  derived and/or modified CDS sequence (wt) from neuraminidase__InfluenzaA__AEK98383
augaauccaaaucaaaagauaauaacgauuggcucuguuucucuaaccauuuccacaauaugcuucuucaugcaaauugccaucuugauaacuacuguaacauugcauuucaagcaauaugaauucaacucccccccaaacaaccaagugaugcugugugaaccaacaauaauagaaagaaacauaacagagauaguguaucugaccaacaccaccauagagaaggaaauaugccccaaacuagcagaauacagaaauuggucaaagccgcaaugugacauuacaggauuugcaccuuuuucuaaggacaauucgauuaggcuuuccgcugguggggacaucugggugacaagagaaccuuaugugucaugcgauccugacaaguguuaucaauuugcccuuggacagggaacaacacuaaacaacgugcauucaaaugacacaguacgugauaggaccccuuaucggacccuauugaugaaugaguuagguguuccuuuucaucuggggaccaagcaagugugcauagcaugguccagcucaaguugucacgauggaaaagcauggcugcauguuuguauaacgggggaugauaaaaaugcaacugccagcuucauuuacaaugggagacuuguagauaguauuguuucaugguccaaagaaauccucaggacccaggagucagaaugcguuuguaucaauggaacuuguacaguaguaaugacugaugggagugcuucaggagaagcugauacuaaaauacuauucauugaggaggggaaaaucguucauacuagcacauugucaggaagugcucagcaugucgaggagugcuccugcuauccucgauauccuggugucagaugugucugcagagacaacuggaaaggcuccaauaggcccaucguagauauaaacauaaaggaucauagcauuguuuccaguuauguguguucaggacuuguuggagacacacccagaaaaaacgacagcuccagcaguagccauuguuuggauccuaacaaugaagaagguggucauggagugaaaggcugggccuuugaugauggaaaugacguguggaugggaagaacgaucagcgagaagucacgcuuaggguaugaaaccuucaaagucauugaaggcugguccaacccuaaguccaaauugcagauaaauaggcaagucauaguugacagagguaauagguccgguuauucugguauuuucucuguugaaggcaaaagcugcaucaaucggugcuuuuauguggaguugauaaggggaagaaaagaggaaacugaagucuuguggaccucaaacaguauuguuguguuuuguggcaccucagguacauauggaacaggcucauggccugauggggcggacaucaaucucaugccuauauaa

SEQ ID NO: 52915 - RNA, 1410 nt, Artificial Sequence
  derived and/or modified CDS sequence (wt) from neuraminidase__InfluenzaA__AEK98385
augaauccaaaucaaaagauaauaacgauuggcucuguuucucucaccauuuccacaauaugcuucuucaugcaaauugccaucuugauaacuacuguaacauugcauuucaagcaauaugaauucaacucccccccaaacaaccaagugaugcugugugaaccaacaauaauagaaagaaauauaacagagauaguguaucugaccaacaccaccauagagaaggaaauaugccccaaauuagcagaauacagaaauuggucaaagccgcaaugugacauuacaggguuugcaccuuuuucuaaggacaauucgauuaggcuuuccgcugguggggacaucugggugacaagagaaccuuaugugucaugcgauccugacaaguguuaucaauuugcccuuggacagggaacaacacuaaacaacguacauucaaauaacacaguacgugauaggaccccuuaucggacccuauugaugaaugaguuagguguuccuuuucaucuggggaccaagcaagugugcauagcaugguccagcucaaguugucacgauggaaaagcauggcugcauguuuguauaacgggggaugauaaaaaugcaacugcuagcuucauuuacaaugggagacuuguagauaguguuguuucaugguccaaagaaauccucaggacccaggagucagaaugcguuuguaucaauggaacuuguacaguaguaaugacugaugggagugcuucaggaaaagcugauacuaaaauacuauucauugaggaggggaaaaucguucauacuagcacauugucaggaagugcucagcaugucgaggagugcuccugcuauccucgauauccuggugucagaugugucugcagagacaacuggaaaggauccaauaggcccaucguagauauaaacauaaaggaucauagcauugucuccaguuauguguguucaggacuuguuggagacacacccagaaaaaacgacagcuccagcaguagccauuguuuggauccuaacaaugaggaagguggucauggggugaaaggcugggccuuugaugauggaaaugacguguggaugggaagaacgaucagcgagaagucacgcuuaggguaugaaaccuucaaagucauugaaggcugguccaacccuaaguccaaauugcagauaaauaggcaagucauaguugacagagguaauagguccgguuauucugguauuuucucuguugaaggcaaaagcugcaucaaucggugcuuuuauguggaguugauaaggggaagaaaagaggaaacugaagucuuguggaccucaaacaguauuguuguguuuuguggcaccucagguacauauggaacaggcucauggccugauggggcggacaucaaucucaugccuauauaa

SEQ ID NO: 52916 - RNA, 1410 nt, Artificial Sequence
  derived and/or modified CDS sequence (wt) from neuraminidase__InfluenzaA__AEK98387
augaauccaaaucaaaagauaauaacgauuggcucuguuucucucaccauuuccacaauaugcuucuucaugcaaauugccaucuugauaacuacuguaacauugcauuucaagcaauaugaauucaacucccccccaaacaaccaagugaugcugugugaaccaacaauaauagaaagaaacauaacagagauaguguaucugaccaacacaaccauagagaaggaaauaugccccaaacuagcagaauacagaaauuggucaaagccgcaaugugacauuacaggauuugcaccuuuuucuaaggacaauucgauuaggcuuuccgcugguggggacaucugggugacaagagaaccuuaugugucaugcgauccugacaaguguuaucaauuugcccuuggacagggaacaacacuaaacaaugugcauucaaauaacacaguacgugauaggaccccuuaucggacccuauugaugaaugaguuagguguuccuuuucaucuggggaccaagcaagugugcauagcaugguccagcucaaguugucacgauggaaaagcauggcugcauguuuguauaacgggggaugauaaaaaugcaacugcuagcuucauuuacaaugggaggcuuauagauaguguuguuucaugguccaaagaaauccucaggacccaggagucagaaugcguuuguaucaauggaacuuguacaguaguaaugacugaugggagugcuucaggaaaagcugauacuaaaauacuauucauugaggaggggaaaaucguucauacuagcacauugucaggaagugcucagcaugucgaggagugcucuugcuauccucgauauccuggugucagaugugucugcagagacaacuggaaaggcuccaauaggcccaucguagauauaaacauaaaggaucauagcauuguuuccaguuauguguguucaggacuuguuggagacacacccagaaaaaacgacagcuccagcaguagccauuguuuggauccuaacaaugaagaagguggucauggagugaaaggcugggccuuugaugauggaaaugacguguggaugggaagaacgaucaacgagacgucacguuuaggguaugaaaccuucaaagucauugaaggcugguccaacccuaaguccaaauugcagauaaauaggcaagucauaguugacagagguaauagguccgguuauucugguauuuucucuguugaaggcaaaagcugcaucaaucggugcuuuuacguggaguugauuaggggaagaaaagaggaaacugaagucuuguggaccucaaacaguauuguuguguuuuguggcaccucagguacauauggaacaggcucauggccugauggggcggaccucaaucucaugccuauauaa

SEQ ID NO: 52917 - RNA, 1410 nt, Artificial Sequence
  derived and/or modified CDS sequence (wt) from neuraminidase__InfluenzaA__AEK98389
augaauccaaaucaaaagauaauaacgauuggcucuguuucucucaccauuuccacaauaugcuucuucaugcaaauugccaucuugauaacuacuguaacauugcauuucaagcaauaugaauucaacucccccccaaacaaccaagugaugcugugugaaccaacaauaauagaaagaaauauaacagagauaguguaucugaccaacaccaccauagagaaggaaauaugucccaaacuagcagaauacagaaauuggucaaagccgcaaugugacauuacaggauuugcaccuuuuucuaaggacaauucgauuaggcuuuccgcugguggggacaucugggugacaagagaaccuuaugugucaugcgauccugacaaguguuaucaauuugcccuuggacagggaacaacacuaaacaacguacauucaaauaacacaguacgugauaggaccccuuaucggacccuauugaugaaugaguuagguguuccuuuucaucuggggaccaagcaagugugcauagcaugguccagcucaaguugucacgauggaaaagcauggcugcauguuuguauaacgggggaugauaaaaaugcaacugcuagcuucauuuacaaugggaggcuuguagauaguguuguuucaugguccaaagaaauccucaggacccaggagucagaaugcguuuguaucaauggaacuuguacaguaguaaugacugaugggagugcuucaggaaaagcugauacuaaaauacuauucauugaggaggggaaaaucguucauacuagcacauugucaggaagugcucagcaugucgaggagugcuccugcuauccucgauauccuggugucagaugugucugcagagacaacuggaaaggauccaauaggcccaucguagauauaaacauaaaggaucauagcauugucuccaguuauguguguucaggacuuguuggagacacacccagaaaaaacgacagcuccagcaguagccauuguuuggauccuaacaaugaggaagguggucauggggugaaaggcugggccuuugaugauggaaaugacguguggaugggaagaacgaucagcgagaagucacgcuuaggauaugaaaccuucaaagucauugaaggcugguccaacccuaaguccaaauugcagauaaauaggcaagucauaguugacagagguaauagguccgguuauucugguauuuucucuguugaaggcaaaagcugcaucaaucggugcuuuuauguggaguugauaaggggaagaaaagaggaaacugaagucuuguggaccucaaacaguauuguuguguuuuguggcaccucagguacauauggaacaggcucauggccugauggggcggacaucaaucucaugccuauauaa

SEQ ID NO: 52918 - RNA, 1410 nt, Artificial Sequence
  derived and/or modified CDS sequence (wt) from neuraminidase__InfluenzaA__AEK98393
augaauccaaaucaaaagauaauaacgauuggcucuguuucucucaccauuuccacaauaugcuucuucaugcaaauugccaucuugauaacuacuguaacauugcauuucaagcaauaugaauucaacucccccccaaacaaccaagugaugcuaugugaaccaacaauaauagaaagaaacauaacagagauaguguaucugaccaacaccaccauagagaaggaaauaugccccaaacuagcagaauacagaaauuggucaaagccgcaaugugacauuacaggauuugcaccuuuuucuaaggacaauucgauuaggcuuuccgcugguggggacaucugggugacaagagaaccuuaugugucaugcgauccugacaaguguuaucaauuugcccuuggacagggaacaacacuaaacaacgugcauucaaauaacacaguacgugauaggaccccuuaucggacccuauugaugaaugaauuagguguuccuuuucaucuggggaccaagcaagugugcauagcaugguccagcucaaguugucacgauggaaaagcauggcugcauguuuguauaacgggggaugauaaaaaugcaacugcuagcuucauuuacaaugggaggcuuguagauaguguuguuucaugguccaaagaaauccucaggacccaggagucagaaugcguuuguaucaauggaacuuguacaguaguaaugacugaugggagugcuucaggaaaagcugauacuaaaauacuauucauugaggaggggaaaaucguucauacuagcacauugucaggaagugcucagcaugucgaggagugcucuugcuauccucgauauccuggugucagaugugucugcagagacaacuggaaaggcuccaauaggcccaucguagauauaaacauaaaggaucauagcauugcuuccaguuauguguguucaggacuuguuggagacacacccagaaaaaacgacagcuccagcaguagccauuguuuggauccuaacaaugaagaagguggucauggagugaaaggcugggccuuugaugauggaaaugacguguggaugggaagaacgaucaacgagacgucacguuuaggguaugaaaccuucaaagucauugaaggcugguccaacccuaaguccaaauugcagauaaauaggcaagucauaguugacagagguaauagguccgguuauucugguauuuucucuguugaaggcaaaagcugcaucaaucggugcuuuuauguggaguugauuaggggaagaaaagaggaaacugaagucuuguggaccucaaacaguauuguuguguuuuguggcaccucagguacauauggaacaggcucauggccugauggggcggaccucaaucucaugccuauauaa

SEQ ID NO: 52919 - RNA, 1410 nt, Artificial Sequence
  derived and/or modified CDS sequence (wt) from neuraminidase__InfluenzaA__AEK98395
augaauccaaaucaaaagauaauaacgauuggcucuguuucucucaccauuuccacaauaugcuucuucaugcaaauugccaucuugauaacuacuguaacauugcauuucaagcaauaugaauucaacucccccccaaacaaccaagugaugcugugugaaccaacaauaauagaaagaaacauaacagagauaguguaucugaccaacaccaccauagagaaggaaauaugccccaaacuagcagaauacagaaauuggucaaagccgcaaugugacauuacaggauuugcaccuuuuucuaaggacaauucgauuaggcuuuccgcugguggggacaucugggugacaagagaaccuuaugugucaugcgauccugacaaguguuaucaauuugcccuuggacagggaacaacacuaaacaaugugcauucaaauaacacaguacgugauaggaccccuuaucggacccuauugaugaaugaguuagguguuccuuuucaucuggggaccaagcaagugugcauagcaugguccagcucaaguugucacgauggaaaagcauggcugcauguuuguauaacgggggaugauaaaaaugcaacugcuagcuucauuuacaaugggaggcuuguagauaguguuguuucaugguccaaagaaauccucaggacccaggagucagaaugcguuuguaucaauggaacuuguacaguaguaaugacugaugggagugcuucaggaaaagcugauacuaaaauacuauucauugaggaggggaaaaucguucauacuagcacauugucaggaagugcucagcaugucgaggagugcucuugcuauccucgauauccuggugucagaugugucugcagagacaacuggaaaggcuccaauaggcccaucguagauauaaacauaaaggaucauagcauuguuuccaguuauguguguucaggacuuguuggagacacacccagaaaaaacgacagcuccagcaguagccauuguuuggauccuaacaaugaagaagguggucauggagugaaaggcugggccuuugaugauggaaaugacguguggaugggaagaacgaucaacgagacgucacguuuaggguaugaaaccuucaaagucauugaaggcugguccaacccuaaguccaaauugcagauaaauaggcaagucauaguugacagagguaauagguccgguuauucugguauuuucucuguugaaggcaaaagcugcaucaaucggugcuuuuauguggaguugauuaggggaagaaaagaggaaacugaagucuuguggaccucaaacaguauuguuguguuuuguggcaccucagguacauauggaacaggcucauggccugauggggcggaccucaaccucaugccuauauaa

SEQ ID NO: 52920 - RNA, 1410 nt, Artificial Sequence
  derived and/or modified CDS sequence (wt) from neuraminidase__InfluenzaA__AEK98397
augaauccaaaucaaaagauaauaacgauuggcucuguuucucucaccauuuccacaauaugcuucuucaugcaaauugccaucuugauaacuacuguaacauugcauuucaagcaauaugaauucaacucccccccaaacaaccaagugaugcugugugaaccaacaauaauagaaagaaacauaacagagauaguguaucugaccaacaccaccauagagaaggaaauaugccccaaacuagcagaauacagaaauuggucaaagccgcaaugugacauuacaggauuugcaccuuuuucuaaggacaauucgauuaggcuuuccgcugguggagacaucugggugacaagagaaccuuaugugucaugcgauccuaacaaguguuaucaauuugcccuuggacaaggaacaacacuaaacaacgugcauucaaauaacacaguacgugauaggaccccuuaucggacccucuugaugaaugaguuagguguuccuuuucaucuggggaccaagcaagugugcauagcaugguccagcucaaguugucacgauggaaaagcauggcugcauguuuguauaacgggggaugauaaaaaugcaacugcuagcuucauuuacaaugggaggcuuguagauaguguuguuucaugguccaaagaaauccucaggacccaagagucagaaugcguuuguaucaauggaacuuguacaguaguaaugacugaugggagugcuucaggaaaagcugauacuaaaauacuauucauugaggaggggaaaaucguucauacuagcacauugucaggaagugcucagcaugucgaggagugcuccugcuauccucgauauccuggugucagaugugucugcagagacaacuggaaaggcuccaauaggcccaucguagauauaaacaugaaggaucauagcauuguuuccaguuauguguguucaggacuuguuggagacacacccagaaaaaacgacagcuccagcaguagucauuguuuggauccuaacaaugaagaagguggucauggagugaaaggcugggccuuugaugauggaaaugacguguggaugggaagaacgaucagugagaagucacgcuuaggguaugaaaccuucaaagucauugaaggcugguccaacccuaaguccaaauugcagauaaauaggcaaguaauaguugacagagguaauagguccgguuauucugguauuuucucuguugaaggcaaaagcugcaucaaucggugcuuuuauguggaguugauaaggggaagaaaagaggaaacugaagucuuguggaccucaaacaguauuguuguguuuuguggcaccucagguacauauggaacaggcucauggccugauggggcggacaucaauuucaugccuauauaa

SEQ ID NO: 52921 - RNA, 1410 nt, Artificial Sequence
  derived and/or modified CDS sequence (wt) from neuraminidase__InfluenzaA__AEK98399
augaauccaaaucaaaagauaauaacgauuggcucuguuucucucaccauuuccacaauaugcuucuucaugcaaauugccaucuugauaacuacuguaacauugcauuucaagcaauaugaauucaacucccccccaaacaaccaagugaugcugugugaaccaacaauaauagaaagaaauauaacagagauaguguaucugaccaacaccaccauagagaaggaaauaugucccaaacuagcagaauacagaaauuggucaaagccgcaaugugacauuacaggauuugcaccuuuuucuaaggacaauucgauuaggcuuuccgcugguggggacaucugggugacaagagaaccuuaugugucaugcgauccugacaaguguuaucaauuugcccuuggacagggaacaacacuaaacaacguacauucaaauaacacaguacgugauaggacuccuuaucggacccuauugaugaaugaguuagguguuccuuuucaucuggggaccaagcaagugugcauagcaugguccagcucaaguugucacgauggaaaagcauggcugcauguuuguauaacgggggaugauaaaaaugcaacugcuagcuucauuuacaaugggaggcuuguagauaguguuguuucaugguccaaagaaauccucaggacccaggagucagaaugcguuuguaucaauggaacuuguacaguaguaaugacugaugggagugcuucaggaaaagcugauacuaaaauacuauucauugaggaggggaaaaucguucauacuagcacauugucaggaagugcucagcaugucgaggagugcuccugcuauccucgauauccuggugucagaugugucugcagagacaacuggaaaggauccaauaggcccaucguagauauaaacauaaaggaucauagcauugucuccaguuauguguguucaggacuuguuggagacacacccagaaaaaacgacagcuccagcaguagccauuguuuggauccuaacaaugaggaagguggucauggggugaaaggcugggccuuugaugauggaaaugacguguggaugggaagaacgaucagcgagaagucacgcuuaggauaugaaaccuucaaagucauugaaggcugguccaacccuaaguccaaauugcagauaaauaggcaagucauaguugacagagguaauagguccgguuauucugguauuuucucuguugaaggcaaaagcugcaucaaucggugcuuuuauguggaguugauaaggggaagaaaagaggaaacugaagucuuguggaccucaaacaguauuguuguguuuuguggcaccucagguacauauggaacaggcucauggccugauggggcggacaucaaucucaugccuauauaa

SEQ ID NO: 52922 - RNA, 1410 nt, Artificial Sequence
  derived and/or modified CDS sequence (wt) from neuraminidase__InfluenzaA__AEK98403
augaauccaaaucaaaagauaauaacgauuggcucuguuucucucaccauuuccacaauaugcuucuucaugcaaauugccaucuugauaacuacuguaacauugcauuucaagcaauaugaauucaacucccccccaaacaaccaagugaugcugugugaaccaacaauaauagaaagaaacauaacagagauaguguaucugaccaacaccacuauagagaaggaaauaugccccaaacuagcagaauacagaaauuggucaaagccgcaaugugacauuacaggauuugcaccuuuuucuaaggacaauucgauuaggcuuuccgcugguggggacaucugggugacaagagaaccuuaugugucaugcgauccugacaaguguuaucaauuugcccuuggacagggaacaacacuaaacaacgugcauucaaaugacacaguacgugauaggaccccuuaucggacccuauugaugaaugaguuagguguuccuuuucaucuggggaccaagcaagugugcauagcaugguccagcucaaguugucacgauggaaaagcauggcugcauguuuguauaacgggggaugauaaaaaugcaacugcuagcuucauuuacaaugggaggcuuguagauaguguuguuucaugguccaaagaaauccucaggacccaggagucagaaugcguuuguaucaauggaacuuguacaguaguaaugacugaugggagugcuucaggaaaagcugauacuaaaauacuauucauugaggaggggaaaaucguucauacuagcacauugucaggaagugcucagcaugucgaggagugcuccugcuacccucgauauccuggugucagaugugucugcagagacaacuggaaaggcuccaauaggcccaucguagauauaaacauaaaggaucauagcauuguuuccaguuauguguguucaggacuuguuggagacacacccagaaaaaacgacagcuccagcaguagccauuguuuggauccuaacaaugaagaagguggucauggagugaaaggcugggccuuugaugauggaaaugacguguggaugggaagaacgaucagcgagaagucacgcuuaggguaugaaaccuucaaagucauugaaggcugguccaacccuaaguccaaauugcagauaaauaggcaagucauaguugacagagguaauagguccgguuauucugguauuuucucuguugaaggcaaaagcugcaucaaucggugcuuuuauguggaguugauaaggggaagaaaagaggaaacugaagucuuguggaccucaaacaguauuguuguguuuuguggcaccucagguacauauggaacaggcucauggccugauggggcggacaucaaucucaugccuauauaa

SEQ ID NO: 52923 - RNA, 1410 nt, Artificial Sequence
  derived and/or modified CDS sequence (wt) from neuraminidase__InfluenzaA__AEK98405
augaauccaaaucaaaagauaauaacgauuggcucuguuucucucaccauuuccacaauaugcuucuucaugcaaauugccaucuugauaacuacaguaacauugcauuucaagcaauaugaauucaacucccccccaaacaaccaagugaugcugugugaaccaacaauaauagaaagaaacauaacagagauaguguaucugaccaacaccaccauagagaaggaaauaugccccaaacuagcagaauacagaaauuggucaaagccacaaugugacauuacaggauuugcaccuuuuucuaaggacaauucgauuaggcuuuccgcugguggggacaucugggugacaagagaaccuuaugugucaugcgauccugacaaguguuaucaauuugcccuuggacagggaacaacacuaaacaacgugcauucaaauaacacaguacgugauaggaccccuuaucggacccuauugaugaaugaguuagguguuccuuuucaucuggggaccaagcaagugugcauagcaugguccaguucaaguugucacgauggaaaagcauggcugcauguuuguauaacgggggaugauaaaaaugcaacugcuagcuuuauuuacaaugggaggcuuguagauaguauuguuucaugguccaaagaaauccucaggacucaggagucagaaugcguuuguaucaauggaacuuguacaguaguaaugacugaugggagugcuucaggaaaagcugauacuaaaauacuauucauugaggaggggaaaaucguucauacuagcacauugucaggaagugcucagcaugucgaggagugcuccugcuauccucgauauccuggugucagaugugucugcagagacaacuggaaaggcuccaauaggcccauuguagauauaaacauaaaggaucauagcauuguuuccaguuauguguguucaggacuuguuggagacacacccagaaaaaacgacagcuccagcaguagccauuguuuggauccuaacaaugaagaagguggucauggagugaaaggcugggccuuugaugauggaaaugacguguggaugggaagaacgaucagcgagaagucacgcuuaggguaugaaaccuucaaagucauugaaggcugguccaacccuaaguccaaauugcagauaaauaggcaagucauaguugacagagauaauagguccgguuauucugguauuuucucuguugaaggcaaaagcugcaucaaucggugcuuuuauguggaguugauaaggggaagaaaagaggaaacugaagucuuguggaccucaaacaguauuguuguguuuuguggcaccucagguacauauggaacaggcucauggccugauggggcggacaucaaucucaugccuauauaa

SEQ ID NO: 52924 - RNA, 1410 nt, Artificial Sequence
  derived and/or modified CDS sequence (wt) from neuraminidase__InfluenzaA__AEK98407
augaauccaaaucaaaagauaauaacgauuggcucuguuucucucaccauuuccacaauaugcuucuucaugcaaauugccaucuugauaacuacaguaacauugcauuucaagcaauaugaauucaacucccccccaaacaaccaagugauguugugugaaccaacaauaauagaaagaaacauaacagagauaguguaucugaccaacaccaccauagagaaggaaauaugccccaaacuagcagaauacagaaauuggucaaagccgcaaugugacauuacaggauuugcaccuuuuucuaaggacaauucgauuaggcuuuccgcugguggggacaucugggugacaagagaaccuuaugugucaugcgauccugacaaguguuaucaauuugcccuuggacagggaacaacacuaaacaacgugcauucaaauaacacaguacguguuaggaccccuuaucggacccuauugaugaaugaguuagguguuccuuuucaucuggggaccaagcaagugugcauagcaugguccagcucaaguugucacgauggaaaagcauggcugcauguuuguauaacgggggaugauaaaaaugcaacugcuagcuucauuuacaaugggaggcuuguagauaguauuguuucaugguccaaagaaauccucaggacccaggagucagaaugcguuuguaucaauggaacuuguacaguaguaaugacugaugggagugcuucaggaaaagcugauacuaaaauacuauucauugaggaggggaaaaucguucauacuagcacauugucaggaagugcucagcaugucgaggagugcuccugcuauccucgauauccuggugucagaugugucugcagagacaacuggaaaggcuccaauaggcccaucguagauauaaacauaaaggaucauagcauuguuuccaguuauguguguucaggacuuguuggagacacacccagaaaaaacgacagcuccagcaguagccauuguuuggauccuaacaaugaagaagguggucauggagugaaaggcugggccuuugaugauggaaaugacguguggaugggaagaacgaucagcgagaagucacgcuuaggguaugaaaccuucaaagucauugaaggcugguccaacccuaaguccaaauugcagauaaauaggcaagucauaguugacagagauaauagguccgguuauucugguauuuucucuguugaaggcaaaagcugcaucaaucggugcuuuuauguggaguugauaaggggaagaaaagaggaaacugaagucuuguggaccucaaacaguauuguuguguuuuguggcaccucagguacauauggaacaggcucauggccugauggggcggacaucaaucucaugccuauauaa

SEQ ID NO: 52925 - RNA, 1410 nt, Artificial Sequence; identical to SEQ ID NO: 48467
  derived and/or modified CDS sequence (wt) from neuraminidase__InfluenzaA__AEL11690

SEQ ID NO: 52926 - RNA, 1410 nt, Artificial Sequence; identical to SEQ ID NO: 52844
  derived and/or modified CDS sequence (wt) from neuraminidase__InfluenzaA__AEL89300

SEQ ID NO: 52927 - RNA, 1410 nt, Artificial Sequence
  derived and/or modified CDS sequence (wt) from neuraminidase__InfluenzaA__AEL89310
augaauccaaaccaaaagauaauaaccauugguucggucuguaugacaauuggaauggcuaacuuaauauuacaaauugggaacauaaucucaauauggauuagccacucaauucaacuugggaauaaaaaucagauugaaacaugcaaucaaagcgucauuacuuaugaaaacaacacuuggguaaaucagacauauguuaacaucagcaacaccaacuuugcugcuggacagucagugguuuccgugaaauuagcgggcaauuccucucucugcccuguuaguggaugggcuauauacaguaaagacaacaguauaagaaucgguuccaagggggauguguuugucauaagggaaccauucauaucaugcuccccccuggaaugcagaaccuucuucuugacucaaggggccuugcuaaaugacaaacauuccaauggaaccauuaaagacaggagcccauaucgaacccuaaugagcuguccuauuggugaaguucccucuccauacaacucaagauuugagucagucgcuuggucagcaagugcuugucaugauggcaucaauuggcuaacaauuggaauuucuggcccagacaauggggcgguggcuguguuaaaguacaacggcauaauaacagacacuaucaagaguuggagaaacaauauauugagaacacaagagucugaaugugcauguguaaaugguucuugcuuuacuguaaugaccgauggaccaagugauggacaggccucauacaagaucuucaggauagaaaagggaaagauagucaaaucagucgaaaugaaugccccuaauuaucacuaugaggaaugcuccuguuauccugauucuagugaaaucacaugugugugcagggauaacuggcauggcucgaaucgaccgugggugucuuucaaccagaaucuggaauaucagauaggauacauaugcagugggauuuucggagacaauccacgcccuaaugauaagaaaggcaguugugguccaguaucgucuaauggagcaaacggaguaaaaggauuuucauucaaauacggcaaugguguuuggauagggagaacuaaaagcauuaguucaagaaacgguuuugagaugauuugggauccgaacggauggacugggacagacaauaacuucucaauaaagcaagauaucguaggaauaaaugaauggucaggauauagcgggaguuuuguucagcauccagaacuaacagggcuggauuguauaagaccuugcuucuggguugaacuaaucagagggcgacccaaagagaacacaaucuggacuagcgggagcagcauauccuuuugugguguaaacagugacacuguggguuggucuuggccagacggugcugaguugccauuuaccauugacaaguaa

SEQ ID NO: 52928 - RNA, 1410 nt, Artificial Sequence; identical to SEQ ID NO: 52844
  derived and/or modified CDS sequence (wt) from neuraminidase__InfluenzaA__AEL89320

SEQ ID NO: 52929 - RNA, 1410 nt, Artificial Sequence; identical to SEQ ID NO: 52844
  derived and/or modified CDS sequence (wt) from neuraminidase__InfluenzaA__AEL89330

SEQ ID NO: 52930 - RNA, 1410 nt, Artificial Sequence; identical to SEQ ID NO: 52844
  derived and/or modified CDS sequence (wt) from neuraminidase__InfluenzaA__AEL89340

SEQ ID NO: 52931 - RNA, 1410 nt, Artificial Sequence; identical to SEQ ID NO: 52844
  derived and/or modified CDS sequence (wt) from neuraminidase__InfluenzaA__AEL89350

SEQ ID NO: 52932 - RNA, 1410 nt, Artificial Sequence; identical to SEQ ID NO: 52844
  derived and/or modified CDS sequence (wt) from neuraminidase__InfluenzaA__AEL89360

SEQ ID NO: 52933 - RNA, 1410 nt, Artificial Sequence; identical to SEQ ID NO: 52844
  derived and/or modified CDS sequence (wt) from neuraminidase__InfluenzaA__AEL89370

SEQ ID NO: 52934 - RNA, 1410 nt, Artificial Sequence; identical to SEQ ID NO: 52844
  derived and/or modified CDS sequence (wt) from neuraminidase__InfluenzaA__AEL89394

SEQ ID NO: 52935 - RNA, 1410 nt, Artificial Sequence; identical to SEQ ID NO: 52844
  derived and/or modified CDS sequence (wt) from neuraminidase__InfluenzaA__AEL89404

SEQ ID NO: 52936 - RNA, 1410 nt, Artificial Sequence; identical to SEQ ID NO: 52844
  derived and/or modified CDS sequence (wt) from neuraminidase__InfluenzaA__AEL89414

SEQ ID NO: 52937 - RNA, 1410 nt, Artificial Sequence; identical to SEQ ID NO: 52844
  derived and/or modified CDS sequence (wt) from neuraminidase__InfluenzaA__AEL89424

SEQ ID NO: 52938 - RNA, 1410 nt, Artificial Sequence; identical to SEQ ID NO: 52844
  derived and/or modified CDS sequence (wt) from neuraminidase__InfluenzaA__AEL89434

SEQ ID NO: 52939 - RNA, 1410 nt, Artificial Sequence; identical to SEQ ID NO: 52844
  derived and/or modified CDS sequence (wt) from neuraminidase__InfluenzaA__AEL89444

SEQ ID NO: 52940 - RNA, 1410 nt, Artificial Sequence; identical to SEQ ID NO: 52844
  derived and/or modified CDS sequence (wt) from neuraminidase__InfluenzaA__AEL89454

SEQ ID NO: 52941 - RNA, 1410 nt, Artificial Sequence
  derived and/or modified CDS sequence (wt) from neuraminidase__InfluenzaA__AEL89464
augaauccaaaccaaaagauaauaaccauugguucggucuguaugacaauuggaauggcuaacuuaauauuacaaauugggaacauaaucucaauauggauuagccacucaauucaacuugggaauaaaaaucagauugaaacaugcaaucaaagcgucauuacuuaugaaaacaacacuuggguaaaucagacauauguuaacaucagcaacaccaacuuugcugcuggacagucagugguuuccgugaaauuagcgggcaauuccucucucugcccuguuaguggaugggcuauauacaguaaagacaacaguauaagaaucgguuccaagggggauguguuugucauaagggaaccauucauaucaugcuccccccuggaaugcagaaccuucuucuugacucaaggggccuugcuaaaugacaaacauuccaauggaaccauuaaagacaggagcccauaucgaacccuaaugagcuguccuauuggugaaguucccucuccauacaacucaagauuugagucagucgcuuggucagcaagugcuugucaugauggcaucaauuggcuaacaauuggaauuucuggcccagacaauggggcaguggcuguguuaaaguacaauggcauaauaacagacacuaucaagaguuggagaaacaauauauugagaacacaagagucugaaugugcauguguaaaugguucuugcuuuacuguaaugaccgauggaccaagugauggacaggccucauacaagaucuucaggauagaaaagggaaagauagucaaaucagucgaaaugaaugccccuaauuaucacuaugaggaaugcuccuguuauccugauucuagugaaaucacaugugugugcagggauaacuggcauggcucgaaucgaccgugggugucuuucaaccagaaucuggaauaucagauaggauacauaugcagugggauuuucggagacaauccacgcccuaaugauaagaaaggcaguugugguccaguaucgucuaauggagcaaacggaguaaaaggauuuucauucaaauacggcaaugguguuuggauagggagaacuaaaagcauuaguucaagaaacgguuuugagaugauuugggauccgaacggauggacugggacagacaauaacuucucaauaaagcaagauaucguaggaauaaaugaauggucaggauauagcgggaguuuuguucagcauccagaacuaacagggcuggauuguauaagaccuugcuucuggguugaacuaaucagagggcgacccaaagagaacacaaucuggacuagugggagcagcauauccuuuugugguguaaacagugacacuguggguuggucuuggccagacggugcugaguugccauuuaccauugacaaguaa

SEQ ID NO: 52942 - RNA, 1410 nt, Artificial Sequence; identical to SEQ ID NO: 52844
  derived and/or modified CDS sequence (wt) from neuraminidase__InfluenzaA__AEL89474

SEQ ID NO: 52943 - RNA, 1410 nt, Artificial Sequence
  derived and/or modified CDS sequence (wt) from neuraminidase__InfluenzaA__AEL89484
augaauccaaaccagaagauaauaaccauugguucggucuguaugacaauuggaauggcuaacuuaauguuacaaauuggaaacauaaucucaauauggauuagccacucaauucaacuugggaaucaaaaucagauugaaacaugcaaucaaagcgucauuacuuaugaaaacaacacuuggguaaaucagacauauguuaacaucagcaacaccaacuuugcugcuggacagucagugguuuccgugaaauuagcgggcaauuccucucucugcccuguuaguggaugggcuauauacaguaaagacaacaguauaagaaucgguuccaagggggauguguuugucauaagggaaccauucauaucaugcucccccuuggaaugcagaaccuucuucuugacucaaggggccuugcuaaaugacaaacauuccaauggaaccauuaaagacaggagcccauaucgaacccuaaugagcuguccuauuggugaaguucccucuccauacaacucaagauuugagucagucgcuuggucagcaagugcuugucaugauggcaucaauuggcuaacaauuggaauuucuggcccagacaauggggcaguggcuguguuaaaguacaacggcauaauaacagacacuaucaagaguuggagaaacaauauauugagaacacaagagucugaaugugcauguguaaaugguucuugcuuuacuguaaugaccgauggaccaagugauggacaggccucauacaagaucuucagaauagaaaagggaaagauagucaaaucagucgaaauaaaugccccuaauuaucacuaugaggaaugcuccuguuauccugauucuagugaaaucacaugugugugcagggauaacuggcauggcucgaaucgaccgugggugucuuucaaccagaaucuggaauaucagauaggauacauaugcagugggauuuucggagacaauccacgcccuaaugauaagacaggcaguugugguccaguaucgucuaauggagcaaauggaguaaaaggauuuucauucaaauacggcaaugguguuuggauagggagaacuaaaagcauuaguucaagaaacgguuuugagaugauuugggauccgaauggauggacugggacagacaauaacuucucaauaaagcaagauaucguaggaauaaaugaguggucaggauauagcgggaguuuuguucagcauccagaacuaacagggcuggauuguauaagaccuugcuucuggguugaacuaaucagggggcgacccaaagagaacacaaucuggacuagcgggagcagcauauccuuuugugguguaaacagugacacuguggguuggucuuggccagacggugcugaguugccauuuaccauugacaaguaa

SEQ ID NO: 52944 - RNA, 1410 nt, Artificial Sequence; identical to SEQ ID NO: 52814
  derived and/or modified CDS sequence (wt) from neuraminidase__InfluenzaA__AEL89494

SEQ ID NO: 52945 - RNA, 1410 nt, Artificial Sequence
  derived and/or modified CDS sequence (wt) from neuraminidase__InfluenzaA__AEL89514
augaauccaaaccaaaagauaauaaccauugguucggucuguaugacaauuggaauggcuaacuuaauauuacaaauuggaaacauaaucucaauauggauuagccacucaauucaacuugggaaucaaaaucagauugaaacaugcaaucaaagcgucauuacuuaugaaaacaacacuuggguaaaucagacauauguuaacaucagcaacaccaacuuugcugcuggacagucagugguuuccgugaaauuagcgggcaauuccucucucugcccuguuaguggaugggcuauauacaguaaagacaacaguauaagaaucgguuccaagggggauguguuugucauaagggaaccauucauaucaugcucccccuuggaaugcagaaccuucuucuugacucaaggggccuugcuaaaugacaaacauuccaauggaaccauuaaagacaggagcccauaucgaacccuaaugagcuguccuauuggugaaguucccucuccauacaacucaagauuugagucagucgcuuggucagcaagugcuugucaugauggcaucaauuggcuaacaauuggaauuucuggcccagacaauggggcaguggcuguguuaaaguacaacggcauaauaacagacacuaucaagaguuggagaaacaauauauugagaacacaagagucugaaugugcauguguaaaugguucuugcuuuacuguaaugaccgauggaccaagugauggacaggccucauacaagaucuucagaauagaaaagggaaagauagucaaaucagucgaaaugaaugccccuaauuaucacuaugaagaaugcuccuguuauccugauucuagugaaaucacaugugugugcagggauaacuggcauggcucgaaucgaccgugggugucuuucaaccagaaucuggaauaucagauaggauacauaugcagugggauuuucggagacaauccacgcccuaaugauaagacaggcaguugugguccaguaucgucuaauggagcaaauggaguaaaaggauuuucauucaaauacggcaaugguguuuggauagggagaacuaaaagcauuaguucaagaaacgguuuugagaugauuugggauccgaacggauggacugggacagacaauaacuucucaauaaagcaagauaucguaggaauaaaagaguggucaggauauagcgggaguuuuguucagcauccagaacuaacagggcuggauuguauaagaccuugcuucuggguugaacuaaucagagggcgacccaaagagaacacaaucuggacuagcgggagcagcauauccuuuugugguguaaacagugacacuguggguuggucuuggccagacggugcugaguugccauuuaccauugacaaguaa

SEQ ID NO: 52946 - RNA, 1410 nt, Artificial Sequence; identical to SEQ ID NO: 52819
  derived and/or modified CDS sequence (wt) from neuraminidase__InfluenzaA__AEL89524

SEQ ID NO: 52947 - RNA, 1410 nt, Artificial Sequence
  derived and/or modified CDS sequence (wt) from neuraminidase__InfluenzaA__AEL89534
augaauccaaaccaaaagauaauaaccauugguucggucuguaugacaauuggaauggcuaacuuaauauuacaaauuggaaacauuaucucaauauggauuagccacucaauucaacuugggaaucaaaaucagauuggaacaugcaaucaaagcgucauuacuuaugaaaacaacacuuggguaaaucagacauauguuaacaucagcaacaccaacuuugcugcuggacagucagugguuuccgugaaauuagcgggcaauuccucccucugcccuguuaguggaugggcuauauacaguaaagacaacaguauaagaaucgguuccaagggggauguguuugucauaagggaaccauucauaucaugcucccccuuggaaugcagaaccuucuucuugacucaaggggccuugcuaaaugacaaacauuccaauggaaccauuaaagacaggagcccauaucgaacccuaaugagcuguccuauuggugaaguucccucuccauacaacucaagauuugagucagucgcuuggucagcaagugcuugucaugauggcaucaauuggcuaacaauuggaauuucuggcccagacaauggggcaguggcuguguuaaaguacaacggcauaauaacagacacuaucaagaguuggagaaacaauauauugagaacacaagagucugaaugugcauguguaaaugguucuugcuuuacuguaaugaccgauggaccaagugauggacaggccucauacaagaucuucagaauagaaaagggaaagauagucaaaucagucgaaauaaaugccccuaauuaucacuaugaggaaugcuccuguuauccugauucuagugaaaucacaugugugugcagggauaacuggcauggcucgaaucgaccgugggugucuuucaaccagaaucuggaauaucagauaggauacauaugcagugggauuuucggagacaauccacgcccuaaugauaagacaggcaguugugguccaguaucgucuaauggagcaaauggaguaaaaggauuuucauucaaauacggcaaugguguuuggauagggagaacuaaaagcauuaguucaagaaacgguuuugagaugauuugggauccgaacggauggacugggacagacaauaacuucucaaaaaagcaagauaucguaggaauaaaugaguggucaggauauagcgggaguuuuguucagcauccagaacuaacagggcuggauuguauaagaccuugcuucuggguugaacuaaucagagggcgacccaaagagaacacaaucuggacuagcgggagcagcauauccuuuugugguguaaacagugacacuguggguuggucuuggccagacggugcugaguugccauuuaccauugacaaguaa

SEQ ID NO: 52948 - RNA, 1410 nt, Artificial Sequence
  derived and/or modified CDS sequence (wt) from neuraminidase__InfluenzaA__AEL89544
augaauccaaaccaaaagauaauaaccauugguucggucuguaugacaauuggaauggcuaacuuaauauuacaaauuggaaacauaaucucaauauggauuagccacucaauucaacuugggaaucaaaaucagauugaaacaugcaaucaaagcgucauuacuuaugaaaacaacacuuggguaaaucagacauauguuaacaucagcaacaccaacuuugcugcuggacagucagugguuuccgugaaauuagcgggcaauuccucucucugcccuguuaguggaugggcuauauacaguaaagacaacaguauaagaaucgguuccaagggggauguguuugucauaagggaaccauucauaucaugcucccccuuggaaugcagaaccuucuucuugacucaaggggccuugcuaaaugacaaacauuccaauggaaccauuaaagacaggagcccauaucgaacccuaaugagcuguccuauuggugaaguucccucuccauacaacucaagauuugagucagucgcuuggucagcaagugcuugucaugauggcaucaauuggcuaacaauuggaauuucuggcccagacaauggggcaguggcuguguuaaaguacaacggcauaauaacagacacuaucaagaguuggagaaacaauauauugagaacacaagagucugaaugugcauguguaaaugguucuugcuuuacuguaaugaccgauggaccaagugauggacaggccucauacaagaucuucagaauagaaaagggaaagauagucaaaucagucgaaaugaaugccccuaauuaucacuaugaggaaugcuccuguuauccugauucuagugaaaucacaugugugugcagggauaacuggcauggcucgaaucgaccgugggugucuuucaaccagaaucuggaauaucagauaggauacauaugcagugggauuuucggagacaauccacgcccuaaugauaagacaggcaguugugguccaguaucgucuaauggagcaaauggaguaaaaggauuuucauucaaauacggcaaugguguuuggauagggagaacuaaaagcauuaguucaagaaacgguuuugagaugauuugggauccgaacggauggacugggacagacaauaacuuuucaauaaagcaagauaucguaggaauaaaagaguggucaggauauagcgggaguuuuguucagcauccagaacuaacagggcuggauuguauaagaccuugcuucuggguugaacuaaucagagggcgacccaaagagaacacaaucuggacuagcgggagcagcauauccuuuugugguguaaacagugacacuguggguuggucuuggccagacggugcugaguugccauuuaccauugacaaguaa

SEQ ID NO: 52949 - RNA, 1410 nt, Artificial Sequence
  derived and/or modified CDS sequence (wt) from neuraminidase__InfluenzaA__AEL89554
augaauccaaaucaaaagauaauaaccauugguucggucuguaugacaauuggaauggcuaacuuaauauuacaaauuggaaacauaaucucaauauggauuagccacucaauucaacuugggaaucaaaaucagauugaaacaugcaaucaaagcgucauuacuuaugaaaacaacacuuggguaaaucagacauauguuaacaucagcaacaccaacuuugcugcuggacagucagugguuuccgugaaauuagcgggcaauuccucucucugcccuguuaguggaugggcuauauacaguaaagacaacaguauaagaaucgguuccaagggggauguguuugucauaagggaaccauucauaucaugcucccccuuggaaugcagaaccuucuuuuugacucaaggggccuugcuaaaugacaaacauuccaauggaaccauuaaagacaggagcccauaucgaacccuaaugagcuguccuauuggugaaguucccucuccauacaacucaagauuugagucagucgcuuggucagcaagugcuugucaugauggcaucaauuggcuaacaauuggaauuucuggcccagacaauggggcaguggcuguguuaaaguacaacggcauaauaacagacacuaucaagaguuggagaaacaauauauugagaacacaagagucugaaugugcauguguaaaugguucuugcuuuacuguaaugaccgauggaccaagugauggacaggccucauacaagaucuucagaauagaaaagggaaagauagucaaaucagucgaaaugaaugccccuaauuaucacuaugaggaaugcuccuguuauccugauucuagugaaaucacaugugugugcagggauaacuggcauggcucgaaucgaccgugggugucuuucaaccagaaucuggaauaucagauaggauacauaugcagugggauuuucggagacaauccacgcccuaaugauaagacaggcaguugugguccaguaucgucuaauggagcaaauggaguaaaaggauuuucauucaaauacggcaaugguguuuggauagggagaacuaaaagcauuaguucaagaaacgguuuugagaugauuugggauccgaacggauggacugggacagacaauaacuucucaauaaagcaagauaucguaggaauaaaagaguggucaggauauagcgggaguuuuguucagcauccagaacuaacagggcuggauuguauaagaccuugcuucuggguugaacuaaucagagggcgacccaaagagaacacaaucuggacuagcgggagcagcauauccuuuugugguguaaacagugacacuguggguuggucuuggccagacggugcugaguugccauuuaccauugacaaguaa

SEQ ID NO: 52950 - RNA, 1410 nt, Artificial Sequence
  derived and/or modified CDS sequence (wt) from neuraminidase__InfluenzaA__AEL89564
augaauccaaaccaaaagauaauaaccauugguucggucuguauaacaauuggaauggcuaacuuaauauuacaaauuggaaacauaaucucaauauggauuagccacucaauucaacuugggaaucaaaaucagauugaaacaugcaaucaaagcgucguuacuuaugaaaacaacacuuggguaaaucagacauauguuaacaucagcaacaccaacuuugcugcuggacagucagugguuuccgugaaauuagcgggcaauuccucucucugcccuguuaguggaugggcuauauacaguaaagacaacaguauaagaaucgguuccaagggggauguguuugucauaagggaaccauucauaucaugcucccccuuggaaugcagaaccuucuucuugacucaaggggccuugcuaaaugacaaacauuccaauggaaccauuaaagacaggagcccauaucgaacccuaaugagcuguccuauuggugaaguucccucuccauacaacucaagauuugagucagucgcuuggucagcaagugcuugucaugauggcaucaguuggcugacaauuggaauuucuggcccagacaauggggcaguggcuguguuaaaguacaacggcauaauaacagacacuaucaagaguuggagaaacaauauauugagaacacaagagucugaaugugcauguguaaaugguucuuguuuuacuguaaugaccgauggaccaagugauggacaggccucauacaagaucuucagaauagaaaagggaaagauagucaaaucagucgaaaugaaugccccuaauuaucacuaugaggaaugcuccuguuauccugauucuagugaaaucacaugugugugcagggauaacuggcauggcucgaaucgaccgugggugucuuucaaccagaaucuggaauaucagauaggauacauaugcagugggauuuucggagacaauccacgcccuaaugauaagacaggcaguugugguccaguaucgucuaauggagcaaauggaguaaaaggauuuucauucaaauacggcaaugguguuuggauagggagaacuaaaagcauuaguucaagaaacgguuuugagaugauuugggauccgaacggauggacugggacagacaauaacuucucaauaaagcaagauaucguaggaauaaaugaguggucaggauauagcgggaguuuuguucagcauccagaacuaacagggcuggauuguauaagaccuugcuucuggguugaacuaaucagagggcgacccaaagagaacacaaucuggacuagcgggagcagcauauccuuuugugguguaaacagugacacuguggguuggucuuggccagacggugcugaguugccauuuaccauugacaaguaa

SEQ ID NO: 52951 - RNA, 1410 nt, Artificial Sequence; identical to SEQ ID NO: 52820
  derived and/or modified CDS sequence (wt) from neuraminidase__InfluenzaA__AEL89574

SEQ ID NO: 52952 - RNA, 1410 nt, Artificial Sequence; identical to SEQ ID NO: 52820
  derived and/or modified CDS sequence (wt) from neuraminidase__InfluenzaA__AEL89584

SEQ ID NO: 52953 - RNA, 1410 nt, Artificial Sequence
  derived and/or modified CDS sequence (wt) from neuraminidase__InfluenzaA__AEL89604
augaauccaaaccaaaagauaauaaccauugguucggucuguaugacaauuggaauggcuaacuuaauauuacaaauuggaaacauaaucucaauauggauuagccacucaauucaacuugggaaucaaaaucagauugaaacaugcaaucaaagcgucauuacuuaugaaaacaacacuuggguaaaucagacauauguuaacaucagcaacaccaacuuugcugcuggacagucagugguuuccgugaaauuagcgggcaauuccucucucugcccuguuaguggaugggcuauauacaguaaagacaacaguauaagaaucgguuccaagggggauguguuugucauaagggaaccauucauaucaugcucccccuuggaaugcagaaccuucuucuugacucaaggggccuugcuaaaugacaaacauuccaauggaaccauuaaagacaggagcccauaucgaacccuaaugagcuguccuauuggugaaguucccucuccauacaacucaagauuugagucagucgcuuggucagcaagugcuugucaugauggcaucaauuggcuaacaauuggaauuucuggcccagacaauggggcaguggcuguguuaaaguacaacggcauaauaacagacacuaucaagaguuggagaaacaauauauugagaacacaagagucugaaugugcauguguaaaugguucuugcuuuacuguaaugaccgauggaccaagugauggacaggccucauacaagaucuucagaauagaaaagggaaagauagucaaaucagucgaaaugaaugccccuaauuaccacuaugaggaaugcuccuguuauccugauucuagugaaaucacaugugugugcagggauaacuggcauggcucgaaucgaccgugggugucuuucaaccagaaucuggaauaucagauaggauacauaugcagugggauuuucggagacaauccacgcccuaaugauaagacaggcaguugugguccaguaucgucuaauggagcaaauggaguaaaaggauuuucauucaaauacggcaaugguguuuggauagggagaacuaaaagcauuaguucaagaaacgguuuugagaugauuugggauccgaacggauggacugggacagacaauaacuucucaauaaagcaagauaucauaggaauaaaugaguggucaggauauagcgggaguuuuguucagcauccagaacuaacagggcuggauuguauaagaccuugcuucuggguugaacuaaucagagggcgacccaaagagaacacaaucuggacuagcgggagcagcauauccuuuugugguguaaacagugacacuguggguuggucuuggccagacggugcugaguugccauuuaccauugacaaguaa

SEQ ID NO: 52954 - RNA, 1410 nt, Artificial Sequence; identical to SEQ ID NO: 52602
  derived and/or modified CDS sequence (wt) from neuraminidase__InfluenzaA__AEL89624

SEQ ID NO: 52955 - RNA, 1410 nt, Artificial Sequence
  derived and/or modified CDS sequence (wt) from neuraminidase__InfluenzaA__AEL89634
augaauccaaaccaaaagauaauaaccauugguucggucuguauaacaauuggaauggcuaacuuaauauuacaaauuggaaacauaaucucaauauggauuagccacucaauucaacuugggaaucaaaaucagauugaaacaugcaaucaaagcgucauuacuuaugaaaacaacacuuggguaaaucagacauauguuaacaucagcaacaccaacuuugcugcuggacagucagugguuuccgugaaauuagcgggcaauuccucucucugcccuguuaguggaugggcuauauacaguaaagacaacaguauaagaaucgguuccaagggggauguguuugucauaagagaaccauucauaucaugcucccccuuggaaugcagaaccuucuucuugacucaaggggccuugcuaaaugacaaacauuccaauggaaccauuaaagacaggagcccauaucgaacccuaaugagcuguccuauuggugaaguucccucuccauacaacucaagauuugagucagucgcuuggucagcaagugcuugucaugauggcaucaguuggcuaacaauuggaauuucuggcccagacaauggggcaguggcuguguuaaaguacaacggcauaauaacagacacuaucaagaguuggagaaacaauauauugagaacacaagagucugaaugugcauguguaaaugguucuuguuuuacuguaaugaccgauggaccaagugauggacaggccucauacaagaucuucagaauagaaaagggaaagauagucaaaucagucgaaaugaaugccccuaauuaucacuaugaggaaugcuccuguuauccugauucuagugaaaucacaugugugugcagggauaacuggcauggcucgaaucgaccgugggugucuuucaaccagaaucuggaauaucagauaggauacauaugcagugggauuuucggagacaauccacgcccuaaugauaagacaggcaguugugguccaguaucgucuaauggagcaaauggaguaaaaggauuuucauacaaauacggcaaugguguuuggauagggagaacuaaaagcauuaguucaagaaacgguuuugagaugauuugggauccgaacggauggacugggacagacaauaacuucucaauaaagcaagauaucguaggaauaaaugaguggucaggauauagcgggaguuuuguucagcauccagaacuaacagggcuggauuguauaagaccuugcuucuggguugaacuaaucagagggcgacccaaagagaacacaaucuggacuagcgggagcagcauauccuuuugugguguaaacagugacacuguggguuggucuuggccagacggugcugaguugccauuuaccauugacaaguaa

SEQ ID NO: 52956 - RNA, 1410 nt, Artificial Sequence
  derived and/or modified CDS sequence (wt) from neuraminidase__InfluenzaA__AEL89644
augaauccaaaccaaaagauaauaaccauugguucggucuguaugacaauuggaauggcuaacuuaauauuacaaauugggaacauaaucucaauauggauuagccacucaauucaacuugggaauaaaaaucagauugaaacaugcaaucaaagcgucauuacuuaugaaaacaacacuuggguaaaucagacauauguuaacaucagcaacaccaacuuugcugcuggacagucagugguuuccgugaaauuagcgggcaauuccucucucugcccuguuaguggaugggcuauauacaguaaagacaacaguauaagaaucgguuccaagggggauguguuugucauaagggaaccauucauaucaugcuccccccuggaaugcagaaccuucuucuugacucaaggggccuugcuaaaugacaaacauuccaauggaaccauuaaagacaggagcccauaucgaacccuaaugagcuguccuauuggugaaguucccucuccauacaacucaagauuugagucagucgcuuggucagcaagugcuugucaugauggcaucaauuggcuaacaauuggaauuucuggcccagacaauggggcaguggcuguguuaaaguacaacggcauaauaacagacacuaucaagaguuggagaaacaauauauugagaacacaagagucugaaugugcauguguaaaugguucuugcuuuacuguaaugaccgauggaccaagugauggacaggccucauacaagaucuucaggauagaaaagggaaagauagucaaaucagucgaaaugaaugccccuaauuaucacuaugaggaaugcuccuguuauccugauucuagugaaaucacaugugugugcagggauaacuggcauggcucgaaucgaccgugggugucuuucaaccagaaucuggaauaucagauaggauacauaugcagugggauuuucggagacaauccacgcccuaaugauaagaaaggcaguugugguccaguaucgucuaauggagcaaauggaguaaaaggauuuucauucaaauacggcaaugguguuuggauagggagaacuaaaagcauuaguucaagaaacgguuuugagaugauuugggauccgaacggauggacugggacagacaauaacuucucaauaaagcaagauaucguaggaauaaaugaauggucaggauauagcgggaguuuuguucagcauccagaacuaacagggcuggauuguauaagaccuugcuucuggguugaacuaaucagagggcgacccaaagagaacacaaucuggacuagcgggagcagcauauccuuuugugguguaaacagugacacuguggguuggucuuggccagacggugcugaguugccauuuaccauugacaaguaa

SEQ ID NO: 52957 - RNA, 1410 nt, Artificial Sequence
  derived and/or modified CDS sequence (wt) from neuraminidase__InfluenzaA__AEL89654
augaauccaaaccaaaagauaauaaccauugguucggucuguaugacaauuggaauggcuaacuuaauauuacaaauuggaaacauaaucucaauauggauuagccacucaauucaacuugggaaucaaaaucagauugaaacaugcaaucaaagcgucauuacuuaugaaaacaacacuuggguaaaucagacauauguuaacaucagcaacaccaacuuugcugcuggacagucagugguuuccgugaaauuagcgggcaauuccucucucugcccuguuaguggaugggcuauauacaguaaagacaacaguauaagaaucgguuccaagggggauguguuugucauaagggaaccauucauaucaugcucccccuuggaaugcagaaccuucuucuugacucaaggggccuugcuaaaugacaaacauuccaauggaaccauuaaagacaggagcccauaucgaacccuaaugagcuguccuauuggugaaguucccucuccauacaacucaagauuugagucagucgcuuggucagcaagugcuugucaugauggcaucaauuggcuaacaauuggaauuucuggcccagacaauggggcaguggcuguguuaaaguacaacggcauaauaacagacacuaucaagaguuggagaaacaauauauugagaacacaagagucugaaugugcauguguaaaugguucuugcuuuaccauaaugaccgauggaccaagugauggacaggccucauacaagaucuucagaauagaaaagggaaagauagucaaaucagucgaaaugaaugccccuaauuaucacuaugaggaaugcuccuguuauccugauucuagugaaaucacaugugugugcagggauaacuggcauggcucgaaucgaccgugggugucuuucaaccagaaucuggaauaucagauaggauacauaugcagugggauuuucggagacaauccacgcccuaaugauaagacaggcaguugugguccaguaucgucuaauggagcaaauggaguaaaaggauuuucauucaaauacggcaaugguguuuggauagggagaacuaaaagcauuaguucaagaaaagguuuugagaugauuugggauccaaacggauggacugggacagacaauaacuucucaauaaagcaagacaucguaggaauaaaugaguggucaggauauagcgggaguuuuguucagcauccagaacuaacagggcuggauuguauaagaccuugcuucuggguugaacuaaucagagggcgacccaaagagaacacaaucuggacuagcgggagcagcauauccuuuugugguguaaacagugacacuguggguuggucuuggccagacggugcugaguugccauuuaccauugacaaguaa

SEQ ID NO: 52958 - RNA, 1410 nt, Artificial Sequence
  derived and/or modified CDS sequence (wt) from neuraminidase__InfluenzaA__AEL89664
augaauccaaaccaaaagauaauaaccauugguucggucuguaugacaauuggaauggcuaacuuaauauuacaaauuggaaacauaaucucaauauggauuagccacucaauucaacuugggaaucaaagucagauugaaacaugcaaucaaagcgucauuacuuaugaaaacaacacuuggguaaaucagacauauguuaacaucagcaacaccaacuuugcugcuggacagucagugguuuccgugaaauuagcgggcaauuccucucucugcccuguuaguggaugggcuauauacaguaaagacaacaguauaagaaucgguuccaagggggauguguuugucauaagggaaccauucauaucaugcucccccuuggaaugcagaaccuucuucuugacucaaggggccuugcuaaaugacaaacauuccaauggaaccauuaaagacaggagcccauaucgaacccuaaugagcuguccuauuggugaaguucccucuccauacaacucaagauuugagucagucgcuuggucagcaagugcuugucaugauggcaucaauuggcuaacaauuggaauuucuggcccagacaauggggcaguggcuguguuaaaguacaacggcauaauaacagacacuaucaagaguuggagaaacaauauauugagaacacaagagucugaaugugcauguguaaaugguucuugcuuuaccauaaugaccgauggaccaagugauggacaggccucauacaagaucuucagaauagaaaagggaaagauagucaaaucagucgaaaugaaugccccuaauuaucacuaugaggaaugcuccuguuauccugauucuagugaaaucacaugugugugcagggauaacuggcauggcucgaaucgaccgugggugucuuucaaccagaaucuggaauaucagauaggauacauaugcagugggauuuucggagacaauccacgcccuaaugauaagacaggcaguugugguccaguaucgucuaauggagcaaauggaguaaaaggauuuucauucaaauacggcaaugguguuuggauagggagaacuaaaagcauuaguucaagaaaagguuuugagaugauuugggauccaaacggauggacugggacagacaauaacuucucaauaaagcaagauaucguaggaauaaaugaguggucaggauauagcgggaguuuuguucagcauccagaacuaacagggcuggauuguauaagaccuugcuuuuggguugaacuaaucagagggcgacccaaagagaacacaaucuggacuagcgggagcagcauauccuuuugugguguaaacagugacacuguggguuggucuuggccagacggugcugaguugccauuuaccauugacaaguaa

SEQ ID NO: 52959 - RNA, 1410 nt, Artificial Sequence; identical to SEQ ID NO: 52602
  derived and/or modified CDS sequence (wt) from neuraminidase__InfluenzaA__AEL89674

SEQ ID NO: 52960 - RNA, 1410 nt, Artificial Sequence; identical to SEQ ID NO: 52602
  derived and/or modified CDS sequence (wt) from neuraminidase__InfluenzaA__AEL89694

SEQ ID NO: 52961 - RNA, 1410 nt, Artificial Sequence
  derived and/or modified CDS sequence (wt) from neuraminidase__InfluenzaA__AEL89704
augaauccaaaccaaaagauaauaaccauugguucggucuguaugacaauuggaauggccaacuuaauauuacaaauuggaaacauaaucuuaauauggauuagccacucaauucaacuugggaaucaaaaucagauugaaacaugcaaucaaagcgucauuacuuaugaaaacaacacuuggguaaaucagacauacguuaacaucagcaacaccaacuuugcugcuggacagucagugguuuccgugaaauuagcgggcaauuccucucucugcccuguuaguggaugggcuauauacaguaaagacaacaguauaagaaucgguuccaagggggauguguuugucauaagggaaccauucauaucauguucccccuuggaaugcaggaccuucuucuugacucaaggggccuugcuaaaugacaaacauuccaauggaaccauuaaagacaggagcccauaucgaacucuaaugagcuguccuauuggugaaguucccucuccauacaacucaagauuugaaucagucgcuuggucagcaagugcuugucaugauggcaucaauuggcuaacaauuggaauuucuggcccagacaauggggcaguggcuguguuaaaguacaacggcauaauaacagacacuaucaagaguuggagaaacaauauauugagaacacaagagucugaaugugcauguguaaaugguucuugcuuuacuguaaugaccgauggaccaaaugauggacaggccucauacaagaucuucagaauagaaaagggaaagauagucaaaucagucgaaaugaaugccccuaauuaucacuaugaggaaugcuccuguuauccugauucuagugaaaucacaugugugugcagggauaacuggcauggcucgaaucgaccgugggugucuuucaaccagaaucuggaauaucagauaggauacauaugcagugggauuuucggagacaauccacgcccuaaugauaagacaggcaguugugguccaguaucgucuaauggagcaaauggaguaaaaggauuuucauucaaauacggcaaugguguuuggauagggagaacuaaaagcauuaguucaagaaacgguuuugagaugauuugggauccgaacggauggacuggaacagacaauaacuucucaguaaagcaagauaucauaggaauaaaugaguggucaggauauagcgggaguuuuguucagcauccagaacuaacagggcuggauuguauaagaccuugcuucuggguugagcuaaucagagggcggcccaaagagaacacaaucuggacuagcgggagcagcauauccuuuugugguguaaacagugacacuguggguuggucuuggccagacggugcugaguugccauuuaccauugacaaguaa

SEQ ID NO: 52962 - RNA, 1410 nt, Artificial Sequence; identical to SEQ ID NO: 52961
  derived and/or modified CDS sequence (wt) from neuraminidase__InfluenzaA__AEL89714

SEQ ID NO: 52963 - RNA, 1410 nt, Artificial Sequence; identical to SEQ ID NO: 52602
  derived and/or modified CDS sequence (wt) from neuraminidase__InfluenzaA__AEL89744

SEQ ID NO: 52964 - RNA, 1410 nt, Artificial Sequence
  derived and/or modified CDS sequence (wt) from neuraminidase__InfluenzaA__AEL89754
augaauccaaaccaaaagauaauaaccauugguucggucuguauaacaauuggaauggcuaacuuaauauuacaaauuggaaacauaaucucaauauggauuagccacucaauucaacuugggaaucaaaaucagauugaaacaugcaaucaaagcgucauuacuuaugaaaacaacacuuggguaaaucagacauauguuaacaucagcaacaccaacuuugcugcuggacagucagugguuuccgugaaauuagcgggcaauuccucucucugcccuguuaguggaugggcuauauacaguaaagacaacaguauaagaaucgguuccaagggggauguguuugucauaagggaaccauucauaucaugcucccccuuggaaugcagaaccuucuucuugacucaaggggccuugcuaaaugacaaacauuccaauggaaccauuaaagacaggagcccauaucgaacccuaaugagcuguccuauuggugaaguucccucuccauacaacucaagauuugagucagucgcuuggucagcaagugcuugucaugauggcaucaguuggcuaacaauuggaauuucuggcccagacaauggggcaguggcuguguuaaaguacaacggcauaauaacagacacuaucaagaguuggagaaacaauauauugagaacacaagagucugaaugugcauguguaaaugguucuuguuuuacuguaaugaccgauggaccaagugauggacaggccucauacaagaucuucagaauagaaaagggaaagauagucaaaucagucgaaaugaaugccccuaauuaucacuaugaggaaugcuccuguuauccugauucuagugaaaucacaugugugugcagggauaacuggcauggcucgaaucgaccgugggugucuuucaaccagaaucuggaauaucagauaggauacauaugcagugggauuuucggagacaauccacgcccuaaugauaagacaggcaguugugguccaguaucgucuaauggagcaaauggaguaaaaggauuuucauucaaauacggcaaugguguuuggauagggagaacuaaaagcauuaguucaagaaacgguuuugagaugauuugggauccgaacggauggacugggacagacaauaacuucucaauaaagcaagauaucguaggaauaaaugaguggucaggauauagcgggaguuuuguucagcauccagagcuaacagggcuggauuguauaagaccuugcuucuggguugaacuaaucagagggcgacccaaagagaacacaaucuggacuagcgggagcagcauauccuuuugugguguaaacagugacacuguggguuggucuuggccagacggugcugaguugccauuuaucauugacaaguaa

SEQ ID NO: 52965 - RNA, 1410 nt, Artificial Sequence; identical to SEQ ID NO: 52927
  derived and/or modified CDS sequence (wt) from neuraminidase__InfluenzaA__AEL89774

SEQ ID NO: 52966 - RNA, 1410 nt, Artificial Sequence
  derived and/or modified CDS sequence (wt) from neuraminidase__InfluenzaA__AEL89784
augaauccaaaccaaaagauaauaaccauugguucggucuguaugacaauuggaauggccaacuuaauauuacaaauuggaaacauaaucucaauauggauuagccacucaauucaacuugggaaucaaaaucagauugaaacaugcaaucaaagcgucauuacuuaugaaaacaacacuuggguaaaucagacauacguuaacaucagcaacaccaacuuugcugcuggacagucagugguuuccgugaaauuagcgggcaauuccucucucugcccuguuaguggaugggcuauauacaguaaagacaacaguauaagaaucgguuccaagggggauguguuugucauaagggaaccauucauaucauguucccccuuggaaugcaggaccuucuucuugacucaaggggccuugcuaaaugacaaacauuccaauggaaccauuaaagacaggagcccauaucgaacucuaaugagcuguccuauuggugaaguucccucuccauacaacucaagauuugaaucagucgcuuggucagcaagugcuugucaugauggcaucaauuggcuaacaauuggaauuucuggcccagacaauggggcaguggcuguguuaaaguacaacggcauaauaacagacacuaucaagaguuggagaaacaauauauugagaacacaagagucugaaugugcauguguaaaugguucuugcuuuacuguaaugaccgauggaccaagugauggacaggccucauacaagaucuucagaauagaaaagggaaagauagucaaaucagucgaaaugaaugccccuaauuaucacuaugaggaaugcuccuguuauccugauucuagugaaaucacaugugugugcagggauaacuggcauggcucgaaucgaccgugggugucuuucaaccagaaucuggaauaucagauaggauacauaugcagugggauuuucggagacaauccacgcccuaaugauaagacaggcaguugugguccaguaucgucuaauggagcaaauggaguaaaaggauuuucauucaaauacggcaaugguguuuggauagggagaacuaaaagcauuaguuuaagaaacgguuuugagaugauuugggauccgaacggauggacuggaacagacaauaacuucucaguaaagcaagauaucauaggaauaaaugaguggucaggauauagcgggaguuuuguucagcauccagaacuaacagggcuggauuguauaagaccuugcuucuggguugagcuaaucagagggcggcccaaagagaacacaaucuggacuagcgggagcagcauauccuuuugugguguaaacagugacacuguggguuggucuuggccagacggugcugaguugccauuuaccauugacaaguaa

SEQ ID NO: 52967 - RNA, 1410 nt, Artificial Sequence
  derived and/or modified CDS sequence (wt) from neuraminidase__InfluenzaA__AEL89794
augaauccaaaccaaaagauaauaaccauugguucggucuguaugacaauuggaauggcuaacuuaauauuacaaauuggaaacauaaucucaauauggauuagccacucaauucaacuugggaaucaaagucagauugaaacaugcaaucaaagcgucauuacuuaugaaaacaacacuuggguaaaucagacauauguuaacaucagcaacaccaacuuugcugcuggacagucagugguuuccgugaaauuagcgggcaauuccucucucugcccuguuaguggaugggcuauauacaguaaagacaacaguauaagaaucgguuccaagggggauguguuugucauaagggaaccauucauaucaugcucccccuuggaaugcagaaccuucuucuugacucaaggggccuugcuaaaugacaaacauuccaauggaaccauuaaagacaggagcccauaucgaacccuaaugagcuguccuauuggugaaguucccucuccauacaacucaagauuugagucagucgcuuggucagcaagugcuugucaugauggcaucaauuggcuaacaauuggaauuucuggcccagacaauggggcaguggcuguguuaaaguacaacggcauaauaacagacacuaucaagaguuggagaaacaauauauugagaacacaagagucugaaugugcauguguaaaugguucuugcuuuaccauaaugaccgauggaccaagugauggacaggccucauacaagaucuucagaauagaaaagggaaagauagucaaaucagucgaaaugaaugccccuaauuaucauuaugaggaaugcuccuguuauccugauucuagugaaaucacaugugugugcagggauaacuggcauggcucgaaucgaccgugggugucuuucaaccagaaucuggaauaucagauaggauacauaugcagugggauuuucggagacaauccacgcccuaaugauaagacaggcaguugugguccaguaucgucuaauggagcaaauggaguaaaaggauuuucauucaaauacggcaaugguguuuggauagggagaacuaaaagcauuaguucaagaaaagguuuugagaugauuugggauccaaacggauggacugggacagacaauaacuucucaauaaagcaagauaucguaggaauaaaugaguggucaggauauagcgggaguuuuguucagcauccagaacuaacagggcuggauuguauaagaccuugcuucuggguugaacuaaucagagggcgacccaaagagaacacaaucuggacuagcgggagcagcauauccuuuugugguguaaacagugacgcuguggguuggucuuggccagacggugcugaguugccauuuaccauugacaaguaa

SEQ ID NO: 52968 - RNA, 1410 nt, Artificial Sequence
  derived and/or modified CDS sequence (wt) from neuraminidase__InfluenzaA__AEL89804
augaauccaaaccaaaagauaauaaccauugguucggucuguaugacaauuggaauggcuaacuuaauauuacaaauuggaaacauaaucucaauauggauuagccacucaauucaacuugggaaucaaaaucagauugaaacaugcaaucaaagcgucauuacuuaugaaaacaacacuuggguaaaucagacauauguuaacaucagcaacaccaacuuugcugcuggacagucagugguuuccgugaaauuagcgggcaauuccucucucugcccuguuaguggaugggcuauauacaguaaagacaacaguauaagaaucgguuccaagggggauguguuugucauaagggaaccauucauaucaugcucccccuuggaaugcagaaccuucuucuugacucaaggggccuugcuaaaugacaaacauuccaauggaaccauuaaagacaggagcccauaucgaacccuaaugagcuguccuauuggugaaguucccucuccauacaacucaagauuugagucagucgcuuggucagcaagugcuugucaugauggcaucaauuggcuaacaauuggaauuucuggcccagacaauggggcaguggcuguguuaaaguacaacggcauaauaacagacacaaucaagaguuggagaaacaauauauugagaacacaagagucugaaugugcauguguaaaugguucuugcuuuaccauaaugaccgauggaccaagugauggacaggccucauacaagaucuucagaauagaaaagggaaagauagucaaaucagucgaaaugaaugccccuaauuaucacuaugaggaaugcuccuguuauccugauucuagugaaaucacaugugugugcagggauaacuggcauggcucgaaucgaccgugggugucuuucaaccagaaucuggaauaucagauaggauacauaugcagugggauuuucggagacaauccacgcccuaaugauaagacaggcaguugugguccaguaucgucuaauggagcaaauggaguaaaaggauuuucauucaaauacggcaaugguguuuggauagggagaacuaaaagcauuaguucaagaaaagguuuugagaugauuugggauccaaacggauggacugggacagauaauaacuucucaauaaagcaagauaucguaggaauaaaugaguggucaggauauagcgggaguuuuguucagcauccagaacuaacagggcuggauuguauaagaccuugcuucuggguugaacuaaucagagggcggcccaaagagaacacaaucuggacuagcgggagcagcauauccuuuugugguguaaacagugacacuguggguuggucuuggccagacggugcugaguugccauuuaccauugacaaguaa

SEQ ID NO: 52969 - RNA, 1410 nt, Artificial Sequence
  derived and/or modified CDS sequence (wt) from neuraminidase__InfluenzaA__AEL89815
augaauccaaaccaaaagauaauaaccauugguucggucuguaugacaauuggaauggccaacuuaauauuacaaauuggaaacauaaucucaauauggauuagccacucaauucaacuugggaaucaaaaucagauugaaacaugcaaucaaagcgucauuacuuaugaaaacaacacuuggguaaaucagacauacguuaacaucagcaacaccaacuuugcugcuggacagucagugguuuccgugaaauuagcgggcaauuccucucucugcccuguuaguggaugggcuauauacaguaaagacaacaguauaagaaucgguuccaagggggauguguuugucauaagggaaccauucauaucauguucccccuuggaaugcaggaccuucuucuugacucaaggggccuugcuaaaugacaaacauuccaauggaaccauuaaagacaggagcccauaucgaacucuaaugagcuguccuauuggugaaguucccucuccauacaacucaagauuugaaucagucgcuuggucagcaagugcuugucaugauggcaucaauuggcuaacaauuggaauuucuggcccagacaauggggcaguggcuguguuaaaguacaacggcauaauaacagacacuaucaagaguuggagaaacaauauauugagaacacaagagucugaaugugcauguguaaaugguucuugcuuuacuguaaugaccgauggaccaagugauggacaggccucauacaagaucuucagaauagaaaagggaaagauagucaaaucagucgaaaugaaugccccuaauuaucacuaugaggaaugcuccuguuauccugauucuagugaaaucacaugugugugcagggauaacuggcauggcucgaaucgaccgugggugucuuucaaccagaaucuggaauaucagauaggauacauaugcagugggauuuucggagacaauccacgcccuaaugauaagacaggcaguugugguccaguaucgucuaauggagcaaauggaguaaaaggauuuucauucaaauacggcaaugguguuuggauagggagaacuaaaagcauuaguucaagaaacgguuuugagaugauuugggauccgaacggauggacuggaacagacaauaacuucucaguaaagcaagauaucauaggaauaaaugaguggucaggauauagcgggaguuuuguucagcauccagaacuaacagggcuggauuguauaagaccuugcuucuggguugagcuaaucagagggcggcccaaagagaacacaaucuggacuagcgggagcagcauauccuuuugugguguaaacagugacacuguggguuggucuuggccagacggugcugaguugccauuuaccauugacaaguaa

SEQ ID NO: 52970 - RNA, 1410 nt, Artificial Sequence
  derived and/or modified CDS sequence (wt) from neuraminidase__InfluenzaA__AEL89825
augaauccaaaccaaaagauaauaaccauugguucggucuguaugacaauuggaauggcuaacuuaauauuacaaauuggaaacauaaucucaauauggauuagccacucaauucaacuugggaaucaaaaucagauugaaacaugcaaucaaagcgucauuacuuaugaaaacaacacuuggguaaaucagacauauguuaacaucagcaacaccaacuuugcugcuggacagucagugguuuccgugaaauuagcgggcaauuccucucucugcccuguuaguggaugggcuauauacaguaaagacaacaguauaagaaucgguuccaagggggauguguuugucauaagggaaccauucauaucaugcuccccuuuggaaugcagaaccuucuucuugacucaaggggccuugcuaaaugacaaacauuccaauggaaccauuaaagacaggagcccauaucgaacccuaaugagcuguccuauuggugaaguucccucuccauacaacucaagauuugagucagucgcuuggucagcaagugcuugucaugauggcaucaauuggcuaacaauuggaauuucuggcccagacaauggggcaguggcuguguuaaaguacaacggcauaauaacagacacuaucaagaguuggagaaacaauauauugagaacacaagagucugaaugugcauguguaaaugguucuugcuuuacugugaugaccgauggaccaagugauggacaggccucauacaagaucuucagaauagaaaagggaaagauagucaaaucagucgaaaugaaugccccuaauuaucacuaugaggaaugcuccuguuauccugauucuagugaaaucacaugugugugcagggauaacuggcauggcgcgaaucgaccgugggugucuuucaaccagaaucuggaauaucagauaggauacauaugcagugggauuuucggagacaauccacgcccuaaugauaagacaggcaguugugguccaguaucgucuaauggagcaaauggaguaaaaggauuuucauucaaauacggcaaugguguuuggauagggagaacuaaaagcauuaguucaagaaacgguuuugagaugauuugggauccgaacggauggacugggacagacaauaacuucucaauaaagcaagauaucguaggaauaaaugaguggucaggauauagcgggaguuuuguucagcauccagaacuaacagggcuggauuguauaagaccuugcuucuggguugaacuaaucagagggcgacccaaagagaacacaaucuggacuagcgggagcagcauauccuuuugugguguaaacagugacacuguggguuggucuuggccagacggugcugaguugccauuuaccauugacaaguaa

SEQ ID NO: 52971 - RNA, 1410 nt, Artificial Sequence
  derived and/or modified CDS sequence (wt) from neuraminidase__InfluenzaA__AEL89835
augaauccaaaccaaaagauaauaaccauugguucggucuguaugacaauuggaauggcuaacuuaauauuacaaauuggaaacauaaucucaauauggauuagccacucaauucaacuugggaaucaaagucagauugaaacaugcaaucaaagcgucauuacuuaugaaaacaacacuuggguaaaucagacauauguuaacaucagcaacaccaacuuugcugcuggacagucagugguuuccgugaaauuagcgggcaauuccucucucugcccuguuaguggaugggcuauauacaguaaagacaacaguauaagaaucgguuccaagggggauguguuugucauaagggaaccauucauaucaugcucccccuuggaaugcagaaccuucuucuugacucaaggggccuugcuaaaugacaaacauuccaauggaaccauuaaagacaggagcccauaucgaacccuaaugagcuguccuauuggugaaguucccucuccauacaacucaagauuugagucagucgcuuggucagcaagugcuugucaugauggcaucaauuggcuaacaauuggaauuucuggcccagacaauggggcaguggcuguguuaaaguacaacggcauaauaacagacacuaucaagaguuggagaaacaauauauugagaacacaagagucugaauguguauguguaaaugguucuugcuuuaccauaaugaccgauggaccaagugauggacaggccucauacaagaucuucagaauagaaaagggaaagauagucaaaucagucgaaaugaaugccccuaauuaucacuaugaggaaugcuccuguuauccugauucuagugaaaucacaugugugugcagggauaacuggcauggcucgaaucgaccgugggugucuuucaaccagaaucuggaauaucagauaggauacauaugcagugggauuuucggagacaauccacgcccuaaugauaagacaggcaguugugguccaguaucgucuaauggagcaaauggaguaaaaggauuuucauucaaauacggcaaugguguuuggauagggagaacuaaaagcauuaguucaagaaaagguuuugagaugauuugggauccaaauggauggacugggacagacaauaacuucucaauaaagcaagauaucguaggaauaaaugaguggucaggauauagcgggaguuuuguucagcauccagaacuaacagggcuggauuguauaagaccuugcuucuggguugaacuaaucagagggcgacccaaagagaacacaaucuggacuagcgggagcagcauauccuuuugugguguaaacagugacacuguggguuggucuuggccagacggugcugaguugccauuuaccauugacaaguaa

SEQ ID NO: 52972 - RNA, 1410 nt, Artificial Sequence
  derived and/or modified CDS sequence (wt) from neuraminidase__InfluenzaA__AEL89845
augaauccaaaccaaaagauaauaaccauugguucggucuguaugacaauuggaauggcuaacuuaauauuacaaauugggaacauaaucucaauauggauuagccacucaauucaacuugggaauaaaaaucagauugaaacaugcaaucaaagcgucauuacuuaugaaaacaacacuuggguaaaucagacauauguuaacaucagcaacaccaacuuugcuacuggacagucagugguuuccgugaaauuagcgggcaauuccucucucugcccuguuaguggaugggcuauauacaguaaagacaacaguauaagaaucgguuccaagggggauguguuugucauaagggaaccauucauaucaugcuccccccuggaaugcagaaccuucuucuugacucaaggggccuugcuaaaugacaaacauuccaauggaaccauuaaagacaggagcccauaucgaacccuaaugagcuguccuauuggugaagcucccucuccauacaacucaagauuugagucagucgcuuggucagcaagugcuugucaugauggcaucaauuggcuaacaauuggaauuucuggcccagacaauggggcaguggcuguguuaaaguacaacggcauaauaacagacacuaucaagaguuggagaaacaauauauugagaacacaagagucugaaugugcauguguaaaugguucuugcuuuacuguaaugaccgauggaccaagugauggacaggccucauacaagaucuucaggauagagaagggaaagauagucaaaucagucgaaaugaaugccccuaauuaucacuaugaggaaugcuccuguuauccugauucuagugaaaucacaugugugugcagggauaacuggcauggcucgaaucgaccgugggugucuuucaaccagaaucuggaauaucagauaggauacauaugcagugggauuuucggagacaauccacgcccuaaugauaagaaaggcaguugugguccaguaucgucuaauggagcaaacggaguaaaaggauuuucauucaaauacggcaaugguguuuggauagggagaacuaaaagcauuaguucaagaaacgguuuugagaugauuugggauccgaacggauggacugggacagacaauaacuucucaauaaagcaagauaucguaggaauaaaugaauggucaggauauagcgggaguuuuguucagcauccagaacuaacagggcuggauuguauaagaccuugcuucuggguugaacuaaucagagggcgacccaaagagaacacaaucuggacuagugggagcagcauauccuuuugugguguaaacagugacacuguggguuggucuuggccagacggugcugaguugccauuuaccauugacaaguaa

SEQ ID NO: 52973 - RNA, 1410 nt, Artificial Sequence; identical to SEQ ID NO: 52970
  derived and/or modified CDS sequence (wt) from neuraminidase__InfluenzaA__AEL89855

SEQ ID NO: 52974 - RNA, 1410 nt, Artificial Sequence; identical to SEQ ID NO: 52602
  derived and/or modified CDS sequence (wt) from neuraminidase__InfluenzaA__AEL93581

SEQ ID NO: 52975 - RNA, 1410 nt, Artificial Sequence
  derived and/or modified CDS sequence (wt) from neuraminidase__InfluenzaA__AEL93591
augaauccaaaccaaaagauaauaaccauugguucggucuguaugacaauuggaauggcuaacuuaauauuacaaauuggaaacauaaucucaauauggauuagccacucaauucaacuugggaaucaaaaucagauugaaacaugcaaucaaagcgucauuacuuaugaaaacaacacuuggguaaaucagacauauguuaacaucagcaacaccaacuuugcugcuggacagucagugguuuccgugaacuuagcgggcaauuccucucucugcccuguuaguggaugggcuauauacaguaaagacaacaguauaagaaucgguuccaagggggauguguuugucauaagggaaccauucauaucaugcucccccuuggaaugcagaaccuucuucuugacucaaggggccuugcuaaaugacaaacauuccaauggaaccauuaaagacaggagcccauaucgaacccuaaugagcuguccuauuggugaaguucccucuccauacaacucaagauuugagucagucgcuuggucagcaagugcuugucaugauggcaucaauuggcuaacaauuggaauuucuggcccagacaauggggcaguggcuguguuaaaguacaacggcauaauaacagacacuaucaagaguuggagaaacaauauauugagaacacaagagucugaaugugcauguguaaaugguucuugcuuuaccauaaugaccgauggaccaagugauggacaggccucauacaagaucuucagaauagaaaagggaaagauagucaaaucagucgaaaugaaugccccuaauuaucacuaugaggaaugcuccuguuauccugauucuagugaaaucacaugugugugcagggauaacuggcauggcucgaaucgaccgugggugucuuucaaccagaaucuggaauaucagauaggauacauaugcagugggauuuucggagacaauccacgcccuaaugauaagacaggcaguugugguccaguaucgucuaauggagcaaauggaguaaaaggauuuucauucaaauacggcaaugguguuuggauagggagaacuaaaagcauuaguucaagaaaagguuuugagaugauuugggauccaaacggauggacugggacagacaauaacuucucaauaaagcaagauaucguaggaauaaaugaguggucaggauauagcgggaguuuuguucagcauccagaacuaacagggcuggauuguauaagaccuugcuucuggguugaacuaaucagagggcgacccaaagagaacacaaucuggacuagcgggagcagcauauccuuuugugguguaaacagugacacuguggguuggucuuggccagacggugcugaguugccauuuaccauugacaaguaa

SEQ ID NO: 52976 - RNA, 1410 nt, Artificial Sequence; identical to SEQ ID NO: 52817
  derived and/or modified CDS sequence (wt) from neuraminidase__InfluenzaA__AEL93601

SEQ ID NO: 52977 - RNA, 1410 nt, Artificial Sequence; identical to SEQ ID NO: 52602
  derived and/or modified CDS sequence (wt) from neuraminidase__InfluenzaA__AEL93611

SEQ ID NO: 52978 - RNA, 1410 nt, Artificial Sequence; identical to SEQ ID NO: 52602
  derived and/or modified CDS sequence (wt) from neuraminidase__InfluenzaA__AEL93621

SEQ ID NO: 52979 - RNA, 1410 nt, Artificial Sequence; identical to SEQ ID NO: 52602
  derived and/or modified CDS sequence (wt) from neuraminidase__InfluenzaA__AEL93631

SEQ ID NO: 52980 - RNA, 1410 nt, Artificial Sequence
  derived and/or modified CDS sequence (wt) from neuraminidase__InfluenzaA__AEL93641
augaauccaaaccaaaagauaauaaccauugguucggucuguauaacaauuggaauggcuaacuuaauauuacaaauuggaaacauaaucucaauauggauuagccacucaauucaacuugggaaucaaaaucagauugaaacaugcaaucaaagcgucauuacuuaugaaaacaacacuuggguaaaucagacauauguuaacaucagcaacaccaacuuugcugcuggacagucagugguuuccgugaaauuagcgggcaauuccucucucugcccuguuaguggaugggcuauauacaguaaagacaacaguauaagaaucgguuccaagggggauguguuugucauaagggaaccauucauaucaugcucccccuuggaaugcagaaccuucuucuugacucaaggggccuugcuaaaugacaaacauuccaauggaaccauuaaagacaggagcccauaucgaacccuaaugagcuguccuauuggugaaguucccucuccauacaacucaagauuugagucagucgcuuggucagcaagugcuugucaugauggcaucaguuggcuaacaauuggaauuucuggcccagacaauggggcaguggcuguguuaaaguacaacggcauaauaacagacacuaucaagaguuggagaaacaauauauugagaacacaagagucugaaugugcauguguaaaugguucuuguuuuacuguaaugaccgauggaccaagugauggacaggccucauacaagaucuucagaauagaaaagggaaagauagucaaaucagucgaaaugaaugccccuaauuaucacuaugaggaaugcuccuguuauccugauucuagugaaaucacaugugugugcagggauaacuggcauggcucgaaucgaccgugggugucuuucaaccauaaucuggaauaucagauaggauacauaugcagugggauuuucggagacaauccacgcccuaaugauaagacaggcaguugugguccaguaucgucuaauggagcaaauggaguaaaaggauuuucauucaaauacggcaaugguguuuggauagggagaacuaaaagcauuaguucaagaaacgguuuugagaugauuugggauccgaacggauggacugggacagacaauaacuucucaauaaagcaagauaucguaggaauaaaugaguggucaggauauagcgggaguuuuguucagcauccagaacuaacagggcuggauuguauaagaccuugcuucuggguugaacuaaucagagggcaacccaaagagaacacaaucuggacuagcgggagcagcauauccuuuugugguguaaacagugacacuguggguuggucuuggccagacggugcugaguugccauuuaccauugacaaguaa

SEQ ID NO: 52981 - RNA, 1410 nt, Artificial Sequence; identical to SEQ ID NO: 52820
  derived and/or modified CDS sequence (wt) from neuraminidase__InfluenzaA__AEL94890

SEQ ID NO: 52982 - RNA, 1410 nt, Artificial Sequence
  derived and/or modified CDS sequence (wt) from neuraminidase__InfluenzaA__AEL95429
augaauccaaaccaaaagauaauaaccauugguucggucuguaugacaauuggaauggcuaacuuaauauuacaaauuggaaacauaaucucaauauggauuagccacucaauucaacuugggaaucaaagucagauugaaacaugcaaucaaagcgucauuacuuaugaaaacaacacuuggguaaaucagacauauguuaacaucagcaacaccaacuuugcugcuggacagucagugguuuccgugaaauuagcgggcaauuccucucucugcccuguuaguggaugggcuauauacaguaaagacaacaguauaagaaucgguuccaagggggauguguuugucauaagggaaccauucauaucaugcucccccuuggaaugcagaaccuucuucuugacucaaggggccuugcuaaaugacaaacauuccaauggaaccauuaaagacaggagcccacaucgaacccuaaugagcuguccuauuggugaaguucccucuccauacaacucaagauuugagucagucgcuuggucagcaagugcuugucaugauggcaucaauuggcuaacaauuggaauuucuggcccagacaauggggcaguggcuguguuaaaguacaacggcauaauaacagacacuaucaagaguuggagaaacaauauauugagaacacaagagucugaaugugcauguguaaaugguucuugcuuuaccauaaugaccgauggaccaagugauggacaggccucauacaagaucuucagaauagaaaagggaaagauagucaaaucagucgaaaugaaugccccuaauuaucacuaugaggaaugcuccuguuauccugauucuagugaaaucacaugugugugcagggauaacuggcauggcucgaaucgaccgugggugucuuucaaccagaaucuggaauaucagauaggauacauaugcagugggauuuucggagacaauccacgcccuaaugauaagacaggcaguugugguccaguaucgucuaauggagcaaauggaguaaaaggauuuucauucaaauacggcaaugguguuuggauagggagaacuaaaagcauuaguucaagaaaagguuuugagaugauuugggauccaaacggauggacugggacagacaauaacuucucaauaaagcaagauaucguaggaauaaaugaguggucaggauauagcgggaguuuuguucagcauccagaacuaacagggcuggauuguauaagaccuugcuucuggguugaacuaaucagagggcgacccaaagagaacacaaucuggacuagcgggagcagcauauccuuuugugguguaaacagugacacuguggguuggucuuggccagacggugcugaguugccauuuaccauugacaaguaa

SEQ ID NO: 52983 - RNA, 1410 nt, Artificial Sequence
  derived and/or modified CDS sequence (wt) from neuraminidase__InfluenzaA__AEL97634
augaauccaaaccaaaagauaauaaccauugguucggucuguaugacaauuggaauggccaacuuaauauuacaaauuggaaacauaaucucaauauggguuagccacucaauucaacuugggaaucaaaaucagauugaaacaugcaaucaaagcgucauuacuuaugaaaacaacacuuggguaaaucagacauauguuaacaucagcaacaccaacuuugcugcuggacagucagugguuuccgugaaauuagcgggcaauuccucucucugcccuguuaguggaugggcuauauacaguaaagacaacaguauaagaaucgguuccaagggggauguguuugucauaagggaaccauucauaucaugcucccccuuggaaugcagaaccuucuucuugacucaaggggccuugcuaaaugacaaacauuccaauggaaccauuaaagacaggagcccauaucgaacccuaaugagcuguccuauuggugaaguucccucuccauacaacucaagauuugagucagucgcuuggucagcaagugcuugucaugauggcaucaauuggcuaacaauuggaauuucuggcccagacaauggggcaguggcuguguuaaaguacaacggcauaauaacagacacuaucaagaguuggagaaacaauauauugagaacacaagagucugaaugugcauguguaaaugguucuugcuuuacuguaaugaccgauggaccaagugauggacaggccucauacaagaucuucagaauagaaaagggaaagauagucaaaucagucgaaaugaaugccccuaauuaucacuaugaggaaugcuccuguuauccugauucuagugaaaucacaugugugugcagggauaacuggcauggcucgaaucgaccgugggugucuuucaaccagaaucuggaauaucagauaggauacauaugcagugggauuuucggagacaauccacgcccuaaugauaagacaggcaguugugguccaguaucgucuaauggagcaaauggaguaaaaggauuuucauucaaauacggcaaugguguuuggauagggagaacuaaaagcauuaguucaagaaacgguuuugagaugauuugggauccgaacggauggacugggacagacaauaacuucucaauaaagcaagauaucguaggaguaaaugaguggucaggauauagcgggaguuuuguucagcauccagaacuaacagggcuggauuguauaagaccuugcuucuggguugaacuaaucagagggcgacccaaagagaacacaaucuggacuagcgggagcagcauauccuuuugugguguaaacagugacacuguggguuggucuuggccagacggugcugaguugccauuuaccauugacaaguaa

SEQ ID NO: 52984 - RNA, 1410 nt, Artificial Sequence
  derived and/or modified CDS sequence (wt) from neuraminidase__InfluenzaA__AEL99667
augaauccaaaccaaaagauaauaaccauugguucggucuguaugacaauuggaauggcuaacuuaauauuacaaauuggaaacauaaucucaauauggauuagccacucaauucaacuugggaaucaaaaucagauugaaacaugcaaucaaagcgucauuacuuaugaaaacaacacuuggguaaaucagacauauguuaacaucagcaacaccaacuuugcugcuggacagucagugguuuccgugaaauuagcgggcaauuccucucucugcccuguuaguggaugggcuauauacaguaaagacaacaguauaagaaucgguuccaagggggauguguuugucauaagggaaccauucauaucaugcucccccuuggaaugcagaaccuucuucuugacucaaggggccuugcuaaaugacaaacauuccaauggaaccauuaaagacagaagcccauaucgaacccuaaugagcuguccuauuggugaaguucccucuccauacaacucaagauuugagucagucgcuuggucagcaagugcuugucaugauggcaucaauuggcuaacaauuggaauuucuggcccagacaauggggcaguggcuguguuaaaguacaacggcauaauaacagacacuaucaagaguuggagaaacaauauauugagaacacaagagucugaaugugcauguguaaaugguucuugcuuuacuguaaugaccgauggaccaagugauggacaggccucauacaagaucuucagaauagaaaagggaaagauagucaaaucagucgaaaugaaugccccuaauuaucacuaugaggaaugcuccuguuauccugauucuagugaaaucacaugugugugcagggacaacuggcauggcucgaaucgaccgugggugucuuucaaccagaaucuggaauaucagauaggauacauaugcagugggauuuucggagacaauccacgcccuaaugauaagacaggcaguugugguccaguaucgucuaauggagcaaauggaguaaaaggauuuucauucaaauacggcaaugguguuuggauagggagaacuaaaagcauuaguucaagaaacgguuuugagaugauuugggauccgaacggauggacugggacagacaauaacuucucaauaaagcaagauaucguaggaauaaaugaguggucaggauauagcgggaguuuuguucagcauccagaacuaacagggcuggauuguauaagaccuugcuucuggguugaacuaaucagagggcgacccaaagagaacacaaucuggacuagcgggagcagcauauccuuuugugguguaaacagugacacuguggguuggucuuggccagacggugcugaguugccauuuaccauugacaaguaa

SEQ ID NO: 52985 - RNA, 1410 nt, Artificial Sequence
  derived and/or modified CDS sequence (wt) from neuraminidase__InfluenzaA__AEL99677
augaauccaaaccaaaagauaauaaccauugguucggucuguaugacaauuggaauggcuaacuuaauauuacaaauuggaaacauaaucucaauauggauuagccacucaauucaacuugggaaucaaaaucagauugaaacaugcaaucaaagcgucauuacuuaugaaaacaacacuuggguaaaucaaacauauguuaacaucagcaacaccaacuuugcugcuggacagucagugguuuccgugaaauuagcgggcaauuccucucucugcccuguuaguggaugggcuauauacaguaaagacaacaguauaagaaucgguuccaagggggauguguuugucauaagggaaccauucauaucaugcucccccuuggaaugcagaaccuucuucuugacucaaggggccuugcuaaaugacaaacauuccaauggaaccauuaaagacaggagcccauaucgaacccuaaugagcuguccuauuggugaaguucccucuccauacaacucaagauuugagucagucgcuuggucagcaagugcuugucaugauggcaucaauuggcuaacaauuggaauuucuggcccagacaauggggcaguggcuguguuaaaguacaacggcauaauaacagacacuaucaagaguuggagaaacaauauauugagaacacaagagucugaaugugcauguguaaaugguucuugcuuuacuguaaugaccgauggaccaagugauggacaggccucauacaagaucuucagaauagaaaagggaaagauagucaaaucagucgaaaugaaugccccuaauuaucacuaugaggaaugcuccuguuauccugauucuagugaaaucacaugugugugcagggauaacuggcauggcucgaaucgaccgugggugucuuucaaccagaaucuggaauaucagauaggauacauaugcagugggauuuucggagacaauccacgcccuaaugauaagacaggcaguugugguccaguaucgucuaauggagcaaauggaguaaaaggauuuucauucaaauacggcaaugguguuuggauagggagaacuaaaagcauuaguucaagaaacgguuuugagaugauuugggauccgaacggauggacugggacagacaauaacuucucaauaaagcaagauaucguaggaauaaaugaguggucaggauauagcgggaguuuuguucagcauccagaacuaacagggcuggauuguauaagaccuugcuucuggguugaacuaaucagagggcgacccaaagagaacacaaucuggacuagcgggagcagcauauccuuuugugguguaaacagugacacuguggguuggucuuggccagacggugcugaguugccauuuaccauugacaaguaa

SEQ ID NO: 52986 - RNA, 1410 nt, Artificial Sequence; identical to SEQ ID NO: 47788
  derived and/or modified CDS sequence (wt) from neuraminidase__InfluenzaA__AEM53471

SEQ ID NO: 52987 - RNA, 1413 nt, Artificial Sequence; identical to SEQ ID NO: 48465
  derived and/or modified CDS sequence (wt) from neuraminidase__InfluenzaA__AEM60040

SEQ ID NO: 52988 - RNA, 1413 nt, Artificial Sequence; identical to SEQ ID NO: 48055
  derived and/or modified CDS sequence (wt) from neuraminidase__InfluenzaA__AEM60061

SEQ ID NO: 52989 - RNA, 1410 nt, Artificial Sequence
  derived and/or modified CDS sequence (wt) from neuraminidase__InfluenzaA__AEM60072
augaauccaaaucaaaagauaauaacaauuggcucuguuucucucaccauugccacaauaugcuuccuuaugcaaauugccauucugguaacuacuguaacauugcauuucaagcaauaugagugcagcucccccccaaacaaccaaguaaugccgugugaaccaacaauaauagaaagaaacauaacagagauaguguauuugacuaacaccaccauagagaaagagauaugccccaaacuaguagaauacagaaauuggucaaagccgcaauguaaaauuacaggauuugcaccuuuuucuaaggacaauucaauucgacuuuccgcugguggagacauuugggugacaagagaaccuuaugugucaugcgauccuggcaaguguuaucaauuugcacuugggcagggaaccacacuaaacaacaggcauucaaaugacacaguacaugauaggaccccuuaucgaacccucuugaugaaugaguuggguguuccauuucauuugggaaccaagcaagugugcauagcaugguccagcucaaguugucacgauggaaaagcaugguugcauguuugugucacugggcaugaugaaaaugcaacugcuagcuucauuuacgaugggaggcuuguagacaguauugguucaugguccaaaaauauccucaggacacaggagucggaaugcguuuguaucaaugggacuuguacaguaguaaugacugauggaagugcuucagaaagagcugauacuaaaauacuauucauugaagaggggaaaaucguucauauuagcccauugucaggaagugcucagcauguagaggagugcuccuguuauccucgauauccuggugucagaugugucugcagagacaacuggaaaggcuccaauaggcccaucguagauauaaaugugaaagauuauagcauuguuuccaguuaugugugcucagggcuuguuggagacacacccagaaaaaacgacagauccagcaguagcuauugccggaauccuaacaaugagaaagggagucauggagugaaaggcugggccuuugacgauggaaaugacguguggaugggaagaacgaucggagaggaguuacgcucagguuaugaaaccuucaaagucauuggagguugguccacaccuaacuccaaauugcagauaaauaggcaagucauaguugacagcgguaauagguccgguuauucugguauuuucucuguugagggcaaaagcugcaucaaucggugcuuuuauguggaguugauaaggggaagggaacaggaaacuagagucugguggacuucaaacaguauuguuguguuuuguggcaccucagguacauauggaacaggcucauggccugauggggcggacaucaaucucaugccuauauaa

SEQ ID NO: 52990 - RNA, 1410 nt, Artificial Sequence; identical to SEQ ID NO: 48750
  derived and/or modified CDS sequence (wt) from neuraminidase__InfluenzaA__AEM62774

SEQ ID NO: 52991 - RNA, 1410 nt, Artificial Sequence; identical to SEQ ID NO: 48750
  derived and/or modified CDS sequence (wt) from neuraminidase__InfluenzaA__AEM62783

SEQ ID NO: 52992 - RNA, 1410 nt, Artificial Sequence
  derived and/or modified CDS sequence (wt) from neuraminidase__InfluenzaA__AEM62792
augaauccaaaccaaaagauaauaaccauugguucggucuguaugacaauuggaauggcuaacuuaauauuacaaauuggaaacauaaucucaauauggauuagccacucaauucaacuugggagucaaaaucagauugaaacaugcaaucaaagcgucauuacuuaugaaaacaacacuuggguaaaucagacauauguuaacaucagcaacaccaacuuugcugcuggacagucagugauuuccgugagauuagcgggcaauuccucucucugcccuguuaguggaugggcuauauacaguaaagacaacaguauaagaaucgguuccaagggggauguguuugucauaagggaaccauucauaucaugcucccccuuggaaugcagaaccuucuucuugacucaaggggccuugcuaaaugacaaacauuccaauggaaccauuaaagacaggagcccauaucgaacccuaaugagcuguccuauuggugaaguucccucuccauacaacucaagauuugagucagucgcuuggucagcaagugcuugucaugauggcaucaauuggcuaacaauuggaauuucuggcccagacaauggggcaguggcuguguuaaaguacaacggcauaauaacagacacuaucaagaguuggagaaacaauauauugagaacacaagagucugaaugugcauguguaaaugguucuugcuuuacuguaaugaccgauggaccaagugauggacaggccucauacaagaucuucagaauagaaaagggaaagauagucaaaucagucgaaaugaaugccccuaauuaucacuaugaggaaugcuccuguuauccugauucuagugaaaucacaugugugugcagggauaacuggcauggcucgaaucgaccgugggugucuuucaaccagaaucuagaauaucagauaggauacauaugcagugggauuuucggagacaauccacgcccuaaugauaagacaggcaguugugguccaguaucgucuaauggagcaaauggaguaaaaggauuuucauucaaauacggcaaugguguuuggauagggagaacuaaaagcauuaguucaagaaacgguuuugagaugauuugggauccgaacggauggacugggacagacaauaacuucucaauaaagcaagauaucauaggaauaaaugaguggucaggauauagcgggaguuuuguucagcauccagaacuaacagggcuggauuguauaagaccuugcuucuggguugaacuaaucagagggcgacccaaagagaacacaaucuggacuagcgggagcagcauauccuuuugugguguaaacagugacacuguggguuggucuuggccagacggugcugaguugccauuuaccauugacaaguaa

SEQ ID NO: 52993 - RNA, 1410 nt, Artificial Sequence; identical to SEQ ID NO: 48947
  derived and/or modified CDS sequence (wt) from neuraminidase__InfluenzaA__AEM62801

SEQ ID NO: 52994 - RNA, 1410 nt, Artificial Sequence
  derived and/or modified CDS sequence (wt) from neuraminidase__InfluenzaA__AEM62810
augaauccaaaccaaaagauaauaaccauugguucggucuguaugacaauuggaauggguaacuuaauauuacaaauuggaaacauaaucucaauauggauuagccacucaauucaacuugggaaucaaaaucagauugaaacaugcaaucaaagcgucauuacuuaugaaaacaacacuuggguaaaucagacauauguuaacaucagcaacaccaacuuugcugcuggacagucagugguuuccgugaaauuagcgggcaauuccucucucugcccuguuaguggaugggcuauauacaguaaagacaacaguauaagaaucgguuccaagggggauguguuugucauaagggaaccauucauaucaugcucccccuuggaaugcagaaccuucuucuugacucaaggggccuugcuaaaugacaaacauuccaauggaaccauuaaagacaggagcccauaucgaacccuaaugagcuguccuauuggugaaguucccucuccauacaacucaagauuugagucagucgcuuggucagcaagugcuugucaugauggcaucaauuggcuaacaauuggaauuucuggcccagacaauggggcaguggcuguguuaaaguacaacggcauaauaacagacacuaucaagaguuggagaaacaauauauugagaacacaagagucugaaugugcauguguaaaugguucuugcuuuacuguaaugaccgauggaccaagugauggacaggccucauacaagaucuucagaauagaaaagggaaagauagucaaaucagucgaaaugaaugccccuaauuaucacuaugaggaaugcuccuguuauccugauucuagugaaaucacaugugugugcagggauaacuggcauggcucgaaucgaccgugggugucuuucaaccagaaucuggaauaucagauaggauacauaugcagugggauuuucggagacaauccacgcccuaaugauaagacaggcaguugugguccaguaucgucuaauggagcaaauggaguaaaaggauuuucauucaaauacggcaaugguguuuggauagggagaacuaaaagcauuaguucaagaaacgguuuugagaugauuugggauccgaacggauggacugggacagacaauaacuucucaauaaagcaagauaucguaggaauaaaugaguggucaggauauagcgggaguuuuguucagcauccagaacuaacagggcuggauuguauaagaccuugcuucuggguugaacuaaucagagggcgacccaaagagaacacaaucuggacuagcgggagcagcauauccuuuugugguguaaacagugacacuguggguuggucuuggccagacggugcugaguugccauuuaccauugacaaguaa

SEQ ID NO: 52995 - RNA, 1410 nt, Artificial Sequence
  derived and/or modified CDS sequence (wt) from neuraminidase__InfluenzaA__AEM62819
augaauccaaaccaaaagauaauaaccauugguucggucuguaugacaauuggaauggcuaauuuaauauuacaaauuggaaacauaaucucaauauggauuagccacucaauucaacuugggaaucaaaaucagauugaaacaugcaaucaaagcgucauuacuuaugaaaacgacacuuggguaaaucagacauauguuaacaucagcaacaccaacuuugcugcuggacagucagugguuuccgugaaauuagcgggcaauuccucucucugcccuguuaguggaugggcuauauacaguaaagacaauaguauaagaaucgguuccaagggggauguguuugucauaagggaaccauucauaucaugcucccccuuggaaugcagaaccuucuucuugacucaaggggccuugcuaaaugacaaacacuccaauggaaccauuaaagacaggagcccauaucgaacccuaaugagcuguccuauuggugaaguucccucuccauacaacucaagauuugagucagucgcuuggucagcaagugcuugucaugauggcaucaauuggcuaacaauuggaauuucuggcccagacaauggggcaguggcuguguuaaaguacaacggcauaauaacagacacuaucaagaguuggagaaacaauauauugagaacacaagagucugaaugugcauguguaaaugguucuugcuuuacuguaaugaccgauggaccaagugauggacaggccucauacaagaucuucagaauagaaaagggaaagauagucaaaucagucgaaaugaaugccccuaauuaucacuaugaggaaugcuccuguuauccugauucuagugaaaucacaugugugugcagggauaacuggcauggcucgaaucgaccgugggugucuuucaaccagaaucuggaauaucagauaggauacauaugcagugggauuuucggagacaauccacgcccuaaugauaagacaggcaguugugguccaguaucgucuaauggagcaaauggaguaaaaggauuuucauucaaauacggcaaugguguuuggauagggagaacuaaaagcauuaguucaagaaacgguuuugagaugauuugggauccgaacggauggacugggacagacaacaacuucucaauaaagcaagauaucguaggaauaaaugaguggucaggauauagcgggaguuuuguucagcauccagaacuaacagggcuggauuguauaagaccuugcuucuggguugaacuaaucagagggcgacccaaagagaacacaaucuggacuagcgggagcagcauauccuuuugugguguaaacagugacacuguggguuggucuuggccagacggugcugaguugccauuuaccauugacaaguaa

SEQ ID NO: 52996 - RNA, 1410 nt, Artificial Sequence
  derived and/or modified CDS sequence (wt) from neuraminidase__InfluenzaA__AEM62828
augaauccaaaccaaaagauaauaaccauugguucggucuguaugacaauuggaauggcuaacuuaauauuacaaauuggaaacauaaucucaauauggauuagccacucaauucaacuugggaaucaaaaucagauugaaacaugcaaucaaagcgucauuacuuaugaaaacaacacuuggguaaaucagacauauguuaacaucagcaacaccaacuuugcugcuggacagucagugguuuccgugaaauuagcgggcaauuccucucucugcccuguuaguggaugggccauauacaguaaagacaacaguauaagaaucgguuccaagggggauguguuugucauaagggaaccauucauaucaugcucccccuuggaaugcagaaccuucuucuugacucaaggggccuugcuaaaugacaaacauuccaauggaaccauuaaagacaggagcccauaucgaacccuaaugagcuguccuauuggugaaguucccucuccauacaacucaagauuugagucagucgcuuggucagcaagugcuugucaugauggcaucaauuggcuaacaauuggaauuucuggcccagacaauggggcaguggcuguguuaaaguacaacggcauaauaacagacacuaucaagaguuggagaaacaauauauugagaacacaagagucugaaugugcauguguaaaugguucuugcuuuacuguaaugaccgauggaccaagugauggacaggccucauacaagaucuucagaauagaaaagggaaagauagucaaaucagucgaaaugaaugccccuaauuaucacuaugaggaaugcuccuguuauccugauucuagugaaaucacaugugugugcagggauaacuggcauggcucgaaucgaccgugggugucuuucaaccagaaucuggaauaucagauaggauacauaugcagugggauuuucggagacaauccacgcccuaaugauaagacaggcaguugugguccaguaucgucuaauggagcaaauggaguaaaaggauuuucauucaaauacggcaaugguguuuggauagggagaacuaaaagcauuaguucaagaaacgguuuugagaugauuugggauccgaacggauggacugggacagacaauaacuucucaauaaagcaagauauuguaggaauaaaugaguggucaggauauagcgggaguuuuguucagcauccagaacuaacagggcuggauuguauaagaccuugcuucuggguugaacuaaucagagggcgacccaaagagaacacaaucuggacuagcgggagcagcauauccuuuugugguguaaacagugacacuguggguuggucuuggccagacggugcugaguugccauuuaccauugacaaguaa

SEQ ID NO: 52997 - RNA, 1410 nt, Artificial Sequence
  derived and/or modified CDS sequence (wt) from neuraminidase__InfluenzaA__AEM62837
augaauccaaaccaaaagauaauaaccauugguucggucuguaugacaauuggaauggcuaacuuaauauuacaaauuggaaacauaaucucaauauggauuagccacucaauucaacuugggaaucaaaaucagauugaaacaugcaaucaaagcgucauuacuuaugaaaacaacacuuggguaaaucagacauauguuaacaucagcaacaccaacuuugcugcuggacagucagugguuuccgugaaauuagcgggcaauuccucucucugcccuguuaguggaugggcuauauacaguaaagacaacaguguaagaaucgguuccaagggggauguguuugucauaagggaaccauucauaucaugcucccccuuggaaugcagaaccuucuucuugacucaaggggccuugcuaaaugacaaacauuccaauggaaccauuaaagacaggagcccauaucgaacccuaaugagcuguccuauuggugaaguucccucuccauacaacucaagauuugagucagucgcuuggucagcaagugcuugucaugauggcaucaauuggcuaacaauuggaauuucuggcccagacaauggggcaguggcuguguuaaaguacaacggcauaauaacagacacuaucaagaguuggagaaacaauauauugagaacacaagagucugaaugugcauguguaaaugguucuugcuuuacuguaaugaccgauggaccaagugauggacaggccucauacaagaucuucagaauagaaaagggaaagauagucaaaucagucgaaaugaaugccccuaauuaucacuaugaggaaugcuccuguuauccugauucuagugaaaucacaugugugugcagggauaacuggcauggcucgaaucgaccgugggugucuuucaaccagaaucuggaauaucagauaggauacauaugcagugggauuuucggagacaauccacgccccaaugauaagacaggcaguugugguccaguaucgucuaauggagcaaauggaguaaaaggauuuucauucaaauacggcaaugguguuuggauagggagaacuaaaagcauuaguucaagaaacgguuucgagaugauuugggauccgaacggauggacugggacagacaauaacuucucaauaaagcaagauaucguaggaauaaaugaguggucaggauauagcgggaguuuuguucagcauccagaacuaacagggcuggauuguauaagaccuugcuucuggguugaacuaaucagagggcgacccaaagagaacacaaucuggacuagcgggagcagcauauccuuuugugguguaaacagugacacuguggguuggucuuggccagacggugcugaguugccauuuaccauugacaaguaa

SEQ ID NO: 52998 - RNA, 1410 nt, Artificial Sequence
  derived and/or modified CDS sequence (wt) from neuraminidase__InfluenzaA__AEM62846
augaauccaaaccaaaagauaauaaccauugguucggucuguaugacaauuggaauggcuaacuuaauauuacaaauuggaaacauaaucucaauauggauuagccacucaauucaacuugggaaucaaaaucagauugaaacaugcaaucaaagcgucauuacuuaugaaaacaacacuuggguaaaucagacauauguuaacaucagcaacaccaacuuugcugcuggacagucagugguuuccgugaaauuagcgggcaauuccucucucugcccuguuaguggaugggcuauauacaguaaagacaacaguauaagaaucgguuccaagggggauguguuugucauaagggaaccauucauaucaugcucccccuuggaaugcagaaccuucuucuugacucaaggggccuugcuaaaugacaaacauuccaauggaaccauuaaagacaggagcccauaucgaacccuaaugagcuguccuauuggugaaguucccucuccauacaacucaagauuugagucagucgcuuggucagcaagugcuugucaugauggcaucaauuggcuaacaauuggaauuucuggcccagacaauggggcaguggcuguguuaaaguacaacggcauaauaacagacacuaucaagaguuggagaaacaauauauugaggacacaagagucugaaugugcauguguaaaugguucuugcuuuacuguaaugaccgauggaccaagugauggacaggccucauacaagaucuucagaauagaaaagggaaagauagucaaaucagucgaaaugaaugccccuaauuaucacuaugaggaaugcuccuguuauccugauucuagugaaaucacaugugugugcagggauaacuggcauggcucgaaucgaccgugggugucuuucaaccagaaucuggaauaucagauaggauacauaugcagugggauuuucggagacaauccacgcccuaaugauaagacaggcaguugugguccaguaucgucuaauggagcaaauggaguaaaaggauuuucauucaaauacggcaaugguguuuggauagggagaacuaaaagcauuaguucaagaaacgguuuugagaugauuugggauccgaacggauggacugggacagacaauaacuucucaauaaagcaagauaucguaggaauaaaugaguggucaggauauagcgggaguuuuguucagcauccagaacuaacagggcuggauuguauaagaccuugcuucuggguugaacuaaucagagggcgacccaaagagaacacaaucuggacuagcgggagcagcauauccuuuugugguguaaacagugacacuguggguuggucuuggccagacggugcugaguugccauuuaccauugacaaguaa

SEQ ID NO: 52999 - RNA, 1410 nt, Artificial Sequence
  derived and/or modified CDS sequence (wt) from neuraminidase__InfluenzaA__AEM62855
augaauccaaaccaaaagauaauaaccauugguucggucuguauaacaauuggaauggcuaacuuaauauuacaaauuggaaacauaaucucaauauggauuagccacucaauucaacuugggaaucaaaaucagauugaaacaugcaaucaaagcgucauuacuuaugaaaacaacacuuggguaaaucagacauauguuaacaucagcaacaccaacuuugcugcuggacagucagugguuuccgugaaauuagcgggcaauuccucucucugcccuguuaguggaugggcuauauacaguaaagacaacaguguaagaaucgguuccaagggggauguguuugucauaagggaaccauucauaucaugcucccccuuggaaugcagaaccuucuucuugacucaaggggccuugcuaaaugacaaacauuccaauggaaccauuaaagacaggagcccauaucgaacccuaaugagcuguccuauuggugaaguucccucuccauacaacucaagauuugagucagucgcuuggucagcaagugcuugucaugauggcaucaauuggcuaacaauuggaauuucuggcccagacaauggggcaguggcuguguuaaaguacaauggcauaauaacagacacuaucaagaguuggagaaacaauauauugagaacacaagagucugaaugugcauguguaaaugguucuugcuuuacuguaaugaccgauggaccaaguaauggacaggccucauacaagaucuucagaauagaaaagggaaagauagucaaaucagucgaaaugaaugccccuaauuaucacuaugaggaaugcuccuguuauccugauucuggugaaaucacaugugugugcagggauaacuggcauggcucgaaucgaccgugggugucuuucaaccagaaucuggaauaucagauaggauacauaugcagugggauuuucggagacaauccacgcccuaaugacaagacaggcaguugugguccaguaucgucuaauggagcaaauggaguaaaaggauuuucauucaaauacggcaaugguguuuggauagggagaacuaaaagcauuaguucaagaaacgguuuugagaugauuugggauccgaacggauggacugggacagacaauaacuucucaauaaagcaagauaucguaggaauaaaugaguggucaggauauagcgggaguuuuguucagcauccagaacuaacagggcuggauuguauaagaccuugcuucuggguugaacuaaucagagggcgacccaaagagaacacaaucuggacuagcgggagcagcauauccuuuugugguguaaacagugacacuguggguuggucuuggccagacggugcugaguugccauuuaccauugacaaguaa

SEQ ID NO: 53000 - RNA, 1410 nt, Artificial Sequence
  derived and/or modified CDS sequence (wt) from neuraminidase__InfluenzaA__AEM62864
augaauccaaaccaaaagauaauaaccauugguucggucuguaugacaauuggaauggcuaacuuaauauuacaaauuggaaacauaaucucaauauggauuagccacucaauucaacuugggaaucaaaaucagauugaaacaugcaaucaaagcgucauuacuuaugaaaacaacacuuggguaaaucagacauauguuaacaucagcaacaccaacuuugcugcuggacagucagugguuuccgugaaauuagcgggcaauuccucucucugcccuguuaguggaugggcuauauacaguaaagacaacaguauaagaaucgguuccaagggggauguguuugucauaagggaaccauucauaucaugcucccccuuggaaugcagaaccuucuucuugacucaaggggccuugcuaaaugacaaacauuccaauggaaccauuaaagacaggagcccauaucgaacccuaaugagcuguccuauuggugaaguucccucuccauacaacucaagauuugagucagucgcuuggucagcaagugcuugucaugauggcaucaauuggcuaacaauuggaauuuucggcccagacaauggggcaguggcuguguuaaaguacaacggcauaauaacagacacuaucaagaguuggagaaacaauauauugagaacacaagagucugaaugugcauguguaaaugguucuugcuuuacuguaaugaccgauggaccaagugauggacaggccucauacaagauuuucagaauagaaaagggaaagauagucaaaucagucgaaaugaaugccccuaauuaucacuaugaggaaugcuccuguuauccugauucuagugaaaucacaugugugugcagggauaacuggcauggcucgaaucgaccgugggugucuuucaaccagaaucuggaauaucagauaggauacauaugcagugggauuuucggagacaauccacgcccuaaugauaagacaggcaguugugguccaguaucgucuaauggagcaaauggaguaaaaggauuuucauucaaauacggcaaugguguuuggauagggagaacuaaaagcauuaguucaagaaacgguuuugagaugauuugggauccgaacggauggacugggacagacaauaacuucucaauaaagcaagauaucguaggaauaaaugaguggucaggauauagcgggaguuuuguucagcauccagaacuaacagggcuggauuguauaagaccuugcuucuggguugaacuaaucagagggcgacccaaagagaacacaaucuggacuagcgggagcagcauauccuuuugugguguaaacagugacacuguggguuggucuuggccagacggugcugaguugccauuuaccauugacaaguaa

SEQ ID NO: 53001 - RNA, 1410 nt, Artificial Sequence
  derived and/or modified CDS sequence (wt) from neuraminidase__InfluenzaA__AEM62872
augaauccaaaccaaaagauaauaaccauugguucggucuguaugacaauuggaauggcuaacuuaauauuacaaauuggaaacauaaucucaauauggauuagccacucaauucaacuugggaaucaaaaucagauugaaacaugcaaucaaagcgucauuacuuaugaaaacaacacuuggguaaaucagacauauguuaacaucagcaacaccaacuuugcugcuggacagucagugguuuccgugaaauuagcgggcaauuccucucucugcccuguuaguggaugggcuauauacaguaaagacaacaguauaagaaucgguuccaagggggauguguuugucauaagggaaccauucauaucaugcucccccuuggaaugcagaaccuucuucuugacucaaggggccuugcuaaaugacaaacauuccaauggaaccaucaaagacaggagcccauaucgaacccuaaugagcuguccuauuggugaaguucccucuccauacaacucaagauuugagucagucgcuuggucagcaagugcuugucaugauggcaucaauuggcuaacaauuggaauuucuggcccagacaauggggcaguggcuguguuaaaguacaacggcauaauaacagacacuaucaagaguuggagaaacaauauauugagaacacaagagucugaaugugcauguguaaaugguucuugcuuuacuguaaugaccgauggaccaagugauggacaggccucauacaagaucuucagaauagaaaagggaaagauagucaaaucagucgaaaugaaugccccuaauuaucacuaugaggaaugcuccuguuauccugauucuagugaaaucacaugugugugcagggauaacuggcauggcucgaaucgaccgugggugucuuucaaccagaaucuggaauaucagauaggauacauaugcagugggauuuucggagacaauccacgcccuaaugauaagacaggcaguugugguccaguaucguuuaauggagcaaauggaguaaaaggauuuucauucaaauacggcaaugguguuuggauagggagaacuaaaagcauuaguucaagaaacgguuuugagaugauuugggauccgaacggauggacugggacagacaauaacuucucaauaaagcaagauaucguaggaauaaaugaguggucaggauauagcgggaguuuuguccagcauccagaacuaacagggcuggauuguauaagaccuugcuucuggguugaacuaaucagagggcgacccaaagagaacacaaucuggacuagcgggagcagcauauccuuuugugguguaaacagugacacuguggguuggucuuggccagacggugcugaguugccauuuaccauugacaaguaa

SEQ ID NO: 53002 - RNA, 1410 nt, Artificial Sequence
  derived and/or modified CDS sequence (wt) from neuraminidase__InfluenzaA__AEM92310
augaauccaaaccaaaagauaauaaccauugguucggucuguaugacaauuggaauggcuaacuuaauauuacaaauuggaaacauaaucucaauauggauuagccacucaauucaacuugggaaucaaaaucagauugaaacaugcaaucaaagcgucauuacuuaugaaaacaacacuuggguaaaucagacauauguuaacaucagcaacaccaacuuugcugcuggacagucagugguuuccgugaaauuagcgggcaauuccucucucugcccuguuaguggaugggcuauauacaguaaagacaacaguauaagaaucgguuccaagggggauguguuugucauaagggaaccauucauaucaugcucccccuuggaaugcagaaccuucuucuugacucaaggggccuugcuaaaugacaaacauuccaauggaaccauuaaagacaggagcccauaucgaacccuaaugagcuguccuauuggugaaguucccucuccauacaacucaagauuugagucagucgcuuggucagcaagugcuugucaugauggcaucaauuggcuaacaauuggaauuucuggcccagacaauggggcaguggcuguguuaaaguacaacggcauaauaacagacacuaucaagaguuggagaaacaauauauugagaacacaagagucugaaugugcauguguaaaugguucuugcuuuacuguaaugaccgauggaccaagugauggacaggccucauacaagaucuucagaauagaaaagggaaagauagucaaaucagucgaaaugaaugccccuaauuaucacuaugaggaaugcuccuguuauccugauucuagugaaaucacaugugugugcagggauaacuggcauggcucgaaucgaccguggguuucuuucaaccagaaucuggaauaucagauaggauacauaugcagugggauuuucggagacaauccacgcccuaaugauaagacaggcaguugugguccaguaucgucuaauggagcaaauggaguaaaaggauuuucauucaaauacggcaaugguguuuggauagggagaacuaaaagcauuaguucaagaaacgguuuugagaugauuugggauccgaacggauggacugggacagacaauaacuucucaauaaagcaagauaucguaggaauaaaugaguggucaggauauagcgggaguuuuguucagcauccagaacuaacagggcuggauuguauaagaccuugcuucuggguugaacuaaucagagggcgacccaaagagaacacaaucuggacuagcgggagcagcauauccuuuugugguguaaacagugacacuguggguuggucuuggccagacggugcugaguugccauuuaccauugacaaguaa

SEQ ID NO: 53003 - RNA, 1410 nt, Artificial Sequence
  derived and/or modified CDS sequence (wt) from neuraminidase__InfluenzaA__AEM92320
augaauccaaaccaaaagauaauaaccauugguucggucuguaugacaauuggaauggccaacuuaauauuacaaauuggaaacauaaucucaauauggauuagccacucaauucaacuugggaaucaaaaucagauugaaacaugcaaucaaagcgucauuacuuaugaaaacaacacuuggguaaaucagacauauguuaacaucagcaacaccaacuuugcugcuggacagucagugguucccgugaaauuagcgggcaauuccucucucugcccuguuaguggaugggcuauauacaguaaagacaacaguauaagaaucgguuccaagggggauguguuugucauaagggaaccauucauaucaugcucccccuuggaaugcagaaccuucuucuugacucaaggggccuuacuaaaugacaaacauuccaauggaaccauuaaagacaggagcccauaucgaacccuaaugagcuguccuauuggugaaguucccucuccauacaacucaagauuugagucagucgcuuggucagcaagugcuugucaugauggcaucaauuggcuaacaauuggaauuucuggcccagacaauggggcaguggcuguguuaaaguacaacggcauaauaacagacacuaucaagaguuggagaaacaauauauugagaacacaagagucugaaugugcauguguaaaugguucuugcuuuacuguaaugaccgauggaccaagugauggacaggccucauacaagaucuucagaauagaaaagggaaagauagucaaaucagucgaaaugaaugccccuaauuaucacuaugaggaaugcuccuguuauccugauucuagugaaaucacaugugugugcagggauaacuggcauggcucgaaccgaccgugggugucuuucaaccagaaucuggaauaucagauaggauacauaugcagugggauuuucggagacaauccacgcccuaaugacaagacaggcaguugugguccaguaucgucuaauggagcaaauggaguaaaaggauuuucauucaaauacggcaaugguguuuggauagggagaacuaaaagcauuaguucaagaaacgguuuugagaugauuugggauccgaacggauggacugggacagacaauaacuucucaauaaagcaagauaucguaggaauaaaugaguggucaggauauagcgggaguuuuguucagcauccagaacuaacagggcuggauuguauaagaccuugcuucuggguugaacuaaucagagggcgacccaaagagaacacaaucuggacuagcgggagcagcauauccuuuugugguguaaacagugacacuguggguuggucuuggccagacggugcugaguugccauuuaccauugacaaguaa

SEQ ID NO: 53004 - RNA, 1410 nt, Artificial Sequence
  derived and/or modified CDS sequence (wt) from neuraminidase__InfluenzaA__AEM92340
augaauccaaaccaaaagauaauaaccauugguucggucuguaugacaauuggaauggcuaacuuaauauuacaaauuggaaacauaaucucaauauggauuagccacucaauucaacuugggaaucaaaaucagauugaaacaugcaaucaaagcgucauuacuuaugaaaacaacacuuggguaaaucagacauauguuaacaucagcaacaccaacuuugcugcuggacagucagugguuuccgugaaauuagcgggcaauuccucucucugcccuguuaguggaugggcuauauacaguaaagacaacaguauaagaaucgguuccaagggggauguguuugucauaagggaaccauucauaucaugcucccccuuggaaugcagaaccuucuucuugacucaaggggccuugcuaaaugacaaacauuccaauggaaccauuaaagacaggagcccauaucgaacccuaaugagcuguccuauuggugaaguucccucuccauacaacucaagauuugagucagucgcuuggucagcaagugcuugucaugauggcaucaauuggcuaacaauuggaauuucuggcccagacaauggggcaguggcuguguuaaaguacaacggcauaauaacagacacuaucaagaguuggagaaacaauauauugagaacacaagagucugaaugugcauguguaaaugguucuugcuuuaccauaaugaccgauggaccaagugauggacaggccucauacaagaucuucagaauagaaaagggaaagauagucaaaucagucgaaaugaaugccccuaauuaucacuaugaggaaugcuccuguuauccugauucuagugaaaucacaugugugugcagggauaacuggcauggcucgaaucgaccgugggugucuuucaaccagaaucuggaauaucagauaggauacauaugcagugggauuuucggagacaauccacgccccaaugauaagacaggcaguugugguccaguaucgucuaauggagcaaauggaguaaaaggauuuucauucaaauacggcaaugguguuuggauagggagaacuaaaagcauuaguucaagaaaagguuuugagaugauuugggauccaaacggauggacuaggacagacaauaacuucucaauaaagcaagauaucguaggaauaaaugaguggucaggauauagcgggaguuuuguucagcauccagaacuaacagggcuggauuguauaagaccuugcuucuggguugaacuaaucagagggcgacccaaagagaacacaaucuggacuagcgggagcagcauauccuuuugugguguaaacagugacacuguggguuggucuuggccagacggugcugaguugccauuuaccauugacaaguaa

SEQ ID NO: 53005 - RNA, 1410 nt, Artificial Sequence
  derived and/or modified CDS sequence (wt) from neuraminidase__InfluenzaA__AEM92350
augaauccaaaccaaaagauaauaaccauugguucggucuguaugacaauuggaauggccaacuuaauauuacaaauuggaaacauaaucucaauauggauuagccacucaauucaacuugggaaucaaaaucagauugaaacaugcaaucaaagcgucauuacuuaugaaaacaacacuuggguaaaucagacauauguuaacaucagcaacaccaacuuugcugcuggacagucagugguucccgugaaauuagcgggcaauuccucucucugcccuguuaguggaugggcuauauacaguaaagacaacaguauaagaaucgguuccaagggggauguguuugucauaagggaaccauucauaucaugcucccccuuggaaugcagaaccuucuucuugacucaaggggccuuacuaaaugacaaacauuccaauggaaccauuaaagacaggagcccauaucgaacccuaaugagcuguccuauuggugaaguucccucuccauacaacucaagauuugagucagucgcuuggucagcaagugcuugucaugauggcaucaauuggcuaacaauuggaauuucuggcccagacaauggggcaguggcuguguuaaaguacaacggcauaauaacagacacuaucaagaguuggagaaacaauauauugagaacacaagagucugaaugugcauguguaaaugguucuugcuuuacuguaaugaccgauggaccaagugauggacaggccucauacaagaucuucagaauagaaaagggaaagauagucaaaucagucgaaaugaaugccccuaauuaucacuaugaggaaugcuccuguuauccugauucuagugaaaucacaugugugugcagggauaacuggcauggcucgaaccgaccgugggugucuuucaaccagaaucuggaauaucagauaggauacauaugcagugggauuuucggagacaauccacguccuaaugacaagacaggcaguugugguccaguaucgucuaauggagcaaauggaguaaaaggauuuucauucaaauacggcaaugguguuuggauagggagaacuaaaagcauuaguucaagaaacgguuuugagaugauuugggauccgaacggauggacugggacagacaauaacuucucaauaaagcaagauaucguaggaauaaaugaguggucaggauauagcgggaguuuuguucagcauccagaacuaacagggcuggauuguauaagaccuugcuucuggguugaacuaaucagagggcgacccaaagagaacacaaucuggacuagcgggagcagcauauccuuuugugguguaaacagugacacuguggguuggucuuggccagacggugcugaguugccauuuaccauugacaaguaa

SEQ ID NO: 53006 - RNA, 1410 nt, Artificial Sequence
  derived and/or modified CDS sequence (wt) from neuraminidase__InfluenzaA__AEM92360
augaauccaaaccaaaagauaauaaccauugguucggucuguaugacaauuggaauggcuaacuuaauauuacaaauuggaaacauaaucucaauauggauuagccacucaauucaacuugggaaucaaaaucagauugaaacaugcaaucaaagcgucauuacuuaugaaaacaacacuuggguaaaucagacauauguuaacaucagcaacaccaacuuugcugcugaacagucagugguuuccgugaaauuagcgggcaauuccucucucugcccuguuaguggaugggcuauauacaguaaagacaacaguauaagaaucgguuccaagggggauguguuugucauaagggaaccauucauaucaugcucccccuuggaaugcagaaccuucuucuugacucaaggggccuugcuaaaugacaaacauuccaauggaaccauuaaagacaggagcccauaucgaacccuaaugagcuguccuauuggugaaguucccucuccauacaacucaagauuugagucagucgcuuggucagcaagugcuugucaugauggcaucaauuggcuaacaauuggaauuucuggcccagacaauggggcaguggcuguguuaaaguacaacggcauaauaacagacacuaucaagaguuggagaaacaauauauugagaacacaagagucugaaugugcauguguaaaugguucuugcuuuaccauaaugaccgauggaccaagugauggacaggccucauacaagaucuucagaauagaaaagggaaagauagucaaaucagucgaaaugaaugccccuaauuaucacuaugaggaaugcuccuguuauccugauucuagugaaaucacaugugugugcagggauaacuggcauggcucgaaucgaccgugggugucuuucaaccagaaucuggaauaucagauaggauacauaugcagugggauuuucggagacaauccacgcccuaaugauaagacaggcaguugugguccaguaucgucuaauggagcaaauggaguaaaaggauuuucauucaaauacggcaaugguguuuggauagggagaacuaaaagcauuaguucaagaaaagguuuugagaugauuugggauccaaacggauggacugggacagacaauaacuucucaauaaagcaagauaucguaggaauaaaugaguggucaggauauagcgggaguuuuguucagcauccagaacuaacagggcuggacuguauaagaccuugcuucuggguugaacuaaucagagggcgacccaaagagaacacaaucuggacuagcgggagcagcauauccuuuugugguguaaacagugacacuguggguuggucuuggccagacggugcugaguugccauuuaccauugacaaguaa

SEQ ID NO: 53007 - RNA, 1410 nt, Artificial Sequence; identical to SEQ ID NO: 53004
  derived and/or modified CDS sequence (wt) from neuraminidase__InfluenzaA__AEM92370

SEQ ID NO: 53008 - RNA, 1410 nt, Artificial Sequence
  derived and/or modified CDS sequence (wt) from neuraminidase__InfluenzaA__AEM92380
augaauccaaaccaaaagauaauaaccauugguucggucuguaugacaauuggaauggcuaacuuaauauuacaaauuggaaacauaaucucaauauggauuagccacucaauucaacuugggaaucaaaaucagauugaaacaugcaaucaaagcgucauuacuuaugaaaacaacacuuggguaaaucagacauauguuaacaucagcaacaccaacuuugcugcuggacagucagugguuuccguaaaauuagcgggcaauuccucucucugcccuguuaguggaugggcuauauacaguaaagacaacaguauaagaaucgguuccaagggggauguguuugucauaagggaaccauucauaucaugcucccccuuggaaugcagaaccuucuucuugacucaaggggccuugcuaaaugacaaacauuccaauggaaccauuaaagacaggagcccauaucgaacccuaaugagcuguccuauuggugaaguucccucuccauacaacucaagauuugagucagucgcuuggucagcaagugcuugucaugauggcaucaauuggcuaacaauuggaauuucuggcccagacaauggggcaguggcuguguuaaaguacaacggcauaauaacagacacuaucaagaguuggagaaacaauauauugagaacacaagagucugaaugugcauguguaaaugguucuugcuuuaccauaaugaccgauggaccaagugauggacaggccucauacaagaucuucagaauagaaaagggaaagauagucaaaucagucgaaaugaaugccccuaauuaucacuaugaggaaugcuccuguuauccugauucuagugaaaucacaugugugugcagggauaacuggcauggcucgaaucgaccgugggugucuuucaaccagaaucuggaauaucagauaggauacauaugcagugggauuuucggagacaauccacgccccaaugauaagacaggcaguugugguccaguaucgucuaauggagcaaauggaguaaaaggauuuucauucaaauacggcaaugguguuuggauagggagaacuaaaagcauuaguucaagaaaagguuuugagaugauuugggauccaaacggauggacuaggacagacaauaacuucucaauaaagcaagauaucguaggaauaaaugaguggucaggauauagcgggaguuuuguucagcauccagaacuaacagggcuggauuguauaagaccuugcuucuggguugaacuaaucagagggcgacccaaagagaacacaaucuggacuagcgggagcagcauauccuuuugugguguaaacagugacacuguggguuggucuuggccagacggugcugaguugccauuuaccauugacaaguaa

SEQ ID NO: 53009 - RNA, 1410 nt, Artificial Sequence
  derived and/or modified CDS sequence (wt) from neuraminidase__InfluenzaA__AEM92399
augaauccaaaccaaaagauaauaaccauugguucggucuguaugacaauuggaauggccaacuuaauauuacaaauuggaaacauaaucucaauauggauuagccacucaauucaacuugggaaucaaaaucagauugaaacaugcaaucaaagcgucauuacuuaugaaaacaacacuuggguaaaucagacauauguuaacaucagcaacaccaacuuugcugcuggacagucagugguguccgugaaauuagcgggcaauuccucucucugcccuguuaguggaugggcuauauacaguaaagacaacaguauaagaaucgguuccaagggggauguguuugucauaagggaaccauucauaucaugcucccccuuggaaugcagaaccuucuucuugacucaaggggccuugcuaaaugacaaacauuccaauggaaccauuaaagacaggagcccauaucgaacccuaaugagcuguccuauuggugaaguucccucuccauacaacucaagauuugagucagucgcuuggucagcaagugcuugucaugauggcaccaauuggcuaacaauuggaauuucuggcccagacaauggggcaguggcuguguuaaaguacaacggcauaauaacagacacuaucaagaguuggagaaacaauauauugagaacacaagagucugaaugugcauguguaaaugguucuugcuuuacuguaaugaccgauggaccaagugauggacaggccucauacaagaucuucagaauagaaaagggaaagauagucaaaucagucgaaaugaaugccccuaauuaucacuaugaggaaugcuccuguuauccugauucuagugaaaucacaugugugugcagggauaacuggcauggcucgaaucgaccgugggugucuuucaaccagaaucuggaauaucagauaggauacauaugcagugggauuuucggagacaauccacgcccuaaugacaagacaggcaguugugguccaguauugucuaauggagcaaauggaguaaaaggauuuucauucaaauacggcaaugguguuuggauagggagaacuaaaagcauuaguucaagaaacggguuugagaugauuugggauccgaacggauggacugggacagacaauaacuucucaauaaagcaagauaucguaggaauaaaugaguggucaggauauagcgggaguuuuguucagcauccagaacuaacagggcuggauuguauaagaccuugcuucuggguugaacuaaucagagggcgacccaaagagaacacaaucuggacuagcgggagcagcauauccuuuugugguguaaacagugacacuguggguuggucuuggccagacggugcugaguugccauuuaccauugacaaguaa

SEQ ID NO: 53010 - RNA, 1410 nt, Artificial Sequence
  derived and/or modified CDS sequence (wt) from neuraminidase__InfluenzaA__AEM92409
augaauccaaaccaaaagauaauaaccauugguucggucuguaugacaauuggaauggcuaacuuaauauuacaaauuggaaacauaaucucaauauggauuagccacucaauucaacuugggaaucaaaaucagauugaaacaugcaaucaaagcgucauuacuuaugaaaacaacacuuggguaaaucagacauauguuaacaucagcaacaccaacuuugcugcuggacagucagugguguccgugaaauuagcgggcaauuccucucucugcccuguuaguggaugggcuauauacaguaaagacaacaguauaagaaucgguuccaagggggauguguuugucauaagggaaccauucauaucaugcucccccuuggaaugcagaaccuucuucuugacucaaggggccuugcuaaaugacaaacauuccaauggaaccauuaaagacaggagcccauaucgaacccuaaugagcuguccuauuggugaaguucccucuccauacaacucaagauuugagucagucgcuuggucagcaagugcuugucaugauggcaccaauuggcuaacaauuggaauuucuggcccagacaauggggcaguggcuguguuaaaguacaacggcauaauaacagacacuaucaagaguuggagaaacaauauauugagaacacaagagucugaaugugcauguguaaaugguucuugcuuuacuguaaugaccgauggaccaagugauggacaggccucauacaagaucuucagaauagaaaagggaaagauagucaaaucagucgaaaugaaugccccuaauuaucacuaugaggaaugcuccuguuauccugauucuagugaaaucacaugugugugcagggauaacuggcauggcucgaaucgaccgugggugucuuucaaccagaaucuggaauaucagauaggauacauaugcagugggauuuucggagacaauccacgcccuaaugacaagacaggcaguugugguccaguauugucuaauggagcaaauggaguaaaaggauuuucauucaaauacggcaaugguguuuggauagggagaacuaaaagcauuaguucaagaaacggguuugagaugauuugggauccgaacggauggacugggacagacaauaacuucucaauaaagcaagauaucguaggaauaaaugaguggucaggauauagcgggaguuuuguucagcauccagaacuaacagggcuggauuguauaagaccuugcuucuggguugaacuaaucagagggcgacccaaagagaacacaaucuggacuagcgggagcagcauauccuuuugugguguaaacagugacacuguggguuggucuuggccagacggugcugaguugccauuuaccauugacaaguaa

SEQ ID NO: 53011 - RNA, 1410 nt, Artificial Sequence; identical to SEQ ID NO: 49196
  derived and/or modified CDS sequence (wt) from neuraminidase__InfluenzaA__AEM92419

SEQ ID NO: 53012 - RNA, 1410 nt, Artificial Sequence
  derived and/or modified CDS sequence (wt) from neuraminidase__InfluenzaA__AEM92430
augaauccaaaccaaaagauaaugaccauugguucggucuguaugacaauuggaauggcuaacuuaauauuacaaauuggaaacauaaucucaauauggauuagccacucaauucaacuugggaaucaaaaucagauugaaacaugcaaucaaagcgucauuacuuaugaaaacaacacuuggguaaaucagacauauguuaacaucagcaacaccaacuuugcugcuggacagucagugguuuccgugaaauuagcgggcaauuccucucucugcccuguuaguggaugggcuauauacaguaaagacaacaguauaagaaucgguuccaagggggauguguuugucauaagggaaccauucauaucaugcucccccuuggaaugcagaaccuucuucuugacucaaggggccuugcuaaaugacaaacauuccaauggaaccauuaaagacaggagcccauaucgaacccuaaugagcuguccuauuggugaaguucccucuccauacaacucaagauuugagucagucgcuuggucagcaagugcuugucaugauggcaucaauuggcuaacaauuggaauuucuggcccagacaauggggcaguggcuguguuaaaguacaacggcauaauaacagacacuaucaagaguuggagaaacaauauauugagaacacaagagucugaaugugcauguguaaaugguucuugcuuuacuguaaugaccgauggaccaagugauggacaggccucauacaagaucuucagaauagaaaagggaaagauagucaaaucagucgaaaugaaugccccuaauuaucacuaugaggaaugcuccuguuauccugauucuagugaaaucacaugugugugcagggauaacuggcauggcucgaaucgaccgugggugucuuucaaccagaaucuggaauaucagauaggauacauaugcagugggauuuucggagacaauccacgcccuaaugauaagacaggcaguugugguccaguaucgucuaauggagcaaauggaguaaaaggauuuucauucaaauacggcaaugguguuuggauagggagaacuaaaagcauuaguucaagaaacgguuuugagaugauuugggauccgaacggauggacugggacagacaauaacuucucaauaaagcaagauaucguaggaauaaaugaguggucaggauauagcgggaguuuuguucagcauccagaacuaacagggcuggauuguauaagaccuugcuucuggguugaacuaaucagagggcgacccaaagagaacacaaucuggacuagcgggagcagcauauccuuuugugguguaaacagugacacuguggguuggucuuggccagacggugcugaguugccauuuaccauugacaaguaa

SEQ ID NO: 53013 - RNA, 1410 nt, Artificial Sequence
  derived and/or modified CDS sequence (wt) from neuraminidase__InfluenzaA__AEM92440
augaauccaaaccaaaagauaauaaccauugguucggucuguauaacaauuggaauggcuaacuuaauauuacaaauuggaaacauaaucucaauauggauuagccacucaauucaacuugggaaucaaagucagauugaaacaugcaaucaaagcgucauuacuuaugaaaacaacacuuggguaaaucagacauauguuaacaucagcaacaccaacuuugcugcuggacagucagugguuuccgugaaauuagcgggcaauuccucucucugcccuguuaguggaugggcuauauacaguaaagacaacaguauaagaaucgguuccaagggggauguguuugucauaagggaaccauucauaucaugcucccccuuggaaugcagaaccuucuucuugacucaaggggccuugcuaaaugacaaacauuccaauggaaccauuaaagacaggagcccauaucggacccuaaugagcuguccuauuggugaaguucccucuccauacaacucaagauuugagucagucgcuuggucagcaagugcuugucaugauggcaucaauuggcuaacaauuggaauuucuggcccagacaauggggcaguggcuguguuaaaguacaacggcauaauaacagacacuaucaagaguuggagaaacaauauauugagaacacaagagucugaaugugcauguguaaaugguucuugcuuuaccauaaugaccgauggaccaagugauggacaggccucauacaagaucuucagaauagaaaagggaaagauagucaaaucagucgaaaugauugccccuaauuaucacuaugaggaaugcuccuguuauccugauucuagugaaaucacaugugugugcagggauaacuggcauggcucgaaucgaccgugggugucuuucaaccagaaucuggaauaucagauaggauacauaugcagugggauuuucggagacaauccacgcccuaaugauaagacaggcaguugugguccaguaucgucuaauggagcaaauggaguaaaaggauuuucauucaaguacggcaaugguguuuggauagggagaacuaaaagcauuaguucaagaaaagguuuugagaugauuugggauccaaacggauggacugggacagacaauaacuucucaauaaagcaagauauuguaggaauaaaugaguggucaggauauagcgggaguuuuguucagcauccagaacuaacagggcuggauuguauaagaccuugcuucuggguugaacuaaucagagggcgacccaaagagaacacaaucuggacuagcgggagcagcauauccuuuugugguguaaacagugacacuguggguuggucuuggccagacggugcugaguugccauuuaccauugacaaguaa

SEQ ID NO: 53014 - RNA, 1410 nt, Artificial Sequence
  derived and/or modified CDS sequence (wt) from neuraminidase__InfluenzaA__AEM92450
augaauccaaaccaaaagauaauaaccauugguucggucuguaugacaauuggaauggcuaacuuaauauuacaaauuggaaacauaaucucaauauggauuagccacucaauucaacuugggaaucaaaaucagauugaaacaugcaaucaaagcgucauuacuuaugaaaacaacacuuggguaaaucagacauauguuaacaucagcaacaccaacuuugcugcuggacagucagugguuuccgugaaauuagcgggcaauucuucucucugcccuguuaguggaugggcuauauacaguaaagacaacaguauaagaaucgguuccaagggggauguguuugucauaagggaaccauucauaucaugcuccccuuuggaaugcagaaccuucuucuugacucaaggggccuugcuaaaugacaaacauuccaauggaaccauuaaagacaggagcccauaucgaacccuaaugagcuguccuauuggugaaguucccucuccauacaacucaagauuugagucagucgcuuggucagcaagugcuugucaugauggcaucaauuggcuaacaauuggaauuucuggcccagacaauggggcaguggcuguguuaaaguacaacggcauaauaacagacacuaucaagaguuggagaaacaauauauugagaacacaagaguccgaaugugcauguguaaauggcucuugcuuuacugugaugaccgauggaccaagugauggacaggccucauacaagaucuucagaauagaaaagggaaagauagucaaaucagucgaaaugaaugccccuaauuaucacuaugaggaaugcuccuguuauccugauucuagugaaaucacaugugugugcagggauaacuggcauggcgcgaaucgaccgugggugucuuucaaccagaaucuggaauaucagauaggauacauaugcagugggauuuucggagacaauccacgcccuaaugauaagacaggcaguugugguccaguaucgucuaauggagcaaauggaguaaaaggauuuucauucaaauacggcaaugguguuuggauagggagaacuaaaagcauuaguucaagaaacgguuuugagaugauuugggauccuaacggauggacugggacagacaauaacuucucaauaaagcaagauaucguaggaauaaaugaguggucaggauauagcgggaguuuuguucagcauccagaacuaacagggcuggauuguauaagaccuugcuucuggguugaacuaaucagagggcgacccaaagagaacacaaucuggacuagcgggagcagcauauccuuuugugguguaaacagugacacuguggguuggucuuggccagacggugcugaguugccauuuaccauugacaaguaa

SEQ ID NO: 53015 - RNA, 1410 nt, Artificial Sequence; identical to SEQ ID NO: 53014
  derived and/or modified CDS sequence (wt) from neuraminidase__InfluenzaA__AEM92460

SEQ ID NO: 53016 - RNA, 1410 nt, Artificial Sequence
  derived and/or modified CDS sequence (wt) from neuraminidase__InfluenzaA__AEM92470
augaauccaaaccaaaagauaauaaccauugguucggucuguaugacaauuggaauggcuaacuuaauauuacaaauuggaaacauaaucucaauauggauuagccacucaauucaacuugggaaucaaaaucagauugaaacaugcaaucaaagcgucauuacuuaugaaaacaacacuuggguaaaucagacauauguuaacaucagcaacaccaacuuugcugcuggacagucagugguuuccgugaaauuagcgggcaauuccucucucugcccuguuaguggaugggcuauauacaguaaagacaacaguauaagaaucgguuccaagggggauguguuugucauaagggaaccauucauaucaugcucccccuuggaaugcagaaccuucuucuugacucaaggggccuugcuaaaugacaaacauuccaauggaaccauuaaagacaggagcccauaucgaacccuaaugagcuguccuauuggugaaguucccucuccauacaacucaagauuugagucagucgcuuggucagcaagugcuugucaugauggcaucaauuggcuaacaauuggaauuucuggcccagacaauggggcaguggcuguguuaaaguacaacggcauaauaacagacacuaucaagaguuggagaaacaauauauugagaacacaagagucugaaugugcauguguaaaugguucuugcuuuaccauaaugaccgauggaccaagugauggacaggccucauacaagaucuucagaauagaaaagggaaagauagucaaaucagucgaaaugaaugccccuaauuaucacuaugaggaaugcuccuguuauccugauucuagugaaaucacaugugugugcagggauaauuggcauggcucgaaucgaccgugggugucuuucaaccagaaucuggaauaucagauaggauacauaugcagugggauuuucggagacaauccacgcccuaaugauaagacaggcaguugugguccaguaucgucuaauggagcaaauggaguaaaaggauuuucauucaaauacggcaaugguguuuggauagggagaacuaaaagcauuaguucaagaaaagguuuugagaugauuugggauccaaacggauggacugggacagacaauaacuucucaauaaagcaagauaucguaggaauaaaugaguggucaggauauagcgggaguuuuguucagcauccagaacuaacagggcuggauuguauaagaccuugcuucuggguugaacuaaucagagggcgacccaaagagaacacaaucuggacuagcgggagcagcauauccuuuugugguguaaacagugacacuguggguuggucuuggccagacggugcugaguugccauuuaccauugacaaguaa

SEQ ID NO: 53017 - RNA, 1410 nt, Artificial Sequence; identical to SEQ ID NO: 53016
  derived and/or modified CDS sequence (wt) from neuraminidase__InfluenzaA__AEM92480

SEQ ID NO: 53018 - RNA, 1410 nt, Artificial Sequence
  derived and/or modified CDS sequence (wt) from neuraminidase__InfluenzaA__AEM92490
augaauccaaaccaaaagauaauaaccauugguucggucuguaugauaauuggaauggcuaacuuaauguuacaaauuggaaacauaaucucaauauggauuagccacucaauucaacuugggaaucaaaaucagauugaaacaugcaaucaaagcgucauuacuuaugaaaacaacacuuggguaaaucagacauauguuaacaucagcaacaccaacuuugcugcuggacagucagugguuuccgugaaauuagcgggcaauuccucucucugcccuguuaguggaugggcuauauacaguaaagacaacaguauaagaaucgguuccaagggggauguguuugucauaagggaaccauucauaucaugcucccccuuggaaugcagaaccuucuucuugacucaaggggccuugcuaaaugacaaacauuccaauggaaccauuaaagacaggagcccauaucgaacccuaaugagcuguccuauuggugaaguucccucuccauacaacucaagauuugagucagucgcuuggucagcaagugcuugucaugauggcaucaauuggcuaacaauuggaauuucuggcccagacaauggggcaguggcuguguuaaaguacaacggcauaauaacagacacuaucaagaguuggagaaacaauauauugagaacacaagagucugaaugugcauguguaaaugguucuugcuuuacuauaaugaccgauggaccaagugauggacaggccucauacaagaucuucagaauagaaaagggaaagauagucaaaucagucgaaaugaaugccccuaauuaucacuaugaggaaugcuccuguuauccugauucuagugaaaucacaugugugugcagggauaacuggcauggcucgaaucgaccgugggugucuuucaaccagaaucuggaauaucagauaggauacauaugcagugggauuuucggagacaauccacgcccuaaugauaagacaggcaguugugguccaguaucgucuaauggagcaaauggaguaaaaggauuuucauucaaauacggcaaugguguuuggauagggagaacuaaaagcauuaguucaagaaacgguuuugagaugauuugggauccgaacggauggacugggacagacaauaacuucucaauaaagcaagauaucguaggaauaaaugaguggucaggauauagcgggaguuuuguucagcauccagaacuaacagggcuggauuguauaagaccuugcuucuggguugaacuaaucagagggcgacccaaagagaacacaaucuggacuagcgggagcagcauauccuuuugugguguaaacagugacacuguggguuggucuuggccagacggugcugaguugccauuuaccauugacaaguaa

SEQ ID NO: 53019 - RNA, 1410 nt, Artificial Sequence
  derived and/or modified CDS sequence (wt) from neuraminidase__InfluenzaA__AEM92500
augaauccaaaccaaaagauaauaaccauugguucggucuguaugauaauuggaauggcuaacuuaauguuacaaauuggaaacauaaucucaauauggauuagccacucaauucaacuugggaaucaaaaucagauugaaacaugcaaucaaagcgucauuacuuaugaaaacaacacuuggguaaaucagacauauguuaacaucagcaacaccaacuuugcugcuggacagucagugguuuccgugaaauuagcgggcaauuccucucucugcccuguuaguggaugggcuauauacaguaaagacaacaguauaagaaucgguuccaaaggggauguguuugucauaagggaaccauucauaucaugcucccccuuggaaugcagaaccuucuucuugacucaaggggccuugcuaaaugacaaacauuccaauggaaccauuaaagacaggagcccauaucgaacccuaaugagcuguccuauuggugaaguucccucuccauacaacucaagauuugagucagucgcuuggucagcaagugcuugucaugauggcaucaauuggcuaacaauuggaauuucuggcccagacaauggggcaguggcuguguuaaaguacaacggcauaauaacagacacuaucaagaguuggagaaacaauauauugagaacacaagagucugaaugugcauguguaaaugguucuugcuuuacuauaaugaccgauggaccaagugauggacaggccucauacaagaucuucagaauagaaaagggaaagauagucaaaucagucgaaaugaaugccccuaauuaucacuaugaggaaugcuccuguuauccugauucuagugaaaucacaugugugugcagggauaacuggcauggcucgaaucgaccgugggugucuuucaaccagaaucuggaauaucagaugggauacauaugcagugggauuuucggagacaauccacgcccuaaugauaagacaggcaguugugguccaguaucgucuaauggagcaaauggaguaaaaggauuuucauucaaauacggcaaugguguuuggauagggagaacuaaaagcauuaguucaagaaacgguuuugagaugauuugggauccgaacggauggacugggacagacaauaaauucucaauaaagcaagauaucguaggaauaaaugaguggucaggauauagcgggaguuuuguucagcauccagaacuaacagggcuggauuguauaagaccuugcuucuggguugaacuaaucagagggcgacccaaagagaacacaaucuggacuagcgggagcagcauauccuuuugugguguaaacagugacacuguggguuggucuuggccagacggugcugaguugccauuuaccauugacaaguaa

SEQ ID NO: 53020 - RNA, 1410 nt, Artificial Sequence
  derived and/or modified CDS sequence (wt) from neuraminidase__InfluenzaA__AEM92520
augaauccaaaccaaaagauaauaaccauugguucggucuguaugacaauuggaauggcuaacuuaauguuacaaauuggaaacauaaucucaauauggauuagccacucaauucaacuugggaaucaaaaucagauugaaacaugcaaucaaagcgucauuacuuaugaaaacaacacuuggguaaaucagacauauguuaacaucagcaacaccaacuuugcugcuggacagucagugguuuccgugaaauuagcgggcaauuccucucucugcccuguuaguggaugggcuauauacaguaaagacaacaguauaagaaucgguuccaagggggauguguuugucauaagggaaccauucauaucaugcucccccuuggaaugcagaaccuucuucuugacucaaggggcccugcuaaaugacaaacauuccaauggaaccauuaaagacaggagcccauaucgaacccuaaugagcuguccuauuggugaaguucccucuccauacaacucaagauuugagucagucgcuuggucagcaagugcuugucaugauggcaucaauuggcuaacaauuggaauuucuggcccagacaauggggcaguggcuguguuaaaguacaacggcauaauaacagacacuaucaagaguuggagaaacaauauauugagaacacaagagucugaaugugcauguguaaaugggucuugcuuuacuguaaugaccgauggaccaagugauggacaggccucauacaagaucuucagaauagaaaagggaaagauagucaaaucagucgaaaugaaugccccuaauuaccacuaugaggaaugcuccuguuauccugauucuagugaaaucacaugugugugcagggauaacuggcauggcucgaaucgaccgugggugucuuucaaccagaaucuggaauaucagauaggauacauaugcagugggauuuucggagacaauccacgcccuaaugauaagacaggcaguugugguccaguaucgucuaauggagcaaauggaguaaaaggauuuucauucaaauacggcaaugguguuuggauagggagaacuaaaagcauuaguucaagaaacgguuuugaaaugauuugggauccgaacggauggacugggacagacaauaacuucucaauaaagcaagauaucauaggaauaaaugaguggucaggauauagcgggaguuuuguucagcauccagaacuaacagggcuggauuguauaagaccuugcuucuggguugaacuaaucagagggcgacccaaagagaacacaaucuggacuagcgggagcagcauauccuuuugugguguaaacagugacacuguggguuggucuuggccagacggugcugaguugccauuuaccauugacaaguaa

SEQ ID NO: 53021 - RNA, 1410 nt, Artificial Sequence
  derived and/or modified CDS sequence (wt) from neuraminidase__InfluenzaA__AEM92550
augaauccaaaccaaaagauaauaaccauugguucggucuguaugacaauuggaauggcuaacuuaauauuacaaauuggaaacauaaucucaauauggauuagccacucaauucaacuugggaaucaaaaucagauugaaacaugcaaucaaagcgucauuacuuaugaaaacaacacuuggguaaaucagacauauguuaacaucagcaacaccaacuuugcugcuggacagucagugguuuccgugaaauuagcgggcaauuccucucucugcccuguuaguggaugggcuauauacaguaaagacaacaguauaagaaucgguuccaagggggauguguuugucauaagggaaccauucauaucaugcucccccuuggaaugcagaaccuucuucuugacucaaggggccuugcuaaaugacaaacauuccaauggaaccauuaaagacaggagcccauaucgaacccuaaugagcugucccauuggugaaguucccucuccauacaacucaagauuugagucagucgcuuggucagcaagugcuugucaugauggcaucaauuggcuaacaauuggaauuucuggcccagacaauggggcaguggcuguguuaaaguacaacggcauaauaacagacacuaucaagaguuggagaaacaauauauugagaacacaagagucugaaugugcauguguaaaugguucuugcuuuaccauaaugaccgauggaccaagugauggacaggccucauacaagaucuucagaauagaaaagggaaagauagucaaaucagucgaaaugaaugccccuaauuaucacuaugaggaaugcuccuguuauccugauucuagugaaaucacaugugugugcagggauaacuggcauggcucgaaucgaccgugggugucuuucaaccagaaucuggaauaucagauaggauacauaugcagugggauuuucggagacaauccacgcccuaaugauaagacaggcaguugugguccaguaucgucuaauggagcaaauggaguaaaaggauuuucauucaaauacggcaaugguguuuggauagggagaacuaaaagcauuaguucaagaaaagguuuugagaugauuugggauccaaacggauggacugggacagacaauaacuucucaauaaagcaagauaucguaggaauaaaugaguggucaggauauagcgggaguuuuguucagcauccagaacuaacagggcuggacuguauaagaccuugcuucuggguugaacuaaucagagggcgacccaaagagaacacaaucuggacuagcgggagcagcauauccuuuugugguguaaacagugacacuguggguuggucuuggccagacggugcugaguugccauuuaccauugacaaguaa

SEQ ID NO: 53022 - RNA, 1410 nt, Artificial Sequence
  derived and/or modified CDS sequence (wt) from neuraminidase__InfluenzaA__AEM92570
augaauccaaaccaaaagauaauaaccauugguucggucuguaugacaauuggaauggcuaacuuaauauuacaaauuggaaacauaaucucaauauggauuagccacucaauucaacuugggaaucaaaaucagauugaaacaugcaaucaaagcgucauuacuuaugaaaacaacacuuggguaaaucagacauauguuaacaucagcaacaccaacuuugcugcuggacagucagugguuuccgugaaauuagcgggcaauuccucucucugcccuguuaguggaugggcuauauacaguaaagacaacaguauaagaaucgguuccaaggggaauguguuugucauaagggaaccauucauaucaugcucccccuuggaaugcagaaccuucuucuugacucaaggggccuugcuaaaugauaaacauuccaauggaaccauuaaagacaggagcccauaucgaacccuaaugagcuguccuauuggugaaguucccucuccauacaacucaagauuugagucagucgcuuggucagcaagugcuugucaugauggcaucaauuggcuaacaauuggaauuucuggcccagacaauggggcaguggcuguguuaaaguacaacggcauaauaacagacacuaucaagaguuggagaaacaauauauugagaacacaagagucugaaugugcauguguaaaugguucuugcuuuaccauaaugaccgauggaccaagugauggacaggccucauacaagaucuucagaauagaaaagggaaagauagucaaaucagucgaaaugaaugccccuaauuaucacuaugaggaaugcuccuguuauccugauucuagugaaaucacaugugugugcagggauaacuggcauggcucgaaucgaccgugggugucuuucaaccagaaucuggaauaucagauaggauacauaugcagugggauuuucggagacaauccacgcccuaaugauaagacaggcaguugugguccaguaucgucuaauggagcaaauggaguaaaaggauuuucauucaaauacggcaaugguguuuggauagggagaacuaaaagcauuaguucaagaaaagguuuugagaugauuugggauccaaacggauggacugggacagacaauaacuucucaauaaagcaagauaucguaggaauaaaugaguggucaggauauagcgggaguuuuguucagcauccagaacuaacagggcuggacuguauaagaccuugcuucuggguugaacuaaucagagggcgacccaaagagaacacaaucuggacuagcgggagcagcauauccuuuugugguguaaacagugacacuguggguuggucuuggccagacggugcugaguugccauuuaccauugacaaguaa

SEQ ID NO: 53023 - RNA, 1410 nt, Artificial Sequence
  derived and/or modified CDS sequence (wt) from neuraminidase__InfluenzaA__AEM92580
augaauccaaaccaaaagauaauaaccauugguucggucuguaugacaauuggaauggcuaacuuaauauuacaaauuggaaacauaaucucaauauggauuagccacucaauucaacuugggaaucaaaaucagauugaaacaugcaaucaaagcgucauuacuuaugaaaacaacacuuggguaaaucagacauauguuaacaucagcaacaccaacuuugcugcuggacagucagugguuuccgugaaauuagcgggcaauuccucucucugcccuguuaguggaugggcuauauacaguaaagacaacaguauaagaaucgguuccaagggggauguguuugucauaagggaaccauucauaucaugcucccccuuggaaugcagaaccuucuucuugacucaaggggccuugcuaaaugacaaacauuccaauggaaccauuaaagacaggagcccauaucgaacccuaaugagcuguccuauuggugaaguucccucuccauacaacucaagauuugagucagucgcuuggucagcaagugcuugucaugauggcaucaauuggcuaacaauuggaauuucuggcccagacaauggggcaguggcuguguuaaaguacaacggcauaauaacagacacuaucaagaguuggagaaacaauauauugagaacacaagagucugaaugugcauguguaaaugguucuugcuuuaccauaaugaccgauggaccaaguaauggacaggccucauacaagaucuucagaauagaaaagggaaagauagucaaaucagucgaaaugaaugccccuaauuaucacuaugaggaaugcuccuguuauccugauucuagugaaaucacaugugugugcagggauaacuggcauggcucgaaucgaccgugggugucuuucaaccagaaucuggaauaucagauaggauacauaugcagugggauuuucggagacaauccacgcccuaaugauaagacaggcaguugugguccaguaucgucuaauggagcaaauggaguaaaaggauuuucauucaaauacggcaaugguguuuggauagggagaacuaaaagcauuaguucaagaaaagguuuugagaugauuugggauccaaacggauggacugggacagacaauaacuucucaauaaagcaagauaucguaggaauaaaugaguggucaggauauagcgggaguuuuguucagcauccagaacuaacagggcuggacuguauaagaccuugcuucuggguugaacuaaucagagggcgacccaaagagaacacaaucuggacuagcgggagcagcauauccuuuugugguguaaacagugacacuguggguuggucuuggccagacggugcugaguugccauuuaccauugacaaguaa

SEQ ID NO: 53024 - RNA, 1410 nt, Artificial Sequence
  derived and/or modified CDS sequence (wt) from neuraminidase__InfluenzaA__AEM92590
augaauccaaaccaaaagauaauaaccauugguucggucuguaugacaauuggaauggccaacuuaauauuacaaauuggaaacauaaucucaauauggauuagccacucaauucaacuugggaaucaaaaucagauugaaacaugcaaucaaagcgucauuacuuaugaaaacaacacuuggguaaaucagacauauguuaacaucagcaacaccaacuuugcugcuggacagucagugguuuccgugaaauuagcgggcaauuccucucucugcccuguuaguggaugggcuauauacaguaaagacaacaguauaagaaucgguuccaagggggauguguuugucauaagggaaccauucauaucaugcucccccuuggaaugcagaaccuucuucuugacucaaggggccuugcuaaaugauaaacauuccaauggaaccauuaaagacaggagcccauaucgaacccuaaugagcuguccuauuggugaaguucccucuccauacaacucaagauuugagucagucgcuuggucagcaagugcuugucaugauggcaucaauuggcuaacaauuggaauuucuggcccagacaauggggcaguggcugugcuaaaguacaacggcauaauaacagacacuaucaagaguuggagaaacaauauauugagaacacaagagucugaaugugcauguguaaaugguucuugcuuuaccauaaugaccgauggaccaagugauggacaggccucauacaagaucuucagaauagaaaagggaaagauagucaaaucagucgaaaugaaugccccuaauuaucacuaugaggaaugcuccuguuauccugauucuagugaaaucacaugugugugcagggauaacuggcauggcucgaaucgaccgugggugucuuucaaccagaaucuggaauaucagauaggauacauaugcagugggauuuucggagacaauccacgcccuaaugauaagacaggcaguugugguccaguaucgucuaauggagcaaauggaguaaaaggauuuucauucaaauacggcaaugguguuuggauagggagaacuaaaagcauuaguucaagaaaagguuuugagaugauuugggauccaaacggauggacugggacagacaauaacuucucaauaaagcaagauaucguaggaauaaaugaguggucaggauauagcgggaguuuuguucagcauccagaacuaacagggcuggauuguauaagaccuugcuucuggguugaacuaaucagagggcgacccaaagagaacacaaucuggacuagcgggagcagcauauccuuuugugguguaaacagugacacuguggguuggucuuggccagacggugcugaguugccauuuaccauugacaaguaa

SEQ ID NO: 53025 - RNA, 1410 nt, Artificial Sequence
  derived and/or modified CDS sequence (wt) from neuraminidase__InfluenzaA__AEM92600
augaauccaaaccaaaagauaauaaccauugguucggucuguaugacaauuggaauggccaacuuaauauuacaaauuggaaacauaaucucaauauggauuagccacucaauucaacuugggaaucaaaaucagauugaaacaugcaaucaaagcgucauuacuuaugaaaacaacacuuggguaaaucagacauauguuaacaucagcaacaccaacuuugcugcuggacagucagugguuuccgugaaauuagcgggcaauuccucucucugcccuguuaguggaugggcuauauacaguaaagacaacaguauaagaaucgguuccaagggggauguguuugucauaagggaaccauucauaucaugcucccccuuggaaugcagaaccuucuucuugacucaaggggccuugcuaaaugacaaacauuccaauggaaccauuaaagacaggagcccauaucgaacccuaaugagcuguccuauuggugaaguucccucuccauacaacucaagauuugagucagucgcuuggucagcaagugcuugucaugauggcaucaauuggcuaacaauuggaauuucuggcccagacaauggggcaguggcuguguuaaaguacaacggcauaauaacagacacuaucaagaguuggagaaacaauauauugagaacacaagagucugaaugugcauguguaaaugguucuugcuuuaccauaaugaccgauggaccaagugauggacaggccucauacaagaucuucagaauagaaaagggaaagauagucaaaucagucgaaaugaaugccccuaauuaucacuaugaggaaugcuccuguuauccugauucuagugaaaucacaugugugugcagggauaacuggcauggcucgaaucgaccgugggugucuuucaaccagaaucuggaauaucagauaggauacauaugcagugggauuuucggagacaauccacgcccuaaugauaagacaggcaguugugguccaguaucgucuaauggagcaaauggaguaaaaggauuuucauucaaauacggcaaugguguuuggauagggagaacuaaaagcauuaguucaagaaaagguuuugagaugauuugggauccaaacggauggacugggacagacaauaacuucucaauaaagcaagauaucguaggaauaaaugaguggucaggauauagcgggaguuuuguucagcauccagaacuaacagggcuggauuguauaagaccuugcuucuggguugaacuaaucagagggcgacccaaagagaacacaaucuggacuagcgggagcagcauauccuuuugugguguaaacagugacacuguggguuggucuuggccagacggugcugaguugccauuuaccauugacaaguaa

SEQ ID NO: 53026 - RNA, 1410 nt, Artificial Sequence
  derived and/or modified CDS sequence (wt) from neuraminidase__InfluenzaA__AEM92610
augaauccaaaccaaaagauaauaaccauugguucggucuguaugacaauuggaauggcuaacuuaauguuacaaauuggaaacauaaucucaauauggauuagccacucaauucaacuugggaaucaaaaucagauugaaacaugcaaucaaagcgucauuacuuaugaaaacaacacuuggguaaaucagacauauguuaacaucagcaacaccaacuuugcugcuggacagucagugguuuccgugaaauuagcgggcaauuccucucucugcccuguuaguggaugggcuauauacaguaaagacaacaguauaagaaucgguuccaagggggauguguuugucauaagggaaccauucauaucaugcucccccuuggaaugcagaaccuucuucuugacucaaggggccuugcuaaaugacaaacauuccaauggaaccauuaaagacaggagcccauaucgaacccuaaugagcuguccuauuggugaaguucccucuccauacaacucaagauuugagucagucgcuuggucagcaagugcuugucaugauggcaucaauuggcuaacaauuggaauuucuggcccagacaauggggcaguggcuguguuaaaguacaacggcauaauaacagacacuaucaagaguuggagaaacaauauauugagaacacaagagucugaaugugcauguguaaaugguucuugcuuuacuguaaugaccgauggaccaagugauggacaggccucauacaagaucuucagaauagaaaagggaaagauagucaaaucagucgaaaugaaugccccuaauuaucacuaugaggaaugcuccuguuauccugauucuagugaaaucacaugugugugcagggauaacuggcauggcucgaaucgaccgugggugucuuucaaccagaaucuggaauaucagauaggauacauaugcagugggauuuucggagacaauccacgcccuaaugauaagacaggcaguugugguccaguaucgucuaauggagcaaauggaguaaaaggauuuucauucaaauacggcaaugguguuuggauagggagaacuaaaagcauuaguucaagaaacgguuuugagaugauuugggauccgaacggauggacugggacagacaauaacuucucaauaaagcaagauaucguaggaauaaaugaguggucaggauauagcgggaguuuuguucagcauccagaacuaacagggcuggauuguauaagaccuugcuucuggguugaacuaaucagagggcgacccaaagagaacacaaucuggacuagcgggagcagcauauccuuuugugguguaaacagugacacugugaguuggucuuggccagacggugcugaguugccauuuaccauugacaaguaa

SEQ ID NO: 53027 - RNA, 1410 nt, Artificial Sequence
  derived and/or modified CDS sequence (wt) from neuraminidase__InfluenzaA__AEM92620
augaauccaaaccaaaagauaauaaccauugguucggucuguaugauaauuggaauggcuaacuuaauguuacaaauuggaaacauaaucucaauauggauuagccacucaauucaacuugggaaucaaaaucagauugaaacaugcaaucaaagcgucauuacuuaugaaaacaacacuuggguaaaucagacauauguuaacaucagcaacaccaacuuugcugcuggacagucagugguuuccgugaaauuagcgggcaauuccucucucugcccuguuaguggaugggcuauauacaguaaagacaacaguauaagaaucgguuccaaaggggauguguuugucauaagggaaccauucauaucaugcucccccuuggaaugcagaaccuucuucuugacucaaggggccuugcuagaugacaaacauuccaauggaaccauuaaagacaggagcccauaucgaacccuaaugagcuguccuauuggugaaguucccucuccauacaacucaagauuugagucagucgcuuggucagcaagugcuugucaugauggcaucaauuggcuaacaauuggaauuucuggcccagacaauggggcaguggcuguguuaaaguacaacggcauaauaacagacacuaucaagaguuggagaaacaauauauugagaacacaagagucugaaugugcauguguaaaugguucuugcuuuacuauaaugaccgauggaccaagugauggacaggccucauacaagaucuucagaauagaaaagggaaagauagucaaaucagucgaaaugaaugccccuaauuaucacuaugaggaaugcuccuguuauccugauucuagugaaaucacaugugugugcagggauaacuggcauggcucgaaucgaccgugggugucuuucaaccagaaucuggaauaucagaugggauacauaugcagugggauuuucggagacaauccacgcccuaaugauaagacaggcaguugugguccaguaucgucuaauggagcaaauggaguaaaaggauuuucauucaaauacggcaaugguguuuggauagggagaacuaaaagcauuaguucaagaaacgguuuugagaugauuugggauccgaacggauggacugggacagacaauaaauucucaauaaagcaagauaucguaggaauaaaugaguggucaggauauagcgggaguuuuguucagcauccagaacuaacagggcuggauuguauaagaccuugcuucuggguugaacuaaucagagggcgacccaaagagaacacaaucuggacuagcgggagcagcauauccuuuugugguguaaacagugacacuguggguuggucuuggccagacggugcugaguugccauuuaccauugacaaguaa

SEQ ID NO: 53028 - RNA, 1410 nt, Artificial Sequence
  derived and/or modified CDS sequence (wt) from neuraminidase__InfluenzaA__AEM92650
augaauccaaaccaaaagauaauaaccauugguucagucuguaugacaauuggaauggccaacuuaauauuacaaauuggaaacauaaucucaauauggauuagccacucaauucaacuugggaaucaaaaucagauugaaacaugcaaucaaagcgucauuacuuaugaaaacaacacuuggguaaaucagacauauguuaacaucagcaacaccaacuuugcugcuggacagucagugguuuccgugaaauuagcgggcaauucuucucucugcccuguuaguggaugggcuauauacaguaaagacaacaguguaagaaucgguuccaagggggauguguuugucauaagggaaccauucauaucaugcucccccuuggaaugcagaaccuucuucuugacucaaggggccuugcuaaaugacaaacauuccaauggaaccauuaaagacaggagcccauaucgaacccuaaugagcuguccuauuggugaaguucccucuccauacaacucaagauuugagucagucgcuuggucagcaagugcuugucaugauggcaucaauuggcuaacaauuggaauuucuggcccagacaauggggcaguggcuguguuaaaguacaacggcauaauaacagacacuaucaagaguuggagaaacaauauauugagaacacaagagucugaaugugcauguguaaaugguucuugcuuuacuguaaugaccgauggaccaagugauggacaggccucauacaagaucuucagaauagaaaagggaaagauagucaaaucagucgaaaugaaugccccuaauuaucacuaugaggaaugcuccuguuauccugauucuagugaaaucacaugugugugcagggauaacuggcauggcucgaaucgaccguggguuucuuucaaccagaaucuggaauaucagauaggauacauaugcagugggauuuucggagacaauccacgcccuaaugauaagacaggcaguugugguccaguaucgucuaauggagcaaauggaguaaaaggauuuucauucaaauacggcaaugguguuuggauagggagaacuaaaagcauuaguucaagaaacgguuuugagaugauuugggauccgaacggauggacuggaacagacacuaaauucucaauaaagcaagauaucguaggaauaaaugaguggucaggauauagcgggaguuuuguucagcauccagaacuaacagggcuggauuguauaagaccuugcuucuggguugaacuaaucagagggcgacccaaagagaacacaaucuggacuagcgggagcagcauauccuuuugugguguaaacagugacacuguggguuggucuuggccagacggugcugaguugccauuuaccauugacaaguaa

SEQ ID NO: 53029 - RNA, 1410 nt, Artificial Sequence; identical to SEQ ID NO: 51422
  derived and/or modified CDS sequence (wt) from neuraminidase__InfluenzaA__AEM98410

SEQ ID NO: 53030 - RNA, 1410 nt, Artificial Sequence; identical to SEQ ID NO: 51422
  derived and/or modified CDS sequence (wt) from neuraminidase__InfluenzaA__AEM98421

SEQ ID NO: 53031 - RNA, 1410 nt, Artificial Sequence; identical to SEQ ID NO: 51422
  derived and/or modified CDS sequence (wt) from neuraminidase__InfluenzaA__AEM98432

SEQ ID NO: 53032 - RNA, 1410 nt, Artificial Sequence
  derived and/or modified CDS sequence (wt) from neuraminidase__InfluenzaA__AEN55401
augaauccaaaccaaaagauaauaaccauugguucggucuguauaacaauuggaauggcuaacuuaauauuacaaauuggaaacauaaucucaauauggauuagccacucaauucaacuugggaaucaaaaucagauugaaacaugcaaucaaagcgucauuacuuaugaaaacaacacuuggguaaaucagacauauguuaacaucagcaacaccaacuuugcugcuggacagucagugguuuccgugaaauuagcgggcaauuccucucucugcccuguuaguggaugggcuauauacaguaaagacaacaguauaagaaucgguuccaagggggauguguuugucauaagggaaccauucauaucaugcucccccuuggaaugcagaaccuucuucuugacucaaggggccuugcuaaaugacaaacauuccaauggaaccauuaaagacaggagcccauaucgaacccuaaugagcuguccuauuggugaaguucccucuccauacaacucaagauuugagucagucgcuuggucagcaagugcuugucaugauggcaucaguuggcuaacaauuggaauuucuggcccagacaauggggcaguggcuguguuaaaguacaacggcauaauaacagacacuaucaagaguuggagaaacaauauauugagaacacaagagucugaaugugcauguguaaaugguucuuguuuuacuguaaugaccgauggaccaagugauggacaggccucauacaagaucuucagaauagaaaagggaaagauagucaaaucagucgaaaugaaugccccuaauuaucacuaugaggaaugcuccuguuauccugauucuagugaaaucacaugugugugcagggauaacuggcauggcucgaaucgaccgugggugucuuucaaccagaaucuggaauaucagauaggauacauaugcagugggauuuucggagacaauccacgcccuaaugauaagacaggcaguugugguccaguaucgucuaauggagcaaauggaguaaaaggauuuucauucaaauacggcaaugguguuuggauagggagaacuaaaagcauuaguucaagaaacgguuuugagaugauuugggauccgaacggauggacugggacagacaauaacuucucaauaaagcaagauaucguaggaauaaaugaguggucaggauauagcgggaguuuuguucagcauccagaacuaacagggcuggauuguauaagaccuugcuucuggguugaacuaaucagagggcgacccaaagaaaacacaaucuggacuagcgggagcagcauauccuuuugugguguaaacagugacacuguggguuggucuuggccagacggugcugaguugccauuuaccauugacaaguaa

SEQ ID NO: 53033 - RNA, 1410 nt, Artificial Sequence; identical to SEQ ID NO: 52844
  derived and/or modified CDS sequence (wt) from neuraminidase__InfluenzaA__AEN55411

SEQ ID NO: 53034 - RNA, 1410 nt, Artificial Sequence
  derived and/or modified CDS sequence (wt) from neuraminidase__InfluenzaA__AEN55421
augaauccaaaccaaaagauaauaaccauugguucggucuguaugacaauuggaauggcuaacuuaauauuacaaauuggaaacauaaucucaauauggauuagccacucaauucaacuugggaaucaaagucagauugaaacaugcaaucaaagcgucauuacuuaugaaaacaacacuuggguaaaucagacauauguuaacaucagcaacaccaacuuugcugcuagacagucagugguuuccgugaaauuagcgggcaauuccucucucugcccuguuaguggaugggcuauauacaguaaagacaacaguauaagaaucgguuccaagggggauguguuugucauaagggaaccauucauaucaugcucccccuuggaaugcagaaccuucuucuugacucaaggggccuugcuaaaugacaaacauuccaauggaaccauuaaagacaggagcccauaucgaacccuaaugagcuguccuauuggugaaguucccucuccauacaacucaagauuugagucagucgcuuggucagcaagugcuugucaugauggcaucaauuggcuaacaauuggaauuucuggcccagacaauggggcaguggcuguguuaaaguacaacggcauaauaacagacacuaucaagaguuggagaaacaauauauugagaacacaagagucugaauguguauguguaaaugguucuugcuuuaccauaaugaccgauggaccaagugauggacaggccucauacaagaucuucagaauagaaaagggaaagauagucaaaucagucgaaaugaaugccccuaauuaucacuaugaggaaugcuccuguuauccugauucuagugaaaucacaugugugugcagggauaacuggcauggcucgaaucgaccgugggugucuuucaaccagaaucuggaauaucagauaggauacauaugcagugggauuuucggagacaauccacgcccuaaugauaagacaggcaguugugguccaguaucgucuaauggagcaaauggaguaaaaggauuuucauucaaauacggcaaugguguuuggauagggagaacuaaaagcauuaguucaagaaaagguuuugagaugauuugggauccaaauggauggacugggacagacaauaacuucucaauaaagcaagauaucguaggaauaaaugaguggucaggauauagcgggaguuuuguucagcauccagaacuaacagggcuggauuguauaagaccuugcuucuggguugaacuaaucagagggcgacccaaagagaacacaaucuggacuagcgggagcagcauauccuuuugugguguaaacagugacacuguggguuggucuuggccagacggugcugaguugccauuuaccauugacaaguaa

SEQ ID NO: 53035 - RNA, 1410 nt, Artificial Sequence
  derived and/or modified CDS sequence (wt) from neuraminidase__InfluenzaA__AEN55466
augaauccaaaccaaaagauaauaaccauugguucggucuguauaacaauuggaauggcuaacuuaauauuacaaauuggaaacacaaucucaauauggauuagccacucaauucaacuugggaaucaaaaucagauugaaacaugcaaucaaagcgucauuacuuaugaaaacaacacuugggugaaucagacauauguuaacaucagcaacaccaacuuugcugcuggacagucagugguuuccgugaaauuagcgggcaauuccucucucugcccuguuaguggaugggcuauauacaguaaagacaacaguauaagaaucgguuccaagggggauguguuugucauaagggaaccauucauaucaugcucccccuuggaaugcagaaccuucuucuugacucaaggggccuugcuaaaugacaaacauuccaauggaaccauuaaagacaggagcccauaucgaacccuaaugagcuguccuauuggugaaguucccucuccauacaacucaagauuugagucagucgcuuggucagcaagugcuugucaugauggcaucaguuggcuaacaauuggaauuucuggcccagacaauggggcaguggcuguguuaaaguacaacggcauaauaacagacacuaucaagaguuggagaaacaauauauugagaacacaagagucugaaugugcauguguaaaugguucuuguuuuacuguaaugaccgauggaccaagugauggacaggccucauacaagaucuucagaauagaaaagggaaagauagucaaaucagucgaaaugaaugccccuaauuaucacuaugaggaaugcuccuguuauccugauucuagugaaaucacaugugugugcagggauaacuggcauggcucgaaucgaccgugggugucuuucaaccagaaucuggaauaucagauaggauacauaugcagugggauuuucggagacaauccacgcccuaaugauaagacaggcaguugugguccaguaucgucuaauggagcaaauggaguaaaaggauuuucauucaaauacggcaaugguguuuggauagggagaacuaaaagcauuaguucaagaaacgguuuugagaugauuugggauccgaacggauggacugggacagacaauaacuucucaauaaagcaagauaucguaggaauaaaugaguggucaggauauagcgggaguuuuguucagcauccagaacuaacagggcuggauuguauaagaccuugcuucuggguugaacuaaucagagggcgacccaaagagaacacaaucuggacuagcgggagcagcauauccuuuugugguguaaacagugacacuguggguuggucuuggccagacggugcugaguugccauuuaccauugacaaguaa

SEQ ID NO: 53036 - RNA, 1410 nt, Artificial Sequence
  derived and/or modified CDS sequence (wt) from neuraminidase__InfluenzaA__AEN55476
augaauccaaaccaaaagauaauaaccauugguucggucuguaugacaauuggaauggcuaacuuaauauuacaaauuggaaacauaaucucaauauggauuagccacucaauucaacuugggaaucaaagucagauugaaacaugcaaucaaagcgucauuacuuaugaaaacaacacuuggguaaaucagacauauguuaacaucagcaacaccaacuuugcugcuggacagucagugguuuccgugaaauuagcgggcaauuccucucucugcccuguuaguggaugggcuauauacaguaaagacaacaguauaagaaucgguuccaagggggauguguuugucauaagggaaccauucauaucaugcucccccuuggaaugcagaaccuucuucuugacucaaggggccuugcuaaaugacaaacauuccaauggaaccauuaaagacaggagcccauaucgaacccuaaugagcuguccuauuggugaaguucccucuccauacaacucaagauuugagucagucgcuuggucagcaagugcuugucaugauggcaucaauuggcuaacaauuggaauuucuggcccagacaauggggcaguggcuguguuaaaguacaacggcauaauaacagacacuaucaagaguuggagaaacaauauauugagaacacaagagucugaaugugcauguguaaaugguucuugcuuuaccauaaugaccgauggaccaagugauggacaggccucauacaagaucuucagaauagaaaagggaaagauagucaaaucagucgaaaugaaugccccuaauuaucacuaugaggaaugcuccuguuauccugauucuagugaaaucacaugugugugcagggauaacuggcauggcucgaaucgaccgugggugucuuucaaccagaaucuggaauaucagauaggauacauaugcagugggauuuucggagacaauccacgcccuaaugauaagacaggcaguugugguccaguaucgucuaauggagcaaauggaguaaaaggauuuucauucaaauacggcaaugguguuuggauagggagaacuaaaagcauuaguucaagaaaagguuuugagaugauuugggauccaaacggauggacugggacagacaauaacuucucaauaaagcaagauaucguaggaauaaaugaguggucaggauauagcgggaguuuuguucagcauccagaacuaacagggcuggauuguauaagaccuugcuucuggguugaacuaaucagagggcgacccaaagagaacacaaucuggacuagcgggagcagcauauccuuuugugguguaaacagugacacugugaguuggucuuggccagacggugcugaguugccauuuaccauugacaaguaa

SEQ ID NO: 53037 - RNA, 1410 nt, Artificial Sequence; identical to SEQ ID NO: 52602
  derived and/or modified CDS sequence (wt) from neuraminidase__InfluenzaA__AEN55486

SEQ ID NO: 53038 - RNA, 1410 nt, Artificial Sequence; identical to SEQ ID NO: 52602
  derived and/or modified CDS sequence (wt) from neuraminidase__InfluenzaA__AEN55506

SEQ ID NO: 53039 - RNA, 1410 nt, Artificial Sequence
  derived and/or modified CDS sequence (wt) from neuraminidase__InfluenzaA__AEN55516
augaauccaaaccaaaagauaauaaccauugguucggucuguaugacaauuggaauggcuaacuuaauauuacaaauuggaaacauaaucucaauauggauuagccacucaauucaacuugggaaucaaagucagauugaaacaugcaaucaaagcgucauuacuuaugaaaacaacacuuggguaaaucagacauauguuaacaucagcaacaccaacuuugcugcuggacagucagugguuucugugaaauuagcgggcaauuccucucucugcccuguuaguggaugggcuauauacaguaaagacaacaguauaagaaucgguuccaggggggauguguuugucauaagggaaccauucauaucaugcucccccuuggaaugcagaaccuucuucuugacucaaggggccuugcuaaaugacaaacauuccaauggaaccauuaaagacaggagcccauaucgaacccuaaugagcuguccuauuggugaaguucccucuccauacaacucaagauuugagucagucgcuuggucagcaagugcuugucaugauggcaucaauuggcuaacaauuggaauuucuggcccagacaauggggcaguggcuguguuaaaguacaacggcauaauaacagacacuaucaagaguuggagaaacaauauauugagaacacaagagucugaaugugcauguguaaaugguucuugcuuuaccauaaugaccgauggaccaagugauggacaggccucauacaagaucuucagaauagaaaagggaaagauagucaaaucagucgaaaugaaugccccuaauuaucacuaugaggaaugcuccuguuauccugauucuagugaaaucacaugugugugcagggauaacuggcauggcucgaaucgaccgugggugucuuucaaccagaaucuggaauaucagauaggauacauaugcagugggauuuucggagacaauccacgcccuaaugauaagacaggcaguugugguccaguaucgucuaauggagcaaauggaguaaaaggauuuucauucaaauacggcaaugguguuuggauagggagaacuaaaagcauuaguucaagaaaagguuuugagaugauuugggauccaaacggauggacugggacagacaauaacuucucaauaaagcaagauaucguaggaauaaaugaguggucaggauauagcgggaguuuuguucagcauccagaacuaacagggcuggauuguauaagaccuugcuucuggguugaacuaaucagagggcgacccaaagagaacacaaucuggacuagcgggagcagcauauccuuuugugguguaaacagugacacuguggguuggucuuggccagacggugcugaguugccauuuaccauugacaaguaa

SEQ ID NO: 53040 - RNA, 1410 nt, Artificial Sequence; identical to SEQ ID NO: 52602
  derived and/or modified CDS sequence (wt) from neuraminidase__InfluenzaA__AEN55526

SEQ ID NO: 53041 - RNA, 1410 nt, Artificial Sequence; identical to SEQ ID NO: 52869
  derived and/or modified CDS sequence (wt) from neuraminidase__InfluenzaA__AEN69429

SEQ ID NO: 53042 - RNA, 1410 nt, Artificial Sequence; identical to SEQ ID NO: 52795
  derived and/or modified CDS sequence (wt) from neuraminidase__InfluenzaA__AEN69438

SEQ ID NO: 53043 - RNA, 1410 nt, Artificial Sequence; identical to SEQ ID NO: 52844
  derived and/or modified CDS sequence (wt) from neuraminidase__InfluenzaA__AEN69484

SEQ ID NO: 53044 - RNA, 1410 nt, Artificial Sequence
  derived and/or modified CDS sequence (wt) from neuraminidase__InfluenzaA__AEO01627
augaauccaaaucaaaagauaauaacgauuggcucuguuucucucaccauuuccacaauaugcuucuucaugcaaauugccaucuugauaacuacuguaacauugcauuucaagcaauaugaauucaacucccccccaaacaaccaagugaugcugugugaaccaacaauaauagaaagaaacauaacagagauaguguaucugaccaacaccaccauagagaaggaaauaugccccaaacuagcagaauacagaaauuggucaaagccgcaaugugacauuacaggauuugcaccuuuuucuaaggacaauucgauuaggcuuucugcugguggggacaucugggugacaagagaaccuuaugugucaugcgauccugacaaguguuaucaauuugcccuuggacagggaacaacacuaaacaacgugcauucaaaugacacaguacgugauaggaccccuuaucggacccuauugaugaaugaguuagguguuccuuuucaucuggggaccaagcaagugugcauagcaugguccagcucaaguugucacgauggaaaagcauggcugcauguuuguauaacgggggaugauaaaaaugcaacugcuagcuucauuuacaaugggaggcuuguagauaguauuguuucaugguccaaagacauccucaggacccaggagucagaaugcguuuguaucaauggaacuuguacaguaguaaugacugaugggagugcuucaggaaaagcugauacuaaaauacuauucauugaggaggggaaaaucguucauacuagcacauugucaggaagugcucagcaugucgaggagugcuccugcuauccucgauauccuggugucagaugugucugcagagacaacuggaaaggcuccaauaggcccaucguagauauaaacauaaaggaucauagcauuguuuccaguuauguguguucaggacuuguuggagacacacccagaaaaaacgacagcuccagcaguggccauuguuuggauccuaacaaugaagaagguggucauggagugaaaggcugggccuuugaugauggaaaugacguguggaugggaagaacgaucagcgagaagucacgcuuaggguaugaaaccuucaaagucauugaaggcugguccaacccuaaguccaaauugcagauaaauaggcaagucauaguugacagagguaauagguccgguuauucugguauuuucucuguugaaggcaaaagcugcaucaaucggugcuuuuauguggaguugauaaggggaagaaaagaggaaacugaagucuuguggaccucaaacaguauuguuguguuuuguggcaccucagguacauauggaacaggcucauggccugauggggcggaaaucaaucucaugccuauauag

SEQ ID NO: 53045 - RNA, 1410 nt, Artificial Sequence
  derived and/or modified CDS sequence (wt) from neuraminidase__InfluenzaA__AEO01638
augaauccaaaucaaaagauaauaacgauuggcucuguuucucucaccauuuccacaauaugcuucuucaugcaaauugccaucuugauaacuacuguaacauugcauuucaagcaauaugaauucaacucccccccaaacaaccaagugaugcugugugaaccaacaauaauagaaagaaacauaacagagauaguguaucugaccaacaccaccauagagaaggaaauaugccccaaacuagcagaauacagaaauuggucaaagccgcaaugugacauuacaggauuugcaccuuuuucuaaggacaauucgauuaggcuuucugcugguggggacaucugggugacaagagaaccuuaugugucaugcgauccugacaaguguuaucaauuugcccuuggacagggaacaacacuaaacaacgugcauucaaaugacacaguacgugauaggaccccuuaucggacccuauugaugaaugaguuagguguuccuuuucaucuggggaccaagcaagugugcauagcaugguccagcucaaguugucacgauggaaaagcauggcugcauguuuguauaacgggggaugauaaaaaugcaacugcuagcuucauuuacaaugggaggcuuguagauaguauuguuucaugguccaaagacauccucaggacccaggagucagaaugcguuuguaucaauggaacuuguacaguaguaaugacugaugggagugcuucaggaaaagcugauacuaaaauacuauucauugaggaggggaaaaucguucauacuagcacauugucaggaagugcucagcaugucgaggagugcuccugcuauccucgauauccuggugucagaugugucugcagagacaacuggaaaggcuccaauaggcccaucguagauauaaacauaaaggaucauagcauuguuuccaguuauguguguucaggacuuguuggagacacacccagaaaaaacgacagcuccagcaguggccauuguuuggauccuaacaaugaagaagguggucauggagugaaaggcugggccuuugaugauggaaaugacguguggaugggaagaacgaucagcgagaagucacgcuuaggguaugaaaccuucaaagucauugaaggcugguccaacccuaaguccaaauugcagauaaauaggcaagucauaguugacagagguaauagguccgguuauucugguauuuucucuguugaaggcaaaagcugcaucaaucggugcuuuuauguggaguugauaaggggaagaaaagaggaaacugaagucuuguggaccucaaacaguauuguuguguuuuguggcaccucagguacauauggaacaggcucauggccugauggggcugaaaucaaucucaugccuauauag

SEQ ID NO: 53046 - RNA, 1410 nt, Artificial Sequence
  derived and/or modified CDS sequence (wt) from neuraminidase__InfluenzaA__AEO01644
augaauccaaaucaaaagauaauaacgauuggcucuguuucucucaccauuuccacaauaugcuucuucaugcaaauugccaucuugauaacuacuguaacauugcauuucaagcaauaugaauucaacucccccccaaacaaccaagugaugcugugugaaccaacaauaauagaaagaaacauaacagagauaguguaucugaccaacaccaccauagagaaggaaauaugccccaaacuagcagaauacagaaauuggucaaagccgcaaugugacauuacaggauuugcaccuuuuucuaaggacaauucgauuaggcuuuccgcugguggggacaucugggugacaagagaaccuuaugugucaugcgauccugacaaguguuaucaauuugcccuuggacagggaacaacacuaaacaacgugcauucaaaugacacaguucgugauaggaccccuuaucggacccuauugaugaaugaguuagguguuccuuuucaucuggggaccaagcaagugugcauagcaugguccagcucaaguugucacgauggaaaagcauggcugcauguuuguauaacgggggaugauaaaaaugcaacugcuagcuucauuuacaaugggaggcuuguagauaguauuguuucaugguccaaagaaauccucaggacccaggagucagaaugcguuuguaucaauggaacuuguacaguaguaaugacugaugggagugcuucaggaaaagcugauacuaaaauacuauucauugaggaggggaaaaucguucauacuagcacauugucaggaagugcucagcaugucgaggaaugcuccugcuauccucgauauccuggugucagaugugucugcagagacaacuggaaaggcuccaauaggcccaucguagauauaaacauaaaggaucauagcauuguuuccaguuauguguguucaggacuuguuggagacacacccagaaaaaccgacagcuccagcaguggccauuguuuggauccuaacaaugaagaagguggucauggagugaaaggcugggccuuugaugauggaaaugacguguggaugggaagaacgaucagcgagaagucacgcuuaggguaugaaaccuucaaagucauugaaggcugguccaacccuaaguccaaauugcagauaaauaggcaagucauaguugacagagguaauagguccgguuauucugguauuuucucuguugaaggcaaaagcugcaucaaucggugcuuuuauguggaguugauaaggggaagaaaagaggaaacugaagucuuguggaccucaaacaguauuguuguguuuuguggcaccucagguacauauggaacaggcucauggccugauggggcggacaucaaucucaugccuauauag

SEQ ID NO: 53047 - RNA, 1410 nt, Artificial Sequence
  derived and/or modified CDS sequence (wt) from neuraminidase__InfluenzaA__AEO01654
augaauccaaaucaaaagauaauaacgauuggcucuguuucucucaccauuuccacaauaugcuucuucaugcaaauugccaucuugauaacuacuguaacauugcauuucaagcaauaugaauucaacucccccccaaacaaccaagugaugcugugugaaccaacaauaauagaaagaaacauaacagagauaguguaucugaccaacaccaccauagagaaggaaauaugccccaaacuagcagaauacagaaauuggucaaagccgcaaugugacauuacaggauuugcaccuuuuucuaaggacaauucgauuaggcuuucugcugguggggacaucugggugacaagagaaccuuaugugucaugcgauccugacaaguguuaucaauuugcccuuggacagggaacaacacuaaacaacgugcauucaaaugacacaguacgugauaggaccccuuaucggacccuauugaugaaugaguuagguguuccuuuucaucuggggaccaagcaagugugcauagcaugguccagcucaaguugucacgauggaaaagcauggcugcauguuuguauaacgggggaugauaaaaaugcaacugcuagcuucauuuacaaugggaggcuuguagauaguauuguuucaugguccaaagacauccucaggacccaggagucagaaugcguuuguaucaauggaacuuguacaguaguaaugacugaugggagugcuucaggaaaagcugauacuaaaauacuauucauugaggaggggaaaaucguucauacuagcacauugucaggaagugcucagcaugucgaggagugcuccugcuauccucgauauccuggugucagaugugucugcagagacaacuggaaaggcuccaauaggcccaucguagauauaaacauaaaggaucauagcauuguuuccaguuauguguguucaggacuuguuggagacacacccagaaaaaacgacagcuccagcaguggccauuguuuggauccuaacaaugaagaagguggucauggagugaaaggcugggccuuugaugauggaaaugacguguggaugggaagaacgaucagcgagaagucacgcuuaggguaugaaaccuucaaagucauugaaggcugguccaacccuaaguccaaauugcagauaaauaggcaagucauaguugacagagguaauagguccgguuauucugguauuuucucuguugaaggcaaaagcugcaucaaucggugcuuuuauguggaguugauaaggggaagaaaagaggaaacuaaagucuuguggaccucaaacaguauuguuguguuuuguggcaccucagguacauauggaacaggcucauggccugauggggcugaaaucaaucucaugccuauauag

SEQ ID NO: 53048 - RNA, 1413 nt, Artificial Sequence
  derived and/or modified CDS sequence (wt) from neuraminidase__InfluenzaA__AEO01665
augaacccaaaucaaaagauaauaaccauuggaucaaucaguauagcaaucggaauaauuagucuaauguugcaaauaggaaauauuauuucaauaugggcuagucacucaauccaaacuggaagucaaaacaacacuggaauaugcaaccaaagaaucaucacauaugaaaacagcaccugggugaaucacacauauguuaauauuaacaacacuaauguuguugcuggagaggacaaaacuucagugacauuggccggcaauucaucucuuuguucuaucaguggaugggcuauauacacaaaagacaacagcauaagaauuggcuccaaaggagauguuuuugucauaagagaaccuuucauaucauguucucacuuggaaugcagaaccuuuuuucugacccaaggcgcucuauuaaaugacaaacauucaaaugggaccguaaaggacagaaguccuuauagggccuuaaugagcuguccucuaggugaagcuccguccccauacaauucaaaguucgaaucaguugcauggucagcaagcgcaugccaugauggcaugggcugguuaacaaucggaauuucugguccagacaauggagcuguggcuguacuaaaauacaacggaauaauaacuggaaccauaaaaaguuggaaaaagcaaauauuaagaacacaagagucugaaugugucuguaugaacgggucauguuucaccauaaugaccgauggcccgaguaauaaggccgccucguacaaaauuuucaagauugaaaaggggaagguuacuaaaucaauagaguugaaugcacccaauuuucauuaugaggaauguuccuguuacccagacacuggcauagugauguguguaugcagggacaacuggcaugguucaaaucgaccuugggugucuuuuaaucaaaacuuggauuaucaaauaggauacaucugcaguggaguguuuggugacaauccgcgucccgaagauggagagggcagcugcaauccagugacuguugauggagcaaacggaguaaaaggguuuucauacaaauaugauaaugguguuuggauaggaaggaccaaaaguaacagacuuagaaagggguuugagaugauuugggauccuaauggauggacaaauacugacagugauuucucagugaaacaggauguuguagcaauaacugauuggucaggguacaguggaaguuucguccaacauccugaguuaacaggauuggacuguauaagaccuugcuucuggguugaguuagucagagggcugccuagagaaaauacaacaaucuggacuagugggagcagcauuucuuuuuguggcguuaauagugauacugcaaacuggucuuggccagacggugcugaguugccguucaccauugacaaguag

SEQ ID NO: 53049 - RNA, 1413 nt, Artificial Sequence
  derived and/or modified CDS sequence (wt) from neuraminidase__InfluenzaA__AEO01676
augaacccaaaucaaaagauaauaaccauuggaucaaucaguauagcaaucggaauaauuagucuaauguugcaaauaggaaauauuauuucaauaugggcuagucacucaauccaaacuggaagucaaaacaacacuggaauaugcaaccaaagaaucaucacauaugaaaacagcaccugggugaaucacacauauguuaauauuaacaacacuaauguuguugcuggagaggacaaaacuucagugacauuggccggcaauucaucucuuuguucuaucaguggaugggcuauauacacaaaagacaacagcauaagaauuggcuccaaaggagauguuuuugucauaagagaaccuuucauaucauguucucacuuggaaugcagaaccuuuuuucugacccaaggcgcucuauuaaaugacaaacauucaaaugggaccguaaaggacagaaguccuuauagggccuuaaugagcuguccucuaggugaagcuccguccccauacaauucaaaguucgaaucaguugcauggucagcaagcgcaugccaugauggcaugggcugguuaacaaucggaauuucugguccagacaauggagcuguggcuguacuaaaauacaacggaauaauaacuggaaccauaaaaaguuggaaaaagcaaauauuaagaacacaagagucugaaugugucuguaugaacgggucauguuucaccauaaugaccgauggcccgaguaauaaggccgccucguacaaaauuuucaagauugaaaaggggaagguuacuaaaucaauagaguugaaugcacccaauuuucauuaugaggaauguuccuguuacccagacacuggcauagugauguguguaugcagggacaacuggcaugguucaaaucgaccuugggugucuuuuaaucaaaacuuggauuaucaaauaggauacaucugcaguggaguguuuggugacaauccgcgucccgaagauggagagggcagcugcaauccagugacuguugauggagcaaacggaguaaaaggguuuucauacaaauaugauaaugguguuuggauaggaaggaccaaaaguaacagacuuagaaagggguuugagaugauuugggauccuaauggauggacaaauacugacagugauuucucagugaaacaggauguuguagcaauaacugauuggucaggguacaguggaaguuucguccaacauccugaguuaacaggauuggacuguauaagaccuugcuucuggguugaguuagucagagggcugccuagagaaaauacaacaaucuggacuagugggagcagcauuuuuuuucguggcgauaauagugauacugcaaacuggucuuggccagacggugcugagaugacguucaccauugacaaguag

SEQ ID NO: 53050 - RNA, 1410 nt, Artificial Sequence
  derived and/or modified CDS sequence (wt) from neuraminidase__InfluenzaA__AEO01693
augaauccaaaucaaaagauaauaacgauuggcucuguuucucucaccauuuccacaauaugcuucuucaugcaaauugccaucuugauaacuacuguaacauugcauuucaagcaauaugaauucaacucccccccaaacaaccaagugaugcugugugaaccaacaauaauagaaagaaacauaacagagauaguguaucugaccaacaccaccauagagaaggaaauaugccccaaacuagcagaauacagaaauuggucaaagccgcaaugugacauuacaggauuugcaccuuuuucuaaggacaauucgauuaggcuuucugcugguggggacaucugggugacaagagaaccuuaugugucaugcgauccugacaaguguuaucaauuugcccuuggacagggaacaacacuaaacaacgugcauucaaaugacacaguacgugauaggaccccuuaucggacccuauugaugaaugaguuagguguuccuuuucauuuggggaccaagcaagugugcauagcaugguccagcucaaguugucacgauggaaaagcauggcugcauguuuguauaacgggggaugauaaaaaugcaacugcuagcuucauuuacaaugggaggcuuguagauaguauuguuucaugguccaaagacauccucaggacccaggagucagaaugcguuuguaucaauggaacuuguacaguaguaaugacugaugggagugcuucaggaaaagcugauacuaaaauacuauucauugaggaggggaaaaucguucauacuagcacauugucaggaagugcucagcaugucgaggagugcuccugcuauccucgauauccuggugucagaugugucugcagagacaacuggaaaggcuccaauaggcccaucguagauauaaacauaaaggaucauagcauuguuuccaguuauguguguucaggacuuguuggagacacacccagaaaaaacgacagcuccagcaguggccauuguuuggauccuaacaaugaagaagguggucauggagugaaaggcugggccuuugaugauggaaaugacguguggaugggaagaacgaucagcgagaagucacgcuuaggguaugaaaccuucaaagucauugaaggcugguccaacccuaaguccaaauugcagauaaauaggcaagucauaguugacagagguaauagguccgguuauucugguauuuucucuguugaaggcaaaagcugcaucaaucggugcuuuuauguggaguugauaaggggaagaaaagaggaaacugaagucuuguggaccucaaacaguauuguuguguuuuguggcaccucagguacauauggaacaggcucauggccugauggggcugaaaucaaucucaugccuauauag

SEQ ID NO: 53051 - RNA, 1413 nt, Artificial Sequence
  derived and/or modified CDS sequence (wt) from neuraminidase__InfluenzaA__AEO01711
augaacccaaaucaaaagauaauaaccauuggaucaaucaguauagcaaucggaauaauuagucuaauguugcaaauaggaaauauuauuucaauaugggcuagucacucaauccaaacuggaagucaaaacaacacuggaauaugcaaccaaagaaucaucacauaugaaaacagcaccugggugaaucacacauauguuaauauuaacaacacuaauguuguugcuggagaggacaaaacuucagugacauuggccggcaauucaucucuuuguucuaucaguggaugggcuauauacacaaaagacaacagcauaagaauuggcuccaaaggagauguuuuugucauaagagaaccuuucauaucauguucucacuuggaaugcagaaccuuuuuucugacccaaggcgcucuauuaaaugacaaacauucaaaugggaccguaaaggacagaaguccuuauagggccuuaaugagcuguccucuaggugaagcuccguccccauacaauucaaaguucgaaucaguugcauggucagcaagcgcaugccaugauggcaugggcugguuaacaaucggaauuucugguccagacaauggagcuguggcuguacuaaaauacaacggaauaauaacuggaaccauaaaaaguuggaaaaagcaaauauuaagaacacaagagucugaaugugucuguaugaacgggucauguuucaccauaaugaccgauggcccgaguaauaaggccgccucguacaaaauuuucaagaucgaaaaggggaagguuacuaaaucaauagaguugaaugcacccaauuuucauuaugaggaauguuccuguuacccagacacuggcauagugauguguguaugcagggacaacuggcaugguucaaaucgaccuugggugucuuuuaaucaaaacuuggauuaucaaauaggauacaucugcaguggaguguuuggugacaauccgcgucccgaagauggagagggcagcugcaauccagugacuguugauggagcaaacggaguaaaaggguuuucauacaaauaugauaaugguguuuggauaggaaggaccaaaaguaacagacuuagaaagggguuugagaugauuugggauccuaauggauggacaaauacugacagugauuucucagugaaacaggauguuguagcaauaacugauuggucaggguacaguggaaguuucguccaacauccugaguuaacaggauuggacuguauaagaccuugcuucuggguugaguuagucagagggcugccuagagaaaauacaacaaucuggacuagugggagcagcauuucuuuuuguggcguuaauagugauacugcaaacuggucuuggccagacggugcugaguugccguucaccauugacaaguaa

SEQ ID NO: 53052 - RNA, 1410 nt, Artificial Sequence; identical to SEQ ID NO: 52820
  derived and/or modified CDS sequence (wt) from neuraminidase__InfluenzaA__AEO37533

SEQ ID NO: 53053 - RNA, 1410 nt, Artificial Sequence
  derived and/or modified CDS sequence (wt) from neuraminidase__InfluenzaA__AEO37543
augaauccaaaccaaaagauaauaaccauugguucggucuguaugacaauuggaauggccaacuuaauauuacaaauuggaaacauaaucucaauauggauuagccacucaauucaacuugggaaucaaaaucagauugaaccaugcaaucaaagcgucauuacuuaugaaaacaacacuuggguaaaucagacauacguuaacaucagcaacaccaacuuugcugcuggacagucagugguuuccgugaaauuagcgggcaauuccucucucugcccuguuaguggaugggcuauauacaguaaagacaacaguauaagaaucgguuccaagggggauguguuugucauaagggaaccauucauaucauguucccccuuggaaugcaggaccuucuucuugacucaaggggccuugcuaaaugacaaacauuccaauggaaccauuaaagacaggagcccauaucgaacucuaaugagcuguccuauuggugaaguucccucuccauacaacucaagauuugaaucagucgcuuggucagcaagugcuugucaugauggcaucaauuggcuaacaauuggaauuucuggcccagacaauggggcaguggcuguguuaaaguacaacggcauaauaacagacacuaucaagaguuggagaaacaauauauugagaacacaagagucugaaugugcauguguaaaugguucuugcuuuacuguaaugaccgauggaccaagugauggacaggccucauacaagaucuucagaauagaaaagggaaagauagucaaaucagucgaaaugaaugccccuaauuaucacuaugaggaaugcuccuguuauccugauucuagugaaaucacaugugugugcagggauaacuggcauggcucgaaucgaccgugggugucuuucaaccagaaucuggaauaucagauaggauacauaugcagugggauuuucggagacaauccacgcccuaaugauaagacaggcaguugugguccaguaucgucuaauggagcaaauggaguaaaaggauuuucauucaaauacggcaaugguguuuggauagggagaacuaaaagcauuaguucaagaaacgguuuugagaugauuugggauccgaacggauggacuggaacagacaauaacuucucaguaaagcaagauaucauaggaauaaaugaguggucaggauauagcgggaguuuuguucagcauccagaacuaacagggcuggauuguauaagaccuugcuucuggguugagcuaaucagagggcggcccaaagagaacacaaucuggacuagcgggagcagcauauccuuuugugguguaaacagugacacuguggguuggucuuggccagacggugcugaguugccauuuaccauugacaaguaa

SEQ ID NO: 53054 - RNA, 1410 nt, Artificial Sequence; identical to SEQ ID NO: 52602
  derived and/or modified CDS sequence (wt) from neuraminidase__InfluenzaA__AEO72179

SEQ ID NO: 53055 - RNA, 1350 nt, Artificial Sequence
  derived and/or modified CDS sequence (wt) from neuraminidase__InfluenzaA__AEO88957
augaauccaaaucagaagauaauaaccauuggaucaaucuguaugguaauuggaauaguuagcuuaauguuacagauugggaacaugaucucaauaugggucagucauucaacucaaacagggaaucaacaccaagcugaaccaaucagaaauacuaauuuucuuacugagaacgcuguggcuucaguaacauuagcgggcaauucaucucuuugccccauuagaggaugggcuguacacaguaaagacaacaguauaaggauugguuccaagggggauguguuuguaauuagagagccguucaucucaugcucccauuuggaaugcagaacuuucuuuuugacucagggagccuuacugaaugacaagcacuccaacggaacugucaaagacagaagcccucacagaacacuaaugaguuguccugugggugaggcucccuccccauauaacucaagguuugagucuguugcuuggucagcaagugcuugccaugauggcaccaguugguugacaauuggaauuucuggcccagacaauggggcuguggcuguauugaaauacaauggcauaauaacagacaccaucaagaguuggaggaacaacauauugagaacucaagagucugaaugugcauguguaaauggcucuugcuuuacuguaaugacugauggaccaaguaauggacaggcaucauauaagaucuucaaaauggaaaaagggaaaguaguuaaaucagucgaauugaaugcuccuaauuaucacuaugaggaaugcuccuguuauccugaugcuggcgaaaucauaugugugugcagggauaauuggcauggcucaaauaggccauggguaucuuucaaucagaauuuggaguaucaaauaggauauauaugcaguggaguuuucggagacaauccacgccccaaugauggaacagguaguugugguccaguguccccuaacggggcauaugggauaaaaggguuuucauuuaaauacggcaaugguguuuggaucgggagaaccaaaagcacuaauuccaggagcggcuuugaaaugauuugggauccaaauggguggacuggaacggacaguaacuuuucggugaaacaagauauaguagcaauaacugauuggucaggauauagcgggaguuuuguccagcauccagaacugacaggauuagauugcauaagaccuugcuucuggguugaguuaaucagagggcggcccaaagagaguacaauuuggacuagugggagcagcauaucuuuuugugguguaaauagugacacugugaguuggucuuggccagacggugcugaguugccauucaccauugacaaguag

SEQ ID NO: 53056 - RNA, 1350 nt, Artificial Sequence
  derived and/or modified CDS sequence (wt) from neuraminidase__InfluenzaA__AEO88965
augaauccaaaucagaagauaauaaccaucggaucaaucuguaugguaauugaaauaguuagcuuaauguuacaaauugggaacaugaucucaauaugggucagucauucaauucagacaaagaaucagcgccaagcugaaccgaucagcaauacuaaauuucuuacugagaaagcuguggcuucaguaacauuagcgggcaauucaucucuuugccccauuagcggaugggcuguacacaguaaggacaacagcauaaggaucgguuccaagggggauguguuuguuauaagagagccguucaucucaugcucccacuuggaaugcagaacuuucuuuuugacucagggagccuugcugaaugauaagcacuccaaugggacugucaaagacagaagcccucacagaacauuaaugaguuguccugugggugaggcucccucuccauauaacucaagguuugagucuguugcuuggucagcaagugcuugccaugauggcaccaguugguugacaauuggaauuucuggcccagacaauggggcuguggcuguauugaaauacaauggcauaauaacagacacuaucaagaguuggaggaacaacauacugagaacucaagagucugaaugugcauguguaaauggcucuugcuuuacuguaaugacugauggaccaaguaaugggcaggcaucauauaagaucuucaaaauggaaaaagggaaagugguuaaaucaguugaauuggaugcuccuaauuaucacuaugaggaaugcuccuguuauccugaugccggagaaaucacaugugugugcagggauaauuggcauggcucaaauaggccauggguaucauucaaucaaaauuuagaguaucaaauaggauauauaugcaguggaguuuucggagacaauccacgccccaaugauggaacagguagcugugguccgguguccccuaauggggcauaugggguaaaaggguuuucauuuaaauacggcaaugguguuuggaucgggagaaccaaaagcacuaauuccaggagcggcuuugaaaugauuugggauccaaauggguggacuggaacggacagcagcuuuucggugaagcaagauaucguagcaauaacugauuggucaggauauagcgggaguuuuguccagcauccagaacugacagguuuaaauugcauaagaccuuguuucuggguugaguuagucagagggcggcccaaagagagcacaaucuggacuagugggagcagcauaucuuuuuguggugugaauagugacacuguggguuggucuuggccagacggugcugaguugccauucaccauugacaaguag

SEQ ID NO: 53057 - RNA, 1350 nt, Artificial Sequence
  derived and/or modified CDS sequence (wt) from neuraminidase__InfluenzaA__AEO88973
augaauccaaaucagaagauaauaaccauugggucaaucuguaugguaauuggaauaguuagcuuaauguuacaaauugggaacaugaucucauuaugggucagucauucaauucagacagggaaucaacaccaaguugaaccaaucagcaauacuaauuuucuuacugagaaagcgguggcuucaguaacauuagcgggcaauucaucucuuugcccaauuagaggaugggcuguacacaguaaggacaacaguauaaggauugguuccaaaggggauguguuuguuauuagagagccauucaucucaugcucccacuuggaaugcagaacuuucuuuuugacucagggagccuugcugaaugacaagcacuccaacgggacugucaaagacagaagcccucacagaacauuaaugaguuguccugugggugaggcucccuccccauauaacucaagguuugaaucuguugcuuggucagcaagugcuugccaugauggcaccaguugguugacaauuggaauuucuggcccagacaauggggcuguggcuguauugaaauacaauggcaugauaacagacaccaucaagaguuggaggaacaacauacugagaacucaagagucugaaugugcauguguaaauggcucuugcuuuacuguaaugacugauggaccaaguaaugggcaggcaucauauaagaucuucaaaauggaaaaaggaagagugguuaaaucagucgaauuggaugcuccuaauuaccacuaugaggaaugcuccuguuauccugaugccggcgaaaucacaugugugugcagggauaauuggcauggcucaaaucggccauggguaucuuucaaucaaaauuuggaguaucaaauaggauauauaugcagcggaguuuucggggacaauccacgccccaaugauggaacagguaguugugguccgguguccccuaauggggcauaugggguaaaaggguuuucauuuaaauacggcaaugguguuuggaucgggagaaccaaaagcccuaauuccaggagcggcuuugaaaugauuugggauccaaauggguggauugaaacggacaguagcuucucggugaaacaagauauaguagcaauaacugauuggucaggauauagcgggaguuuuguccagcauccagaacugacaggauuagauugcauaagaccuuguuucuggguugaguuaaucagagggcggcccaaagagagcacaauuuggacuagugggagcagcauauccuuuugugguguaaauagugacacugugaguuggucuuggccagacggugcugaguugccauucaccauugacaaguaa

SEQ ID NO: 53058 - RNA, 1350 nt, Artificial Sequence
  derived and/or modified CDS sequence (wt) from neuraminidase__InfluenzaA__AEO88982
augaauccaaaucagaagauaauaaccauugggucaaucuguaugguaauuggaauaguuagcuuaauguuacaaauugggaacaugaucucaauaugggucagucauucaauucaaacagggaaucaacaccaagcugaaccaaucagaaacacuaauuuucuuacugagaacgcuguggcuucaguaacauuagcgggcaauucaucucuuugccccguuagaggaugggcuguacacaguaaggacaacaguauaaggauugguuccaagggggauguguuuguuauuagagagccguucaucucaugcucccacuuggaaugcagaacuuucuuuuugacucagggagccuuacugaaugacaagcacuccaaugggacugucaaagacagaagcccucacagaacauuaaugaguuguccugugggugaggcucccuccccauauaacucaagguuugagucuguugcuuggucagcaagugcuugccaugauggcaccaguugguugacaauuggaauuucuggcccagacaauggggcuguggcuguauugaaauacaauggcauaauaacagacaccaucaagaguuggaggaacaacauacugagaacucaagagucugaaugugcauguguaaauggcucuugcuuuacuguaaugacugauggaccaaguaauggccaggcaucauauaagaucuucaaaauggaaaaagggaaagugguuaaaucagucgaauugaaugcuccuaauuaucacuaugaggaaugcuccuguuauccugaugcuggcgaaaucacaugugugugcagggauaauuggcauggcucaaauaggccauggguaucuuucaaucagaauuuggaguaucaaauaggauauauaugcaguggaauuuucggagacaauccacgcccccaugauggaacagguaguugugguccaguguccccuaacggggcauaugggauaaaaggguuuucauuuaaauacggcaaugguguuuggaucgggagaaccaaaagcacuaauuccaggagcggcuuugaaaugauuugggauccaaauggguggacuggaacggacaguaacuuuucggugaaacaagauauaguagcaauaacugauuggucaggauauagcgggaguuuuguccagcauccagaacugacaggauuagauugcauaaggccuugcuucuggguugaguuaaucagagggcggcccaaagagagcacaauuuggacuagugggagcagcauaucuuuuugugguguaaauagugacacugugaguuggucuuggccagacgaugccgaguugccauucaccauugacaaguag

SEQ ID NO: 53059 - RNA, 1350 nt, Artificial Sequence
  derived and/or modified CDS sequence (wt) from neuraminidase__InfluenzaA__AEO88990
augaauccaaaucagaagauaauaaccauugggucaaucuguaugguaauuggaauaguuagcuuaauguuacaaauugggaacaugaucucaauaugggucagucauucaauucaaacagggaaucaacaccaagcugaaccaaucagaaacacuaauuuucuuacugagaacgcuguggcuucaguaacacuagcgggcaauucaucucuuugccccguuagaggaugggcuguacacaguaaggacaacaguauaaggauugguuccaagggggauguguuuguuauuagagagccguucaucucaugcucccacuuggaaugcagaacuuucuuuuugacucagggagccuuacugaaugacaagcacuccaaugggacugucaaagacagaagcccucacagaacauuaaugaguuguccugugggugaggcucccuccccauauaacucaagguuugagucuguugcuuggucagcaagugcuugccaugauggcaccaguugguugacaauuggaauuucuggcccagacaauggggcuguggcuguauugaaauacaauggcauaauaacagacaccaucaagaguuggaggaacaacauacugagaacucaagagucugaaugugcauguguaaauggcucuugcuuuacuguaaugacugauggaccaaguaaugggcaggcaucauauaagaucuucaaaauggaaaaagggaaagugguuaaaucagucgaauugaaugcuccuaauuaucacuaugaggaaugcuccuguuauccugaugcuggcgaaaucacaugugugugcagggauaauuggcauggcucaaauaggccauggguaucuuucaaucagaauuuggaguaucaaauaggauauauaugcaguggaguuuucggagacaauccacgccccaaugauggaacagguaguugugguccaguguccccuaacggggcauaugggauaaaaggguuuucauuuaaauacggcaauggugucuggaucggaagaaccaaaagcacuaauuccaggagcggcuuugaaaugauuugggauccaaauggguggacuggaacggacaguaacuuuucggugaaacaagauauaguagcaauaacugauuggucaggauauagcgggaguuuuguccagcauccagaacugacaggauuagauugcauaaggccuugcuucuggguugaguuaaucagagggcggcccaaagagagcacaauuuggacuagugggagcagcauaucuuuuugugguguaaauagugacacugugaguuggucuuggccagacgaugccgaguugccauucaccauugacaaguag

SEQ ID NO: 53060 - RNA, 1350 nt, Artificial Sequence
  derived and/or modified CDS sequence (wt) from neuraminidase__InfluenzaA__AEO88998
augaauccaaaucagaagauaauaaccauuggaucaaucuguaugguaauuggaauaguuagcuuaauguuacagauugggaacaugaucucaauaugggucagucauucaauucaaacagggaaucaacaccaagcugaaccaaucagaaauacuaauuuucuuacugagaacgcuguggcuucaguaacauuagcgggcaauucaucucuuugccccauuagaggaugggcuguacacaguaaagacaacaguauaaggauugguuccaagggggauguguuuguaauuagagagccguucaucucaugcucccauuuggaaugcagaacuuucuuuuugacucagggagccuuacugaaugacaagcacuccaacgggacugucaaagacagaagcccucacagaacacuaaugaguuguccugugggugaggcucccuccccauauaacucaagguuugagucuguugcuuggucagcaagugcuugccaugauggcaccaguugguugacaauuggaauuucugguccagacaauggggcuguggcuguguugaaauacaauggcauaauaacagacaccaucaagaguuggaggaacaacauacugagaacucaagagucugaaugugcauguguaaauggcucuugcuuuacuguaaugacugauggaccaaguaaugaacaggcaucauauaagaucuucaaaauggaaaaaggaaaaguaguuaaaucagucgaauugaaugcuccuaauuaucacuaugaggaaugcuccuguuauccugaugcuggcgaaaucauaugugugugcagggauaauuggcauggcucaaauaggccauggguaucuuucaaucagaauuuggaguaucaaauaggauauauaugcaguggaguuuucggagacaauccacgccccaaugauggaacagguaguugugguccaguguccccuaacggggcauaugggauaaaaggguuuucauuuaaauacggcaaugguguuuggaucgggagaaccaaaagcacuaauuccaggagcggcuuugaaaugauuugggauccaaauggguggacuggaacggacaguaacuuuucggugaaacaagauauaguagcaauaacugauuggucaggguauagcgggaguuuuguccagcauccagaacugacaggauuagauugcauaagaccuugcuucuggguugaguuaaucagagggcggcccaaagagagcacaauuuggacuagugggagcagcauaucuuuuugugguguaaauagugacacugugaguuggucuuggccagacggugcugaguugccauucaccauugacaaguag

SEQ ID NO: 53061 - RNA, 1350 nt, Artificial Sequence
  derived and/or modified CDS sequence (wt) from neuraminidase__InfluenzaA__AEO89006
augaauccaaaucagaagauaauaaccauugggucaaucuguaugguaauuggaauaguuagcuuaauguuacaaauugggaacaugaucucaauaugggucagucauucaauucaaacagggaaucaacaccaagcugaaccaaucagaaauacuaauuuucuuacugagaacgcuguggcuucaguaacauuagcgggcaauucaucucuuugccccguuagaggaugggcuguacacaguaaagacaacaguauaaggauugguuccaagggggauguguuuguuauuagagagccguucaucucaugcucccacuuggaaugcagaacuuucuuuuugacucagggagccuuacugaaugacaagcacuccaaugggacugucaaagacagaagcccucacagaacauuaaugaguuguccugugggugaggcucccuccccauauaacucaagguuugagucuguugcuuggucagcaagugcuugccaugauggcaccaguugguugacaauuggaauuucuggcccagacaauggggcuguggcuguauugaaauacaauggcauaauaacagacaccaucaagaguuggaggaacaacauacugagaacucaagagucugaaugugcauguguaaauggcucaugcuuuacuguaaugacugauggaccaaguaaugggcaggcaucauauaagaucuucaaaauggaaaaagggaaagugguuaaaucagucgaauugaaugcuccuaauuaucacuaugaggaaugcuccuguuauccugaugcuggcgaaaucacaugugugugcagagauaauuggcauggcucaaauaggccauggguaucuuucaaucagaauuuggaguaucaaauaggauauauaugcaguggaguuuucggagacaauccacgccccaaugauggaacagguaguugugguccaguguccccuaacggggcauaugggauaaaaggguuuucauuuaaauacggcaaugguguuuggaucggaagaaccaaaagcacuaauuccaggagcggcuuugaaaugauuugggauccaaauggguggacuggaacggacagugacuuuucggugaaacaagauauaauagcaauaacugauuggucaggauauagcgggaguuuuguccagcauccagaacugacaggauuagauugcauaagaccuugcuucuggguugaguuaaucagagggcggcccaaagagagcacaauuuggacuagugggagcagcauaucuuuuugugguguaaauagugacacugugaguuggucuuggccagacggugcugaguugccauucaccauugacaaguag

SEQ ID NO: 53062 - RNA, 1350 nt, Artificial Sequence
  derived and/or modified CDS sequence (wt) from neuraminidase__InfluenzaA__AEO89023
augaauccaaaucagaagauaauaaccauugggucaaucuguaugguaauuggaauaguuagcuuaauguuacaaauugggaacauggucucauuaugggucagucauucaauucagacagggaaucaacaccaaguugaaccaaucagcaauacuaauuuucuuacugagaaagcuguggcuucaguaacauuagcgggcaauucaucucuuugccccauuagaggaugggcuguacacaguaaggacaacaguauaaggauugguuccaaaggggauguguuuguuauuagagagccauucaucucaugcucccacuuggaaugcagaacuuucuuuuugacucagggagccuugcugaaugacaagcacuccaacgggacugucaaagacagaagcccucacagaacauuaaugaguuguccugugggugaggcucccuccccauauaacucaagguuugaaucuguugcuuggucagcaagugcuugccaugauggcaccaguugguugacaauuggaauuucuggcccagacaauggggcuguggcuguauugaaauacaauggaaugauaacagacaccaucaagaguuggaggaacaacauacugagaacucaagagucugaaugugcauguguaaauggcucuugcuuuacuguaaugacugauggaccaaguaaugggcaggcaucauauaagaucuucaaaauggaaaaaggaaaagugguuaaaucagucgaauuggaugcuccuaauuaccacuaugaggaaugcuccuguuauccugaugccggcgaaaucacaugugugugcagggauaauuggcauggcucaaaucggccauggguaucuuucaaucaaaauuuggaguaucaaauaggauauauaugcagcggaguuuucggggacaauccacgccccaaugauggaacagguaguugugguccgguguccccuaauggggcauaugggguaaaaggguuuucauuuaaauacggcaaugguguuuggaucgggagaaccaaaagcccuaguuccaggagcggcuuugaaaugauuugggauccaaauggguggacugaaacggacaguagcuucucggugaaacaagauauaguagcaauaacugauuggucaggauauagcgggaguuuuguccagcauccagaacugacaggauuagauugcauaagaccuuguuucuggguugaguuaaucagagggcggcccaaagagagcacaauuuggacuagugggagcagcauauccuuuugugguguaaauagugacacugugaguuggucuuggccagacggugcugaguugccauucaccauugacaaguaa

SEQ ID NO: 53063 - RNA, 1350 nt, Artificial Sequence
  derived and/or modified CDS sequence (wt) from neuraminidase__InfluenzaA__AEO89032
augaauccaaaucagaagauaauaaccauugggucaaucuguaugguaauuggaauaguuagcuuaauguuacaaauugggaacaugaucucaauaugggucagucauucaauucaaacagggaaucaacaccaagcugaaccaaucagaaacacuaauuuucuuacugagaacgcuguggcuucaguaacauuagcgggcaauucaucucuuugccccguuagaggaugggcuguacacaguaaagacaacaguauaaggauugguuccaagggggauguguuuguuauuagagagccguucaucucaugcucccacuuggaaugcagaacuuucuuuuugacucagggagccuuacugaaugacaagcacuccaaugggacugucaaagacagaagcccucacagaacauuaaugaguuguccugugggugaggcucccucccccuauaacucaagguuugagucuguugcuuggucagcaagugcuugccaugauggcaccaguugguugacaauuggaauuucuggcccagacaauggggcuguggcuguauugaaauacaauggcauaauaacagacaccaucaagaguuggaggaacaacauacugagaacucaagagucugaaugugcauguguaaauggcucuugcuuuacuguaaugacugauggaccaaguaaugggcaggcaucauauaagaucuucaaaauggaaaaaggaaaagugguuaaaucagucgaauugaaugcuccuaauuaucacuaugaggaaugcuccuguuauccugaugcgggcgaaaucacaugugugugcagggauaauuggcauggcucaaauaggccauggguaucuuucaaucagaauuuggaguaucaaauaggauauauaugcaguggaguuuucggagacaauccacgccccaaugauggaacagguaguugugguccaguguccccuaacggggcauaugggauaaaaggguuuucauuuaaauacggcaaugguguuuggaucggaagaaccaaaagcacuaauuccaggagcggcuuugaaaugauuugggauccaaauggguggacuggaacggacaguaacuuuucggugaaacaagauauaguagcaauaacugauuggucaggauauagcgggaguuuuguccagcauccagaacugacaggauuagauugcauaaggccuugcuucuggguugaguuaaucagagggcggcccaaagagagcacaauuuggacuagugggagcagcauaucuuuuugugguguaaauagugacacugugaguuggucuuggccagacggugcugaguugccauucaccauugacaaguag

SEQ ID NO: 53064 - RNA, 1350 nt, Artificial Sequence
  derived and/or modified CDS sequence (wt) from neuraminidase__InfluenzaA__AEO89041
augaauccaaaucagaagauaauaaccauugggucaaucuguaugguaauuggauuagucagcuuaauguuacaaauugggaacaugaucucaauaugggucagucauucaauucaaacagggaaucaacaccaagcugaaccaaucagaaauacuaauuuucuuacugagaacgcuguggcuucaguaacauuagcgggcaauucaucucuuugccccguuagaggaugggcuguacacaguaaagacaacaguauaaggauugguuccaagggggauguguuuguuauuagagagccguucaucucaugcucccacuuggaaugcagaacuuucuuuuugacucaaggagccuuacugaaugacaagcacuccaaugggacugucaaagacagaagcccucacagaacauuaaugaguuguccugugggagaggcucccuccccauauaacucaagguuugagucuguugcuuggucagcaagugcuugccaugauggcaccaguugguugacaauuggaauuucuggcccagacaauggggcuguggcuguauugaaauacaauggcauaauaacagacaccaucaagaguuggaggaacaacauacugagaacucaagagucugaaugugcauguguaaauggcucuugcuuuacuguaaugacugauggaccaaguaaugggcaggcaucauauaagaucuucaaaauggaaaaagggaaagugguuaaaucagucgaauugaaugcuccuaauuaucacuaugaggaaugcuccuguuauccugaugcuggcgaaaucacaugugugugcagggauaauuggcauggcucaaauaggccauggguaucuuucaaucagaauuuggaguaucaaauaggauauauaugcaguggaguuuucggagacaauccacgccccaaugauggaacagguaguugugguccaguguccccuaacggggcauaugggauaaaaggguuuucauuuaaauacggcaaugguguuuggaucggaagaaccaaaagcacuaauuccaggagcggcuuugaaaugauuugggauccaaauggguggacuggaacggacaguaacuuuucggugaaacaagauauaguagcaauaacugauuggucaggauauagcgggaguuuuguccagcauccagaacuaacaggauuagauugcauaagaccuugcuucuggauugaguuaaucagagggcggcccaaagagagcacaauuuggacuagugggagcagcauaucuuuuugugguguaaauagugacacugugaguuggucuuggccagacggugcugaguugccauucaccauugacaaguag

SEQ ID NO: 53065 - RNA, 1350 nt, Artificial Sequence
  derived and/or modified CDS sequence (wt) from neuraminidase__InfluenzaA__AEO89050
augaauccaaaucagaagauaauaaccauuggaucaaucuguaugguaauuggaauaguuagcuuaauguuacagauugggaacaugaucucaauaugggucagucauucaauucaaacagggaaucaacaccaagcugaaccaaucagaaauacuaauuuucuuacugagaacgcuguggcuucaguaacauuagcgggcaauucaucucuuugccccauuagaggaugggcuguacacaguaaagacaacaguauaaggauuggguccaagggggauguguuuguaauuagagagccguucaucucaugcucccaucuggaaugcagaacuuucuuuuugacucagggagccuuacugaaugacaagcacuccaacgggaccgucaaagacagaagcccucacagaacacuaaugaguuguccuaugggugaggcucccuccccauauaacucgagguuugagucuguugcuuggucagcaagugcuugccaugauggcaccaguugguugacaauuggaauuucugguccagacaauggggcuguggcuguauugaaauacaauggcauaauaacagacaccaucaagaguuggaggaacaacauacugaggacucaagagucugaaugugcauguguaaauggcucuuguuuuacuguaaugacagauggaccaaguaauggacaggcaucauauaagaucuucaaaauggaaaaagggaaaguaguuaaaucagucgaacugaaugcuccuaauuaucacuaugaagaaugcuccuguuauccugaugcuggcgaaaucauaugugugugcagggauaauuggcauggcucaaauaggccauggguaucuuucaaucagaauuuggaguaucaaauaggauauauuugcaguggaguuuucggagacaauccacggccaaaugaugggacagguaguugugguccaguguccccuaacggggcauaugggauaaaaggguuuucauuuaaauacggcaaugguguuuggaucgggagaaccaaaagcacuaauuccaggagcggcuuugaaaugauuugggauccaaauggguggacuggaacggacagugacuuuucggugaaacaagauauaguagcaauaacugauuggucaggauauagcgggaguuuuguccagcauccagaacugacaggauuagauugcauaagaccuugcuucuggguugaguuaaucagagggcggccaaaagagagcacaauuuggacuagugggagcagcauaucuuuuugugguguaaauagugacacugugaguuggucuuggccagacggugcugaguugccauucaccauugacaaguag

SEQ ID NO: 53066 - RNA, 1350 nt, Artificial Sequence
  derived and/or modified CDS sequence (wt) from neuraminidase__InfluenzaA__AEO89058
augaauccaaaucagaagauaauaaccaucggaucaaucuguaugguaauuggaauaguuagcuuaauguuacaaauugggaacaugaucucaauaugggucagucauucaauucagacagggaaucaacgccaagcugaaccaaucagcaauacuaaauuucuuacugagaaagcuguggcuucaguaacauuagcgggcaauucaucucuuugccccauuagcggaugggcuguauacaguaaggacaacaguauaaggaucgguuccaggggggauguguuuguuauaagagagccguucaucucaugcucccacuuggaaugcagaacuuucuuuuugacucagggagccuugcugaaugacaagcacuccaaugggacugucaaagacagaagcccucacagaacauuaaugaguuguccugugggugaggcucccuccccauauaacucaagguuugagucuguugcuuggucagcaagugcuugccaugauggcaccaguugguugacaauuggaauuucugguccagacaauggggcuguggcuguauugaaauacaauggcauaauaacagacaccaucaagaguuggaggaacaacauacugagaacucaagagucugaaugugcauguguaaauggcucuugcuuuacuguaaugacugauggaccaaguaaugggcaggcaucauauaagaucuucaaaauggaaaaagggaaagugguuaaaucagucgaauuggaugcuccuaauuaucacuaugaggagugcuccuguuauccugaugccggcgaaaucacaugugugugcagggauaauuggcauggcucaaauaggccauggguaucuuucaaucaaaauuuggauuaucaaauaggauauauaugcaguggaguuuucggagacaauccacgccccaaugauggaacagguaguugugguccgguguccccuaacggggcauaugggguaaaaggguuuucauuuaaauacggcaaugguguuuggaucgggagaaccaaaagcacuaauuccaggagcggcuuugaaaugauuugggauccaaauggguggacuggaacggacaguagcuuuucggugaagcaagauaucguagcaauaacugauuggucaggauauagcgggaguuuuguccagcauccagaacugacaggauuagauugcauaagaccuuguuucuggguugaguuaaucagagggcggccuaaagagagcacaauuuggaccagugggagcagcauaucuuuuugugguguaaauagugacacuguuaguuggucuuggccagacggugcugaguugccauucaccauugacaaguag

SEQ ID NO: 53067 - RNA, 1350 nt, Artificial Sequence
  derived and/or modified CDS sequence (wt) from neuraminidase__InfluenzaA__AEO89075
augaauccaaaucaaaagauaauaaccauugggucaaucuguaugguaauuggaauaguuagcuuaauguuacaaauugggaacaugaucucaauaugggucagucauucaauucagagagggaaucuaaaccaaguugaaccaaucagcaauacuaauuuucuuacugagaaagcuguggcuucaguaacauuagcgggcaauucaucucuuugcccuauuagagguugggcuauacacaguaaagacaacaguauaaggauugguuccaagggggauguguuuguuauuagagagccauucaucucaugcucccacuuggaaugcagaacuuucuuuuugacucagggagccuugcugaaugacaagcacuccaacgggacugucaaagacagaagcccucacagaacauuaaugaguuguccugugggugagguccccuccccauauaacucaagguuugagucuguugcuuggucagcaagugcuugccaugauggcaccaguugguugacaauuggaauuucuggcccagacaauggggcuguggcuguagugaaauacaauggcauaauaacagacaccaucaagaguuggaggaacaacauacugagaacucaagagucugaaugugcauguguaaauggcucuugcuuuacuguaaugacugacggaccaaguaaugggcaggcaucauauaagaucuucaaaauggaaaaaggaaaaguaauuaaaucagucgaauuggaugcuccuaauuaccacuaugaggaaugcuccuguuauccugaugccggcgaaaucacaugugugugcagggauaauuggcaugguucaaaucggccauggguguccuucaaucaaaaucuggaguaucaaauaggauauauaugcaguggaguuuucggagacaauccacgccccaaugauggaacagguaguugugguccgguguccccuaauggggcauaugggguaaaaggguuuucauuuaaauacggcaaugguguuuggaucgggagaaccaaaagcccuaauuccaggagcggcuuugaaaugauuugggauccaaauggguggagugaaacggacaguagcuucucggugaaacaagauauaguagcaauaacugauuggucaggauauagcgggaguuuuguccagcauccagaacugacagguuuagauugcauaagaccuuguuucuggguugaguuaaucagagggcggcccaaagagaguacaaucuggacuagugggagcagcauauccuuuugugguguaaauagugacacugugaguuggucuuggccagacggugcugaguugccauucaccauugacaaguaa

SEQ ID NO: 53068 - RNA, 1350 nt, Artificial Sequence
  derived and/or modified CDS sequence (wt) from neuraminidase__InfluenzaA__AEO89084
augaauccaaaucagaagauaauaaccauugggucaaucuguaugguaauuggaauaguuagcuuaauguuacaaauugggaacaugaucucaauauggaucaguuauucaauucaaacagggaaucaacaccaagcugaaccaaccagaaaugcuacuuuucuuacugagaacgcuguggcuucaguaacauuagcgggcaauucaucucuuugccccguuagaggaugggcuguacacaguaaagacaacagcauaaggauugguuccaagggggauguguuuguuauuagagagccguucauuucaugcucccacuuggaaugcagaacuuucuuuuugacucagggagccuuacugaaugacaagcacuccaaugggacugucaaagacagaagcccucacagaacauuaaugaguuguccugugggugaggcucccuccccauauaacucaagguuugagucuguugcuuggucagcaagugcuugccaugauggcaccaguugguugacaauuggaauuucuggcccagacaauggggcuguggcuguauugaaauacaauggcauaauaacagacaccaucaagaguuggaggaacaacauacugagaacucaagagucugaaugugcauguguaaauggcucuugcuuuacuguaaugacugauggaccaagugaugggcaggcaucauauaagaucuucaaaauggaaaaagggaaagugguuaaaucagucgaauugauugcuccuaauuaucacuaugaggaaugcuccuguuauccugaugcuggcgaaaucacaugugugugcagggauaauuggcacggcucgaauaggccauggguaucuuucaaucagaauuuggaguaucaaauaggauauauaugcaguggaguuuucggagacaauccacgccccaaugauggaacagguaguugugguccaguguccccuaacggggcauaugggauaaaaggguuuucauuuaaauacggcaaugguguuuggaucggaagaaccaaaagcacuaauuccaggagcggcuuugaaaugauuugggauccaaauggguggacugaaacggacaguaacuuuucggugaaacaagauauaguagcaauaacugauuggucaggauauagcgggaguuuuguccagcauccagaacugacaggauuagauugcauaagaccuugcuucuggguugaguuaaucagagggcggcccaaagagagcacaauuuggacuagugggagcagcauaucuuuuugugguguaaauagugacacugugaguuggucuuggccagacggugcugaguugccauucaccauugacaaguag

SEQ ID NO: 53069 - RNA, 1350 nt, Artificial Sequence
  derived and/or modified CDS sequence (wt) from neuraminidase__InfluenzaA__AEO89093
augaauccgaaucagaagauaauaaccauugggucaaucuguaugguaauuggaauaguuagcuuaauguuacaaauugggaacaugaucucauuaugggucagucauucaauucagacagggaaucaacaccaaguugaaccaaucagcaauacuaauuuucuuguugagaaagcuguggcuucuguaacauuagcaggcaauucaucucuuugcccaauuagaggaugggcuguacacaguaaggacaacaguauaaggauugguuccaaaggggauguguuuguuauuagagagccauucaucucaugcucccacuuggaaugcagaacuuucuuuuugacccagggagccuugcugaaugacaagcauuccaauggaacugucaaagacaggagcccucacagaacauuaaugaguuguccugugggugaggcucccuccccauauaacucaagguucgaaucuguugcuuggucagcaagugcuugccaugauggcaccaguugguugacaauuggaauuucuggcccagacaauggggcuguggcuguauugaaauacaauggcaugauaacagacaccaucaagagcuggagaaacaacauacugagaacucaagagucugaaugugcauguguaaauggcucuugcuuuacuguaaugacugauggaccaaguaaugggcaggcaucauauaagaucuucaaaauggaaaaaggaagagugguuaaaucagucgaauuggaugcuccuaauuaccacuaugaggaaugcucauguuauccugaugccggcgaaaucacaugugugugcagggauaauuggcauggcucaaaucggccauggguaucuuucaaucaaaauuuggaguaucaaauaggcuauauaugcagcggaguuuuuggggacaauccacgccccaaugauggaacagguaguugugguccgguguccucuaauggggcauaugggguaaaaggguuuucauuuaaauacggcaaugguguuuggaucgggagaaccaaaagcccuaauuccaggagcggcuuugaaaugauuugggauccaaauggguggacugaaacggacaguagcuucucggugaaacaagauauaguagcaauaacugauuggucaggguauagcgggaguuuuguccagcauccagaacugacaggauuagauugcauaagaccuuguuucuggguugaguuaaucagagggcggcccaaagagagcacaauuuggacuagugggagcagcauauccuuuugugguguaaauagugacacugugaguuggucuuggccagacggugcugaguugccauucaccauugacaaguaa

SEQ ID NO: 53070 - RNA, 1350 nt, Artificial Sequence
  derived and/or modified CDS sequence (wt) from neuraminidase__InfluenzaA__AEO89102
augaauccaaaucaaaagauaauaaccauugggucaaucuguaugguaauuggaauaguuagcuuaauguuacaaauugggaacaugaucucaauauggaucagucauucaauucagacagggaaucaaaaccaaguugagccaaucagcaauacuaauuuucuuacugagaaagcuguggcuucaguaauauuagcgggcaauucaucucuuugcccuauuagaggaugggcuauacacaguaaggacaacaguauaaggauugguuccaagggggauguauuuguuauuagagagccauucaucucaugcucccacuuggaaugcagaacuuucuuuuugacucagggagccuugcugaaugacaagcacuccaacgggacugucaaagacagaagcccucacagaacauuaaugaguuguccugugggugaggcucccuccccauauaacucaagguuugagucuguugcuuggucagcaagugcuugccaugauggcaccaguugguugacaauuggaauuucugguccggacaguggggcuguggcuguauugaaauacaauggcauaauaacagacaccaucaagagcuggaggaacaacauacugagaacucaagaguccgaaugugcaugcguaaacggcucuugcuuuacuguaaugacugacggaccaaguaaugggcaggcaucuuauaagaucuucaaaauggaaaaagggaaaguaauuaaaucagucgaauuggaugcuccuaauuaccacuaugaggaaugcuccuguuauccugaugccggcgaaaucacaugugugugcagagauaauuggcauggcucaaaucggccauggguguccuucaaucaaaaucuggaauaucaaauaggauauauaugcaguggaguuuucggagacaauccacgccccaaugauggaacagguaguugugguccggugucccauaauggggcauaugggguaaaaggguuuucauuuaaauacggcaaugguguuuggaucgggagaaccaaaagcccuaauuccaggagcggcuuugaaaugauuugggauccaaauggguggagugaaacggacaguagcuucucggugaaacaagauauaguagcaauaacugauuggucaggauauagugggaguuuuguccagcauccagaacugacagguuuggauugcauaagaccuuguuucuggguugaguuaaucagagggcggcccaaagagaguacaguuuggacuagugguagcagcauauccuuuugugguguaaauagugacacugugaguuggucuuggccagacggugcugaguugccauucaccauugacaaguaa

SEQ ID NO: 53071 - RNA, 1350 nt, Artificial Sequence
  derived and/or modified CDS sequence (wt) from neuraminidase__InfluenzaA__AEO89111
augaauccaaaucagaagauaauaaccauugggucaaucuguaugguaauuggaauaguuagcuuaauguuacaaauugggaacauaaucucaauaugggucagucauucaauucaaacagggaaucaacaccaagaugaaccaaucagaaaugcuaauguucuuacugagaacgcuguggcuucaguaacauuagcgggcaauucaucucuuugccccguuagaggaugggcuguacacaguaaagacaacagcauaaggauugguuccaagggggauguguuuguuauuagagagccguucaucucaugcucccacuuggaaugcagaacuuucuuuuugacucagggagccuuacugaaugacaagcacuccaaugggacugucaaagacagaagcccucacagaacauuaaugagcuguccugugggugaggcucccuccccauauaacucaagguuugagucuguugcuuggucagcaagugcuugccaugauggcaccaguugguugacaauuggaauuucuggcccagacaauggggcuguggcuguauugaaauacaauggcauaauaacagacaccaucaagaguuggaggaacaacauacugagaacucaagagucugaaugugcauguguaaauggcucuugcuuuacuguaaugacugauggaccaaguaaugggcaggcaucauauaagaucuucaaaauggaaaaaggaaaagugguuaaaucagucgaauugaaugccccuaauuaucacuaugaggaaugcuccuguuauccugaugcuggugaaaucacaugugugugcagggauaauuggcauggcucaaauaggccauggguaucuuucaaucagaauuuggaguaucaaauaggauauauauguagcggaguuuucggagacaauccacgccccaaugauggaacagguaguugugauccaguguccccuaauggggcauaugggauaaaaggguuuuccuuuaaauacggcaaugguguuuggaucggaagaaccaaaagcacuaauuccaggagugguuuugaaaugauuugggauccaaauggguggacugaaacggacaguaacuuuucagugaaacaagauauaguagcaauaacugauuggucaggguauagcgggaguuuuguccagcauccagaacugacaggauuagauugcauaagaccuugcuucuggguugaguuaaucagagggcggcccaaagagagcacaauuuggacuagugggagcagcauaucuuuuugugguguaaauagcgacacugugaguuggucuuggccagacggugcugaguugccauucaccauugacaaguag

SEQ ID NO: 53072 - RNA, 1350 nt, Artificial Sequence
  derived and/or modified CDS sequence (wt) from neuraminidase__InfluenzaA__AEO89120
augaauccaaaucagaagauaauaaccauugggucaaucuguaugguaauuggaauaguuagcuuaauguuacaaauugggaacaugaucucaauaugggucagucauucaauucaaacagggaaucaacaccaagcugaaccaaucagaaaugcuaguuuucuuacugagaacgcuguggcuucaguaacauuagcgggcaauucaucccuuugccccguuagaggaugggcuguacacaguaaagacaacaguauaaggauugguuccaagggggauguguuuguuauuagagagccguucaucucaugcucccacuuggaaugcagaacuuucuuuuugacucagggagccuuacugaaugacaagcacuccaaugggacugucaaagacagaagcccucacagaacauuaaugaguuguccugugggugaggcucccuccccauauaacucaagguuugagucuguugcuuggucagcaagugcuugccaugauggcaucaguugguugacaauuggaauuucuggcccagacaauggggcuguggcuguauugaaauacaauggcauaauaacagacaccaucaagaguuggagaaacaacauacugagaacucaagagucugaaugugcauguguaaauggcucuugcuuuacuguaaugacugauggaccaaguaaugggcaggcaucauauaagaucuucaaaauggaaaaggggaaagugguuaaaucagucgaauugaaugcuccuaauuaucacuaugaggaaugcuccuguuauccugaugcuggcgaaaucacaugugugugcagggauaauuggcaugguucaaauaggccauggguaucuuucaaucagaauuuggaguaucaaauaggauauauaugcaguggaguuuucggagacaauccacgccccaaugauggaacagguaguugugguccaguguccccuaacggggcauaugggauaaaaggguuuucauuuaaauacggcaaugguguuuggaucggaagaaccaaaagcacuaauuccaggagcgguuuugaaaugauuugggauccaaaugggugggcugaaacggacaguaacuuuucggugaaacaagauauaguagcaauaacugauuggucaggauauagcgggaguuuuguccagcauccagaacuaacaggauuagauugcauaagaccuugcuucuggguugaguuaaucagagggcggcccaaagagggcacaauuuggacuagugggagcagcauauccuuuugugguguaaauagugacacugugaguuggucuuggccagacggugcugaguugccauucaccauugacaaguag

SEQ ID NO: 53073 - RNA, 1350 nt, Artificial Sequence
  derived and/or modified CDS sequence (wt) from neuraminidase__InfluenzaA__AEO89129
augaauccaaaucagaagauaauaaccauugggucaaucuguaugguaauuggaauaguuagcuuaauguuacaaauugggaacauaaucucaauaugggucagucauucaacucaaacagggaaucaacaccaagaugaaccaaucagaaaugcuaauuuucuuacugagaacgcuguggcuucaguaacauuagcgggcaauucaucucuuugccccguuagaggaugggcuguacacaguaaagacaacaguauaaggguugguuccaagggggauguguucguuauuagagagccguucaucucaugcucccacuuggaaugcagaacuuucuuuuugacucagggagcccuacugaacgacaagcacuccaaugggacugucaaagacagaagcccucacagaacauuaaugaguuguccugugggugaggcucccuccccauauaacucaagguuugagucuguugcuuggucagcaagugcuugccaugauggcacuaguugguugacaauuggaauuucuggcccagacaauggggcuguggcuguauugaaauacaauggcauaauaacagacaccaucaagaguuggaggaacaacauacugagaacucaagagucugaaugugcauguguaaauggcucuugcuuuacuguaaugacugauggaccaaguaaugggcaggcaucauauaagaucuucaaaauggaaaaaggaaaagugguuaaaucagucgaauugaaugcuccuaauuaucauuaugaggaaugcuccuguuauccugaugcuggcgaaaucacaugugugugcagggauaauuggcauggcucaaauaggccauggguaucuuucaaucagaauuuggaguaucaaauaggauauauauguaguggaguuuucggagacaauccacgccccaaugauggaacagguaguugugauccaguguccccuaacggggcauaugggauaaaaggguuuucauuuaaauacggcaaugguguuuggaucggaagaaccaaaagcacuaauuccaggagugguuuugagaugauuugggauccaaauggguggacugaaacggacaguaacuuuucagugaaacaagauauaguagcaauaacugauuggucaggguauagcgggaguuuuguccagcauccagaacugacaggauuagauugcauaagaccuugcuucuggguugaguuaaucagagggcggcccaaagagagcacaauuuggacuagugggagcagcauaucuuuuugugguguaaauagcgacacugugaguuggucuuggccagacggugcugaguugccauucaccauugacaaguag

SEQ ID NO: 53074 - RNA, 1350 nt, Artificial Sequence
  derived and/or modified CDS sequence (wt) from neuraminidase__InfluenzaA__AEO89138
augaauccaaaucaaaagauaauaaccauuggaucaaucuguaugguaacuggaauaguuagcuuaauguuacagauugggaacauaaucucaaugugggucagucauucaauucaaacaaggaaucaacaccaagcugaaccaaucagaaauacuaauuuucuuacugagaaugcuguggcuucaguaacauuaacgggcaauucgucucuuugccccauuagaggaugggcuguacacaguaaagacaacaguauaaggauugguuccaagggggauguguuuguaauuagagagccguucaucucaugcucccauuuggaaugcagaacuuucuuuuugacccagggagccuuacugaaugauaagcacuccaacgggacugucaaagacagaagcccucacagaacacuaaugaguugcccugugggugaggcucccuccccauauaacucaagguuugagucuguugcuuggucagcaagugcuugccaugauggcaccaguuggcugacaauuggaauuucugguccagacaauggggcgguggcuguauugaaauacaacggcauaauaacagacaccaucaagaguuggaggaacaauauacugagaacucaagagucugaaugugcauguguaaauggcucuugcuuuacuguaaugacugauggaccaaguaauggacaggcaucauauaagaucuucaaaauggaaaaagggaaaguaguuaaaucagucgaauugaaugcuccuaauuaucacuaugaggaaugcuccuguuauccugaugcuggagaaaucauaugugugugcagggauaauuggcauggcucaaauaggccauggguaucuuucaaucagaauuuggaguaucaaauaggauacauaugcaguggaguuuucggagacaauccacggcccaaugauggaacagguaguugugguccaguguccccuaacggggcauaugggauaaaaggguuuucauuuaaauacggcaaugguguuuggaucgggagaaccaaaagcacuaauuccaggagcggcuuugaaaugauuugggauccaaaugguuggacuggaacggacaaugacuuuucggugaaacaagauauaguagcaauaacugauuggucaggauauagcgggaguuuuguccagcauccagaacugacaggauuagauugcauaagaccuugcuucuggguugaguuaaucagagggcggcccaaagagagcacaguuuggacuagugggagcagcauaucuuuuugugguguaaauagugacacugugaguuggucuuggccagacggugcugaguugccauucaccauugacaaguag

SEQ ID NO: 53075 - RNA, 1350 nt, Artificial Sequence
  derived and/or modified CDS sequence (wt) from neuraminidase__InfluenzaA__AEO89156
augaauccaaaucaaaagauaauaaccauuggaucaaucuguaugguaacuggaauaguuagcuuaaugcuacagauugggaacauaaccucaaugugggucagucauucaauucaaacaaggaaucaacaccaagcugaaccaaucagaaauacuaauuuucuuacugagaacgcuguggcuucaguaacauuagcgggcaauucgucucuuugccccauuagaggaugggcuguacacaguaaagacaacaguauaaggauugguuccaagggggauguguuuguaauuagagagccguucaucucaugcucccacuuggaaugcagaacuuucuuuuugacccagggagcccuacugaaugacaagcacuccaacgggacugucaaagacagaagcccucacagaacacuaaugaguugcccugugggugaggcucccuccccauauaacucaagguuugagucuguugcuuggucagcaagugcuugccaugauggcaccaguuggcugacaauugggauuucugguccagacaauggggcgguggcuguauugaaauacaacggcauaauaacagacaccaucaaaaguuggaggaacaacauacugagaacucaagagucugaaugugcauguguaaauggcucuugcuuuacuguaaugacugauggaccaaguaauggacaggcaucauauaagaucuucaaaauggaaaaagggaaaguaguuaaaucagucgaauugaaugcuccuaauuaucacuaugaggaaugcuccuguuauccugaugcuggagaaaucauaugugugugcagggauaauuggcauggcucaaauaggccauggguaucuuucaaucagaauuuggaguaucaaauaggauacauaugcaguggaguuuucggagacaauccacgccccaaugauggaacagguaguugugguccaguguccccuaacggggcauaugggauaaaaggguuuucauuuaaauacggcaaugguguuuggaucgggagaaccaaaagcacuaauuccaggagcggcuuugaaaugauuugggauccaaaugguuggacuggaacggacagugacuuuucggugaaacaagauauaguagcaauaacugauuggucaggauauagcgggaguuuuguccagcauccagaacugacaggauuagauugcauaagaccuugcuucuggguugaguuaaucagagggcggcccaaagagagcacaauuuggacuagugggagcagcauaucuuuuugugguguaaauagugacacugugaguuggucuuggccagacggugcugaguugccauucaccauugacaaguag

SEQ ID NO: 53076 - RNA, 1350 nt, Artificial Sequence
  derived and/or modified CDS sequence (wt) from neuraminidase__InfluenzaA__AEO89174
augaauccaaaucaaaagauaauaaccauuggaucaaucuguaugguaacuggaauaguuagcuuaaugcuacagauugggaacauaaucucaaugugggucagucauucaauucaaacaaggaaucaacaccaagcugaaccaaucagaaauacuaauuuucuuacugagaacgcuguggcuucaguaacauuagcgggcaauucgucucuuugccccauuagaggaugggcugugcacaguaaagacaacaguauaaggauugguuccaagggggauguguuuguaauuagagagccguucaucucaugcucccauuuggaaugcagaacuuucuuuuugacccagggagcauuacugaaugacaagcacuccaacgggacugucaaagacagaagcccucacagaacacuaaugaguugcccugugggugaggcucccuccccauauaacucaagguuugagucuguugcuuggucagcaagugcuugccaugauggcaccaguuggcugacaauuggaauuucugguccagacaauggggcgguggcuguauugaaauacaacggcauaauaacagacaccaucaagaguuggaggaacaacauacugagaacucaagagucugaaugugcauguguaaauggcucuugcuuuacuguaaugacugauggaccaaguaauggacaggcaucauauaagaucuucaaaauggaaaaagggaaaguagucaaaucagucgaauugaaugcuccuaauuaucacuaugaggaaugcuccuguuauccugaugcuggagaaaucauaugugugugcagggauaauuggcauggcucaaauaggccauggguaucuuucaaucagaauuuggaguaucaaauaggauacauaugcaguggaguuuucggagacaauccacgccccaaugauggaacagguaguugugguccaguguccccuaacggggcauaugggauaaaaggguuuucauuuaaauacggcaaugguguuuggaucgggagaaccaaaagcacuaauuccaggagcggcuuugaaaugauuugggauccaaaugguuggacuggaacggacagugacuuuucggugaaacaagauauaguagcaauaacugauuggucaggauauagcgggaguuuuguccagcauccagaacugacaggauuagauugcauaagaccuugcuucuggguugaguuaaucagagggcggcccaaagagagcacaauuuggacuagugggagcagcauaucuuuuugugguguaaauagugacacugugaguuggucuuggccagacggugcugaguugccauucaccauugacaaguag

SEQ ID NO: 53077 - RNA, 1350 nt, Artificial Sequence
  derived and/or modified CDS sequence (wt) from neuraminidase__InfluenzaA__AEO89183
augaauccaaaucagaagauaguaaccauuggaucaaucuguaugguaauuggaauaguuagcuugauguuacagauugggaacaugaucucaauaugggucagucauucaauucaaacagggaaucaacaccaaacugaaccaaucagaaauacuaauuuucuuacugagaacacuguggcuucaguaacauuagcuggcaauucaucucuuugccccauuagaggaugggcuguacacaguaaagacaacaguauaaggauuggguccaaaggggauguguuuguaauuagagagccguucaucucaugcucccaucuggaaugcagaacuuucuuuuugacucagggagcuuuacugaaugacaagcacuccaacgggacugucaaagacaggagcccucacagaacgcuaaugaguuguccuauaggugaggcucccuccccauauaacucgagguuugagucuguugcuuggucggcaagugcuugccaugauggcaccaguugguugacaauuggaauuucugguccagacaauggggcuguggcgguauugaaauacaauggcauaauaacagacacuaucaagaguuggaggaauaacauacugaggacccaagagucugaaugugcauguguaaauggcucuugcuuuacugugaugacagauggaccaaguaauggacaggcaucauauaagauuuucaaaauggaaaaagggaaaguaguuaagucagucgaauugaaugcuccuaauuaucacuaugaggaaugcuccuguuauccugaugcuggcgaaaucauaugugugugcagggauaauuggcauggcucaaacaggccauggguaucuuucaaucagaauuuggaguaucaaauaggauauauuugcaguggaguuuucggagacaauccacgaccaaaugaugggaaagguaguugugguccaguguccccuaacggggcauaugggguaaaaggguuuucauuuaaauacggcaauggugucuggaucgggaggaccaaaagcacucauuccaggagcggcuuugaaaugauuugggauccaaauggguggacuggaacggacagugaauuuucgaugaaacaagauauaguagcaauaacugauuggucaggauauagcgggaguuuuguccagcacccagaacugacaggauuagauugcauaagaccuugcuucugggucgaguuaaucagagggcggcccaaggagagcacaauuuggacuagugggagcagcauaucuuuuugugguguaaauagugacacugugaguuggucuuggccagacggugcugaguugccauucaccauugacaaguag

SEQ ID NO: 53078 - RNA, 1350 nt, Artificial Sequence
  derived and/or modified CDS sequence (wt) from neuraminidase__InfluenzaA__AEO89205
augaauccaacucagaagauaauaaccauugggucaaucuguaugguaauuggaauaguuagcuuaauguuacaaauugggaacaugaucucaauaugggucagucauucaauucaaacagggaaucaacaccaagcugaaccaaucagaaaugcuaguuuucuuacugagaacgcuguggcuucaguaacauuagcgggcaauucaucccuuugccccguuagaggaugggcuguacacaguaaagacaacaguauaaggauugguuccaagggggauguguuuguuauuagagagccguucaucucaugcucccacuuggaaugcagaacuuucuuuuugacucagggagccuuacugaaugacaagcacuccaaugggacugucaaagacagaagcccucacagaacauuaaugaguuguccugugggugaggcucccuccccauauaacucaagguuugagucuguugcuuggucagcaagugcuugccaugauggcaucaguugguugacaauuggaauuucuggcccagacaauggggcuguggcuguauugaaauacaauggcauaauaacagacaccaucaagaguuggagaaacaacauacugagaacucaagagucugaaugugcauguguaaauggcucuugcuuuacuguaaugacugauggaccaaguaaugggcaggcaucauauaagaucuucaaaauggaaaaggggaaagugguuaaaucagucgaauugaaugcuccuaauuaucacuaugaggaaugcuccuguuauccugaugcuggcgaaaucacaugugugugcagggauaauuggcaugguucaaauaggccauggguaucuuucaaucagaauuuggaguaucaaauaggauauauaugcaguggaguuuucggagacaauccacgccccaaugauggaacagguaguugugguccaguguccccuaacggggcauaugggauaaaaggguuuucauuuaaauacggcaaugguguuuggaucggaagaaccaaaagcacuaauuccaggagcgguuuugaaaugauuugggauccaaaugggugggcugaaacggacaguaacuuuucggugaaacaagauauaguagcaauaacugauuggucaggauauagcgggaguuuuguccagcauccagaacuaacaggauuagauugcauaagaccuugcuucuggguugaguuaaucagagggcggcccaaagagggcacaauuuggacuagugggagcagcauauccuuuugugguguaaauagugacacugugaguuggucuuggccagacggugcugaguugccauucaccauugacaaguag

SEQ ID NO: 53079 - RNA, 1350 nt, Artificial Sequence
  derived and/or modified CDS sequence (wt) from neuraminidase__InfluenzaA__AEO89215
augaauccaaaucagaagauaauaaccauugggucaaucuguauggcaauuggaauaguuagcuuaauguuacaaauugggaacaugaucucaauaugggucagucauucaauucaaacagggaaucaacaccaagcugaaccaaucagaaaugcuaguuuucuuacugagaacgcuguggcuucaguaacauuagcgggcaauucaucccuuugccccguuagaggaugggcuguacacaguaaagacaacaguauaaggauugguuccaagggggauguguuuguuauuagagagccguucaucucaugcucccacuuggaaugcagaacuuucuuuuugacucagggagccuuacugaaugacaagcacuccaaugggacugucaaagacagaagcccucacagaacauuaaugaguuguccugugggugaggcucccuccccauauaacucaagguuugagucuguugcuuggucagcaagugcuugccaugauggcaucaguugguugacaauuggaauuucuggcccagacaauggggcuguggcuguauugaaauacaauggcauaauaacagacaccaucaagaguuggagaaacaacauacugagaacucaagagucugaaugugcauguguaaauggcucuugcuuuacuguaaugacugauggaccaaguaaugggcaggcaucauauaagaucuucaaaauggaaaaggggaaagugguuaaaucagucgaauugaaugcuccuaauuaucacuaugaggaaugcuccuguuauccugaugcuggcgaaaucacaugugugugcagggauaauuggcaugguucaaauaggccauggguaucuuucaaucagaauuuggaguaucaaauaggauauauaugcaguggaguuuucggagacaauccacgccccaaugauggaacagguaguugugguccaguguccccuaacggggcauaugggauaaaaggguuuucauuuaaauacggcaaugguguuuggaucggaagaaccaaaagcacuaauuccaggagcgguuuugaaaugauuugggauccaaaugggugggcugaaacggacaguaacuuuucggugaaacaagauauaguagcaauaacugauuggucaggauauagcgggaguuuuguccagcauccagaacuaacaggauuagauugcauaagaccuugcuucuggguugaguuaaucagagggcggcccaaagagggcacaauuuggacuagugggagcagcauauccuuuugugguguaaauagugacacugugaguuggucuuggccagacggugcugaguugccauucaccauugacaaguag

SEQ ID NO: 53080 - RNA, 1350 nt, Artificial Sequence
  derived and/or modified CDS sequence (wt) from neuraminidase__InfluenzaA__AEO89226
augaauccaacucagaagauaauaaccauugggucaaucuguauggcaauuggaauaguuagcuuaauguuacaaauugggaacaugaucucaauaugggucagucauucaauucaaacagggaaucaacaccaagcugaaccaaucagaaaugcuaguuuucuuacugagaacgcuguggcuucaguaacauuagcgggcaauucaucccuuugccccguuagaggaugggcuguacacaguaaagacaacaguauaaggauugguuccaagggggauguguuuguuauuagagagccguucaucucaugcucccacuuggaaugcagaacuuucuuuuugacucagggagccuuacugaaugacaagcacuccaaugggacugucaaagacagaagcccucacagaacauuaaugaguuguccugugggugaggcucccuccccauauaacucaagguuugagucuguugcuuggucagcaagugcuugccaugauggcaucaguugguugacaauuggaauuucuggcccagacaauggggcuguggcuguauugaaauacaauggcauaauaacagacaccaucaagaguuggagaaacaacauacugagaacucaagagucugaaugugcauguguaaauggcucuugcuuuacuguaaugacugauggaccaaguaaugggcaggcaucauauaagaucuucaaaauggaaaaggggaaagugguuaaaucagucgaauugaaugcuccuaauuaucacuaugaggaaugcuccuguuauccugaugcuggcgaaaucacaugugugugcagggauaauuggcaugguucaaauaggccauggguaucuuucaaucagaauuuggaguaucaaauaggauauauaugcaguggaguuuucggagacaauccacgccccaaugauggaacagguaguugugguccaguguccccuaacggggcauaugggauaaaaggguuuucauuuaaauacggcaaugguguuuggaucggaagaaccaaaagcacuaauuccaggagcgguuuugaaaugauuugggauccaaaugggugggcugaaacggacaguaacuuuucggugaaacaagauauaguagcaauaacugauuggucaggauauagcgggaguuuuguccagcauccagaacuaacaggauuagauugcauaagaccuugcuucuggguugaguuaaucagagggcggcccaaagagggcacaauuuggacuagugggagcagcauauccuuuugugguguaaauagugacacugugaguuggucuuggccagacggugcugaguugccauucaccauugacaaguag

SEQ ID NO: 53081 - RNA, 1350 nt, Artificial Sequence
  derived and/or modified CDS sequence (wt) from neuraminidase__InfluenzaA__AEO89237
augaauccaaaucaaaagauaauaaccauuggaucaaucuguaugguaauuggaauaguuagcuuaauguuacagauugggaacauaaucucaaugugggucagucauucaauucaaacaaggaaucaacaccaagcugaaccaaucagaaauacuaauuuucuuacugagaacgcuguggcuucaguaacauuagcgggcaauucgucucuuugccccauuagaggaugggcuguacacaguaaagacaacaguauaaggauugguuccaagggggauguguuuguaauuagagagccguucaucucaugcucccauuuggaaugcagaacuuucuuuuugacccagggagccuuacugaaugacaagcacuccaacgggacugucaaagacagaagcccucacagaacacuaaugaguugcccugugggugaggcucccuccccauauaacucaagguuugagucuguugcuuggucagcaagugcuugccaugauggcaccaguuggcugacaauuggaauuucugguccagacaauggggcgguggcuguauugaaauacaacggcauaauaacagacaccaucaagaguuggaggaacaacauacugagaacucaagagucugaaugugcauguguaaauggcucuugcuuuacuguaaugacugauggaccaaguaauggacaggcaucauauaagaucuucaaaauggaaaaagggaaaguaguuaaaucagucgaauugaaugcuccuaauuaucacuaugaggaaugcuccuguuauccugaugcuggagaaaucauaugugugugcagggauaauuggcauggcucaaauaggccauggguaucuuucaaucagaauuuggaguaucaaauaggauauauaugcaguggaguuuucggagacaauccacgccccaaugauggaacagguaguugugguccaguguccccuaacggggcauaugggauaaaaggguuuucauuuaaauacggcaaugguguuuggaucgggagaaccaaaagcacuaauuccaggagcggcuuugaaaugauuugggauccaaauggguggacuggaacggacagugacuuuucggugaaacaagauauaguagcaauaacugauuggucaggauauagcgggaguuuuguccagcauccagaacugacaggauuagauugcauaagaccuugcuucuggguugaguuaaucagagggcggcccaaagagagcacaauuuggacuagugggagcagcauaucuuuuugugguguaaauagugacacugugaguuggucuuggccagacggugcugaguugccauucaccauugacaaguag

SEQ ID NO: 53082 - RNA, 1350 nt, Artificial Sequence
  derived and/or modified CDS sequence (wt) from neuraminidase__InfluenzaA__AEO89248
augaauccaaaucaaaagauaauaaccauuggaucaaucuguaugguaauuggaauaguuagcuuaauguuacagauugggaacauaaucucaauaugggucagucauucauuucaaacaaggguucaacaccaagcugaaccaaucagaaauacuaauuuucuuacugagaacgcuguggcuucaguaacauuagcgggcaauucgucucuuugccccauuaggggaugggcuguacacaguaaagacaacaguauaagaauugguuccaagggggauguguuuguaauuagagagccguucaucucaugcucucauuuggaaugcagaacuuucuuuuugacccagggagccuuacugaaugacaagcacuccaacgggacugucaaagacaggagcccucacagaacacuaaugaguugcccugugggugaggcucccuccccauauaacucaagguuugagucuguugcuuggucagcaagugcuugccaugauggcaccaguuggcugacaauuggaauuucuggaccagacaauggggcuguggcuguauugaaauacaauggcauaauaacagacaccaucaagaguuggaggaacaacauacugagaacucaagagucugaaugugcauguguaaauggcucuugcuuuacuguaaugacugauggaccaaguaauggacaggcaucauauaagaucuucaaaaugaaaaaagggaaaguaguuaaaucagucgaguugaaugcuccuaauuaucacuaugaggaaugcuccuguuauccugaugcuggagaaaucauaugugugugcagggauaauuggcauggcucaaauaggccauggguaucuuucaaucagaauuuggaguaucaaauaggauauauaugcaguggaguuuucggagacaauccacgccccaaugauggaacagguaguuguggcccaguguccccuaacggggcauaugggauaaaaggguuuucauuuaaauacggcaauggcguuuggaucgggagaaccaaaagcacuaauuccagaagcggcuuugaaaugauuugggauccaaauggguggacuggaacggacagugacuuuucgaugaaacaagauauaguagcaauaacugauuggucaggauauagcgggaguuuuguccagcauccagaacugacaggauuagauugcauaagaccuugcuucuggguugaguuaaucagagggcggcccaaagaaagcacaauuuggacuagugggagcagcauauccuuuugugguguaaauagugacacugugaguuggucuuggccagacggugcugaguugccauucaccauugacaaguag

SEQ ID NO: 53083 - RNA, 1350 nt, Artificial Sequence
  derived and/or modified CDS sequence (wt) from neuraminidase__InfluenzaA__AEO89270
augaauccaaaucaaaagauaauaaccauuggaucaaucuguaugguaacuggaauaguuagcuuaaugcuacagauugggaacauaaccucaaugugggucagucauucaauucaaacaaggaaucaacaccaagcugaaccaaucagaaauacuaauuuucuuacugagaacgcuguggcuucaguaacauuagcgggcaauucgucucuuugccccauuagaggaugggcuguacacaguaaagacaacaguauaaggauugguuccaagggggauguguuuguaauuagagagccguucaucucaugcucccacuuggaaugcagaacuuucuuuuugacccagggagccuuacugaaugacaagcacuccaacgggacugucaaagacagaagcccucacagaacacuaaugaguugcccugugggugaggcucccuccccauauaacucaagguuugagucuguugcuuggucagcaagugcuugccaugauggcaccaguuggcugacaauugggauuucugguccagacaauggggcgguggcuguauugaaauacaacggcauaauaacagacaccaucaaaaguuggaggaacaacauacugagaacucaagagucugaaugugcauguguaaauggcucuugcuuuacuguaaugacugauggaccaaguaauggacaggcaucauauaagaucuucaaaauggaaaaagggaaaguaguuaaaucagucgaauugaaugcuccuaauuaucacuaugaggaaugcuccuguuauccugaugcuggagaaaucauaugugugugcagggauaauuggcauggcucaaauaggccauggguaucuuucaaucagaauuuggaguaucaaauaggauacauaugcaguggaguuuucggagacaauccacgccccaaugauggaacagguaguugugguccaguguccccuaacggggcauaugggauaaaaggguuuucauuuaaauacggcaaugguguuuggaucgggagaaccaaaagcacuaauuccaggagcggcuuugaaaugauuugggauccaaaugguuggacuggaacggacagugacuuuucggugaaacaagauauaguagcaauaacugauuggucaggauauagcgggaguuuuguccagcauccagaacugacaggauuagauugcauaagaccuugcuucuggguugaguuaaucagagggcggcccaaagagagcacaauuuggacuagugggagcagcauaucuuuuugugguguaaauagugacacuguggguuggucuuggccagacggugcugaguugccauucaccauugacaaguag

SEQ ID NO: 53084 - RNA, 1350 nt, Artificial Sequence
  derived and/or modified CDS sequence (wt) from neuraminidase__InfluenzaA__AEO89281
augaauccaaaucagaagauaauaaccauuggaucaaucuguaugguaguuggaauaguuagcuuaaugcuacagauugggaacauagucucaauaugggucagucauucaauucaaacagggcaucaacaacaagcugaaccaaucaaaaauacuaauuuucuuacuaagaacgcuguggcuucaguaacauuagcgggcaauucaucucuuugccccauuagaggaugggcuguacacaguaaagacaacaguauaaggauugguuccaagggggauguguuuguaauuagagagccauucaucucaugcucccauuuggaaugcagaacuuucuuuuugacucagggagcuuuacuaaaugacaagcacuccaacgggacugucaaagacagaagcccucacagaacacuaaugaguuguccugugggugaggcucccuccccauauaacucaagguuugagucuguugcuuggucagcaagugcuugccaugauggcaccaguugguugacaauuggaauuucugguccagacaauggagcuguggcuguauugaaauacaauggaauaauaacagacaccaucaagaguuggaggaacaacacacugagaacccaagagucugaaugugcauguguaaauggcucuugcuuuacuguaaugacugauggaccaaguaauggacaggcaucauauaagaucuucaaaauggaaaaaggaaaaguaguuaaaucagccgaauuaaaugcuccuaauuaucacuaugaggaaugcuccuguuauccugaugcuggcgaaaucauaugugugugcagagauaauuggcauggcucaaauaggccauggguaucuuucaaucagaauuuggaguaucaaauaggauauauaugcaguggaguuuucggagacaacccacgucccaaugauggaacagguaguugcgguccaguguccccuaacggggcauaugggauaaaaggguuuucauucaaauacggcaaugguguuuggaucgggagaaccaaaagcacuaauuccaggagcggcuuugaaaugauuugggacccaaauggguggacuggaacggacaguaacuuuucgaugaaacaagauauaguagcaauaacugaguggucaggauauagcgggaguuuuguccagcauccagaacugacaggauuagauugcauaagaccuugcuucugggucgaguuaaucagagggcggcccaaagagagcacaauuuggacuagugggagcagcauaucuuuuugugguguaaauagugacacugugaguuggucuuggccagacggugcugaguugccauucaccauugacaaguag

SEQ ID NO: 53085 - RNA, 1350 nt, Artificial Sequence
  derived and/or modified CDS sequence (wt) from neuraminidase__InfluenzaA__AEO89291
augaauccaaaucagaagauaauaaccauuggaucaaucuguaugguaguuggaauaguuagcuuaaugcuacagauugggaacauagucucaauaugggucagucauucaauucaaacagggcaucaacaacaagcugaaccaaucaaaaauacuaauuuucuuacugagaacgcuguggcuucaguaacauuagcgggcaauucaucucuuugccccauuagaggaugggcuguacacaguaaagacaacaguauaaggauugguuccaagggggauguguuuguaauuagagagccauucaucucaugcucccauuuggaaugcagaacuuucuuuuugacucagggagcuuuacuaaaugacaagcacuccaacgggacugucaaagacagaagcccucacagaacacuaaugaguuguccugugggugaggcucccuccccauauaacucaagguuugagucuguugcuuggucagcaagugcuugccaugauggcaccaguugguugacaauuggaauuucugguccagacaauggagcuguggcuguauugaaauacaauggaauaauaacagacaccaucaagaguuggaggaacaacauacugagaacccaagagucugaaugugcauguguaaauggcucuugcuuuacuguaaugacugauggaccaaguaauggacaggcaucauauaagaucuucaaaauggaaaaaggaaaaguaguuaaaucagccgaauuaaaugcuccuaauuaucacuaugaggaaugcuccuguuauccugaugcuggugaaaucauaugugugugcagagauaauuggcauggcucaaauaggccauggguaucuuucaaucagaauuuggaguaucaaauaggauauauaugcaguggaguuuucggagacaacccacgccccaaugauggaacagguaguugugguccaguguccccuaacggggcauaugggauaaaaggguuuucauucaaauacggaaaugguguuuggaucgggagaaccaaaagcacuaauuccaggagcggcuuugaaaugauuugggacccaaauggguggacuggaacggacaguaacuuuucgaugaaacaagacauaguagcaauaacugaguggucaggauauagcgggaguuuuguccagcauccagaacugacaggauuagauugcauaagaccuugcuucuggguugaguuaaucagagggcggcccaaagagagcacaauuuggacuagugggagcagcauaucuuuuugugguguaaauagugacacugugaguuggucuuggccagacggugcugaguugccauucaccauugacaaguag

SEQ ID NO: 53086 - RNA, 1350 nt, Artificial Sequence
  derived and/or modified CDS sequence (wt) from neuraminidase__InfluenzaA__AEO89302
augaauccaaaucagaagauaauaaccauugggucaaucuguaugguaauuggaauaguuagcuuaauguuacaaauugggaacauaaucucaauaugggucagucauucaauucaaacagggaaucaacaccaagaugaaccaaucagaaaugcuaauuuucuuacugagaacgcuguggcuucaguaacauuagcgggcaauucaucucuuugccccguuagaggaugggcuguacacagcaaagacaacaguauaaggauagguuccaagggggauguguuuguuauuagagagccguucaucucaugcucccacuuggaaugcagaacuuucuuuuugacucagggagccuuacugaaugacaagcacuccaaugggacuguuaaagacagaagcccucacagaacauuaaugaguuguccugugggugaggcucccuccccauauaacucaagguuugagucuguugcuuggucagcaagugcuugccaugauggcaccaguugguugacaauuggaauuucuggcccagacaauggggcuguggcuguauugaaauacaauggcauaauaacagacaccaucaagaguuggaggaacaacauacugagaacucaagagucugaaugugcauguguaaauggcucuugcuuuacuguaaugacugaugggccaaguaaugggcaggcaucauauaagaucuucaaaauggaaaaaggaaaagugguuagaucagucgaauugaaugccccuaauuaucacuaugaggaaugcuccuguuauccugaugcuggcgaaaucacaugugugugcagggauaauuggcauggcucaaauaggccauggguaucuuucaaucagaauuuggaguaucaaauaggauauauauguaguggaguuuucggagacaauccacgccccaaugauggaacagguaguugugauccaguguccccuaacggggcauaugggauaaaaggguuuucauuuaaauacggcaaugguguuuggaucggaagaaccaaaagcacuaauuccaggagugguuuugaaaugauuugggauccaaauggguggacugaaacggacagugacuuuucagugaaacaagauauaguagcaauaacugauuggucaggguauagcgggaguuuuguccagcauccagaacugacaggauuagauugcauaaggccuugcuucuggguugaguuaaucagagggcggcccaaagagagcacaauuuggacuagugggagcagcauaucuuuuugugguguaaguagcgacacugugaguuggucuuggccagacggugcugaguugccauucaccauugacaaguag

SEQ ID NO: 53087 - RNA, 1410 nt, Artificial Sequence; identical to SEQ ID NO: 48069
  derived and/or modified CDS sequence (wt) from neuraminidase__InfluenzaA__AEO99218

SEQ ID NO: 53088 - RNA, 1410 nt, Artificial Sequence
  derived and/or modified CDS sequence (wt) from neuraminidase__InfluenzaA__AEQ49739
augaauccaaaccaaaagauaauaaccauugguucggucuguaugacaauuggaauggcuaacuuaauauuacaaauuggaaacauaaucucaauauggauuagccacucaauucaacuugggaaucaaagucagauugaaacaugcaaucaaagcgucauuacuuaugaaaacaacacuuggguaaaucagacauauguuaacaucagcaacaccaacuuugcugcuggacagucagugguuuccgugaaauuagcgggcaauuccucucucugcccuguuaguggaugggcuauauacaguaaagacaacaguauaagaaucgguuccaagggggauguguuugucauaagggaaccauucauaucaugcucccccuuggaaugcagaaccuucuucuugacucaaggggccuugcuaaaugacaaacauuccaauggaaccauuaaagacaggagcccauaucgaacccuaaugagcuguccuauuggugaaguucccucuccauacaacucaagauuugagucagucgcuuggucagcaagugcuugucaugauggcaucaauuggcuaacaauuggaauuucuggcccagacaauggggcaguggcuguguuaaaguacaacggcauaauaacagacacuaucaagaguuggagaaacaauauauugagaacacaagagucugaaugugcauguguaaaugguucuugcuuuaccauaaugaccgauggaccaagugauggacaggccucauacaagaucuucagaauagaaaagggaaagauagucaaaucagucgaaaugaaugccccuaauuaucacuaugaggaaugcuccuguuauccugauucuagugaagucacaugugugugcagggauaacuggcauggcucgaaucgaccgugggugucuuucaaccagaaucuggaauaucagauaggauacauaugcagugggauuuucggagacaauccacgcccuaaugauaagacaggcaguugugguccaguaucgucuaauggagcaaauggaguaaaaggauuuucauucaaauacggcaaugguguuuggauagggagaacuaaaagcauuaguucaagaaaagguuuugagaugauuugggauccaaacggauggacugggacagacaauaacuucucaauaaagcaagauaucguaggaauaaaugaguggucaggauauagcgggaguuuuguucagcauccagaacuaacagggauggauuguauaagaccuugcuucuggguugaacuaaucagagggcgacccaaagagaacacaaucuggacuagcgggagcagcauauccuuuugugguguaaacagugacacuguggguuggucuuggccagacggugcugaguugccauuuaccauugacaaguaa

SEQ ID NO: 53089 - RNA, 1410 nt, Artificial Sequence
  derived and/or modified CDS sequence (wt) from neuraminidase__InfluenzaA__AEQ49740
augaauccaaaccaaaagauaauaaccauugguucggucuguaugacaauuggaauggcuaacuuaauauuacaaauuggaaacauaaucucaauauggauuagccacucaauucaacuugggaaucaaagucagauugaaacaugcaaucaaagcgucauuacuuaugaaaacaacacuuggguaaaucagacauauguuaacaucagcaacaccaacuuugcugcuggacagucagugguuuccgugaaauuagcgggcaauuccucucucugcccuguuaguggaugggcuauauacaguaaagacaacaguauaagaaucgguuccaagggggauguguuugucauaagggaaccauucauaucaugcucccccuuggaaugcagaaccuucuucuugacucaaggggccuugcuaaaugacaaacauuccaauggaaccauuaaagacaggagcccauaucgaacccuaaugagcuguccuauuggugaaguucccucuccauacaacucaagauuugagucagucgcuuggucagcaagugcuugucaugauggcaucaauuggcuaacaauuggaauuucuggcccagacaauggggcaguggcuguguuaaaguacaacggcauaauaacagacacuaucaagaguuggagaaacaauauauugagaacacaagagucugaaugugcauguguaaaugguucuugcuuuaccauaaugaccgauggaccaagugauggacaggccucauacaagaucuucagaauagaaaagggaaagauagucaaaucagucgaaaugaaugccccuaauuaucacuaugaggaaugcuccuguuauccugauucuagugaaaucacaugugugugcagggauaacuggcauggcucgaaucgaccguggguaucuuucaaccagaaucuggaauaucagauaggauacauaugcagugggauuuucggagacaauccacgcccuaaugauaagacaggcaguugugguccaguaucgucuaauggagcaaauggaguaaaaggauuuucauucaaauacggcaaugguguuuggauagggagaacuaaaagcauuaguucaagaaaagguuuugagaugauuugggauccaaacggauggacugggacagacaauaacuucucaauaaagcaagauaucguaggaauaaaugaguggucaggauauagcgggaguuuuguucagcauccagaacuaacagggcuggauuguauaagaccuugcuucuggguugaacuaaucagagggcgacccaaagagaacacaaucuggacuagcgggagcagcauauccuuuugugguguaaacagugacacuguggguuggucuuggccagacggugcugaguugccauuuaccauugacaaguaa

SEQ ID NO: 53090 - RNA, 1410 nt, Artificial Sequence
  derived and/or modified CDS sequence (wt) from neuraminidase__InfluenzaA__AEQ49741
augaauccaaaccaaaagauaauaaccauugguucggucuguaugacaauuggaauggcuaacuuaauauuacaaauuggaaacauaaucucaauauggauuagccacucaauucaacuugggaaucaaagucagauugaaacaugcaaucaaagcgucauuacuuaugaaaacaacacuuggguaaaucagacauauguuaacaucagcaacaccaacuuugcugcuggacagucagugguuuccgugaaauuagcgggcaauuccucucucugcccuguuaguggaugggcuauauacaguaaagacaacaguauaagaaucgguuccaagggggauguguuugucauaagggaaccauucauaucaugcucccccuuggaaugcagaaccuucuucuugacucaaggggccuugcuaaaugacaaacauuccaauggaaccauuaaagacaggagcccauaucgaacccuaaugagcuguccuauuggugaaguucccucuccauacaacucaagauuugagucagucgcuuggucagcaagugcuugucaugauggcaucaauuggcuaacaauuggaauuucuggcccagacaauggggcaguggcuguguuaaaguacaacggcauaauaacagacacuaucaagaguuggagaaacaauauauugagaacacaagagucugaaugugcauguguaaaugguucuugcuuuaccauaaugaccgauggaccaagugauggacaggccucauacaagaucuucagaauagaaaagggaaagauagucaaaucagucgaaaugaaugccccuaauuaucacuaugaggaaugcuccuguuauccugauucuagugaaaucacaugugugugcagggauaacuggcauggcucgaaucgaccgugggugucuuucaaccagaaucuggaauaucagauaggauacauaugcagugggauuuucggagacaauccacgcccuaaugacaagacaggcaguugugguccaguaucgucuaauggagcaaauggaguaaaaggauuuucauucaaauacggcaaugguguuuggauagggagaacuaaaagcauuaguucaagaaaagguuuugagaugauuugggauccaaacggauggacugggacagacaauaacuucucaauaaagcaagauaucguaggaauaaaugaguggucaggauauagcgggaguuuuguucagcauccagaacuaacagggauggauuguauaagaccuugcuucuggguugaacuaaucagagggcgacccaaagagaacacaaucuggacuagcgggagcagcauauccuuuugugguguaaacagugacacuguggguuggucuuggccagacggugcugaguugccauuuaccauugacaaguaa

SEQ ID NO: 53091 - RNA, 1410 nt, Artificial Sequence
  derived and/or modified CDS sequence (wt) from neuraminidase__InfluenzaA__AEQ49742
augaauccaaaccaaaagauaauaaccauugguucggucuguaugacaauuggaauggcuaacuuaauauuacaaauuggaaacauaaucucaauauggauuagccacucaauucaacuugggaaucaaagucagauugaaacaugcaaucaaagcgucauuacuuaugaaaacaacacuuggguaaaucagacauauguuaacaucagcaacaccaacuuugcugcuggacagucagugguuuccgugaaauuagcgggcaauuccucucucugcccuguuaguggaugggcuauacacaguaaagacaacaguauaagaaucgguuccaagggggauguguuugucauaagggaaccauucauaucaugcucccccuuggaaugcagaaccuucuucuugacucaaggggccuugcuaaaugacaaacauuccaauggaaccauuaaagacaggagcccauaucgaacccuaaugagcuguccuauuggugaaguucccucuccauacaacucaagauuugagucagucgcuuggucagcaagugcuugucaugauggcaucaauuggcuaacaauuggaauuucuggcccagacaauggggcaguggcuguguuaaaguacaacggcauaauaacagacacuaucaagaguuggagaaacaauauauugagaacacaagagucugaaugugcauguguaaaugguucuugcuuuaccauaaugaccgauggaccaagugauggacaggccucguacaagaucuucagaauagaaaagggaaagauagucaaaucagucgaaaugaaugccccuaauuaucacuaugaggaaugcuccuguuauccugauucuagugaaaucacaugugugugcagggauaacuggcauggcucgaaucgaccgugggugucuuucaaccagaaucuggaauaucagauaggauacauaugcagugggauuuucggagacaauccacgcccuaaugauaagacaggcaguugugguccaguaucgucuaauggagcaaauggaguaaaaggauuuucauucaaauacggcaaugguguuuggauagggagaacuaaaagcauuaguucaagaaaagguuuugagaugauuugggauccaaacggauggacugggacagacaauaacuucucaauaaagcaagauaucguaggaauaaaugaguggucaggauauagcgggaguuuuguucagcauccagaacuaacagggauggauuguauaagaccuugcuucuggguugaacuaaucagagggcgacccaaagagaacacaaucuggacuagcgggagcagcauauccuuuugugguguaaacagugacacuguggguuggucuuggccagacggugcugaguugccauuuaccauugacaaguaa

SEQ ID NO: 53092 - RNA, 1410 nt, Artificial Sequence
  derived and/or modified CDS sequence (wt) from neuraminidase__InfluenzaA__AEQ49743
augaauccaaaccaaaagauaauaaccauugguucggucuguaugacaauuggaauggcuaacuuaauauuacaaauuggaaacauaaucucaauauggauuagccacucaauucaacuugggaaucaaagucagauugaaacaugcaaucaaagcgucauuacuuaugaaaacaacacuuggguaaaucagacauauguuaacaucagcaacaccaacuuugcugcuggacagucagugguuuccgugaaauuagcgggcaauuccucucucugcccuguuaguggaugggcuauauacaguaaagacaacaguauaagaaucgguuccaagggggauguguuugucauaagggaaccauucauaucaugcucccccuuggaaugcagaaccuucuucuugacucaaggggccuugcuaaaugacaaacauuccaauggaaccauuaaagacagaagcccauaucgaacccuaaugagcuguccuauuggugaaguucccucuccauacaacucaagauuugagucagucgcuuggucagcaagugcuugucaugauggcaucaauuggcuaacaauuggaauuucuggcccagacaauggggcaguggcuguguuaaaguacaacggcauaauaacagacacuaucaagaguuggagaaacaauauauugagaacacaagagucugaaugugcaugugugaaugguucuugcuuuaccauaaugaccgauggaccaagugauggacaggccucauacaagaucuucagaauagaaaagggaaagauagucaaaucagucgaaaugaaugccccuaauuaucacuaugaggaaugcuccuguuauccugauucuagugaaaucacaugugugugcagggauaacuggcauggcucgaaucgaccgugggugucuuucaaccagaaucuggaauaucagauaggauacauaugcagugggauuuucggagacaauccacgcccuaaugauaagacaggcaguugugguccaguaucgucuaauggagcaaauggaguaaaaggauuuucauucaaauacggcaaugguguuuggauagggagaacuaaaagcauuaguucaagaaaagguuuugagaugauuugggauccaaacggauggacugggacagacaauaacuucucaauaaagcaagacaucguaggaacaaaugaguggucaggauauagcgggaguuuuguucagcauccagaacuaacagggcuggauuguauaagaccuugcuucuggguugaacuaaucagagggcgacccaaagagaacacaaucuggacuagcgggagcagcauauccuuuugugguguaaacagugacacuguggguuggucuuggccagacggugcugaguugccauuuaccauugacaauuaa

SEQ ID NO: 53093 - RNA, 1410 nt, Artificial Sequence
  derived and/or modified CDS sequence (wt) from neuraminidase__InfluenzaA__AEQ49744
augaauccaaaccaaaagauaauaaccauugguucggucuguaugacaauuggaauggcuaacuuaauauuacaaauuggaaacauaaucucaauauggauuagccacucaauucaacuugggaaucaaagucagauugaaacaugcaaucaaagcgucauuacuuaugaaaacaacacuuggguaaaucagacauauguuaacaucagcaacaccaacuuugcugcuggacagucagugguuuccgugaaauuagcgggcaauuccucucucugcccuguuaguggaugggcuauauacaguaaagacaacaguauaagaaucgguuccaagggggauguguuugucauaagggaaccauucauaucaugcucccccuuggaaugcagaaccuucuucuugacucaaggggccuugguaaaugacaaacauuccaauggaaccauuaaagacaggagcccauaucgaacccuaaugagcuguccuauuggugaaguucccucuccauacaacucaagauuugagucagucgcuuggucagcaagugcuugucaugauggcaucaauuggcuaacaauuggaauuucuggcccagacaauggggcaguggcuguguuaaaguacaacggcauaauaacagacacuaucaagaguuggagaaacaauauauuuagaacacaagagucugaaugugcauguguaaaugguucuugcuuuaccauaaugaccgauggaccaagugauggacaggccucauacaagaucuucagaauagaaaagggaaagauagucaaaucagucgaaaugaaugccccuaauuaucacuaugaggaaugcuccuguuauccugauucuagugaaaucacaugugugugcagggauaacuggcauggcucgaaucgaccguggguaucuuucaaccaggaucuggaauaucagauaggauacauaugcagugggauuuucggagacaauccacgcccuaaugauaagacaggcaguugugguccaguaucgucuaauggagcaaauggaguaaaaggauuuucauucaaauacggcaaugguguuuggauagggagaacuaaaagcauuaguucaagaaaagguuuugagaugauuugggauccaaacggauggacugggacagacaauaacuucucaauaaagcaaaauaucguaggaauaaaugaguggucaggauauagcgggaguuuuguucagcauccagaacuaacagggcuggauuguauaagaccuugcuucuggguugaacuaaucagagggcgacccaaagagaacacaaucuggacuagcgggagcagcauauccuuuugugguguaaacagugacacuguggguuggucuuggccagacggugcugaguugccauuuaccauugacaaguaa

SEQ ID NO: 53094 - RNA, 1410 nt, Artificial Sequence
  derived and/or modified CDS sequence (wt) from neuraminidase__InfluenzaA__AEQ49745
augaauccaaaccaaaagauaauaaccauugguucggucuguaugacaauuggaauggcuaacuuaauauuacaaauuggaaacauaaucucaauauggauuagccacucaauucaacuugggaaucaaagucagauugaaacaugcaaucaaagcgucauuacuuaugaaaacaacacuuggguaaaucagacauauguuaacaucagcaacaccaacuuugcugcuggacagucagugguuuccgugaaauuagcgggcaauuccucucucugcccuguuaguggaugggcuauauacaguaaagacaacaguauaagaaucgguuccaagggggauguguuugucauaagggaaccauucauaucaugcucccccuuggaaugcagaaccuucuucuugacucaaggggccuugcuaaaugacaaacauuccaauggaaccauuaaagacaggagcccauaucgaacccuaaugagcuguccuauuggugaaguucccucuccauacaacucaagauuugagucagucgcuuggucagcaagugcuugucaugauggcaucaauuggcuaacaauuggaauuucuggcccagacaauggggcaguggcuguguuaaaguacaacggcauaauaacagacacuaucaagaguuggagaaacaauauauugagaacacaagagucugaaugugcauguguaaaugguucuugcuuuaccauaaugaccgauggaccaagugauggacaggccucauacaagaucuucagaauagaaaagggaaagauagucaaaucagucgaaaugaaugccccuaauuaucacuaugaggaaugcuccuguuauccugauucuagugaaaucacaugugugugcagggauaacuggcauggcucgaaucgaccgugggugucuuucaaccagaaucuggaauaucagauaggauacauaugcagugggauuuucggagacaauccacgcccuaaugauaagacaggcaguugugguccaguaucgucuaauggagcaaauggaguaaaaggauuuucauucaaauacggcaaugguguuuggauagggagaacuaaaagcauuaguucaagaaaagguuuugagaugauuugggauccaaacggauggacugggacagacaauaacuucucaauaaagcaagauaucguaggaauaaaugaguggucaggauauagcgggaguuuuguucagcauccagaacuaacagggauggauuguauaagaccuugcuucuggguugaacuaaucagagggcgacccaaagagaacacaaucuggacuagcgggagcagcauauccuuuugugguguaaacagugacacuguggguuggucuuggccagacggugcugaguugccauuuaccauugacaaguaa

SEQ ID NO: 53095 - RNA, 1410 nt, Artificial Sequence
  derived and/or modified CDS sequence (wt) from neuraminidase__InfluenzaA__AEQ49746
augaauccaaaccaaaagauaauaaccauugguucggucuguaugacaauuggaauggcuaacuuaauauuacaaauuggaaacauaaucucaauauggauuagccacucaauucaacuugggaaucaaagucagauugaaacaugcaaucaaagcgucauuacuuaugaaaacaacacuuggguaaaucagacauauguuaacaucagcaacaccaacuuugcugcuggacagucagugguuuccgugaaauuagcgggcaauuccucucucugcccuguuaguggaugggcuauauacaguaaagacaacaguauaagaaucgguuccaagggggauguguuugucauaagggaaccauucauaucaugcucccccuuggaaugcagaaccuucuucuugacucaaggggccuugcuaaaugacaaacauuccaauggaaccauuaaagacaggagcccauaucgaacccuaaugagcuguccuauuggugaaguucccucuccauacaacucaagauuugagucagucgcuuggucagcaagugcuugucaugauggcaucaauuggcuaacaauuggaauuucuggcccagacaauggggcaguggcuguguuaaaguacaacggcauaauaacagacacuaucaagaguuggagaaacaauauauugagaacacaagagucugaaugugcauguguaaaugguucuugcuuuaccauaaugaccgauggaccaagugauggacaggccucauacaagaucuucagaauagaaaagggaaagauagucaaaucagucgaaaugaaugccccuaauuaucacuaugaggaaugcuccuguuauccugauucuagugaaaucacaugugugugcagggauaacuggcauggcucgaaucgaccgugggugucuuucaaccagaaucuggaauaucagauaggauacauaugcagugggauuuucggagacaauccacgcccuaaugauaagacaggcaguugugguccaguaucgucuaauggagcaaauggaguaaaaggauuuucauucaaauacggcaaugguguuuggauagggagaacuaaaagcauuaguucaagaaaagguuuugagaugauuugggauccaaacggauggacugggacagacaauaacuucucaauaaagcaagauaucguaggaauaaaugaguggucaggauauagcgggaguuuuguucagcauccagaacuaacagggauggauuguauaagaccuugcuucuggguugaacuaaucagagggcgacccaaagagaacacaaucuggacuagcgggagcagcauauccuuuugugguguaaacagugacacuguggguuggucuuggccagacggcgcugaguugccauuuaccauugacaaguaa

SEQ ID NO: 53096 - RNA, 1410 nt, Artificial Sequence; identical to SEQ ID NO: 53094
  derived and/or modified CDS sequence (wt) from neuraminidase__InfluenzaA__AEQ49747

SEQ ID NO: 53097 - RNA, 1410 nt, Artificial Sequence; identical to SEQ ID NO: 52731
  derived and/or modified CDS sequence (wt) from neuraminidase__InfluenzaA__AEQ49748

SEQ ID NO: 53098 - RNA, 1410 nt, Artificial Sequence
  derived and/or modified CDS sequence (wt) from neuraminidase__InfluenzaA__AEQ49749
augaauccaaaccaaaagauaauaaccauugguucggucuguaugacaauuggaauggcuaacuuaauauuacaaauuggaaacauaaucucaauauggauuagccacucaauucaacuugggaaucaaagucagauugaaacaugcaaucaaagcgucauuacuuaugaaaacaacacuuggguaaaucagacauauguuaacaucagcaacaccaacuuugcugcuggacagucagugguuuccgugaaauuagcgggcaauuccucucucugcccuguuaguggaugggcuauauacaguaaagacaacaguauaagaaucgguuccaagggggauguguuugucauaagggaaccauucauaucaugcucccccuuggaaugcagaaccuucuucuugacucaaggggccuugcuaaaugacaaacauuccaauggaaccauuaaagacaggagcccauaucgaacacuaaugagcuguccuauuggugaaguucccucuccauacaacucaagauuugagucagucgcuuggucagcaagugcuugucaugauggcaucaauuggcuaacaauuggaauuucuggcccagacaauggggcaguggcuguguuaaaguacaacggcauaauaacagacacuaucaagaguuggagaaacaauauauugagaacacaagagucugaaugugcauguguaaaugguucuugcuuuaccauaaugaccgauggaccaagugauggacaggccucauacaagaucuucagaauagaaaagggaaagauagucaaaucagucgaaaugaaugccccuaauuaucacuaugaggaaugcuccuguuauccugauucuagugaaaucacaugugugugcagggauaacuggcauggcucgaaucgaccgugggugucuuucaaccagaaucuggaauaucagauaggauacauaugcagugggauuuucggagacaauccacgcccuaaugauaagacaggcaguugugguccaguaucgucuaauggagcaaauggaguaaaaggauuuucauucaaauacggcaaugguguuuggauagggagaacuaaaagcauuaguucaagaaaagguuuugagaugauuugggauccaaacggauggacugggacagacaauaacuucucaauaaagcaagauaucguaggaauaaaugaguggucaggauauagcgggaguuuuguucagcauccagaacuaacagggauggauuguauaagaccuugcuucuggguugaacuaaucagagggcgacccaaagagaacacaaucuggacuagcgggagcagcauauccuuuugugguguaaacagugacacuguggguuggucuuggccagacggugcugaguugccauuuaccauugacaaguaa

SEQ ID NO: 53099 - RNA, 1410 nt, Artificial Sequence
  derived and/or modified CDS sequence (wt) from neuraminidase__InfluenzaA__AEQ49750
augaauccaaaccaaaagauaauaaccauugguucggucuguaugacaauuggaauggcuaacuuaauauuacaaauuggaaacauaaucucaauauggauuagccacucaauucaacuugggaaucaaagucagauugaaacaugcaaucaaagcgucauuacuuaugaaaacaacacuuggguaaaucagacauauguuaacaucagcaacaccaacuuugcugcuggacagucagugguuuccgugaaauuagcgggcaauuccucucucugcccuguuaguggaugggcuauauacaguaaagacaacaguauaagaaucgguuccaagggggauguguuugucauaagggaaccauucauaucaugcucccccuuggaaugcagaaccuucuucuugacucaaggggccuugcuaaaugacaaccauuccaauggaaccauuaaagacaggagcccauaucgaacccuaaugagcuguccuauuggugaaguucccucuccauacaacucaagauuugagucagucgcuuggucagcaagugcuugucaugauggcaucaauuggcuaacaauuggaauuucuggcccagacaauggggcaguggcuguguuaaaguacaacggcauaauaacagacacuaucaagaguuggagaaacaauauauugagaacacaagagucugaaugugcauguguaaaugguucuugcuuuaccauaaugaccgauggaccaagugauggacaggccucauacaagaucuucagaauagaaaagggaaagauagucaaaucagucgaaaugaaugccccuaauuaucacuaugaggaaugcuccuguuauccugauucuagugaaaucacaugugugugcagggauaacuggcauggcucgaaucgaccguggguaucuuucaaccagaaucuggaauaucagauaggauacauaugcagugggauuuucggagacaauccacgcccuaaugauaagacaggcaguugugguccaguaucgucuaauggagcaaauggaguaaaaggauuuucauucaaauacggcaaugguguuuggauagggagaacuaaaaacauuaguucaagaaaagguuuugagaugauuugggauccaaacggauggacugggacagacaauaacuucucaauaaagcaagauaucguaggaauaaaugaguggucaggauauagcgggaguuuuguucagcauccagaacuaacagggcuggauuguauaagaccuugcuucuggguugaacuaaucagagggcgacccaaagagaacacaaucuggacuagcgggagcagcauauccuuuugugguguaaacagugacacuguggguuggucuuggccagacggugcugaguugccauuuaccauugacaaguaa

SEQ ID NO: 53100 - RNA, 1410 nt, Artificial Sequence
  derived and/or modified CDS sequence (wt) from neuraminidase__InfluenzaA__AEQ49751
augaauccaaaccaaaagauaauaaccauugguucggucuguaugacaauuggaauggcuaacuuaauauuacaaauuggaaacauaaucucaauauggauuagccacucauuucaacuugggaaucaaagucagauugaaacaugcaaucaaagcgucauuacuuaugaaaacaacacuuggguaaaucagacauauguuaacaucagcaacaccaacuuugcugcuggacagucagugguuuccgugaaauuagcgggcaauuccucucucugcccuguuaguggaugggcuauauacaguaaagacaacaguauaagaaucgguuccaagggggauguguuugucauaagggaaccauucauaucaugcucccccuuggaaugcagaaccuucuucuugacucaaggggccuugcuaaaugacaaccauuccaauggaaccauuaaagacaggagcccauaucgaacccuaaugagcuguccuauuggugaaguucccucuccauacaacucaagauuugagucagucgcuuggucagcaagugcuugucaugauggcaucaauuggcuaacaauuggaauuucuggcccagacaauggggcaguggcuguguuaaaguacaacggcauaauaacagacacuaucaagaguuggagaaacaauauauugagaacacaagagucugaaugugcauguguaaaugguucuugcuuuaccauaaugaccgauggaccaagugauggacaggcuucauacaagaucuucagaauagaaaagggaaagauagucaaaucagucgaaaugaaugccccuaauuaucacuaugaggaaugcuccuguuauccugauucuagugaaaucacaugugugugcagggauaacuggcauggcucgaaucgaccgugggugucuuucaaccagaaucuggaauaucagauaggauacauaugcagugggauuuucggagacaauccacgcccuaaugauaagacaggcaguugugguccaguaucgucuaauggagcaaauggaguaaaaggauuuucauucaaauacggcaaugguguuuggauagggagaacuaaaagcauuaguucaagaaaagguuuugagaugauuugggauccaaacggauggacugggacagacaauaacuucucaauaaagcaagauaucguaggaauaaaugaguggucaggauauagcgggaguuuuguucagcauccagaacuaacagggauggauuguauaagaccuugcuucuggguugaacuaaucagagggcgacccaaagagaacacaaucuggacuagcgggagcagcauauccuuuugugguguaaacagugacacuguggguuggucuuggccagacggugcugaguugccauuuaccauugacaaguaa

SEQ ID NO: 53101 - RNA, 1410 nt, Artificial Sequence
  derived and/or modified CDS sequence (wt) from neuraminidase__InfluenzaA__AEQ49752
augaauccaaaccaaaagauaauaaccauugguucggucuguaugacaauuggaauggcuaacuuaauauuacaaauuggaaacauaaucucaauauggauuagccacucaauucaacuugggaaucaaagucagauuggaacaugcaaucaaagcgucauuacuuaugaaaacaacacuuggguaaaucagacauauguuaacaucagcaacaccaacuuugcugcuggacagucagugguuuccgugaaauuagcgggcaauuccucucucugcccuguuaguggaugggcuauauacaguaaagacaacaguauaagaaucgguuccaagggggauguguuugucauaagggaaccauucauaucaugcuccccuuuggaaugcagaaccuucuucuugacucaaggggccuugcuaaaugacaaacauuccaauggaaccauuaaagacaggagcccauaucgaacccuaaugagcuguccuauuggugaaguucccucuccauacaacucaagauuugagucagucgcuuggucagcaagugcuugucaugauggcaucaauuggcuaacaauuggaauuucuggcccagacaauggggcaguggcuguguuaaaguacaacggcauaauaacagacacuaucaagaguuggagaaacaauauauugagaacacaagagucugaaugugcauguguaaaugguucuugcuuuaccauaaugaccgauggaccaagugauggacaggccucauacaagaucuucagaauagaaaagggaaagauagucaaaucagucgaaaugaaugccccuaauuauuacuaugaggaaugcuccuguuauccugauucuagugaaaucacaugugugugcagggauaacuggcauggcucgaaucgaccgugggugucuuucaaccagaaucuggaauaucagauaggauacauaugcagugggauuuucggagacaauccacgcccuaaugauaagacaggcaguugugguccaguaucgucuaauggagcaaauggaguaaaaggauuuucauucaaauacggcaaugguguuuggauagggagaacuaaaagcauuaguucaagaaaagguuuugagaugauuugggauccaaacggauggacugggacagacaauaacuucucaauaaagcaagauaucguaggaauaaaugaguggucaggauauagcgggaguuuuguucagcauccagaacuaacagggauggauuguauaagaccuugcuucuggguugaacuaaucagagggcgacccaaagagaacacaaucuggacuagcgggagcagcauauccuuuugugguguaaacagugacacuguggguuggucuuggccagacggugcugaguugccauuuaccauugacaaguaa

SEQ ID NO: 53102 - RNA, 1410 nt, Artificial Sequence
  derived and/or modified CDS sequence (wt) from neuraminidase__InfluenzaA__AEQ49753
augaauccaaaccaaaagauaauaaccauugguucggucuguaugacaauuggaauggcuaacuuaauauuacaaauuggaaacauaaucucaauauggauuagccacucaauucaacuugggaaucaaagucagauugaaacaugcaaucaaagcgucauuacuuaugaaaacaacacuuggguaaaucagacauauguuaacaucagcaacaccaacuuugcugcuggacagucagugguuuccgugaaauuagcgggcaauuccucucucugcccuguuaguggaugggcuauauacaguaaagacaacaguauaagaaucgguuccaagggggauguguuugucauaagggaaccauucauaucaugcucccccuuggaaugcagaaccuucuucuugacucaaggggccuugcuaaaugacaaacauuccaauggaaccauuaaagacaggagcccauaucgaacccuaaugagcuguccuauuggugaaguucccucuccauacaacucaagauuugagucagucgcuuggucagcaagugcuugucaugauggcaucaauuggcuaacaauuggaauuucuggcccagacaauggggcaguggcuguguuaaaguacaacggcauaauaacagacacuaucaagaguuggagaaacaauauauugagaacacaagagucugaaugugcauguguaaaugguucuugcuuuaccauaaugaccgauggaccaagugauggacaggccucauacaagaucuucagaauagaaaagggaaagauagucaaaucagucgaaaugaaugccccuaauuaucacuaugaggaaugcuccuguuauccugauucuagugaaaucacaugugugugcagggauaacuggcauggcucgaaucggccgugggugucuuucaaccagaaucuggaauaucagauaggauacauaugcagugggauuuucggagacaauccgcgcccuaaugauaagacaggcaguugugguccaguaucgucuaauggagcaaauggaguaaaaggauuuucauucaaauacggcaaugguguuuggauagggagaacuaaaagcauuaguucaagaaaagguuuugagaugauuugggauccaaacggauggacugggacagacaauaacuucucaauaaagcaagauaucguaggaauaaaugaguggucaggauauagcgggaguuuuguucagcauccagaacuaacagggauggauuguauaagaccuugcuucuggguugaacuaaucagagggcgacccaaagagaacacaaucuggacuagcgggagcagcauauccuuuugugguguaaacagugacacuguggauuggucuuggccagacggugcugaguugccauuuaccauugacaaguaa

SEQ ID NO: 53103 - RNA, 1410 nt, Artificial Sequence
  derived and/or modified CDS sequence (wt) from neuraminidase__InfluenzaA__AEQ49754
augaauccaaaccaaaagauaauaaccauugguucggucuguaugacaauuggaauggcuaacuuaauauuacaaauuggaaacauaaucucaauauggauuagccacucaauucaacuugggaaucaaagucagauugaaacaugcaaucaaagcgucauuacuuaugaaaacaacacuuggguaaaucagacauauguuaacaucagcaacaccaacuuugcugcuggacagucagugguuuccgugaaauuagcgggcaauuccucucucugcccuguuaguggaugggcuauauacaguaaagacaauaguauaagaaucgguuccaagggggauguguuugucauaagggaaccauucauaucaugcucccccuuggaaugcagaaccuucuucuugacucaaggggccuugcuaaaugacaaacauuccaauggaaccauuaaagacaggagcccauaucgaacccuaaugagcuguccuauuggugaaguucccucuccauacaacucaagauuugagucagucgcuuggucagcaagugcuugucaugauggcaucaauuggcuaacaauuggaauuucuggcccagacaauggggcaguggcuguguuaaaguacaacggcauaauaacagacacuaucaagaguuggagaaacaauauauugagaacacaagagucugaaugugcauguguaaaugguucuugcuuuaccauaaugaccgauggaccaagugauggacaggccucauacaagaucuucagaauagaaaagggaaagauagucaaaucagucgaaaugaaugccccuaauuaucacuaugaggaaugcuccuguuauccugauucuagugagaucacaugugugugcagggauaacuggcauggcucgaaucgaccgugggugucuuucaaccagaaucuggaauaucagauaggauacauaugcagugggauuuucggagacaauccacgcccuaaugauaagacaggcaguugugguccaguaucgucuaauggagcaaauggaguaaaaggauuuucauucaaauacggcaaugguguuuggauagggagaacuaaaagcauuaguucaagaaaagguuuugagaugauuugggauccaaacggauggacugggacagacaauaacuucucaauaaagcaagauaucguaggaauaaaugaguggucaggauauagcgggaguuuuguucagcauccagaacuaacagggcuggauuguauaagaccuugcuucuggguugaacuaaucagagggcgacccaaagagaacacaaucuggacuagcgggagcagcauauccuuuugugguguaaacaguaacacuguggguuggucuuggccagacggugcugaguugccauuuaccauugacaaguaa

SEQ ID NO: 53104 - RNA, 1410 nt, Artificial Sequence; identical to SEQ ID NO: 53094
  derived and/or modified CDS sequence (wt) from neuraminidase__InfluenzaA__AEQ49755

SEQ ID NO: 53105 - RNA, 1410 nt, Artificial Sequence
  derived and/or modified CDS sequence (wt) from neuraminidase__InfluenzaA__AEQ49756
augaauccaaaccaaaagauaauaaccauugguucggucuguaugacaauuggaauggcuaacuuaauauuacaaauuggaaacauaaucucaauauggauuagccacucaauucaacuugggaaucaaagucagguugaaacaugcaaucaaagcgucauuacuuaugaaaacaacacuuggguaaaucagacauauguuaacaucagcaacaccaacuuugcugcuggacagucagugguuuccgugaaauuagcgggcaauuccucucucugcccuguuaguggaugggcuauauacaguaaagacaacaguauaagaaucgguuccaagggggauguguuugucauaagggaaccauucauaucaugcucccccuuggaaugcagaaccuucuucuugacucaaggggccuugcuaaaugacaaacauuccaauggaaccauuaaagacaggagcccauaucgaacccuaaugagcuguccuauuggugaaguucccucuccauacaacucaagauuugagucagucgcuuggucagcaagugcuugucaugauggcaucaauuggcuaacaauuggaauuucuggcccagacaauggggcaguggcuguguuaaaguacaacggcauaauaacagacacuaucaagaguuggagaaacaauauauugagaacacaagagucugaaugugcauguguaaaugguucuugcuuuaccauaaugaccgauggaccaagugauggacaggccucauacaagaucuucagaauagaaaagggaaagauagucaaaucagucgaaaugaaugccccuaauuaucacuaugaggaaugcuccuguuauccugauucuagugaaaucacaugugugugcagggauaacuggcauggcucgaaucgaccgugggugucuuucaaccagaaucuggaauaucagauaggauacauaugcagugggauuuucggagacaauccacgcccuaaugauaagacaggcaguugugguccaguaucgucuaauggagcaaauggaguaaaaggauuuucauucaaauacggcaaugguguuuggauagggagaacuaaaagcauuaguucaagaaaagguuuugagaugauuugggauccaaacggauggacugggacagacaauaacuucucaauaaagcaagauaucguaggaauaaaugaguggucaggauauagcgggaguuuuguucagcauccagaacuaacagggcuggauuguauaagaccuugcuucuggguugaacuaaucagagggcgacccaaagagaacacaaucuggacuagcgggagcagcauauccuuuugugguguaaauagugacacuguggguuggucuuggccagacggugcugaguugccauuuaccauugacaaguaa

SEQ ID NO: 53106 - RNA, 1410 nt, Artificial Sequence; identical to SEQ ID NO: 53094
  derived and/or modified CDS sequence (wt) from neuraminidase__InfluenzaA__AEQ49757

SEQ ID NO: 53107 - RNA, 1410 nt, Artificial Sequence
  derived and/or modified CDS sequence (wt) from neuraminidase__InfluenzaA__AEQ49758
augaauccaaaccaaaagauaauaaccauugguucggucuguaugacaauuggaauggcuaacuuaauauuacaaauuggaaacauaaucucaauauggauuagccacucaauucaacuugggaaucauagucagauugaaacaugcaaucaaagcgucauuacuuaugaaaacaacacuuggguaaaucagacauauguuaacaucagcaacaccaacuuugcugcuggacagucagugguuuccgugaaauuagcgggcaauuccucucucugcccuguuaguggaugggcuauauacaguaaagacaacaguauaagaaucgguuccaagggggauguguuugucauaagggaaccauucauaucaugcucccccuuggaaugcagaaccuucuucuugacucaaggggccuugcuaaaugacaaacauuccaauggaaccauuaaagacaggagcccauaucgaacccuaaugagcuguccuauuggugaaguucccucuccauacaacucaagauuugagucagucgcuuggucagcaagugcuugucaugauggcaucaauuggcuaacaauuggaauuucuggcccagacaauggggcaguggcuguguuaaaguacaacggcauaauaacagacacuaucaagaguuggagaaacaauauauugagaacacaagagucugaaugugcauguguaaaugguucuugcuuuaccauaaugaccgauggaccaagugauggacaggccucauacaagaucuucagaauagaaaagggaaagauagucaaaucagucgaaaugaaugccccuaauuauuacuaugaggaaugcuccuguuauccugauucuagugaaaucacaugugugugcagggauaacuggcauggcucgaaucgaccgugggugucuuucaaccagaaucuggaauaucagauaggauacauaugcagugggauuuucggagacaauccacgcccuaaugauaagacaggcaguugugguccaguaucgucuaauggagcaaauggaguaaaaggauuuucauucaaauacggcaaugguguuuggauagggagaacuaaaagcauuagcucaagaaaagguuuugagaugauuugggauccaaacggaugggcugggacagacaauaacuucucaauaaagcaagauaucguaggaauaaaugaguggucaggauauagcgggaguuuuguucagcauccagaacuaacagggcuggauuguauaagaccuugcuucuggguugaacuaaucagagggcgacccaaagagaacacaaucuggacuagcgggagcagcauauccuuuugugguguaaacagugacacuguggguuggucuuggccagacggugcugaguugccauuuaccauugacaaguaa

SEQ ID NO: 53108 - RNA, 1410 nt, Artificial Sequence; identical to SEQ ID NO: 53094
  derived and/or modified CDS sequence (wt) from neuraminidase__InfluenzaA__AEQ49759

SEQ ID NO: 53109 - RNA, 1410 nt, Artificial Sequence
  derived and/or modified CDS sequence (wt) from neuraminidase__InfluenzaA__AEQ49760
augaauccaaaccaaaagauaauaaccauugguucggucuguaugacaauuggaauggcuaacuuaauauuacaaauuggaaacauaaucucaauauggauuagccacucaauucaacuugggaaucaaagucagauugaaacaugcaaucaaagcgucauuacuuaugaaaacaacacuuggguaaaucagacauauguuaacaucagcaacaccaacuuugcugcuggacagucagugguuuccgugaaauuagcgggcaauuccucucucugcccuguuaguggaugggcuauauacaguaaagacaacaguauaagaaucgguuccaagggggauguguuugucauaagggaaccauucauaucaugcucccccuuggaaugcagaaccuucuucuugacucaaggggccuugcuaaaugacaaacauuccaauggaaccauuaaagacaggagcccauaucgaacccuaaugagcuguccuauuggugaaguucccucuccauacaacucaagauuugagucagucgcuuggucagcaagugcuugucaugauggcaucaauuggcuaacaauuggaauuucuggcccagacaauggggcaguggcuguguuaaaguacaacggcauaauaacagacacuaucaagaguuggagaaacaauauauugagaacacaagagucugaaugugcauguguaaaugguucuugcuuuaccauaaugaccgauggaccaagugauggacaggccucauacaagaucuucagaauagaaaagggaaagauagucaaaucagucgaaaugaaugccccuaauuaucacuaugaggaaugcuccuguuauccugauucuagugaaaucacaugugugugcagggauaacuggcauggcucgaaucgaccgugggugucuuucaaccagaaucuggaauaucagauaggauacauaugcagugggauuuucggagacaauccacgcccuaaugauaagacaggcaguugugguccaguaucgucuaauggagcaaauggaguaaaaggauuuucauucaaauacggcaaugguguuuggauagggagaacuaaaagcauuaguucaagaaaagguuuugagaugauuugggauccaaauggauggacugggacagacaauaacuucucaauaaagcaagauaucguaggaauaaaugaguggucaggauauagcgggaguuuuguucagcauccagaacuaacagggauggauuguauaagaccuugcuucuggguugaacuaaucagagggcgacccaaagagaacacaaucuggacuagcgggagcagcauauccuuuugugguguaaacagugacacuguggguuggucuuggccagacggugcugaguugccauuuaccauugacaaguaa

SEQ ID NO: 53110 - RNA, 1410 nt, Artificial Sequence
  derived and/or modified CDS sequence (wt) from neuraminidase__InfluenzaA__AEQ49761
augaauccaaaccaaaagauaauaaccauugguucggucuguaugacaauuggaauggcuaacuuaauauuacaaauuggaaacauaaucucaauauggauuagccacucaauucaacuugggaaucaaagucagauugaaacaugcaaucaaagcgucauuacuuaugaaaacaacacuugguuaaaucagacauauguuaacaucagcaacaccaacuuugcugcuggacagucagugguuuccgugaaauuagcgggcaauuccucucucugcccuguuaguggaugggcuauauacaguaaagacaacaguauaagaaucgguuccaagggggauguguuugucauaagggaaccauucauaucaugcucccccucggaaugcagaaccuucuucuugacucaaggggccuugcuaaaugacaaacauuccaauggaaccauuaaagacaggagcccauaucgaacccuaaugagcuguccuauuggugaaguucccucuccauacaacucaagauuugagucagucgcuuggucagcaagugcuugucaugauggcaucaauuggcuaacaauuggaauuucuggcccagacaauggggcaguggcuguguuaaaguacaacggcauaauaacagacacuaucaagaguuggagaaacaauauauugagaacacaagagucugaaugugcauguguaaaugguucuugcuuuaccauaaugaccgauggaccaagugauggacaggccucauacaagaucuucagaauagaaaagggaaagauagucaaaucagucgaaaugaaugccccuaauuaucacuaugaggaaugcuccuguuauccugauucuagugaaaucacaugugugugcagggauaacuggcauggcucgaaucgaccgugggugucuuucaaccagaaucuggaauaucagauaggauacauaugcagugggauuuucggagacaauccacgcccuaaugauaagacaggcaguugugguccaguaucgucuaauggagcaaauggaguaaaaggauuuucauucaaauacggcaaugguguuuggauagggagaacuaaaagcauuaguucaagaaaagguuuugagaugauuugggauccaaacggauggacugggacagacaauaacuucucaauaaagcaagauaucguaggaauaaaugaguggucaggauauagcgggaguuuuguucagcauccagaacuaacagggcuggauuguauaagaccuugcuucuggguugaacuaauaagagggcgauccaaagagaacacaaucuggacuagcgggagcagcauauccuuuugugguguaaacagugacacuguggguuggucuuggccagacggugcugaguugccauuuaccauugacaaguaa

SEQ ID NO: 53111 - RNA, 1410 nt, Artificial Sequence
  derived and/or modified CDS sequence (wt) from neuraminidase__InfluenzaA__AEQ49762
augaauccaaaccaaaagauaauaaccauugguucggucuguaugacaauuggaauggcuaacuuaauauuacaaauuggaaacauaaucucaauauggauuagccacucaauucaacuugggaaucaaagucagauugaaacaugcaaucaaagcgucauuacuuaugaaaacaacacuuggauaaaucagacauauguuaacaucagcaacaccaacuuugcugcuggacagucagugguuuccgugaaauuagcgggcaauuccucucucugcccuguuaguggaugggcuauauacaguaaagacaacaguauaagaaucgguuccaagggggauguguuugucauaagggaaccauucauaucaugcucccccuuggaaugcagaaccuucuucuugacucaaggggccuugcuaaaugacaaacauuccaauggaaccauuaaagacaggagcccauaucgaacccuaaugagcuguccuauuggugaaguucccucuccauacaacucaagauuugagucagucgcuuggucagcaagugcuugucaugauggcaucaauuggcuaacaauuggaauuucuggcccagacaauggggcaguggcuguguuaaaguacaacggcauaauaacagacacuaucaagaguuggagaaacaauauauugagaacacaagagucugaaugugcauguguaaaugguucaugcuuuaucauaaugaccgauggaccaagugauggacaggccucauacaagaucuucagaauagaaaagggaaagauagucaaaucagucgaaaugaaugccccuaauuaucacuaugaggaaugcuccuguuauccugauucuagugaaaucacaugugugugcagggauaacuggcauggcucgaaucgaccgugggugucuuucaaccagaaucuggaauaucagauaggauacauaugcagugggauuuucggagacaauccacgcccuaaugauaagacaggcaguugugguccaguaucgucuaauggagcaaauggaguaaaaggauuuucauucaaauacggcaaugguguuuggauagggagaacuaaaagcauuaguucaagaaaagguuuugagaugauuugggauccaaacggauggacugggacagacaauaacuucucaauaaagcaagauaucguaggaauaaaugaguggucaggauauagcgggaguuuuguucagcauccagaacuaacagggcuggauuguauaagaccuugcuucuggguugaacuaaucagagggcgacccaaagagaacacaaucuggacuagcgggagcagcauauccuuuugugguguaaacagugacacuguggguuggucuuggccagacggugcugaguugccauuuaccauugacaaguaa

SEQ ID NO: 53112 - RNA, 1410 nt, Artificial Sequence
  derived and/or modified CDS sequence (wt) from neuraminidase__InfluenzaA__AEQ49763
augaauccaaaccaaaagauaauaaccauugguucggucuguaugacaauuggaauggcuaacuuaauauuacaaauuggaaauauaaucucaauauggauuagccacucaauucaacuugggaaucaaagucagauugaaacaugcaaucaaagcgucauuacuuaugaaaacaacacuuggguaaaucagacauauguuaacaucagcaacaccaacuuugcugcuggacagucagugguuuccgugaaauuagcgggcaauuccucucucugcccuguuaguggaugggcuauauacaguaaagacaacaguauaagaaucgguuccaagggggauguguuugucauaagggaaccauucauaucaugcucccccuuggaaugcagaaccuucuucuugacucaaggggccuugcuaaaugacaaacauuccaauggaaccauuaaagacaggagcccauaucgaacccuaaugagcuguccuauuggugaaguucccucuccauacaacucaagauuugagucagucgcuuggucagcaagugcuugucaugauggcaucaauuggcuaacaauuggaauuucuggcccagacaauggggcaguggcuguguuaaaguacaacggcauaauaacagacacuaucaagaguuggagaaacaauauauugagaacacaagagucugaaugugcauguguaaaugguucuugcuuuaccauaaugaccgauggaccaagugauggacaggccucauacaagaucuucagaauagaaaagggaaagauagucaaaucagucgaaaugaaugccccuaauuaucacuaugaggaaugcuccuguuauccugauucuagugaaaucacaugugugugcagggauaacuggcauggcucgaaucgaccgugggugucuuucaaccagaaucuggaauaucagauaggauacauaugcagugggauuuucggagacaauccacgcccuaaugauaagacaggcaguugugguccaguaucgucuaauggagcaaauggaguaaaaggauuuucauucaaauacggcaaugguguuuggauagggagaacuaaaagcauuaguucaagaaaagguuuugagaugauuugggauccaaacggauggacugggacagacaauaacuucucaauaaagcaagauaucguaggaauaaaugaguggucaggauauagcgggaguuuuguucagcauccagaacuaacagggauggauuguauaagaccuugcuucuggguugaacuaaucagagggcgacccaaagagaacacaaucuggacuagcgggagcagcauauccuuuugugguguaaacagugacacuguggguuggucuuggccagacggugcugaguugccauuuaccauugacaaguaa

SEQ ID NO: 53113 - RNA, 1410 nt, Artificial Sequence; identical to SEQ ID NO: 53112
  derived and/or modified CDS sequence (wt) from neuraminidase__InfluenzaA__AEQ49764

SEQ ID NO: 53114 - RNA, 1410 nt, Artificial Sequence; identical to SEQ ID NO: 53112
  derived and/or modified CDS sequence (wt) from neuraminidase__InfluenzaA__AEQ49765

SEQ ID NO: 53115 - RNA, 1410 nt, Artificial Sequence
  derived and/or modified CDS sequence (wt) from neuraminidase__InfluenzaA__AEQ49766
augaauccaaaccaaaagauaauaaccauugguucggucuguaugacaauuggaauggcuaacuuaauauuacaaauuggaaacauaaucucaauauggauuagccacucaauucaacuugggaaucaaagucagauugaaacaugcaaucaaagcgucauuacuuaugaaaacaacacuuggguaaaucagacauauguuaacaucagcaacaccaacuuugcugcuggacagucagugguuuccgugaaauuaacgggcaauuccucucucugcccuguuaguggaugggcuauauacaguaaagacaacaguauaagaaucgguuccaagggggauguguuugucauaagggaaccauucauaucaugcucccccuuggaaugcagaaccuucuucuugacucaaggggccuugcuaaaugacaaacauuccaauggaaccauuaaagacaggagcccauaucgaacccuaaugagcuguccuauuggugaaguucccucuccauacaacucaagauuugagucagucgcuuggucagcaagugcuugucaugauggcaucaauuggcuaacaauuggaauuucuggcccagacaauggggcaguggcuguguuaaaguacaacggcauaauaacagacacuaucaagaguuggagaaacaauauauugagaacacaagagucugaaugugcauguguaaaugguucuugcuuuaccauaaugaccgauggaccaagugauggacaggccucauacaagaucuucagaauagaaaagggaaagauagucaaaucagucgaaaugaaugccccuaauuaucacuaugaggaaugcuccuguuauccugauucuagugaaaucacaugugugugcagggauaacuggcauggcucgaaucgaccgugggugucuuucaaccagaaucuggaauaucagauaggauacauaugcagugggauuuucggagacaauccacgcccuaaugauaagacaggcaguugugguccaguaucgucuaauggagcaaauggaguaaaaggauuuucauucaaauacggcaaugguguuuggauagggagaacuaaaagcauuaguucaagaaaagguuuugagaugauuugggauccaaauggauggacugggacagacaauaacuucucaauaaagcaagauaucguaggaauaaaugaguggucaggauauagcgggaguuuuguucagcauccagaacuaacagggcuggauuguauaagaccuugcuucuggguugaacuaaucagagggcgacccaaagagaacacaaucuggacuagcgggagcagcauauccuuuugugguguaaacagugacacuguggguuggucuuggccagacggugcugaguugccauuuaccauugacaaguaa

SEQ ID NO: 53116 - RNA, 1410 nt, Artificial Sequence
  derived and/or modified CDS sequence (wt) from neuraminidase__InfluenzaA__AEQ49767
augaauccaaaccaaaagauaauaaccauugguucggucuguaugacaauuggaauggcuaacuuaauauuacaaauuggaaacauaaucucaauauggauuagccacucaauucaacuugggaaccaaagucagauugaaacaugcaaucaaagcgucauuacuuaugaaaacaacacuuggguaaaucagacauauguuaacaucagcaacaccaacuuugcugcuggacagucagugguuuccgugaaauuagcgggcaauuccucucucugcccuguuaguggaugggcuauauacaguaaagacaacaguauaagaaucgguuccaagggggauguguuugucauaagggaaccauucauaucaugcucccccuuggaaugcagaaccuucuucuugacucaaggggccuugcuaaaugacaaacauuccaauggaaccauuaaagacaggagcccauaucgaacccuaaugagcuguccuauuggugaaguucccucuccauacaacucaagauuugagucagucgcuuggucagcaagugcuugucaugauggcaucaauuggcuaacaauuggaauuucuggcccagacaauggggcaguggcuguguuaaaguacaacggcauaauaacagacacuaucaagaguuggagaaacaauauauugagaacacaagagucugaaugugcauguguaaaugguucuugcuuuaccauaaugaccgauggaccaagugauggacaggccucauacaagaucuucaaaauagaaaagggaaagauagucaaaucagucgaaaugaaugccccuaauuaucacuaugaggaaugcuccuguuauccugauucuagugaaaucacaugugugugcagggauaacuggcauggcucgaaucgaccgugggugucuuucaaccagaaucuggaauaucagauaggauacauaugcagugggauuuucggagacaauccacgcccuaaugauaagacaggcaguugugguccaguaucgucuaauggagcaaauggaguaaaaggauuuucauacaaauacggcaaugguguuuggauagggagaacuaaaagcauuaguucaagaaaagguuuugagaugauuugggauccaaacggauggacugggacagacaauaacuucucaauaaagcaagauaucguaggaauaaaugaguggucaggauauagcgggaguuuuguucagcauccagaacuaacagggauggguuguauaagaccuugcuucuggguugaacuaaucagagggcgacccaaagagaacacaaucuggacuagcgggagcagcauauccuuuugugguguaaacagugacacuguggguuggucuuggccagacggugcugaguugccauuuaccauugacaaguaa

SEQ ID NO: 53117 - RNA, 1410 nt, Artificial Sequence
  derived and/or modified CDS sequence (wt) from neuraminidase__InfluenzaA__AEQ49768
augaauccaaaccaaaagauaauaaccauugguucggucuguaugacaauuggaauggcuaacuuaauauuacaaauuggaaacauaaucucaauauggauuagccacucaauucaacuugggaaucaaagucagauugaaacaugcaaucaaagcgucauuacuuaugaaaacaacacuuggguaaaucagacauauguuaacaucagcaacaccaacuuugcugcuggacagucagugguuuccgugaaauuagcgggcaauuccucucucugcccuguuaguggaugggcuauauacaguaaagacaacaguauaagaaucgguuccaagggggauguguuugucauaagggaaccauucauaucaugcucccccuuggaaugcagaaccuucuucuugacucaaggggccuugcuaaaugacaaacauuccaauggaaccauuaaagacaggagcccauaucgaacccuaaugagcuguccuauuggugaaguucccucuccauacaacucaagauuugagucagucgcuuggucagcaagugcuugucaugauggcaucaauuggcuaacaauuggaauuucuggcccagacaauggggcaguggcuguguuaaaguacaacggaauaauaacagacacuaucaagaguuggagaaacaauauauugagaacacaagagucugaaugugcauguguaaaugguucuugcuuuaccauaaugaccgauggaccaagugauggacaggccucauacaagaucuucagaauagaaaagggaaagauagucaaaucagucgaaaugaaugccccuaauuaucacuaugaggaaugcuccuguuauccugauucuagugaaaucacaugugugugcagggauaacuggcauggcucgaaucgaccgugggugucuuucaaccagaaucuggaauaucagauaggauacauaugcagugggauuuucggagacaauccacgcccuaaugauaagacaggcaguugugguccaguaucgucuaauggagcaaauggaguaaaaggauuuucauucaaauacggcaaugguguuuggauagggagaacuaaaagcauuaguucaagaaaagguuuugagaugauuugggauccaaauggauggacugggacagacaauaacuucucaauaaagcaagauaucguaggaauaaaugaguggucaggauauagcgggaguuuuguucagcauccagaacuaacagggcuggauuguauaagaccuugcuucuggguugaacuaaucagagggcgacccaaagagaacacaaucuggacuagcgggagcagcauauccuuuugugguguaaacagugacacuguggguuggucuuggccagacggugcugaguugccauuuaccauugacaaguaa

SEQ ID NO: 53118 - RNA, 1410 nt, Artificial Sequence; identical to SEQ ID NO: 53094
  derived and/or modified CDS sequence (wt) from neuraminidase__InfluenzaA__AEQ49769

SEQ ID NO: 53119 - RNA, 1410 nt, Artificial Sequence
  derived and/or modified CDS sequence (wt) from neuraminidase__InfluenzaA__AEQ49770
augaauccaaaccaaaagauaauaaccauugguucggucuguaugacaauuggaauggcuaacuuaauauuacaaauuggaaacauaaucucaguauggauuagccacucaauucaacuugggaaucaaaaucagacugaaacaugcaaucaaagcgucauuacuuaugaaaacaacacuuggguaaaucagacauauguuaacaucagcaacaccaacuuugcugcuggacagucagugguuuccgugaaauuagcgggcaauuccucucucugcccuguuaguggaugggcuauauacaguaaagacaacaguauaagaaucgguuccaagggggauguguuugucauaagggaaccauucauaucaugcuccccuuuggaaugcagaaccuucuucuugacucaaggggccuugcuaaaugacaaacauuccaauggaaccauuaaagacaggagcccauaucgaacccuaaugagcuguccuauuggugaaguucccucuccauacaacucaagauuugagucagucgcuuggucagcaagugcuugucaugaugguaucaauuggcuaacaauuggaauuucuggcccagacaauggggcaguggcuguguuaaaguacaacggcauaauaacagacacuaucaagaguuggagaaacaauauauugagaacacaagagucugaaugugcauguguaaaugguucuugcuuuacuguaaugaccgauggaccaagugauggacaggccucauacaagaucuucagaauagaaaagggaaagauagucaaaucagucgaaaugaaugccccuaauuaucacuaugaggaaugcuccuguuauccugauucuagugaaaucacaugugugugcagggauaacuggcauggcucgaaucgaccgugggugucuuucaaccagaaucuggaauaucggauaggauacauaugcagugggauuuucggagacaauccacgcccuaaugauaagacaggcaguugugguccaguaucgucuaauggagcaaauggaguaaaaggauuuucauucaaauacggcaaugguguuuggauagggagaacuaaaagcauuaguucaagaaacgguuuugagaugauuugggauccgaacggauggacugggacagacaauaacuucucaauaaagcaagauaucauaggaauaaaugaguggucaggauauagcgggaguuuuguucagcauccagaacuaacagggcuggauuguauaagaccuugcuucuggguugaacuaaucagagggcggcccaaagagaacacaaucuggacuagcgggagcagcauauccuuuugugguguaaacagugacacuguggguuggucuuggccagacggugcugaguugccauuuaccguugacaaguaa

SEQ ID NO: 53120 - RNA, 1410 nt, Artificial Sequence
  derived and/or modified CDS sequence (wt) from neuraminidase__InfluenzaA__AEQ49771
augaauccaaaccaaaagauaauaaccauugguucggucuguaugacaauuggaauggcuaacuuaauauuacaaauuggaaacauaaucucaauauggauuagccacucaauucaacuugggaaucaaagucagauugaaacaugcaaucaaagcgucauuacuuaugaaaacaacacuuggguaaaucagacauauguuaacaucagcaacaccaacuuugcugcuggacagucagugguuuccgugaaauuagcgggcaauuccucucucugcccuguuaguggaugggcuauauacaguaaagacaauaguauaagaaucgguuccaagggggauguguuugucauaagggaaccauucauaucaugcucccccuuggaaugcagaaccuucuucuugacucaaggggccuugcuaaaugacaaacauuccaauggaaccauuaaagacaggagcccauaucgaacccuaaugagcuguccuauuggugaaguucccucuccauacaacucaagauuugagucagucgcuuggucagcaagugcuugucaugauggcaucaauuggcuaacaauuggaauuucuggcccagacaauggggcaguggcuguguuaaaguacaacggcauaauaacagacacuaucaagaguuggagaaacaauauauugagaacacaagagucugaaugugcauguguaaaugguucuugcuuuaccauaaugacagauggaccaagugauggacaggccucauacaagaucuucagaauagaaaagggaaagauagucaaaucagucgaaaugaaugccccuaauuaucacuaugaggaaugcuccuguuauccugauucuagugaaaucacaugugugugcagggauaacuggcauggcucgaaucgaccgugggugucuuucaaccagaaucuggaauaucagauaggauacauaugcagugggauuuucggagacaauccacgcccuaaugauaagacaggcaguugugguccaguaucgucuaauggagcaaauggaguaaaaggauuuucauucaaauacggcaaugguguuuggauagggagaacuaaaagcauuaguucaagaaaagguuuugagaugauuugggauccaaacggauggacugggacagacaauaacuucucaauaaagcaagauaucguaggaauaaaugaguggucaggauauagcgggaguuuuguucagcauccagaacuaacagggcuggauuguauaagaccuugcuucuggguugaacuaaucagagggcgacccaaagagaacacaaucuggacuagcgggagcagcauauccuuuugugguguaaacaguaacacuguggguuggucuuggccagacggugcugaguugccauuuaccauugacaaguaa

SEQ ID NO: 53121 - RNA, 1410 nt, Artificial Sequence
  derived and/or modified CDS sequence (wt) from neuraminidase__InfluenzaA__AEQ49772
augaauccaaaccaaaagauaauaaccauugguucagucuguaugacaauuggaauggcuaacuuaauauuacaaauuggaaacauaaucucaauauggauuagccacucaauucaacuugggaaucaaagucagauugaaacaugcaaucaaagcgucauuacuuaugaaaacaacacuuggguaaaucagacauauguuaacaucagcaacaccaacuuugcugcuggacagucagugguuuccgugaaauuagcgggcaauuccucucucugcccuguuaguggaugggcuauauacaguaaagacaacaguauaagaaucgguuccaagggggauguguuugucauaagggaaccauucauaucaugcucccccuuggaaugcagaaccuucuucuugacucaaggggccuugcuaaaugacaaacauuccaauggaacuauuaaagacaggagcccauaucgaacccuaaugagcuguccuauuggugaaguucccucuccauacaacucaagauuugagucagucgcuuggucagcaagugcuugucaugauggcaucaauuggcuaacaauuggaauuucuggcccagacaauggggcaguggcuguguuaaaguacaacggcauaauaacagacacuaucaagaguuggagaaacaauauauugagaacacaagagucugaaugugcauguguaaaugguucuugcuuuaccauaaugaccgauggaccaagugauggacaggccucauacaagaucuucagaauagaaaagggaaagauagucaaaucagucgaaaugaaugccccuaauuaucacuaugaggaaugcuccuguuauccugauucuagugaaaucacaugugugugcagggauaacuggcauggcucgaaucgaccguggguaucuuucaaccagaaucuggaauaucagauaggauacauaugcagugggauuuucggagacaauccacgcccuaaugauaagacaggcaguugugguccaguaucgucuaauggagcaaauggaguaaaaggauuuucauucaaauacggcaaugguguuuggauagggagaacuaaaagcauuaguucaagaaaagguuuugagaugauuugggauccaaauggauggacugggacagacaauaacuucucaauaaagcaagauaucguaggaauaaaugaguggucaggauauagcgggaguuuuguucagcauccagaacuaacagggcuggauuguauaagaccuugcuucuggguugaacuaaucagagggcgacccaaagagaacacaaucuggacuagcgggagcagcauauccuuuugugguguaaacagugacacuguggguuggucuuggccagacggugcugaguugccauuuaccauugacaaguaa

SEQ ID NO: 53122 - RNA, 1410 nt, Artificial Sequence
  derived and/or modified CDS sequence (wt) from neuraminidase__InfluenzaA__AEQ49773
augaauccaaaccaaaagauaauaaccauugguucgaucuguaugacaauuggaauggcuaacuuaauauuacaaauuggaaacauaaucucaauauggauuagccacucaauucaacuugggaaucaaagucagauugaaacaugcaaucaaagcgucauuacuuaugaaaacaacacuuggguaaaucagacauauguuaacaucagcaacaccaacuuugcugcuggacagucagugguuuccgugaaauuagcgggcaauuccucucucugcccuguuaguggaugggcuauauacaguaaagacaauaguauaagaaucgguuccaagggggauguguuugucauaagggaaccauucauaucaugcucccccuuggaaugcagaaccuucuucuugacucaaggggccuugcuaaaugacaaacauuccaauggaaccauuaaagacaggagcccauaucgaacccuaaugagcuguccuauuggugaaguucccucuccauacaacucaagauuugagucagucgcuuggucagcaagugcuugucaugauggcaucaauuggcuaacaauuggaauuucuggcccagacaauggggcaguggcuguguuaaaguacaacggcauaauaacagacacuaucaagaguuggagaaacaauauauugagaacacaagagucugaaugugcauguguaaaugguucuugcuuuaccauaaugaccgauggaccaagugauggacaggccucauacaagaucuucagaauagaaaagggaaagauagucaaaucagucgaaaugaaugccccuaauuaucacuaugaggaaugcuccuguuauccugauucuagugaaaucacaugugugugcagggauaacuggcauggcucgaaucgaccgugggugucuuucaaccagaaucuggaauaucagauaggauacauaugcagugggauuuucggagacaauccacgcccuaaugauaagacaggcaguugugguccaguaucgucuaauggagcaaauggaguaaaaggauuuucauucaaauacggcaaugguguuuggauagggagaacuaaaagcauuaguucaagaaaagguuuugagaugauuugggauccaaacggauggacugggacagacaauaacuucucaauaaagcaagauaucguaggaauaaaugaguggucaggauauagcgggaguuuuguucagcauccagaacuaacagggcuggauuguauaagaccuugcuucuggguugaacuaaucagagggcgacccaaagagaacacaaucuggacuagcgggagcagcauauccuuuugugguguaaacaguaacacuguggguuggucuuggccagacggugcugaguugccauuuaccauugacaaguaa

SEQ ID NO: 53123 - RNA, 1410 nt, Artificial Sequence
  derived and/or modified CDS sequence (wt) from neuraminidase__InfluenzaA__AEQ49774
augaauccaaaccaaaagauaauaaccauugguucggucuguaugacaauuggaauggcuaacuuaauauuacaaauuggaaacauaaucucaauauggauuagccacucaauucaacuugggaaucaaagucagauugaaacaugcaaucaaagcgucauuacuuaugaauacaacacuuggguaaaucagacauauauuaacaucagcaacaccaacuuugcugcuggacagucagugguuuccgugaaauuagugggcaauuccucucucugcccuguuaguggaugggcuauauacaguaaagacaacaguauaagaaucgguuccaagggggauguguuugucauaagggaaccauucauaucaugcucccccuuggaaugcagaaccuucuucuugacucaaggggccuugcuaaaugacaaacauuccaauggaaccauuaaagacaggagcccauaucgaacccuaaugagcuguccuauuggugaaguucccucuccauacaacucaagauuugagucagucgcuuggucagcaagugcuugucaugauggcaucaauuggcuaacaauuggaauuucuggcccagacaauggggcaguggcuguguuaaaguacaacggcauaauaacagacacuaucaagaguuggagaaacaauauacugagaacacaagagucugaaugugcauguguaaaugguucuugcuuuaccauaaugaccgauggaccaagugauggacaggccucauacaagaucuucagaauagaaaagggaaagauagucaaaucagucgaaaugaaugccccuaauuaucacuaugaggaaugcuccuguuauccugauucuagugaaaucacaugugugugcagggauaacuggcauggcucgaaucgaccgugggugucuuucaaccagaaucuggaauaucagauaggauacauaugcagugggauuuucggagacaauccacgcccuaaugauaagacaggcaguugugguccaguaucgucuaauggagcaaauggaguaaaaggauuuucauucaaauacggcaaugguguuuggauagggagaacuaaaagcauuaguucaagaaaagguuaugagaugauuugggauccaaacggauggacugggacagacaauaacuucucaauaaagcaagauaucguaggaauaaaugaguggucaggauauagcgggaguuuuguucagcauccagaacuaacagggauggauuguauaagaccuugcuucuggguugaacuaaucagagggcgacccaaagagaacacaaucuggacuagcgggagcagcauauccuuuugugguguaaacagugacacuguggguuggucuuggccagacggugcugaguugccauuuaccauugacaaguaa

SEQ ID NO: 53124 - RNA, 1410 nt, Artificial Sequence; identical to SEQ ID NO: 53089
  derived and/or modified CDS sequence (wt) from neuraminidase__InfluenzaA__AEQ49775

SEQ ID NO: 53125 - RNA, 1410 nt, Artificial Sequence
  derived and/or modified CDS sequence (wt) from neuraminidase__InfluenzaA__AEQ49776
augaauccaaaccaaaagauaauaaccauugguucggucuguaugacaauuggaauggcuaacuuaauauuacaaauuggaaacauaaucucaauauggauuagccacucaauucaacuugggaaucaaagucagauugaaacaugcaaucaaagcgucauuacuuaugaaaacaacacuuggguaaaucagacauauguuaacaucagcaacaccaacuuugcugcuggacagucagugguuuccgugaaauuagcgggcaauuccucucucugcccuguuaguggaugggcuauauacaguaaagacaacaguauaagaaucgguuccaagggggauguguuugucauaagggaaccauucauaucaugcucccccucggaaugcagaaccuucuucuugacucaaggggccuugcuaaaugacaaacauuccaauggaaccauuaaagacaggagcccauaucgaacccuaaugagcuguccuauuggugaaguucccucuccauacaacucaagauuugagucagucgcuuggucagcaagugcuugucaugauggcaucaauuggcuaacaauuggaauuucuggcccagacaauggggcaguggcuguguuaaaguacaacggcauaauaacagacacuaucaagaguuggagaaacaauauauugagaacacaagagucugaaugugcauguguaaaugguucuugcuuuaccauaaugaccgauggaccaagugauggacaggccucauacaagaucuucagaauagaaaagggaaagauagucaaaucagucgaaaugaaugccccuaauuaucacuaugaggaaugcuccuguuauccugauucuagugaaaucacaugugugugcagggauaacuggcauggcucgaaucgaccgugggugucuuucaaccagaaucuggaauaucagauaggguacauaugcagugggauuuucggagacaauccacgcccuaaugauaagacaggcaguugugguccaguaucgucuaauggagcaaauggaguaaaaggauuuucauucaaauacggcaaugguguuuggauagggagaacuaaaagcauuaguucaagaaaagguuuugagaugauuugggauccaaacggauggacuggaacagacaauaacuucucaauaaagcaagauaucguaggaauaaaugaguggucaggauauagcgggaguuuuguucagcauccagaacuaacagggcuggauuguauaagaccuugcuucuggguugaacuaaucagagggcgacccacagagaacacaauuuggacuagcgggagcagcauauccuuuugugguguaaacagugacacuguggguuggucuuggccagacggugcugaguugccauuuaccauugacaaguaa

SEQ ID NO: 53126 - RNA, 1410 nt, Artificial Sequence
  derived and/or modified CDS sequence (wt) from neuraminidase__InfluenzaA__AEQ49777
augaauccaaaccaaaagauaauaaccauugguucggucuguaugacaauuggaauggcuaacuuaauauuacaaauuggaaacauaaucucaauauggauuagccacucaauucaacuugggaaucaaagucagauugaaacaugcaaucaaagcgucauuacuuaugaaaacaacacuuggguaaaucagacauauguuaacaucagcaacaccaacuuugcugcuggacagucagugguuuccgugaaauuagcgggcaauuccucucucugcccuguuaguggaugggcuauauacaguaaagacaacaguauaagaaucgguuccaagggggauguguuugucauaagggaaccauucauaucaugcucccccuuggaaugcagaaccuucuucuugacucaaggggccuugcuaaaugacaaacauuccaauggaaccauuaaagacaggagcccauaucgaacccuaaugagcuguccuauuggugaaguucccucuccauacaacucaagauuugagucagucgcuuggucagcaagugcuugucaugauggcaucaauuggcuaacaauuggaauuucuggcccagacaauggggcaguggcuguguuaaaguacaacggcauaauaacagacacuaucaagaguuggagaaacaauauauugagaacacaagagucugaaugugcauguguaaaugguucuugcuuuaccauaaugaccgauggaccaagugauggacaggccucauacaagaucuucagaauagaaaagggaaagauagucaaaucagucgaaaugaaugccccuaauuaucacuaugaggaaugcuccuguuauccugauucuagugaaaucacaugugugugcagggauaacuggcauggcucgaaucgaccgugggugucuuucaaccagaaucuggaauaucagauaggauacauaugcagugggauuuucggagacaauccacgcccuaaugauaagacaggcaguugugguccaguaucgucuaauggagcaaauggaguaaaaggauuuucauucaaauacggcaaugguguuuggauagggagaacuaaaagcauuaguucaagaaaagguuuugagaugauuugggauccaaacggauggacuggaacagacaauaacuucucaauaaagcaagauaucguaggaauaaaugaguggucaggauauagcgggaguuuuguucagcauccagaacuaacagggauggauuguauaagaccuugcuucuggguugaacuaaucagagggcgacccaaagagaacacaaucuggacuagcgggagcagcauauccuuuugugguguaaacagugacacuguggguuggucuuggccagacggugcugaguugccauuuaccauugacaaguaa

SEQ ID NO: 53127 - RNA, 1410 nt, Artificial Sequence
  derived and/or modified CDS sequence (wt) from neuraminidase__InfluenzaA__AEQ49778
augaauccaaaccaaaagauaauaaccauugguucggucuguaugacaauuggaauggcuaacuuaauauuacaaauuggaaacauaaucucaauauggauuagccacucaauucaacuugggaaucaaagucagauugaaacaugcaaucaaagcgucauuacuuaugaaaacaacacuuggauaaaucagacauauguuaacaucagcaacaccaacuuugcugcuguacagucagugguuuccgugaaauuagcgggcaauuccacucucugcccuguuaguggaugggcuauauacaguaaagacaacaguauaagaaucgguuccaagggggauguguuugucauaagggaaccauucauaucaugcucccccuuggaaugcagaaccuucuucuugacucaaggggccuugcuaaaugacaaacauuccaauggaaccauuaaagacaggagcccauaucgaacccuaaugagcuguccuauuggugaaguucccucuccauacaacucaagauuugagucagucgcuuggucagcaagugcuugucaugauggcaucaauuggcuaacaauuggaauuucuggcccagacaauggggcaguggcuguguuaaaguacaacggcauaauaacagacacuaucaagaguuggagaaacaauauauugagaacacaagagucugaaugugcauguguaaaugguucuugcuuuaccauaaugaccgauggaccaagugauggacaggccucauacaagaucuucagaauagaaaagggaaagauagucaaaucagucgaaaugaaugccccuaauuaucacuaugaggaaugcuccuguuauccugauucuagugaaaucacaugugugugcagggauaacuggcauggcucgaaucgaccgugggugucuuucaaccagaaucuggaauaucagauaggauacauaugcagugggauuuucggagacaauccacgcccuaaugauaagacaggcaguugugguccaguaucgucuaauggagcaaauggaguaaaaggauuuucauucaaauacggcaaugguguuuggauagggagaacuaaaagcauuagcucaagaaaagguuuugagaugauuugggauccaaacggauggacugggacagacaauaacuucucaauaaagcaagauaucguaggaauaaaugaguggucaggauauagcgggaguuuuguucagcauccagaacuaacagggcuggauuguauaagaccuugcuucuggguugaacuaaucagagggcgacccaaagagaacacaaucuggacuagcgggagcagcauauccuuuugugguguaaacagugacacuguggguuggucuuggccagacggugcugaguugccauuuaccauugacaaguaa

SEQ ID NO: 53128 - RNA, 1410 nt, Artificial Sequence
  derived and/or modified CDS sequence (wt) from neuraminidase__InfluenzaA__AEQ49779
augaauccaaaccaaaagauaauaaccauugguucggucuguaugacaauuggaauggcuaacuuaauauuacaaauuggaaacauaaucucaauauggauuagccacucaauucaacuugggaaucaaaaucagacugaaacaugcaaucaaagcgucauuacuuaugaaaacaacacuuggguaaaucagacauauguuaacaucagcaacaccaacuuugcugcuggacagucagugguuuccgugaaauuagcgggcaauuccucucucugcccuguuaguggaugggcuauauacaguaaagacaacaguauaagaaucgguuccaagggggauguguuugucauaagggaaccauucauaucaugcuccccuuuggaaugcagaaccuucuucuugacucaaggggccuugcuaaaugacaaacauuccaauggaaccauuaaagacaggagcccauaucgaacccuaaugagcuguccuauuggugaaguucccucuccauacaacucaagauuugagucagucgcuuggucagcaagugcuugucaugaugguaucaauuggcuaacaauuggaauuucuggcccagacaauggggcaguggcuguguuaaaguacaacggcauaauaacagacacuaucaagaguuggagaaacaauauauugagaacacaagagucugaaugugcauguguaaaugguucuugcuuuacuguaaugaccgauggaccaagugauggacaggccucauacaagaucuucagaauagaaaagggaaagauagucaaaucagucgaaaugaaugccccuaauuaucacuaugaggaaugcuccuguuauccugauucuagugaaaucacaugugugugcagggauaacuggcauggcucgaaucgaccgugggugucuuucaaccagaaucuggaauaucggauaggauacauaugcagugggauuuucggagacaauccacgcccuaaugauaagacaggcaguugugguccaguaucgucuaauggagcaaauggaguaaaaggauuuucauucaaauacggcaaugguguuuggauagggagaacuaaaagcauuaguucaagaaacgguuuugagaugauuugggauccgaacggauggacugggacagacaauaacuucucaauaaagcaagauaucauaggaauaaaugaguggucaggauauagcgggaguuuuguucagcauccagaacuaacagggcuggauuguauaagaccuugcuucuggguugaacuaaucagagggcggcccaaagagaacacaaucuggacuagcgggagcagcauauccuuuugugguguaaacagugacacuguggguuggucuuggccagacggugcugaguugccauuuaccguugacaaguaa

SEQ ID NO: 53129 - RNA, 1410 nt, Artificial Sequence; identical to SEQ ID NO: 53089
  derived and/or modified CDS sequence (wt) from neuraminidase__InfluenzaA__AEQ49780

SEQ ID NO: 53130 - RNA, 1410 nt, Artificial Sequence
  derived and/or modified CDS sequence (wt) from neuraminidase__InfluenzaA__AEQ49781
augaauccaaaccaaaagauaauaaccauugguucggucuguaugacaauuggaauggcuaacuuaauauuacaaauuggaaacauaaucucaauauggauuagccacucaauucaacuugggaaucaaagucagauugaaacaugcaaucaaagcgucauuacuuaugaaaacaacacuuggguaaaucagacauauguuaacaucagcaacaccaacuuugcugcuggacagucagugguuuccgugaaauuagcgggcaauuccucucucugcccuguuaguggaugggcuauauacaguaaagacaacaguauaagaaucgguuccaagggggauguguuugucauaagggaaccauuuauaucaugcucccccuuggaaugcagaaccuucuucuugacucaaggggccuugcuaaaugacaaacauuccaauggaaccauuaaagacaggagcccauaucgaacccuaaugagcuguccuauuggugaaguucccucuccauacaacucaagauuugagucagucgcuuggucagcaagugcuugucaugauggcaucaauuggcuaacaauuggaauuucuggcccagacaauggggcaguggcuguguuaaaguacaacggcauaauaacagacacuaucaagaguuggagaaacaauauauugagaacacaagagucugaaugugcauguguaaaugguucuugcuuuaccauaaugaccgauggaccaagugauggacaggccucauacaagaucuucagaauagaaaagggaaagauagucaaaucagucgaaaugaaugccccuaauuaucacuaugaggaaugcuccuguuauccugauucuagugaaaucacaugugugugcagggauaacuggcauggcucgaaucgaccguggguaucuuucaaccagaaucuggaauaucagauaggauacauaugcagugggauuuucggagacaauccacgcccuaaugauaagacaggcaguugugguccaguaucgucuaauggagcaaauggaguaaaaggauuuucauucaaauacggcaaugguguuuggauagggagaacuaaaagcauuaguucaagaaaagguuuugagaugauuugggauccaaacggauggacugggacagacaauaacuucucaauaaagcaagauaucguaggaauaaaugaguggucaggauauagcgggaguuuuguucagcauccagaacuaacagggcuggauuguauaagaccuugcuucuggguugaacuaaucagagggcgacccaaagagaacacaaucuggacuagcgggagcagcauauccuuuugugguguaaacagugacacuguggguuggucuuggccagacggugcugaguugccauuuaccauugacaaguaa

SEQ ID NO: 53131 - RNA, 1410 nt, Artificial Sequence; identical to SEQ ID NO: 53098
  derived and/or modified CDS sequence (wt) from neuraminidase__InfluenzaA__AEQ49782

SEQ ID NO: 53132 - RNA, 1410 nt, Artificial Sequence
  derived and/or modified CDS sequence (wt) from neuraminidase__InfluenzaA__AEQ49783
augaauccaaaccaaaagauaauaaccauugguucggccuguaugacaauuggaauggcuaacuuaauauuacaaauuggaaacauaaucucaauauggauuagccacucaauucaacuugggaaucaaagucagauugaaacaugcaaucaaagcgucauuacuuaugaaaacaacacuuggguaaaucaaacauauguuaacaucagcaacaccaacuuugcugcuggacagucagugguuuccgugaaauuagcgggcaauuccucucucugcccuguuaguggaugggcuauauacaguaaagacaacaguauaagaaucgguuccaagggggauguguuugucauaagggaaccauucauaucaugcucccccuuggaaugcagaaccuucuucuugacucaaggggccuugcuaaaugacaaacauuccaauggaaccauuaaagacaggagcccauaucgaacccuaaugagcuguccuauuggugaaguucccucuccauacaacucaagauuugagucagucgcuuggucagcaagugcuugucaugauggcaucaauuggcuaacaauuggaauuucuggcccagacaauggggcaguggcuguguuaaaguacaacggcauaauaacagacacuaucaagaguuggagaaacaauauauugagaacacaagagucugaaugugcauguguaaaugguucuugcuuuaccauaaugaccgauggaccaagugauggacaggccucauacaagaucuucagaauagaaaagggaaagauagucaaaucagucgaaaugaaugccccuaauuaucacuaugaggaaugcuccuguuauccugauucuagugaaaucacaugugugugcagggauaacuggcauggcucgaaucgaccgugggugucuuucaaccagaaucuggaauaucagauaggauacauaugcagugggauuuucggagacaauccacgcccuaaugauaagacaggcaguugugguccaguaucgucuaauggagcaaauggaguaaaaggauuuucauucaaauacggcaaugguguuuggauagggagaacuaaaagcauuaguucaagaaaagguuuugagaugauuugggauccaaauggauggacugggacagacaauaacuucucaauaaagcaagauaucguaggaauaaaugaguggucaggauauagcgggaguuuuguucagcauccagaacuaacagggcuggauuguauaagaccuugcuucuggguugaacuaaucagagggcgacccaaagagaacacaaucuggacuagcgggagcagcauauccuuuugugguguaaacagugacacuguggguuggucuuggccagacggugcugaguugccauuuaccauugacaaguaa

SEQ ID NO: 53133 - RNA, 1410 nt, Artificial Sequence
  derived and/or modified CDS sequence (wt) from neuraminidase__InfluenzaA__AEQ49785
augaauccaaaccaaaagauaauaacgauuggcucuguuucccucaccauuuccacaauaugcuucuucaugcaaauugccaucuugauaacuacuguaacauugcauuucaagcaauaugaauucaacucccccccaaacaaccaagugaugcugugugaaccaacaauaauagaaagaaacauaacagagauaguguaucugaccaacaccaccauagagaaggaaauaugucccaaacuagcagaauacagaaauuggucaaagccgcaaugugacauuacaggauuugcaccuuuuucuaaggacaauucgauuaggcuuuccgcugguggggacaucugggugacaagagaaccuuaugugucaugcgauccuaacaaguguuaucaauuugcccuuggacaaggaacaacacuaaacaacgugcauucaaauaacacaguacgugauaggaccccuuaucggacccuauugaugaaugaguuagguguuccuuuucaucuggggaccaagcaagugugcauagcaugguccagcucaaguugucacgauggaaaagcauggcugcauguuuguauaacgggggacgauaaaaaugcaacugcuagcuucauuuacaaugggaggcuuguagauaguguuguuucaugguccaaagaaauccucaggacucaggagucagaaugcguuuguaucaauggaacuuguacaguaguaaugacugaugggagugcuucaggaaaagcugauacuaaaauacuauucaucgaggaggggaaaaucguucauacuagcacauugucaggaagugcucaacaugucgaggagugcuccugcuauccucgauauccuggugucagaugugucugcagagacaacuggaaaggcuccaauaggcccaucguagauauaaacaugaaggaucauagcauuguuuccaguuauguguguucaggacuuguuggagacacacccagaaaaaacgacagcuccagcaguagccauuguuuugauccuaacgaugaagaagguggucauggagugaaaggcugggccuuugaugauggaaaugacguguggaugggaagaacgaucagcgagaagucacgcuuaggguaugaaaccuucaaagucauugaaggcugguccaacccuaaguccaaauugcagauaaauaggcaagucauaguugacagaggugauagguccgguuauucugguauuuucucuguugaaggcaaaagcugcaucaaucggugcuuuuauguggaguugauaaggggaaguaaagaggaaacugaaguauuguggaccucaaacaguauuguuguguuuuguggcaccucagggacauauggaacaggcucauggccugauggggcggacaucaaucucaugccuauauaa

SEQ ID NO: 53134 - RNA, 1410 nt, Artificial Sequence
  derived and/or modified CDS sequence (wt) from neuraminidase__InfluenzaA__AEQ49786
augaauccaaaccaaaagauaauaacgauuggcucuguuucccucaccauuuccacaauaugcuucuucaugcaaauugccaucuugauaaccacuguaacauugcauuucaagcaauaugaauucaacucccccccaaacaaccaagugaugcugugugaaccaacaauaauagaaagaaacauaacagagauaguguaucugaccaacaccaccauagagaaggaaauaugucccaaacuagcagaauacagaaauuggucaaagccgcaaugugacauuacaggauuugcaccuuuuucuaaggacaauucgauuaggcuuuccgcugguggggacaucugggugacaagagaaccuuaugugucaugcgauccuaacaaguguuaucaauuugcccuuggacaaggaacaacacuaaacaacgugcauucaaauaacacaguacgugauaggaccccuuaucggacccuauugaugaaugaguuagguguuccuuuucaucuggggaccaagcaagugugcauagcaugguccagcucaaguugucacgauggaaaagcauggcugcauguuuguauaacgggggacgauaaaaaugcaacugcuagcuucauuuacaaugggaggcuuguagauaguguuguuucaugguccaaagaaauccucaggacccaggagucagaaugcguuuguaucaauggaacuuguacaguaguaaugacugaugggagugcuucaggaaaagcugauacuaaaauacuauucaucgaggaggggaaaaucguucauacuagcacauugucaggaagugcucaacaugucgaggagugcuccugcuauccucgauauccuggugucagaugugucugcagagacaacuggaaaggcuccaauaggcccaucguagauauaaacaugaaggaucauagcauuguuuccaguuauguguguucaggacuuguuggagacacacccagaaaaaacgacagcuccagcaguagccauuguuuugauccuaacgaugaagaagguggucauggagugaaaggcugggccuuugaugauggaaaugacguguggaugggaagaacgaucagcgagaagucacgcuuaggguaugaaaccuucaaagucauugaaggcugguccaacccuaaguccaaauugcagauaaauaggcaagucauaguugacagaggugauagguccgguuauucugguauuuucucuguugaaggcaaaagcugcaucaaucggugcuuuuauguggaguugauaaggggaaguaaagaggaaacugaaguauuguggaccucaaacaguauuguuguguuuuguggcaccucagggacauauggaacaggcucauggccugauggggcggacaucaaucucaugccuauauaa

SEQ ID NO: 53135 - RNA, 1410 nt, Artificial Sequence; identical to SEQ ID NO: 53133
  derived and/or modified CDS sequence (wt) from neuraminidase__InfluenzaA__AEQ49788

SEQ ID NO: 53136 - RNA, 1410 nt, Artificial Sequence; identical to SEQ ID NO: 53133
  derived and/or modified CDS sequence (wt) from neuraminidase__InfluenzaA__AEQ49789

SEQ ID NO: 53137 - RNA, 1410 nt, Artificial Sequence
  derived and/or modified CDS sequence (wt) from neuraminidase__InfluenzaA__AEQ49790
augaauccaaaucaaaagauaauaacgauuggcucuguuucucucaccauuuccacaauaugcuucuucaugcaaauugccaucuugauaacuacuguaacauugcauuucaagcaauaugaauucuacucccccccaaacaaccaagugaugcugugugaaccaacaauaauagaaagaaacauaacagagauaguguaucugaccaacaccaccauagagaaggaaauaugccccaaacuagcagaauacagaaauuggucaaagccgcaaugugacauuacaggauuugcaccuuuuucuaaggacaauucgauuaggcuuuccgcugguggggacaucugggugacaagagaaccuuaugugucaugcgauccugacaaguguuaucaauuugcccuuggacagggaacaacacuaaacaacgugcauucaaauaacacaguacgugguaggaccccuuaucggacccuauugaugaaugaguuagguguuccuuuucaucuggggaccaagcaagugugcauagcaugguccagcucaaguugucacgauggaaaagcauggcugcauguuuguauaacgggggaugauaaaaaugcaacugcuagcuucauuuacaaugggaggcuuguagauaguguuguuucaugguccaaagaaauccucaggacccaggagucagaaugcguuuguaucaauggaacuuguacaguaguaaugacugaugggagugcuucaggaaaagcugauacuaaaauacuauucauugaggaggggaaaaucguucauacuagcacauugucaggaagugcucagcaugucgaggagugcucuugcuauccucgauauccuggugucagaugugucugcagagacaacuggaaaggcuccaauaggcccaucguugauauaaacauaaaggaucauagcauuguuuccaguuaugugugcucaggacuuguuggagacacacccagaaaaaacgacagcuccagcaguagccauuguuuggauccuaacaaugaagaagguggucauggagugaaaggcugggccuuugaugauggaaaugacguguggaugggaagaacgaucaacgagacgucacgcuuaggguaugaaaccuucaaagucauugaaggcugguccaacccuaaguccaaauugcagauaaauaggcaagucauaguugacagagguaauagguccgguuauucugguauuuucucuguugaaggcaagagcugcaucaaucggugcuuuuauguggaguugauuaggggaagaaaagaggaaacugaagucuuguggaccucaaacaguauuguuguguuuuguggcaccucagguacauauggaacaggcucauggccugauggggcggaccucaaucucaugccuauauaa

SEQ ID NO: 53138 - RNA, 1410 nt, Artificial Sequence
  derived and/or modified CDS sequence (wt) from neuraminidase__InfluenzaA__AEQ49791
augaauccaaaucaaaagauaauaacgauuggcucuguuucucucaccauuuccacaauaugcuucuucaugcaaauugccaucuugauaacuacuguaacauugcauuucaagcaauaugaauucuacccccccccaaacaaccaagugaugcugugugaaccaacaauaauagaaagaaacauaacagagauaguguaucugaccaacaccaccauagagaaggaaauaugccccaaacuagcagaauacagaaauuggucaaagccgcaaugugacauuacaggauuugcaccuuuuucuaaggacaauucgauuaggcuuuccgcugguggggacaucugggugacaagagaaccuuaugugucaugcgauccugacaaguguuaucaauuugcccuuggacagggaacaacacuaaacaacgugcauucaaauaacacaguacguaauaggaccccuuaucggacccuauugaugaaugaguuagguguuccuuuucaucuggggaccaagcaagugugcauagcaugguccagcucaaguugucacgauggaaaagcauggcugcauguuuguauaacgggggaugauaaaaaugcaacugcuagcuucauuuacaaugggaggcuuguagauaguguuguuucaugguccaaagaaauccucaggacccaggagucagaaugcguuuguaucaauggaacuuguacaguaguaaugacugaugggagugcuucaggaaaagcugauacuaaaauacuauucauugaggaggggaaaaucguucauacuagcacauugucaggaagugcucagcaugucgaggagugcucuugcuauccucgauauccuggugucagaugugucugcagagacaacuggaaaggcuccaauaggcccaucguugauauaaacauaaaggaucauagcauuguuuccaguuaugugugcucaggacuuguuggagacacacccagaaaaaacgacagcuccagcaguagccauuguuuggauccuaacaaugaagaagguggucauggagugaaaggcugggccuuugaugauggaaaugacguguggaugggaagaacgaucaacgagacgucacgcuuaggguaugaaaccuucaaagucauugaaggcugguccaacccuaaguccaaauugcagauaaauaggcaagucauaguugacagagguaauagguccgguuauucugguauuuucucuguugaaggcaagagcugcaucaaucggugcuuuuauguggaguugauuaggggaagaaaagaggaaacugaagucuuguggaccucaaacaguauuguuguguuuuguggcaccucagguacauauggaacaggcucauggccugauggggcggaccucaaucucaugccuauauaa

SEQ ID NO: 53139 - RNA, 1410 nt, Artificial Sequence
  derived and/or modified CDS sequence (wt) from neuraminidase__InfluenzaA__AEQ49792
augaauccaaaccaaaagauaauaacgauuggcucuguuucccucaccauuuccacaauaugcuucuucaugcaaauugccaucuugauaacuacuguaacauugcauuucaagcaauaugaauucaacucccccccaaacaaccaagugaugcugugugaaccaacaauaauagaaagaaacauaacagagauaguguaucugaccaacaccaccauagagaaggaaauaugccccaaacuagcagaauacagaaauuggucaaagccgcaaugugacauuacaggauuugcaccuuuuucuaaggacaauucgauuaggcuuuccgcugguggggacaucugggugacaagagaaccuuaugugucaugcgauccuaacaaguguuaucaauuugcccuuggacaaggaacaacacuaaacaacgugcauucaaauaacacaguacgugauaggaccccuuaucggacccuauugaugaaugaguuagguguuccuuuucaucuggggaccaagcaagugugcauagcaugguccagcucaaguugucacgauggaaaagcauggcugcauguuuguauaacgggggacgauaaaaaugcaacugcuagcuucauuuacaaugggaggcuuguagauaguguuguuucaugguccaaagaaauccucaggacccaggagucagaaugcguuuguaucaauggaacuuguacaguaguaaugacugaugggagugcuucaggaaaagcugauacuaaaauacuauucaucgaggaggggaaaaucguucauacuagcacacugucaggaagugcucaacaugucgaggagugcuccugcuauccucgauauccuggugucagaugugucugcagagacaacuggaaaggcuccaauaggcccaucguagauauaaacaugaaggaucauagcauuguuuccaguuauguguguucaggacuuguuggagacacacccagaaaaaacgacagcuccagcaguagccauuguuuugauccuaacgaugaagaagguggucauggagugaaaggcugggccuuugaugauggaaaugacguguggaugggaagaacgaucagcgagaagucacgcuuaggguaugaaaccuucaaagucauugaaggcugguccaacccuaaguccaaauugcagauaaauaggcaagucauaguugacagaggugauagguccgguuauucugguauuuucucuguugaaggcaaaagcugcaucaaucggugcuuuuauguggaguugauaaggggaaguaaagaggaaacugaaguauuguggaccucaaacaguauuguuguguuuuguggcaccucagggacauauggaacaggcucauggccugauggggcggacaucaaucucaugccuauauaa

SEQ ID NO: 53140 - RNA, 1410 nt, Artificial Sequence; identical to SEQ ID NO: 53139
  derived and/or modified CDS sequence (wt) from neuraminidase__InfluenzaA__AEQ49793

SEQ ID NO: 53141 - RNA, 1410 nt, Artificial Sequence; identical to SEQ ID NO: 53139
  derived and/or modified CDS sequence (wt) from neuraminidase__InfluenzaA__AEQ49794

SEQ ID NO: 53142 - RNA, 1410 nt, Artificial Sequence; identical to SEQ ID NO: 53139
  derived and/or modified CDS sequence (wt) from neuraminidase__InfluenzaA__AEQ49795

SEQ ID NO: 53143 - RNA, 1410 nt, Artificial Sequence
  derived and/or modified CDS sequence (wt) from neuraminidase__InfluenzaA__AEQ49796
augaauccaaaucaaaagauaauaacgauuggcucuguuucucucaccauuuccacaauaugcuucuucaugcaaauugccaucuugauaacuacuguaacauugcauuucaagcaauaugaauucaacucccccccaaacaaccaagugaugcugugugaaccgacaauaauagaaaggaacauaacagagauaguguaucugaccaacaccaccauagagaaggaaauaugccccaaauuagcagaauacagaaauuggucaaaaccgcaaugugacauuacaggauuugcaccuuuuucuaaggacaauucaauuaggcuuuccgcugguggggacaucugggugacaagagaaccuuaugugucaugcgauccugacaaguguuaucaauuugcccuuggacagggaacaacacuaaacaacgugcauucaaauaacacaguacgugguaggaccccuuaucggacccuauugaugaaugaguuagguguuccuuuucaucuggggaccaagcaagugugcauagcaugguccagcucaaguugucacgauggaaaagcauggcugcauguuuguauaacgggggaugauaaaaaugcaacugcaagcuucauuuacaaugggaggcuuguagauaguguuguuucaugguccaaagaaauucucaggacccaggagucagaaugcguuuguaucaauggaacuuguacaguaguaaugacugauggaagugcuucaggaaaagcugauacuaaaauacuauucauugaggaggggaaaaucguucauacuagcacauugucaggaagugcucagcaugucgaggagugcucuugcuauccucgauauccuggugucagaugugucugcagagacaacuggaaaggcuccaauaggcccaucguagauauaaacauaaaggaucauagcauaguuuccaguuauguguguucaggacuuguuggagacacacccagaaaaaacgacagcuccagcaguagccauuguuuggauccuaacaaugaagaagguggucauggagugaaaggcugggccuuugaugauggaaaugacguguggaugggaagaacaaucaacgagacgucacgcuugggguaugaaaccuucaaagucauugaaggcugguccaacccuaaguccaaauugcagauaaauaggcaagucauaguugacaaagguaauagguccgguuauucugguauuuucucuguugaaggcaaaagcugcaucaaucggugcuuuuauguggaguugauuaggggaagaaaagaggaaacugaagucuuguggaccucaaacaguauuguuguguuuuguggcaccucagguacauauggaacaggcucauggccugauggggcugaccucaaucucaugccuauauaa

SEQ ID NO: 53144 - RNA, 1410 nt, Artificial Sequence; identical to SEQ ID NO: 53139
  derived and/or modified CDS sequence (wt) from neuraminidase__InfluenzaA__AEQ49797

SEQ ID NO: 53145 - RNA, 1410 nt, Artificial Sequence; identical to SEQ ID NO: 53139
  derived and/or modified CDS sequence (wt) from neuraminidase__InfluenzaA__AEQ49798

SEQ ID NO: 53146 - RNA, 1410 nt, Artificial Sequence; identical to SEQ ID NO: 53139
  derived and/or modified CDS sequence (wt) from neuraminidase__InfluenzaA__AEQ49799

SEQ ID NO: 53147 - RNA, 1410 nt, Artificial Sequence; identical to SEQ ID NO: 53139
  derived and/or modified CDS sequence (wt) from neuraminidase__InfluenzaA__AEQ49800

SEQ ID NO: 53148 - RNA, 1410 nt, Artificial Sequence; identical to SEQ ID NO: 53139
  derived and/or modified CDS sequence (wt) from neuraminidase__InfluenzaA__AEQ49801

SEQ ID NO: 53149 - RNA, 1410 nt, Artificial Sequence; identical to SEQ ID NO: 53139
  derived and/or modified CDS sequence (wt) from neuraminidase__InfluenzaA__AEQ49802

SEQ ID NO: 53150 - RNA, 1410 nt, Artificial Sequence
  derived and/or modified CDS sequence (wt) from neuraminidase__InfluenzaA__AEQ49803
augaauccaaaucaaaagauaauaacgauuggcucuguuucccucaccauuuccacaauaugcuucuucaugcaaauugccaucuugauaacuacuguaacauugcauuucaagcaauaugaauucaacucccccccaaacaaccaagugaugcugugugaaccaacaauaauagaaagaaacauaacagagauaguguaucugaccaacaccaccauagagaaggaaauaugccccaaacuagcagaauacagaaauuggucaaaaccgcaaugugacauuacaggauuugcaccuuuuucuaaggacaauucaauuaggcuuuccgcugguggggacaucugggugacaagagaaccuuaugugucaugcgauccuaacaaguguuaucaauuugcccuuggacagggaacaacacuaaacaacgugcauucaaauaacacaguacgugauaggaccccuuaucggacccuauugaugaaugaguuagguguuccuuuucaucuggggaccaagcaagugugcauagcaugguccagcucaaguugucacgauggaaaagcauggcugcauguuuguauaacgggggaugauaaaaaugcaacugcaagcuucauuuacaaugggaggcuuguagauaguguuguuucaugguccaaagaaauucucaggacccaggagucagaaugcguuuguaucaauggaacuuguacaguaguaaugacugauggaagugcuucaggaaaagcugauacuaaaauacuauucauugaggaggggaaaaucguucauacuagcacauugucaggaagugcucaacaugucgaggagugcucuugcuauccucgauauccuggugucagaugugucugcagagacaacuggaaaggcuccaauaggcccaucguagauauaaacauaaaggaucauagcauaguuuccaguuauguguguucaggacuuguuggagacacacccagaaaaaacgacagcaccagcaguagccauuguuuggauccuaacaaugaagaagguggucauggagugaaaggcugggccuuugaugauggaaaugacguguggaugggaagaacaaucagcgagacgucacgcuugggguaugaaaccuucaaagucauugaaggcugguccaacccuaaguccaaauugcagauaaauaggcaagucauaguugacaaagguaauagguccgguuauucugguauuuucucuguugaaggcaaaagcugcaucaaucggugcuuuuauguggaguugauuaggggaagaaaagaggaaacugaagucuuguggaccucaaacaguauuguuguguuuuguggcaccucagguacauauggaacaggcucauggccugauggggcugaccucaaucucaugacuauauaa

SEQ ID NO: 53151 - RNA, 1410 nt, Artificial Sequence
  derived and/or modified CDS sequence (wt) from neuraminidase__InfluenzaA__AEQ49804
augaauccaaaucaaaagauaauaacgauuggcucuguuucucucaccauuuccacaauaugcuucuucaugcaaauugccaucuugauaacuacuguaacauugcauuucaagcaauaugaauucaacucccccccaaacaaccaagugaugcuaugugaaccaacaauaauagaaagaaacauaacagagauaguguaucugaccaacaccaccauagagaaggaaauaugccccaaaccagcagaauacagaaauuggucaaagccgcaaugugacauuacaggauuugcaccuuuuucuaaggacaauucgauuaggcuuuccgcugguggggacaucugggugacaagagaaccuuaugugucaugcgauccugacaaguguuaucaauuugcccuuggacagggaacaacacuaaacaacgugcauucaaauaacacaguacgugauaggaccccuuaucggacccuauugaugaaugaauuagguguuccuuuucaucuggggaccaagcaagugugcauagcaugguccagcucaaguugucacgauggaaaagcauggcugcauguuuguauaacgggggaugauaaaaaugcaacugcuagcuucauuuacaaugggaggcuuguagauaguguuguuucaugguccaaagacauccucaggacccaggagucagaaugcguuuguaucaauggaacuuguacaguaguaaugacugaugggagugcuucaggaaaagcugauacuaaaauacuauucauugaggaggggaaaaucguucauacuagcacauuaucaggaagugcucagcaugucgaggagugcucuugcuauccucgauauccuggugucagaugugucugcagagacaacuggaaaggcuccaauaggcccaucguagauauaaacauaaaggaucauagcauuguuuccaguuauguguguucaggacuuguuggagacacacccagaaaaaacgacagcuccagcaguagccauuguuuggauccuaacaaugaagaagguggucauggagugaaaggcugggccuuugaugauggaaaugacguguggaugggaagaacgaucaacgagacgucgcguuuaggguaugaaaccuucaaagucauugaaggcugguccaacccuaaguccaaauugcagauaaauaggcaagucauaguugacagagguaauagguccgguuauucugguauuuucucuguugaaggcaaaagcugcaucaaucggugcuuuuauguggaguugauuaggggaagaaaagaggaaacugaagucuuguggaccucaaacaguauuguuguguuuuguggcaccucagguacauauggaacaggcucauggccugauggggcggaccucaaucucaugccuauauaa

SEQ ID NO: 53152 - RNA, 1410 nt, Artificial Sequence
  derived and/or modified CDS sequence (wt) from neuraminidase__InfluenzaA__AEQ49805
augaauccaaaucaaaagauaauaacgauuggcucuguuucucucaccauuuccacaauaugcuucuucaugcaaauugccaucuugauaacuacuguaacauugcauuucaagcaauaugaauucaacucccccccaaacaaccaagugaugcuaugugaaccaacaauaauagaaagaaacauaacagagauaguguaucugaccaacaccaccauagagaaggaaauaugccccaaaccagcagaauacagaaauuggucaaagccgcaaugugacauuacaggauuugcaccuuuuucuaaggacaauucgauuaggcuuuccgcugguggggacaucugggugacaagagaaccuuaugugucaugcgauccugacaaguguuaucaauuugcccuuggacagggaacaacacuaaacaacgugcauucaaauaacacaguacguaauaggaccccuuaucggacccuauugaugaaugaauuagguguuccuuuucaucuggggaccaagcaagugugcauagcaugguccagcucaaguugucacgauggaaaagcauggcugcauguuuguauaacgggggaugauaaaaaugcaacugcuagcuucauuuacaaugggaggcuuguagauaguguuguuucaugguccaaagacauccucaggacccaggagucagaaugcguuuguaucaauggaacuuguacaguaguaaugacugaugggagugcuucaggaaaagcugauacuaaaauacuauucauugaggaggggaaaaucguucauacuagcacauuaucaggaagugcucagcaugucgaggagugcucuugcuauccucgauauccuggugucagaugugucugcagagacaacuggaaaggcuccaauaggcccaucguagauauaaacauaaaggaucauagcauuguuuccaguuauguguguucaggacuuguuggagacacacccagaaaaaacgacagcuccagcaguagccauuguuuggauccuaacaaugaagaagguggucauggagugaaaggcugggccuuugaugauggaaaugacguguggaugggaagaacgaucaacgagacgucgcguuuaggguaugaaaccuucaaagucauugaaggcugguccaacccuaaguccaaauugcagauaaauaggcaagucauaguugacagagguaauagguccgguuauucugguauuuucucuguugaaggcaaaagcugcaucaaucggugcuuuuauguggaguugauuaggggaagaaaagaggaaacugaagucuuguggaccucaaacaguauuguuguguuuuguggcaccucagguacauauggaacaggcucauggccugauggggcggaccucaaucucaugccuauauaa

SEQ ID NO: 53153 - RNA, 1410 nt, Artificial Sequence
  derived and/or modified CDS sequence (wt) from neuraminidase__InfluenzaA__AEQ49806
augaauccaaaucaaaagauaauaacgauuggcucuguuucucucaccauuuccacaauaugcuucuucaugcaaauugccaucuugauaacuacuguaacauugcauuucaagcaauaugaauucaacucccccccaaacaaccaagugaugcugugugaaccaacaauaauagaaagaaacauaacagagauaguguaucugaccaacaccaccauagagaaggaaauaugccccaaacuagcagaauacagaaauuggucaaaaccgcaaugugacauuacaggauuugcaccuuuuucuaaggacaauucgauuaggcuuuccgcugguggggacaucugggugacaagagaaccuuaugugucaugcgauccugacaaguguuaucaauuugcccuuggacagggaacaacacuaaacaacgugcauucaaauaacacaguacgugauaggaccccuuaucggacccuauugaugaaugaguuagguguuccuuuucaucuggggaccaagcaagugugcauagcaugguccagcucaaguugucaugauggaaaagcauggcugcauguuuguauaacgggggaugauaaaaaugcaacugcuagcuucauuuacaaugggaggcuuguagauaguguuguuucaugguccaaagaaauucucaggacccaggagucagaaugcguuuguaucaauggaacuuguacaguaguaaugacugauggaagugcuucaggaaaagcugauacuaaaauacuauucauugaggaggggaaaaucguucauacuagcacauugucaggaagugcucagcaugucgaggagugcucuugcuauccucgauauccuggugucagaugugucugcagagacaacuggaaaggcuccaauaggcccaucguagauauaaacauaaaggaucauagcauuguuuccaguuauguguguucaggacuuguuggagacacacccagaaaaaacgacagcuucagcaguagccauuguuuggauccuaacaaugaagaagguggucauggagugaaaggcugggccuuugaugauggaaaugacguguggaugggaagaacaaucaacgagacgucacgcuuaggguaugaaaccuucaaagucauugaaggcugguccaacccuaaguccaaauugcagauaaauaggcaagucauaguugacagagguaauagguccgguuauucugguauuuucucuguugaaggcaaaagcugcaucaaucggugcuuuuauguggaguugauuaggggaagaaaagaggaaacugaagucuuguggaccucaaacaguauuguuguguuuuguggcaccucggguacauauggaacaggcucauggccugauggggcggaccucaaucucaugccuauauaa

SEQ ID NO: 53154 - RNA, 1410 nt, Artificial Sequence
  derived and/or modified CDS sequence (wt) from neuraminidase__InfluenzaA__AEQ49807
augaauccaaaucaaaagauaauaacgauuggcucuguuucucucaccauuuccacaauaugcuucuucaugcaaauugccaucuugauaacuacuguaacacugcauuucaagcaauaugaauucaacucccccccaaacaaccaagugaugcugugugaaccaacaauaauagaaagaaacauaacagagauaguguaucugaccaacaccaccauagagaaggaaauaugccccaaacuagcagaauacagaaauuggucaaagccgcaaugugacauuacaggauuugcaccuuuuucuaaggacaauucgauuaggcuuuccgcugguggggacaucugggugacaagagaaccuuaugugucaugcgauccugacaaguguuaucaauuugcccuuggacagggaacaacacuaaacaaugugcauucaaauaacacaguacgugauaggaccccuuaucggacccuauugaugaaugaguuagguguuccuuuucaucuggggaccaagcaagugugcauagcaugguccagcucaaguugucacgauggaaaagcauggcugcaugucuguauaacgggggaugauaaaaaugcaacugcuagcuucauuuacaaugggaggcuuguagauaguguuguuucaugguccaaagaaauccucaggacccaggagucagaaugcguuuguaucaauggaacuuguacaguaguaaugacugaugggagugcuucaggaaaagcugauacuaaaauacuauucauugaggaggggaagaucguucauacuagcacauugucaggaagugcucaacaugucgaggagugcuccugcuauccucgauauccuggugucagaugugucugcagagacaacuggaaaggcuccaauaggcccaucguagauauaaacauaaaggaucauagcauuguuuccaguuauguguguucaggacuuguuggagacacacccagaaaaaacgacagcuccagcaguagccauuguuuggauccuaacaaugaagaagguggucauggagugaaaggcugggccuuugaugauggaaaugacguguggaugggaagaacgaucaacgagacgucacguuuaggguaugaaaccuucaaagucauugaaggcugguccaacccuaaguccaaauugcagauaaauaggcaagucauaguugacagagguaauagguccgguuauucugguauuuucucuguugaaggcaaaagcugcaucaaucggugcuuuuauguggaguugauuaggggaagaaaagaggaaacugaagucuuguggaccucaaacaguauuguuguguuuuguggcaccucagguacauauggaacaggcucauggccugauggggcggaccucaaucucaugccuauauaa

SEQ ID NO: 53155 - RNA, 1410 nt, Artificial Sequence
  derived and/or modified CDS sequence (wt) from neuraminidase__InfluenzaA__AEQ49809
augaauccaaaucaaaagauaauaacgauuggcucuguuucucucaccauuuccacaauaugcuucuucaugcaaauugccaucuugauaacuacuguaacauugcauuucaagcaauaugaauucaacucccccccaaacaaccaagugaugcugugugaaccaacaauaauagaaagaaacauaacagagauaguguaucugaccaacaccaccauagagaaggaaauaugccccaaacuagcagaauacagaaauuggucaaagccgcaaugugacauuacaggauuugcaccuuuuucuaaggacaauucgauuaggcuuuccgcugguggggacaucugggugacaagagaaccuuaugugucaugcgauccugacaaguguuaucaauuugcccuuggacagggaacaacacuaaacaacgugcauucaaauaacacaguacgugauaggaccccuuaucggacccuauugaugaaugaguuagguguuccuuuucaucuggggaccaagcaagugugcauagcaugguccagcucaaguugucacgauggaaaagcauggcugcauguuuguauaacgggggaugauaaaaaugcaacugcuagcuucauuuacaaugggaagcuuguagauaguguuguuucaugguccaaagaaauccucagaacccaggagucagaaugcguuuguaucaauggaacuuguacaguaguaaugacugaugggagugcuucaggaaaagcugauacuaaaauacuauucauugaggaggggaaaaucguucauacuagcacauugucaggaagugcucaacaugucgaggagugcuccugcuauccucgauauccuggugucagaugugucugcagagacaacuggaaaggcuccaauaggcccaucguagauauaaacauaaaggaucauagcauuguuuccaguuauguguguucaggacuuguuggagacacacccagaaaaaacgacagcuccagcaguagccauuguuuggauccuaacaaugaagaagguggucauggagugaaaggcugggccuuugaugauggaaaugacguguggaugggaagaacgaucaacgagacgucacguuuaggguaugaaaccuucaaagucauugaaggcugguccaacccuaaguccaaauugcagauaaauaggcaagucauaguugacagagguaauagguccgguuauucugguauuuucucuguugaaggcaaaagcugcaucaaucgaugcuuuuauguggaguugauuaggggaagaaaagaggaaacugaaguuuuguggaccucaaacaguauuguuguguuuuguggcaccucagguacauauggaacaggcucauggccugauggggcggaccucaaucucaugccuauauaa

SEQ ID NO: 53156 - RNA, 1410 nt, Artificial Sequence
  derived and/or modified CDS sequence (wt) from neuraminidase__InfluenzaA__AEQ49811
augaauccaaaucaaaagauaauaacgauuggcucuguuucucucaccauuuccacaauaugcuucuucaugcaaauugccaucuugauaacuacuguaacauugcauuucaagcaauaugaauucaacucccccccaaacaaccaagugaugcugugugaaccaacaauaauagaaagaaacauaacagagauaguguaucugaccaacaccaccauagagaaggaaauaugccccaaacuagcagaauacagaaauuggucaaagccgcaaugugacauuacaggauuugcaccuuuuucuaaggacaauucgauuaggcuuuccgcugguggggacaucugggugacaagagaaccuuaugugucaugcgauccugacaaguguuaucaauuugcccuuggacagggaacaacacuaaacaacgugcauucaaauaacacaguacgugauaggaccccuuaucggacccuauugaugaaugaguuagguguuccuuuucaucuggggaccaagcaagugugcauagcaugguccagcucaaguugucacgauggaaaagcauggcugcauguuuguauaacgggggaugauaaaaaugcaacugcuagcuucauuuacaaugggaagcuuguagauaguguuguuucaugguccaaagaaauccucagaacccaggagucagaaugcguuuguaucaauggaacuuguacaguaguaaugacugaugggagugcuucaggaaaagcugauacuaaaauacuauucauugaggaggggaaaaucguucauacuagcacauugucaggaagugcucagcaugucgaggagugcucuugcuauccucgauauccuggugucagaugugucugcagagacaacuggaaaggcuccaauaggcccaucguagauauaaacauaaaggaucauagcauuguuuccaguuauguguguucaggacuuguuggagacacacccagaaaaaacgacagcuccagcaguagccauuguuuggauccuaacaaugaagaagguggucauggagugaaaggcugggccuuugaugauggaaaugacguguggaugggaagaacgaucaacgagacgucacguuuaggguaugaaaccuucaaagucauugaaggcugguccaacccuaaguccaaauugcagauaaauaggcaagucauaguugacagagguaauagguccgguuauucugguauuuucucuguugaaggcaaaagcugcaucaaucgaugcuuuuauguggaguugauuaggggaagaaaagaggaaacugaaguuuuguggaccucaaacaguauuguuguguuuuguggcaccucagguacauauggaacaggcucauggccugauggggcggaccucaaucucaugccuauauaa

SEQ ID NO: 53157 - RNA, 1410 nt, Artificial Sequence
  derived and/or modified CDS sequence (wt) from neuraminidase__InfluenzaA__AEQ49812
augaauccaaaucaaaagauaauaacgauuggcucuguuucucucaccauuuccacaauaugcuucuucaugcaaauugccaucuugauaacuacuguaacauugcauuucaagcaauaugaauucaacucccccccaaacaaccaagugaugcugugugaaccaacaauaauagaaagaaacauaacagagauaguguaucugaccaacaccaccauagagaaggaaauaugccccaaacuagcagaauacagaaauuggucaaagccucaaugugacauuacaggauuugcaccuuuuucuaaggacaauucgauuaggcuuuccgcugguggggacaucugggugacaagagaaccuuaugugucaugcgauccugacaaguguuaucaauuugcccuuggacagggaacaacacuaaacaacgugcauucaaauaacacaguacgugauaggaccccuuaucggacccuauugaugaaugaguuagguguuccuuuucaucuggggaccaagcaagugugcauagcaugguccagcucaaguugucacgauggaaaagcauggcugcauguuuguauaacgggggaugauaaaaaugcaacugcuagcuucauuuacaaugggaggcuuguagauaguguuguuucaugguccaaagaaauccucaggacccaggagucagaaugcguuuguaucaauggaacuuguacaguaguaaugacugaugggagugcuucaggaaaagcugauacuaaaauacuauucauugaggaggggaaaaucguucauacuagcacauugucaggaagugcucagcaugucgaggagugcucuugcuauccucgauauccuggugucagaugugucugcagagacaacuggaaaggcuccaauaggcccaucguagauauaaacauaaaggaucauagcauuguuuccaguuauguguguucaggacuuguuggagacacacccagaaaaaaugacagcuccagcaguagccauuguuuggauccuaacaaugaagaagguggucauggagugaaaggcugggccuuugaugauggaaaugacguguggaugggaagaacgaucaacgagacgucacguuuaggguaugaaaccuucaaagucauugaaggcugguccaacccuaaguccaaauugcagauaaauaggcaagucauaguugacagagguaauagguccgguuauucugguauuuucucuguugaaggcaaaagcugcaucaaucggugcuuuuauguggaguugauuaggggaagaaaagaggaaacugaagucuuguggaccucaaacaguauuguuguguuuuguggcaccucagguacauauggaacaggcucauggccugauggggcggaccucaaucucaugccuauauaa

SEQ ID NO: 53158 - RNA, 1410 nt, Artificial Sequence
  derived and/or modified CDS sequence (wt) from neuraminidase__InfluenzaA__AEQ49813
augaauccaaaucaaaagauaauaacgauuggcucuguuucucucaccauuuccacaauaugcuucuucaugcaaauugccaucuugauaacuacuguaacacugcauuucaagcaauaugaauucaacucccccccaaacaaccaagugaugcugugugaaccaacaauaauagaaagaaacauaacagagauaguguaucugaccaacaccaccauagagaaggaaauaugccccaaacuagcagaauacagaaauuggucaaagccgcaaugugacauuacaggauuugcaccuuuuucuaaggacaauucgauuaggcuuuccgcugguggggacaucugggugacaagagaaccuuaugugucaugcgauccugacaaguguuaucaauuugcccuuggacagggaacaacacuaaacaaugugcauucaaauaacacaguacgugauaggaccccuuaucggacccuauugaugaaugaguuagguguuccuuuucaucuggggaccaagcaagugugcauagcaugguccagcucaaguugucacgauggaaaagcauggcugcaugucuguauaacgggggaugauaaaaaugcaacugcuagcuucauuuacaaugggaggcuuguagauaguguuguuucaugguccaaagaaauccucaggacccaggagucagaaugcguuuguaucaauggaacuuguacaguaguaaugacugaugggagugcuucaggaaaagcugauacuaaaauacuauucauugaggaggggaagaucguucauacuagcacauugucaggaagugcucagcaugucgaggagugcucuugcuauccucgauauccuggugucagaugugucugcagagacaacuggaaaggcuccaauaggcccaucguagauauaaacauaaaggaucauagcauuguuuccaguuauguguguucaggacuuguuggagacacacccagaaaaaacgacagcuccagcaguagccauuguuuggauccuaacaaugaagaagguggucauggagugaaaggcugggccuuugaugauggaaaugacguguggaugggaagaacgaucaacgagacgucacguuuaggguaugaaaccuucaaagucauugaaggcugguccaacccuaaguccaaauugcagauaaauaggcaagucauaguugacagagguaauagguccgguuauucugguauuuucucuguugaaggcaaaagcugcaucaaucggugcuuuuauguggaguugauuaggggaagaaaagaggaaacugaagucuuguggaccucaaacaguauuguuguguuuuguggcaccucagguacauauggaacaggcucauggccugauggggcggaccucaaucucaugccuauauaa

SEQ ID NO: 53159 - RNA, 1410 nt, Artificial Sequence; identical to SEQ ID NO: 53157
  derived and/or modified CDS sequence (wt) from neuraminidase__InfluenzaA__AEQ49815

SEQ ID NO: 53160 - RNA, 1410 nt, Artificial Sequence
  derived and/or modified CDS sequence (wt) from neuraminidase__InfluenzaA__AEQ49816
augaauccaaaccaaaagauaauaacgauuggcucuguuucccucaccauuuccacaauaugcuucuucaugcaaauugccaucuugauaacuacuguaacauugcauuucaagcaauaugaauucaacucccccccaaacaaccaagugaugcugugugaaccaacaauaauagaaagaaacauaacagagauaguguaucugaccaacaccaccauagagaaggaaauaugccccaaacuagcagaauacaggaauuggucaaagccgcaaugugacauuacaggauuugcaccuuuuucuaaggacaauucgauuaggcuuuccgcugguggggacaucugggugacaagagaaccuuaugugucaugcgauccuaacaaguguuaucaauuugcccuuggacaaggaacaacacuaaacaacgugcauucaaauaacacaguacgugauaggaccccuuaucggacccuauugaugaaugaguuagguguuccuuuucaucuggggaccaagcaagugugcauagcaugguccagcucaaguugucacgauggaaaagcauggcugcauguuuguauaacgggggacgauaaaaaugcaacugcuagcuucaucuacaaugggaggcuuguagauaguguuguuucaugguccaaagaaauccucaggacccaggagucagaaugcguuuguaucaauggaacuuguacaguaguaaugacugaugggagugcuucaggaaaagcugauacuaaaauauuauucguugaggaggggaaaaucguucauacuagcacauugucaggaagugcucaacaugucgaggagugcuccugcuauccucgauauccuggugucagaugugucugcagagacaacuggaaaggcuccaauaggcccaucguagauauaaacaugaaggaucauagcauuguuuccaguuauguguguucaggacuuguuggagacacacccagaaaaaacgacagcuccagcaguagccauuguuuugauccuaacgaugaagaagguggucauggagugaaaggcugggccuuugaugauggaaaugacguguggaugggaagaacgaucagcgagaagucacgcuuaggguaugaaaccuucaaagucauugaaggcugguccaacccuaaguccaaauugcagauaaauaggcaagucauaguugacagagguaauagguccgguuauucugguauuuucucuguugaaggcaaaagcugcaucaaucggugcuuuuauguggaguugauaaggggaagaaaagaggaaacugaaguauuguggaccucaaacaguauuguuguguuuuguggcaccucagguacauauggaacaggcucauggccugauggggcugacaucaaucucaugccuauauaa

SEQ ID NO: 53161 - RNA, 1410 nt, Artificial Sequence
  derived and/or modified CDS sequence (wt) from neuraminidase__InfluenzaA__AEQ49820
augaauccaaaccaaaagauaauaacgauuggcucuguuucccucaccauuuccacaauaugcuucuucaugcaaauugccaucuugauaacuacuguaacauugcauuucaagcaauaugaauucaacucccccccaaacaaccaagugaugcugugugaaccaacaauaauagaaagaaacauaacagagauaguguaucugaccaacaccaccauagagaaggaaauaugccccaaacuagcagaauacagaaauuggucaaagccgcaaugugacauuacaggauuugcaccuuuuucuaaggacaauucgauuaggcuuuccgcugguggggacaucugggugacaagagaaccuuaugugucaugcgauccuaacaaguguuaucaauuugcccuuggacaaggaacaacacuaaacaacgugcauucaaauaacacaguacgugauaggaccccuuaucggacccuauugaugaaugaguuagguguuccuuuucaucuggggaccaagcaagugugcauagcaugguccagcucaaguugucacgauggaaaagcauggcugcauguuuguauaacgggggacgauaaaaaugcaacugcuagcuucauuuacaaugggaggcuuguagauaguguuguuucaugguccaaagaaauccucaggacccaggagucagaaugcguuuguaucaauggaacuuguacaguaguaaugacugaugggagugcuucaggaaaagcugauacuaaaauacuauucaucgaggaggggaaaaucguucauacuagcacauugucaggaagugcucaacaugucgaggagugcuccugcuauccucgauauccuggugucagaugugucugcagagacaacuggaaaggcuccaauaggcccaucguagauauaaacaugaaggaucauagcauuguuuccaguuauguguguucaggacuuguuggagacacacccagaaaaaacgacagcuccagcaguagccauuguuuugauccuaacgaugaagaagguggucauggagugaaaggcugggccuuugaugauggaaaugauguguggaugggaagaacgaucagcgagaagucacgcuuaggguaugaaaccuucaaagucauugaaggcugguccaacccuaaguccaaauugcagauaaauaggcaagucauaguugacagagguaauagguccgguuauucugguauuuucucuguugaaggcaaaagcugcaucaaucggugcuuuuauguggaguugauaaggggaagaaaagaggaaacugaaguauuguggaccucaaacaguauuguuguguuuuguggcaccucagguacauauggaacaggcucauggccugauggggcggacaucaaucucaugccuauauaa

SEQ ID NO: 53162 - RNA, 1410 nt, Artificial Sequence; identical to SEQ ID NO: 53161
  derived and/or modified CDS sequence (wt) from neuraminidase__InfluenzaA__AEQ49821

SEQ ID NO: 53163 - RNA, 1410 nt, Artificial Sequence
  derived and/or modified CDS sequence (wt) from neuraminidase__InfluenzaA__AEQ49822
augaauccaaaccaaaagauaauaacgauuggcucuguuucccucaccauuuccacaauaugcuucuucaugcaaauugccaucuugauaaccacuguaacauugcauuucaagcaauaugaauucaacucccccccaaacaaccaagugaugcugugugaaccaacaauaauagaaagaaacauaacagagauaguguaucugaccaacaccaccauagagaaggaaauaugucccaaacuagcagaauacagaaauuggucaaagccgcaaugugacauuacaggauuugcaccuuuuucuaaggacaauucgauuaggcuuuccgcugguggggacaucugggugacaagagaaccuuaugugucaugcgauccuaacaaguguuaucaauuugcccuuggacaaggaacaacacuaaacaacgugcauucaaauaacacaguacgugauaggaccccuuaucggacccuauugaugaaugaguuagguguuccuuuucaucuggggaccaagcaagugugcauagcaugguccagcucaaguugucacgauggaaaagcauggcugcauguuuguauaacgggggacgauaaaaaugcaacugcuagcuucauuuacaaugggaggcuuguagauaguguuguuucaugguccaaagaaauccucaggacccaggagucagaaugcguuuguaucaauggaacuuguacaguaguaaugacugaugggagugcuucaggaaaagcugauacuaaaauacuauucaucgaggaggggaaaaucguucauacuagcacauugucaggaagugcucaacaugucgaggagugcuccugcuauccucgauauccuggugucagaugugucugcagagacaacuggaagggcuccaauaggcccaucguagauauaaacaugaaggaucauagcauuguuuccaguuauguguguucaggacuuguuggagacacacccagaaaaaacgacagcuccagcaguagccacuguuuugauccuaacgaugaagaagguggucauggagugaaaggcugggccuuugaugauggaaaugacguguggaugggaagaacgaucagcgagaagucacgcuuaggguaugaaaccuucaaagucauugaaggcugguccaacccuaaguccaaauugcagauaaauaggcaagucauaguugacagaggugauagguccgguuauucugguauuuucucuguugaaggcaaaagcugcaucaaucggugcuuuuauguggaguugauaaggggaaguaaagaggaaacugaaguauuguggaccucaaacaguauuguuguguuuuguggcaccucagggacauauggaacaggcucauggccugauggggcggacaucaaucucaugccuauauaa

SEQ ID NO: 53164 - RNA, 1410 nt, Artificial Sequence
  derived and/or modified CDS sequence (wt) from neuraminidase__InfluenzaA__AEQ49823
augaauccaaaccaaaagauaauaacgauuggcucuguuucccucaccauuuccacaauaugcuucuucaugcaaauugccaucuugauaacuacuguaacauugcauuucaagcaauaugaauucaacucccccccaaacaaccaagugaugcugugugaaccaacaauaauagaaagaaacauaacagagauaguguaucugaccaacaccaccauagagaaggaaauaugucccaaacuagcagaauacagaaauuggucaaagccgcaaugugacauuacaggauuugcaccuuuuucuaaggacaacucgauuaggcuuuccgcugguggggacaucugggugacaagagaaccuuaugugucaugcgauccuaacaaguguuaucaauuugcccuuggacaaggaacaacacuaaacaacgugcauucaaauaacacaguacgugauaggaccccuuaucggacccuauugaugaaugaguuagguguuccuuuucaucuggggaccaagcaggugugcauagcaugguccagcucaaguugucacgauggaaaagcauggcugcauguuuguauaacgggggacgauaaaaaugcaacugcuagcuucauuuacaaugggaggcuuguagauaguguuguuucaugguccaaagaaauccucaggacccaggagucagaaugcguuuguaucaauggaacuuguacaguaguaaugacugaugggagugcuucaggaaaagcugauacuaaaauacuauucaucgaggaggggaaaaucguucauacuagcacauugucaggaagugcucaacaugucgaggagugcuccugcuauccucgauauccuggugucagaugugucugcagagacaacuggaaaggcuccaauaggcccaucguagauauaaacaugaaggaucauagcauuguuuccaguuauguguguucaggacuuguuggagacacacccagaaaaaacgacagcuccagcaguagccauuguuuugauccuaacgaugaagaagguggucauggagugaaaggcugggccuuugaugauggaaaugacguguggaugggaagaacgaucagcgagaagucacgcuuaggguaugaaaccuucaaagucauugaaggcugguccaacccuaaguccaaauugcagauaaauaggcaagucauaguugacagaggugauagguccgguuauucugguauuuucucuguugaaggcaaaagcugcaucaaucggugcuuuuauguggaguugauaaggggaaguaaagaggaaacugaaguauuguggaccucaaacaguauuguuguguuuuguggcaccucagggacauauggaacaggcucauggccugauggggcggacaucaaucucaugccuauauaa

SEQ ID NO: 53165 - RNA, 1410 nt, Artificial Sequence
  derived and/or modified CDS sequence (wt) from neuraminidase__InfluenzaA__AEQ49824
augaauccaaaccaaaagauaauaacgauuggcucuguuucccucaccauuuccacaauaugcuucuucaugcaaauugccaucuugauaacuacuguaacauugcauuucaagcaauaugaauucaacucccccccaaacaaccaagugaugcugugugaaccaacaauaauagaaagaaacauaacagagauaguguaucugaccaacaccaccauagagaaggaaauaugccccaaacuagcggaauacagaaauuggucaaagccgcaaugugacauuacaggauuugcaccuuuuucuaaggacaauucgauuaggcuuuccgcugguggggacaucugggugacaagagaaccuuaugugucaugcgauccuaacaaguguuaucaauuugcccuuggacaaggaacaacacuaaacaacgugcauucaaauaacacaguacgugauaggaccccuuaucggacccuauugaugaaugaguuagguguuccuuuucaucuggggaccaagcaagugugcauagcaugguccagcucaaguugucacgauggaaaagcauggcugcauguuuguauaacgggggacgauaaaaaugcaacugcuagcuucauuuacaaugggaggcuuguagauaguguuguuucaugguccaaagaaauccucaggacccaggagucagaaugcguuuguaucaauggaacuuguacaguaguaaugacugaugggagugcuucaggaaaagcugauacuaaaauacuauucaucgaggaggggaaaaucguucauacuagcacauugucaggaagugcucaacaugucgaggagugcuccugcuauccucgauauccuggugucagaugugucugcagagacaacuggaaaggcuccaauaggcccaucguagauauaaacaugaaggaucauagcauuguuuccaguuauguguguucaggacuuguuggagacacacccagaaaaaacgacagcuccagcaguagccauuguuuugauccuaacgaugaagaagguggucauggagugaaaggcugggccuuugaugauggaaaugacguguggaugggaagaacgaucagcgagaagucacgcuuaggguaugaaaccuucaaagucauugaaggcugguccaacccuaaguccaaauugcagauaaauaggcaagucauaguugacagaggugauagguccgguuauucugguauuuucucuguugaaggcaaaagcugcaucaaucggugcuuuuauguggaguugauaaggggaaguaaagaggaaacugaaguauuguggaccucaaacaguauuguuguguuuuguggcaccucagggacauauggaacaggcucauggccugauggggcggacaucaaucucaugccuauauaa

SEQ ID NO: 53166 - RNA, 1410 nt, Artificial Sequence; identical to SEQ ID NO: 53165
  derived and/or modified CDS sequence (wt) from neuraminidase__InfluenzaA__AEQ49825

SEQ ID NO: 53167 - RNA, 1410 nt, Artificial Sequence; identical to SEQ ID NO: 53165
  derived and/or modified CDS sequence (wt) from neuraminidase__InfluenzaA__AEQ49826

SEQ ID NO: 53168 - RNA, 1410 nt, Artificial Sequence; identical to SEQ ID NO: 53165
  derived and/or modified CDS sequence (wt) from neuraminidase__InfluenzaA__AEQ49827

SEQ ID NO: 53169 - RNA, 1410 nt, Artificial Sequence; identical to SEQ ID NO: 53165
  derived and/or modified CDS sequence (wt) from neuraminidase__InfluenzaA__AEQ49828

SEQ ID NO: 53170 - RNA, 1410 nt, Artificial Sequence
  derived and/or modified CDS sequence (wt) from neuraminidase__InfluenzaA__AEQ49829
augaauccaaaccaaaagauaauaacgauuggcucuguuucccucaccauuuccacaauaugcuucuucaugcaaauugccaucuugauaacuacuguaacauugcauuucaagcaauaugaauucaacucccccccaaacaaccaagugaugcugugugaaccaacaauaauagaaagaaacauaacagagauaguguaucugaccaacaccaccauagagaaggaaauaugccccaaacuagcggaauacagaaauuggucaaagccgcaaugugacauuacaggauuugcaccuuuuucuaaggacaauucgauuaggcuuuccgcugguggggacaucugggugacaagagaaccuuaugugucaugcgauccuaacaaguguuaucaauuugcucuuggacaaggaacaacacuaaacaacgugcauucaaauaacacaguacgugauaggaccccuuaucggacccuauugaugaaugaguuagguguuccuuuucaucuggggaccaagcaagugugcauagcaugguccagcucaaguugucacgauggaaaagcauggcugcauguuuguauaacgggggacgauaaaaaugcaacugcuagcuucauuuacaaugggaggcuuguagauaguguuguuucaugguccaaagaaauucucaggacccaggagucagaaugcguuuguaucaauggaacuuguacaguaguaaugacugauggaagugcuuuaggaaaagcugauacuaaaauacuauucaucgaggaggggaaaaucguucauacuagcacauugucaggaagugcucaacaugucgaggagugcuccugcuauccucgauauccuggugucagaugugucugcagagacaacuggaaaggcuccaauaggcccaucguagauauaaacaugaaggaucauagcauuguuuccaguuauguguguucaggacuuguuggagacacacccagaaaaaacgacagcuccagcaguagccauuguuuugauccuaacgaugaagaagguggucauggagugaaaggcugggccuuugaugauggaaaugacguguggaugggaagaacgaucagcgagaagucacgcuuaggguaugaaaccuucaaagucauugaaggcugguccaacccuaaguccaaauugcagauaaauaggcaagucauaguugacagaggugauagguccgguuauucugguauuuucucuguugaaggcaaaagcugcaucaaucggugcuuuuauguggaguugauaaggggaaguaaagaggaaacugaaguauuguggaccucaaacaguauuguuguguuuuguggcaccucagggacauauggaacaggcucauggccugauggggcggacaucaaucucaugccuauauaa

SEQ ID NO: 53171 - RNA, 1410 nt, Artificial Sequence
  derived and/or modified CDS sequence (wt) from neuraminidase__InfluenzaA__AEQ49830
augaauccaaaccaaaagauaauaacgauuggcucuguuucccucaccauuuccacaauaugcuucuucaugcaaauugccaucuugauaacuacuguaacauugcauuucaagcaauaugaauucaacucccccccaaacaaccaagugaugcugugugaaccaacaauaauagaaagaaacauaacagagauaguguaucugaccaacaccaccauagagaaggaaauaugccccaaacuagcggaauacagaaauuggucaaagccgcaaugugacauuacaggauuugcaccuuuuucuaaggacaauucgauuaggcuuuccgcugguggggacaucugggugacaagagaaccuuaugugucaugcgauccuaacaaguguuaucaauuugcucuuggacaaggaacaacacuaaacaacgugcauucaaauaacacaguacgugauaggaccccuuaucggacccuauugaugaaugaguuagguguuccuuuucaucuggggaccaagcaagugugcauagcaugguccagcucaaguugucacgauggaaaagcauggcugcauguuuguauaacgggggacgauaaaaaugcaacugcuagcuucauuuacaaugggaggcuuguagauaguguuguuucaugguccaaagaaauccucaggacccaggagucagaaugcguuuguaucaauggaacuuguacaguaguaaugacugaugggagugcuucaggaaaagcugauacuaaaauacuauucaucgaggaggggaaaaucguucauacuagcacauugucaggaagugcucaacaugucgaggagugcuccugcuauccucgauauccuggugucagaugugucugcagagacaacuggaaaggcuccaauaggcccaucguagauauaaacaugaaggaucauagcauuguuuccaguuauguguguucaggacuuguuggagacacacccagaaaaaacgacagcuccagcaguagccauuguuuugauccuaacgaugaagaagguggucauggagugaaaggcugggccuuugaugauggaaaugacguguggaugggaagaacgaucagcgagaagucacgcuuaggguaugaaaccuucaaagucauugaaggcugguccaacccuaaguccaaauugcagauaaauaggcaagucauaguugacagaggugauagguccgguuauucugguauuuucucuguugaaggcaaaagcugcaucaaucggugcuuuuauguggaguugauaaggggaaguaaagaggaaacugaaguauuguggaccucaaacaguauuguuguguuuuguggcaccucagggacauauggaacaggcucauggccugauggggcggacaucaaucucaugccuauauaa

SEQ ID NO: 53172 - RNA, 1410 nt, Artificial Sequence; identical to SEQ ID NO: 53165
  derived and/or modified CDS sequence (wt) from neuraminidase__InfluenzaA__AEQ49831

SEQ ID NO: 53173 - RNA, 1410 nt, Artificial Sequence
  derived and/or modified CDS sequence (wt) from neuraminidase__InfluenzaA__AEQ49832
augaauccaaaccaaaagauaauaacgauuggcucuguuucccucaccauuuccacaauaugcuucuucaugcaaauugccaucuugauaacuacuguaacauugcauuucaagcaauaugaauucaacucccccccaaacaaccaagugaugcugugugaaccaacaauaauagaaagaaacauaacagagauaguguaucugaccaacaccaccauagagaaggaaauaugccccaaacuagcggaauacagaaauuggucaaagccgcaaugugacauuacaggauuugcaccuuuuucuaaggacaauucgauuaggcuuuccgcugguggggacaucugggugacaagagaaccuuaugugucaugcgauccuaacaaguguuaucaauuugcccuuggacaaggaacaacacuaaacaacgugcauucaaauaacacaguacgugauaggaccccuuaucggacccuauugaugaaugaguuagguguuccuuuucaucuggggaccaagcaagugugcauagcaugguccagcucaaguugucacgauggaaaagcauggcugcauguuuguauaacgggggacgauaaaaaugcaacugcuagcuucauuuacaaugggaggcuuguagauaguguuguuucaugguccaaagaaauccucaggacccaggagucagaaugcguuuguaucaauggaacuuguacaguaguaaugacugaugggagugcuucaggaaaagcugauacuaaaauacuauucaucgaggaggggaaaaucguucauacuagcacauugucaggaagugcucaacaugucgaggagugcuccugcuauccucgauauccuggugucagaugugucugcagagacaacuggaaaggcuccaauaggcccaucguagauauaaacaugaaggaucauagcauuguuuccaguuauguguguucaggacuuguuggagacacacccagaaaaaacgacagcuccagcaguagccauuguuuugauccuaacgaugaagaagguggucauggagugaaaggcugggccuuugaugauggaaaugacguguggaugggaagaacgaucagcgagaagucacgcuuaggguaugaaaccuucaaagucguugaaggcugguccaacccuaaguccaaauugcagauaaauaggcaagucauaguugacagaggugauagguccgguuauucugguauuuucucuguugaaggcaaaagcugcaucaaucggugcuuuuauguggaguugauaagggggaguaaagaggaaacugaaguauuguggaccucaaacaguauuguuguguuuuguggcaccucagggacauauggaacaggcucauggccugauggggcggacaucaaucucaugccuauauaa

SEQ ID NO: 53174 - RNA, 1410 nt, Artificial Sequence
  derived and/or modified CDS sequence (wt) from neuraminidase__InfluenzaA__AEQ49833
augaauccaaaucaaaagauaauaacgauuggcucuguuucucucaccauuuccacaauaugcuucuucaugcaaauugccaucuugauaacuacuguaacauugcauuucaagcaauaugaauucaacucccccccaaacaaccaagugaugcugugugaaccaacaauaauagaaagaaacauaacagagauaguguaucugaccaacaccaccauagagaaggaaauaugccccaaacuagcagaauacagaaauuggucaaagccgcaaugugacauuacaggauuugcaccuuuuucuaaggacaauucgauuaggcuuuccgcugguggggacaucugggugacaagagaaccuuaugugucaugcgauccugacaaguguuaucaauuugcccuuggacagggaacaacacuaaacaacgugcauucaaauaauacaguacgugauaggaccccuuaucggacccuauugaugaaugaguuagguguuccuuuucaucuggggaccaagcaagugugcauagcaugguccagcucaaguugucacgauggaaaagcauggcugcauguuuguauaacgggggaugauaaaaaugcaacugcuagcuucauuuacaaugggaagcuuguagauaguguuguuucaugguccaaagaaauccucaggacccaggagucagaaugcguuuguaucaauggaacuuguacaguaguaaugacugaugggagugcuucaggaaaagcugauacuaaaauacuauucauugaggaggggaaaaucguucauacuagcacauugucaggaagugcucagcaugucgaggagugcucuugcuauccucgauauccuggugucagaugugucugcagagacaacuggaaaggcuccaauaggcccaucguagauauaaacauaaaggaucauagcauuguuuccaguuauguguguucaggacuuguuggagacacacccagaaaaaacgacagcuccagcaguagccauuguuuggauccuaacaaugaagaagguggucauggagugaaaggcugggccuuugaugauggaaaugacguguggaugggaagaacgaucaacgagacgucacguuuaggguaugaaaccuucaaagucauugaaggcugguccaauccuaaguccaaauugcagauaaguaggcaagucauaguugacagagguaauagguccgguuauucugguauuuucucuguugaaggcaaaagcugcaucaaucggugcuuuuauguggaguugauuaggggaagaaaagaggaaacugaagucuuguggaccucaaacaguauuguuguguuuuguggcaccucagguacauauggaacaggcucauggccugauggggcggaccucaaucucaugccuauauaa

SEQ ID NO: 53175 - RNA, 1410 nt, Artificial Sequence
  derived and/or modified CDS sequence (wt) from neuraminidase__InfluenzaA__AEQ49835
augaauccaaaccaaaagauaauaacgauuggcucuguuucccucaccauuuccacaauaugcuucuucaugcaaauugccaucuugauaacuacuguaacauugcauuucaagcaauaugaauucaacucccccccaaacaaccaagugaugcugugugaaccaacaauaauagaaagaaacauaacagagauaguguaucugaccaacaccaccauagagaaggaaauaugccccaaacuagcagaauacagaaauuggucaaagccgcaaugugacauuacaggauuugcaccuuuuucuaaggacaauucgauuaggcuuuccgcugguggggacaucugggugacaagagaaccuuaugugucaugcgauccuaacaaguguuaucaauuugcccuuggacaaggaacaacacuaaacaacgugcauucaaauaacacaguacgugauaggaccccuuaucggacccuauugaugaaugaguuagguguuccuuuucaucuggggaccaagcaagugugcauggcaugguccagcucaaguugucacgauggaaaagcauggcugcauguuuguauaacgggggacgauaaaaaugcaacugcuagcuucauuuacaaugggaggcuuguagauaguguuguuucaugguccaaagaaauccucaggacccaggagucagaaugcguuuguaucaauggaacuuguacaguaguaaugacugaugggagugcuucaggaaaagcugauacuaaaauacuauucaucgaggaggggaaaaucguucauacuagcacauugucaggaagugcucaacaugucgaggaaugcuccugcuauccucgauauccuggugucagaugugucugcagagacaacuggaaaggcuccaauaggcccaucguagauauaaacaugaaggaucauagcauuguuuccaguuauguguguucaggacuuguuggagacacacccagaaaaaacgacagcuccagcaguagccauuguuuugauccuaacgaugaagaagguggucauggagugaaaggcugggccuuugaugauggaaaugacguguggaugggaagaacgaucagcgagaagucacgcuuaggguaugaaaccuucaaagucauugaaggcugguccaacccuaaguccaaauugcagauaaauaggcaagucauaguugacagagguaauagguccgguuauucugguauuuucucuguugaaggcaaaagcugcaucaaucggugcuuuuauguggaguugauaaggggaagaaaagaggaaacugaaguauuguggaccucaaacaguauuguuguguuuuguggcaccucagguacauauggaacaggcucauggccugauggggcggacaucaaucucaugccuauauaa

SEQ ID NO: 53176 - RNA, 1410 nt, Artificial Sequence
  derived and/or modified CDS sequence (wt) from neuraminidase__InfluenzaA__AEQ49836
augaauccaaaccaaaagauaauaacgauuggcucuguuucccucaccauuuccacaauaugcuucuucaugcaaauugccaucuugauaacuacuguaacauugcauuucaagcaauaugaauucaacucccccccaaacaaccaagugaugcugugugaaccaacaauaauagaaagaaacauaacagagauaguguaucugaccaacaccaccauagagaaggaaauaugccccaaacuagcagaauacagaaauuggucaaagccgcaaugugacauuacaggauuugcaccuuuuucuaaggacaauucgauuaggcuuuccgcugguggggacaucugggugacaagagaaccuuaugugucaugcgauccuaacaaguguuaucaauuugcccuuggacaaggaacaacacuaaacaacgugcauucaaauaacacaguacgugauaggaccccuuaucggacccuauugaugaaugaguuagguguuccuuuucaucuggggaccaagcaagugugcauggcaugguccagcucaaguugucacgauggaaaagcauggcugcauguuuguauaacgggggacgauaaaaaugcaacugcuagcuucauuuacaaugggaggcuuguagauaguguuguuucaugguccaaagaaauccucaggacccaggagucagaaugcguuuguaucaauggaacuuguacaguaguaaugacugaugggagugcuucaggaaaagcugauacuaaaauacuauucaucgaggaggggaaaaucguucauacuagcacauugucaggaagugcucaacaugucgaggagugcuccugcuauccucgauauccuggugucagaugugucugcagagacaacuggaaaggcuccaauaggcccaucguagauauaaacaugaaggaucauagcauuguuuccaguuauguguguucaggacuuguuggagacacacccagaaaaaacgacagcuccagcaguagccauuguuuugauccuaacgaugaagaagguggucauggagugaaaggcugggccuuugaugauggaaaugacguguggaugggaagaacgaucagcgagaagucacgcuuaggguaugaaaccuucaaagucauugaaggcugguccaacccuaaguccaaauugcagauaaauaggcaagucauaguugacagagguaauagguccgguuauucugguauuuucucuguugaaggcaaaagcugcaucaaucggugcuuuuauguggaguugauaaggggaagaaaagaggaaacugaaguauuguggaccucaaacaguauuguuguguuuuguggcaccucagguacauauggaacaggcucauggccugauggggcggacaucaaucucaugccuauauaa

SEQ ID NO: 53177 - RNA, 1410 nt, Artificial Sequence; identical to SEQ ID NO: 53176
  derived and/or modified CDS sequence (wt) from neuraminidase__InfluenzaA__AEQ49838

SEQ ID NO: 53178 - RNA, 1410 nt, Artificial Sequence; identical to SEQ ID NO: 53175
  derived and/or modified CDS sequence (wt) from neuraminidase__InfluenzaA__AEQ49839

SEQ ID NO: 53179 - RNA, 1410 nt, Artificial Sequence
  derived and/or modified CDS sequence (wt) from neuraminidase__InfluenzaA__AEQ49840
augaauccaaaccaaaagauaauaacgauuggcucuguuucccucaccauuuccacaauaugcuucuucaugcaaauugccaucuugauaacuacuguaacauugcauuucaagcaauaugaauucaacucccccccaaacaaccaagugaugcugugugaaccaacaauaauagaaagaaacauaacagagauaguguaucugaccaacaccaccauagagaaggaaauaugccccaaacuagcagaauacagaaauuggucaaagccgcaaugugacauuacaggauuugcaccuuuuucuaaggacaauucgauuaggcuuuccgcugguggggacaucugggugacaagagaaccuuaugugucaugcgauccuaacaaguguuaucaauuugcccuuggacaaggaacaacacuaaacaacgugcauucaaauaacacaguacgugauaggaccccuuaucggacccuauugaugaaugaguuagguguuccuuuucaucuggggaccaagcaagugugcauggcaugguccagcucaaguugucacgauggaaaagcauggcugcauguuuguauaacgggggacgauaaaaaugcaacugcuagcuucauuuacaaugggaggcuuguagauaguguuguuucaugguccaaagaaauccucaggacccaggagucagaaugcguuuguaucaauggaacuuguacaguaguaaugacugaugggagugcuucaggaaaagcugauacuaaaauacuauucaucgaggaggggaaaaucguucauacuagcacauugucaggaagugcucaacaugucgaggagugcuccugcuauccucgauauccuggugucagaugugucugcagagacaacuggaaaggcuccaauaggcccaucguagauauaaacaugaaggaucauagcauuguuuccaguuauguguguucaggacuuguuggagacacacccagaaaaaacgacagcuccagcaguagccauuguuuugauccuaacgaugaagaagguggucauggagugaaaggcugggccuuugaugauggaaaugacguguggaugggaagaacgaucagcgagaagucacgcuuaggguaugaaaccuucaaagucauugaaggcugguccaaccauaaguccaaauugcagauaaauaggcaagucauaguugacagagguaauagguccgguuauucugguauuuucucuguugaaggcaaaagcugcaucaaucggugcuuuuauguggaguugauaaggggaagaaaagaggaaacugaaguauuguggaccucaaacaguauuguuguguuuuguggcaccucagguacauauggaacaggcucauggccugauggggcggacaucaaucucaugccuauauaa

SEQ ID NO: 53180 - RNA, 1410 nt, Artificial Sequence; identical to SEQ ID NO: 53175
  derived and/or modified CDS sequence (wt) from neuraminidase__InfluenzaA__AEQ49841

SEQ ID NO: 53181 - RNA, 1410 nt, Artificial Sequence; identical to SEQ ID NO: 53175
  derived and/or modified CDS sequence (wt) from neuraminidase__InfluenzaA__AEQ49842

SEQ ID NO: 53182 - RNA, 1410 nt, Artificial Sequence; identical to SEQ ID NO: 53175
  derived and/or modified CDS sequence (wt) from neuraminidase__InfluenzaA__AEQ49843

SEQ ID NO: 53183 - RNA, 1410 nt, Artificial Sequence; identical to SEQ ID NO: 53165
  derived and/or modified CDS sequence (wt) from neuraminidase__InfluenzaA__AEQ49844

SEQ ID NO: 53184 - RNA, 1410 nt, Artificial Sequence
  derived and/or modified CDS sequence (wt) from neuraminidase__InfluenzaA__AEQ49845
augaauccaaaccaaaagauaauaacgauuggcucuguuucccucaccauuuccacaauaugcuucuucaugcaaauugccaucuugauaacuacuguaacauugcauuucaagcaauaugaauucaacucccccccaaacaaccaagugaugcugugugaaccaacaauaauagaaagaaacauaacagagauaguguaucugaccaacaccaccauagagagggaaauaugccccaaacuagcagaauacagaaauuggucaaagccgcaaugugacauuacaggauuugcaccuuuuucuaaggacaauucgauuaggcuuuccgcugguggggacaucugggugacaagagaaccuuaugugucaugcgauccuaacaaguguuaucaauuugcccuuggacaaggaacaacacuaaacaacgugcauucaaauaacacaguacgugauaggaccccuuaucggacccuauugaugaaugaguuagguguuccuuuucaucuggggaccaagcaagugugcauggcaugguccagcucaaguugucacgauggaaaagcauggcugcauguuuguauaacgggggacgauaaaaaugcaacugcuagcuucauuuacaaugggaggcuuguagauaguguuguuucaugguccaaagaaauccucaggacccaggagucagaaugcguuuguaucaauggaacuuguacaguaguaaugacugaugggagugcuucaggaaaagcugauacuaaaauacuauucaucgaggaggggaaaaucguucauacuagcacauugucaggaagugcucaacaugucgaggagugcuccugcuauccucgauauccuggugucagaugugucugcagagacaacuggaaaggcuccaauaggcccaucguagauauaaacaugaaggaucauagcauuguuuccaguuauguguguucaggacuuguuggagacacacccagaaaaaacgacagcuccagcaguagccauuguuuugauccuaacgaugaagaagguggucauggagugaaaggcugggccuuugaugauggaaaugacguguggaugggaagaacgaucagcgagaagucacgcuuaggguaugaaaccuucaaagucauugaaggcugguccaacccuaaguccaaauugcagauaaauaggcaagucauaguugacagagguaauagguccgguuauucugguauuuucucuguugaaggcaaaagcugcaucaaucggugcuuuuauguggaguugauaaggggaagaaaagaggaaacugaaguauuguggaccucaaacaguauuguuguguuuuguggcaccucagguacauauggaacaggcucauggccugauggggcggacaucaaucucaugccuauauaa

SEQ ID NO: 53185 - RNA, 1410 nt, Artificial Sequence
  derived and/or modified CDS sequence (wt) from neuraminidase__InfluenzaA__AEQ49846
augaauccaaaccaaaagauaauaacgauuggcucuguuucccucaccauuuccacaauaugcuucuucaugcaaauugccaucuugauaacuacuguaacauugcauuucaagcaauaugaauucaacucccccccaaacaaccaagugaugcugugugaaccaacaauaauagaaagaaacauaacagagauaguguaucugaccaacaccaccauagagaaggaaauaugccccaaacuagcagaauacagaaauuggucaaagccgcaaugugacauuacaggauuugcaccuuuuucuaaggacaauucgauuaggcuuuccgcugguggggacaucugggugacaagagaaccuuaugugucaugcgauccuaacaaguguuaucaauuugcccuuggacaaggaacaacacuaaacaacgugcauucaaauaacacaguacgugauaggaccccuuaucggacccuauugaugaaugaguuagguguuccuuuucaucuggggaccaagcaagugugcauggcaugguccagcucaaguugucacgauggaaaagcauggcugcauguuuguauaacgggggacgauaaaaaugcaacugcuagcuucauuuacaaugggaggcuuguagauaguguuguuucaugguccaaagaaauccucaggacccaggagucagaaugcguuuguaucaauggaacuuguacaguaguaaugacugaugggagugcuucaggaaaagcugauacuaaaauacuauucaucgaggaggggaaaaucguucauacuagcacauugucaggaagugcucaacaugucgaggagugcuccugcuauccucgauauccuggugucagaugugucugcagagacaacuggaaaggcuccaauaggcccaucguagauauaaacuugaaggaucauagcauuguuuccaguuauguguguucaggacuuguuggagacacacccagaaaaaacgacagcuccagcaguagccauuguuuugauccuaacgaugaagaagguggucauggagugaaaggcugggccuuugaugauggaaaugacguguggaugggaagaacgaucagcgagaagucacgcuuaggguaugaaaccuucaaagucauugaaggcugguccaacccuaaguccaaauugcagauaaauaggcaagucauaguugacagagguaauagguccgguuauucugguauuuucucuguugaaggcaaaagcugcaucaaucggugcuuuuauguggaguugauaaggggaagaaaagaggaaacugaaguauuguggaccucaaacaguauuguuguguuuuguggcaccucagguacauauggaacaggcucauggccugauggggcggacaucaaucucaugccuauauaa

SEQ ID NO: 53186 - RNA, 1410 nt, Artificial Sequence
  derived and/or modified CDS sequence (wt) from neuraminidase__InfluenzaA__AEQ49850
augaauccaaaccaaaagauaauaacgauuggcucuguuucccucaccauuuccacaauaugcuucuucaugcaaauugccaucuugauaacuacuguaacauugcauuucaagcaauaugaauucaacucccccccaaacaaccaagugaugcugugugaaccaacaauaauagaaagaaacauaacagagauaguguaucugaccaacaccaccauagagaaggaaauaugccccaaacuagcagaauacagaaauuggucaaagccgcaaugugacauuacaggauuugcaccuuuuucuaaggacaauucgauuaggcuuuccgcugguggggacaucugggugacaagagaaccuuaugugucaugcgauccuaacaaguguuaucaauuugcccuuggacaaggaacaacacuaaacaacgugcauucaaauaacacaguacgugauaggaccccuuaucggacccuauugaugaaugaguuagguguuccuuuucaucuggggaccaagcaagugugcauagcaugguccagcucaaguugucacgauggaaaagcauggcugcauguuuguauaacgggggacgauaaaaaugcaacugcuagcuucauuuacaaugggaggcuuguagauaguguuguuucaugguccaaagaaauccucaggacccaagagucagaaugcguuuguaucaauggaacuuguacaguaguaaugacugaugggagugcuucaggaaaagcugauacuaaaauacuauucaucgaggaggggaaaaucguucauacuagcacauugucaggaagugcucaacaugucgaggagugcuccugcuauccucgauauccuggugucagaugugucugcagagacaacuggaaaggcuccaauaggcccaucguagauauaaacaugaaggaucauagcauuguuuccaguuauguguguucaggacuuguuggagacacacccagaaaaaacgacagcuccagcaguagccauuguuuugauccuaacgaugaagaagguggucauggagugaaaggcugggccuuugaugauggaaaugacguguggaugggaagaacgaucagcgagaagucacgcuuaggguaugaaaccuucaaagucauugaaggcugguccaacccuaaguccaaauugcagauaaauaggcaagucauaguugacagaggugauagguccgguuauucugguauuuucucuguugaaggcaaaagcugcaucaaucggugcuuuuauguggaguugauaaggggaaguaaagaggaaacugaaguauuguggaccucaaacaguauuguuguguuuuguggcaccucagggacauauggaacaggcucauggccugauggggcggacaucaagaucaugccuauauaa

SEQ ID NO: 53187 - RNA, 1410 nt, Artificial Sequence
  derived and/or modified CDS sequence (wt) from neuraminidase__InfluenzaA__AEQ49851
augaauccaaaucaaaagauaauaacgauuggcucuguuucucucaccauuuccacaauaugcuucuucaugcaaauugccauccugauaacuacuguaacauugcauuucaagcaguaugaauucaacucccccccaaacaaccaagugaugcugugugaaccaacaauaauggaaagaaacauaacagagauaguguaucugaccaacaccaccauagagaaggaaauaugccccaaacuagcagaauacagaaauuggucaaagccgcaaugugacauuacaggauuugcaccuuuuucuaaggacaauucgauuaggcuuuccgcugguggggacaucugggugacaagagaaccuuaugugucaugcgauccugacaaguguuaucaauuugcccuuggacagggaacaacacuaaacaacgugcauucaaauaacacaguacgugauaggaccccuuaucggacccuauugaugaaugaguuagguguuccuuuucaucuggggaccaagcaagugugcauagcaugguccagcucaaguugucacgauggaaaagcauggcugcauguuuguauaacgggggaugauaaaaaugcaacugcuagcuucauuuacaaugggaagcuuguagauaguguugucucaugguccaaagaaauccucaggacccaggagucagaaugcguuuguaucaauggaacuuguacaguaguaaugacugaugggagugcuucaggaaaagcugauacuaaaauacuauucauugaggaggggaaaaucguucauacuagcacauugucaggaagugcucagcaugucgaggagugcucuugcuauccucgauauccuggugucagaugugucugcagagacaacuggaaaggcuccaauaggcccaucguagacauaaacauaaaggaucauagcauuguuuccaguuauguguguucaggacuuguuggagacacacccagaaaaaacgacagcuccagcaguagccauuguuuggauccuaacaaugaagaagguggucauggagugaaaggcugggccuuugaugauggaaaugacguguggaugggaagaacgaucaacgagacgucacguuuaggguaugaaaccuucaaagucauugaaggcugguccaacccuaaguccaaauugcagauaaauaggcaagucauaguugacagagguaauagguccgguuauucugguauuuucucuguugaaggcaaaagcugcaucaaucggugcuuuuauguggaguugauuaggggaagaaaagaggaaacugaagucuuguggaccucaaacaguauuguuguguuuuguggcaccucagguacauauggaacaggcucauggccugauggggcggaccucaaucucaugccuauauaa

SEQ ID NO: 53188 - RNA, 1410 nt, Artificial Sequence
  derived and/or modified CDS sequence (wt) from neuraminidase__InfluenzaA__AEQ49852
augaauccaaaucaaaagauaauaacgauuggcucuguuucucucaccauuuccacaauaugcuucuucaugcaaauugccaucuugauaacuacuguaacauugcauuucaagcaauaugaauucaacucccccccaaacaaccaagugaugcugugugaaccaacaauaauagaaagaaacauaacagagauaguguaucugaccaacaccaccauagagaaggaaauaugccccaaacuagcagaauacagaaauuggucaaagccgcaaugugacauuacaggauuugcaccuuuuucuaaggacaauucgauuaggcuuuccgcugguggggacaucugggugacaagagaaccuuaugugucaugcgauccugauaaguguuaucaauuugcccuuggacagggaacaacacuaaacaacgugcauucaaauaacacaguacgugauaggaccccuuaucggacccuauugaugaaugaguuagguguuccuuuucaucuggggaccaagcaagugugcauagcaugguccagcucaaguugucacgauggaaaagcauggcugcauguuuguauaacgggggaugauaaaaaugcaacugcuagcuucauuuacaaugggaagcuuguagauaguguugucucaugguccaaagaaauccucaggacccaggagucagaaugcguuuguaucaaugggacuuguacaguaguaaugacugaugggagugcuucaggaaaagcugauacuaaaauacuauucauugaggaggggaaaaucguucauacuagcacauugucaggaagugcucagcaugucgaggagugcucuugcuauccucgauauccuggugucagaugugucugcagagacaacuggaaaggcuccaauaggcccaucguagauauaaacauaaaggaucauagcauuguuuccaguuauguguguucaggacuuguuggagacacacccagaaaaaacgacagcuccagcaguagccauuguuuggauccuaacaaugaagaagguggucauggagugaaaggcugggccuuugaugauggaaaugacguguggaugggaagaacgaucaacgagacgucacguuuaggguaugaaaccuucaaagucauugaaggcugguccaacccuaaguccaaauugcagauaaauaggcaagucauaguugacagagguaauagguccgguuauucugguauuuucucuguugaaggcaaaagcugcaucaaucggugcuuuuauguggaguugauuaggggaagaaaagaggaaacugaagucuuguggaccucaaacaguauuguuguguuuuguggcaccucagguacauauggaacaggcucauggccugauggggcggaccucaaucucaugccuauauaa

SEQ ID NO: 53189 - RNA, 1410 nt, Artificial Sequence
  derived and/or modified CDS sequence (wt) from neuraminidase__InfluenzaA__AEQ49969
augaauccaaaccaaaagauaauaacgauuggcucuguuucccucaccauuuccacaauaugcuucuucaugcaaauugccaucuugauaacuacuguaacauugcauuucaagcaauaugaauucaacucccccccaaacaaccaagugaugcugugugaaccaacaauaauagaaagaaacauaacagagauaguguaucugaccaacaccaccauagagaaggaaauaugccccaaacuagcagaauacagaaauuggucaaagccgcaaugugacauuacaggauuugcaccuuuuucuaaggacaauucgauuaggcuuuccgcugguggggacaucugggugacaagagaaccuuaugugucaugcgauccuaacaaguguuaucaauuugcccuuggacaaggaacaacacuaaacaacgugcauucaaauaacacaguacgugauaggaccccuuaucggacccuauugaugaaugaguuagguguuccuuuucaucuggggaccaagcaagugugcauagcaugguccagcucaaguugucacgauggaaaagcauggcugcauguuuguauaacgggggacgauaaaaaugcaacugcuagcuucauuuacaaugggaggcuuguagauaguguuguuucaugguccaaagaaauccucaggacccaggagucagaaugcguuuguaucaauggaacuuguacaguaguaaugacugaugggagugcuucaggaaaagcugauacuaaaauacuauucaucgaagaggggaaaaucguucauacuagcacacugucaggaagugcucaacaugucgaggagugcuccugcuauccucgauauccuggugucagaugugucugcagagacaacuggaaaggcuccaauaggcccaucguagauauaaacaugaaggaucauagcauuguuuccaguuauguguguucaggacuuguuggagacacacccagaaaaaacgacagcuccagcaguagccauuguuuugauccuaacgaugaagaagguggucauggagugaaaggcugggccuuugaugauggaaaugacguguggaugggaagaacgaucagcgagaagucacgcuuaggguaugaaaccuucaaagucauugaaggcugguccaacccuaaguccaaauugcagauaaauaggcaagucauaguugacagaggugauagguccgguuauucugguauuuucucuguugaaggcaaaagcugcaucaaucggugcuuuuauguggaguugauaaggggaaguaaagaggaaacugaaguauuguggaccucaaacaguauuguuguguuuuguggcaccucagggacauauggaacaggcucauggccugauggggcggacaucaaucucaugccuauauaa

SEQ ID NO: 53190 - RNA, 1410 nt, Artificial Sequence
  derived and/or modified CDS sequence (wt) from neuraminidase__InfluenzaA__AEQ49970
augaauccaaaucaaaagauaauaacgauuggcucuguuucucucaccauuuccacaauaugcuucuucaugcaaauugccauccugauaacuacuguaacauugcauuucaagcaguaugaauucaacucccccccaaacaaccaagugaugcugugugaaccaacaauaauagaaagaaacauaacagagauaguguaucugaccaacaccaccauagagaaggaaauaugccccaaacuagcagaauacagaaauuggucaaagccgcaaugugacauuacaggauuugcaccuuuuucuaaggacaauucgauuaggcuuuccgcugguggggacaucugggugacaagagaaccuuaugugucaugcgauccugacaaguguuaucaauuugcccuuggacagggaacaacacuaaacaacgugcauucaaauaacacaguacgugauaggaccccuuaucggacccuauugaugaaugaguuagguguuccuuuucaucuggggaccaagcaagugugcauagcaugguccagcucaaguugucacgauggaaaagcauggcugcauguuuguauaacgggggaugauaaaaaugcaacugcuagcuucauuuacaaugggaagcuuguagauaguguugucucaugguccaaagaaauccucaggacccaggagucagaaugcguuuguaucaauggaacuuguacaguaguaaugacugaugggagugcuucaggaaaagcugauacuaaaauacuauucauugaggaggggaaaaucguucauacuagcacauugucaggaagugcucagcaugucgaggagugcucuugcuauccucgauauccuggugucagaugugucugcagagacaacuggaaaggcuccaauaggcccaucguagacauaaacauaaaggaucauagcauuguuuccaguuauguguguucaggacuuguuggagacacacccagaaaaaacgacagcuccagcaguagccauuguuuggauccuaacaaugaagaagguggucauggagugaaaggcugggccuuugaugauggaaaugacguguggaugggaagaacgaucaacgagacgucacguuuaggguaugaaaccuucaaagucauugaaggcugguccaacccuaaguccaaauugcagauaaauaggcaagucauaguugacagagguaauagguccgguuauucugguauuuucucuguugaaggcaaaagcugcaucaaucggugcuuuuauguggaguugauuaggggaagaaaagaggaaacugaagucuuguggaccucaaacaguauuguuguguuuuguggcaccucagguacauauggaacaggcucauggccugauggggcggaccucaaucucaugccuauauaa

SEQ ID NO: 53191 - RNA, 1410 nt, Artificial Sequence
  derived and/or modified CDS sequence (wt) from neuraminidase__InfluenzaA__AEQ54954
augaauccaaaucaaaagauaauaacgauuggcucuguuucucucaccauuuccacaauaugcuucuucaugcaaauugccaucuugauaacuacuguaacauugcauuucaagcaauaugaauucaacucccccccaaacaaccaagugaugcugugugaaccaacaauaauagaaagaaacauaacagagauaguguaucugaccaacaccaccauagagaaggaaauaugccccaaacuagcagaauacagaaauuggucaaagccgcaaugugacauuacaggauuugcaccuuuuucuaaggacaauucgauuaggcuuuccgcugguggggacaucugggugacaagagaaccuuaugugucaugcgauccugacaaguguuaucaauuugcccuuggacagggaacaacacuaaacaacgugcauucaaauaacacaguacgugauaggaccccuuaucggacccuauugaugaaugaguuagguguuccuuuucaucuggggaccaagcaagugugcauagcaugguccagcucaaguugucacgauggaaaagcauggcugcauguuuguauaacgggggaugauaaaaaugcaacugcuagcuucauuuacaaugggaagcuuguagauaguguuguuucaugguccaaagaaauccucaggacccaggagucagaaugcgucuguaucaauggaacuuguacaguaguaaugacugaugggagugcuucaggaaaagcugauacuaaaauacuauucauugaggaggggaaaaucguucauacuagcacauugucaggaagugcucagcaugucgaggagugcucuugcuauccucgauauccuggugucagaugugucugcagagacaacuggaaaggcuccaauaggcccaucguagauauaaacauaaaggaucauagcauuguuuccaguuauguguguucaggacuuguuggagacacacccagaaaaaacgacagcuccagcaguagccauuguuuggauccuaacaaugaagaagguggucauggagugaaaggcugggccuuugaugauggaaaugacguguggaugggaagaacgaucagcgagacgucacguuuaggguaugaaaccuucaaagucauugaaggcugguccaacccuaaguccaaauugcagauaaauaggcaagucauaguugacagagguaauagguccgguuauucugguauuuucucuguugaaggcaaaagcugcaucaaucggugcuuuuauguggaguugauuaggggaagaaaggaggaaacugaagucuuguggaccucaaacaguauuguuguguuuuguggcaccucagguacauauggaacaggcucauggccugauggggcggaccucaaucucaugccuauauaa

SEQ ID NO: 53192 - RNA, 1410 nt, Artificial Sequence
  derived and/or modified CDS sequence (wt) from neuraminidase__InfluenzaA__AER08645
augaauccaaaucaaaagauaauaacgauuggcucuguuucucucaccauuuccacaauaugcuucuucaugcaaauugccaucuugauaacuacuguaacauugcauuucaagcaauacgaauucaacucccccccaaacaaccaagugaugcugugugaaccaacaauaauagaaagaaacauaacagagauaguguaucugaccaacaccaccauagagaaggaaauaugccccaaacuagcagaauacagaaauuggucaaagccgcaaugugacauuacaggguuugcaccuuuuucuaaggacaauucgauuaggcuuuccgcugguggggacaucugggugacaagagaaccuuaugugucaugcgauccugacaaguguuaucaauuugcccuuggacagggaacaacacuaaacaacguacauucaaauaacacaguacgugauaggaccccuuaucggacccuauugaugaaugaguuagguguuccuuuucaucuggggaccaagcaagugugcauagcaugguccagcucaaguugucacgauggaaaagcauggcugcauguuuguauaacgggggaugauaaaaaugcaacugcuagcuucauuuacaaugggaggcuuguagauaguguuguuucaugguccaaagaaauccucaggacccaggagucagaaugcguuuguaucaauggaacuuguacaguaguaaugacugaugggagugcuucaggaaaagcugauacuaaaauauuauucauugaggaggggaaaaucguucauacuagcacauugucaggaagugcucagcaugucgaggagugcuccugcuauccucgauauccuggugucagaugugucugcagagacaacuggaaaggauccaauaggcccaucguagauauaaacauaaaggaucauagcauugucuccaguuauguguguucaggacuuguuggagacacacccagaaaaaacgacagcuccagcaguagccauuguuuggauccuaacaaugaggaagguggucauggggugaaaggcugggccuuugaugauggaaaugacguuuggaugggaagaacgaucagcgagaagucacgcuuaggguaugaaaccuucaaagucauugaaggcugguccaacccuaaguccaaauugcagauaaauaggcaagucauaguugacagagguaauagguccgguuauucugguauuuucucuguugaaggcaaaagcugcaucaaucggugcuuuuauguggaguugauaaggggaagaaaagaggaaacugaagucuuguggaccucaaacaguauuguuguguuuuguggcaccucagguacauauggaacaggcucauggccugauggggcggacaucaaucucaugccuauauaa

SEQ ID NO: 53193 - RNA, 1410 nt, Artificial Sequence
  derived and/or modified CDS sequence (wt) from neuraminidase__InfluenzaA__AER08649
augaauccaaaucaaaagauaauaacgauuggcucuguuucucucaccauuuccacaauaugcuucuucaugcaaauugccaucuugauaacuacuguaacauugcauuucaagcaauaugaauucaacucccccccaaacaaccaagugaugcugugugaaccaacaauaauagaaagaaacauaacagagauaguguaucugaccaacaccaccauagagaaggaaauaugccccaaacuagcagaauacagaaauuggucaaagccgcaaugugacauuacaggguuugcaccuuuuucuaaggacaauucgauuaggcuuuccgcugguggggacaucugggugacaagagaaccuuaugugucaugcgauccugacaaguguuaucaauuugcccuuggacagggaacaacacuaaacaacguacauucaaauaacacaguacgugauaggaccccuuaucggacccuauugaugaaugaguuagguguuccuuuucaucuggggaccaagcaagugugcauagcaugguccagcucaaguugucacgauggaaaagcauggcugcauguuuguauaacgggggaugauaaaaaugcaacugcuagcuucauuuacaaugggaggcuuguagauaguguuguuucaugguccaaagaaauccucaggacccaggagucagaaugcguuuguaucaauggaacuuguacaguaguaaugacugaugggagugcuucaggaaaagcugauacuaaaauacuauucauugaggaggggaaacucguucauacaagcacauugucaggaagugcucagcaugucgaggagugcuccugcuauccucgauauccuggugucagaugugucugcagagacaacuggaaaggauccaauaggcccaucguagauauaaacauaaaggaucauagcauugucuccaguuauguguguucaggacuuguuggagacacacccagaaaaaacgacagcuccagcaguagccauuguuuggauccuaacaaugaggaagguggucauggggugaaaggcugggccuuugaugauggaaaugacguguggaugggaagaacgaucagcgagaagucacgcuuaggguaugaaaccuucaaagucauugaaggcugguccaacccuaaguccaaauugcagauaaauaggcaagucauaguugacagagguaauagguccgguuauucugguauuuucucuguugaaggcaaaagcugcaucaaucggugcuuuuauguggaguugauaaggggaagaaaagaggaaacugaagucuuguggaccucaaacaguauuguuguguuuuguggcaccucagguacauauggaacaggcucauggccugauggggcggacaucaaucucaugccuauauaa

SEQ ID NO: 53194 - RNA, 1410 nt, Artificial Sequence
  derived and/or modified CDS sequence (wt) from neuraminidase__InfluenzaA__AER08657
augaauccaaaucaaaagauaauaacgauuggcucuguuucucucaccauuuccacaguaugcuucuucaugcaaauugccaucuugauaacuacuguaacauugcauuucaagcaauaugaauucaacucccccccaaacaaccaagugaugcugugugaaccaacaauaauagaaagaaacauaacagagauaguguaucugaccaacaccaccauagagaaggaaaugugccccaaacuagcagaauacagaaauuggucaaagccgcaaugugacauuacaggguuugcaccuuuuucuaaggacaauucgauuaggcuuuccgcugguggggacaucugggugacaagagaaccuuaugugucaugcgauccugacaaguguuaucaauuugcccuuggacagggaacaacacuaaacaacguacauucaaauaacacaguacgugauaggaccccuuaucggacccuauugaugaaugaguuagguguuccuuuucaucuggggaccaagcaagugugcauagcaugguccagcucaaguugucacgauggaaaagcauggcugcauguuuguauaacgggggaugauaaaaaugcaacugcuagcuucauuuacaaugggaggcuuguagauaguguuguuucaugguccaaagaaauccucaggacccaggagucagaaugcguuuguaucaauggaacuuguacaguaguaaugacugaugggagugcuucaggaaaagcugauacuaaaauacuauucauugaggaggggaaaaucguucauacuagcacauugucaggaagugcucagcaugucgaggagugcuccugcuauccucgauauccuggugucagaugugucugcagagacaacuggaaaggauccaauaggcccaucguagauauaaacauaaaggaucauagcauugucuccaguuauguguguucaggacuuguuggagacacacccagaaaaaacgacagcuccagcaguagccauuguuuggauccuaacaaugaggaagguggucauggggugaaaggcugggccuuugaugauggaaaugacguguggaugggaagaacgaucagcgagaagucacgcuuaggguaugaaaccuucaaagucauugaaggcugguccaacccuaaguccaaauugcagauaaauaggcaagucauaguugacagagguaauagguccgguuauucugguauuuucucuguugaaggcaaaagcugcaucaaucggugcuuuuauguggaguugauaaggggaagaaaagaggaaacugaagucuuguggaccucaaacaguauuguuguguuuuguggcaccucagguacauauggaacaggcucauggccugauggggcggacaucaaucucaugccuauauaa

SEQ ID NO: 53195 - RNA, 1410 nt, Artificial Sequence
  derived and/or modified CDS sequence (wt) from neuraminidase__InfluenzaA__AER08659
augaauccaaaucaaaagauaauaacgauuggcucuguuucucucaccauuuccacaauaugcuucuucaugcaaauugccaucuugauaacuacuguaacauugcauuucaagcaauaugaauucaacucccccccaaacaaccaagugaugcugugugaaccaacaauaauagaaagaaacauaacagagauaguguaucugaccaacaccaccauagagaaggaaauaugccccaaacuagcagaauacagaaauuggucaaagccgcaaugugacauuacaggguuugcaccuuuuucuaaggacaauucgauuaggcuuuccgcugguggggacaucugggugacaagagaaccuuaugugucaugcgauccugacaaguguuaucaauuugcccuuggacagggaacaacacuaaacaacguacauucaaauaacacaguacgugauaggaccccuuaucggacccuauugaugaaugaguuagguguuccuuuucaucuggggaccaagcaagugugcauagcaugguccagcucaaguugucacgauggaaaagcauggcugcauguuuguauaacgggggaugauaaaaaugcaacugcuagcuucauuuacaaugggaggcuuguagauaguguuguuucaugguccaaagaaauccucaggacccaggagucagaaugcguuuguaucaauggaacuuguacaguaguaaugacugaugggagugcuucaggaaaagcugauacuaaaauacuauucauugaggaggggaaaaucguucauacuagcacauugucaggaagugcucagcaugucgaggagugcuccugcuauccucgauauccuggugucagaugugucugcagagacaacuggaaaggauccaauaggcccaucguagauauaaacauaaaggaucauagcauugucuccaguuauguguguucaggacuuguuggagacacacccagaaaaaacgacagcuccagcaguagccauuguuuggauccuaacaaugaggaagguggucauggggugaaaggcugggccuuugaugauggaaaugacguguggaugggaagaacgaucagcgagaagucacgcuuaggguaugaaaccuucaaagucauugaaggcugguccaacccuaaguccaaauugcagauaaauaggcaagucauaguugacagagguaauagguccgguuauucugguauuuucucuguugaaggcaaaagcugcaucaaucggugcuuuuauguggaguugauaaggggaagaaaagaggaaacugaagucuuguggaccucaaacaguauuguuguguuuuguggcaccucagguacauauggaacaggcucauggccugauggagcggacaucaaucucaugccuauauaa

SEQ ID NO: 53196 - RNA, 1410 nt, Artificial Sequence
  derived and/or modified CDS sequence (wt) from neuraminidase__InfluenzaA__AER08661
augaauccaaaucaaaagauaauaacgauuggcucuguuucucucaccauuuccacaauaugcuucuucaugcaaauugccaucuugauaacuacuguaacauugcauuucaagcaauaugaauucaacucccccccaaacaaccaagugaugcugugugaaccaacaauaauagaaagaaacauaacagagauaguguaucugaccaacaccaccauagagaaggaaauaugccccaaacuagcagaauacagaaauuggucaaagccgcaaugugacauuacaggauuugcaccuuuuucuaaggacaauucgauuaggcuuuccgcugguggggacaucugggugacaagagaaccuuaugugucaugcgauccugacaaguguuaucaauuugcccuuggacagggaacaacacuaaacaacgugcauucaaauaacacaguacgugauaggaccccuuaucggacccuauugaugaaugaguuagguguuccuuuucaucuggggaccaagcaagugugcauagcaugguccagcucaaguugucacgauggaaaagcauggcugcauguuuguauaacgggggaugauaaaaaugcaacugcuagcuucauuuacaaugggaggcuuguagauaguguuguuucaugguccaaagaaauccucaggacccaggagucagaaugcguuuguaucaauggaacuuguacaguaguaaugacugaugggagugcuucaggaaaagcugauacuaaaauacuauucauugaggaggggaaaaucguucauacuagcacauugucaggaagugcucagcaugucgaggagugcucuugcuauccucgauauccuggugucagaugugucugcagagacaacuggaaaggcuccaauaggcccaucguagauauaaacauaaaggaucauagcauuguuuccaguuauguguguucaggacuuguuggagacacacccagaaaaaacgacagcuccagcaguagccauuguuuggauccuaacaaugaagaaggugaucauggagugaaaggcugggccuuugaugauggaaaugacguguggaugggaagaacgaucaacgagacgucacgcuuaggguaugaaaccuucaaaguaauugaaggcugguccaacccuaaguccaaauugcagauaaauaggcaagucauaguugacagagguaauagguccgguuauucugguauuuucucuguugaaggcaaaagcugcaucaaucggugcuuuuauguggaguugauuaggggaagaaaagaggaaacugaagucuuguggaccucaaacaguauuguuguguuuuguggcaccucagguacauauggaacaggcucauggccugauggggcggaccucaaucucaugccuauauaa

SEQ ID NO: 53197 - RNA, 1410 nt, Artificial Sequence
  derived and/or modified CDS sequence (wt) from neuraminidase__InfluenzaA__AER08663
augaauccaaaucaaaagauaauaacgauuggcucuguuucucucaccauuuccacaauaugcuucuucaugcaaauugccaucuugauaacuacuguaacauugcauuucaagcaauaugaauucaacucccccccaaacaaccaagugaugcugugugaaccaacaauaauagaaagaaacauaacagagauaguguaucugaccaacaccaccauagagaaggaaauaugccccaaacuagcagaauacagaaauuggucaaaaccgcagugugacauuacaggauuugcaccuuuuucuaaggacaauucgauuaggcuuuccgcugguggggacaucugggugacaagagaaccuuaugugucaugcgauccugacaaguguuaucaauuugcccuuggacagggaacaacacuaaacaacgugcauucaaauaacacaguacgugauaggaccccuuaucggacccuauugaugaaugaguuagguguuccuuuucaucuggggaccaagcaagugugcauagcaugguccagcucaaguugucacgauggaaaagcauggcugcauguuuguauaacgggggaugauaaaaaugcaacugcuagcuucauuuacaaugggaggcuuguagauaguguuguuucaugguccaaagaaauucucaggacccaggagucagaaugcguuuguaucaauggaacuuguacaguaguaaugacugauggaagugcuucaggaaaagcugauacuaaaauacuauucauugaggaggggaaaaucguucauacuagcacauugucaggaagugcucaacaugucgaggagugcucuugcuauccucgauauccuggugucagaugugucugcagagacaacuggaaaggcuccaauaggcccaucguagauauaaacauaaaggaucauagcauuguuuccaguuauguguguucaggacuuguuggagacacacccagaaaaaacgacagcuccagcaguagccauuguuuggauccuaacaaugaagaagguggucauggagugaaaggcugggccuuugaugauggaaaugacguguggaugggaagaacaaucaacgagacgucacgcuuaggguaugaaaccuucaaagucauugaaggcugguccaacccuaaguccaaauugcagauaaauaggcaagucauaguugacagagguaauagguccgguuauucugguauuuucucuguugaaggcaaaagcugcaucaaucggugcuuuuauguggaguugauuaggggaagaaaagaggaaacugaagucuuguggaccucaaacaguauuguuguguuuuguggcaccucagguacauauggaacaggcucauggccugauggggcggaccucaaucucaugccuauauaa

SEQ ID NO: 53198 - RNA, 1410 nt, Artificial Sequence
  derived and/or modified CDS sequence (wt) from neuraminidase__InfluenzaA__AER08665
augaauccaaaucaaaagauaauaacgauuggcucuguuucucucaccauuuccacaauaugcuucuucaugcaaauugccaucuugauaacuacuguaacauugcauuucaagcaauaugaauucaacucccccccaaacaaccaagugaugcugugugaaccaacaauaauagaaagaaacauaacagagauaguguaucugaccaacaccaccauagagaaggaaauaugccccaaacuagcagaauacagaaauuggucaaaaccgcaaugugacauuacaggauuugcaccuuuuucuaaggacaauucgauuaggcuuuccgcugguggggacaucugggugacaagagaaccuuaugugucaugcgauccugacaaguguuaucaauuugcccuuggacagggaacaacacuaaacaacgugcauucaaauaacacaguacgugauaggaccccuuaucggacccuauugaugaaugaguuaggugugccuuuucaucuggggaccaagcaagugugcauagcaugguccagcucaaguugucacgauggaaaagcauggcugcauguuuguauaacgggggaugauaaaaaugcaacugcuagcuucauuuacaaugggaggcuuguagauaguguuguuucaugguccaaagaaauucucaggacucaggagucagaaugcguuuguaucaauggaacuuguacaguaguaaugacugauggaagugcuucaggcaaagcugauacuaaaauacuauucauugaggaggggaaaaucguucauacuagcacauugucaggaagugcucagcaugucgaggaaugcucuugcuauccucgauauccuggugucagaugugucugcagagacaacuggaaaggcuccaauaggcccaucguagauauaaacauaaaggaucauagcauuguuuccaguuauguguguucaggacuuguuggagacacacccagaaaaaacgacagcuccagcaguagccauuguuuggauccuaacaaugaagaagguggucauggagugaaaggcugggccuuugaugauggaaaugacguguggaugggaagaacaaucaacgagacgucacgcuuaggguaugaaaccuucaaagucauugaaggcugguccaacccuaaguccaaauugcagauaaauaggcaagucauaguugacagagguaauagguccgguuauucugguauuuucucuguugaaggcaaaagcugcaucaaucggugcuuuuauguggaguugauuaggggaagaaaagaggaaacugaagucuuguggaccucaaacaguauuguuguguuuuguggcaccucagguacauauggaacaggcucauggccugauggggcggaccucaaucucaugccuauauaa

SEQ ID NO: 53199 - RNA, 1410 nt, Artificial Sequence
  derived and/or modified CDS sequence (wt) from neuraminidase__InfluenzaA__AER08669
augaauccaaaucaaaagauaauaacgauuggcucuguuucucucaccauuuccacaauaugcuucuucaugcaaauugccaucuugauaacuacuguaacauugcauuucaagcaauaugaauucaacucccccccaaacaaccaagugaugcuaugugaaccaacaauaauagaaagaaacauaacagagauaguguaucugaccaacaccaccauagagaaggaaauaugccccacacuagcagaauacagaaauuggucaaagccgcaaugugacauuacaggauuugcaccuuuuucuaaggacaauucgauuaggcuuuccgcugguggggacaucugggugacaagagaaccuuaugugucaugcgauccugacaaguguuaucaauuugcccuuggacagggaacaacacuaaacaacgugcauucaaauaacacaguacgugauaggaccccuuaucggacccuauugaugaaugaguuagguguuccuuuucaucuggggaccaagcaagugugcauagcaugguccagcucaaguugucacgauggaaaagcauggcugcauguuuguauaacgggggaugauaaaaaugcaacugcuagcuucauuuacaaugggaggcuuguagauaguguuguuucaugguccaaagaaauccucaggacccaggagucagaaugcguuuguaucaauggaacuuguacaguaguaaugacugaugggagugcuucaggaaaagcugauacuaaaauacuauucauugaggaggggaaaaucguucauacuagcacauugucaggaagugcucagcaugucgaggagugcucuugcuauccucgauauccuggugucagaugugucugcagagacaacuggaaaggcuccaauaggcccaucguagauauaaacauaaaggaucauagcauuguuuccaguuauguguguucaggacuuguuggagacacacccagaaaaaacgacagcuccagcaguagccauuguuuggauccuaacaaugaagaagguggucauggagugaaaggcugggccuuugaugauggaaaugacguguggaugggaagaacgaucagcgagacgucacguuuaggguaugaaaccuucaaagucauugaaggcugguccaacccuaaguccaaauugcagauaaauaggcaagucauaguugacagagguaauagguccgguuauucugguauuuucucuguugaaggcaaaagcugcaucaaucggugcuuuuauguggaguugauuaggggaagaaaagaggaaacugaagucuuguggaccucaaacaguauuguuguguuuuguggcaccucagguacauauggaacaggcucauggccugauggggcggaccucaaucucaugccuauauaa

SEQ ID NO: 53200 - RNA, 1410 nt, Artificial Sequence
  derived and/or modified CDS sequence (wt) from neuraminidase__InfluenzaA__AER08671
augaauccaaaucaaaagauaauaacgauuggcucuguuucucucaccauuuccacaauaugcuucuucaugcaaauugccaucuugauaacuacuguaacauugcauuucaagcaauauggauucaacucccccccaaacaaccaagugaugcuaugugaaccaacaauaauagaaagaaacauaacagagauaguguaucugaccaacaccaccauagagaaggaaauaugccccacacuagcagaauacagaaauuggucaaagccgcaaugugacauuacaggauuugcaccuuuuucuaaggacaauucgauuaggcuuuccgcugguggggacaucugggugacaagagaaccuuaugugucaugcgauccugacaaguguuaucaauuugcccuuggacagggaacaacacuaaacaacgugcauucaaauaacacaguacgugauaggaccccuuaucggacccuauugaugaaugaguuagguguuccuuuucaucuggggaccaagcaagugugcauagcaugguccagcucaaguugucacgauggaaaagcauggcugcauguuuguauaacgggggaugauaaaaaugcaacugcuagcuucauuuacaaugggaggcuuguagauaguguuguuucaugguccaaagaaauccucaggacccaggagucagaaugcguuuguaucaauggaacuuguacaguaguaaugacugaugggagugcuucaggaaaagcugauacuaaaauacuauucauugaggaggggaaaaucguucauacuagcacauugucaggaagugcucagcaugucgaggagugcucuugcuauccucgauauccuggugucagaugugucugcagagacaacuggaaaggcuccaauaggcccaucguagauauaaacauaaaggaucauagcauuguuuccaguuauguguguucaggacuuguuggagacacacccagaaaaaacgacagcuccagcaguagccauuguuuggauccuaacaaugaagaagguggucauggagugaaaggcugggccuuugaugauggaaaugacguguggaugggaagaacgaucaacgagacgucacguuuaggguaugaaaccuucaaagucauugaaggcugguccaacccuaaguccaaauugcagauaaauaggcaagucauaguugacagagguaauagguccgguuauucugguauuuucucuguugaaggcaaaagcugcaucaaucggugcuuuuauguggaguugauuaggggaagaaaagaggaaacugaagucuuguggaccucaaacaguauuguuguguuuuguggcaccucagguacauauggaacaggcucauggccugauggggcggaccucaaucucaugccuauauaa

SEQ ID NO: 53201 - RNA, 1410 nt, Artificial Sequence
  derived and/or modified CDS sequence (wt) from neuraminidase__InfluenzaA__AER08673
augaauccaaaucaaaagauaauaacgauuggcucuguuucucucaccauuuccacaauaugcuucuucaugcaaauugccaucuugauaacuacuguaacauugcauuucaagcaauaugaauucaacucccccccaaacaaccaagugaugcugugugaaccaacaauaauagaaagaaacauaacagagauaguguaucugaccaacaccaccauagagaaggaaauaugccccaaacuagcagaauacagaaauuggucaaaaccgcaaugugacauuacaggauuugcaccuuuuucuaaggacaauucgauuaggcuuuccgcugguggggacaucugggugacaagagaaccuuaugugucaugugauccugacaaguguuaucaauuugcccuuggacagggaacaacacuaaacaacgugcauucaaauaacacaguacgugauaggaccccuuaucggacccuauugaugaaugaguuaggugugccuuuucaucuggggaccaagcaagugugcauagcaugguccagcucaaguugucacgauggaaaagcauggcugcauguuuguauaacgggggaugauaaaaaugcaacugcuagcuucauuuacaaugggaggcuuguagauaguguuguuucaugguccaaagaaauucucaggacccaggagucagaaugcguuuguaucaauggaacuuguacaguaguaaugacugauggaagugcuucaggcaaagcugauacuaaaauacuauucauugaggaggggaaaaucguucauacuagcacauugucaggaagugcucagcaugucgaggaaugcucuugcuauccucgauauccuggugucagaugugucugcagagacaacuggaaaggcuccaauaggcccaucguagauauaaacauaaaggaucauagcauuguuuccaguuauguguguucaggacuuguuggagacacacccagaaaaaacgacagcuccagcaguagccauuguuuggauccuaacaaugaagaagguggucauggagugaaaggcugggccuuugaugauggaaaugacguguggaugggaagaacaaucaacgagacgucacgcuuaggguaugaaaccuucaaagucauugaaggcugguccaacccuaaguccaaauugcagauaaauaggcaagucauaguugacagagguaauagguccgguuauucugguauuuucucuguugaaggcaaaagcugcaucaaucggugcuuuuauguggaguugauuaggggaagaaaagaggaaacugaagucuuguggaccucaaacaguauuguuguguuuuguggcaccucagguacauauggaacaggcucauggccugauggggcggaccucaaucucaugccuauauaa

SEQ ID NO: 53202 - RNA, 1410 nt, Artificial Sequence
  derived and/or modified CDS sequence (wt) from neuraminidase__InfluenzaA__AER08675
augaauccaaaucaaaagauaauaacgauuggcucuguuucucucaccauuuccacaauaugcuucuucaugcaaauugccaucuugauaacuacuguaacauugcauuucaagcaauaugaauucaacucccccccaaacaaccaagugaugcuaugugaaccaacaauaauagaaagaaacauaacagagauaguguaucugaccaacaccaccauagagaaggaaauaugccccaaacuagcagaauacagaaauuggucaaagccgcaaugugacauuacaggauuugcaccuuuuucuaaggacaauucgauuaggcuuuccgcugguggggacaucugggugacaagagaaccuuaugugucaugcgauccugacaaguguuaucaauuugcccuuggacaggggacaacacuaaacaacgugcauucaaauaacacaguacgugauaggaccccuuaucggacccuauugaugaaugaguuagguguuccuuuucaucuggggaccaagcaagugugcauagcaugguccagcucaaguugucacgauggaaaagcauggcugcauguuuguauaacgggggaugauaaaaaugcaacugcuagcuucauuuacaaugggaggcuuguagauaguguuguuucaugguccaaagaaauccucaggacccaggagucagaaugcguuuguaucaauggaacuuguacaguaguaaugacugaugggagugcuucaggaaaagcugauacuaaaauacuauucauugaggaggggaaaaucguucauacuagcacauugucuggaagugcucagcaugucgaggagugcucuugcuauccucgauauccuggugucagaugugucugcagagacaacuggaaaggcuccaauaggcccaucguagauauaaacauaaaggaucauagcauuguuuccaguuauguguguucaggacuuguuggagacacacccagaaaaaacgacagcuccagcaguagccauuguuuggauccuaacaaugaagaagguggucauggagugaaaggcugggccuuugaugauggaaaugacguguggaugggaagaacgaucaacgagacgucacguuuaggguaugaaaccuucaaagucauugaaggcugguccaacccuaaguccaaauugcagauaaauaggcaagucauaguugacagagguaauagguccgguuauucugguauuuucucuguugaaggcaaaagcugcaucaaucggugcuuuuauguggaguugauuaggggaagaaaagaggaaacugaagucuuguggaccucaaacaguauuguuguguuuuguggcaccucagguacauauggaacaggcucauggccugauggggcggaccucaaucucaugccuauauaa

SEQ ID NO: 53203 - RNA, 1410 nt, Artificial Sequence
  derived and/or modified CDS sequence (wt) from neuraminidase__InfluenzaA__AER08677
augaauccaaaucaaaagauaauaacgauuggcucuguuucucucaccauuuccacaauaugcuucuucaugcaaauugccaucuugauaacuacuguaacauugcauuucaagcaauaugaauucaacucccccccaaacaaccaagugaugcugugugaaccaacaauaauagaaagaaacauaacagagauaguguaucugaccaacaccaccauagagaaggaaauaugccccaaacuagcagaauacagaaauuggucaaagccgcaaugugacauuacaggauuugcaccuuuuucuaaggacaauucgauuaggcuuuccgcugguggggacaucugggugacaagagaaccuuaugugucaugcgauccugacaaguguuaucaauuugcccuuggacagggaacaacacuaaacaacgugcauucaaauaacacaguacgugauaggaccccuuaucggacccuauugaugaaugaguuagguguuccuuuucaucuggggaccaagcaagugugcauagcaugguccagcucaaguugucacgauggaaaagcauggcugcauguuuguauaacgggggaugauaaaaaugcaacugcuagcuucauuuacaaugggaggcuuguagauaguguuguuucaugguccaaagaaauccucaggacccaggagucagaaugcguuuguaucaauggaacuuguacaguaguaaugacugaugggagugcuucaggaaaagcugauacuaaaauacuauucauugaggaggggaaaaucguucauacuagcacauugucaggaagugcucagcaugucgaggagugcucuugcuauccucgauauccuggugucagaugugucugcagagacaacuggaaaggcuccaauaggcccaucguagauauaaacauaaaggaucauagcauuguuuccaguuauguguguucaggacuuguuggagacacacccagaaaaaacgacagcuccagcaguagccauuguuuggauccuaacaaugaagaagguggucauggagugaaaggcugggccuuugaugauggaaaugacguguggaugggaagaacgaucaacgagacgucacguuuaggguaugaaaccuucaaagucauugaaggcugguccaacccuaaguccaaauugcagauaaauaggcaagucauaguugacagagguaauagguccgguuauucugguauuuucucuguugaaggcaaaagcugcaucaaucggugcuuuuauguggaguugauuaggggaagaaaagaggaaacugaagucuuguggaccucaaacaguauuguuguguuuuguggcaccucagguacauauggaacaggcucauggccugauggggcggaccuuaaucucaugccuauauaa

SEQ ID NO: 53204 - RNA, 1410 nt, Artificial Sequence
  derived and/or modified CDS sequence (wt) from neuraminidase__InfluenzaA__AER08679
augaauccaaaucaaaagauaauaacgauuggcucuguuucucucaccauuuccacaauaugcuucuucaugcaaauugccaucuugauaacuacuguaacauugcauuucaagcaauaugaauucaacucccccccaaacaaccaagugaugcugugugaaccaacaauaauagaaagaaacauaacagagauaguguaucugaccaacaccaccauagagaaggaaauaugccccaaacuagcagaauacagaaauuggucaaagccgcaaugugacauuacaggauuugcaccuuuuucuaaggacaauucgauuaggcuuuccgcugguggggacaucugggugacaagagaaccuuaugugucaugcgauccugacaaguguuaucaauuugcccuuggacagggaacaacacuaaacaacgugcauucaaauaacacaguacgugauaggaccccuuaucggacccuauugaugaaugaguuagguguuccuuuucaucuggggaccaagcaagugugcauagcaugguccagcucaaguugucacgauggaaaagcauggcugcauguuuguauaacgggggaugauaaaaaugcaacugcuagcuucauuuacaaugggaggcuuguagauaguguuguuucaugguccaaagaaauccucaggacccaggagucagaaugcguuuguaucaauggaacuuguacaguaguaaugacugaugggagugcuucaggaaaagcugauacuaagauacuauucauugaggaggggaaaaucguucauacuagcacauugucaggaagugcucagcaugucgaggagugcucuugcuauccucgauauccuggugucagaugugucugcagagacaacuggaaaggcuccaauaggcccaucguagauauaaacauaaaggaucauagcauuguuuccaguuauguguguucaggacuuguuggagacacacccagaaaaaacgacagcuccagcaguagccauuguuuggauccuaacaaugaagaagguggucauggagugaaaggcugggccuuugaugauggaaaugacguguggaugggaagaacgaucaacgagacgucacguuuaggguaugaaaccuucaaagucauugaaggcugguccaacccuaaguccaaauugcagauaaauaggcaagucauaguugacagagguaauagguccgguuauucugguauuuucucuguugaaggcaaaagcugcaucaaucggugcuuuuauguggaguugauuaggggaagaaaagaggaaacugaagucuuguggaccucaaacaguauuguuguguuuuguggcaccucagguacauauggaacaggcucauggccugauggggcggaccucaaucucaugccuauauaa

SEQ ID NO: 53205 - RNA, 1410 nt, Artificial Sequence
  derived and/or modified CDS sequence (wt) from neuraminidase__InfluenzaA__AER08681
augaauccaaaucaaaagauaauaacgauuggcucuguuucucucaccauuuccacaauaugcuucuucaugcaaauugccauauugauaacuacuguaacauugcauuucaagcaauaugaauucaacucccccccaaacaaccaagugaugcugugugaaccgacaauaauagaaagaaacauaacagagauaguguaucugaccaacaccaccauagagaaggaaauaugccccaaacuagcagaauacagaaauuggucaaaaccgcaaugugacauuacaggauuugcaccuuuuucuaaggacaauucgauuaggcuuuccgcugguggggacaucugggugacaagagaaccuuaugugucaugcgauccugacaaguguuaucaauuugcccuuggacagggaacaacacuaaacaacgugcauucaaauaacacaguacgugauaggaccccuuaucggacccuauugaugaaugaguuagguguuccuuuucaucuggggaccaagcaagugugcauagcaugguccagcucaaguugucacgauggaaaagcauggcugcauguuuguauaacgggggaugauaaaaaugcaacugcaagcuucauuuacaaugggaggcuuguagauaguguuguuucaugguccaaagaaauucucaggacccaggagucagaaugcguuuguaucaauggaacuuguacaguaguaaugacugauggaagugcuucaggaaaagcugauacuaaaauacuauucauugaggaggggaaaaucguucauacuagcacauugucaggaagugcccagcaugucgaggagugcucuugcuauccucgauauccuggugucagaugugucugcagagacaacuggaaaggcuccaauaggcccaucguagauauaaacauaaaggaucauagcauaguuuccaguuauguguguucaggacuuguuggagacacacccagaaaaaacgacagcuccagcaguagccauuguuuggauccuaacgaugaagaagguggucauggagugaaaggcugggccuuugaugauggaaaugacguguggaugggaagaacaaucaacgagacgucacgcuugggguaugaaaccuucaaagucauugaaggcugguccaacccuaaguccaaauugcagauaaauaggcaagucauaguugacaaagguaauagguccgguuauucugguauuuucucuguugaaggcaaaagcugcaucaaucggugcuuuuauguggaguugauuaggggaagaaaagaggaaacugaagucuuguggacuucaaacaguauuguuguguuuuguggcaccucagguacauauggaacaggcucauggccugauggggcggaccucaaucucaugccuauauaa

SEQ ID NO: 53206 - RNA, 1410 nt, Artificial Sequence; identical to SEQ ID NO: 52894
  derived and/or modified CDS sequence (wt) from neuraminidase__InfluenzaA__AER08683

SEQ ID NO: 53207 - RNA, 1410 nt, Artificial Sequence
  derived and/or modified CDS sequence (wt) from neuraminidase__InfluenzaA__AER08685
augaauccaaaucaaaagauaauaacgauuggcucuguuucucucaccauuuccacaauaugcuucuucaugcaaauugccaucuugauaacuacuguaacauugcauuucaagcaauaugaauucaacucccccccaaacaaccaagugaugcugugugaaccaacaauaauagaaagaaacauaacagagauaguguaucugaccaacaccaccauagagaaggaaauaugccccaaacuagcagaauacagaaauuggucaaagccgcaaugugacauuacaggauuugcaccuuuuucuaaggacaauucgauuaggcuuuccgcugguggggacaucugggugacaagagaaccuuaugugucaugcgauccugacaaguguuaucaauuugcccuuggacagggaacaacacuaaacaacgugcauucaaauaacacaguacgugauaggaccccuuaucggacccuauugaugaaugaguuagguguuccuuuucaucuggggaccaagcaagugugcauagcaugguccagcucaaguugucacgauggaaaagcauggcugcauguuuguauaacgggggaugauaaaaaugcaacugcuagcuucauuuacaaugggaagcuuguagauaguguuguuucaugguccaaagaaauccucaggacccaggagucagaaugcguuuguaucaauggaacuuguacaguaguaaugacugaugggagugcuucaggaaaagcugauacuaaaauacuauucauugaggaggggaaaaucguucauacuagcacauugucaggaagugcucagcaugucgaggagugcucuugcuauccucgauauccuggugucagaugugucugcagagacaacuggaaaggcuccaauaggcccaucguagauauaaacauaaaggaucauagcauuguuuccaguuauguguguucaggacuuguuggagacacacccagaaaaaacgacagcuccagcaguagccauuguuuggauccuaacaaugaagaagguggucauggagugaaaggcugggccuuugaugauggaaaugacguguggaugggaagaacgaucaacgagacgucacguuuaggguaugaaaccuucaaagucauugaaggcugguccaacccuaaguccaaauugcagauaaauaggcaagucauaguugacagagguaauagguccgguuauucugguauuuucucuguugaaggcaaaagcugcaucaaucggugcuuuuauguggaguugauuaggggaagaaaagaggaaacugaagucuuguggaccucaaacaguauuguuguguuuuguggcaccucagguacauauggaacaggcucauggccugauggggcggaccucaaucucaugccuauauaa

SEQ ID NO: 53208 - RNA, 1410 nt, Artificial Sequence; identical to SEQ ID NO: 53207
  derived and/or modified CDS sequence (wt) from neuraminidase__InfluenzaA__AER08687

SEQ ID NO: 53209 - RNA, 1410 nt, Artificial Sequence
  derived and/or modified CDS sequence (wt) from neuraminidase__InfluenzaA__AER08689
augaauccaaaucaaaagauaauaacgauuggcucuguuucucucaccauuuccacaauaugcuucuucaugcaaauugccauuuugauaacuacuguaacauugcauuucaagcaauaugaauucaacucccccccaaacaaccaagugacgcugugugaaccaacaauaauagaaagaaacauaacagagauaguguaucugaccaacaccaccauagagaaggaaauaugccccaaacuagcagaauacagaaauuggucaaagccgcaaugugacauuacaggauuugcaccuuuuucuaaggacaauucgauuaggcuuucagcugguggggacaucugggugacaagagaaccuuaugugucaugcgauccugacaaguguuaucaauuugcccuuggacagggaacaacacuaaacaacgugcauucaaauaacacaguacgugauaggaccccuuaucggacccuauugaugaaugaguuagguguuccuuuucaucuggggaccaagcaagugugcauagcaugguccagcucaaguugucacgauggaaaagcauggcugcauguuuguauaacgggggaugauaaaaaugcaacugcuagcuucauuuacaaugggaggcuuguagauaguguuguuucaugguccaaagaaauccucaggacccaggagucagaaugcguuuguaucaauggaacuuguacaguaguaaugacugaugggagugcuucaggaaaagcugauacuaaaauacuauucauugaggaggggaaaaucguucauacuagcacauugucaggaagugcucagcaugucgaggagugcucuugcuauccucgauauccuggugucagaugugucugcagagacaacuggaaaggcuccaauaggcccaucguagauauaaacauaaaggaucauagcauuguuuccaguuauguguguucaggacuuguuggagacacacccagaaaagacgacagcuccagcaguagccauuguuuggauccuaacaaugaagaagguggucauggagugaaaggcugggccuuugaugauggaaaugacguguggaugggaagaacgaucaacgagacgucacguuuaggguaugaaaccuucaaagucauugaaggcugguccaacccuaaguccaaauugcagauaaauaggcaagucauaguugacagagguaauagguccgguuauucugguauuuucucuguugaaggcaaaagcugcaucaaucggugcuuuuauguggaguugauuaggggaagaaaagaggaaacugaagucuuguggaccucaaacaguauuguuguguuuuguggcaccucagguacauauggaacaggcucauggccugauggggcggaccucaaucucaugccuauauaa

SEQ ID NO: 53210 - RNA, 1410 nt, Artificial Sequence; identical to SEQ ID NO: 53207
  derived and/or modified CDS sequence (wt) from neuraminidase__InfluenzaA__AER08691

SEQ ID NO: 53211 - RNA, 1410 nt, Artificial Sequence
  derived and/or modified CDS sequence (wt) from neuraminidase__InfluenzaA__AER08693
augaauccaaaucaaaagauaauaacgauuggcucuguuucucucaccauuuccacaauaugcuucuucaugcaaauugccaucuugauaacuacuguaacauugcauuucaagcaauaugaauucaacucccccccaaaaaaccaagugaugcugugugaaccaacaauaauagaaagaaacauaacagagauaguguaucugaccaacaccaccauagagaaggaaauaugccccaaacuagcagaauacagaaauuggucaaagccgcaaugugacauuacaggauuugcaccuuuuucuaaggacaauucgauuaggcuuuccgcugguggggacaucugggugacaagagaaccuuaugugucaugcgauccugacaaguguuaucaauuugcccuuggacagggaacaacacuaaacaacgugcauucaaauaacacaguacgugauaggaccccuuaucggacccuauugaugaaugaguuagguguuccuuuucaucuggggaccaagcaagugugcauagcaugguccagcucaaguugucacgauggaaaagcauggcugcauguuuguauaacgggggaugauaaaaaugcaacugcuagcuucauuuacaaugggaagcuuguagauaguguugucucaugguccaaagaaauccucaggacccaggagucagaaugcguuuguaucaaugggacuuguacaguaguaaugacugaugggagugcuucaggaaaagcugauacuaaaauacuauucauugaggaggggaaaaucguucauacuagcacauugucaggaagugcucagcaugucgaggagugcucuugcuauccucgauauccuggugucagaugugucugcagagacaacuggaaaggcuccaauaggcccaucguagauauaaacauaaaggaucauagcauuguuuccaguuauguguguucaggacuuguuggagacacacccagaaaaaacgacagcuccagcaguagccauuguuuggauccuaacaaugaagaagguggucauggagugaaaggcugggccuuugaugauggaaaugacguguggaugggaagaacgaucaacgagacgucacguuuaggguaugaaaccuucaaagucauugaaggcugguccaacccuaaguccaaauugcagauaaauaggcaagucauaguugacagagguaauagguccgguuauucugguauuuucucuguugaaggcaaaagcugcaucaaucggugcuuuuauguggaguugauuaggggaagaaaagaggaaacugaagucuuguggaccucaaacaguauuguuguguuuuguggcaccucagguacauauggaacaggcucauggccugauggggcggaccucaaucucaugccuauauaa

SEQ ID NO: 53212 - RNA, 1410 nt, Artificial Sequence
  derived and/or modified CDS sequence (wt) from neuraminidase__InfluenzaA__AER08697
augaauccaaaucaaaagauaauaacgauuggcucuguuucucucaccauuuccacaauaugcuucuucaugcaaauugccaucuugauaacuacuguaacauugcauuucaagcaauaugaauucaacucccccccaaacaaccaagugaugcuaugugaaccaacaauaauagaaagaaacauaacagagauaguguaucugaccaacaccaccauagagaaggaaacaugccccacacuagcagaauacagaaauuggucaaagccgcaaugugacauuacaggauuugcaccuuuuucuaaggacaauucgauuaggcuuuccgcugguggggacaucugggugacaagagaaccuuaugugucaugcgauccugacaaguguuaucaauuugcccuuggacagggaacaacacuaaacaacgugcauucaaauaacacaguacgugauaggaccccuuaucggacccuauugaugaaugaguuagguguuccuuuucaucuggggaccaagcaagugugcauagcaugguccagcucaaguugucacgauggaaaagcauggcugcauguuuguauaacgggggaugauaaaaaugcaacugcuagcuucauuuacaaugggaggcuuguagauaguguuguuucaugguccaaagaaauccucaggacccaggagucagaaugcguuuguaucaauggaacuuguacaguaguaaugacugauggaagugcuucaggaaaagcugauacuaaaauacuauucauugaggaggggaaaaucguucauacuagcacauugucaggaagugcucagcaugucgaggagugcucuugcuauccucgauauccuggugucagaugugucugcagagacaacuggaaaggcuccaauaggcccaucguagauauaaacauaaaggaucauagcauuguuuccaguuauguguguucaggacuuguuggagacacacccagaaaaaacgacagcuccagcaguagccauuguuuggauccuaacaaugaagaagguggucauggagugaaaggcugggccuuugaugauggaaaugacguguggaugggaagaacaaucaacgugacgucacgcuuaggguaugaaaccuucaaagucauugaaggcugguccaacccuaaguccaaauugcagauaaauaggcaagucauaguugacagagguaauagguccgguuauucugguauuuucucuguugaaggcaaaagcugcaucaaucggugcuuuuauguggaguugauuaggggaagaaaagaggaaacugaagucuuguggaccucaaacaguauuguuguguuuuguggcaccucagguacauauggaacaggcucauggccugauggggcggaucucaaucucaugccuauauaa

SEQ ID NO: 53213 - RNA, 1410 nt, Artificial Sequence; identical to SEQ ID NO: 53009
  derived and/or modified CDS sequence (wt) from neuraminidase__InfluenzaA__AER92714

SEQ ID NO: 53214 - RNA, 1410 nt, Artificial Sequence
  derived and/or modified CDS sequence (wt) from neuraminidase__InfluenzaA__AER92721
augaauccaaaccaaaagauaauaaccauugguucggucuguaugacaauuggaauggccaacuuaauauuacaaauuggaaacauaaucucaauauggauuagccacucaauucaacuugggaaucaaaaucagauugaaacaugcaaucaaagcgucauuacuuaugaaaacaacacuuggguaaaucagacauauguuaacaucagcaacaccaacuuugcugcuggacagucagugguuuccgugaaauuagcgggcaauuccucucucugcccuguuaguggaugggcuauauacaguaaagacaacaguauaagaaucgguuccaagggggauguguuugucauaagggaaccauucauaucaugcucccccuuggaaugcagaaccuucuucuugacucaaggggccuuacuaaaugacaaacauuccaauggaaccauuaaagacaggagcccauaucgaacccuaaugagcuguccuauuggugaaguucccucuccauacaacucaagauuugagucagucgcuuggucagcaagugcuugucaugauggcaucaauuggcuaacaauuggaauuucuggcccagacaauggggcaguggcuguguuaaaguacaacggcauaauaacagacacuaucaagaguuggagaaacaauauauugagaacacaagagucugaaugugcauguguaaaugguucuugcuuuacuguaaugaccgauggaccaagugauggacaggccucauacaagaucuucagaauagaaaagggaaagauagucaaaucagucgaaaugaaugccccuaauuaucacuaugaggaaugcuccuguuauccugauucuagugaaaucacaugugugugcagggauaacuggcauggcucgaaccgaccgugggugucuuucaaccagaaucuggaauaucagauaggauacauaugcagugggauuuucggagacaauccacguccuaaugacaagacaggcaguugugguccaguaucgucuaauggagcaaauggaguaaaaggauuuucauucaaauacggcaaugguguuuggauagggagaacuaaaagcauuaguucaagaaacgguuuugagaugauuugggauccgaacggauggacugggacagacaauaacuucucaauaaagcaagauaucguaggaauaaaugaguggucaggauauagcgggaguuuuguucagcauccagaacuaacagggcuggauuguauaagaccuugcuucuggguugaacuaaucagagggcgacccaaagagaacacaaucuggacuagcgggagcagcauauccuuuugugguguaaacagugacacuguugguuggucuuggccagacggugcugaguugccauuuaccauugacaaguaa

SEQ ID NO: 53215 - RNA, 1410 nt, Artificial Sequence
  derived and/or modified CDS sequence (wt) from neuraminidase__InfluenzaA__AER92724
augaauccaaaccaaaagauaauaaccauugguucggucuguaugacaauuggaauggccaacuuaauauuacaaauuggaaacauaaucucaauauggauuagccacucaauucaacuugggaaucaaaaucagauugaaacaugcaaucaaagcgucauuacuuaugaaaacaacacuuggguaaaucagacauauguuaacaucagcaacaccaacuuugcugcuggacagucagugguuuccgugaaauuagcgggcaauuccucucucugcccuguuaguggaugggcuauauacaguaaagacaacaguauaagaaucgguuccaagggggauguguuugucauaagggaaccauucauaucaugcucccccuuggaaugcagaaccuucuucuugacucaaggggccuuacuaaaugacaaacauuccaauggaaccauuaaagacaggagcccauaucgaacccuaaugagcuguccuauuggugaaguucccucuccauacaacucaagauuugagucagucgcuuggucagcaagugcuugucaugauggcaucaauuggcuaacaauuggaauuucuggcccagacaauggggcaguggcuguguuaaaguacaacggcauaauaacagacacuaucaagaguuggagaaacaauauauugagaacacaagagucugaaugugcauguguaaaugguucuugcuuuacuguaaugaccgauggaccaagugauggacaggccucauacaagaucuucagaauagaaaagggaaagauagucaaaucagucgaaaugaaugccccuaauuaucacuaugaggaaugcuccuguuauccugauucuagugaaaucacaugugugugcagggauaacuggcauggcucgaaccgaccgugggugucuuucaaccagaaucuggaauaucagauaggauacauaugcagugggauuuucggagacaauccacguccuaaugacaagacaggcaguugugguccaguaucgucuaauggagcaaauggaguaaaaggauuuucauucaaauacggcaaugguguuuggauagggagaacuaaaagcauuaguucaagaaacgguuuugagaugauuugggauccgaacggauggacugggacagacaauaacuucucaauaaagcaagauauuguaggaauaaaugaguggucaggauauagcgggaguuuuguucagcauccagaacuaacagggcuggauuguauaagaccuugcuucuggguugaacuaaucagagggcgacccaaagagaacacaaucuggacuagcgggagcagcauauccuuuugugguguaaacagugacacuguugguuggucuuggccagacggugcugaguugccauuuaccauugacaaguaa

SEQ ID NO: 53216 - RNA, 1413 nt, Artificial Sequence
  derived and/or modified CDS sequence (wt) from neuraminidase__InfluenzaA__AET84165
augaacccaaaucaaaagauaauaaccauuggaucaaucaguauagcaaucggaauaauuagucuaauguugcaaauaggaaauauuauuucaauaugggcuagucacucaauccaaacuggaagucaaaacaacacuggaauaugcaaccaaagaaucaucacauaugaaaacagcaccugggugaaucacacauauguuaauauuaacaacacuaauguuguugcuggagaggacaaaacuucagugacauuggccggcaauucaucucuuuguucuaucaguggaugggcuauauacacaaaagacaacagcauaagaauuggcuccaaaggagauguuuuugucauaagagaaccuuucauaucauguucucacuuggaaugcagaaccuuuuuucugacccaaggcgcucuauuaaaugacaaacauucaaaugggaccguaaaggacagaaguccuuauagggccuuaaugagcuguccucuaggugaagcuccguccccauacaauucaaaguucgaaucgguugcauggucagcaagcgcaugccaugauggcaugggcugguuaacaaucggaauuucugguccagacaauggagcuguggcuguacuaaaauacaacggaauaauaacuggaaccauaaaaaguuggaaaaagcaaauauuaagaacacaagagucugaaugugucuguaugaacgggucauguuucaccauaaugaccgauggcccgaguaauaaggccgccucguacaaaauuuucaagaucgaaaaggggaagguuacuaaaucaauagaguugagugcacccaauuuuuauuaugaggaaugcuccuguuacccagacacuggcauagugauguguguaugcagggacaacuggcaugguucaaaucgaccuugggugucuuuuaaucaaaacuuggauuaucaaauaggauacaucugcaguggaguguuuggugacaauccgcgucccgaagauggagagggcagcugcaauccagugacuauugauggagcaaacggaguaaaaggguuuucauacaaauaugguaaugggguuuggauaggaaggaccaaaaguaacagacuuagaaagggguuugagaugauuugggauccuaauggauggacaaauaccgacagugauuucucagugaaacaggauguuguagcaauaacugauuggucaggguacagcggaaguuucguccaacauccugaguuaacaggauuggacuguauaagaccuugcuucuggguugaguuagucagagggcugccuagagaaaauacaacaaucuggacuagugggagcagcauuucuuuuuguggcguuaauagugauacugcaaacuggucuuggccagacggugcugaguugccguucaccaucgacaaguag

SEQ ID NO: 53217 - RNA, 1413 nt, Artificial Sequence; identical to SEQ ID NO: 52253
  derived and/or modified CDS sequence (wt) from neuraminidase__InfluenzaA__AET84176

SEQ ID NO: 53218 - RNA, 1413 nt, Artificial Sequence
  derived and/or modified CDS sequence (wt) from neuraminidase__InfluenzaA__AET84187
augaacccaaaucaaaagauaauaaccauuggaucaaucaguauagcaaucggaauaauuagucuaauguugcaaauaggaaauauuauuucaauaugggcuagucacucaauccaaacuggaagucaaaacaacacuggaauaugcaaccaaagaaucaucacauaugaaaacagcaccugggugaaucacacauauguuaauauuaacaacacuaauguuguugcuggagaggacaaaacuucagugacauuggccggcaauucaucucuuuguucuaucaguggaugggcuauauacacaaaagacaacagcauaagaauuggcuccaaaggagauguuuuugucauaagagaaccuuucauaucauguucucacuuggaaugcagaaccuuuuuucugacccaaggcgcucuauuaaaugacaaacauucaaaugggaccguaaaggacagaaguccuuauagggccuuaaugagcuguccucuaggugaagcuccguccccauacaauucaaaguucgaaucgguugcauggucagcaagcgcaugccaugauggcauggacugguuaacaaucggaauuucugguccagacaauggagcuguggcuguacuaaaauacaacggaauaauaacuggaaccauaaaaaguuggaaaaagcaaauauuaagaacacaagagucugaaugugucuguaugaacgggucauguuucaccauaaugaccgauggcccgaguaauaaggccgccucguacaaaauuuucaagaucgaaaaggggaagguuacuaaaucaauagaguugaaugcacccaauuuuuauuaugaggaaugcuccuguuacccagacacuggcauagugauguguguaugcagggacaacuggcaugguucaaaucgaccuugggugucuuuuaaucaaaacuuggauuaucaaauaggauacaucugcaguggaguguuuggugacaauccgcgucccaaagauggagagggcagcugcaauccagugacuauugauggagcaaacggaguaaaaggguuuucauacaaauaugguaaugggguuuggauaggaaggaccaaaaguaacagacuuagaaagggguuugagaugauuugggauccuaauggauggacaaauaccgacagugauuucucagugaaacaggauguuguagcaauaacugauuggucaggguacagcggaaguuucguccaacauccugaguuaacaggauuggacuguauaagaccuugcuucuggguugaguuagucagagggcugccuagagaaaauacaacaaucuggacuagugggagcagcauuucuuuuuguggcguuaauagugauacugcaaacuggucuuggccagacggugcugaguugccguucaccaucgacaaguag

SEQ ID NO: 53219 - RNA, 1413 nt, Artificial Sequence
  derived and/or modified CDS sequence (wt) from neuraminidase__InfluenzaA__AET84198
augaacccaaaucaaaagauaauaaccauuggaucaaucaguauagcaaucggaauaauuagucuaauguugcaaauaggaaauauuauuucaauaugggcuagucacucaauccaaacuggaagucaaaacaacacuggaauaugcaaccaaagaaucaucacauaugaaaacagcaccugggugaaucacacauauguuaauauuaacaacacuaauguuguugcuggagaggacaaaacuucaaugacauuggccggcaauucaucucuuuguucuaucaguggaugggcuauauacacgaaagacaacagcauaagaauuggcuccaaaggagauguuuuugucauaagagaaccuuucauaucauguucucacuuggaaugcagaaccuuuuuucugacccaaggcgcucuauuaaaugacaaacauucaaaugggaccguaaaggacagaaguccuuauagggccuuaaugagcuguccucuaggugaagcuccguccccauacaauucaaaguucgaaucaguugcauggucagcaagcgcaugccaugauggcaugggcugguuaacaaucgggauuucugguccagacaauggagcuguggcuguacuaaaauacaacggaauaauaacuggaaccauaaaaaguuggaaaaagcaaauauuaagaacacaagagucugaaugugucuguaugaacgggucauguuucaccauaaugaccgauggcccaaguaauaaggccgccucguacaaaauuuucaagaucgaaaaggggaagguuacuaaaucaauagaguugaaugcacccaauuuuuauuaugaggaaugcuccuguuacccagacacuggcauagugauguguguaugcagggacaacuggcaugguucaaaucgaccuugggugucuuuuaaucaaaacuuggauuaucaaauaggauacaucugcaguggaguguuuggugacaauccgcgucccaaagauggagagggcagcugcaauccagugacuguugauggagcaaacggaguaaaaggguuuucauacaaauaugguaaugguguuuggauaggaaggaccaaaaguaacagacuuagaaagggguuugagaugauuugggauccuaauggauggacaaauaccgacagugauuucucagugaaacaggauguuguagcaauaacugauuggucaggguacagcggaaguuucguccaacauccugaauuaacaggauuggacuguauaagaccuugcuucuggguugaguuagucagagggcugccuagagaaaauacaacaaucuggacuagugggagcagcauuucuuuuuguggcguuaauagugauacugcaaacuggucuuggccagacggugcugaguugccguucaccaucgacaaguag

SEQ ID NO: 53220 - RNA, 1413 nt, Artificial Sequence
  derived and/or modified CDS sequence (wt) from neuraminidase__InfluenzaA__AET84209
augaacccaaaucaaaagauaauaaccauuggaucaaucaguauagcaaucgggauaauuagucuaauguugcaaauaggaaauauuauuucaauaugggcuagucacucaauccaaacuggaagucaaaacaacacuggaauaugcaaccaaagaaucaucacauaugaaaacagcaccugggugaaucacacauauguuaauauuaacaacacuaaaguuguugcuggagaggacaaaacuucagugacauuggccggcaauucaucucuuuguucuaucaguggaugggcuauaaacacaaaagacaacagcauaagaauuggcuccaaaggagauguuuuugucauaagagaaccuuucauaucauguucucacuuggaaugcagaaccuuuuuucugacccaaggcgcucuauuaaaugacaaacauucaaaugggaccguaaaggacagaaguccuuauagggccuuaaugagcuguccucuaggugaagcuccguccccauacaauucaaaguucgaaucaguugcuuggucagcaagcgcaugccaugauggcaugggcugguuaacaaucggaauuucugguccagacaauggagcuguggcuguacuaaaauacaacggaauaauaacuggaaccauaaaaaguuggaaaaagcaaauauuaagaacacaagagucugaaugugucuguaugaacgggucauguuuuaccauaaugaccgauggcccgaguaauaaggccgccucguacaaaauuuucaagaucgaaaaagggaagguuacuaaaucaauagaguugaaugcacccaauuuuuauuaugaggaaugcuccuguuacccagacacuggcauagugauguguguaugcagggacaacuggcaugguucaaaucgaccuugggugucuuuuaaucaaaacuuggauuaucaaauaggauacaucugcaguggaguguuuggugacaauccgcgucccaaagauggagagggcagcugcaauccagugacuguugauggagcaaacggaguaaaaggguuuucauacaaauaugguaaugggguuuggauaggaaggaccaaaaguaacagacuuagaaagggguuugagaugauuugggauccuaauggauggacaaauaccgacagugauuucucagugaaacaggauguuguagcaauaacugauuggucaggauacagcgggaguuucguccaacauccugaguuaacaggauuggacuguauaagaccuugcuucuggguugaguuagucagagggcugccuagagaaaauacaacaaucuggacuagugggagcagcauuucuuuuuguggcguuaauagugauacugcaaacuggucuuggccagacggugcugaguugccguucaccaucgacaaguag

SEQ ID NO: 53221 - RNA, 1413 nt, Artificial Sequence
  derived and/or modified CDS sequence (wt) from neuraminidase__InfluenzaA__AET84231
augaacccaaaucaaaagauaauaaccauuggaucaaucaguauagcaaucggaauaauuagucuaauguugcaaauaggaaguauuauuucaauaugggcuagucacucaauccauacuggaagucaaaacaacacuggaauaugcaaccaaagaaucaucacauaugaaaacagcaccugggugaaucacacauauguuaauauuaacaacacuaauguuguugcuggagaggacaaaacgucagugacauuggccggcaauucaucucuuuguucuaucaguggaugggcuauauacacaaaagacaacagcauaagaauuggcuccaaaggagauguuuuugucauaagagaaccuuucauaucauguucucacuuggaaugcagaaccuuuuuucugacccaaggcgcucuauuaaaugacaaacauucaaaugggaccguaaaggacagaaguccuuauagggccuuaaugagcuguccucuaggugaagcuccguccccauacaauucaaaguucgaaucaguugcauggucagcaagcgcaugccaugauggcaugggcugguuaacaaucggaauuucugguccagacaauggagcuguggcuguacuaaaauacaacggaauaauaacuggaaccauaaaaaguuggaaaaagcaaauauuaagaacacaagagucugaaugugucuguaugaacgggucauguuucaccauaaugaccgauggcccgaguaauaaagccuccucguacaaaauuuucaagaucgaaaaggggaagguuacuaaaucaauagaguugaaugcacccaauuuuuauuaugaggaaugcuccuguuacccagacacuggcauagugauguguguaugcagggacaacuggcaugguucaaaucgaccuugggugucuuuuaaucaaaauuuggauuaucaaauaggauacaucugcaguggaguguuuggugacaauccgcgucccgaagauggagagggcagcugcaauccagugacuguagauggagcaaacggagugaaaggguuuucauacaaauaugguaaugguguuuggauaggaaggaccaaaaguaacagacuuagaaagggguuugagaugauuugggauccuaauggauggacaaauaccgacagugauuucucagugaaacaggauguuguagcaauaacugauuggucaggguacagcggaaguuucguccaacauccugaauugacaggauuggacuguauaagaccuugcuucuggguugaguuagucagagggcugccuagagaaaauacaacaaucuggacuagugggagcagcauuucuuuuuguggcguuaauagugauacugcaaacuggucuuggccagacggugcugaguugccguucaccauugacaaguag

SEQ ID NO: 53222 - RNA, 1413 nt, Artificial Sequence
  derived and/or modified CDS sequence (wt) from neuraminidase__InfluenzaA__AET84242
augaacccaaaucaaaagauaauaaccauuggaucaaucaguauagcaaucggaauaauuagucuaauguugcaaauaggaaauauuauuucaauaugggcuagucacucaauccaaacuggaagucaaaacaacacuggaauaugcaaccaaagaaucaucacauaugaaaacagcaccugggugaaucacacauauguuaauauuaacaacacuaauguuguugcuggagaggacaaaacgucagugacauuggccggcaauucaucucuuuguucuaucaguggaugggcuauauacacaaaagacaacagcauaagaauuggcuccaaaggagauguuuuugucauaagagaaccuuucauaucauguucucacuuggaaugcagaaccuuuuuucugacccaaggcgcucuauuaaaugacaaacauucaaaugggaccguaaaggacagaagucccuauagggccuuaaugagcuguccucuaggugaagcuccguccccauacaauucaaaguucgaaucaguugcauggucagcaagcgcaugccaugauggcaugggcugguuaacaaucggaauuucugguccagacaauggagcuguggcuguacuaaaauacaacggaauaauaacuggaaccauaaaaaguuggaaaaagcaaauauuaagaacacaagagucugaaugugucuguaugaacgggucauguuucaccauaaugaccgauggcccgaguaauaaagccgccucguacaaaauuuucaagaucgaaaaggggaagguuacuaaaucaauagaguugaaugcacccaauuuuuauuaugaggaaugcuccuguuacccagacacuggcauagugauguguguaugcagggacaacuggcaugguucaaaucgaccuugggugucuuuuaaucaaaauuuggauuaucaaauaggauacaucugcaguggaguguuuggugacaauccgcgucccgaagauggagagggcagcugcaauccagugacuguugauggagcaaacggaguaaaaggguuuucauacaaauaugguaaugguguuuggauaggaaggaccaaaaguaacagacuuagaaagggguuugagaugauuugggauccuaauggauggacaaauaccgacagugauuucucagugaaacaggauguuguagcaauaacugauuggucaggguacagcggaaguuucguccaacauccugaguugacaggauuggacuguauaagaccuugcuucuggguugaguuagucagagggcugccuagagaaaauacaacaaucuggacuagugggagcagcauuucuuuuuguggcguuaauagugauacugcaaacuggucuuggccagacggugcugaguugccguucaccauugacaaguag

SEQ ID NO: 53223 - RNA, 1413 nt, Artificial Sequence
  derived and/or modified CDS sequence (wt) from neuraminidase__InfluenzaA__AET84253
augaacccaaaucaaaagauaauaaccauuggaucaaucaguauagcaaucggaauaauuagucuaauguugcaaauaggaaguauuauuucaauaugggcuagucacucaauccaaacuggaagucaaaacaacacuggaauaugcaaccaaagaaucaucacauaugaaaacagcaccugggugaaucacacauauguuaauauuaacaacacuaauguuguugcuggagaggacaaaacgucagugacauuggccggcaauucaucucuuuguucuaucaguggaugggcuauauacacaaaagacaacagcauaagaauuggcuccaaaggagauguuuuugucauaagagaaccuuucauaucauguucucacuuggaaugcagaaccuuuuuucugacccaaggcgcucuauuaaaugacaaacauucaaaugggaccguaaaggacagaaguccuuauagggccuuaaugagcuguccucuaggugaagcuccguccccauacaauucaaaguucgaaucaguugcauggucagcaagcgcaugccaugauggcaugggcugguuaacaaucggaauuucugguccagacaauggagcuguggcuguacuaaaauacaacggaauaauaacugaaaccauaaaaaguuggaaaaagcaaauauuaagaacacaagagucugaaugugucuguaugaacgggucauguuucaccauaaugaccgauggcccgaguaauaaagccgccucguacaaaauuuucaagaucgaaaaggggaagguuacuaaaucaauagaguugaaugcacccaauuuuuauuaugaggaaugcuccuguuacccagacacuggcauagugauguguguaugcagggacaacuggcaugguucaaaucgaccuugggugucuuuuaaucaaaauuuggauuaucaaauaggauacaucugcaguggaguguuuggugacaauccgcgucccgaagauggagagggcagcugcaauccagugacuguagauggagcaaacggaguaaaaggguuuucauacaaauaugguaaugguguuuggauaggaaggaccaaaaguaacagacuuagaaagggguuugagaugauuugggauccuaauggauggacaaauaccgacagugauuucucagugaaacaggauguuguagcaauaacugauuggucaggguacagcggaaguuucguccaacauccugaauugacaggauuggacuguauaagaccuugcuucuggguugaguuagucagagggcugccuagagaaaauacaacaaucuggacuagugggagcagcauuucuuuuuguggcguuaauagugauacugcaaacuggucuuggccagacggugcugaguugccguucaccauugacaaguag

SEQ ID NO: 53224 - RNA, 1413 nt, Artificial Sequence
  derived and/or modified CDS sequence (wt) from neuraminidase__InfluenzaA__AET84264
augaacccaaaucaaaagauaauaaccauuggaucaaucaguauagcaaucggaauaauuagucuaauguuucaaauaggaaguauuauuucaauaugggcuagucacucaauccaaacuggaagucaaaacaacacuggaauaugcaaccaaagaaucaucacauaugaaaacagcaccugggugaaucacacauauguuaauauuaacaacacuaauguuguugcuggagaggacaaaacgucagugacauuggccggcaauucaucucuuuguucuaucaguggaugggcuauauacacaaaagacaacagcauaagaauuggcuccaaaggagauguuuuugucauaagagaaccuuucauaucauguucucacuuggaaugcagaaccuuuuuucugacccaaggcgcucuauuaaaugacaaacauucaaaugggaccguaaaggacagaaguccuuauagggccuuaaugagcuguccucuaggugaagcuccguccccauacaauucaaaguucgaaucaguugcauggucagcaagcgcaugccaugauggcaugggcugguuaacaaucggaauuucugguccagacaauggagcuguggcuguacuaaaauacaacggaauaauaacugaaaccauaaaaaguuggaaaaagcaaauauuaagaacacaagagucugaaugugucuguaugaacgggucauguuucaccauaaugaccgauggcccgaguaauaaagccgccucguacaaaauuuucaagaucgaaaaggggaagguuacuaaaucaauagaguugaaugcacccaauuuuuauuaugaggaaugcuccuguuacccagacacuggcauagugauguguguaugcagggacaacuggcaugguucaaaucgaccuugggugucuuuuaaucaaaauuuggauuaucaaauaggauacaucugcaguggaguguuuggugacaauccgcgucccgaagauggagagggcagcugcaauccagugacuguugauggagcaaacggaguaaaagguuuuucauacaaauaugguaaugguguuuggauaggaaggaccaaaaguaacagacuuagaaagggguuugagaugauuugggauccuaauggauggacaaauaccgacagugauuucucagugaaacaggauguuguagcaauaacugauuggucaggguacagcggaaguuucguccaacauccugaguugacaggauuggacuguauaagaccuugcuucuggguugaguuagucagagggcugccuagagaaaauacaacaaucuggacuagugggagcagcauuucuuuuuguggcguuaauagugauacugcaaacuggucuuggccagacggugcugaguugccguucaccauugacaaguag

SEQ ID NO: 53225 - RNA, 1413 nt, Artificial Sequence
  derived and/or modified CDS sequence (wt) from neuraminidase__InfluenzaA__AET84275
augaacccaaaucaaaagauaauaaccauuggaucaaucaguauagcaaucggaauaauuagucuaauguugcaaauaggaaauauuauuucaauaugggcuagucacucaauccaaacugggagucaaaacaacacuggaauaugcaaccaaagaaucaucacauaugaaaacagcaccugggugaaucacacauauguuaauauuaacaacacuaauguuguugcuggagaggacaaaacaucagugacauuggccggcaauucaucucuuuguucuaucaguggaugggcuauauacacaaaagacaacagcauaagaauuggcuccaaaggagauguuuuugucauaagagaaccuuucauaucauguucucacuuggaaugcagaaccuuuuuucugacccaaggcgcucuauuaaaugacaaacauucaaaugggaccguaaaggacagaaguccuuauagggccuuaaugagcuguccucuaggugaagcuccguccccauacaauucaaaguucgaaucaguugcauggucagcaagcgcaugccaugauggcaugggcugguuaacaaucggaauuucugguccagacaauggagcuguggcuguacuaaaauacaacggaauaauaacuggaaccauaaaaaguuggaaaaagcaaauauuaagaacacaagagucugaaugugucuguaugaacgggucauguuucaccauaaugaccgauggcccgaguaauaaggccgccucguacaaaauuuucaagaucgaaaaggggaagguuacuaaaucaauagaguugaaugcacccaauuuuuauuaugaggaaugcuccuguuacccagauacuggcauagugauguguguaugcagggacaacuggcaugguucaaaucgaccuugggugucuuuuaaucaaaacuuggauuaucaaauaggauacaucugcaguggaguguuuggugacaauccgcgucccaaagauggagagggcagcugcaauccagugacuguugauggagcaaacggaguaaaaggguuuucauacaaauaugguaaugguguuuggauagggaggaccaaaaguaacagacuuagaaagggguuugagaugauuugggauccuaauggauggacaaauaccgacagugauuucucagugaaacaggauguuguagcaauaacugauuggucaggguacagcggaaguuucguccaacauccugaguuaacaggauuggacuguauaagaccuugcuucuggguugaguuagucagagggcugccuagagaaaauacaacaaucuggacuagugggagcagcauuucuuuuuguggcguuaauagugauacugcaaacuggucuuggccagacggugcugaguugccguucaccauugacaaguag

SEQ ID NO: 53226 - RNA, 1413 nt, Artificial Sequence
  derived and/or modified CDS sequence (wt) from neuraminidase__InfluenzaA__AET84286
augaacccaaaucaaaagauaauaaccauuggaucaaucaguauagcaaucggaauaauuagucuaauguugcaaauaggaaauauuauuucaauaugggcuagucacucaauccaaacugggagucaaaacaacacuggaauaugcaaccaaagaaucaucacauaugaaaacagcacuugggugaaucacacauauguuaauauuaacaacacuaauguuguugcuggagaggacaaaacaucagugacauuggccggcaauucaucucuuuguucuaucaguggaugggcuauauacacaaaagacaacagcauaagaauuggcuccaaaggagauguuuuugucauaagagaaccuuucauaucauguucucacuuggaaugcagaaccuuuuuucugacccaaggcgcucuauuaaaugacaaacauucaaaugggaccguaaaggacagaaguccuuauagggccuuaaugagcuguccucuaggugaagcuccguccccauacaauucaaaguucgaaucaguugcauggucagcaagcgcaugccaugauggcaugggcugguuaacaaucggaauuucugguccagacaauggagcuguggcuguacuaaaauacaacggaauaauaacuggaaccauaaaaaguuggaaaaagcaaauauuaagaacacaagagucugaaugugucuguaugaacgggucauguuucaccauaaugaccgauggcccgaguaauaaggccgccucguacaaaauuuucaagaucgaaaaggggaagguuacuaaaucaauagaguugaaugcacccaauuuuuauuaugaggaaugcuccuguuacccagauacuggcauagugauguguguaugcagggacaacuggcaugguucaaaucgaccuugggugucuuuuaaucaaaacuuggauuaucaaauaggauacaucugcaguggaguguuuggugacaauccgcgucccgaagauggagagggcagcugcaauccagugacuguugauggagcaaacggaguaaaaggguuuucauacaaauaugguaaugguguuuggauagggagaaccaaaaguaacagacuuagaaagggguuugagaugauuugggauccuaauggauggacaaauaccgacagugauuucucagugaaacaggauguuguagcaauaacugauuggucaggguacagcggaaguuucguccaacauccugaguuaacaggauuggacuguauaagaccuugcuucuggguugaguuagucagagggcugccuagagaaaauacaacaaucuggacuagugggagcagcauuucuuuuuguggcguuaauagugauacugcaaacuggucuuggccagacggugcugaguugccguucaccauugacaaguag

SEQ ID NO: 53227 - RNA, 1413 nt, Artificial Sequence
  derived and/or modified CDS sequence (wt) from neuraminidase__InfluenzaA__AET84297
augaacccaaaucaaaagauaauaaccauuggaucaaucaguauagcaaucggaauaauuagucuaauguugcaaauaggaaauauuauuucaauaugggcuagucacucaauccaaacuggaagucaaaacaacacuggaauaugcaaccaaagaaucaucacauaugaaaacagcaccugggugaaucacacauauguuaauauuaacaacacuaauguuguugcuggagaggacaaaacgucagugacauuggccggcaauucaucucuuuguucuaucaguggaugggcuauauacacaaaagacaacagcauaagaauuggcuccaaaggagauguuuuugucauaagagaaccuuucauaucauguucucacuuggaaugcagaaccuuuuuucugacccaaggcgcucuauuaaaugacaaacauucaaaugggaccguaaaggacagaaguccuuauagggccuuaaugagcuguccucuaggugaagcuccguccccauacaauucaaaguucgaaucaguugcauggucagcaagcgcaugccaugauggcaugggcugguuaacaaucggaauuucugguccagacaauggagcuguagcuguacuaaaauacaacggaauaauaacuggaaccauaaaaaguuggaaaaagcaaauauuaagaacacaagagucugaaugugucuguaugaacgggucauguuucaccauaaugaccgauggcccgaguaauaaggccgccucguacaaaauuuucaagaucgaaaaggggaagguuacuaaaucaauagaguugaaugcacccaauuuuuauuaugaggaaugcuccuguuacccagacacuggcauagugauguguguaugcagggacaacuggcaugguucaaaucgaccuugggugucuuuuaaucaaaacuuggauuaucaaauaggauacaucugcaguggaguguuuggugacaauccgcgucccgaagauggagagggcagcugcaauccagugacuguugauggagcaaacggaguaaaaggguuuucauacaaauaugauaaugguguuuggauaggaaggaccaaaaguaacagacuuagaaagggguuugagaugauuugggauccuaauggauggacaaauaccgacagugauuucucagugaaacaggauguuguagcaauaacugauuggucaggguacagcggaaguuucguccaacauccugaguuaacaggauuggacuguauaagaccuugcuucuggguugaguuagucagagggcugccuagagaaaauacaacaaucuggacuagugggagcagcauuucuuuuuguggcguuaauagugauacuacaaacuggucuuggccagacggugcugaguugccguucaccauugacaaguag

SEQ ID NO: 53228 - RNA, 1413 nt, Artificial Sequence
  derived and/or modified CDS sequence (wt) from neuraminidase__InfluenzaA__AET84308
augaacccaaaucaaaagauaauaaccauuggaucaaucaguauagcaaucggaauaauuagucuaauguugcaaauaggaaauauuauuucaauaugggcuagucacucaauccaaacuggaagucaaaacaacacuggaauaugcaaccaaagaaucaucacauaugaaaacagcaccugggugaaucacacauauguuaauauuaacaacacuaauguuguugcuggagaggacaaaacuucagugacauuggccggcaauucaucucuuuguucuaucaguggaugggcuauauacacaaaagacaacagcauaagaauuggcuccaaaggagauguuuuugucauaagagaaccuuucauaucauguucucacuuggaaugcagaaccuuuuuucugacccaaggcgcucuauuaaaugacaaacauucaaaugggaccguaaaggacagaaguccuuauagggccuuaaugagcuguccucuaggugaagcuccguccccauacaauucaaaguucgaaucaguugcauggucagcaagcgcaugccaugauggcaugggcugguuaacaaucggaauuucugguccagacaauggagcuguagcuguacuaaaauacaacggaauaauaacugaaaccauaaaaaguuggaaaaagcaaauauuaagaacacaagagucugaaugugucuguaugaacgggucauguuucaccauaaugaccgauggcccgaguaauaaggccgccucguacaaaauuuucaagaucgaaaaggggaagguuacuaaaucaauagaguugaaugcacccaauuuucauuaugaggaaugcuccuguuacccagacacuggcauagugauguguguaugcagggacaacuggcaugguucaaaucgaccuugggugucuuuuaaucaaaacuuggauuaucaaauaggauacaucugcaguggaguguuuggugacaauccgcgucccgaagauggagagggcagcugcaauccagugacuguugauggagcaaacggaguaaaaggguuuucauacaaauaugauaaugguguuuggauaggaaggaccaaaaguaacagacuuagaaagggguuugagaugauuugggauccuaauggauggacaaauaccgacagugauuucucagugaaacaggauguuguagcaauaacugauuggucaggguacagcggaaguuucguccaacauccugaguuaacaggauuggacuguauaagaccuugcuucuggguugaguuagucagagggcugccuagagaaaauacaacaaucuggacuagugggagcagcauuucuuuuuguggcguuaauagugauacuacaaacuggucuuggccagacggugcugaguugccguucaccauugacaaguag

SEQ ID NO: 53229 - RNA, 1413 nt, Artificial Sequence
  derived and/or modified CDS sequence (wt) from neuraminidase__InfluenzaA__AET84319
augaacccaaaucaaaagauaauaaccauuggaucaaucaguauagcaaucggaauaauuagucuaauguugcaaauaggaaauauuauuucaauaugggcuagucacucaauucaaacuggaagucaaaacaacacuggaauaugcaaccaaagaaucaucacauaugaaaacagcaccugggugaaucacacauauguuaauauuaacaacacuaauguuguugcuggagaggacaaaacuucaaugacauuggccggcaauucaucucuuuguucuaucaguggaugggcuauauacacaaaagacaacagcauaagaauuggcuccaaaggagauguuuuugucauaagagaaccuuucauaucauguucucacuuggaaugcagaaccuuuuuucugacccaaggcgcucuauuaaaugacaaacauucaaauaggaccguaaaggacagaaguccuuauagggccuuaaugagcuguccucuaggugaagcuccguccccauacaauucaaaguucgaaucaguugcauggucagcaagcgcaugccaugauggcaugggcugguuaacaaucggaauuucugguccagacaauggagcuguggcuguacuaaaauacaacggaauaauaacugaaaccauaaaaaguuggaaaaagcaaauauuaagaacacaagagucugaaugugucuguaugaacgggucauguuucaccauaaugaccgauggcccgaguaauaaggccgccucguacaaaauuuucaagaucgaaaaggggaagguuacuaaaucaauagaguugaaugcacccaauuuuuauuaugaggaaugcuccuguuacccagacacuggcauagugauguguguaugcagggacaacuggcaugguucaaaucgaccuugggugucuuuuaaucaaaacuuggauuaucaaauaggauacaucugcaguggaguguuuggugacaauccgcgucccgaagauggagagggcagcugcaauccagugacuguugauggagcaaacggaguaaaaggauuuucauacaaauaugguaaugguguuuggauaggaaggaccaaaaguaacagacuuagaaagggguuugagaugauuugggauccuaauggauggacaaauaccgacagugauuucucagugaaacaggauguuguagcaauaacugauuggucaggguacagcggaaguuucguccaacauccugaguuaacaggauuggacuguauaagaccuugcuucuggguugaguuagucagagggcugccuagagaaaauacaacaaucuggacuagugggagcagcauuucuuuuuguggcgucaauagugauacugcaaacuggucuuggccagacggugcugaguugccguucaccaucgacaaguag

SEQ ID NO: 53230 - RNA, 1413 nt, Artificial Sequence
  derived and/or modified CDS sequence (wt) from neuraminidase__InfluenzaA__AET84330
augaacccaaaucaaaggauaauaaccauuggaucaaucaguauagcaaucggaauaauuagucuaauguugcaaauaggaaauauuauuucaauaugggcuagucacucaauccaaauuggaagucaaaacaacacuggaauaugcaaccaaagaaucaucacauaugaaaacagcaccugggugaaucauacauauguuaauauuaacaacacuaauguuguugcuggagaggacaaaacgucagugacauuggccggcaauucaucucuuuguucuaucaguggaugggcuauauacacaaaagacaacagcauaagaauuggcuccaaaggagauguuuuugucauaagagaaccuuucauaucauguucucacuuggaaugcagaaccuuuuuucugacccaaggcgcucuauuaaaugacaaacauucaaaugggaccgcaaaggacagaaguccuuauagggccuuaaugagcuguccucuaggugaagcuccguccccauacaauucaaaguucgaaucaguugcauggucagcaagcgcaugccaugauggcaugggcugguuaacaaucggaauuucugguccagacaauggagcuguggcuguacuaaaauacaacggaauaauaacuggaaccauaaaaaguuggaaaaagcaaauauuaagaacacaagagucugaaugugucuguaugaacgggucauguuucaccauaaugaccgauggcccgaguaauaaggccgccucguacaaaauuuucaagaucgaaaaggggaagguuacuaaaucaauagaguugaaugcacccaauuuuuauuaugaggaaugcuccuguuacccagacacuggcauagugauguguguaugcagggacaacuggcaugguucaaaucgaccuugggugucuuuuaaucaaaacuuggauuaucaaauaggauacaucugcaguggaguguuuggugacaauccgcgucccaaagauggagagggcagcugcaauccagugacuguugauggagcaaacggaguaaaaggguuuucauacaaauaugguaaugguguuuggauaggaaggaccaaaaguaacagacuuagaaagggguuugagaugauuugggauccuaauggauggacaaauaccgacagugauuucucagugaaacaggauguuguagcaauaacugauuggucaggguacagcggaaguuucguccaacauccugaguuaacaggauuggacuguauaagaccuugcuucuggguugaguuagucagagggcugccuagagaaaauacaacaaucuggacuagugggagcagcauuucuuuuuguggcguuaauagugauacugcaaacuggucuuggccagacggugcugaguugccguucaccauugacaaguag

SEQ ID NO: 53231 - RNA, 1413 nt, Artificial Sequence
  derived and/or modified CDS sequence (wt) from neuraminidase__InfluenzaA__AET84341
augaacccaaaucaaaggauaauaaccauuggaucaaucaguauagcaaucggaauaauuagucuaauguugcaaauaggaaauauuauuucaauaugggcuagucacucaauccaaauuggaagucaaaacaacacuggaauaugcaaccaaagaaucaucacauaugaaaacagcaccugggugaaucauacauauguuaauauuaacaacacuaauguuguugcuggagaggacaaaacgucagugacauuggccggcaauucaucucuuuguucuaucaguggaugggcuauauacacaaaagacaacagcauaagaauuggcuccaaaggagauguuuuugucauaagagaaccuuucauaucauguucucacuuggaaugcagaaccuuuuuucugacccaaggcgcucuauuaaaugacaaacauucaaaugggaccgcaaaggacagaaguccuuauagggccuuaaugagcuguccucuaggugaagcuccguccccauacaauucaaaguucgaaucaguugcauggucagcaagcgcaugccaugauggcaugggcugguuaacaaucggaauuucugguccagacaauggagcuguggcuguacuaaaauacaacggaauaauaacuggaaccauaaaaaguuggaaaaagcaaauauuaagaacacaagagucugaaugugucuguaugaacgggucauguuucaccauaaugaccgauggcccgaguaauaaggccgccucguacaaaauuuucaagaucgaaaaggggaagguuacuaaaucaauagaguugaaugcacccaauuuuuauuaugaggaaugcuccuguuacccagacacuggcauagugauguguguaugcagggacaacuggcaugguucaaaucgaccuugggugucuuuuaaucaaaacuuggauuaucaaauaggauacaucugcaguggaguguuuggugacaauccgcgucccaaagauggagagggcagcugcaauccagugacuguugauggagcaaacggaguaaaaggguuuucauacaaauaugguaaugguguuuggauaggaaggaccaaaaguaacagacuuagaaagggguuugagaugauuugggauccuaauggauggacaaauaccgacagugauuucucagugaaacaggauguuguagcaauaacugauuggucaggguacagcggaaguuucguccaacauccugaguuaacaggauuggacuguauaagaccuugcuucuggguugaguuagucagagggcugccuaaagaaaauacaacaaucuggacuagugggagcagcauuucuuuuuguggcguuaauagugauacugcaaacuggucuuggccagacggugcugaguugccguucaccauugacaaguag

SEQ ID NO: 53232 - RNA, 1413 nt, Artificial Sequence
  derived and/or modified CDS sequence (wt) from neuraminidase__InfluenzaA__AET84363
augaacccaaaucaaaggauaauaaccauuggaucaaucaguauagcaaucggaauaauuagucuaauguugcaaauaggaaauauuauuucaauaugggcuagucacucaauccaaacuggaagucaaaacaacacuggaauaugcaaccaaagaaucaucacauaugaaaacagcaccugggugaaucauacauauguuaauauuaacaacacuaauguuguugcuggagaggacaaaacgucaaugacauuggccggcaauucaucucuuuguucuaucaguggaugggcuauauacacaaaagacaacagcauaagaauuggcuccaaaggagauguuuuugucauaagagaaccuuucauaucauguucucacuuggaaugcagaaccuuuuuucugacccaaggcgcucuauuaaaugacaaacauucaaaugggaccgcaaaggacagaaguccuuauagggccuuaaugagcuguccucuaggugaagcuccguccccauacaauucaaaguucgaaucaguugcauggucagcaagcgcaugccaugauggcaugggcugguuaacaaucggaauuucugguccagacaauggagcuguggcuguacuaaaauacaacggaauaauaacuggaaccauaaaaaguuggaaaaagcaaauauuaagaacacaagagucugaaugugucuguaugaacgggucauguuucaccauaaugaccgauggcccgaguaauaaggccgccucguacaaaauuuucaagaucgaaaaggggaagguuaccaaaucaauagaguugaaugcacccaauuuuuauuaugaggaaugcuccuguuacccagacacuggcauagugauguguguaugcagggacaacuggcaugguucaaaucgaccuugggugucuuuuaaucaaaacuuggauuaucaaauaggauacaucugcaguggaguguuuggugacaauccgcgucccaaagauggagagggcagcugcaauccagugacuguugauggagcaaacggaguaaaaggguuuucauacaaauaugguaaugguguuuggauaggaaggaccaaaaguaacagacuuagaaagggguuugagaugauuugggauccuaauggauggacaaauaccgacagugauuucucagugaaacaggauguuguagcaauaacugauuggucaggguacagcggaaguuucguccaacauccugaguuaacaggauuggacuguauaagaccuugcuucuggguugaguuagucagagggcugccuagagaaaauacaacaaucuggacuagugggagcagcauuucuuuuuguggcguuaauagugauacugcaaacuggucuuggccagacggugcugaguugccguucaccauugacaaguag

SEQ ID NO: 53233 - RNA, 1413 nt, Artificial Sequence
  derived and/or modified CDS sequence (wt) from neuraminidase__InfluenzaA__AET84374
augaacccaaaucaaaggauaauaaccauuggaucaaucaguauagcaaucggaauaauuagucuaauguugcaaauaggaaauauuauuucaauaugggcuagucacucaauccaaauuggaagucaaaacaacacuggaauaugcaaccaaagaaucaucacauaugaaaacagcaccugggugaaucauacauauguuaauauuaacaacacuaauguuguugcuggagaggacaaaacgucagugacauuggccggcaauucaucucuuuguucuaucaguggaugggcuauauacacaaaagacaacagcauaagaauuggcuccaaaggagauguuuuugucauaagagaaccuuucauaucauguucucacuuggaaugcagaaccuuuuuucugacccaaggcgcucuauuaaaugacaaacauucaaaugggaccgcaaaggacagaaguccuuauagggccuuaaugagcuguccucuaggugaagcuccguccccauacaauucaaaguucgaaucaguugcauggucagcaagcgcaugccaugauggcaugggcugguuaacaaucggaauuucugguccagacaauggagcuguggcuguacuaaaauacaacggaauaauaacugaaaccauaaaaaguuggaaaaagcaaauauuaagaacacaagagucugaaugugucuguaugaacgggucauguuucaccauaaugaccgauggcccgaguaauaaggccgccucguacaaaauuuucaagaucgaaaaggggaagguuacuaaaucaauagaguugaaugcacccaauuuuuauuaugaggaaugcuccuguuacccagacacuggcauagugauguguguaugcagggacaacuggcaugguucaaaucgaccuugggugucuuuuaaucaaaacuuggauuaucaaauaggauacaucugcaguggaguguuuggugacaauccgcgucccaaagauggagagggcagcugcaauccagugacuguugauggagcaaacggaguaaaaggguuuucauacaaauaugguaaugguguuuggauaggaaggaccaaaaguaacagacuuagaaagggguuugagaugauuugggauccuaauggauggacaaauaccgacagugauuucucagugaaacaggauguuguagcaauaacugauuggucaggguacagcggaaguuucguccaacauccugaguuaacaggauuggacuguauaagaccuugcuucuggguugaguuagucagagggcugccuagagaaaauacaacaaucuggacuagugggagcagcauuucuuuuuguggcguuaauagugauacugcaaacuggucuuggccagacggugcugaguugccguucaccauugacaaguag

SEQ ID NO: 53234 - RNA, 1413 nt, Artificial Sequence
  derived and/or modified CDS sequence (wt) from neuraminidase__InfluenzaA__AET84396
augaacccaaaucaaaggauaauaaccauuggaucaaucaguauagcaaucggaauaauuagucuaauguuacaaauaggaaauauuauuucaauaugggcuagucacucaauccaaacuggaagucaaaacaacacuggaauaugcaaccaaagaaucaucacauaugaaaacagcaccugggugaaucauacauauguuaauauuaacaacacuaauguuguugcuggagaggacaaaacgucaaugacauuggccggcaauucaucucuuuguucuaucaguggaugggcuauauacacaaaagacaacagcauaagaauuggcuccaaaggagauguuuuugucauaagagaaccuuucauaucauguucucacuuggaaugcagaaccuuuuuucugacccaaggcgcucuauuaaaugacaaacauucaaaugggaccgcaaaggacagaaguccuuauagggccuuaaugagcuguccucuaggugaagcuccguccccauacaauucaaaguucgaaucaguugcauggucagcaagcgcaugccaugauggcaugggcugguuaacaaucggaauuucugguccagacaauggagcuguggcuguacuaaaauacaacggaauaauaacugaaaccauaaaaaguuggaaaaagcaaauauuaagaacacaagagucugaaugugucuguaugaacgggucauguuucaccauaaugaccgauggcccgaguaauaaggccgccucguacaaaauuuucaagaucgaaaaggggaagguuacuaaaucaauagaguugaaugcacccaauuuuuauuaugaggaaugcuccuguuacccagacacuggcauagugauguguguaugcagggacaacuggcaugguucaaaucgaccuugggugucuuuuaaucaaaacuuggauuaucaaauaggauacaucugcaguggaguguuuggugacaauccgcgucccaaagauggagagggcagcugcaauccagugacuguugauggagcaaacggaguaaaaggguuuucauacaaauaugguaaugguguuuggauaggaaggaccaaaaguaacagacuuagaaagggguuugagaugauuugggauccuaauggauggacaaauaccgacagugauuucucagugaaacaggauguuguagcaauaacugauuggucaggguacagcggaaguuucguccaacauccugaguuaacaggauuggacuguauaagaccuugcuucuggguugaguuagucagagggcugccuagagaaaauacaacaaucuggacuagugggagcagcauuucuuuuuguggcguuaauagugauacugcaaacuggucuuggccagacggugcugaguugccguucaccauugacaaguag

SEQ ID NO: 53235 - RNA, 1413 nt, Artificial Sequence
  derived and/or modified CDS sequence (wt) from neuraminidase__InfluenzaA__AET84407
augaacccaaaucaaaggauaauaaccauuggaucaaucaguauagcaaucggaauaauuagucuaauguugcaaauaggaaauauuauuucaauaugggcuagucacucaauccaaauuggaagucaaaacaacacuggaauaugcaaccaaagaaucaucacauaugaaaacagcaccugggugaaucauacauauguuaauauuaacaacacuaauguuguugcuggagaggacaaaacgucagugacauuggccggcaauucaucucuuuguucuaucaguggaugggcuauauacacaaaagacaacagcauaagaauuggcuccaaaggagauguuuuugucauaagagaaccuuucauaucauguucucacuuggaaugcagaaccuuuuuucugacccaaggcgcucuauuaaaugacaaacauucaaaugggaccgcaaaggacagaaguccuuauagggccuuaaugagcuguccucuaggugaagccccguccccauacaauucaaaguucgaaucaguugcauggucagcaagcgcaugccaugauggcaugggcugguuaacaaucggaauuucugguccagacaauggagcuguggcuguacuaaaauacaacggaauaauaacuggaaccauaaaaaguuggaaaaagcaaauauuaagaacacaagagucugaaugugucuguaugaacgggucauguuucaccauaaugaccgauggcccgaguaauaaggccgccucguacaaaauuuucaagaucgaaaaggggaagguuacuaaaucaauagaguugaaugcacccaauuuuuauuaugaggaaugcuccuguuacccagacacuggcauagugauguguguaugcagggacaacuggcaugguucaaaucgaccuugggugucuuuuaaucaaaacuuggauuaucaaauaggauacaucugcaguggaguguuuggugacaauccgcgucccgaagauggagagggcagcugcaauccagugacuguugauggagcaaacggaguaaaaggguuuucauacaaauaugguaaugguguuuggauaggaaggaccaaaaguaacagacuuagaaagggguuugagaugauuugggauccuaauggauggacaaauaccgacagugauuucucagugaaacaggauguuguagcaauaacugauuggucaggguacagcggaaguuucguccaacauccugaguuaacaggauuggacuguauaagaccuugcuucuggguugaguuagucagagggcugccuagagaaaauacaacaaucuggacuagugggagcagcauuucuuuuuguggcguuaauagugauacugcaaacuggucuuggccagacggugcugaguugccguucaccauugacaaguag

SEQ ID NO: 53236 - RNA, 1413 nt, Artificial Sequence
  derived and/or modified CDS sequence (wt) from neuraminidase__InfluenzaA__AET84418
augaacccaaaucaaaggauaauagccauuggaucaaucaguauagcaaucggaauaauuagucuaauguugcaaauaggaaauauuauuucaauaugggcuagucacucaauccaaauuggaagucaaaacaacacuggaauaugcaaccaaagaaucaucacauaugaaaacagcaccugggugaaucauacauauguuaauauuaacaacacuaauguuguugcuggagaggacaaaacgucagugacauuggccggcaauucaucucuuuguucuaucaguggaugggcuauauacacaaaagacaacagcauaagaauuggcuccaaaggagauguuuuugucauaagagaaccuuucauaucauguucucacuuggaaugcagaaccuuuuuucugacccaaggcgcucuauuaaaugacaaacauucaaacgggaccgcaaaggacagaaguccuuauagggccuuaaugagcuguccucuaggugaagcuccguccccauacaauucaaaguucgaaucaguugcauggucagcaagcgcaugccaugauggcaugggcugguuaacaaucggaauuucugguccagacaauggagcuguggcuguacuaaaauacaacggaauaauaacugaaaccauaaaaaguuggaaaaagcaaauauuaagaacacaagagucugaaugugucuguaugaacgggucauguuucaccauaaugaccgauggcccgaguaauaaggccgccucguacaaaauuuucaagaucgaaaaggggaagguuacuaaaucaauagaguugaaugcacccaauuuuuauuaugaggaaugcuccuguuacccagacacuggcauagugauguguguaugcagggacaacuggcaugguucaaaucgaccuugggugucuuuuaaucaaaacuuggauuaucaaauaggauacaucugcaguggaguguuuggugauaauccgcgucccgaagauggagagggcagcugcaauccagugacuguugauggagcaaacggaguaaaaggguuuucauacaaauaugguaaugguguuuggauaggaaggaccaaaaguaacagacuuagaaagggguuugagaugauuugggauccuaauggauggacaaauaccgacagugauuucucagugaaacaggauguuguagcaauaacugauuggucaggguacagcggaaguuucguccaacauccugaguuaacaggauuggacuguauaagaccuugcuucuggguugaguuagucagagggcugccuagagaaaauacaacaaucuggacuagugggagcagcauuucuuuuuguggcguuaauagugauacugcaaacuggucuuggccagacggugcugaguugccguucaccauugacaaguag

SEQ ID NO: 53237 - RNA, 1413 nt, Artificial Sequence
  derived and/or modified CDS sequence (wt) from neuraminidase__InfluenzaA__AET84429
augaacccaaaucaaaagauaauaaccauuggaucaaucaguauagcaaucggaauaauuagucuaauguugcaaauaggaaauauuauuucaauaugggcuagucacucaauccaaacuggaagucaaaacaacacuggaauaugcaaccaaagaaucaucacauaugaaaacagcaccugggugaaucacacauauguuaguauuaacaacacuaauguuguugcuggaaaggacaaaacgucagugacauuggccggcaauucaucucuuuguucuaucaguggaugggcuauauacacaaaagacaacagcauaagaauuggcuccaaaggagauguuuuugucauaagagaaccuuucauaucauguucucacuuggaaugcagaaccuuuuuucugacccaaggcgcucuauuaaaugacaaacauucaaaugggaccguaaaggacagaaguccuuauagggccuuaaugagcuguccucuaggugaagcuccguccccauacaauucaaaguucgaaucaguugcauggucagcaagcgcaugccaugauggcaugggcugguuaacaaucggaauuucugguccagacaauggagcuguggcuguacuaaaauacaacggaauaauaacuggaaccauaaaaaguuggaaaaagcaaauauuaagaacacaagagucugaaugugucuguaugaacgggucauguuucaccauaaugaccgauggcccgaguaauaaggccgccucguacaaaauuuucaagaucgaaaaggggaagguuacuaaaucaauagaguugaaugcacccaauuuuuauuaugaggaaugcuccuguuacccagacacuggcauagugauguguguaugcagggacaacuggcaugguucaaaucgaccuugggugucuuuuaaucaagacuuggauuaucaaauaggauacaucugcaguggaguguuuggugacaauccccgucccaaagauggagagggcagcugcaauccagugacuguugauggagcaaacggaguaaaaggguuuucauacaaauaugguaaugguguuuggauaggaaggaccaaaaguaacagacuuagaaagggguuugagaugauuugggauccuaauggauggacaaauaccgacagugauuucucagugaaacaggauguuguagcaauaacugauuggucaggguacagcggaaguuucguccaacauccugaguuaacaggauuggauuguauaagaccuugcuucuggguugaguuagucagagggcugccuagagaaaauacaacaaucuggacuagugggagcagcauuucuuuuuguggcguuaauagugauacugcaaacuggucuuggccagacggugcugaguugccauuuaccauugacaaguag

SEQ ID NO: 53238 - RNA, 1413 nt, Artificial Sequence
  derived and/or modified CDS sequence (wt) from neuraminidase__InfluenzaA__AET84440
augaacccaaaucaaaagauaauaaccauuggaucaaucaguauagcaaucggaauaauuagucuaauguugcaaauaggaaauauuauuucaauaugggcuagucacucaauccaaacuggaagucaaaacaacacuggaauaugcaaccaaagaaucaucacauaugaaaacagcaccugggugaaucacacauauguuaauauuaacaacacuaauguuguugcuggagaggacaaaacgucagugacauuggccggcaauucaucucuuuguucuaucaguggaugggcuauauacacaaaagacaacagcauaagaauuggcuccaaaggagauguuuuugucauaagagaaccuuucauaucauguucucacuuggaaugcagaaccuuuuuucugacccaaggcgcucuauuaaaugacaaacauucaaaugggaccguaaaggacagaaguccuuauagggccuuaaugagcuguccucuaggugaagcuccguccccauacaauucaaaguucgaaucaguugcauggucagcaagcgcaugccaugauggcaugggcugguuaacaaucggaauuucugguccagacaauggagcuguggcuguacuaaaauacaacggaauaauaacugaaaccauaaaaaguuggaaaaagcaaauauuaagaacacaagagucugaaugugucuguaugaacgggucauguuucaccauaaugaccgauggcccgaguaauaaagccgccucguacaaaauuuucaagaucgaaaaggggaagguuacuaaaucaauagaguugaaugcacccaauuuuuauuaugaggaaugcuccuguuacccagacacuggcauagugauguguguaugcagggacaacuggcaugguucaaaucgaccuugggugucuuuuaaucaaaacuuggauuaucaaauaggauacaucugcaguggaguguuuggugacaauccccgucccaaagauggagagggcagcugcaauccagugacuguugauggagcaaacggaguaaaaggguuuucauacaaauaugguaaugguguuuggauaggaaggaccaaaaguaacagacuuagaaagggguuugagaugauuugggauccuaauggauggacaaauaccgacagugauuucucagugaaacaggauguuguagcaauaacugauuggucaggguacagcggaaguuucguccaacauccugaguuaacaggauuggacuguauaagaccuugcuucuggguugaguuagucagagggcugccuagagaaaauacaacaaucuggacuagugggagcagcauuucuuuuuguggcguuaauagugauacugcaaacuggucuuggccagacggugcugaguugccguucaccauugacaaguag

SEQ ID NO: 53239 - RNA, 1413 nt, Artificial Sequence
  derived and/or modified CDS sequence (wt) from neuraminidase__InfluenzaA__AET84451
augaacccaaaucaaaaaauaauaaccauuggaucaaucaguauagcaaucggaauaauuagucuaauauugcaaauaggaaauauuauuucaauaugggcuagucacucaauccaaacuggaagucaaaaccacacuggaauaugcaaccaaagaaucaucacauaugaaaacagcaccugggugaauaacacauauguuaauauuaacaacaccaauguuguugcugaaaaggacaaaacuucagugacauuggccggcaauucaucucuuuguucuaucaguggaugggcuauauacacaaaagacaacagcauaagaauuggcuccaaaggagauguuuuugucauaagagaaccuuucauaucauguucucacuuggaaugcagaaccuuuuuucugaccaaaggugcucuauuaaaugacaaacauucaaaugggaccguaacggacagaaguccuuauagggccuuaaugagcuguccucuaggugaagcuccguccccauacaauucaagguucgaaucaguugcauggucagcaagcgcaugccaugauggcaugggcugguuaacaaucggaauuucugguccagacaauggagcuguggcuguacuaaaauacaacggaauaauaacugaaaccauaaaaaguuggaaaaagcgaauauuaagaacacaagagucugaaugugucuguaugaacgggucauguuucaccauaaugaccgauggcccgaguaauggggccgccucguacaaaauuuucaagaucgaaaaggggaagguuaccaaaacaauagaguugaaugcacccaauuuucauuaugaggaauguuccuguuacccagacacuggcacagugauguguguaugcagagacaacuggcaugguucaaaucgaccuugggugucuuuuaaucaaaacuuggauuaucaaauaggauacaucugcaguggaguguucggugacaauccgcgucccaaagauggagagggcagcugcaauccagugacuguugauggagcagacggaguaaaaggguuuucauacaaauaugguaaugguguuuggauaggaaggaccaaaaguaacagacuuagaaagggguuugagaugauuugggauccuaauggauggacaaauaccgacagugauuucucaguuaaacaggauguuguagcaauaacugauuggucaggguacagcggaaguuuuguucaacauccugaguuaacaggauuggacuguauaagaccuugcuucuggguugaguuagucagagggcugccuagggaaaauacaacaaucuggacuagugggagcagcauuucuuuuuguggcguuaauagugguacugcaaacuggucuuggccagacggugcugaguugccguucaccauugacaaguag

SEQ ID NO: 53240 - RNA, 1410 nt, Artificial Sequence
  derived and/or modified CDS sequence (wt) from neuraminidase__InfluenzaA__AEV53421
augaauccaaaccaaaagauaauaaccauugguucggucuguaugacaauuggaauggcuaacuuaauauuacaaauuggaaacauaaucucaauauggauuagccacucaauucaacuugggaaucaaaaucagauugaaacaugcaaucaaagcgucauuacuuaugaaaacaacacuuggguaaaucagacauauguuaacaucagcaacaccaacuuugcugcuggacagucagugguuuccgugaaauuagcgggcaauuccucucucugcccuguuaguggaugggcuauauacaguaaagacaacaguauaagaaucgguucaaagggggauguguuugucauaagggaaccauucauaucaugcucccccuuggaaugcagaaccuucuucuugacucaaggggccuugcuaaaugacaaacauuccaauggaaccauuaaagacaggagcccauaucgaacccuaaugagcuguccuauuggugaaguucccucuccauacaacucaagauuugagucagucgcuuggucagcaagugcuugucaugauggcaucaauuggcuaacaauuggaauuucuggcccagacaauggggcaguggcuguguuaaaguacaacggcauaauaacagacacuaucaagaguuggagaaacaauauauugagaacacaagagucugaaugugcauguguaaaugguucuugcuuuacuguaaugaccgauggaccaagugauggacaggccucauacaagaucuucagaauagaaaagggaaagauagucaaaucagucgaaaugaaugccccuaauuaucacuaugaggaaugcuccuguuauccugauucuagugaaaucacaugugugugcagggauaacuggcauggcucgaaucggccgugggugucuuucaaccagaaucuggaauaucagauaggauacauaugcagugggauuuucggagacaauccacgcccuaaugauaagacaggcaguugugguccaguaucgucuaauggagcaaauggaguaaaaggauuuucauucaaauacggcaaugguguuuggauagggagaacuaaaagcauuaguucaagaaacgguuuugagaugauuugggauccgaacggauggacugggacagacaauaacuucucaauaaagcaagauaucguaggaauaaaugaguggucaggauauagcgggaguuuuguucagcauccagaacuaacagggcuggauuguauaagaccuugcuucuggguugaacuaaucagagggcgacccaaagagaacacaaucuggacuagcgggagcagcauauccuuuugugguguaaacagugacacuguggguuggucuuggccagacggugcugaguugccauuuaccauugacaaguaa

SEQ ID NO: 53241 - RNA, 1410 nt, Artificial Sequence; identical to SEQ ID NO: 51588
  derived and/or modified CDS sequence (wt) from neuraminidase__InfluenzaA__AEV53423

SEQ ID NO: 53242 - RNA, 1410 nt, Artificial Sequence
  derived and/or modified CDS sequence (wt) from neuraminidase__InfluenzaA__AEV53425
augaauccaaaccaaaagauaauaaccauugguucggucuguaugacaauuggaauggcuaacuuaauauuacaaauuggaaacauaaucucaauauggauuagccacucaauucaacuugggaaucaaaaucagauugaaacaugcaaucaaagcgucauuacuuaugaaaacaacacuuggguaaaucagacauauguuaacaucagcaacaccaacuuugcugcuggacagucagugguucccgugaaauuagcgggcaauuccucucucugcccuguuaguggaugggcuauauacaguaaagacaacaguauaagaaucgguuccaagggggauguguuugucauaagggaaccauucauaucaugcucccccuuggaaugcagaaccuucuucuugacucaaggggccuugcuaaaugacaaacauuccaauggaaccauuaaagacaggagcccauaucgaacccuaaugagcuguccuauuggugaaguucccucuccauacaacucaagauuugagucagucgcuuggucagcaagugcuugucaugauggcaucaauuggcuaacaauuggaauuucuggcccagacaauggggcaguggcuguguuaaaguacaacggcauaauaacagacacuaucaagaguuggagaaacaauauauugagaacacaagagucugaaugugcauguguaaaugguucuugcuuuacuguaaugaccgauggaccaagugauggacaggccucauacaagaucuucagaauagaaaagggaaagauagucaaaucagucgaaaugaaugccccuaauuaucacuaugaggaaugcuccuguuauccugauucuagugaaaucacaugugugugcagggacaacuggcauggcucgaaucgaccgugggugucuuucaaccagaaucuggaauaucagauaggauacauaugcagugggauuuucggagacaauccacgcccuaaugauaagacaggcaguugugguccaguaucgucuaauggagcaaauggaguaaaaggauuuucauucaaauacggcaaugguguuuggauagggagaacuaaaagcauuaguucaagaaacgguuuugagaugauuugggauccgaacggauggacugggacagacaauaacuucucaauaaagcaagauaucguaggaauaaaugaguggucaggauauagcgggaguuuuguucagcauccagaacuaacagggcuggauuguauaagaccuugcuucuggguugaacuaaucagagggcgacccaaagagaacacaaucuggacuagcgggagcagcauauccuuuugugguguaaacagugacacuguggguuggucuuggccagacggugcugaguugccauuuaccauugacaaguaa

SEQ ID NO: 53243 - RNA, 1410 nt, Artificial Sequence
  derived and/or modified CDS sequence (wt) from neuraminidase__InfluenzaA__AEV53427
augaauccaaaccaaaagauaauaaccauugguucggucuguaugacaauuggaauggcuaacuuaauauuacaaauuggaaacauaaucucaauauggauuagccacucaauucaacuugggaaucaaaaucagauugaaacaugcaaucaaagcgucauuacuuaugaaaacaacacuuggguaaaucagacauauguuaacaucagcaacaccaacuuugcugcuggacagucagugguuuccgugaaauuagcgggcaauuccucucucugcccuguuaguggaugggcuauauacaguaaagacaacaguauaagaaucgguuccaagggggauguguuugucauaagggaaccauucauaucaugcucccccuuggaaugcagaaccuucuucuugacucaaggggccuugcuaaaugacaaacauuccaauggaaccauuaaagacaggagcccauaucgaacccuaaugagcuguccuauuggugaaguucccucuccauacaacucaagauuugagucagucgcuuggucagcaagugcuugucaugauggcaucaauuggcuaacaauuggaauuucuggcccagacaauggggcaguggcuguguuaaaguacaacggcauaauaacagacacuaucaagaguuggagaaacaauauauugagaacacaagagucugaaugugcauguguaaaugguucuugcuuuacuguaaugaccgauggaccaagugauggacaggccucauacaagaucuucagaauagaaaagggaaagauagucaaaucagucgaaaugaaugccccuaauuaucacuaugaggaaugcuccuguuauccugauucuagugaaaucacaugcguaugcagggauaacuggcauggcucgaaucgaccgugggugucuuucaaccagaaucuggaauaucagauaggauacauaugcaguggaauuuucggagacaauccacgcccuaaugauaagacaggcaguugugguccaguaucgucuaauggagcaaauggaguaaaaggauuuucauucaaauacggcaaugguguuuggauagggagaacuaaaagcauuaguucaagaaacgguuuugagaugauuugggauccgaacggauggacugggacagacaauaacuucucaauaaagcaagauaucguaggaauaaaugaguggucaggauauagcgggaguuuuguucagcauccagaacuaacagggcuggauuguauaagaccuugcuucuggguugaacuaaucagagggcgacccaaagagaacacaaucuggacuagcgggagcagcauauccuuuuguggugugaacagugacacuguggguuggucuuggccagacggugcugaguugccauuuaccauugacaaguaa

SEQ ID NO: 53244 - RNA, 1410 nt, Artificial Sequence
  derived and/or modified CDS sequence (wt) from neuraminidase__InfluenzaA__AEV53429
augaauccaaaccaaaagauaauaaccauugguucgguuuguaugacaauuggaauggcuaacuuaauauuacaaauuggaaacauaaucucaauauggauuagccacucaauucaacuugggaaucaaaaucagauugaaacaugcaaucaaagcgucauuacuuaugaaaacaacacuuggguaaaucagacauauguuaacaucagcaacaccaacuuugcugcuggacagucagugguucccgugaaauuagcgggcaauuccucucucugcccuguuaguggaugggcuauauacaguaaagacaacaguauaagaaucgguuccaagggggauguguuugucauaagggaaccauucauaucaugcucccccuuggaaugcagaaccuucuucuugacucaaggggccuugcuaaaugacaaacauuccaauggaaccauuaaagacaggagcccauaucgaacccuaaugagcuguccuauuggugaaguucccucuccauacaacucaagauuugagucagucgcuuggucagcaagugcuugucaugauggcaucaauuggcuaacaauuggaauuucuggcccagacaauggggcaguggcuguguuaaaguacaacggcauaauaacagacacuaucaagaguuggagaaacaauauauugagaacacaagagucugaaugugcauguguaaaugguucuugcuuuacuguaaugaccgauggaccaagugauggacaggccucauacaagaucuucagaauagaaaagggaaagauagucaaaucagucgaaaugaaugccccuaauuaucacuaugaggaaugcuccuguuauccugauucuagugaaaucacaugugugugcagggacaacuggcauggcucgaaucgaccgugggugucuuucaaccagaaucuggaauaucagauaggauacauaugcagugggauuuucggagacaauccacgcccuaaugauaagacaggcaguugugguccaguaucgucuaauggagcaaauggaguaaaaggauuuucauucaaauacggcaaugguguuuggauagggagaacuaaaagcauuaguucaagaaacgguuuugagaugauuugggauccgaacggauggacugggacagacaauaacuucucaauaaagcaagauaucguaggaauaaaugaguggucaggauauagcgggaguuuuguucagcauccagaacuaacagggcuggauuguauaagaccuugcuucuggguugaacuaaucagagggcgacccaaagagaacacaaucuggacuagcgggagcagcauauccuuuugugguguaaacagugacacuguggguuggucuuggccagacggugcugaguugccauuuaccauugacaaguaa

SEQ ID NO: 53245 - RNA, 1410 nt, Artificial Sequence
  derived and/or modified CDS sequence (wt) from neuraminidase__InfluenzaA__AEV53431
augaauccaaaccaaaagauaauaaccauugguucggucuguaugacaauuggaauggcuaacuuaauauuacaaauuggaaacauaaucucaauauggauuagccacucaauucaacuugggaaucaaaaucagauugaaacaugcaaucaaagcgucauuacuuaugaaaacaacacuuggguaaaucagacauauguuaacaucagcaacaccaacuuugcugcuggacagucagugguucccgugaaauuagcgggcaauuccucucucugcccuguuaguggaugggcuauauacaguaaagacaacaguauaagaaucgguuccaagggggauguguuugucauaagggaaccauucauaucaugcucccccuuggaaugcagaaccuucuucuugacucaaggggccuugcuaaaugacaaacauuccaauggaaccauuaaagacaggagcccauaucgaacccuaaugagcuguccuauuggugaaguucccucuccauacaacucaagauuugagucagucgcuuggucagcaagugcuugucaugauggcaucaauuggcuaacaauuggaauuucuggcccagacaauggggcaguggcuguguuaaaguacaacggcauaauaacagacacuaucaagaguuggagaaacaauauauugagaacacaagagucugaaugugcauguguaaaugguucuugcuuuacuguaaugaccgauggaccaagugauggacaggccucauacaagaucuucagaauagaaaagggaaagauagucaaaucagucgaaaugaaugccccuaauuaucacuaugaggaaugcuccuguuauccugauucuagugaaaucacaugugugugcagggacaacuggcauggcucgaaucgaccgugggugucuuucaaccagaaucuggaauaucagauaggauacauaugcagugggauuuucggagacaauccacgcccuaaugauaagacaggcaguugugguccaguaucgucuaauggagcaaauggaguaaaaggauuuucauucaaauacggcaaugguguuuggauagggagaacuaaaagcauuaguucaagaaacgguuuugagaugauuugggauccgaacggauggacugggacagacaauaacuucucaauaaagcaagauaucguaggaauaaaugaguggucaggauauagcgggaguuuuguucagcauccagaacuaacagggcuggauuguauaagaccuugcuucuggguugaacuaaucagagggcgacccaaagagaacacaaucuggacuagcgggagcagcauauccuuuugugguguaaacaguggcacuguggguuggucuuggccagacggugcugaguugccauuuaccauugacaaauaa

SEQ ID NO: 53246 - RNA, 1410 nt, Artificial Sequence; identical to SEQ ID NO: 50374
  derived and/or modified CDS sequence (wt) from neuraminidase__InfluenzaA__AEV53435

SEQ ID NO: 53247 - RNA, 1410 nt, Artificial Sequence
  derived and/or modified CDS sequence (wt) from neuraminidase__InfluenzaA__AEV53437
augaauccaaaccaaaagauaauaaccauugguucggucuguaugacaauuggaauggcuaacuuaauauuacaaauuggaaacauaaucucaauauggauuagccacucaauucaacuugggaaucaaaaucagauugaaacaugcaaucaaagcgucauuacuuaugaaaacaacacuuggguaaaucagacauauguuaacaucagcaacaccaacuuugcugcuggacagucagugguuuccgugaaauuagcgggcaauuccucucucugcccuguuaguggaugggcuauauacaguaaagacaacaguauaagaaucgguuccaagggggauguguuugucauaagggaaccauucauaucaugcucccccuuggaaugcagaaccuucuucuugacucaaggggccuugcuaaaugacaaacauuccaauggaaccauuaaagacaggagcccauaucgaacccuaaugagcuguccuauuggugaaguucccucuccauacaacucaagauuugagucagucgcuuggucagcaagugcuugucaugauggcaucaauuggcuaacaauuggaauuucuggcccagacaauggggcaguggcuguguuaaaguacaacggcauaauaacagacacuaucaagaguuggagaaacaauacauugagaacacaagagucugaaugugcauguguaaaugguucuugcuuuacuguaaugaccgauggaccaagugauggacaggccucauacaagaucuucagaauagaaaagggaaagauagucaaaucagucgaaaugaaugccccuaauuaucacuaugaggaaugcuccuguuauccugauucuagugaaaucacaugugugugcagggauaacuggcauggcucgaaucgaccgugggugucuuucaaccagaaucuggaauaucagauaggauacauaugcagugggauuuucggagacaauccacgcccuaaugauaagacaggcaguugugguccaguaucgucuaauggagcaaauggaguaaaaggauuuucauucaaauacggcaaugguguuuggauagggagaacuaaaagcauuaguucaagaaacgguuuugagaugauuugggauccgaacggauggacugggacagacaauaacuucucaauaaagcaagauaucguaggaauaaaugaguggucaggauauagcgggaguuuuguucagcauccagaacuaacagggcuggauuguauaagaccuugcuucuggguugaacuaaucagagggcgacccaaagagaacacaaucuggacuagcgggagcagcauauccuuuugugguguaaacagugacacuguggguuggucuuggccagacggugcugaguugccauuuaccauugacaaguaa

SEQ ID NO: 53248 - RNA, 1410 nt, Artificial Sequence; identical to SEQ ID NO: 48750
  derived and/or modified CDS sequence (wt) from neuraminidase__InfluenzaA__AEV53439

SEQ ID NO: 53249 - RNA, 1410 nt, Artificial Sequence; identical to SEQ ID NO: 50116
  derived and/or modified CDS sequence (wt) from neuraminidase__InfluenzaA__AEV53441

SEQ ID NO: 53250 - RNA, 1410 nt, Artificial Sequence
  derived and/or modified CDS sequence (wt) from neuraminidase__InfluenzaA__AEV53443
augaauccaaaccaaaagauaauaaccauugguucggucuguaugacaauuggaauggcuaacuuaauauuacaaauuggaaacauaaucucaauauggauuagccacucaauucaacuugggaaucaaaaucagauugaaacaugcaaucaaagcgucauuacuuaugaaaacaacacuuggguaaaucagacauauguuaacaucagcaacaccaacuuugcugcuggacagucagugguuuccgugaaauuagcgggcaauuccucucucugcccuguuaguggaugggcuauauauaguaaagacaacaguauaagaaucgguuccaagggggauguguuugucauaagggaaccauucauaucaugcucccccuuggaaugcagaaccuucuucuugacucaaggggccuugcuaaaugacaaacauuccaauggaaccauuaaagacaggagcccauaucgaacccuaaugagcuguccuauuggugaaguucccucuccauacaacucaagauuugagucagucgcuuggucagcaagugcuugucaugauggcaucaauuggcuaacaauuggaauuucuggcccagacaauggggcaguggcuguguuaaaguacaacggcauaauaacagacacuaucaagaguuggagaaacaauauauugagaacacaagagucugaaugugcauguguaaaugguucuugcuuuacuguaaugaccgauggaccaagugauggacaggccucauacaagaucuucagaauagaaaagggaaagauagucaaaucagucgaaaugaaugccccuaauuaucacuaugaggaaugcuccuguuauccugauucuagugaaaucacaugugugugcagggauaacuggcauggcucgaaucggccgugggugucuuucaaccagaaucuggaauaucagauaggauacauaugcagugggauuuucggagacaauccacgcccuaaugauaagacaggcaguugugguccaguaucgucuaauggagcaaauggaguaaaaggauuuucauucaaauacggcaaugguguuuggauagggagaacuaaaagcauuaguucaagaaacgguuuugagaugauuugggauccgaacggauggacugggacagacaauaacuucucaauaaagcaagauaucguaggaauaaaugaguggucaggauauagcgggaguuuuguucagcauccagaacuaacagggcuggauuguauaagaccuugcuucuggguugaacuaaucagagggcgacccaaagagaacacaaucuggacuagcgggagcagcauauccuuuugugguguaaacagugacacuguggguuggucuuggccagacggugcugaguugccauuuaccauugacaaguaa

SEQ ID NO: 53251 - RNA, 1410 nt, Artificial Sequence
  derived and/or modified CDS sequence (wt) from neuraminidase__InfluenzaA__AEV53445
augaauccaaaccaaaagauaauaaccauugguucggucuguaugacaauuggaauggcuaacuuaauauuacaaauuggaaacauaaucucaauauggauuagccacucaauucaacuugggaaucaaaaucagauugaaacaugcaaucaaagcgucauuacuuaugaaaacaacacuuggguaaaucagacauauguuaacaucagcaacaccaacuuugcugcuggacagucagugguuuccgugaaauuagcgggcaauuccucucucugcccuguuaguggaugggcuauauacaguaaagacaacaguauaagaaucgguuccaagggggauguguuugucauaagggaaccauucauaucaugcucccccuuggaaugcagaaccuucuucuugacucaaggggccuugcuaaaugacaaacauuccaauggaaccauuaaagacaggagcccauaucgaacccuaaugagcuguccuauuggugaaguucccucuccauacaacucaagauuugagucagucgcuuggucagcaagugcuugucaugauggcaucaauuggcuaacaauuggaauuucuggcccagacaauggggcaguggcuguguuaaaguacaacggcauaauaacagacacuaucaagaguuggagaaacaauauauugagaacacaagagucugaaugugcauguguaaaugguucuugcuuuacuguaaugaccgauggaccaagugauggacaggccucauacaagaucuucagaauagaaaagggaaagauagucaaaucagucgaaaugaaugccccuaauuaucacuaugaggaaugcuccuguuauccugauucuagugaaaucacaugugugugcagggauaacuggcauggcucgaaucggccgugggugucuuucaaccagaaucuggaauaucagauaggauacauaugcagugggauuuucggagacaauccacgcccuaaugauaagacaggcaguugugguccaguaucgucuaauggagcaaauggaguaaaaggauuuucauucaaauacggcaaugguguuuggauagggagaacuaaaagcauuaguucaagaaacgguuuugagaugauuugggauccgaacggauggacugggacagaccauaacuucucaauaaagcaagauaucguaggaauaaaugaguggucaggauauagcgggaguuuuguucagcauccagaacuaacagggcuggauuguauaagaccuugcuucuggguugaacuaaucagagggcgacccaaagagaacacaaucuggacuagcgggagcagcauauccuuuugugguguaaacagugacacuguggguuggucuuggccagacggugcugaguugccauuuaccauugacaaguaa

SEQ ID NO: 53252 - RNA, 1410 nt, Artificial Sequence
  derived and/or modified CDS sequence (wt) from neuraminidase__InfluenzaA__AEV53447
augaauccaaaccaaaagauaauaaccauugguucggucuguaugacaauuggaauggcuaacuuaauauuacaaauuggaaacauaaucucaauauggauuagccacucaauucaacuugggaaucaaaaucagauugaaacaugcaaucaaagcgucauuacuuaugaaaacaacacuuggguaaaucagacauauguuaacaucagcaacaccaacuuugcugcuggacagucagugguuuccgugaaauuagcgggcaauuccucucucugcccuguuaguggaugggcuauauacaguaaagacaacaguauaagaaucgguuccaagggggauguguuugucauaagggaaccauucauaucaugcucccccuuggaaugcagaaccuucuucuugacucaaggggccuugcuaaaugacaaacauuccaauggaaccauuaaagacaggagcccauaucgaacccuaaugagcuguccuauuggugaaguucccucuccauacaacucaagauuugagucagucgcuuggucagcaagugcuugucaugauggcaucaauuggcuaacaauuggaauuucuggcccagacaauggggcaguggcuguguuaaaguacaacggcauaauaacagacacuaucaagaguuggagaaacaauauauugagaacacaagagucugaaugugcauguguaaaugguucuugcuuuacuguaaugaccgauggaccaagugauggacaggccucauacaagaucuucagaauagaaaagggaaagauagucaaaucagucgaaaugaaugccccuaauuaucacuaugaggaaugcuccuguuauccugauucuagugaaaucacauguguguguagggauaacuggcauggcucgaaucgaccgugggugucuuucaaccagaaucuggaauaucagauaggauacauaugcagugggauuuucggagacaauccacgcccuaaugauaagacaggcaguugugguccaguaucgucuaauggagcaaauggaguaaaaggauuuucauucaaauacggcaaugguguuuggauagggagaacuaaaagcauuaguucaagaaacgguuuugagaugauuugggauccgaacggauggacugggacagacaauaacuucucaauaaagcaagauaucguaggaauaaaugaguggucaggauauagcgggaguuuuguucagcauccagaacuaacagggcuggauuguauaagaccuugcuucuggguugaacuaaucagagggcgacccaaagagaacacaaucuggacuagcgggagcagcauauccuuuugugguguaaacagugacacuguggguuggucuuggccagacggugcugaguugccauuuaccauugacaaguaa

SEQ ID NO: 53253 - RNA, 1410 nt, Artificial Sequence
  derived and/or modified CDS sequence (wt) from neuraminidase__InfluenzaA__AEV53449
augaauccaaaccaaaagauaauaaccauugguucggucuguaugacaauuggaauggcuaacuuaauauuacaaauuggaaacauaaucucaauauggauuagccacucaauucaacuugggaaucaaaaucagauugaaacaugcaaucaaagcgucauuacuuaugaaaacaacacuuggguaaaucagacauauguuaacaucagcaacaccaacuuugcugcuggacagucagugguuuccgugaaauuagcgggcaauuccucucucugcccuguuaguggaugggcuauauacaguaaagacaacaguauaagaaucgguuccaagggggauguguuugucauaagggaaccauucauaucaugcucccccuuggaaugcagaaccuucuucuugacucaaggggccuugcuaaaugacaaacauuccaauggaaccauuaaagacaggagcccauaucgaacccuaaugagcuguccuauuggugaaguucccucuccauacaacucaagauuugagucagucgcuuggucagcaagugcuugucaugauggcaucaauuggcuaacaauuggaauuucuggcccagacaauggggcaguggcuguguuaaaguacaacggcauaauaacagacacuaucaagaguuggagaaacaauauauugagaacacaagagucugaaugugcauguguaaaugguucuugcuuuacuguaaugaccgauggaccaagugauggacaggccucauacaagaucuucaaaauagaaaagggaaagauagucaaaucagucgaaaugaaugccccuaauuaucacuaugaggaaugcuccuguuauccugauucuagugaaaucacaugugugugcagggauaacuggcauggcucgaaucggccgugggugucuuucaaccagaaucuggaauaucagauaggauacauaugcagugggauuuucggagacaauccacgcccuaaugauaagacaggcaguugugguccaguaucgucuaauggagcaaauggaguaaaaggauuuucauucaaauacggcaaugguguuuggauagggagaacuaaaagcauuaguucaagaaacgguuuugagaugauuugggauccgaacggauggacugggacagacaauaacuucucaauaaagcaagauaucguaggaauaaaugaguggucaggauauagcgggaguuuuguucagcauccagaacuaacagggcuggauuguauaagaccuugcuucuggguugaacuaaucagagggcgacccaaagagaacacaaucuggacuagcgggagcagcauauccuuuugugguguaaacagugacacuguggguuggucuuggccagacggugcugaguugccauuuaccauugacaaguaa

SEQ ID NO: 53254 - RNA, 1410 nt, Artificial Sequence
  derived and/or modified CDS sequence (wt) from neuraminidase__InfluenzaA__AEV53451
augaauccaaaccaaaagauaauaaccauugguucggucuguaugacaauuggaauggcuaacuuaauauuacaaauuggaaacauaaucucaauauggauuagccacucaauucaacuugggaaucaaaaucagauugaaacaugcaaucaaagcgucauuacuuaugaaaacaacacuuggguaaaucagacauauguuaacaucagcaacaccaacuuugcugcuggacagucagugguuuccgugaaauuagcgggcaauuccucucucugcccuguuaguggaugggcuauauacaguaaagacaacaguauaagaaucgguuccaagggggauguguuugucauaagggaaccauucauaucaugcucccccuuggaaugcagaaccuucuucuugacucaaggggccuugcuaaaugacaaacauuccaauggaaccauuaaagacaggagcccauaucgaacccuaaugagcuguccuauuggugaaguucccucuccauacaacucaagauuugagucagucgcuuggucagcaagugcuugucaugauggcaucaauuggcuaacaauuggaauuucuggcccagacaauggggcaguggcuguguuaaaguacaacggcauaauaacagacacuaucaagaguuggagaaacaauauauugagaacacaagagucugaaugugcauguguaaaugguucuugcuuuacuguaaugaccgauggaccaagugauggacaggccucauacaagaucuucaaaauagaaaagggaaagauagucaaaucagucgaaaugaaugccccugauuaucacuaugaggaaugcuccuguuauccugauucuagugaaaucacaugugugugcagggauaacuggcauggcucgaaucggccgugggugucuuucaaccagaaucuggaauaucagauaggauacauaugcagugggauuuucggagacaauccacgcccuaaugauaagacaggcaguugugguccaguaucgucuaauggagcaaauggaguaaaaggauuuucauucaaauacggcaaugguguuuggauagggagaacuaaaagcauuaguucaagaaacgguuuugagaugauuugggauccgaacggauggacugggacagacaauaacuucucaauaaagcaagauauuguaggaauaaaugaguggucaggauauagcgggaguuuuguucagcauccagaacuaacagggcuggauuguauaagaccuugcuucuggguugaacuaaucagagggcgacccaaagagaacacaaucuggacuagcgggagcagcauauccuuuugugguguaaacagugacacuguggguuggucuuggccagacggugcugaguugccauuuaccauugacaaguaa

SEQ ID NO: 53255 - RNA, 1410 nt, Artificial Sequence; identical to SEQ ID NO: 48750
  derived and/or modified CDS sequence (wt) from neuraminidase__InfluenzaA__AEV53453

SEQ ID NO: 53256 - RNA, 1410 nt, Artificial Sequence
  derived and/or modified CDS sequence (wt) from neuraminidase__InfluenzaA__AEV53455
augaauccaaaccaaaagauaauaaccauugguucggucuguaugacaauuggaauggcuaacuuaauauuacaaauuggaaacauaaucucaauauggauuagccacucaauucaacuugggaaucaaaaucagauugaaacaugcaaucaaagcgucauuacuuaugaaaacaacacuuggguaaaucagacauauguuaacaucagcaacaccaacuuugcugcuggacagucagugguuuccgugaaauuagcgggcaauuccucucucugcccuguuaguggaugggcuauauacaguaaagacaacaguauaagaaucgguuccaagggggauguguuugucauaagggaaccauucauaucaugcucccccuuggaaugcagaaccuucuucuugacucaaggggccuugcuaaaugacaaacauuccaauggaaccauuaaagacaggagcccauaucgaacccuaaugagcuguccuauuggugaaguucccucuccauacaacucaagauuugagucagucgcuuggucagcaagugcuugucaugauggcaucaauuggcuaacaauuggaauuucuggcccagacaauggggcaguggcuguguuaaaguacaacggcauaauaacagacacuaucaagaguuggagaaacaauauauugagaacacaagagucugaaugugcauguguaaaugguucuugcuuuacuguaaugaccgauggaccaagugauggacaggccucauacaagaucuucagaauagaaaagggaaagauagucaaaucagucgaaaugaaugccccuaauuaucacuaugaggaaugcuccuguuauccugauucuagugaaaucacaugugugugcagggauaacuggcauggcucgaaucgaccgugggugucuuucaaccagaaucuggaauaucagauaggauacauaugcagugggauuuucggagacaauccacgcccuaaugauaagacaggcaguugugguccaguaucgucuaauggagcaaauggaguaaaaggauuuucauucaaauacggcaaugguguuuggauagggagaacuaaaagcauuaguucaagaaacgguuuugagaugauuugggauccgaacggauggacugagacagacaauaacuucucaauaaagcaagauaucguaggaauaaaugaguggucaggauauagcgggaguuuuguucagcauccagaacuaacagggcugaauuguauaagaccuugcuucuggguugaacuaaucagagggcgacccaaagagaacacaaucuggacuagcgggagcagcauauccuuuugugguguaaacagugacacuguggguuggucuuggccagacggugcugaguugccauuuaccauugacaaguaa

SEQ ID NO: 53257 - RNA, 1410 nt, Artificial Sequence
  derived and/or modified CDS sequence (wt) from neuraminidase__InfluenzaA__AEV53457
augaauccaaaccaaaagauaauaaccauugguucggucuguaugacaauuggaauggcuaacuuaauauuacaaauuggaaacauaaucucaauauggauuagccacucaauucaacuugggaaucaaaaucagauugaaacaugcaaucaaagcgucauuacuuaugaaaacaacacuuggguaaaucagacauauguuaacaucagcaacaccaacuuugcugcuggacagucagugguuuccgugaaauuagcgggcaauuccucucucugcccuguuaguggaugggcuauauacaguaaagacaacaguauaagaaucgguuccaagggggauguguuugucauaagggaaccauucauaucaugcucccccuuggaaugcagaaccuucuucuugacucaaggggccuugcuaaaugacaaacauuccaauggaaccauuaaagacaggagcccauaucgaacccuaaugagcuguccuauuggugaaguucccucuccauacaacucaagauuugagucagucgcuuggucagcaagugcuugucaugauggcaucaauuggcuaacaauuggaauuucuggcccagacaauggggcaguggcuguguuaaaguacaacggcauaauaacagacacuaucaagaguuggagaaacaauauauugagaacacaagagucugaaugugcauguguaaaugguucuugcuuuacuguaaugaccgauggaccaagugauggacaggccucauacaagaucuucagaguagaaaagggaaagauagucaaaucagucgaaaugaaugccccuaauuaucacuaugaggaaugcuccuguuauccugauucuagugaaaucacaugugugugcagggauaacuggcauggcucgaaucggccgugggugucuuucaaccagaaucuggaauaucagauaggauacauaugcagugggauuuucggagacaauccacgcccuaaugauaagacaggcaguugugguccaguaucgucuaauggagcaaauggaguaaaaggauuuucauucaaauacggcaaugguguuuggauagggagaacuaaaagcauuaguucaagaaacgguuuugagaugauuugggauccgaacggauggacugggacagacaauaacuucucaauaaagcaagauaucguaggaauaaaugaguggucaggauauagcgggaguuuuguucagcauccagaacuaacagggcuggauuguauaagaccuugcuucuggguugaacuaaucagagggcgacccaaagagaacacaaucuggacuagcgggagcagcauaucuuuuugugguguaaacagugacacuguggguuggucuuggccagacggugcugaguugccauuuaccauugacaaguaa

SEQ ID NO: 53258 - RNA, 1410 nt, Artificial Sequence
  derived and/or modified CDS sequence (wt) from neuraminidase__InfluenzaA__AEV53459
augaauccaaaccaaaagauaauaaccauugguucggucuguaugacaauuggaauggcuaacuuaauauuacaaauuggaaacauaaucucaauauggauuagccacucaauucaacuugggaaucaaaaucagauugaaacaugcaaucaaagcgucauuacuuaugaaaacaacacuuggguaaaucagacauauguuaacaucagcaacaccaacuuugcugcuggacagucagugguuuccgugaaauuagcgggcaauuccucucucugcccuguuaguggaugggcuauauacaguaaagacaacaguauaagaaucgguuccaagggggauguguuugucauaagggaaccauucauaucaugcucccccuuggaaugcagaaccuucuucuugacucaaggggccuugcuaaaugacaaacauuccaauggaaccauuaaagacaggagcccauaucgaacccuaaugagcuguccuauuggugaaguucccucuccauacaacucaagauuugagucagucgcuuggucagcaagugcuugucaugauggcaucaauuggcuaacaauuggaauuucuggcccagacaauggggcaguggcuguguuaaaguacaacggcauaauaacagacacuaucaagaguuggagaaacaauauauugagaacacaagagucugaaugugcauguguaaaugguucuugcuuuacuguaauaaccgauggaccaagugauggacaggccucauacaagaucuucagaauagaaaaaggaaagauagucaaaucagucgaaaugaaugccccuaauuaucacuaugaggaaugcuccuguuauccugauucuagugaaaucacaugugugugcagggauaacuggcauggcucgaaucgaccgugggugucuuucaaccagaaucuggaauaucagauaggauacauaugcagugggauuuucggagacaauccacgcccuaaugauaagacaggcaguugugguccaguaucgucuaauggagcaaauggaguaaaaggauuuucauucaaauacggcaaugguguuuggauagggagaacuaaaagcauuaguucaagaaacgguuuugagaugauuugggauccgaacggauggacugagacagacaauaacuucucaauaaagcaagauaucguaggaauaaaugaguggucaggauauagcgggaguuuuguucagcauccagaacuaacagggcugaauuguauaagaccuugcuucuggguugaacuaaucagagggcgacccaaagagaacacaaucuggacuagcgggagcagcauauccuuuugugguguaaacagugacacuguggguuggucuuggccagacggugcugaguugccauuuacuauugacaaguaa

SEQ ID NO: 53259 - RNA, 1410 nt, Artificial Sequence
  derived and/or modified CDS sequence (wt) from neuraminidase__InfluenzaA__AEV53461
augaauccaaaccaaaagauaauaaccauugguucggucuguaugacaauuggaauggcuaacuuaauauuacaaauuggaaacauaaucucaauauggauuagccacucaauucaacuugggaaucaaaaucagauugaaacaugcaaucaaagcgucauuacuuaugaaaacaacacuuggguaaaucagacauauguuaacaucagcaacaccaacuuugcugcuggacagucagugguuuccgugaaauuagcgggcaauuccucucucugcccuguuaguggaugggcuauauacaguaaagacaacaguauaagaaucgguuccaagggggauguguuugucauaagggaaccauucauaucaugcucccccuuggaaugcagaaccuucuucuugacucaaggggccuugcuaaaugacaaacauuccaauggaaccauuaaagacaggagcccauaucgaacccuaaugagcuguccuauuggugaaguucccucuccauacaacucaagauuugagucagucgcuuggucagcaagugcuugucaugauggcaucaauuggcuaacaauuggaauuucuggcccagacaauggggcaguggcuguguuaaaguacaacggcauaauaacagacacuaucaagaguuggagaaacaauauauugagaacacaagagucugaaugugcauguguaaaugguucuugcuuuacuguaaugaccgauggaccaagugauggacaggccucauacaagaucuucagaauagaaaagggaaagauagucaaaucagucgaaaugaaugccccuaauuaucacuaugaggaaugcuccuguuauccugauucuagugaaaucacaugugugugcagggauaacuggcauggcucgaaucggccgugggugucuuucaaccagaaucuggaauaucagauaggauacauaugcagugggauuuucggagacaauccacgcccuaaugauaagacaggcaguugugguccaguaucgucuaauggagcaaauggaguaaaaggauuuucauucaaauacggcaaugguguuuggauagggagaacuaaaagcauuaguucaagaaacgguuuugagaugauuugggauccgaacggauggacugggacagacaauaacuucucaauaaagcaagauaucguaggaauaaaugaguggucaggauauagcggaaguuuuguucagcauccagaacuaacagggcuggauuguauaagaccuugcuucuggguugaacuaaucagagggcgacccaaagagaacacaaucuggacuagcgggagcagcauaucuuuuugugguguaaacagugacacuguggguuggucuuggccagacggugcugaguugccauuuaccauugacaaguaa

SEQ ID NO: 53260 - RNA, 1410 nt, Artificial Sequence
  derived and/or modified CDS sequence (wt) from neuraminidase__InfluenzaA__AEV53463
augaauccaaaccaaaagauaauaaccauugguucggucuguaugacaauuggaauggcuaacuuaauauuacaaauuggaaacauaaucucaauauggauuagccacucaauucaacuugagaaucaaaaucagauugaaacaugcaaucaaagcgucauuacuuaugaaaacaacacuuggguaaaucagacauauguuaacaucagcaacaccaacuuugcugcuggacagucagugguuuccgugaaauuagcgggcaauuccucucucugcccuguuaguggaugggcuauauacaguaaagacaacaguauaagaaucgguuccaagggggauguguuugucauaagggaaccauucauaucaugcucccccuuggaaugcagaaccuucuucuugacucaaggggccuugcuaaaugacaaacauuccaauggaaccauuaaagacaggagcccauaucgaacccuaaugagcuguccuauuggugaaguucccucuccauacaacucaagauuugagucagucgcuuggucagcaagugcuugucaugauggcaucaauuggcuaacaauuggaauuucuggcccagacaauggggcaguggcuguguuaaaguacaacggcauaauaacagacacuaucaagaguuggagaaacaauauauugagaacacaagagucugaaugugcauguauaaaugguucuugcuuuacuguaaugaccgauggaccaagugauggacaggccucauacaagaucuucagaauagaaaagggaaagauagucaaaucagucgaaaugaaugccccuaauuaucacuaugaggaaugcuccuguuauccugauucuagugaaaucacaugugugugcagggauaacuggcauggcucgaaucgaccgugggugucuuucaaccagaaucuggaauaucagauaggauacauaugcagugggauuuucggagacaauccacgcccuaaugauaagacaggcaguugugguccaguaucgucuaauggagcaaauggaguaaaaggauuuucauucaaauacggcaaugguguuuggauagggagaacuaaaagcauuaguucaagaaacgguuuugagaugauuugggauccgaacggauggacugggacagacaauaacuucucaauaaagcaagauaucguaggaauaaaugaguggucaggauauagcgggaguuuuguucagcauccagaacuaacagggcuggauuguauaagaccuugcuucuggguugaacuaaucagagggcgacccaaagagaacacaaucuggacuagcgggagcagcauauccuuuugugguguaaacagugacacuguggguuggucuuggccagacggugcugaguugccauuuaccauugacaaguaa

SEQ ID NO: 53261 - RNA, 1410 nt, Artificial Sequence
  derived and/or modified CDS sequence (wt) from neuraminidase__InfluenzaA__AEV53465
augaauccaaaccaaaagauaauaaccauugguucggucuguaugacaauuggaauggcuaacuuaauauuacaaauuggaaacauaaucucaauauggauuagccacucaauucaacuugggaaucaaaaucagauugaaacaugcaaucaaagcgucauuacuuaugaaaacaacacuuggguaaaucagacauauguuaacaucagcaacaccaacuuugcugcuggacagucagugguuuccgugaaauuagcgggcaauuccucucucugcccuguuaguggaugggcuauauacaguaaagacaacaguauaagaaucgguuccaagggggauguguuugucauaagggaaccauucauaucaugcucccccuuggaaugcagaaccuucuucuugacucaaggggccuugcuaaaugacaaacauuccaauggaaccauuaaagacaggagcccauaucgaacccuaaugagcuguccuauuggugaaguucccucuccauacaacucaagauuugagucagucgcuuggucagcaagugcuugucaugauggcaucaauuggcuaacaauuggaauuucuggcccagacaauggggcaguggcuguguuaaaguacaacggcauaauaacagacacuaucaagaguuggagaaacaauauauugagaacacaagagucugaaugugcauguguaaaugguucuugcuuuacuguaaugaccgauggaccaagugauagacaggccucauacaagaucuucagaauagaaaagggaaaaauagucaaaucagucgaaaugaaugccccuaauuaucacuaugaggaaugcuccuguuauccugauucuagugaaaucacaugugugugcagggauaacuggcauggcucgaaucggccgugggugucuuucaaucagaaucuggaauaucagauaggauacauaugcagugggauuuucggagacaauccacgcccuaaugauaagacaggcaguugugguccaguaucgucuaauggagcaaauggaguaaaaggauuuucauacaaauacggcaaugguguuuggauagggagaacuaaaagcauuaguucaagaaacgguuuugagaugauuugggauccgaacggauggacugggacagacaauaacuucucaauaaagcaagauaucguaggaauaaaugaguggucaggauauagcgggaguuuuguucagcauccagaacuaacagggcuagauuguauaagaccuugcuucuggguugaacuaaucagagggcgacccaaagagaacacaaucuggacuagcgggagcagcauauccuuuugugguguaaacagugacacuguggguuggucuuggccagacggugcugaguugccauuuaccauugacaaguaa

SEQ ID NO: 53262 - RNA, 1410 nt, Artificial Sequence
  derived and/or modified CDS sequence (wt) from neuraminidase__InfluenzaA__AEV53467
augaauccaaaccaaaagauaauaaccauugguucggucuguaugacaauuggaauggcuaacuuaauauuacaaauuggaaacauaaucucaauauggauuagccacucaauucaacuugagaaucaaaaucagauugaaacaugcaaucaaagcgucauuacuuaugaaaacaacacuuggguaaaucagacauauguuaacaucagcaacaccaacuuugcugcuggacagucagugguuuccgugaaauuagcgggcaauuccucucucugcccuguuaguggaugggcuauauacaguaaagacaacaguauaagaaucgguuccaagggggauguguuugucauaagggaaccauucauaucaugcucccccuuggaaugcagaaccuucuucuugacucaaggggccuugcuaaaugacaaacauuccaauggaaccauuaaagacaggagcccauaucgaacccuaaugagcuguccuauuggugaaguucccucuccauacaacucaagauuugagucagucgcuuggucagcaagugcuugucaugauggcaucaauuggcuaacaauuggaauuucuggcccagacaauggggcaguggcuguguuaaaguacaacggcauaauaacagacacuaucaagaguuggagaaacaauauauugagaacacaagagucugaaugugcauguguaaaugguucuugcuuuacuguaaugaccgauggaccaagugauggacaggccucauacaagaucuucagaauagaaaagggaaagauagucaaaucagucgaaaugaaugccccuaauuaucacuaugaggaaugcuccuguuauccugauucuagugaaaucacaugugugugcagggauaacuggcauggcucgaaucgaccgugggugucuuucaaccagaaucuggaauaucagauaggauacauaugcagugggauuuucggagacaauccacgcccuaaugauaagacaggcaguugugguccaguaucgucuaauggagcaaauggaguaaaaggauuuucauucaaauacggcaaugguguuuggauagggagaacuaaaagcauuaguucaagaaacggcuuugagaugauuugggauccgaacggauggacugggacagacaauaacuucucaauaaagcaagauaucguaggaauaaaugaguggucaggauauagcgggaguuuuguucagcauccagaacuaacagggcuggauuguauaagaccuugcuucuggguugaacuaaucagagggcgacccaaagagaacacaaucuggacuagcgggagcagcauauccuuuugugguguaaacagugacacuguggguuggucuuggccagacggugcugaguugccauuuaccauugacaaguaa

SEQ ID NO: 53263 - RNA, 1410 nt, Artificial Sequence; identical to SEQ ID NO: 53262
  derived and/or modified CDS sequence (wt) from neuraminidase__InfluenzaA__AEV53469

SEQ ID NO: 53264 - RNA, 1410 nt, Artificial Sequence; identical to SEQ ID NO: 48750
  derived and/or modified CDS sequence (wt) from neuraminidase__InfluenzaA__AEV53471

SEQ ID NO: 53265 - RNA, 1410 nt, Artificial Sequence; identical to SEQ ID NO: 52320
  derived and/or modified CDS sequence (wt) from neuraminidase__InfluenzaA__AEV53473

SEQ ID NO: 53266 - RNA, 1410 nt, Artificial Sequence; identical to SEQ ID NO: 48750
  derived and/or modified CDS sequence (wt) from neuraminidase__InfluenzaA__AEV53475

SEQ ID NO: 53267 - RNA, 1410 nt, Artificial Sequence; identical to SEQ ID NO: 48750
  derived and/or modified CDS sequence (wt) from neuraminidase__InfluenzaA__AEV53477

SEQ ID NO: 53268 - RNA, 1410 nt, Artificial Sequence; identical to SEQ ID NO: 48750
  derived and/or modified CDS sequence (wt) from neuraminidase__InfluenzaA__AEV53479

SEQ ID NO: 53269 - RNA, 1410 nt, Artificial Sequence
  derived and/or modified CDS sequence (wt) from neuraminidase__InfluenzaA__AEV53481
augaauccaaaccaaaagauaauaaccauugguucggucuguaugacaauuggaauggcuaacuuaauauuacaaauuggaaacauaaucucaauauggauuagccacucaauucaacuugggaaucaaaaucagauugaaacaugcaaucaaagcgucauuacuuaugaaaacaacacuuggguaaaucagacauauguuaacaucagcaacaccaacuuugcugcuggacagucagugguuuccgugaaauuagcgggcaauucaucucucugcccuguuaguggaugggcuauauacaguaaagacaacaguauaagaaucgguuccaagggggauguguuugucauaagggaaccauucauaucaugcucccccuuggaaugcagaaccuucuucuugacucaaggggccuugcuaaaugacaaacauuccaauggaaccauuaaagacaggagcccauaucgaacccuaaugagcuguccuauuggugaaguucccucuccauacaacucaagauuugagucagucgcuuggucagcaagugcuugucaugauggcaucaauuggcuaacaauuggaauuucuggcccagacaauggggcaguggcuguguuaaaguacaacggcauaauaacagacacuaucaagaguuggagaaacaauauauugagaacacaagagucugaaugugcauguguaaaugguucuugcuuuacuguaaugaccgauggaccaagugauggacaggccucauacaagaucuucagaauagaaaagggaaagauagucaaaucagucgaaaugaaugccccuaauuaucacuaugaggaaugcuccuguuauccugauucuagugaaaucacaugugugugcagggauaacuggcauggcucgaaucgaccgugggugucuuucaaccagaaucuggaauaucagauaggguacauaugcagugggauuuucggagacaauccacgcccuaaugauaagacaggcaguugugguccaguaucgucuaauggagcaaauggaguaaaaggauuuucauucaaauacggcaaugguguuuggauagggagaacuaaaagcauuaguucaagaaacgguuuugagaugauuugggauccgaacggauggacugggacagacaauaacuucucaauaaagcaagauaucguaggaauaaaugaguggucaggauauagcgggaguuuuguucagcauccagaacuaacagggcuggauuguauaagaccuugcuucuggguugaacuaaucagagggcgacccaaagagaacacaaucuggacuagcgggagcagcauauccuuuugugguguaaacagugacacuguggguuggucuuggccagacggugcugaguugccauuuaccauugacaaguaa

SEQ ID NO: 53270 - RNA, 1410 nt, Artificial Sequence; identical to SEQ ID NO: 48750
  derived and/or modified CDS sequence (wt) from neuraminidase__InfluenzaA__AEV53483

SEQ ID NO: 53271 - RNA, 1410 nt, Artificial Sequence
  derived and/or modified CDS sequence (wt) from neuraminidase__InfluenzaA__AEV53485
augaauccaaaccaaaagauaauaaccauugguucggucuguaugacaauuggaauggcuaacuuaauauuacaaauuggaaacauaaucucaauauggguuagccacucaauucaacuugggaaucaaaaucagauugaaacaugcaaucaaagcgucauuacuuaugaaaacaacacuuggguaaaucagacauauguuaacaucagcaacaccaacuuugcugcuggacagucagugguuuccgugaaauuagcgggcaauuccucucucugcccuguuaguggaugggcuauauacaguaaagacaacaguauaagaaucgguuccaagggggauguguuugucauaagggaaccauucauaucaugcucccccuuggaaugcagaaccuucuucuugacucaaggggccuugcuaaaugacaaacauuccaauggaaccauuaaagacaggagcccauaucgaacccuaaugagcuguccuauuggugaaguucccucuccauacaacucaagauuugagucagucgcuuggucagcaagugcuugucaugauggcaucaauuggcuaacaauuggaauuucuggcccagacaauggggcaguggcuguguuaaaguacaacggcauaauaacagacacuaucaagaguuggagaaacaauauauugagaacacaagagucugaaugugcauguguaaaugguucuugcuuuacuguaaugaccgauggaccaagugauggacaggccucauacaagaucuucagaauagaaaagggaaagauagucaaaucagucgaaaugaaugccccuaauuaucacuaugaggaaugcuccuguuauccugauucuagugaaaucacauguguaugcagggauaacuggcauggcucgaaucgaccgugggugucuuucaaccagaaucuggaauaucagauaggauacauaugcagugggauuuucggagacaauccacgcccuaaugauaagacaggcaguugugguccaguaucgucuaauggagcaaauggaguaaaaggauuuucauucaaauacggcaaugguguuuggauagggagaacuaaaagcauuaguucaagaaacgguuuugagaugauuugggauccgaacggauggacugggacagacaauaacuucucaauaaagcaagauaucguaggaauaaaugaguggucaggauauagcgggaguuuuguucagcauccagaacuaacagggcuggauuguauaagaccuugcuucuggguugaacuaaucagagggcgacccaaagagaacacaaucuggaccagcgggagcagcauauccuuuugugguguaaacagugacacuguggguuggucuuggccagacggugcugaguugccauuuaccauugacaaguaa

SEQ ID NO: 53272 - RNA, 1410 nt, Artificial Sequence
  derived and/or modified CDS sequence (wt) from neuraminidase__InfluenzaA__AEV53487
augaauccaaaccaaaagauaauaaccauugguucggucuguaugacaauuggaauggcuaacuuaauauuacaaauuggaaacauaaucucaauauggauuagccacucaauucaacuugagaaucaaaaucagauugaaacaugcaaucaaagcgucauuacuuaugaaaacaacacuuggguaaaucagacauauguuaacaucagcaacaccaacuuugcugcuggacagucagugguuuccgugaaauuagcgggcaauuccucucucugcccuguuaguggaugggcuauauacaguaaagacaacaguauaagaaucgguuccaagggggauguguuugucauaagggaaccauucauaucaugcucccccuuggaaugcagaaccuucuucuugacucaaggggccuugcuaaaugacaaacauuccaauggaaccauuaaagacaggagcccauaucgaacccuaaugagcuguccuauuggugaaguucccucuccauacaacucaagauuugagucagucgcuuggucagcaagugcuugucaugauggcaucaauuggcuaacaauuggaauuucuggcccagacaauggggcaguggcuguguuaaaguacaacggcauaauaacagacacuaucaagaguuggagaaacaauauauugagaacacaagagucugaaugugcauguguaaaugguucuugcuuuacuguaaugaccgauggaccaagugauggacaggccucauacaagaucuucagaauagaaaagggaaagauagucaaaucagucgaaaugaaugccccuaauuaucacuaugaggaaugcuccuguuauccugauucuagugaaaucacaugugugugcagggauaacuggcauggcucgaaucgaccgugggugucuuucaaccagaaucuggaauaucagauaggauacauaugcagugggauuuucggagacaauccacgcccuaaugauaagacaggcaguugugguccaguaucgucuaauggagcaaauggaguaaaaggauuuucauucaaauacggcaaugguguuuggauagggagaacuaaaagcauuaguucaagaaacgguuuugagaugauuugggauccgaacggauggacugggacagacaauaacuucucaauaaagcaagauaucguaggaauaaaugaguggucaggauauagcgggaguuuuguucagcauccagaacuaacagggcuggauuguauaagaccuugcuucuggguugaacuaaucagagggcgacccaaagagaacacaaucuggacuagcgggagcagcauauccuuuugugguguaaacagugacacuguggguuggucuuggccagacggugcugaguugccauuuaccauugacaaguaa

SEQ ID NO: 53273 - RNA, 1410 nt, Artificial Sequence; identical to SEQ ID NO: 49768
  derived and/or modified CDS sequence (wt) from neuraminidase__InfluenzaA__AEV53489

SEQ ID NO: 53274 - RNA, 1410 nt, Artificial Sequence
  derived and/or modified CDS sequence (wt) from neuraminidase__InfluenzaA__AEV53491
augaauccaaaccaaaagauaauaaccauugguuuggucuguaugacaauuggaauggcuaacuuaauauuacaaauuggaaacauaaucucaauauggauuagccacucaauucaacuugggaaucaaaaucagauugaaacaugcaaucaaagcgucauuacuuaugaaaacaacacuuggguaaaucagacauauguuaacaucagcaacaccaacuuugcugcuggacagucagugguuuccgugaaauuagcgggcaauuccucucucugcccuguuaguggaugggcuauauacaguaaagacaacaguauaagaaucgguuccaagggggauguguuugucauaagggaaccauucauaucaugcucccccuuggaaugcagaaccuucuucuugacucaaggggccuugcuaaaugacaaacauuccaauggaaccauuaaagacaggagcccauaucgaacccuaaugagcuguccuauuggugaaguucccucuccauacaacucaagauuugagucagucgcuuggucagcaagugcuugucaugauggcaucaauuggcuaacaauuggaauuucuggcccagacaauggggcaguggcuguguuaaaguacaacggcauaauaacagacacuaucaagaguuggagaaacaauauauugagaacacaagagucugaaugugcauguguaaaugguucuugcuuuacuguaaugaccgauggaccaagugauggacaggccucauacaagaucuucagaauagaaaagggaaagauagucaaaucagucgaaaugaaugccccuaauuaucacuaugaggaaugcuccuguuauccugauucuagugaaaucacaugugugugcagggauaacuggcauggcucgaaucgaccgugggugucuuucaaccagaaucuggaauaucagauaggauacauaugcagugggauuuucggagacaauccacgcccuaaugauaagacaggcaguugugguccaguaucgucuaauggagcaaauggaguaaaaggauuuucauucaaauacggcaaugguguuuggauagggagaacuaaaagcauuaguucaagaaacggcuuugagaugauuugggauccgaacggauggacugggacagacaauaacuucucaauaaagcaagauaucguaggaauaaaugaguggucaggauauagcgggaguuuuguucagcauccagaacuaacagggcuggauuguauaagaccuugcuucuggguugaacuaaucagagggcgacccaaagagaacacaaucuggacuagcgggagcagcauauccuuuugugguguaaacagugacacuguggguuggucuuggccagacggugcugaguugccauuuaccauugacaaguaa

SEQ ID NO: 53275 - RNA, 1410 nt, Artificial Sequence; identical to SEQ ID NO: 48750
  derived and/or modified CDS sequence (wt) from neuraminidase__InfluenzaA__AEV53493

SEQ ID NO: 53276 - RNA, 1410 nt, Artificial Sequence; identical to SEQ ID NO: 53242
  derived and/or modified CDS sequence (wt) from neuraminidase__InfluenzaA__AEV53495

SEQ ID NO: 53277 - RNA, 1410 nt, Artificial Sequence
  derived and/or modified CDS sequence (wt) from neuraminidase__InfluenzaA__AEV53497
augaauccaaaccaaaagauaauaaccauugguucggucuguaugacaauuggaauggcuaacuuaauauuacaaauuggaaacauaaucucaauauggauuagccacucaauucaacuugagaaucaaaaucagauugaaacaugcaaucaaagcgucauuacuuaugaaaacaacacuuggguaaaucagacauauguuaacaucagcaacaccaacuuugcugcuggacagucagugguuuccgugaacuuagcgggcaauuccucucucugcccuguuaguggaugggcuauauacaguaaagacaacaguauaagaaucgguuccaagggggauguguuugucauaagggaaccauucauaucaugcucccccuuggaaugcagaaccuucuucuugacucaaggggccuugcuaaaugacaaacauuccaauggaaccauuaaagacaggagcccauaucgaacccuaaugagcuguccuauuggugaaguucccucuccauacaacucaagauuugagucagucgcuuggucagcaagugcuugucaugauggcaucaauuggcuaacaauuggaauuucuggcccagacaauggggcaguggcuguguuaaaguacaacggcauaauaacagacacuaucaagaguuggagaaacaauauauugagaacacaagagucugaaugugcauguguaaaugguucuugcuuuacuguaaugaccgauggaccaagugauggacaggccucauacaagaucuucagaauagaaaagggaaagauagucaaaucagucgaaaugaaugccccuaauuaucacuaugaggaaugcuccuguuauccugauucuagugaaaucacaugugugugcagggauaacuggcauggcucgaaucgaccgugggugucuuucaaccagaaucuggaauaucagauaggauacauaugcagugggauuuucggagacaauccacgcccuaaugauaagacaggcaguugugguccaguaucgucuaauggagcaaauggaguaaaaggauuuucauucaaauacggcaaugguguuuggauagggagaacuaaaagcauuaguucaagaaacgguuuugagaugauuugggauccgaacggauggacugggacagacaauaacuucucaauaaagcaagauaucguaggaauaaaugaguggucaggauauagcgggaguuuuguucagcauccagaacuaacagggcuggauuguauaagaccuugcuucuggguugaacuaaucagagggcgacccaaagagaacacaaucuggacuagcgggagcagcauauccuuuugugguguaaacagugacacuguggguuggucuuggccagacggugcugaguugccauuuaccauugacaaguaa

SEQ ID NO: 53278 - RNA, 1410 nt, Artificial Sequence; identical to SEQ ID NO: 49768
  derived and/or modified CDS sequence (wt) from neuraminidase__InfluenzaA__AEV53499

SEQ ID NO: 53279 - RNA, 1410 nt, Artificial Sequence
  derived and/or modified CDS sequence (wt) from neuraminidase__InfluenzaA__AEV53501
augaauccaaaccaaaagauaauaaccauugguucggucuguaugacaauuggaauggcuaacuuaauauuacaaauuggaaacauaaucucaauauggauuagccacucaauucaacuugggaaucaaaaucagauugaaacaugcaaucaaagcgucauuacuuaugaaaacaacacuuggguaaaucagacauauguuaacaucagcaacaccaacuuugcugcuggacagucagugguuuccgugaaauuagcgggcaauuccucucucugcccuguuaguggaugggcuauauacaguaaagacaacaguauaagaaucgguuccaagggggauguguuugucauaagggaaccauucauaucaugcucccccuuggaaugcagaaccuucuucuugacucaaggggccuugcuaaaugacaaacauuccaauggaaccauuaaagacaggagcccauaucgaacccuaaugagcuguccuauuggugaaguucccucuccauacaacucaagauuugagucagucgcuuggucagcaagugcuugucaugauggcaucaauuggcuaacaauuggaauuucuggcccagacaauggggcaguggcuguguuaaaguacaacggcauaauaacagacacuaucaagaguuggagaaacaauauauugagaacacaagagucugaaugugcauguguaaaugguucuugcuuuacuguaaugaccgauggaccaagugauggacaggccucauacaagaucuucagaauagaaaagggaaagauagucaaaucagucgaaaugaaugccccuaauuaucacuaugaggaaugcuccuguuauccugauucuagugaaaucacaugugugugcagggauaacuggcauggcucgaaucgaccgugggugucuuucaaccagaaucuggaauaucagauaggguacauaugcagugggauuuucggagacaauccacgcccuaaugauaagacaggcaguugugguccaguaucgucuaauggagcaaauggaguaaaaggauuuucauucaaauacggcaaugguguuuggauagggagaacuaaaagcauuaguucaagaaacgguuuugagaugauuugggauccgaacggauggacugggacagacaauaacuucucaauaaagcaagauaucguaggaauaaaugaguggucaggauauagcgggaguuuuguucagcauccagaacuaacagggcuggauuguauaagaccuugcuucuggguugaacuaaucagagggcgacccaaagagaacacaaucuggacuagcgggagcagcauauccuuuugugguguaaacagugacacuguggguuggucuuggccagacggugcugaguugccauuuaccauugacaaguaa

SEQ ID NO: 53280 - RNA, 1410 nt, Artificial Sequence; identical to SEQ ID NO: 48750
  derived and/or modified CDS sequence (wt) from neuraminidase__InfluenzaA__AEV53503

SEQ ID NO: 53281 - RNA, 1410 nt, Artificial Sequence
  derived and/or modified CDS sequence (wt) from neuraminidase__InfluenzaA__AEV53505
augaauccaaaccaaaagauaauaaccauugguucggucuguaugacaauuggaauggcuaacuuaauauuacaaauuggaaacauaaucucaauauggauuagccacucaauucaacuugggaaucaaaaucagauugaaacaugcaaucaaagcgucauuacuuaugaaaacaacacuuggguaaaucagacauauguuaacaucagcaacaccaacuuugcugcuggacagucagugguuuccgugaaauuagcgggcaauuccucucucugcccuguuaguggaugggcuauauacaguaaagacaacaguauaagaaucgguuccaagggggauguguuugucauaagggaaccauucauaucaugcucccccuuggaaugcagaaccuucuucuugacucaaggggccuugcuaaaugacaaacauuccaauggaaccauuaaagacaggagcccauaucgaacccuaaugagcuguccuauuggugaaguucccucuccauacaacucaagauuugagucagucgcuuggucagcaagugcuugucaugauggcaucaauuggcuaacaauuggaauuucuggcccagacaauggggcaguggcuguguuaaaguacaacggcauaauaacagacacuaucaagaguuggagaaacaauauauugagaacacaagagucugaaugugcauguguaaaugguucuugcuuuacuguaaugaccgauggaccaagugauggacaggccucauacaagaucuucagaauagaaaagggaaagauagucaaaucagucgaaaugaaugccccuaauuaucacuaugaggaaugcuccuguuauccugauucuagugaaaucacaugugugugcagggauaacuggcaugguucgaaucgaccgugggugucuuucaaccagaaucuggaauaucagauaggauacauaugcagugggauuuucggagacaauccacgcccuaaugauaagacaggcaguugugguccaguaucgucuaauggagcaaauggaguaaaaggauuuucauucaaauacggcaaugguguuuggauagggagaacuaaaagcauuaguucaagaaacgguuuugagaugauuugggauccgaacggauggacugggacagacaauaacuucucaauaaagcaagauaucguaggaauaaaugaguggucaggauauagcgggaguuuuguucagcauccagaacuaacagggcuggacuguauaagaccuugcuucuggguugaacuaaucagagggcgacccaaagagaacacaaucuggacuagcgggagcagcauauccuuuugugguguaaacagugacacuguggguuggucuuggccagacggugcugaguugccauuuaccauugacaaguaa

SEQ ID NO: 53282 - RNA, 1410 nt, Artificial Sequence; identical to SEQ ID NO: 50656
  derived and/or modified CDS sequence (wt) from neuraminidase__InfluenzaA__AEV53507

SEQ ID NO: 53283 - RNA, 1410 nt, Artificial Sequence
  derived and/or modified CDS sequence (wt) from neuraminidase__InfluenzaA__AEV53509
augaauccaaaccaaaagauaauaaccauugguucggucuguaugacaauuggaauggcuaacuuaauauuacaaauuggaaacauaaucucaauauggauuagccacucaauucaacuugggaaucaaaaucagauugaaacaugcaaucaaagcgucauuacuuaugaaaacaacacuuggguaaaucagacauauguuaacaucagcaacaccaacuuugcugcuggacagucagugguuuccgugaaauuagcgggcaauuccucucucugcccuguuaguggaugggcuauauacaguaaagacaacaguauaagaaucgguuccaagggggauguguuugucauaagggaaccauucauaucaugcucccccuuggaaugcagaaccuucuucuugacucaaggggccuugcuaaaugacaaacauucuaauggaaccauuaaagacaggagcccauaucgaacccuaaugagcuguccuauuggugaaguucccucuccauacaacucaagauuugagucagucgcuuggucagcaagugcuugucaugauggcaucaauuggcuaacaauuggaauuucuggcccagacaauggggcaguggcuguguuaaaguacaacggcauaauaacagacacuaucaagaguuggagaaacaauauauugagaacacaagagucugaaugugcauguguaaaugguucuugcuuuacuguaaugaccgauggaccaagugauggacaggccucauacaagaucuucagaauagaaaagggaaagauagucaaaucagucgaaaugaaugccccuaauuaucacuaugaggaaugcuccuguuauccugauucuagugaaaucacaugugugugcagggauaacuggcauggcucgaaucgaccgugggugucuuucaaccagaaucuggaauaucagauaggauacauaugcagugggauuuucggagacaauccacgcccuaaugauaagacaggcaguugugguccaguaucgucuaauggagcaaauggaguaaaaggauuuucauucaaauacggcaaugguguuuggauaggaagaacuaaaagcauuaguucaagaaacgguuuugagaugauuugggauccgaacggauggacugggacagacaauaacuucucaauaaagcaagauaucguaggaauaaaugaguggucaggauauagcgggaguuuuguucagcauccagaacuaacagggcuggauuguauaagaccuugcuucuggguugaacuaaucagagggcgacccaaagagaacacaaucuggacuagcgggagcagcauauccuuuugugguguaaacagugacacuguggguuggucuuggccagacggugcugaguugccauuuaccauugacaaguaa

SEQ ID NO: 53284 - RNA, 1410 nt, Artificial Sequence; identical to SEQ ID NO: 53242
  derived and/or modified CDS sequence (wt) from neuraminidase__InfluenzaA__AEV53511

SEQ ID NO: 53285 - RNA, 1410 nt, Artificial Sequence; identical to SEQ ID NO: 53242
  derived and/or modified CDS sequence (wt) from neuraminidase__InfluenzaA__AEV53513

SEQ ID NO: 53286 - RNA, 1410 nt, Artificial Sequence
  derived and/or modified CDS sequence (wt) from neuraminidase__InfluenzaA__AEV53515
augaauccaaaccaaaagauaauaaccauugguucggucuguaugacaauuggaauggcuaacuuaauauuacaaauuggaaacauaaucucaauauggauuagccacucaauucaacuugggaaucaaaaucagauugaaacaugcaaucaaagcgucauuacuuaugaaaacaacacuuggguaaaucagacauauguuaacaucagcaacaccaacuuugcugcuggacagucagugguucccgugaaauuagcgggcaauuccucucucugcccuguuaguggaugggcuauauacaguaaagacaacaguauaagaaucgguuccaagggggauguguuugucauaagggaaccauucauaucaugcucccccuuggaaugcagaaccuucuucuugacucaaggggccuugcuaaaugacaaacauuccaauggaaccauuaaagacaggagcccauaucgaacccuaaugagcuguccuauuggugaaguucccucuccauacaacucaagauuugagucagucgcuuggucagcaagugcuugucaugauggcaucaauuggcuaacaauuggaauuucuggcccagacaauggggcaguggcuguguuaaaguacaacggcauaauaacagacacuaucaagaguuggagaaacaauauauugagaacacaagagucugaaugugcauguguaaaugguucuugcuuuacuguaaugaccgauggaccaagugauggacaggccucauacaagaucuucagaauagaaaagggaaagauagucaaaucagucgaaaugaaugccccuaauuaucacuaugaggaaugcuccuguuauccugauucuagugaaaucacaugugugugcagggacaacuggcauggcucgaaucgaccgugggugucuuucaaccagaaucuggaauaucagauaggauacauaugcagugggauuuucggagacaauccacgcccuaaugauaagacaggcaguugugguccaguaucgucuaauggagcaaauggaguaaaaggauuuucauucaaauacggcaaugguguuuggauagggagaacuaaaagcauuaguucaagaaacgguuuugagaugauuugggauccgaacggauggacugggacagacaauaacuucucaauaaagcaagauaucguaggaauaaaugaguggucaggauauagcgggaguuuuguucagcauccagaacuaacagggcuggauuguauaagaccuugcuucuggguugaacuaaucagaggacgacccaaagagaacacaaucuggacuagcgggagcagcauauccuuuugugguguaaacagugacacuguggguuggucuuggccagacggugcugaguugccauuuaccauugacaaguaa

SEQ ID NO: 53287 - RNA, 1410 nt, Artificial Sequence
  derived and/or modified CDS sequence (wt) from neuraminidase__InfluenzaA__AEV53517
augaauccaaaccaaaggauaauaaccauugguucgguuuguaugacaauuggaauggcuaacuuaauauuacaaauuggaaacauaaucucaauauggguuagccacucaauucaacuugggaaucaaaaucagauugaaacaugcaaucaaagcgucauuacuuaugaaaacaacacuuggguaaaucagacauauguuaacaucagcaacaccaacuuugcugcuggacagucagugguuuccgugaaauuagcgggcaauuccucucucugcccuguuaguggaugggcuauauacaguaaagacaacaguauaagaaucgguuccaagggggauguguuugucauaagggaaccauucauaucaugcucccccuuggaaugcagaaccuucuucuugacucaaggggccuugcuaaaugacaaacauuccaauggaaccauuaaagacaggagcccauaucgaacccuaaugagcuguccuauuggugaaguucccucuccauacaacucaagauuugagucagucgcuuggucagcaagugcuugucaugauggcaucaauuggcuaacaauuggaauuucuggcccagacaauggggcaguggcuguguuaaaguacaacggcauaauaacagacacuaucaagaguuggagaaacaauauauugagaacacaagagucugaaugugcauguguaaaugguucuugcuuuacuguaaugaccgauggaccaagugauggacaggccucauacaagaucuucagaauagaaaagggaaagauagucaaaucagucgaaaugaaugccccuaauuaucacuaugaggaaugcuccuguuauccugauucuagugaaaucacauguguaugcagggauaacuggcauggcucgaaucgaccgugggugucuuucaaccagaaucuggaauaucagauaggauacauaugcagugggauuuucggagacaauccacgcccuaaugauaagacaggcaguugugguccaguaucgucuaauggagcaaauggaguaaaaggauuuucauucaaauacggcaaugguguuuggauagggagaacuaaaagcauuaguucaagaaacgguuuugagaugauuugggauccgaacggauggacugggacagacaauaacuucucaauaaagcaagauaucguaggaauaaaugaguggucaggauauagcgggaguuuuguucagcauccagaacuaacagggcuggauuguauaagaccuugcuucuggguugaacuaauuagagggcgacccaaagagaacacaaucuggacuagcgggagcagcauauccuuuugugguguaaacagugacacuguggguuggucuuggccagacggugcugaguugccauuuaccauugacaaguaa

SEQ ID NO: 53288 - RNA, 1410 nt, Artificial Sequence
  derived and/or modified CDS sequence (wt) from neuraminidase__InfluenzaA__AEV53519
augaauccaaaccaaaagauaauaaccauugguucggucuguaugacaauuggaauggcuaacuuaauauuacaaauuggaaacauaaucucaauauggauuagccacucaauucaacuugggaaucaaaaucagauugaaacaugcaaucaaagcgucauuacuuaugaaaacaacacuuggguaaaucagacauauguuaacaucagcaacaccaacuuugcugcuggacagucagugguuuccgugaaauuagcgggcaauuccucucucugcccuguuaguggaugggcuauauacaguaaagacaacaguauaagaaucgguuccaagggggauguguuugucauaagggaaccauucauaucuugcucccccuuggaaugcagaaccuucuucuugacucaaggggccuugcuaaaugacaaacauuccaauggaaccauuaaagacaggagcccauaucgaacccuaaugagcuguccuauuggugaaguucccucuccauacaacucaagauuugagucaguugcuuggucagcaagugcuugucaugauggcaucaauuggcuaacaauuggaauuucuggcccagacaauggggcaguggcuguguuaaaguacaacggcauaauaacagacacuaucaagaguuggagaaacaauauauugagaacacaagagucugaaugugcauguguaaaugguucuugcuuuacuguaaugaccgauggaccaagugauggacaggccucauacaagaucuucagaauagaaaagggaaagauagucaaaucagucgaaaugaaugccccuaauuaucacuaugaggaaugcuccugcuauccugauucuagugaaaucacaugugugugcagggauaacuggcauggcucgaaucgaccgugggugucuuucaaccagaaucuggaguaucagauaggguacauaugcagugggauuuucggagacaauccacgcccuaaugauaagacaggcaguugugguccaguaucgucuaauggagcaaauggaguaaaaggauuuucauucaaauacggcaaugguguuuggauagggagaacuaaaagcauuaguucaagaaacgguuuugagaugauuugggauccgaacggauggacugggacagacaauaacuucucaauaaagcaagauaucguaggaauaaaugaguggucaggauauagcgggaguuuuguucagcauccagaacuaacagggcuggauuguauaagaccuugcuucuggguugaacuaaucagagggcgacccaaagagaacacaaucuggacuagcgggagcagcauauccuuuugcgguguaaacagugacacuguggguuggucuuggccagacggugcugaguugccauuuaccauugacaaguaa

SEQ ID NO: 53289 - RNA, 1410 nt, Artificial Sequence; identical to SEQ ID NO: 53242
  derived and/or modified CDS sequence (wt) from neuraminidase__InfluenzaA__AEV53521

SEQ ID NO: 53290 - RNA, 1410 nt, Artificial Sequence
  derived and/or modified CDS sequence (wt) from neuraminidase__InfluenzaA__AEV53523
augaauccaaaccaaaagauaauaaccauugguucggucuguaugacaauuggaauggcuaacuuaauauuacaaauuggaaacauaaucucaauauggauuagccacucaauucaacuugggaaucaaaaucagauugaaacaugcaaucaaagcgucauuacuuaugaaaacaacacuuggguaaaucagacauauguuaacaucagcaacaccaacuuugcugcuggacagucagugguuuccgugaaauuagcgggcaauuccucucucugcccuguuaguggaugggcuauauacaguaaagacaacaguauaagaaucgguuccaagggggauguguuugucauaagggaaccauucauaucaugcucccccuuggaaugcagaaccuucuucuugacucaaggggccuugcuaaaugacaaacauuccaauggaaccauuaaagacaggagcccauaucgaacccuaaugagcuguccuauuggugaaguucccucuccauacaacucaagauuugagucagucgcuuggucagcaagugcuugucaugauggcaucaauuggcuaacaauuggaauuucuggcccagacaauggggcaguggcuguguuaaaguacaacggcauaauaacagacacuaucaagaguuggagaaacaauauauugagaacacaagagucugaaugugcauguguaaaugguucuugcuuuacuguaaugaccgauggaccaagugauggacaggccucauacaagaucuucagaauagaaaagggaaagauagucaaaucagucgaaaugaaugccccuaauuaucacuaugaggaaugcuccuguuauccugauucuagugaaaucacaugugugugcagggauaacuggcauggcucgaaucgaccgugggugucuuucaaccagaaucuggaauaucagauaggauacauaugcagugggauuuucggagacaauccacgcccuaaugauaagaaaggcaguugugguccaguaucgucuaauggagcaaauggaguaaaaggauuuucauucaaauacggcaaugguguuuggauagggagaacuaaaagcauuaguucaagaaacgguuuugagaugauuugggauccgaacggauggacugggacagacaauaacuucucaauaaagcaagauaucguaggaauaaaugaauggucaggauauagcgggaguuuuguucagcauccagaacuaacagggcuggauuguauaagaccuugcuucuggguugaacuaaucagagggcggcccaaagagaacacaaucuggacuagcgggagcagcauauccuuuugugguguaaacagugacacuguggguuggucuuggccagacggugcugaguugccauuuaccauugacaaguaa

SEQ ID NO: 53291 - RNA, 1410 nt, Artificial Sequence
  derived and/or modified CDS sequence (wt) from neuraminidase__InfluenzaA__AEV53525
augaauccaaaccaaaagauaauaaccauugguucggucuguaugacaauuggaauggcuaacuuaauauuacaaauuggaaacauaaucucaauauggauuagccacucaauucaacuugggaaucaaaaucagauugaaacaugcaaucaaagcgucauuacuuaugaaaacaacacuuggguaaaucagacauauguuaacaucagcaacaccaacuuugcugcuggacagucagugguuuccgugaaauuagcgggcaauuccucucucugcccuguuaguggaugggcuauauacaguaaagacaacaguauaagaaucgguuccaagggggauguguuugucauaagggaaccauucauaucuugcucccccuuggaaugcagaaccuucuucuugacucaaggggccuugcuaaaugacaaacauuccaauggaaccauuaaagacaggagcccauaucgaacccuaaugagcuguccuauuggugaaguucccucuccauacaacucaagauuugagucaguugcuuggucagcaagugcuugucaugauggcaucaauuggcuaacaauuggaauuucuggcccagacaauggggcaguggcuguguuaaaguacaacggcauaauaacagacacuaucaagaguuggagaaacaauauauugagaacacaagagucugaaugugcauguguaaaugguucuugcuuuacuguaaugaccgauggaccaagugauggacaggccucauacaagaucuucagaauagaaaagggaaagauagucaaaucagucgaaaugaaugccccuaauuauuacuaugaggaaugcuccugcuauccugauucuagugaaaucacaugugugugcagggauaacuggcauggcucgaaucgaccgugggugucuuucaaccagaaucuggaguaucagauaggguacauaugcagugggauuuucggagacaauccacgcccuaaugauaagacaggcaguugugguccaguaucgucuaauggagcaaauggaguaaaaggauuuucauucaaauacggcaaugguguuuggauagggagaacuaaaagcauuaguucaagaaacgguuuugagaugauuugggauccgaacggauggacugggacagacaauaacuucucaauaaagcaagauaucguaggaauaaaugaguggucaggauauagcgggaguuuuguucagcauccagaacuaacagggcuggauuguauaagaccuugcuucuggguugaacuaaucagagggcgacccaaagagaacacaaucuggacuagcgggagcagcauauccuuuugcgguguaaacagugacacuguggguuggucuuggccagacggugcugaguugccauuuaccauugacaaguaa

SEQ ID NO: 53292 - RNA, 1410 nt, Artificial Sequence
  derived and/or modified CDS sequence (wt) from neuraminidase__InfluenzaA__AEV53527
augaauccaaaccaaaagauaauaaccauugguucggucuguaugacaauuggaauggcuaacuuaauauuacaaauuggaaacauaaucucaauauggauuagccacucaauucaacuugggaaucaaaaucagauugaaacaugcaaucaaagcgucauuacuuaugagaacaacacuuggguaaaucagacauaugucaacaucagcaacaccaacuuugcugcuggacagucagugguuuccgugaaauuagcgggcaauuccucucucugcccuguuaguggaugggcuauauacaguaaagacaacaguauaagaaucgguuccaagggggauguguuugucauaagggaaccauucauaucaugcucccccuuggaaugcagaaccuucuucuugacucaaggggccuugcuaaaugacaaacauuccaauggaaccauuaaagacaggagcccauaucgaacccuaaugagcuguccuauuggugaaguucccucuccauacaacucaagauuugagucagucgcuuggucagcaagugcuugucaugauggcaucaauuggcuaacaauuggaauuucuggcccagacaauggggcaguggcuguguuaaaguacaacggcauaauaacagacacuaucaagaguuggagaaacaauauauugagaacacaagagucugaaugugcauguguaaaugguucuugcuuuacuguaaugaccgauggaccaagugauggacaggccucauacaagaucuucagaauagaaaagggaaagauagucaaaucagucgaaaugaaugccccuaauuaucacuaugaggaaugcuccuguuauccugauucuagugaaaucacaugugugugcagggauaacuggcauggcucgaaucgaccgugggugucuuucaaccagaaucuagaauaucagauaggauacauaugcagugggauuuucggagacaauccacgcccuaaugauaagacaggcaguugugguccaguaucgucuaauggagcaaauggaguaaaaggauuuucauucaaauacggcaaugguguuuggauagggagaacuaaaagcauuaguucaagaaacgguuuugagaugauuugggauccgaacggauggacugggacagacaauaacuucucaauaaagcaagauaucguaggaauaaaugaguggucaggauauagcggaaguuuuguucagcauccagaacuaacagggcuggauuguauaagaccuugcuucuggguugaacuaaucagagggcgacccaaagagaacacaaucuggacuagcgggagcagcauauccuuuugugguguaaacagugacacuguggguuggucuuggccagacggugcugaguugccauuuaccauugacaaguaa

SEQ ID NO: 53293 - RNA, 1410 nt, Artificial Sequence
  derived and/or modified CDS sequence (wt) from neuraminidase__InfluenzaA__AEV53529
augaauccaaaccaaaagauaauaaccauugguucggucuguaugacaauuggaauggcuaacuuaauauuacaaauuggaaacauaaucucaauauggauuagccacucaauucaacuugagaaucaaaaucagauugaaacaugcaaucaaagcgucauuacuuaugaaaacaacacuuggguaaaucagacauauguuaacaucagcaacaccaacuuugcugcuggacagucagugguuuccgugaaauuagcgggcaauuccucucucugcccuguuaguggaugggcuauauacaguaaagacaacaguauaagaaucgguuccaagggggauguguuugucauaagggaaccauucauaucaugcucccccuuggaaugcagaaccuucuucuugacucaaggggccuugcuaaaugacaaacauuccaauggaaccauuaaagacaggagcccauaucgaacccuaaugagcuguccuauuggugaaguucccucuccauacaacucaagauuugagucagucgcuuggucagcaagugcuugucaugauggcaucaauuggcuaacaauuggaauuucuggcccagacaauggggcaguggcuguguuaaaguacaacggcauaauaacagacacuaucaagaguuggagaaacaauauauugagaacacaagagucugaaugugcauguguaaaugguucuugcuuuacuguaaugaccgauggaccaagugauggacaggccucauacaagaucuucagaauagaaaagggaaagauagucaaaucagucgaaaugaaugccccuaauuaucacuaugaggaaugcuccuguuauccugauucuagugaaaucacaugugugugcagggauaacuggcauggcucgaaucgaccgugggugucuuucaaccagaaucuggaauaucagauaggauacauaugcagugggauuuucggagacaauccacgcccuaaugauaagacaggcaguugugguccaguaucgucuaauggagcaaauggaguaaaaggauuuucauucaaauacggcaaugguguuuggauagggagaacuaaaagcauuaguucaagaaacgguuuugagaugauuugggauccgaacggauggacugggacagacaauaacuucucaauaaagcaagauaucguaggaauaaaggaguggucaggauauagcgggaguuuuguucagcauccagaacuaacagggcuggauuguauaagaccuugcuucuggguugaacuaaucagagggcgacccaaagagaacacaaucuggacuagcgggagcagcauauccuuuugugguguaaacagugacacuguggguuggucuuggccagacggugcugaguugccauuuaccauugacaaguaa

SEQ ID NO: 53294 - RNA, 1410 nt, Artificial Sequence; identical to SEQ ID NO: 53242
  derived and/or modified CDS sequence (wt) from neuraminidase__InfluenzaA__AEV53531

SEQ ID NO: 53295 - RNA, 1410 nt, Artificial Sequence
  derived and/or modified CDS sequence (wt) from neuraminidase__InfluenzaA__AEV53533
augaauccaaaccaaaagauaauaaccauugguucggucuguaugacaauuggaauggcuaacuuaauauuacaaauuggaaacauaaucucaauauggauuagccacucaauucaacuugggaaucaaaaucagauugaaacaugcaaucaaagcgucauuacuuaugaaaacaacacuuggguaaaucagacauauguuaacaucagcaacaccaacuuugcugcuggacagucagugguuuccgugaaauuagcgggcaauuccucucucugcccuguuaguggaugggcuauauacaguaaagacaacaguauaagaaucgguuccaagggggauguguuugucauaagggaaccauucauaucaugcucccccuuggaaugcagaaccuucuucuugacucaaggggccuugcuaaaugacaaacauuccaauggaaccauuaaagacaggagcccauaucgaacccuaaugagcuguccuaucggugaaguucccucuccauacaacucaagauuugagucagucgcuuggucagcaagugcuugucaugauggcaucaauuggcuaacaauuggaauuucuggcccagacaauggggcaguggcuguguuaaaguacaacggcauaauaacagacacuaucaagaguuggagaaacaauauauugagaacacaagagucugaaugugcauguguaaaugguucuugcuuuacuguaaugaccgauggaccaagugauggacaggccucauacaagaucuucagaauagaaaagggaaagauagucaaaucagucgaaaugaaugccccuaauuauuacuaugaggaaugcuccugcuauccugauucuagugaaaucacaugugugugcagggauaacuggcauggcucgaaucgaccgugggugucuuucaaccagaaucuggaguaucagauaggguacauaugcagugggauuuucggagacaauccacgcccuaaugauaagacaggcaguugugguccaguaucgucuaauggagcaaauggaguaaaaggauuuucauucaaauacggcaaugguguuuggauagggagaacuaaaagcauuaguucaagaaacgguuuugagaugauuugggauccgaacggauggacugggacagacaauaacuucucaauaaagcaagauaucguaggaauaaaugaguggucaggauauagcgggaguuuuguucagcauccagaacuaacagggcugaauuguauaagaccuugcuucuggguugaacuaaucagagggcgacccaaagagaacacaaucuggacuagcgggagcagcauauccuuuugugguguaaacagugacacuguggguuggucuuggccagacggugcugaguugccauuuaccauugacaaguaa

SEQ ID NO: 53296 - RNA, 1410 nt, Artificial Sequence; identical to SEQ ID NO: 48750
  derived and/or modified CDS sequence (wt) from neuraminidase__InfluenzaA__AEV53535

SEQ ID NO: 53297 - RNA, 1410 nt, Artificial Sequence
  derived and/or modified CDS sequence (wt) from neuraminidase__InfluenzaA__AEV53537
augaauccaaaccaaaagauaauaaccauugguucggucuguaugacaauuggaauggcuaacuuaauauuacaaauuggaaacauaaucucaauauggguuagccacucaauucaacuugggaaucaaaaucagauugaaacaugcaaucaaagcgucauuacuuaugaaaacaacacuuggguaaaucagacauauguuaacaucagcaacaccaacuuugcugcuggacagucagugguuuccgugaaauuagcgggcaauuccucucucugcccuguuaguggaugggcuauauacaguaaagacaacaguauaagaaucgguuccaagggggauguguuugucauaagggaaccauucauaucaugcucccccuuggaaugcagaaccuucuucuugacucaaggggccuugcuaaaugacaaacauuccaauggaaccauuaaagacaggagcccauaucgaacccuaaugagcuguccuauuggugaaguucccucuccauacaacucaagauuugagucagucgcuuggucagcaagugcuugucaugauggcaucaauuggcuaacaauuggaauuucuggcccagacaauggggcaguggcuguguuaaaguacaacggcauaauaacagacacuaucaagaguuggagaaacaauauauugagaacacaagagucugaaugugcauguguaaaugguucuugcuuuacuguaaugaccgauggaccaagugauggacaggccucauacaagaucuucagaauagaaaagggaaagauagucaaaucagucgaaaugaaugccccuaauuaucacuaugaggaaugcuccuguuauccugauucuagugaaaucacauguguaugcagggauaacuggcauggcucgaaucgaccgugggugucuuucaaccagaaucuggaauaucagauaggauacauaugcagugggauuuucggagacaauccacgcccuaaugauaagacaggcaguugugguccaguaucgucuaauggagcaaauggaguaaaaggauuuucauucaaauacggcaaugguguuuggauagggagaacuaaaagcauuaguucaagaaacgguuuugagaugauuugggauccgaacggauggacugggacagacaauaacuucucaauaaagcaagauaucguaggaauaaaugaguggucaggauauagcgggaguuuuguucagcauccagaacuaacagggcuggauuguauaagaccuugcuucuggguugaacuaaucagagggcgacccaaagagaacacaaucuggacuagcgggagcagcauauccuuuugugguguaaacagugacacuguggguuggucuuggccagacggugcugaguugccauuuaccauugacaaguaa

SEQ ID NO: 53298 - RNA, 1410 nt, Artificial Sequence
  derived and/or modified CDS sequence (wt) from neuraminidase__InfluenzaA__AEV53539
augaauccaaaccaaaagauaauaaccauugguucggucuguaugacaauuggaauggcuaacuuaauauuacaaauuggaaacauaaucucaauauggauuagccacucaauucaacuugggaaucaaaaucagauugaaacaugcaaucaaagcgucauuacuuaugaaaacaacacuuggguaaaucagacauauguuaacaucagcaacaccaacuuugcugcuggacagucagugguuuccgugaaauuagcgggcaauuccucucucugcccuguuaguggaugggcuauauacaguaaagacaacaguauaagaaucgguuccaagggggauguguuugucauaagggaaccauucauaucaugcucccccuuggaaugcagaaccuucuucuugacucaaggggccuugcuaaaugacaaacauuccaauggaaccauuaaagacaggagcccauaucgaacccuaaugagcuguccuauuggugaaguucccucuccauacaacucaagauuugagucagucgcuuggucagcaagugcuugucaugauggcaucaauuggcuaacaauuggaauuucuggcccagacaauggggcaguggcuguguuaaaguacaacggcauaauaacagacacuaucaagaguuggagaaacaauauauugagaacacaagagucugaaugugcauguguaaaugguucuugcuuuacuguaaugaccgauggaccaagugauggacaggccucauacaagaucuucagaauagaaaagggaaagauagucaaaucagucgaaaugaaugccccuaauuaucacuaugaggaaugcuccuguuauccugauucuagugaaaucacaugugugugcagagauaacuggcauggcucgaaucgaccgugggugucuuucaaccagaaucuggaauaucagauaggauacauaugcagugggauuuucggagacaauccacgcccuaaugauaagacaggcaguugugguccaguaucgucuaauggagcaaauggaguaaaaggauuuucauucaaauacggcaaugguguuuggauagggagaacuaaaagcauuaguucaagaaacgguuuugagaugauuugggauccgaacggauggacugggacagacaauaacuucucaauaaagcaagauaucguaggaauaaaugaguggucaggauauagcgggaguuuuguucagcauccagaacuaacagggcuggauuguauaagaccuugcuucuggguugaacuaaucagagggcgacccaaagagaacacaaucuggacuagcgggagcagcauauccuuuugugguguaaacagugacacuguggguuggucuuggccagacggugcugaguugccauuuaccauugacaaguaa

SEQ ID NO: 53299 - RNA, 1410 nt, Artificial Sequence
  derived and/or modified CDS sequence (wt) from neuraminidase__InfluenzaA__AEV53541
augaauccaaaccaaaagauaauaaccauugguucggucuguaugacaauuggaauggcuaacuuaauauuacaaauuggaaacauaaucucaauauggauuagccacucaauucaacuugggaaucaaaaucagauugaaacaugcaaucaaagcgucauuacuuaugaaaacaacacuuggguaaaucaaacauauguuaacaucagcaacaccaacuuugcugcuggacagucagugguuuccgugaaauuagcgggcaauuccucucucugcccuguuaguggaugggcuauauacaguaaagacaacaguauaagaaucgguuccaagggggauguguuugucauaagggaaccauucauaucaugcucccccuuggaaugcagaaccuucuucuugacucaaggggccuugcuaaaugacaaacauuccaauggaaccauuaaagacaggagcccauaucgaacccuaaugagcuguccuauuggugaaguucccucuccauacaacucaagauuugagucagucgcuuggucagcaagugcuugucaugauggcaucaauuggcuaacaauuggaauuucuggcccagacaauggggcaguggcuguguuaaaguacaacggcauaauaacagacacuaucaagaguuggagaaacaauauauugagaacacaagagucugaaugugcauguguaaaugguucuugcuuuacuguaaugaccgauggaccaagugauggacaggccucauacaagaucuucagaauagaaaagggaaagauagucaaaucagucgaaaugaaugccccuaauuaucacuaugaggaaugcuccuguuauccugauucuagugaaaucacaugugugugcagggauaacuggcauggcucgaaucgaccgugggugucuuucaaccagaaucuggaauaucagauaggauacauaugcagugggauuuucggagacaauccacgcccuaaugauaagacaggcaguugugguccaguaucgucuaauggagcaaauggaguaaaaggauuuucauucaaauacggcaaugguguuuggauagggagaacuaaaagcauuaguucaagaaacgguuuugagaugauuugggauccgaacggauggacugagacagacaauaacuucucaauaaagcaagauaucguaggaauaaaugaguggucaggauauagcgggaguuuuguucagcauccagaacuaacagggcuggauuguauaagaccuugcuucuggguugaacuaaucagagggcgacccaaagagaacacaaucuggacuagcgggagcagcauauccuuuugugguguaaacagugacacuguggguuggucuuggccagacggugcugaguugccauuuaccauugacaaguaa

SEQ ID NO: 53300 - RNA, 1410 nt, Artificial Sequence
  derived and/or modified CDS sequence (wt) from neuraminidase__InfluenzaA__AEV53543
augaauccaaaccaaaagauaauaaccauugguucggucuguaugacaauuggaauggcuaacuuaauauuacaaauuggaaacauaaucucaauauggauuagccacucaauucaacuugggaaucaaaaucagauugaaacaugcaaucaaagcgucauuacuuaugaaaacaacacuuggguaaaucaaacauauguuaacaucagcaacaccaacuuugcugcuggacagucagugguuuccgugaaauuagcgggcaauuccucucucugcccuguuaguggaugggcuauauacaguaaagacaacaguauaagaaucgguuccaagggggauguguuugucauaagggaaccauucauaucaugcucccccuuggaaugcagaaccuucuucuugacucaaggggccuugcuaaaugacaaacauuccaauggaaccauuaaagacaggagcccauaucgaacccuaaugagcuguccuauuggugaaguucccucuccauacaacucaagauuugagucagucgcuuggucagcaagugcuugucaugauggcaucaauuggcuaacaauuggaauuucuggcccagacaauggggcaguggcuguguuaaaguacaacggcauaauaacagacacuaucaagaguuggagaaacaauauauugagaacacaagagucugaaugugcauguguaaaugguucuugcuuuacuguaaugaccgauggaccaagugauggacaggccucauacaaaaucuucagaauagaaaagggaaagauagucaaaucagucgaaaugaaugccccuaauuaucacuaugaggaaugcuccuguuauccugauucuagugaaaucacaugugugugcagggauaacuggcauggcucgaaucgaccgugggugucuuucaaccagaaucuggaauaucagauaggauacauaugcagugggauuuucggagacaauccacgcccuaaugauaagacaggcaguugugguccaguaucgucuaauggagcaaauggaguaaaaggauuuucauucaaauacggcaaugguguuuggauagggagaacuaaaagcauuaguucaagaaacgguuuugagaugauuugggauccgaacggauggacugagacagacaauaacuucucaauaaagcaagauaucguaggaauaaaugaguggucaggauauagcgggaguuuuguucagcauccagaacuaacagggcuggauuguauaagaccuugcuucuggguugaacuaaucagagggcgacccaaagagaacacaaucuggacuagcgggagcagcauauccuuuugugguguaaacagugacacuguggguuggucuuggccagacggugcugaguugccauuuaccauugacaaguaa

SEQ ID NO: 53301 - RNA, 1410 nt, Artificial Sequence
  derived and/or modified CDS sequence (wt) from neuraminidase__InfluenzaA__AEV53545
augaauccaaaccaaaagauaauaaccauugguucggucuguaugacaauuggaauggcuaacuuaauauuacaaauuggaaacauaaucucaauauggauuagccacucaauucaacuugggaaucaaaaucagauugaaacaugcaaucaaagcgucauuacuuaugaaaacaacacuuggguaaaucagacauauguuaacaucagcaacaccaacuuugcugcuggacagucagugguuuccgugaaauuagcgggcaauuccucucucugcccuguuaguggaugggcuauauacaguaaagacaacaguauaagaaucgguuccaagggggauguguuugucauaagggaaccauucauaucaugcucccccuuggaaugcagaaccuucuucuugacucaaggggccuugcuaaaugacaaacauuccaauggaaccauuaaagacaggagcccauaucgaacccuaaugagcuguccuauuggugaaguucccucuccauacaacucaagauuugagucagucgcuuggucagcaagugcuugucaugauggcaucaacuggcuaacaauuggaauuucuggcccagacaauggggcaguggcuguguuaaaguacaacggcauaauaacagacacuaucaagaguuggagaaacaauauauugagaacacaagagucugaaugugcauguguaaaugguucuugcuuuacuguaaugaccgauggaccaagugauggacaggccucauacaagaucuucagaauagaaaagggaaagauagucaaaucagucgaaaugaaugccccuaauuaucacuaugaggaaugcuccuguuauccugauucuagugaaaucacaugugugugcagggauaacuggcauggcucgaaucgaccgugggugucuuucaaccagaaucuggaauaucagauaggauacauaugcagugggauuuucggagacaauccacgcccuaaugauaagacaggcaguugugguccaguaucgucuaauggagcaaauggaguaaaaggauuuucauucaaauacggcaaugguguuuggauagggagaacuaaaagcauuaguucaagaaacgguuuugagaugauuugggauccgaacggauggauugggacagacaauaacuucucaauaaagcaagauaucguaggaauaaaugaguggucaggauauagcgggaguuuuguucagcauccagaacuaacagggcuggauuguauaagaccuugcuucuggguugaacuaaucagagggcgacccaaagagaacacaaucuggacuagcgggagcagcauauccuuuugugguguaaacagugacacuguggguuggucuuggccagacggugcugaguugccauuuaccauugacaaguaa

SEQ ID NO: 53302 - RNA, 1410 nt, Artificial Sequence; identical to SEQ ID NO: 53299
  derived and/or modified CDS sequence (wt) from neuraminidase__InfluenzaA__AEV53547

SEQ ID NO: 53303 - RNA, 1410 nt, Artificial Sequence
  derived and/or modified CDS sequence (wt) from neuraminidase__InfluenzaA__AEV53549
augaauccaaaccaaaagauaauaaccauugguucggucuguaugacaauuggaauggcuaacuuaauauuacaaauuggaaacauaaucucaauauggauuagccacucaauucaacuugggaaucaaaaucagauugaaacaugcaaucaaagcgucauuacuuaugaaaacaacacuuggguaaaucagacauauguuaacaucagcaacaccaacuuugcugcuggacagucagugguuuccgugaaauuagcgggcaauuccucucucugcccuguuaguggaugggcuauauacaguaaagacaacaguauaagaaucgguuccaagggggauguguuugucauaagggaaccauucauaucaugcucccccuuggaaugcagaaccuucuucuugacucaaggggccuugcuaaaugacaaacauuccaauggaaccauuaaagacaggagcccauaucgaacccuaaugagcuguccuauuggugaaguucccucuccauacaacucaagauuugagucagucgcuuggucagcaagugcuugucaugauggcaucaauuggcuaacaauuggaauuucuggcccagacaauggggcaguggcuguguuaaaguacaacggcauaauaacagacacuaucaagaguuggagaaacaauauauugagaacacaagagucugaaugugcauguguaaaugguucuugcuuuacuguaaugaccgauggaccaagugauggacaggccucauacaagaucuucagaauagaaaagggaaagauagucaaaucagucgaaaugaaugccccuaauuaucacuaugaggaaugcuccuguuauccugauucuagugaaaucacaugugugugcagggauaacuggcauggcucgaaucgaccgugggugucuuucaaccagaaucuggaauaucagauaggauacauaugcagugggauuuucggagacaauccacgcccuaaugauaagacaggcaguugugguccaguaucgucuaauggagcaaauggaguaaaaggauuuucauucaaauacggcaaugguguuuggauagggagaacuaaaagcauuaguucaagaaacgguuuugagaugauuugggauccgaacggauggacugagacagacaauaacuucucaauaaagcaagauaucguaggaauaaaugaguggucaggauauagcgggaguuuuguucagcauccagaacuaacagggcuggauuguauaagaccuugcuucuggguugaacuaaucagagggcgacccaaagagaacacaaucuggacuagcgggagcagcauauccuuuugugguguaaacagugacacuguggguuggucuuggccagacggugcugaguugccauuuaccauugacaaguaa

SEQ ID NO: 53304 - RNA, 1410 nt, Artificial Sequence; identical to SEQ ID NO: 53300
  derived and/or modified CDS sequence (wt) from neuraminidase__InfluenzaA__AEV53551

SEQ ID NO: 53305 - RNA, 1410 nt, Artificial Sequence; identical to SEQ ID NO: 53300
  derived and/or modified CDS sequence (wt) from neuraminidase__InfluenzaA__AEV53553

SEQ ID NO: 53306 - RNA, 1410 nt, Artificial Sequence; identical to SEQ ID NO: 53297
  derived and/or modified CDS sequence (wt) from neuraminidase__InfluenzaA__AEV53555

SEQ ID NO: 53307 - RNA, 1410 nt, Artificial Sequence
  derived and/or modified CDS sequence (wt) from neuraminidase__InfluenzaA__AEV53557
augaauccaaaccaaaagauaauaaccauugguucggucuguaugacaauuggaauggcuaacuuaauauuacaaauuggaaacauaaucucaauauggauuagccacucaauucaacuugggaaucaaaaucagauugaaacaugcaaucaaagcgucauuacuuaugaaaacaacacuuggguaaaucagacauauguuaacaucagcaacaccaacuuugcugcuggacagucagugguuuccgugaaauuagcgggcaauuccucucucugcccuguuaguggaugggcuauauacaguaaagacaacaguauaagaaucgguuccaagggggauguguuugucauaagggaaccauucauaucaugcucccccuuggaaugcagaaccuucuucuugacucaaggggccuugcuaaaugacaaacauuccaauggaaccauuaaagacaggagcccauaucgaacccuaaugagcuguccuaucggugaaguucccucuccauacaacucaagauuugagucagucgcuuggucagcaagugcuugucaugauggcaucaauuggcuaacaauuggaauuucuggcccagacaauggggcaguggcuguguuaaaguacaacggcauaauaacagacacuaucaagaguuggagaaacaauauauugagaacacaagagucugaaugugcauguguaaaugguucuugcuuuacuguaaugaccgauggaccaagugauggacaggccucauacaagaucuucagaauagaaaagggaaagauagucaaaucagucgaaaugaaugccccuaauuaucacuaugaggaaugcuccuguuauccugauucuagugaaaucacaugugugugcagggauaacuggcauggcucgaaucgaccgugggugucuuucaaccagaaucuggaauaucagauaggauacauaugcagugggauuuucggagacaauccacgcccuaaugauaagacaggcaguugugguccaguaucgucuaauggagcaaauggaguaaaaggauuuucauucaaauacggcaaugguguuuggauagggagaacuaaaagcauuaguucaagaaacgguuuugagaugauuugggauccgaacggauggacugggacagacaauaacuucucaauaaagcaagauaucguaggaauaaaugaguggucaggauauagcgggaguuuuguucagcauccagaacuaacagggcugaauuguauaagaccuugcuucuggguugaacuaaucagagggcgacccaaagagaacacaaucuggacuagcgggagcagcauauccuuuugugguguaaacagugacacuguggguuggucuuggccagacggugcugaguugccauuuaccauugacaaguaa

SEQ ID NO: 53308 - RNA, 1410 nt, Artificial Sequence; identical to SEQ ID NO: 48750
  derived and/or modified CDS sequence (wt) from neuraminidase__InfluenzaA__AEV53559

SEQ ID NO: 53309 - RNA, 1410 nt, Artificial Sequence; identical to SEQ ID NO: 50354
  derived and/or modified CDS sequence (wt) from neuraminidase__InfluenzaA__AEV53561

SEQ ID NO: 53310 - RNA, 1410 nt, Artificial Sequence; identical to SEQ ID NO: 50352
  derived and/or modified CDS sequence (wt) from neuraminidase__InfluenzaA__AEV53563

SEQ ID NO: 53311 - RNA, 1410 nt, Artificial Sequence
  derived and/or modified CDS sequence (wt) from neuraminidase__InfluenzaA__AEV53565
augaauccaaaccaaaagauaauaaccauugguucggucuguaugacaauuggaauggcuaacuuaauauuacaaauuggaaacauaaucucaauauggauuagccacucaauucaacuugggaaucaaaaucagauugaaacaugcaaucaaagcgucauuacuuaugaaaacaacacuuggguaaaucagacauauguuaacaucagcaacaccaacuuugcugcuggacagucagugguuuccgugaaauuagcgggcaauuccucucucugcccuguuaauggaugggcuauauacaguaaagacaacaguauaagaaucgguuccaagggggauguguuugucauaagggaaccauucauaucaugcucccccuuggaaugcagaaccuucuucuugacucaaggggccuugcuaaaugacaaacauuccaauggaaccauuaaagacaggagcccauaucgaacccuaaugagcuguccuauuggugaaguucccucuccauacaacucaagauuugagucagucgcuuggucagcaagugcuugucaugauggcaucaauuggcuaacaauuggaauuucuggcccagacaauggggcaguggcuguguuaaaguacaacggcauaauaacagacacuaucaagaguuggagaaacaauauauugagaacacaagagucugaaugugcauguguaaaugguucuugcuuuacuguaaugaccgauggaccaagugauggacaggccucauacaagaucuucagaauagaaaaaggaaagauagucaaaucagucgaaaugaaugccccuaauuaucacuaugaggaaugcuccuguuauccugauucuagugaaaucacauguguaugcagggauaacuggcauggcucgaaucgaccgugggugucuuucaaccagaaucuggaauaucagauaggauacauaugcagugggauuuucggagacaauccacgcccuaaugauaagacaggcaguugugguccaguaucgucuaauggagcaaauggaguaaaaggauuuucauucaaauacggcaaugguguuuggauagggagaacuaaaaguauuaguucaagaaacgguuuugagaugauuugggauccgaacggauggacugggacagacaauaacuucucaauaaagcaagauaucguaggaauaaaugaguggucaggauauagcgggaguuuuguucagcauccagaacuaacagggcuggauuguauaagaccuugcuucuggguugaacuaaucagagggcgacccaaagagaacacaaucuggacuagcgggagcagcauauccuuuugugguguaaacagugacacuguggguuggucuuggccagacggugcugaguugccacuuaccauugacaaguaa

SEQ ID NO: 53312 - RNA, 1410 nt, Artificial Sequence
  derived and/or modified CDS sequence (wt) from neuraminidase__InfluenzaA__AEV53567
augaauccaaaccaaaagauaauaaccauugguucggucuguaugacaauuggaauggcuaacuuaauauuacaaauuggaaacauaaucucaauauggauuagccacucaauucaacuugggaaucaaaaucagauugaaacaugcaaucaaagcgucauuacuuaugaaaacaacacuuggguaaaucagacauauguuaacaucagcaacaccaacuuugcugcuggacagucagugguuuccgugaaauuagcgggcaauuccucucucugcccuguuaguggaugggcuauauacaguaaagacaacaguauaagaaucgguuccaagggggauguguuugucauaagggaaccauucauaucaugcucccccuuggaaugcagaaccuucuucuugacucaaggggccuugcuaaaugacaaacauuccaauggaaccauuaaagacaggagcccauaucgaacccuaaugagcuguccuauuggugaaguucccucuccauacaacucaagauuugagucagucgcuuggucagcaagugcuugucaugauggcaucaauuggcuaacaauuggaauuucuggcccagacaauggggcaguggcuguguuaaaguacaacggcauaauaacagacacuaucaagaguuggagaaacaauauauugagaacacaagagucugaaugugcauguguaaaugguucuugcuuuacuguaaugaccgauggaccaagugauggacaggccucauacaagaucuucagaauagaaaagggaaagauagucaaaucagucgaaaugaaugccccuaauuaucacuaugaggaaugcuccuguuauccugauucuagugaaaucacaugugugugcagggauaacuggcauggcucgaaucgaccgugggugucuuucaaccagaaucuggaauaucagauaggauacauaugcagugggauuuucggagacaauccacgcccuaaugauaagacaggcaguugugguccaguaucgucuaauggagcaaauggaguaaaaggauuuucauucaaauacggcaauggugcuuggauagggagaacuaaaagcauuaguucaagaaacgguuuugagaugauuugggauccgaacggauggacugagacagacaauaacuucucaauaaagcaagauaucguaggaauaaaugaguggucaggauauagcgggaguuuuguucagcauccagaacuaacagggcugaauuguauaagaccuugcuucuggguugaacuaaucagagggcgacccaaagagaacacaaucuggacuagcgggagcagcauauccuuuugugguguaaacagugacacuguggguuggucuuggccagacggugcugaguugccauuuaccauugacaaguaa

SEQ ID NO: 53313 - RNA, 1410 nt, Artificial Sequence; identical to SEQ ID NO: 49794
  derived and/or modified CDS sequence (wt) from neuraminidase__InfluenzaA__AEV53569

SEQ ID NO: 53314 - RNA, 1410 nt, Artificial Sequence
  derived and/or modified CDS sequence (wt) from neuraminidase__InfluenzaA__AEV53571
augaauccaaaccaaaagauaauaaccauugguucggucuguaugacaauuggaauggcuaacuuaauauuacaaauuggaaacauaaucucaauauggauuagccacucaauucaacuugggaaucaaaaucagauugaaacaugcaaucaaagcgucauuacuuaugaaaacaacacuuggguaaaucaaacauauguuaacaucagcaacaccaacuuugcugcuggacagucagugguuuccgugaaauuagcgggcaauuccucucucugcccuguuaguggaugggcuauauacaguaaagacaacaguauaagaaucgguuccaagggggauguguuugucauaagggaaccauucauaucaugcucccccuuggaaugcagaaccuucuucuugacucaaggggccuugcuaaaugacaaacauuccaauggaaccauuaaagacaggagcccauaucgaacccuaaugagcuguccuauuggugaaguucccucuccauacaacucaagauuugagucagucgcuuggucagcaagugcuugucaugauggcaucaauuggcuaacaauuggaauuucuggcccagacaauggggcaguggcuguguuaaaguacaauggcauaauaacagacacuaucaagaguuggagaaacaauauauugagaacacaagagucugaaugugcauguguaaaugguucuugcuuuacuguaaugaccgauggaccaagugauggacaggccucauacaagaucuucagaauagaaaagggaaagauagucaaaucagucgaaaugaaugccccuaauuaucacuaugaggaaugcuccuguuauccugauucuagugaaaucacaugugugugcagggauaacuggcauggcucgaaucgaccgugggugucuuucaaccagaaucuggaauaucagauaggauacauaugcagugggauuuucggagacaauccacgcccuaaugauaagacaggcaguugugguccaguaucgucuaauggagcaaauggaguaaaaggauuuucauucaaauacggcaaugguguuuggauagggagaacuaaaagcauuaguucaagaaacgguuuugagaugauuugggauccgaacggauggacugagacagacaauaacuucucaauaaagcaagauaucguaggaauaaaugaguggucaggauauagcgggaguuuuguucagcauccagaacuaacagggcuggauuguauaagaccuugcuucuggguugaacuaaucagagggcgacccaaagagaacacaaucuggacuagcggaagcagcauauccuuuugugguguaaacagugacacuguggguuggucuuggccagacggugcugaguugccauuuaccauugacaaguaa

SEQ ID NO: 53315 - RNA, 1410 nt, Artificial Sequence; identical to SEQ ID NO: 53314
  derived and/or modified CDS sequence (wt) from neuraminidase__InfluenzaA__AEV53573

SEQ ID NO: 53316 - RNA, 1410 nt, Artificial Sequence; identical to SEQ ID NO: 53272
  derived and/or modified CDS sequence (wt) from neuraminidase__InfluenzaA__AEV53575

SEQ ID NO: 53317 - RNA, 1410 nt, Artificial Sequence
  derived and/or modified CDS sequence (wt) from neuraminidase__InfluenzaA__AEV53577
augaauccaaaccaaaagauaauaaccauugguucggucuguaugacaauuggaauggcuaacuuaauauuacaaauuggaaacauaaucucaauauggauuagccacucaauucaacuugggaaucaaaaucagauugaaacaugcaaucaaagcgucauuacuuaugaaaacaacacuuggguaaaucagacauauguuaacaucagcaacaccaacuuugcugcuggacagucagugguuuccgugaaauuagcgggcaauuccucucucugcccuguuaguggaugggcuauauacaguaaagacaacaguauaagaaucgguuccaagggggauguguuugucauaagggaaccauucauaucaugcucccccuuggaaugcagaaccuucuucuugacucaaggggccuugcuaaaugacaaacauuccaauggaaccauuaaagauaggagcccauaucgaacccuaaugagcuguccuauuggugaaguucccucuccauacaacucaagauuugagucagucgcuuggucagcaagugcuugucaugauggcaucaauuggcuaacaauuggaauuucuggcccagacaauggggcaguggcuguguuaaaguacaacggcauaauaacagacacuaucaagaguuggagaaacaauauauugagaacacaagagucugaaugugcauguguaaaugguucuugcuuuacuguaaugaccgauggaccaagugauggacaggccucauacaagaucuucagaauagaaaagggaaagauagucaaaucagucgaaaugaaugccccuaauuaucacuaugaggaaugcuccuguuauccugauucuagugaaaucacaugugugugcagggauaacuggcauggcucgaaucgaccgugggugucuuucaaccagaaucuggaauaucagauaggauacauaugcagugggauuuucggagacaauccacgcccuaaugauaagacaggcaguugugguccaguaucgucuaauggagcaaauggaguaaaaggauuuucauucaaauacggcaaugguguuuggauagggagaacuaaaagcauuaguucaagaaacgguuuugagaugauuugggauccgaacggauggacugggacagacaauaacuucucaauaaagcaagauaucguaggaauaaaugaguggucaggauauagcgggaguuuuguucagcaaccagaacuaacagggcuggacuguauaagaccuugcuucuggguugaacuaaucagagggcgacccaaagagaacacaaucuggacuagcgggagcagcauauccuuuugugguguaaacagugacacuguggguuggucuuggccagacggugcugaguugccauuuaccauugacaaguaa

SEQ ID NO: 53318 - RNA, 1410 nt, Artificial Sequence
  derived and/or modified CDS sequence (wt) from neuraminidase__InfluenzaA__AEV53579
augaauccaaaccaaaagauaauaaccauugguucggucuguaugacaauuggaauggcuaacuuaauauuacaaauuggaaacauaaucucaauauggauuagccacucaauucaacuugggaaucaaaaucagauugaaacaugcaaucaaagcgucauuacuuaugaaaacaacacuuggguaaaucagacauauguuaacaucagcaacaccaacuuugcugcuggacagucagugguuuccgugaaauuagcgggcaauuccucucucugcccuguuaguggaugggcuauauacaguaaagacaacaguauaagaaucgguuccaagggggauguguuugucauaagggaaccauucauaucaugcucccccuuggaaugcagaaccuucuucuugacucaaggggccuugcuaaaugacaaacauuccaauggaaccauuaaagacaggagcccauaucgaacccuaaugagcuguccuauuggugaaguucccucuccauacaacucaagauuugagucagucgcuuggucagcaagugcuugucaugauggcaucaauuggcuaacaauuggaauuucuggcccagacaauggggcaguggcuguguuaaaguacaacggcauaauaacagacacuaucaagaguuggagaaacaauauauugagaacacaagagucugaaugugcauguguaaaugguucuugcuuuacuguaaugaccgauggaccaagugauggacaggccucauacaagaucuucagaauagaaaagggaaagauagucaaaucagucgaaaugaaugccccuaauuaucacuaugaggaaugcuccuguuauccugauucuagugaaaucacaugugugugcagggauaacuggcauggcucgaaucgaccgugggugucuuucaaccagaaucuggaauaucaaauaggauacauaugcagugggauuuucggagacaauccacgcccuaaugauaagacaggcaguugugguccaguaucgucuaauggagcaaauggaguaaaaggauuuucauucaaauacggcaaugguguuuggauagggagaacuaaaagcauuaguucaagaaacgguuuugagaugauuugggauccgaacggauggacugagacagacaauaacuucucaauaaagcaagauaucguaggaauaaaugaguggucaggauauagcgggaguuuuguucagcauccagaacuaacagggcugaauuguauaagaccuugcuucuggguugaacuaaucagagggcgacccaaagagaacacaaucuggacuagcgggagcagcauauccuuuugugguguaaacagugacacuguggguuggucuuggccagacggugcugaguugccauuuaccauugacaaguaa

SEQ ID NO: 53319 - RNA, 1410 nt, Artificial Sequence; identical to SEQ ID NO: 53272
  derived and/or modified CDS sequence (wt) from neuraminidase__InfluenzaA__AEV53581

SEQ ID NO: 53320 - RNA, 1410 nt, Artificial Sequence; identical to SEQ ID NO: 53242
  derived and/or modified CDS sequence (wt) from neuraminidase__InfluenzaA__AEV53583

SEQ ID NO: 53321 - RNA, 1410 nt, Artificial Sequence
  derived and/or modified CDS sequence (wt) from neuraminidase__InfluenzaA__AEV53585
augaauccaaaccaaaagauaauaaccauugguucggucuguaugacaauuggaauggcuaacuuaauauuacaaauuggaaacauaaucucaauauggauuagccacucaauucaacuugggaaucaaaaucagauugaaacaugcaaucaaagcgucauuacuuaugaaaacaacacuuggguaaaucagacauauguuaacaucagcaacaccaacuuugcugcuggacagucagugguucccgugaaauuagcgggcaauuccucucucugcccuguuaguggaugggcuauauacaguaaagacaacaguauaagaaucgguuccaagggggauguguuugucauaagggaaccauucauaucaugcucccccuuggaaugcagaaccuucuucuugacucaaggggccuugcuaaaugacaaacauuccaauggaaccauuaaagacaggagcccauaucgaacccuaaugagcuguccuauuggugaaguucccucuccauacaacucaagauuugagucagucgcuuggucagcaagugcuugucaugauggcaucaauuggcuaacaauuggaauuucugggccagacaauggggcaguggcuguguuaaaguacaacggcauaauaacagacacuaucaagaguuggagaaacaauauauugagaacacaagagucugaaugugcauguguaaaugguucuugcuuuacuguaaugaccgauggaccaagugauggacaggccucauacaagaucuucagaauagaaaagggaaagauagucaaaucagucgaaaugaaugccccuaauuaucacuaugaggaaugcuccuguuauccugauucuagugaaaucacaugugugugcagggacaacuggcauggcucgaaucgaccgugggugucuuucaaccagaaucuggaauaucagauaggauacauaugcagugggauuuucggagacaauccacgcccuaaugauaagacaggcaguugugguccaguaucgucuaauggagcaaauggaguaaaaggauuuucauucaaauacggcaaugguguuuggauagggagaacuaaaagcauuaguucaagaaacgguuuugagaugauuugggauccgaacggauggacugggacagacaauaacuucucaauaaagcaagauaucguaggaauaaaugaguggucaggauauagcgggaguuuuguucagcauccagaacuaacagggcuggauuguauaagaccuugcuucuggguugaacuaaucagagggcgacccaaagagaacacaaucuggacuagcgggagcagcauauccuuuugugguguaaacagugacacuguggguuggucuuggccagacggugcugaguugccauuuaccauugacaaguaa

SEQ ID NO: 53322 - RNA, 1410 nt, Artificial Sequence
  derived and/or modified CDS sequence (wt) from neuraminidase__InfluenzaA__AEV76877
augaauccaaaccaaaagauaauaaccauugguucggucuguaugacaauuggaauggcuaacuuaauauuacaaauuggaaacauaaucucaauauggauuagccacucaauucaacuugggaaucaaagucagauugaaacaugcaaucaaagcgucauuacuuaugaaaacaacacuuggguaaaucagacauauguuaacaucagcaccaccaacuuugcugcuggacagucagugguuuccgugaaauuagcgggcaauuccucucucugcccuguuaguggaugggcuauauacaguaaagacaacaguauaagaaucgguuccaagggggauguguuugucauaagggaaccauucauaucaugcucccccuuggaaugcagaaccuucuucuugacucaaggggccuugcuaaaugacaaacauuccaauggaaccauuaaagacaggagcccauaucgaacccuaaugagcuguccuauuggugaaguucccucuccauacaacucaagauuugagucagucgcuuggucagcaagugcuugucaugauggcaucaauuggcuaacaauuggaauuucuggcccagacaauggggcaguggcuguguuaaaguacaacggcauaauaacagacacuaucaagaguuggagaaacaauauauugagaacacaagagucugaaugugcauguguaaaugguucuugcuuuaccauaaugaccgauggaccaagugauggacaggccucauacaagaucuucagaauagaaaagggaaagauagucaaaucagucgaaaugaaugccccuaauuaucacuaugaggaaugcuccuguuauccugauucuagugaaaucacaugugugugcagggauaacuggcauggcucgaaucgaccgugggugucuuucaaccagaaucuggaauaucagauaggauacauaugcagugggauuuucggagacaauccacgcccuaaugauaagacaggcaguugugguccaguaucgucuaauggagcaaauggaguaaaaggauuuucauucaaauacggcaaugguguuuggauagggagaacuaaaagcauuaguucaagaaaagguuuugagaugauuugggauccaaacggauggacugggacagacaauaacuucucaauaaagcaagauaucguaggaauaaaugaguggucaggauauagcgggaguuuuguucagcauccagaacuaacagggcuggauuguauaagaccuugcuucuggguugaacuaaucagagggcgacccaaagagaacacaaucuggacuagcgggagcagcauauccuuuugugguguaaacagugacacuguggguuggucuuggccagacggugcugaguugccauuuaccauugacaaguaa

SEQ ID NO: 53323 - RNA, 1410 nt, Artificial Sequence; identical to SEQ ID NO: 52303
  derived and/or modified CDS sequence (wt) from neuraminidase__InfluenzaA__AEW10576

SEQ ID NO: 53324 - RNA, 1410 nt, Artificial Sequence; identical to SEQ ID NO: 48750
  derived and/or modified CDS sequence (wt) from neuraminidase__InfluenzaA__AEW10586

SEQ ID NO: 53325 - RNA, 1410 nt, Artificial Sequence; identical to SEQ ID NO: 48814
  derived and/or modified CDS sequence (wt) from neuraminidase__InfluenzaA__AEW10596

SEQ ID NO: 53326 - RNA, 1410 nt, Artificial Sequence
  derived and/or modified CDS sequence (wt) from neuraminidase__InfluenzaA__AEW10606
augaauccaaaccaaaagauaauaaccauugguucggucuguaugacaauuggaauggcuaacuuaauauuacaaauuggaaacauaaucucaauauggauuagccacucaauucaacuugggaaucaaaaucagauugaaacaugcaaucaaagcgucauuacuuaugaaaacaacacuuggguaaaucagacauauguuaacaucagcaacaccaacuuugcugcuggacagucagugguuuccgugaaauuagcgggcaauuccucucucugcccuguuaguggaugggcuauauacaguaaagacaacaguauaagaaucgguuccaagggggauguguuugucauaagggaaccauucauaucaugcucccccuuggaaugcagaaccuucuucuugacucaaggggccuugcuaaaugacaaacauuccaauggaaccauuaaagacaggagcccauaucgaacccuaaugagcuguccuauuggugaaguucccucuccauacaacucaagauuugagucagucgcuuggucagcaagugcuugucaugauggcaucaauuggcuaacaauuggaauuucuggcccagacaauggggcaguggcuguguuaaaguacaacggcauaauaacagacacuaucaagaguuggagaaacaauauauugagaacacaagagucugaaugugcauguguaaaugguucuugcuuuacuguaaugaccgauggaccaagugauggacaggcaucauacaagaucuucagaauagaaaagggaaagauagucaaaucagucgaaaugaaugccccuaauuaucacuaugaggaaugcuccuguuauccugauucuagugaaaucacauguguaugcagggauaacuggcauggcucgaaucgaccgugggugucuuucaaccagaaucuggaauaucagauaggauacauaugcagugggauuuucggagacaauccacgcccuaaugauaagacaggcaguugugguccaguaucgucuaauggagcaaauggaguaaaaggauuuucauucaaauacggcaaugguguuuggauagggagaacuaaaagcauuaguucaagaaacgguuuugagaugauuugggauccgaacggauggacugggacagacaauaacuucucaauaaagcaagauaucguaggaauaaaugaguggucaggauauagcgggaguuuuguucagcauccagaacuaacagggcuggauuguauaagaccuugcuucuggguugaacuaaucagagggcgacccaaagagaacacaaucuggacuagcgggagcagcauauccuuuugugguguaaacagugacacuguggguuggucuuggccagacggugcugaguugccauuuaccauugacaaguaa

SEQ ID NO: 53327 - RNA, 1410 nt, Artificial Sequence
  derived and/or modified CDS sequence (wt) from neuraminidase__InfluenzaA__AEW10616
augaauccaaaccaaaagauaauaaccauugguucggucuguaugacaauuggaauggcuaacuuaauauuacaaauuggaaacauaaucucaauauggauuagccacucaauucaacuugggaaucaaaaucagauugaaacaugcaaucaaagcgucauuacuuaugaaaacaacacuuggguaaaucagacauauguuaacaucagcaacaccaacuuugcugcuggacagucagugguuuccgugaaauuagcgggcaauuccucucucugcccuguuaguggaugggcuauauacaguaaagacaacaguauaagaaucgguuccaagggggauguguuugucauaagggaaccauucauaucaugcucccccuuggaaugcagaaccuucuucuugacucaaggggccuugcuaaaugacaaacauuccaauggaaccauuaaagacaggagcccauaucgaacccuaaugagcuguccuauuggugaaguucccucuccauacaacucaagauuugagucagucgcuuggucagcaagugcuugucaugauggcaucaauuggcuaacaauuggaauuucuggcccagacaauggggcaguggcuguguuaaaguacaacggcauaauaacagacacuaucaagaguuggagaaacaauauauugagaacacaagagucugaaugugcauguguaaaugguucuugcuuuacuauaaugaccgauggaccaagugauggacaggccucauacaagaucuucagaauagaaaagggaaagauagucaaaucagucgaaaugaaugccccuaauuaucacuaugaggaaugcuccuguuauccugauucuagugaaaucacauguguaugcagggauaacuggcauggcucgaaucgaccgugggugucuuucaaccagaaucuggaauaucagauaggauacauaugcagugggauuuucggagacaauccacgcccuaaugauaagacaggcaguugugguccaguaucgucuaauggagcaaauggaguaaaaggauuuucauucaaauacggcaaugguguuuggauagggagaacuaaaagcauuaguucaagaaacgguuuugagaugauuugggauccgaacggauggacugggacagacaauaacuucucaauaaagcaagauaucguaggaauaaaugaguggucaggauauagcgggaguuuuguucagcauccagaacuaacagggcuggauuguauaagaccuugcuucuggguugaacuaaucagagggcgacccaaagagaacacaaucuggacuagcgggagcagcauauccuuuugugguguaaacagugacacuguggguuggucuuggccagacggugcugaguugccauuuaccauugacaaguaa

SEQ ID NO: 53328 - RNA, 1410 nt, Artificial Sequence
  derived and/or modified CDS sequence (wt) from neuraminidase__InfluenzaA__AEW10626
augaauccaaaccaaaagauaauaaccauugguucggucuguaugacaauuggaauggcuaacuuaauauuacaaauuggaaacauaaucucaauauggauuagccacucaauucaacuugggaaucaaaaucagauugaaacaugcaaucaaagcgucauuacuuaugaaaacaacacuuggguaaaucagacauauguuaacaucagcaacaccaacuuugcugcuggacagucagugguuuccgugaaauuagcgggcaauuccucucucugcccuguaaguggaugggcuauauacaguaaagacaacaguauaagaaucgguuccaagggggauguguuugucauaagggaaccauucauaucaugcucccccuuggaaugcagaaccuucuucuugacucaaggggccuugcuaaaugacaaacauuccaauggaaccauuaaagacaggagcccauaucgaacccuaaugagcuguccuauuggugaaguucccucuccauacaacucaagauuugagucagucgcuuggucagcaagugcuugucaugauggcaucaauuggcuaacaauuggaauuucuggcccagacaauggggcaauggcuguguuaaaguacaacggcauaauaacagacacuaucaagaguuggagaaacaauauauugagaacacaagagucugaaugugcaugugugaaugguucuugcuuuacuguaaugaccgauggaccaagugauggacaggccucauacaagaucuucagaauagaaaagggaaagauagucaaaucagucgaaaugaaugccccuaauuaucacuaugaggaaugcuccuguuauccugauucuagugaaaucacauguguaugcagggauaacuggcauggcucgaaucgaccgugggugucuuucaaccagaaucuggaauaucagauaggauacauaugcagugggauuuucggagacaauccacgcccuaaugauaagacaggcaguugugguccaguaucgucuaauggagcaaauggaguaaaaggauuuucauucaaauacggcaaugguguuuggauagggagaacuaaaagcauuaguucaagaaacgguuuugagaugauuugggauccgaacggauggacugggacagacaauaacuucucaauaaagcaagauaucguaggaauaaaugaguggucaggauauagcgggaguuuuguucagcauccagaacuaacagggcuggauuguauaagaccuugcuucuggguugaacuaaucagggggcgacccaaagagaacacaaucuggacuagcgggagcagcauauccuuuugugguguaaacagugacacuguggguuggucuuggccagacggugcugaguugccauuuaccauugacaaguaa

SEQ ID NO: 53329 - RNA, 1410 nt, Artificial Sequence; identical to SEQ ID NO: 48750
  derived and/or modified CDS sequence (wt) from neuraminidase__InfluenzaA__AEW10636

SEQ ID NO: 53330 - RNA, 1410 nt, Artificial Sequence
  derived and/or modified CDS sequence (wt) from neuraminidase__InfluenzaA__AEW10646
augaauccaaaccaaaagauaauaaccauugguucggucuguaugacaauuggaauggcuaacuuaauauuacaaauuggaaacauaaucucaauauggauuagccacucaauucaacuugggaaucaaaaucagauugaaacaugcaaucaaagcgucauuacuuaugaaaacaacacuuggguaaaucagacauauguuaacaucagcaacaccaacuuugcugcuggacagucagugguuuccgugaaauuagcgggcaauuccucucucugcccuguuaguggaugggcuauauacaguaaagacaacaguguaagaaucgguuccaagggggauguguuugucauaagggaaccauucauaucaugcucccccuuggaaugcagaaccuucuucuugacucaaggggccuugcuaaaugacaaacauuccaauggaaccauuaaagacaggagcccauaucgaacccuaaugagcuguccuauuggugaaguucccucuccauacaacucaagauuugagucagucgcuuggucagcaagugcuugucaugauggcaucaauuggcuaacaauuggaauuucuggcccagacaauggggcaguggcuguguuaaaguacaacggcauaauaacagacacuaucaagaguuggagaaacaauauauugagaacacaagagucugaaugugcauguguaaaugguucuugcuuuacuguaaugaccgauggaccaaguaauggacaggccucauacaagaucuucagaauagaaaagggaaaaauagucaaaucagucgaaaugaaugccccuaauuaucacuaugaggaauguuccuguuauccugauucuagugaaaucacaugugugugcagggauaacuggcauggcucgaaucgaccgugggugucuuucaaccagaaucuggaauaucagauaggauacauaugcagugggauuuucggagacaauccacgcccuaaugauaagacaggcaguugugguccaguaucgucuaauggagcaaauggaguaaaaggauuuucauucaaauacggcaaugguguuuggauagggagaacuaaaagcauuaguucaagaaacgguuuugagaugauuugggauccgaacggauggacugggacagacaauaacuucucaauaaagcaagauaucguaggaauaaaugaguggucaggauauagcgggaguuuuguucagcauccagaacuaacagggcuggauuguauaagaccuugcuucuggguugaacuaaucagagggcgacccaaagagaacacaaucuggacuagcgggagcagcauauccuuuugugguguaaacagugacacuguggguuggucuuggccagacggugcugaguugccauuuaccauugacaaguaa

SEQ ID NO: 53331 - RNA, 1410 nt, Artificial Sequence; identical to SEQ ID NO: 49070
  derived and/or modified CDS sequence (wt) from neuraminidase__InfluenzaA__AEW10656

SEQ ID NO: 53332 - RNA, 1410 nt, Artificial Sequence; identical to SEQ ID NO: 49070
  derived and/or modified CDS sequence (wt) from neuraminidase__InfluenzaA__AEW10666

SEQ ID NO: 53333 - RNA, 1410 nt, Artificial Sequence; identical to SEQ ID NO: 48750
  derived and/or modified CDS sequence (wt) from neuraminidase__InfluenzaA__AEW10676

SEQ ID NO: 53334 - RNA, 1410 nt, Artificial Sequence; identical to SEQ ID NO: 48750
  derived and/or modified CDS sequence (wt) from neuraminidase__InfluenzaA__AEW10686

SEQ ID NO: 53335 - RNA, 1410 nt, Artificial Sequence; identical to SEQ ID NO: 48750
  derived and/or modified CDS sequence (wt) from neuraminidase__InfluenzaA__AEW10696

SEQ ID NO: 53336 - RNA, 1410 nt, Artificial Sequence; identical to SEQ ID NO: 49070
  derived and/or modified CDS sequence (wt) from neuraminidase__InfluenzaA__AEW10706

SEQ ID NO: 53337 - RNA, 1410 nt, Artificial Sequence; identical to SEQ ID NO: 48749
  derived and/or modified CDS sequence (wt) from neuraminidase__InfluenzaA__AEW10716

SEQ ID NO: 53338 - RNA, 1410 nt, Artificial Sequence; identical to SEQ ID NO: 49070
  derived and/or modified CDS sequence (wt) from neuraminidase__InfluenzaA__AEW10726

SEQ ID NO: 53339 - RNA, 1410 nt, Artificial Sequence; identical to SEQ ID NO: 48750
  derived and/or modified CDS sequence (wt) from neuraminidase__InfluenzaA__AEW10736

SEQ ID NO: 53340 - RNA, 1410 nt, Artificial Sequence; identical to SEQ ID NO: 48749
  derived and/or modified CDS sequence (wt) from neuraminidase__InfluenzaA__AEW10746

SEQ ID NO: 53341 - RNA, 1410 nt, Artificial Sequence; identical to SEQ ID NO: 48749
  derived and/or modified CDS sequence (wt) from neuraminidase__InfluenzaA__AEW10756

SEQ ID NO: 53342 - RNA, 1410 nt, Artificial Sequence; identical to SEQ ID NO: 48749
  derived and/or modified CDS sequence (wt) from neuraminidase__InfluenzaA__AEW10766

SEQ ID NO: 53343 - RNA, 1410 nt, Artificial Sequence; identical to SEQ ID NO: 48749
  derived and/or modified CDS sequence (wt) from neuraminidase__InfluenzaA__AEW10776

SEQ ID NO: 53344 - RNA, 1410 nt, Artificial Sequence; identical to SEQ ID NO: 48749
  derived and/or modified CDS sequence (wt) from neuraminidase__InfluenzaA__AEW10786

SEQ ID NO: 53345 - RNA, 1410 nt, Artificial Sequence; identical to SEQ ID NO: 48749
  derived and/or modified CDS sequence (wt) from neuraminidase__InfluenzaA__AEW10796

SEQ ID NO: 53346 - RNA, 1410 nt, Artificial Sequence; identical to SEQ ID NO: 48749
  derived and/or modified CDS sequence (wt) from neuraminidase__InfluenzaA__AEW10806

SEQ ID NO: 53347 - RNA, 1410 nt, Artificial Sequence; identical to SEQ ID NO: 48740
  derived and/or modified CDS sequence (wt) from neuraminidase__InfluenzaA__AEW10816

SEQ ID NO: 53348 - RNA, 1410 nt, Artificial Sequence; identical to SEQ ID NO: 48750
  derived and/or modified CDS sequence (wt) from neuraminidase__InfluenzaA__AEW10826

SEQ ID NO: 53349 - RNA, 1410 nt, Artificial Sequence
  derived and/or modified CDS sequence (wt) from neuraminidase__InfluenzaA__AEW10836
augaauccaaaccaaaagauaauaaccauugguucggucuguaugacaauuggaauggcuaacuuaauauuacaaauuggaaacauaaucucaauauggauuagccacucaauucaacuugggaaucaaaaucagauugaaacaugcaaucaaagcgucauuacuuaugaaaacaacacuuggguaaaucagacauauguuaacaucagcaacaccaacuuugcugcuggacagucagugguuuccgugaaauuagcgggcaauuccucucucugcccuguuaguggaugggcuauauacaguaaagacaacaguguaagaaucgguuccaagggggauguguuugucauaagggaaccauucauaucaugcucccccuuggaaugcagaaccuucuucuugacucaaggggccuugcuaaaugacaaacauuccaauggaaccauuaaagacaggagcccauaucgaacccuaaugagcuguccuauuggugaaguucccucuccauacaacucaagauuugagucagucgcuuggucagcaagugcuugucaugauggcaucaauuggcuaacaauuggaauuucuggcccagacaauggggcaguggcuguguuaaaguacaacggcauaauaacagacacuaucaagaguuggagaaacaauauauugagaacacaagagucugaaugugcauguguaaaugguucuugcuuuacuguaaugaccgauggaccaaguaauggacaggccucauacaagaucuucagaauagaaaagggaaaaauagucaaaucagucgaaaugaaugccccuaauuaucacuaugaggaaugcuccuguuauccugauucuagugaaaucacaugugugugcagggauaacuggcauggcucgaaucgaccgugggugucuuucaaccagaaucuggaauaucagauaggauacauaugcagugggauuuucggagacaauccacgcccuaaugauaagacaggcaguugugguccaguaucgucuaauggagcaaauggaguaaaaggauuuucauucaaauacggcaaugguguuuggauagggagaacuaaaagcauuaguucaagaaacgguuuugagaugauuugggauccgaacggauggacugggacagacaauaacuucucaauaaagcaagauaucguaggaauaaaugaguggucaggauauagugggaguuuuguucagcauccagaacuaacagggcuggauuguauaagaccuugcuucuggguugaacuaaucagagggcgacccaaagagaacacaaucuggacuagcgggagcagcauauccuuuugugguguaaacagugacacuguggguuggucuuggccagacggugcugaguugccauuuaccauugacaaguaa

SEQ ID NO: 53350 - RNA, 1410 nt, Artificial Sequence; identical to SEQ ID NO: 48749
  derived and/or modified CDS sequence (wt) from neuraminidase__InfluenzaA__AEW10846

SEQ ID NO: 53351 - RNA, 1410 nt, Artificial Sequence; identical to SEQ ID NO: 48749
  derived and/or modified CDS sequence (wt) from neuraminidase__InfluenzaA__AEW10856

SEQ ID NO: 53352 - RNA, 1410 nt, Artificial Sequence
  derived and/or modified CDS sequence (wt) from neuraminidase__InfluenzaA__AEW10866
augaauccaaaccaaaagauaauaaccauugguucggucuguaugacaauuggaauggcuaacuuaauauuacaaauuggaaacauaaucucaauauggauuagccacucaauucaacuugggaaucaaaaucagauugaaacaugcaaucaaagcgucauuacuuaugaaaacaacacuuggguaaaucagacauauguuaacaucagcaacaccaacuuugcugcuggacagucagugguuuccgugaaauuagcgggcaauuccucucucugcccuguuaguggaugggcuauauacaguaaagacaacaguguaagaaucgguuccaagggggauguguuugucauaagggaaccauucauaucaugcucccccuuggaaugcagaaccuucuucuugacucaaggggccuugcuaaaugacaaacauuccaauggaaccauuaaagacaggagcccauaucgaacccuaaugagcuguccuauuggugaaguucccucuccauacaacucaagauuugagucagucgcuuggucagcaagugcuugucaugauggcaucaauuggcuaacaauuggaauuucuggcccagacaauggggcaguggcuguguuaaaguacaacggcauaauaacagacacuaucaagaguuggagaaacaauauauugagaacacaagagucugaaugugcauguguaaaugguucuugcuuuacuguaaugaccgauggaccaaguaauggacaggccucauacaagaucuucagaauagaaaagggaaagauagucaaaucagucgaaaugaaugccccuaauuaucacuaugaggaaugcuccuguuauccugauucuagugaaaucacaugugugugcagggauaacuggcauggcucgaaucgaccgugggugucuuucaaccagaaucuggaauaucagauaggauacauaugcagugggauuuucggagacaauccacgcccuaaugauaagacaggcaguugugguccaguaucgucuaauggagcaaauggaguaaaaggauuuucauucaaauacggcaaugguguuuggauagggagaacuaaaagcauuaguucaagaaacgguuuugagaugauuugggauccaaacggauggacugggacagacaauaacuucucaauaaagcaagauaucguaggaauaaaugaguggucaggauauagcgggaguuuuguucagcauccagaacuaacagggcuggauuguauaagaccuugcuucuggguugaacuaaucagagggcgacccaaagagaacacaaucuggacuagcgggagcagcauauccuuuugugguguaaacagugacacuguggguuggucuuggccagacggugcugaguugccauuuaccauugacaaguaa

SEQ ID NO: 53353 - RNA, 1410 nt, Artificial Sequence; identical to SEQ ID NO: 48749
  derived and/or modified CDS sequence (wt) from neuraminidase__InfluenzaA__AEW10876

SEQ ID NO: 53354 - RNA, 1410 nt, Artificial Sequence; identical to SEQ ID NO: 48749
  derived and/or modified CDS sequence (wt) from neuraminidase__InfluenzaA__AEW10886

SEQ ID NO: 53355 - RNA, 1410 nt, Artificial Sequence; identical to SEQ ID NO: 48749
  derived and/or modified CDS sequence (wt) from neuraminidase__InfluenzaA__AEW10896

SEQ ID NO: 53356 - RNA, 1410 nt, Artificial Sequence; identical to SEQ ID NO: 48749
  derived and/or modified CDS sequence (wt) from neuraminidase__InfluenzaA__AEW10906

SEQ ID NO: 53357 - RNA, 1410 nt, Artificial Sequence; identical to SEQ ID NO: 48749
  derived and/or modified CDS sequence (wt) from neuraminidase__InfluenzaA__AEW10916

SEQ ID NO: 53358 - RNA, 1410 nt, Artificial Sequence
  derived and/or modified CDS sequence (wt) from neuraminidase__InfluenzaA__AEW10926
augaauccaaaccaaaagauaauaaccauugguucggucuguaugacaauuggaauggcuaacuuaauauuacaaauuggaaacauaaucucaauauggauuagccacucaauucaacuugggaaucaaaaucagauugaaacaugcaaucaaagcgucauuacuuaugaaaacaacacuuggguaaaucagacauauguuaacaucagcaacaccaacuuugcugcuggacagucagugguuuccgugaaauuagcgggcaauuccucucucugcccuguuaguggaugggcuauauacaguaaagacaacaguauaagaaucgguuccaagggggauguguuuaucauaagggaaccauucauaucaugcucccccuuggaaugcagaaccuucuucuugacucaaggggccuugcuaaaugacaaacauuccaauggaaccauuaaagacaggagcccauaucgaacccuaaugagcuguccuauuggugaaguucccucuccauacaacucaagauuugagucagucgcuuggucagcaagugcuugucaugauggcaucaauuggcuaacaauuggaauuucuggcccagacaauggggcaguggcuguguuaaaguacaacggcauaauaacagacacuaucaagaguuggagaaacaauauauugagaacacaagagucugaaugugcauguguaaaugguucuugcuuuacuguaaugaccgauggaccaagugauggacaggccucauacaagaucuucagaauagaaaagggaaagauagucaaaucagucgaaaugaaugccccuaauuaucacuaugaggaaugcuccuguuauccugauucuagugaaaucacaugugugugcagggauaacuggcauggcucgaaucgaccgugggugucuuucaaccagaaucuggaauaucagauaggauacauaugcagugggauuuucggagacaauccacgcccuaaugauaagacaggcaguugugguccaguaucgucuaauggagcaaauggaguaaaaggauuuucauucaaauacggcaaugguguuuggauagggagaacuaaaagcauuaguucaagaaacgguuuugagaugauuugggauccgaacggauggacugggacagacaauaacuucucaauaaagcaagauaucguaggaauaaaugaguggucaggauauagcgggaguuuuguucagcauccagaacuaacagggcuggauuguauaagaccuugcuucuggguugaacuaaucagagggcgacccaaagagaacacaaucuggacuagcgggagcagcauauccuuuugugguguaaacagugacacuguggguuggucuuggccagacggugcugaguugccauuuaccauugacaaguaa

SEQ ID NO: 53359 - RNA, 1410 nt, Artificial Sequence; identical to SEQ ID NO: 48749
  derived and/or modified CDS sequence (wt) from neuraminidase__InfluenzaA__AEW10936

SEQ ID NO: 53360 - RNA, 1410 nt, Artificial Sequence; identical to SEQ ID NO: 53352
  derived and/or modified CDS sequence (wt) from neuraminidase__InfluenzaA__AEW10946

SEQ ID NO: 53361 - RNA, 1410 nt, Artificial Sequence; identical to SEQ ID NO: 48750
  derived and/or modified CDS sequence (wt) from neuraminidase__InfluenzaA__AEW10956

SEQ ID NO: 53362 - RNA, 1410 nt, Artificial Sequence; identical to SEQ ID NO: 48750
  derived and/or modified CDS sequence (wt) from neuraminidase__InfluenzaA__AEW10966

SEQ ID NO: 53363 - RNA, 1410 nt, Artificial Sequence; identical to SEQ ID NO: 48749
  derived and/or modified CDS sequence (wt) from neuraminidase__InfluenzaA__AEW10976

SEQ ID NO: 53364 - RNA, 1410 nt, Artificial Sequence; identical to SEQ ID NO: 48750
  derived and/or modified CDS sequence (wt) from neuraminidase__InfluenzaA__AEW10986

SEQ ID NO: 53365 - RNA, 1410 nt, Artificial Sequence; identical to SEQ ID NO: 48750
  derived and/or modified CDS sequence (wt) from neuraminidase__InfluenzaA__AEW10996

SEQ ID NO: 53366 - RNA, 1410 nt, Artificial Sequence; identical to SEQ ID NO: 48750
  derived and/or modified CDS sequence (wt) from neuraminidase__InfluenzaA__AEW11006

SEQ ID NO: 53367 - RNA, 1410 nt, Artificial Sequence; identical to SEQ ID NO: 48750
  derived and/or modified CDS sequence (wt) from neuraminidase__InfluenzaA__AEW11016

SEQ ID NO: 53368 - RNA, 1410 nt, Artificial Sequence; identical to SEQ ID NO: 48750
  derived and/or modified CDS sequence (wt) from neuraminidase__InfluenzaA__AEW11026

SEQ ID NO: 53369 - RNA, 1410 nt, Artificial Sequence; identical to SEQ ID NO: 48750
  derived and/or modified CDS sequence (wt) from neuraminidase__InfluenzaA__AEW11036

SEQ ID NO: 53370 - RNA, 1410 nt, Artificial Sequence; identical to SEQ ID NO: 48749
  derived and/or modified CDS sequence (wt) from neuraminidase__InfluenzaA__AEW11046

SEQ ID NO: 53371 - RNA, 1410 nt, Artificial Sequence; identical to SEQ ID NO: 48750
  derived and/or modified CDS sequence (wt) from neuraminidase__InfluenzaA__AEW11056

SEQ ID NO: 53372 - RNA, 1410 nt, Artificial Sequence
  derived and/or modified CDS sequence (wt) from neuraminidase__InfluenzaA__AEW11066
augaauccaaaccaaaagauaauaaccauugguucggucuguaugacaauuggaauggcuaacuuaauauuacaaauuggaaacauaaucucaauauggauuagccacucaauucaacuugggaaucaaaaucagauugaaacaugcaaucaaagcgucauuacuuaugaaaacaacacuuggguaaaucagacauauguuaacaucagcaacaccaacuuugcugcuggacagucagugguuuccgugaaauuagcgggcaauuccucucucugcccuguuaguggaugggcuauauacaguaaagacaacaguguaagaaucgguuccaagggggauguguuugucauaagggaaccauucauaucaugcucccccuuggaaugcagaaccuucuucuugacucaaggggccuugcuaaaugacaaacauuccaauggaaccauuaaagacaggagcccauaucgaacccuaaugagcuguccuauuggugaaguucccucuccauacaacucaagauuugagucagucgcuuggucagcaagugcuugucaugauggcaucaauuggcuaacaauuggaauuucuggcccagacaauggggcaguggcuguguuaaaguacaacggcauaauaacagacacuaucaagaguuggagaaacaauauauugagaacacaagagucugaaugugcauguguaaaugguucuugcuuuacuguaaugaccgauggaccaaguaauggacaggccucauacaagaucuucagaauagaaaagggaaagauagucaaaucagucgaaaugaaugccccuaauuaucacuaugaggaaugcuccuguuauccugauucuagugaaaucacaugugugugcagggauaacuggcauggcucgaaucgaccgugggugucuuucaaccagaaucuggaauaucagauaggauacauaugcagugggauuuucggagacaauccacgcccuaaugauaagacaggcaguugugguccaguaucguuuaauggagcaaauggaguaaaaggauuuucauucaaauacggcaaugguguuuggauagggagaacuaaaagcauuaguucaagaaacgguuuugagaugauuugggauccgaacggauggacugggacagacaauaacuucucaauaaagcaagauaucguaggaauaaaugaguggucaggauauagcgggaguuuuguucagcauccggaauuaacagggcuggauuguauaagaccuugcuucuggguugaacuaaucagagggcgacccaaagagaacacaaucuggacuagcgggagcagcauauccuuuugugguguaaacagugacacuguggguuggucuuggccagacggugcugaguugccauuuaccauugacaaguaa

SEQ ID NO: 53373 - RNA, 1410 nt, Artificial Sequence; identical to SEQ ID NO: 53372
  derived and/or modified CDS sequence (wt) from neuraminidase__InfluenzaA__AEW11076

SEQ ID NO: 53374 - RNA, 1410 nt, Artificial Sequence; identical to SEQ ID NO: 53372
  derived and/or modified CDS sequence (wt) from neuraminidase__InfluenzaA__AEW11086

SEQ ID NO: 53375 - RNA, 1410 nt, Artificial Sequence; identical to SEQ ID NO: 53372
  derived and/or modified CDS sequence (wt) from neuraminidase__InfluenzaA__AEW11096

SEQ ID NO: 53376 - RNA, 1410 nt, Artificial Sequence; identical to SEQ ID NO: 53372
  derived and/or modified CDS sequence (wt) from neuraminidase__InfluenzaA__AEW11106

SEQ ID NO: 53377 - RNA, 1410 nt, Artificial Sequence; identical to SEQ ID NO: 49194
  derived and/or modified CDS sequence (wt) from neuraminidase__InfluenzaA__AEW11116

SEQ ID NO: 53378 - RNA, 1410 nt, Artificial Sequence; identical to SEQ ID NO: 53372
  derived and/or modified CDS sequence (wt) from neuraminidase__InfluenzaA__AEW11126

SEQ ID NO: 53379 - RNA, 1410 nt, Artificial Sequence; identical to SEQ ID NO: 49647
  derived and/or modified CDS sequence (wt) from neuraminidase__InfluenzaA__AEW11136

SEQ ID NO: 53380 - RNA, 1410 nt, Artificial Sequence; identical to SEQ ID NO: 48750
  derived and/or modified CDS sequence (wt) from neuraminidase__InfluenzaA__AEW11146

SEQ ID NO: 53381 - RNA, 1410 nt, Artificial Sequence; identical to SEQ ID NO: 48750
  derived and/or modified CDS sequence (wt) from neuraminidase__InfluenzaA__AEW11156

SEQ ID NO: 53382 - RNA, 1410 nt, Artificial Sequence; identical to SEQ ID NO: 53372
  derived and/or modified CDS sequence (wt) from neuraminidase__InfluenzaA__AEW11166

SEQ ID NO: 53383 - RNA, 1410 nt, Artificial Sequence; identical to SEQ ID NO: 53372
  derived and/or modified CDS sequence (wt) from neuraminidase__InfluenzaA__AEW11176

SEQ ID NO: 53384 - RNA, 1410 nt, Artificial Sequence
  derived and/or modified CDS sequence (wt) from neuraminidase__InfluenzaA__AEW11186
augaauccaaaccaaaagauaauaaccauugguucggucuguaugacaauuggaauggcuaacuuaauauuacaaauuggaaacauaaucucaauauggauuagccacucaauucaacuugggaaucaaaaucagauugaaacaugcaaucaaagcgucauuacuuaugaaaacaacacuuggguaaaucagacauauguuaacaucagcaacaccaacuuugcugcuggacagucagugguuuccgugaaauuagcgggcaauuccucucucugcccuguuaguggaugggcuauauacaguaaagacaacaguauaagaaucgguuccaagggggauguguuugucauaagggaaccauucauaucaugcucccccuuggaaugcagaaccuucuucuugacucaaggggccuugcuaaaugacaaacauuccaauggaaccauuaaagacaggagcccauaucgaacccuaaugagcuguccuauuggugaaguucccucuccauacaacucaagauuugagucagucgcuuggucagcaagugcuugucaugauggcaucaauuggcuaacaauuggaauuucuggcccagacaauggggcaguggcuguguuaaaguacaacggcauaauaacagacacuaucaagaguuggagaaacaauauacugagaacacaagagucugaaugugcauguguaaaugguucuugcuuuacuguaaugaccgauggaccaagugauggacaggccucauacaagaucuucagaauagaaaagggaaagauagucaaaucagucgaaaugaaugccccuaauuaucacuaugaggaaugcuccuguuauccugauucuagugaaaucacaugugugugcagggauaacuggcauggcucgaaucgaccgugggugucuuucaaccagaaucuggaauaucagauaggauacauaugcagugggauuuucggagacaauccacgcccuaaugauaagacaggcaguugugguccaguaucgucuaauggagcaaauggaguaaaaggauuuucauucaaauacggcaaugguguuuggauagggagaacuaaaagcauuaguucaagaaacgguuuugagaugauuugggauccgaacggauggacugggacagacaauaacuucucaauaaagcaagauaucguaggaauaaaugaguggucaggauauagcgggaguuuuguucagcauccagaacuaacagggcuggauuguauaagaccuugcuucuggguugaacuaaucagagggcgacccaaagagaacacaaucuggacuagcgggagcagcauauccuuuugugguguaaacagugacacuguggguuggucuuggccagacggugcugaguugccauuuaccauugacaaguaa

SEQ ID NO: 53385 - RNA, 1410 nt, Artificial Sequence; identical to SEQ ID NO: 53372
  derived and/or modified CDS sequence (wt) from neuraminidase__InfluenzaA__AEW11196

SEQ ID NO: 53386 - RNA, 1410 nt, Artificial Sequence; identical to SEQ ID NO: 48750
  derived and/or modified CDS sequence (wt) from neuraminidase__InfluenzaA__AEW11206

SEQ ID NO: 53387 - RNA, 1410 nt, Artificial Sequence; identical to SEQ ID NO: 48750
  derived and/or modified CDS sequence (wt) from neuraminidase__InfluenzaA__AEW11216

SEQ ID NO: 53388 - RNA, 1410 nt, Artificial Sequence; identical to SEQ ID NO: 49647
  derived and/or modified CDS sequence (wt) from neuraminidase__InfluenzaA__AEW11226

SEQ ID NO: 53389 - RNA, 1410 nt, Artificial Sequence; identical to SEQ ID NO: 48750
  derived and/or modified CDS sequence (wt) from neuraminidase__InfluenzaA__AEW11236

SEQ ID NO: 53390 - RNA, 1410 nt, Artificial Sequence; identical to SEQ ID NO: 48750
  derived and/or modified CDS sequence (wt) from neuraminidase__InfluenzaA__AEW11246

SEQ ID NO: 53391 - RNA, 1410 nt, Artificial Sequence; identical to SEQ ID NO: 53372
  derived and/or modified CDS sequence (wt) from neuraminidase__InfluenzaA__AEW11255

SEQ ID NO: 53392 - RNA, 1410 nt, Artificial Sequence; identical to SEQ ID NO: 53372
  derived and/or modified CDS sequence (wt) from neuraminidase__InfluenzaA__AEW11265

SEQ ID NO: 53393 - RNA, 1410 nt, Artificial Sequence; identical to SEQ ID NO: 48750
  derived and/or modified CDS sequence (wt) from neuraminidase__InfluenzaA__AEW11275

SEQ ID NO: 53394 - RNA, 1410 nt, Artificial Sequence
  derived and/or modified CDS sequence (wt) from neuraminidase__InfluenzaA__AEW11285
augaauccaaaccaaaagauaauaaccauugguucggucuguaugacaauuggaauggcuaacuuaauauuacaaauuggaaacauaaucucaauauggauuagccacucaauucaacuugggaaucaaaaucagauugaaacaugcaaucaaagcgucauuacuuaugaaaacaacacuuggguaaaucagacauauguuaacaucagcaacaccaacuuugcugcuggacagucagugguuuccgugaaauuagcgggcaauuccucucucugcccuguuaguggaugggcuauauacaguaaagacaacaguguaagaaucgguuccaagggggauguguuugucauaagggaaccauucauaucaugcucccccuuggaaugcagaaccuucuucuugacucaaggggccuugcuaaaugacaaacauuccaauggaaccauuaaagacaggagcccauaucgaacccuaaugagcuguccuauuggugaaguucccucuccauacaacucaagauuugagucagucgcuuggucagcaagugcuugucaugauggcaucaauuggcuaacaauuggaauuucuggcccagacaauggggcaguggcuguguuaaaguacaacggcauaauaacagacacuaucaagaguuggagaaacaauauauugagaacacaagagucugaaugugcauguguaaaugguucuugcuuuacuguaaugaccgauggaccaaguaauggacaggccucauacaagaucuucagaauagaaaagggaaagauagucaaaucagucgaaaugaaugccccuaauuaucacuaugaggaaugcuccuguuauccugauucuagugaaaucacaugugugugcagggauaacuggcauggcucgaaucgaccgugggugucuuucaaccagaaucuggaauaucagauaggauacauaugcagugggauuuucggagacaauccacgcccuaaugauaagacaggcaguugugguccaguaucgucuaauggagcaaauggaguaaaaggauuuucauucaaauacggcaaugguguuuggauagggagaacuaaaagcauuaguucaagaaacgguuuugagaugauuugggauccgaacggauggacugggacagacaauaacuucucaauaaagcaagauaucguaggaauaaaugaguggucaggauauagcgggaguuuuguucagaauccagaacuaacagggcuggauuguauaagaccuugcuucuggguugaacuaaucagagggcgacccaaagagaacacaaucuggacuagcgggagcagcauauccuuuugugguguaaacagugacacuguggguuggucuuggccagacggugcugaguugccauuuaccauugacaaguaa

SEQ ID NO: 53395 - RNA, 1410 nt, Artificial Sequence; identical to SEQ ID NO: 53372
  derived and/or modified CDS sequence (wt) from neuraminidase__InfluenzaA__AEW11295

SEQ ID NO: 53396 - RNA, 1410 nt, Artificial Sequence; identical to SEQ ID NO: 48750
  derived and/or modified CDS sequence (wt) from neuraminidase__InfluenzaA__AEW11305

SEQ ID NO: 53397 - RNA, 1410 nt, Artificial Sequence; identical to SEQ ID NO: 53372
  derived and/or modified CDS sequence (wt) from neuraminidase__InfluenzaA__AEW11315

SEQ ID NO: 53398 - RNA, 1410 nt, Artificial Sequence; identical to SEQ ID NO: 48750
  derived and/or modified CDS sequence (wt) from neuraminidase__InfluenzaA__AEW11325

SEQ ID NO: 53399 - RNA, 1410 nt, Artificial Sequence; identical to SEQ ID NO: 53279
  derived and/or modified CDS sequence (wt) from neuraminidase__InfluenzaA__AEW25299

SEQ ID NO: 53400 - RNA, 1410 nt, Artificial Sequence; identical to SEQ ID NO: 53279
  derived and/or modified CDS sequence (wt) from neuraminidase__InfluenzaA__AEW25308

SEQ ID NO: 53401 - RNA, 1410 nt, Artificial Sequence
  derived and/or modified CDS sequence (wt) from neuraminidase__InfluenzaA__AEW25317
augaauccaaaccaaaagauaauaaccauugguucggucuguaugacaauuggaauggcuaacuuaauauuacaaauuggaaacauaaucucaauauggauuagccacucaauucaacuugggaaucaaaaucagauugaaacaugcaaucaaagcgucauuacuuaugaaaacaacacuuggauaaaucagacauauguuaacaucagcaacaccaacuuugcugcuggacagucagugguuuccgugaaauuagcgggcaauuccucucucugcccuguuaguggaugggcuauauacaguaaagacaacaguauaagaaucgguuccaagggggauguguuugucauaagggaaccauucauaucaugcucccccuuggaaugcagaaccuucuucuugacucaaggggccuugcuaaaugacaaacauuccaauggaaccauuaaagacaggagcccauaucgaacccuaaugagcuguccuauuggugaaguucccucuccauacaacucaagauuugagucagucgcuuggucagcaagugcuugucaugauggcaucaauuggcuaacaauuggaauuucuggcccagacaauggggcaguggcuguguuaaaguacaacggcauaauaacagacacuaucaagaguuggagaaacaauauauugagaacacaagagucugaaugugcauguguaaaugguucuugcuuuacuguaaugaccgauggaccaagugauggacaggccucauacaagaucuucagaauagaaaagggaaagauagucaaaucagucgaaaugaaugccccuaauuaucacuaugaggaaugcuccuguuauccugauucuagugaaaucacaugugugugcagggauaacuggcauggcucgaaucgaccgugggugucuuucaaccagaaucuggaauaucagauaggguacauaugcagugggauuuucggagacaauccacgcccuaaugauaagacaggcaguugugguccaguaucgucuaauggagcaaauggaguaaaaggauuuucauucaaauacggcaaugguguuuggauagggagaacuaaaagcauuaguucaagaaacgguuuugagaugauuugggauccgaacggauggacugggacagacaauaacuucucaauaaagcaagauaucguaggaauaaaugaguggucaggauauagcgggaguuuuguucagcauccagaacuaacagggcuggauuguauaagaccuugcuucuggguugaacuaaucagagggcgacccaaagagaacacaaucuggacuagcgggagcagcauauccuuuugcgguguaaacagugacacuguggguuggucuuggccagacggugcugaguugccauuuaccauugacaaguaa

SEQ ID NO: 53402 - RNA, 1410 nt, Artificial Sequence
  derived and/or modified CDS sequence (wt) from neuraminidase__InfluenzaA__AEW25324
augaauccaaaccaaaagauaauaaccauugguucggucuguaugacaauuggaauggcuaacuuaauauuacaaauuggaaacauaaucucaauauggauuagccacucaauucaacuugggaaucaaaaucagauugaaacaugcaaucaaagcgucauuacuuaugaaaacaacacuuggguaaaucagacauauguuaacaucagcaacaccaacuuugcugcuggacagucagugguuuccgugaaauuagcaggcaauuccucucucugcccuguuaguggaugggcuauauacaguaaagacaacaguauaagaaucgguuccaagggggauguguuugucauaagggaaccauucauaucaugcucccccuuggaaugcagaaccuucuucuugacucaaggggccuugcuaaaugacaaacauuccaauggaaccauuaaagacaggagcccauaucgaacccuaaugagcuguccuauuggugaaguucccucuccauacaacucaagauuugagucagucgcuuggucagcaagugcuugucaugauggcaucaauuggcuaacaauuggaauuucuggcccagacaauggggcaguggcuguguuaaaguacaacggcauaauaacagacacuaucaagaguuggagaaacaauauauugagaacacaagagucugaaugugcauguguaaaugguucuugcuuuacuguaaugaccgauggaccaagugauggacaggccucauacaagaucuucagaauagaaaagggaaagauagucaaaucagucgaaaugaaugccccuaauuaucacuaugaggaaugcuccuguuauccugauucuagugaaaucacaugugugugcagggauaacuggcauggcucgaaucgaccgugggugucuuucaaccagaaucuggaauaucagauaggguacauaugcagugggauuuucggagacaauccacgcccuaaugauaagacaggcaguugugguccaguaucgucuaauggagcaaauggaguaaaaggauuuucauucaaauacggcaaugguguuuggauagggagaacuaaaagcauuaguucaagaaacgguuuugagaugauuugggauccgaacggauggacugggacagacaauaacuucucaauaaagcaagauaucguaggaauaaaugaguggucaggauauagcgggaguuuuguucagcauccagaacuaacagggcuggauuguauaagaccuugcuucuggguugaacuaaucagagggcgacccaaagagaacacaaucuggacuagcgggagcagcauauccuuuugugguguaaacagugacacuguggguuggucuuggccagacggugcugaguugccauuuaccauugacaaguaa

SEQ ID NO: 53403 - RNA, 1410 nt, Artificial Sequence
  derived and/or modified CDS sequence (wt) from neuraminidase__InfluenzaA__AEW25327
augaauccaaaccaaaagauaauaaccauugguucggucuguaugacaauuggaauggcuaacuuaauauuacaaauuggaaacauaaucucaauauggauuagccacucaauucaacuugggaaucaaaaucagauugaaacaugcaaucaaagcgucauuacuuaugaaaacaacacuuggguaaaucagacauauguuaacaucagcaacaccaacuuugcugcuggacagucagugguuuccgugaaauuagcgggcaauuccucucucugcccuguuaguggaugggcuauauacaguaaagacaacaguauaagaaucgguuccaagggggauguguuugucauaagggaaccauucauaucaugcucccccuuggaaugcagaaccuucuucuugacucaaggggccuugcuaaaugacaaacauuccaauggaaccauuaaagacaggagcccauaucgaacccuaaugagcuguccuauuggugaaguucccccuccauacaacucaagauuugagucagucgcuuggucagcaagugcuugucaugauggcaucaauuggcuaacaauuggaauuucuggcccagacaauggggcaguggcuguguuaaaguacaacggcauaauaacagacacuaucaagaguuggagaaacaauauauugagaacacaagagucugaaugugcauguguaaaugguucuugcuuuacuguaaugaccgauggaccaagugauggacaggccucauacaagaucuucagaauagaaaagggaaagauagucaaaucagucgaaaugaaugccccuaauuaucacugugaggaaugcuccuguuauccugauucuagugaaaucacaugugugugcagggauaacuggcauggcucgaaucgaccgugggugucuuucaaccagaaucuggaauaucagauaggguacauaugcagugggauuuucggagacaauccacgcccuaaugauaagacaggcaguugugguccaguaucgucuaauggagcaaauggaguaaaaggauuuucauucaaauacggcaaugguguuuggauagggagaacuaaaagcauuaguucaagaaacgguuuugagaugauuugggauccgaacggauggacugggacagacaauaacuucucaauaaagcaagauaucguaggaauaaaugaguggucaggauauagcgggaguuuuguucagcauccagaacuaacagggcuggauuguauaagaccuugcuucuggguugaacuaaucagagggcgacccaaagagaacacaaucuggacuagcgggagcagcauauccuuuugcgguguaaacagugacacuguggguuggucuuggccagacggugcugaguugccauuuaccauugacaaguaa

SEQ ID NO: 53404 - RNA, 1410 nt, Artificial Sequence
  derived and/or modified CDS sequence (wt) from neuraminidase__InfluenzaA__AEW25333
augaauccaaaccaaaagauaauaaccauugguucggucuguaugacaauuggaauggcuaacuuaauauuacaaauuggaaacauaaucucaauauggauuagccacucaauucaacuugggaaucaaaaucagauugaaacaugcaaucaaagcgucauuacuuaugaaaacaacacuuggguaaaucauacauauguuaacaucagcaacaccaacuuugcugcuggacagucagugguuuccgugaaauuagcgggcaauuccucucucugcccuguuaguggaugggcuauauacaguaaagacaacaguauaagaaucgguuccaagggggauguguuugucauaagggaaccauucauaucaugcucccccuuggaaugcagaaccuucuucuugacucaaggggccuugcuaaaugacaaacauuccaauggaaccauuaaagacaggagcccauaucgaacccuaaugagcuguccuauuggugaaguucccucuccauacaacucaagauuugagucagucgcuuggucagcaagugcuugucaugauggcaucaauuggcuaacaauuggaauuucuggcccagacaauggggcaguggcuguguuaaaguacaacggcauaauaacagacacuaucaagaguuggagaaacaauauauugagaacacaagagucugaaugugcauguguaaaugguucuugcuuuacuguaaugaccgauggaccaagugauggacaggccucauacaagaucuucagaauagaaaagggaaagauagucaaaucagucgaaaugaaugccccuaauuaucacuaugaggaaugcuccuguuauccugauucuagugaaaucacaugugugugcagggauaacuggcauggcucgaaucgaccgugggugucuuucaaccagaaucuggaauaucagauaggauacauaugcagugggauuuucggagacaauccacgcccuaaugauaagacaggcaguugugguccaguaucgucuaauggagcaaauggaguaaaaggauuuucauucaaauacggcaaugguguuuggguagggagaacuaaaagcauuaguucaagaaacgguuuugagaugauuugggauccgaacggauggacugggacagacaauaacuucucaauaaagcaagauaucguaggaauaaaugaguggucaggauauagcgggaguuuuguucagcauccagaacuaacagggcuggauuguauaagacauugcuucuggguugaacuaaucagagggcgacccaaagagaacacaaucuggacuagcgggagcagcauauccuuuugugguguaaacagugacacuguggguuggucuuggccagacggugcugaguugccauuuaccauugacaaguaa

SEQ ID NO: 53405 - RNA, 1410 nt, Artificial Sequence
  derived and/or modified CDS sequence (wt) from neuraminidase__InfluenzaA__AEW25338
augaauccaaaccaaaagauaauaaccauugguucggucuguauggcaauuggaauggcuaacuuaauauuacaaauuggaaacauaaucucaauauggauuagccacucaauucaacuugggaaucaaaaucagauugaaacaugcaaucaaagcgucauuacuuaugaaaacaacacuuggguaaaucagacauauguuaacaucagcaacaccaacuuugcugcuggacagucagugguuuccgugaaauuagcgggcaauuccucucucugcccuguuaguggaugggcuauauacaguaaagacaacaguauaagaaucgguuccaagggggauguguuugucauaagggaaccauucauaucaugcucccccuuggaaugcagaaccuucuucuugacucaaggggccuugcuaaaugacaaacauuccaauggaaccauuaaagacaggagcccauaucgaacccuaaugagcuguccuauuggugaaguucccucuccauacaacucaagauuugagucagucgcuuggucagcaagugcuugucaugauggcaucaauuggcuaacaauuggaauuucuggcccagacaauggggcaguggcuguguuaaaguacaacggcauaauaacagacacuaucaagaguuggagaaacaauauauugagaacacaagagucugaaugugcauguguaaaugguucuugcuuuacuguaaugaccgauggaccaagugauggacaggccucauacaagaucuucagaauagaaaagggaaagauagucaaaucagucgaaaugaaugccccuaauuaucacuaugaggaaugcuccuguuauccugauucuagugaaaucacaugugugugcagggauaacuggcauggcucgaaucgaccgugggugucuuucaaccagaaucuggaauaucagauaggguacauacgcagugggauuuucggagacaauccacgcccuaaugauaagacaggcaguugugguccaguaucgucuaauggagcaaauggaguaaaaggauuuucauucaaauacggcaaugguguuuggauagggagaacuaaaagcauuaguucaagaaacgguuuugagaugauuugggauccgaacggauggacugggacagacaauaacuucucaauaaagcaagauaucguaggaauaaaugaguggucaggauauagcgggaguuuuguucagcauccagaacuaacagggcuggauuguauaagaccuugcuucuggguugaacuaaucagagggcgacccaaagagaacacaaucuggacuagcgggagcagcauauccuuuugcgguguaaacagugacacuguggguuggucuuggccagacggugcugaguugccauuuaccauugacaaguaa

SEQ ID NO: 53406 - RNA, 1410 nt, Artificial Sequence
  derived and/or modified CDS sequence (wt) from neuraminidase__InfluenzaA__AEW25343
augaauccaaaccaaaagauaauaaccauugguucggucuguaugacaauuggaauggcuaacuuaauauuacaaauuggaaacauaaucucaauauggauuagccacucaauucaacuugggaaucaaaaucagauugaaacaugcaaucaaagcgucauuacuuaugaaaacaacacuuggguaaaucagacauauguuaacaucagcaacaccaacuuugcugcuggacagucagugguuuccgugaaauuagcgggcaauuccucucucugcccuguuaguggaugggcuauauacaguaaagacaacaguauaagaaucgguuccaagggggauguguuugucauaagggaaccauucauaucaugcucccccuuggaaugcagaaccuucuucuugacucaaggggccuugcuaaaugacaaacauuccaauggaaccauuaaagacaggagcccauaucgaacccuaaugagcuguccuauuggugaaguucccucuccauacaacucaagaucugagucagucgcuuggucagcaagugcuugucaugauggcaucaauuggcuaacaauuggaauuucuggcccagacaauggggcaguggcuguguuaaaguacaacggcauaauaacagacacuaucaagaguuggagaaacaauauauugagaacacaagagucuguaugugcauguguaaaugguucuugcuuuacuguaaugaccgauggaccaagugauggacaggccucauacaagaucuucagaauagaaaagggaaagauagucaaaucagucgaaaugaaugccccuaauuaucacuaugaggaaugcuccuguuauccugauucuagugaaaucacaugugugugcagggauaacuggcauggcucgaaucgaccgugggugucuuucaaccagaaucuggaauaucagauaggauacauaugcagugggauuuucggagacaguccacgcccuaaugauaagacaggcaguugugguccaguaucgucuaauggagcaaauggaguaaaaggauuuucauucaaauacggcaaugguguuuggauagggagaacuaaaagcauuaguucaagaaacgguuuugagaugauuugggauccgaacggauggacugggacagacaauaacuucucaauaaagcaagauaucguaggaauaaaugaguggucaggauauagcgggaguuuuguucagcauccagaacuaacagggcuggauuguauaagaccuugcuucuggguugaacuaaucagagggcgacccaaagagaacacaaucuggacuagcgggagcagcauauccuuuugugguguaaacagugacacuguggguuggucuuggccagacggugcugaguugccauuuaccauugacaaguaa

SEQ ID NO: 53407 - RNA, 1410 nt, Artificial Sequence
  derived and/or modified CDS sequence (wt) from neuraminidase__InfluenzaA__AEW25351
augaauccaaaccaaaagauaauaaccauugguucggucuguaugacaauuggaauggcuaacuuaauauuacaaauuggaaacauaaucucaauauggauuagccacucaauucaacuugggaaucaaaaucagauugaaacaugcaaucaaagcgucauuacuuaugaaaacaacacuuggguaaaucauacauauguuaacaucagcaacaccaacuuugcugcuggacagucagugguuuccgugaaauuagcgggcaauuccucucucugcccuguuaguggaugggcuauauacaguaaagacaacaguauaagaaucgguuccaagggggauguguuugucauaagggaaccauucauaucaugcucccccuuggaaugcagaaccuucuucuugacucaaggggccuugcuaaaugacaaacauuccaauggaaccauuaaugacaggagcccauaucgaacccuaaugagcuguccuauuggugaaguucccucuccauacaacucaagauuugagucagucgcuuggucagcaagugcuugucaugauggcaucaauuggcuaacaauuggaauuucuggcccagacaauggggcaguggcuguguuaaaguacaacggcauaauaacagacacuaucaagaguuggagaaacaauauauugagaacacaagagucugaaugugcauguguaaaugguucuugcuuuacuguaaugaccgauggaccaagugauggacaggccucauacaagaucuucagaauagaaaagggaaagauagucaaaucagucgaaaugaaugccccuaauuaucacuaugaggaaugcuccuguuauccugauucuagugaaaucacaugugugugcagggauaacuggcauggcucgaaucgaccgugggugucuuucaaccagaaucuggaauaucagauaggauacauaugcagugggacuuucggagacaauccacgcccuaaugauaagacaggcaguugugguccaguaucgucuaauggagcaaauggaguaaaaggauuuucauucaaauacggcaaugguguuuggauagggagaacuaaaagcauuaguucaagaaacgguuuugagaugauuugggauccgaacggauggacugggacagacaauaacuucucaauaaagcaagauaucguaggaauaaaugaguggucaggauauagcgggaguuuuguucagcauccagaacuaacagggcuggauuguauaagaccuugcuucuggguugaacuaaucagagggcgacccaaagagaacacaaucuggacuagcgggagcagcauauccuuuugugguguaaacagugacacuguggguuggucuuggccagacggugcugaguugccauuuaccauugacaaguaa

SEQ ID NO: 53408 - RNA, 1410 nt, Artificial Sequence
  derived and/or modified CDS sequence (wt) from neuraminidase__InfluenzaA__AEW25358
augaauccaaaccaaaagauaauaaccauugguucggucuguaugacaauuggaauggcuaacuuaauauuacaaauuggaaacauaaucucaauauggguuagccacucaauucaacuugggaaucagaaucagauugaaacaugcaaucaaagcgucauuacuuaugaaaacaacacuuggguaaaucagacauauguuaacaucagcaacaccaacuuugcugcuggacagucagugguuuccgugaaauuagcgggcaauuccucucucugcccuguuaguggaugggcuauauacaguaaagacaacaguauaagaaucgguuccaagggggauguguuugucauaagggaaccauucacaucaugcucccccuuggaaugcagaaccuucuucuugacucaaggggccuugcuaaaugacaaacauuccaauggaaccauuaaagacaggagcccauaucgaacccuaaugagcuguccuauuggugaaguucccucuccauacaacucaagauuugagucagucgcuuggucagcaagugcuugucaugauggcaucaauuggcuaacaauuggaauuucuggcccagacaauggggcaguggcuguguuaaaguacaacggcauaauaacagacacuaucaagaguuggagaaacaauauauugagaacacaagagucugaaugugcauguguaaaugguucuugcuuuacuguaaugaccgauggaccaagugauggacaggccucauacaagaucuucagaauagaaaagggaaagauagucaaaucagucgaaaugaaugccccuaauuaucacuaugaggaaugcuccuguuauccugauucuagugaaaucacaugugugugcagggauaacuggcauggcucgaaucgaccgugggugucuuucaaccagaaucuggaauaucagauaggauacauaugcagugggauuuucggagacaauccacgcccuaaugauaagacaggcaguugugguccaguaucgucuaauggagcaaauggaguaaaaggauuuucauucaaauacggcaaugguguuuggauagggagaacuaaaagcauuaguucaagaaacgguuuugagaugauuugggauccgaacggauggacugggacagacaauaacuucucaauaaagcaagauaucguaggaauaaaugaguggucaggauauagcgggaguuuuguucagcauccagaacuaacagggcuggauuguauaagaccuugcuucuggguugaacuaaucagagggcgacccaaagagaacacaaucuggacuagcgggagcagcauauccuuuugugguguaaacagugacacuguggguuggucuuggccagacggugcugaguugccauuuaccauugucaaguaa

SEQ ID NO: 53409 - RNA, 1410 nt, Artificial Sequence
  derived and/or modified CDS sequence (wt) from neuraminidase__InfluenzaA__AEW25361
augaauccaaaccaaaagauaauaaccauugguucggucuguaugacaauuggaauggcuaacuuaauauuacaaauuggaaacauaaucucaauauggauuagccacucaauucaacuugggaaucaaaaucagauugaaacaugcaaucaaagcgucauuacuuaugaaaacaacacuuggguaaaucagacauauguuaacaucagcaacaccaacuuugcugcuggacagucagugguuuccgugaaauuagcgggcaauuccucucucugcccuguuaguggaugggcuauauacaguaaagacaacaguauaagaaucgguuccaagggggauguguuugucauaagggaaccauucauaucaugcucccccuuggaaugcagaaccuucuucuugacucaaggggcccugcuaaaugacaaacauuccaauggaaccauuaaagacaggagcccauaucgaacccuaaugagcuguccuauuggugaaguucccucuccauacaacucaagauuugagucggucgcuuggucagcaagugcuugucaugauggcaucaauuggcuaacaauuggaauuucuggcccagacaauggggcaguggcuguguuaaaguacaacggcauaauaacagacacuaucaagaguuggagaaacaauauauugagaacacaagagucugaaugugcauguguaaaugguucuugcuuuacuguaaugaccgauggaccaagugauggacaggccucauacaagaucuucagaauagaaaagggaaagauagucaaaucagucgaaaugaaugccccuaauuaucacuaugaggaaugcuccuguuauccugauucuagugaaaucacaugugugugcagggauaacuggcauggcucgaaucgaccgugggugucuuucaaccagaaucuggaauaucagauaggauacauaugcagugggauuuucggagacaauccacgcccuaaugauaagacaggcaguugugguccaguaucgucuaauggagcaaauggaguaaaaggauuuucauucaaauacggcaaugguguuuggauagggagaacuaaaagcauuaguucaagaaacgguuuugagaugauuugggauccgaacggauggacugggacagacaauaacuucucaauaaagcaagauaucguaggaauaaaugaguggucaggauauagcgggaguuuuguccagcauccagaacuaacagggcuggauuguauaagaccuugcuucuggguugaacuaaucagagggcgacccaaagagaacacaaucuggacuagcgggagcagcauauccuuuugugguguaaacagugacacuguggguuggucuuggccagacggugcugaguugccauuuaccauugacaaguaa

SEQ ID NO: 53410 - RNA, 1410 nt, Artificial Sequence
  derived and/or modified CDS sequence (wt) from neuraminidase__InfluenzaA__AEW25379
augaauccaaaccaaaagauaauaaccauugguucggucuguaugacaauuggaauggcuaacuuaauauuacaaauuggaaacauaaucucaauauggacuagccacucaauucaacuugggaaucaaaaccagauugaaacaugcaaucaaagcgucauuacuuaugaaaacaacacuuggguaaaucagacauauguuaacaucagcaacaccaacuuugcugcuggacagucagugguuuccgugaaauuagcgggcaauuccucucucugcccuguuaguggaugggcuauauacaguaaagacaacaguauaagaaucgguuccaagggggauguguuugucauaagggaaccauucauaucaugcucccccuuggaaugcagaaccuucuucuugacucaaggggccuugcuaaaugacaaacauuccaauggaaccauuaaagacaggagcccauaucgaacccuaaugagcuguccuauuggugaaguucccucuccauacaacucaagauuugagucagucgcuuggucagcaagugcuugucaugauggcaucaauuggcuaacaauuggaauuucuggcccagacaauggggcaguggcuguguuaaaguacaacggcauaauaacagacacuaucaagaguuggagaaacaauauauugagaacacaagagucugaaugugcauguguaaaugguucuugcuuuacuguaaugaccgauggaccaagugauggacaggccucauacaagaucuucagaauagaaaagggaaagauagucaaaucagucgaaaugaaugccccuaauuaucacuaugaggaaugcuccuguuauccugauucuagugaagucacaugugugugcagggauaacuggcauggcucgaaucgaccgugggugucuuucaaccagaaucuggaauaucagauaggauacauaugcagugggauuuucggagacaauccacgcccuaaugauaagacaggcaguugugguccaguaucguccgauggagcaaauggaguaaaaggauuuucauucaaauacggcaaugguguuuggauagggagaacuaaaagcauuaguucaagaaacgguuuugagaugauuugggauccgaacggauggacugggacagacaauaacuucucaauaaagcaagauaucguaggaauaaaugaguggucaggauauagcgggaguuuuguucagcauccagaacuaacagggcuggauuguauaagaccuugcuucuggguugaacuaaucagagggcgacccaaagagaacacaaucuggacuagcgggagcagcauauccuuuugugguguaaacagugacacuguggguuggucuuggccagacggugcugaguugccauuuaccauugacaaguaa

SEQ ID NO: 53411 - RNA, 1410 nt, Artificial Sequence
  derived and/or modified CDS sequence (wt) from neuraminidase__InfluenzaA__AEW25387
augaauccaaaccaaaagauaauaaccauugguucggucuguaugacaauuggaauggcuaaccuaauauuacaaauuggaaacauaaucucaauauggauuagccacucaauucaacuugggaaucaaaaucagauugaaacaugcaaucaaagcgucauuacuuaugaaaacaacacuuggguaaaucagacauauguuaacaucagcaacaccaacuuugcugcuggacagucagugguuuccgugaaauuagcgggcaauuccucucucugcccuguuaguggaugggcuauauacaguaaagacaacaguauaagaaucgguuccaagggggauguguuugucauaagggaaccauucauaucaugcucccccuuggaaugcagaaccuucuucuugacucaaggggccuugcuaaaugacaaacauuccaauggaaccauuaaagacaggagcccauaucgaacccuaaugagcuguccuauuggugaaguucccucuccauacaacucaagauuugagucagucgcuuggucagcaagugcuugucaugauggcaucaauuggcuaacaauuggaauuucuggcccagacaauggggcaguggcuguguuaaaguacaacggcauaauaacagacacuaucaagaguuggagaaacaauauauugagaacacaagagucugaaugugcauguguagaugguucuugcuuuacuguaaugaccgauggaccaagugauggacaggccucauacaagaucuucagaauagaaaagggaaagauagucaaaucagucgaaaugaaugccccuaauuaucacuaugaggaaugcuccuguuauccugauucuagugaaaucacaugugugugcagggauaacuggcauggcucgaaucgaccgugggugucuuucaaccagaaucuggaauaucagauaggauacauaugcagugggauuuucgaagacaauccacgcccuaaugauaagacaggcaguugugguccaguaucgucuaauggagcaaauggaguaaaaggauuuucauucaaauacggcaaugguguuuggauagggagaacuaaaagcauuaguucaagaaacgguuuugagaugauuugggauccgaacggauggacugggacagacaauaacuucucaauaaagcaagauaucguaggaauaaaugaguggucaggauauagcgggaguuuuguucagcauccagaacuaacagggcuggauuguauaagaccuugcuucuggguugaacuaaucagagggcgacccaaagagaacacaaucuggacuagcgggagcagcauauccuuuugugguguaaacagugacacuguggguuggucuuggccagacggugcugaguugccauuuaccauugacaaguaa

SEQ ID NO: 53412 - RNA, 1410 nt, Artificial Sequence
  derived and/or modified CDS sequence (wt) from neuraminidase__InfluenzaA__AEW25392
augaauccaaaccaaaagauaauaaccauugguucggucuguaugacaauuggaauggcuaacuuaauauuacaaauuggaaacauaaucucaauauggauuagccacucaauucaacuugggaaucaaaaucagauugaaacaugcaaucaaagcgucauuacuuaugaaaacaacacuuggguaaaucagacauauguuaacaucagcaacaccaacuuugcugcuggacagucagugguuuccgugaaauuagcgggcaauuccucucucugcccuguuaguggaugggcuauauacaguaaagacaacaguauaagaaucgguuccaagggggauguguuugucauaagggaaccauucauaucaugcucccccuuggaaugcagaaccuucuucuugacucaaggggccuugcuaaaugacaaacauuccaauggaaccauuaaagacaggaguccauaucgaacccuaaugagcuguccuauuggugaaguucccucuccauacaacucaagauuugagucagucgcuuggucagcaagugcuugucaugauggcaucaauuggcuaacaauuggaauuucuggcccagacaauggggcaguggcuguguuaaaguacaacggcauaauaacagacacuaucaagaguuggagaaacaauauauugagaacacaagagucugaaugugcauguguaaaugguucuugcuuuacuguaaugaccgauggaccaagugauggacaggccucauacaagaucuucagaauagaaaagggaaagauagucaaaucagucgaaaugaaugccccuaauuaucacuaugaggaaugcuccuguuauccugauucuagugaaaucacaugugugugcagggauaacuggcauggcucgaaucgaccgugggugucuuucaaccagaaucuggaauaucagauaggauacauaugcagugggauuuucggagacaauccacgcccuaaugauaagacaggcaguugugguccaguaucgucuaauggagcaaauggaguaaaaggauuuucauucaaauacggcaaugguguuuggauagggagaacuaaaagcauuaguucaagaaacgguuuugagaugauuugggauccgaacggauggacugggacagacaauaacuucucaauaaagcaugauaucguaggaauaaaugaguggucaggauauagcgggaguuuuguucagcauccagaacuaacagggcuggauuguauaagaccuugcuucuggguugaacuaaucagggggcgacccaaagagaacacaaucuggacuagcgggagcagcauauccuuuugugguguaaacagugacacuguggguuggucuuggccagacggugcugaguugccauuuaccauugacaaguaa

SEQ ID NO: 53413 - RNA, 1410 nt, Artificial Sequence
  derived and/or modified CDS sequence (wt) from neuraminidase__InfluenzaA__AEW25397
augaauccaaaccaaaagauaauaaccauugguucggucuguaugacaauuggaauggcuaacuuaauauuacaaauuggaaacauaaucucaauauggauuagccacucaauucaacuugggaaucaaaaucagauugaaacaugcaaucaaagcgucauuacuuaugaaaacaacacuuggguaaaucagacauauguuaacaucagcaacaccaacuuugcugcuggacagucagugguuuccgugaaauuagcgggcaauuccucucucugcccuguuaguggaugggcuauauacaguaaagacaacaguauaagaaucgguuccaagggggauguguuugucauaagggaaccauucauaucaugcucccccuuggaaugcagaaccuucuucuugacucaaggggccuugcuaaaugacaaacauuccaauggaaccauuaaagacaggagcccauaucgaacccuaaugagcuguccuauuggugaaguucccucuccauacaacucaagauuugagccagucgcuuggucagcaagugcuugucaugauggcaucaauuggcuaacaauuggaauuucuggcccagacaauggggcaguggcuguguuaaaguacaacggcauaauaacagacacuaucaagaguuggagaaacaauauauugagaacacaagagucugaaugugcauguguaaaugguucuugcuuuacuguaaugaccgauggaccaagugauggacaggccucauacaagaucuucagaauagaaaagggaaagauagucaaaucagucgaaaugaaugccccuaauuaucacuaugaggaaugcuccuguuauccugauucuagugaaaucacaugugugugcagggauaacuggcauggcucgaaucgaccgugggugucuuucaaccagaaucuggaauaucagauaggauacauaugcagugggauuuucggagacaguccacgcccuaaugauaagacaggcaguugugguccaguaucgucuaauggagcaaauggaguaaaaggauuuucauucaaauacggcaaugguguuuggauagggagaacuaaaagcauuaguucaagaaacgguuuugagaugauuugggauccgaacggauggacugggacagacaauaacuucucaauaaagcaagauaucguaggaauaaaugaguggucaggauauagcgggaguuuuguucagcauccagaacuaacagggcuggauuguauaagaccuugcuucuggguugaacuaaucagagggcgacccaaagagaacacaaucuggacuagcgggagcagcauauccuuuugugguguaaacagugacaauguggguuggucuuggccagacggugcugaguugccauuuaccauugacaaguaa

SEQ ID NO: 53414 - RNA, 1410 nt, Artificial Sequence
  derived and/or modified CDS sequence (wt) from neuraminidase__InfluenzaA__AEW25402
augaauccaaaccaaaagauaauaaccauugguucggucuguaugacaauuggaauggcuaacuuaauauuacaaauaggaaacauaaucucaauauggauuagccacucaauucaacuugggaaucaaaaucagauugaaacaugcaaucaaagcgucauuacuuaugaaaacaacacuuggguaaaucagacauauguuaacaucagcaacaccaacuuugcugcuggacagucagugguuuccgugaaauuagcgggcaauuccucucucugcccuguuaguggaugggcuauauacaguaaagacaacaguauaagaaucgguuccaagggggauguguuugucauaagggaaccauucauaucaugcucccccuuggaaugcagaaccuucuucuugacucaaggggccuugcuaaaugacaaacauuccaauggaaccauuaaagacaggagcccauaucgaacccuaaugagcuguccuauuggugaaguucccucuccauacaacucaagauuugagucagucgcuuggucagcaagugcuugucaugauggcaucaauuggcuaacaauuggaauuucuggcccagacaauggggcaguggcuguguuaaaguacaacggcauaauaacagacacuaucaagaguuggagaaacaauauauugagaacacaagagucugaaugugcauguguaaaugguucuugcuuuacuguaaugaccgauggaccaagugauggacaggccucauacaagaucuucagaauagaaaagggaaagauagucaaaucagucgaaaugaaugccccuaauuaucacuaugaggaaugcuccuguuauccugauucuagugaaaucacaugugugugcagggauaacuggcauggcucgaaucgaccgugggugucuuucaaccagaaucuggaauaucagauaggauacauaugcagugggauuuucggagacaauccacgcccuaaugauaagacaggcaguugugguccaguaucgucuaauggagcaaauggaguaaaaggauuuucauucaaauacggcaaugguguuuggauagggagaacuaaaagcauuaguucaagaaacgguuuugagaugauuugggauccgaacggauggacugggacagacaauaacuucucaauaaagcaagauaucguaggaauaaaugaguggucaggauauagcgggaguuuuguucagcauccagaacuaacagggcuggauuguauaagaccuugcuucuggguugaacuaaucagagggcgacccaaagagaacacaaucuggacuagcgggagcagcauauccuuuugugguguaaacagugacacuguggguuggucuuggccagacggugcugaguugccauuuaccauugacaaguaa

SEQ ID NO: 53415 - RNA, 1410 nt, Artificial Sequence
  derived and/or modified CDS sequence (wt) from neuraminidase__InfluenzaA__AEW25407
augaauccaaaccaaaagauaauaaccauugguucggucuguaugacaauuggaauggcuaacuuaauauuacaaauuggaaacauaaucucaauauggauuagccacucaauucaacuugggaaucaaaaucagauugaaacaugcaaucaaagcgucauuacuuaugaaaacaacacuuggguaaaucagacauauguuaacaucagcaacaccaacuuugcugcuggacagucagugguuuccgugaaauuagcgggcaauuccucucucugcccuguuaguggaugggcuauauacaguaaagacaacaguauaagaaucgguuccaagggggauguguuugucauaagggaaccauucauaucaugcucccccuuggaaugcagaaccuucuucuugacucaaggggccuugcuaaaugacaaacauuccaauggaaccauuaaagacaggagcccauaucgaacccuaaugagcuguccuauuggugaaguucccucuccauacaacucaagauuugagucagucgcuuggucagcaagugcuugucaugauggcaucaauuggcuaacaauuggaauuucuggcccagacaauggggcaguggcuguguuaaaguacaacggcauaauaacagacaccaucaagaguuggagaaacaauauauugagaacacaagagucugaaugugcauguguaaaugguucuugcuuuacuguaaugaccgauggaccaagugauggacaggccucauacaagaucuucagaauagaaaagggaaagauagucaaaucagucgaaaugaaugccccuaauuaucacuaugaggaaugcuccuguuauccugauucuagugaaaucacaugugugugcagggauaacuggcauggcucgaaucgaccgugggugucuuucaaccagaaucuggaauaucagauaggauacauaugcagugggauuuucggagacaauccacgcccuaaugauaagacaggcaguugugguccaguaucgucuaauggagcaaauggaguaaaaggauuuucauucaaauacggcaaugguguuuggauagggagaacuaaaagcauuaguucaagaaacgguuuugagaugauuugggauccgaacggauggacugggacagacaauaacuucucaauaaagcaagauaucguaggaauaaaugaguggucaggauauagcgggaguuuuguucagcauccagaacuaacagggcuggauuguauaagaccuugcuucuggguugaacuaaucagagggcgacccaaagagaacacaaucuggacuagcgggagcagcauauccuuuugugguguaaacagugacacuguggguuggucuuggccagacggugcugaguugccauuuaccauugacaaguaa

SEQ ID NO: 53416 - RNA, 1410 nt, Artificial Sequence
  derived and/or modified CDS sequence (wt) from neuraminidase__InfluenzaA__AEW25418
augaauccaaaccaaaagauaauaaccauugguucggucuguaugacaauuggaauggcuaacuuaauauuacaaauuggaaacauaaucucaauauggauuagccacucaauucaacuugggaaucaaaaucagauugaaacaugcaaucaaagcgucauuacuuaugaaaacaacacuuggguaaaucauacauauguuaacaucagcaacaccaacuuugcugcuggacagucagugguuuccgugaaauuagcgggcaauuccucucucugcccuguuaguggaugggcuauauacaguaaagacaacaguauaagaaucgguuccaagggggauguguuugucauaagggaaccauucauaucaugcucccccuuggaaugcagaaccuucuucuugacucaaggggccuugcuaaaugacaaacauuccaauggaaccauuaaagacaggagcccauaucgaacccuaaugagcuguccuauuggugaaguucccucuccauacaacucaagauuugagucagucgcuuggucagcaagugcuugucaugauggcaucaauuggcuaacaauuggaauuucuggcccagacaauggggcaguggcuguguuaaaguacaacggcauaauaacagacacuaucaagaguuggagaaacaauauauugagaacacaagagucugaaugugcauguguaaaugguucuugcuuuacuguaaugaccgauggaccaagugauggacaggccucauacaagaucuucagaauaggaaagggaaagauagucaaaucagucgaaaugaaugccccuaauuaucacuaugaggaaugcuccuguuauccugauucuagugaaaucacaugugugugcagggauaacuggcauggcucgaaucgaccgugggugucuuucaaccagaaucuggaauaucagauaggauacauaugcagugggauuuucggagacaauccacgcccuaaugauaagacaggcaguugugguccaguaucgucuaauggagaaaauggaguaaaaggauuuucauucaaauacggcaaugguguuuggauagggagaacuaaaagcauuaguucaagaaacgguuuugagaugauuugggauccgaacggauggacugggacagacaauaacuucucaauaaagcaagauaucguaggaauaaaugaguggucaggauauagcgggaguuuuguucagcauccagaacuaacagggcuggauuguauaagaccuugcuucuggguugaacuaaucagagggcgacccaaagagaacacaaucuggacuagcgggagcagcauauccuuuugugguguaaacagugacacuguggguugguuuuggccagacggugcugaguugccauuuaccauugacaaguaa

SEQ ID NO: 53417 - RNA, 1410 nt, Artificial Sequence
  derived and/or modified CDS sequence (wt) from neuraminidase__InfluenzaA__AEW25423
augaauccaaaccaaaagauaauaaccauugguucggucuguaugacaauuggaauggcuaacuuaauauuacaaauuggaaacauaaucucaauauggauuagcaacucaauucaacuugggaaucaaaaucagauugaaacaugcaaucaaagcgucauuacuuaugaaaacaacacuuggguaaaucagacauauguuaacaucagcaacaccaacuuugcugcuggacagucagugguuuccgugaaauuagcgggcaauuccucucucugcccuguuaguggaugggcuauauacaguaaagacaacaguauaagaaucgguuccaagggggauguguuugucauaagggaaccauucauaucaugcucccccuuggaaugcagaaccuucuucuugacucaaggggccuugcuaaaugacaaacauuccaauggaaccauuaaagacaggagcccauaucgaacccuaaugagcuguccuauuggugaaguucccucuccauacaacucaagauuugagucagucgcuuggucagcaagugcuugucaugauggcaucaauuggcuaacaauuggaauuucuggcccagacaauggggcaguggcuguguuaaaguacaacggcauaauaacagacacuaucaagaguuggagaaacaauauauugagaacacaagagucugaaugugcauguguaaaugguucuugcuuuacuguaaugaccgauggaccaagugauggacaggccucauacaagaucuucagaauagaaaagggaaagauagucaaaucagucgaaaugaaugccccuaauuaucacuaugaggaaugcuccuguuauccugauucuagugaaaucacaugugugugcagggauaacuggcauggcucgaaucgaccgugggugucuuucaaccagaaucuggaauaucagauaggauacauaugcagugggauuuucggagacaauccacgcccuaaugauaagacaggcaguugugguccaguaucgucuaauggagcaaauggaguaaaaggauuuucauucaaauacggcaaugguguuuggauagggagaacuaaaagcauuaguucaagaaacgguuuugagaugauuugggauccgaacggauggacugggacagacaauaacuucucaauaaagcaagauaucguaggaauaaaugaguggucaggauauagcgggaguuuuguucagcauccagaacuaacagggcuggauuguauaagaccuugcuucuggguugaacuaaucagagggcgacccaaagagaacacaaucuggacuagcgggagcagcauauccuuuugugguguaaacagugacacuguggguugguccuggccagacggugcugaguugccauuuaccauugacaaguaa

SEQ ID NO: 53418 - RNA, 1410 nt, Artificial Sequence
  derived and/or modified CDS sequence (wt) from neuraminidase__InfluenzaA__AEW25426
augaauccaaaccaaaagauaauaaccauugguucggucuguaugacaauuggaauggcuaacuuaauauuacaaauuggaaacauaaucucaauauggauuagccacucaauucaacuugggaaucaaaaccagauugaaacaugcaaucaaagcgucauuacuuaugaaaacaacacuuggguaaaucagacauauguuaacaucagcaacaccaacuuugcugcuggacagucagugguuuccgugaaauuagcgggcaauuccucucucugcccuguuaguggaugggcuauauacaguaaagacaacaguauaagaaucgguuccaagggggauguguuugucauaagggaaccauucauaucaugcucccccuuggaaugcagaaccuucuucuugacucaaggggccuugcuaaaugacaaacauuccaauggaaccauuaaagacaggagcccauaucgaacccuaaugagcuguccuauuggugaaguucccucuccauacaacucaagauuugagucagucgcuuggucagcaagugcuugucaugauggcaucaauuggcuaacaauuggaauuucuggcccagacaauggggcaguggcuguguuaaaguacaacggcauaauaacagacacuaucaagaguuggagaaacaauauauugagaacacaagagucugaaugugcauguguaaaugguucuugcuuuacuguaaugaccgauggaccaagugauggacaggccucauacaagaucuucagaauagaaaagggaaagauagucaaaucagucgaaaugaaugccccuaauuaucacuaugaggaaugcuccuguuauccugauucuagugaaaucacaugugugugcagggauaacuggcauggcucgaaccgaccgugggugucuuucaaccagaaucuggaauaucagauaggauacauaugcagugggauuuucggagacaauccacgcccuaaugauaagacaggcaguugugguccaguaucgucuaauggagcaaauggaguaaaaggauuuucauucaaauacggcaaugguguuuggauagggagaacuaaaagcauuaguucaagaaacgguuuugagaugauuugggauccgaacggauggacugggacagacaauaacuucucaauaaagcaagauaucguaggaauaaaugaguggucaggauauagcgggaguuuuguucagcauccagaacuaacagggcuggauuguauaagaccuugcuucuggguugaacuaaucagagggcgacccaaagagaacacaaucuggacuagcgggagcagcauauccuuuugugguguaaacagugacacuguggguuggucuuggccagacggugcugaguugccauuuaccauugacaaguaa

SEQ ID NO: 53419 - RNA, 1410 nt, Artificial Sequence
  derived and/or modified CDS sequence (wt) from neuraminidase__InfluenzaA__AEW25432
augaauccaaaccaaaagauaauaaccauugguucggucuguaugacaauuggaauggcuaacuuaauauuacaaauuggaaacauaaucucaauauggacuagccacucaauucaacuugggaaucaaaaucagauugaaacaugcaaucaaagcgucauuacuuaugaaaacaacacuuggguaaaucagacauauguuaacaucagcaacaccaacuuugcugcuggacagucagugguuuccgugaaauuagcgggcaauuccucucucugcccuguuaguggaugggcuauauacaguaaagacaacaguauaagaaucgguuccaagggggauguguuugucauaagggaaccauucauaucaugcucccccuuggaaugcagaaccuucuucuugacucaaggggccuugcuaaaugacaaacauuccaauggaaccauuaaagacaggagcccauaucgaacccuaaugagcuguccuauuggugaaguucccucuccauacaacucaagauuugagucagucgcuuggucagcaagugcuugucaugacggcaucaauuggcuaacaauuggaauuucuggcccagacaauggggcaguggcuguguuaaaguacaacggcauaauaacagacacuaucaagaguuggagaaacaauauauugagaacacaagagucugaaugugcauguguaaaugguucuugcuuuacuguaaugaccgauggaccaagugauggacaggccucauacaagaucuucagaauagaaaagggaaagauagucaaaucagucgaaaugaaugccccuaauuaucacuaugaggaaugcuccuguuauccugauucuagugaaaucacaugugugugcagggauaacuggcauggcucgaaucgaccgugggugucuuucaaccagaaucuggaauaucagauaggauacauaugcagugggauuuucggagacaauccacgcccuaaugauaagacaggcaguugugguccaguaucgucuaauggagcaaauggaguaaaaggauuuucauucaaauacggcaaugguguuuggauagggagaacuaaaagcauuaguucaagaaacgguuuugagaugauuugggauccgaacggauggacugggacagacaauaacuccucaauaaagcaagauaucguaggaauaaaugaguggucaggauauagcgggaguuuuguucagcauccagaacuaacagggcuggauuguauaagaccuugcuucuggguugaacuaaucagagggcgacccaaagagaacacaaucuggacuagcgggagcagcauauccuuuugugguauaaacagugacgcuguggguuggucuuggccagacggugcugaguugccauuuaccauugacaaguaa

SEQ ID NO: 53420 - RNA, 1410 nt, Artificial Sequence
  derived and/or modified CDS sequence (wt) from neuraminidase__InfluenzaA__AEW25436
augaauccaaaccaaaagauaauaaccauugguucggucuguaugacaauuggaauggcuaacuuaauauuacaaauuggaaacauaaucucaauauggauuagccacucaauucaacuugggaaucaaaaucagauugaaacaugcaaucaaagcaucauuacuuaugaaaacaacacuuggguaaaucagacauauguuaacaucagcaacaccaacuuugcugcuggacagucagugguuuccgugaaacuagcgggcaauuccucucucugcccuguuaguggaugggcuauauacaguaaagacaacaguauaagaaucgguuccaagggggauguguuugucauaagggaaccauucauaucaugcucccccuuggaaugcagaaccuucuucuugacucaaggggccuugcuaaaugacaaacauuccaauggaaccauuaaagacaggagcccauaucgaacccuaaugagcuguccuauuggugaaguucccucuccauacaacucaagauuugagucagucgcuuggucagcaagugcuugucaugauggcaucaauuggcuaacaauuggaauuucugggccagacaauggggcaguggcuguguuaaaguacaacggcauaauaacagacacuaucaagaguuggagaaacaauauauugagaacacaagagucugaaugugcauguguaaaugguucuugcuuuacuguaaugaccgauggaccaagugauggacaggccucauacaagaucuucagaauagaaaagggaaagauagucaaaucagucgaaaugaaugccccuaauuaucacuaugaggaaugcuccuguuauccugauucuagugaaaucacaugugugugcagggauaacuggcauggcucgaaucgaccgugggugucuuucaaccagaaucuggaauaucggauaggauacauaugcagugggauuuucggagacaauccacgcccuaaugauaagacaggcaguugugguccaguaucgucuaauggagcaaauggaguaaaaggauuuucauucaaauacggcaaugguguuuggauagggagaacuaaaagcauuaguucaagaaacgguuuugagaugauuugggauccgaacggauggacugggacagacaauaacuucucaauaaagcaagauaucguaggaacaaaugaguggucaggauauagcgggaguuuuguucagcauccagaacuaacagggcuggauuguauaagaccuugcuucuggguugaacuaaucagagggcgacccaaagagaacacaaucuggacuagcgggagcagcauauccuuuugugguguaaacagugacacuauggguuggucuuggccagacggugcugaguugccauuuaccauugacaaguaa

SEQ ID NO: 53421 - RNA, 1410 nt, Artificial Sequence; identical to SEQ ID NO: 50284
  derived and/or modified CDS sequence (wt) from neuraminidase__InfluenzaA__AEW25440

SEQ ID NO: 53422 - RNA, 1410 nt, Artificial Sequence
  derived and/or modified CDS sequence (wt) from neuraminidase__InfluenzaA__AEW25448
augaauccaaaccaaaagauaauaaccauugguucggucuguaugacaauuggaauggcuaacuuaauauuacaaauuggaaacauaaucucaauauggauuagccacucaauucaacuugggaaucaaaaucagauugaaacaugcaaucaaagcgucauuacuuaugaaaacaacacuuggguaaaucagacauauguuaacaucagcaacaccaacuuugcugcuggacagucagugguuuccgugaaauuagcgggcaauuccucucucugcccuguuaguggaugggcuauauacaguaaagacaacaguauaagaaucgguuccaagggggauguguuugucauaagggaaccauucauaucaugcucccccuuggaaugcagaaccuucuucuugacucaaggggccuugcuaaaugacaaacauuccaauggaaccauuaaagacaggagcccauaucgaacccuaaugagcuguccuauuggugaaguucccucuccauacaacucaagauuugagucagucgcuuggucagcaagugcuugucaugauggcaucaauuggcuaacaauuggaauuucuggcccagacaauggggcaguggcuguguuaaaguacaacggcauaauaacagacacuaucaagaguuggagaaacaauauauugagaacacaagagucugaaugugcauguguaaaugguucuugcuuuacuguaaugaccgauggaccaagugauggacaggccucauacaagaucuucagaauagaaaagggaaagauagucaaaucagucgaaaugaaugccccuaauuaucacuaugaggaaugcuccuguuauccugauucuagugaaaucacaugugugugcagggauaacuggcauggcucgaaucgaccgugggugucuuucaaccagaaucuggaauaucagauaggguacauaugcagugggauuuucggagacaauccacgcccuaaugauaagacaggcaguugugguccaguaucgucuaauggagcaaauggaguaaaaggauuuucauucaaauacggcaaugguguuuggauagggagaacuaaaagcauuaguucaagaaacgguuuugagaugauuugggauccgaacggauggacugggacagacaauaacuucucaauaaagcaagauaucguaggaauaaaugaguggucaggauauagcgggaguuuuguucagcauccagaacuaacagggcuggauuguauaagaccuugcuucuggguugaacuaaucagagggcgacccaaagagaacacaaucuggacuagcgggagcagcauauccuuuugcgguguaaacagugacacuguggguuggucuuggccagacggugcugaguugccauuuaccacugacaaguaa

SEQ ID NO: 53423 - RNA, 1410 nt, Artificial Sequence
  derived and/or modified CDS sequence (wt) from neuraminidase__InfluenzaA__AEW25456
augaauccaaaccaaaagauaauaaccauugguucggucuguaugacaauuggaauggcuaacuuaauauuacaaauuggaaacauaaucucaauauggauuagccacucaauucaacuugggaaucaaaaucagauugaaacaugcaaucaaagcgucauuacuuaugaaaacaacacuuggguaaaucagacauauguuaacaucagcaacaccaacuuugcugcuggacagucagugguuuccgugaaauuagcgggcaauuccucucucugcccuguuaguggaugggcuauauacaguaaagacaacaguauaagaaucgguuccaagggggauguguuugucauaagggaaccauucauaucaugcucccccuuggaaugcagaaccuucuucuugacucaaggggccuuguuaaaugacaaacauuccaauggaaccauuaaagacaggagcccauaucgaacccuaaugagcuguccuauuggugaaguucccucuccauacaacucaagauuugagucagucgcuuggucagcaagugcuugucaugauggcaucaauuggcuaacaauuggaauuucuggcccagacaauggggcaguggcuguguuaaaguacaacggcauaauaacagacacuaucaagaguuggagaaacaauauauugagaacacaagagucugaaugugcauguguaaaugguucuugcuuuacuguaaugaccgauggaccaagugauggacaggccucauacaagaucuucagaauagaaaagggaaagauagucaaaucagucgaaaugaaugcccccaauuaucacuaugaggaaugcuccugcuauccugauucuagcgaaaucacaugugugugcagggauaacuggcauggcucgaaucgaccgugggugucuuucaaccagaaucuggaauaucagauaggguacauaugcagugggauuuucggagacaauccacgcccuaaugauaagacaggcaguugugguccaguaucgucuaauggagcaaauggaguaaaaggauuuucauucaaauacggcaaugguguuuggauagggagaacuaaaagcauuaguucaagaaacgguuuugagaugauuugggauccgaacggauggacugggacagacaauaacuucucaauaaagcaagauaucguaggaauaaaugaguggucaggauauagcgggaguuuuguucagcauccagaacuaacagggcuggauuguauaagaccuugcuucuggguugaacuaaucagagggcgacccaaagagaacacaaucuggacuagcgggagcagcauauccuuuugcgguguaaacagugacacuguggguuggucuuggccagacggugcugaguugccauuuaccauugacaaguaa

SEQ ID NO: 53424 - RNA, 1410 nt, Artificial Sequence
  derived and/or modified CDS sequence (wt) from neuraminidase__InfluenzaA__AEW25464
augaauccaaaccaaaagauaauaaccauugguucggucuguaugacaauuggaauggcuaacuuaauauuacaaauuggaaacauaaucucaauauggauuagccacucaauucaacuugggaaucaaaaucagauugaaacaugcaaucaaagcgucauuacuuaugaaaacaacacuuggguaaaucagacauauguuaacaucagcaacaccaacuuugcugcuggacagucagugguuuccgugaaauuagcgggcaauuccucucucugcccuguuaguggaugggcuauauacaguaaagacaacaguauaagaaucgguuccaagggggauguguuugucauaagggaaccauucauaucaugcucccccuuggaaugcagaaccuucuucuugacucaaggggccuugcuaaaugacaaacauuccaauggaaccauuaaagacaggagcccauaucgaacccuaaugagcuguccuauuggugaaguucccucuccauacaacucaagauuugagucagucgcuuggucagcaagugcuugucaugauggcaucaauuggcuaacaauuggaauuucuggcccagacaauggggcaguggcuguguuaaaguacaacggcauaauaacagacacuaucaagaguuggagaaacaauauauugagaacacaagagucugaaugugcauguguaaaugguucuugcuuuacuguaaugaccgauggaccaagugauggacaggccucauacaagaucuucagaauagaaaagggaaagauagucaaaucagucgaacugaaugccccuaauuaucacuaugaggaaugcuccuguuauccugauucuagugaaaucacaugugugugcagggauaacuggcauggcucgaaucgaccgugggugucuuucaaccagaaucuggaauaucagauaggguacauaugcagugggauuuucggagacaauccacgcccuaaugauaagacaggcaguugugguccaguaucgucuaauggagcaaauggaguaaaaggauuuucauucaaauacggcaaugguguuuggauagggagaacuaaaagcauuaguucaagaaacgguuuugagaugauuugggauccgaacggauggacugggacagacaauaacuucucaauaaagcaagauaucguaggaauaaaugaguggucaggauauagcgggaguuuuguucagcauccagaacuaacagggcuggauuguauaagaccuugcuucuggguugaacuaaucagagggcgacccaaagagaacacaaucuggacuagcgggagcagcauauccuuuugugguguaaacagugacacuguggguuggucuuggccagacggugcugagcugccauuuaccauugacaaguaa

SEQ ID NO: 53425 - RNA, 1410 nt, Artificial Sequence
  derived and/or modified CDS sequence (wt) from neuraminidase__InfluenzaA__AEW25474
augaauccaaaccaaaagauaauaaccauugguucgguuuguaugacaauuggaauggcuaacuuaauauuacaaauuggaaacauaaucucaauauggauuagccacucaauucaacuugggaaucaaaaucagauugaaacaugcaaucaaagcgucauuacuuaugaaaacaacacuuggguaaaucagacauauguuaacaucagcaacaccaacuuugcugcuggacagucagugguuuccgugaaauuagcgggcaauuccucucucugcccuguuaguggaugggcuauauacaguaaagacaacaguauaagaaucgguuccaagggggauguguuugucauaagggaaccauucauaucaugcucccccuuggaaugcagaacuuucuucuugacucaaggggccuugcuaaaugacaaacauuccaauggaaccauuaaagacaggagcccauaucgaacccuaaugagcuguccuauuggugaaguucccucuccauacaacucaagauuugagucagucgcuuggucagcaagugcuugucaugauggcaucaauuggcuaacaauuggaauuucuggcccagacaauggggcaguggcuguguuaaaguacaacggcauaauaacagacacuaucaagaguuggagaaacaauauauugagaacacaagagucugaaugugcauguguaaaugguucuugcuuuacuguaaugaccgauggaccaagugauggacaggccucauacaagaucuucagaauagaaaagggaaagauagucaaaucagucgaaaugaaugccccuaauuaucacuaugaggaaugcuccuguuauccugauucuagugaaaucacaugugugugcagggauaacuggcauggcucgaaucgaccgugggugucuuucaaccagaaucuggaauaucagauaggguacauaugcagugggauuuucggagacaauccacgcccuaaugauaagacaggcaguugugguccaguaucgucuaauggagcaaauggaguaaaaggauuuucauucaaauacggcaaugguguuuggauagggagaacuaaaagcauuaguucaagaaacgguuuugagaugauuugggauccgaacggauggacugggacagacaauaacuucucaauaaagcaagauaucguaggaauaaaugaguggucaggauauagcgggaguuuuguucagcauccagaacuaacagggcuggauuguauaagaccuugcuucuggguugaacuaaucagagggcgacccaaagagaacacaaucuggacuagcgggagcagcauauccuuuugcgguguaaacagugacacuguggguuggucuuggccagacggugcugaguugccaucuaccauugacaaguaa

SEQ ID NO: 53426 - RNA, 1410 nt, Artificial Sequence
  derived and/or modified CDS sequence (wt) from neuraminidase__InfluenzaA__AEW25484
augaauccaaaccaaaagauaauaaccauugguucggucuguaugacaauuggaauggcuaacuuaauauuacaaauuggaaacauaaucucaauauggauuagccacucaauucaacuugggaaucaaaaucagauugaaacaugcaaucaaagcgucauuacuuaugaaaacaacacuuggauaaaucagacauauguuaacaucagcaacaccaacuuugcugcuggacagucagugguuuccgugaaauuagcgggcaauuccucucucugcccuguuaguggaugggcuauauacaguaaagacaacaguauaagaaucgguuccaagggggauguguuugucauaagggaaccauucauaucaugcucccacuuggaaugcagaaccuucuucuugacucaaggggccuugcuaaaugacaaacauuccaauggaaccauuaaagacaggagcccguaucgaacccuaaugagcuguccuauuggugaaguucccucuccauacaacucaagauuugagucagucgcuuggucagcaagugcuugucaugauggcaucaauuggcuaacaauuggaauuucuggcccagaccauggggcaguggcuguguuaaaguacaacggcauaauaacagacacuaucaagaguuggagaaacaauauauugagaacacaagagucugaaugugcauguguaaaugguucuugcuuuacuguaaugaccgauggaccaagugauggacaggccucauacaagaucuucagaauagaaaagggaaagauagucaaaucagucgaaaugaaugccccuaauuaucacuaugaggaaugcuccuguuauccugauucuagugaaaucacaugugugugcagggauaacuggcauggcucgaaucgaccgugggugucuuucaaccagaaucuggaauaucagauaggguacauaugcagugggauuuucggagacaauccacgcccuaaugauaagacaggcaguugugguccaguaucgucuaauggagcaaauggaguaaaaggauuuucauucaaauacggcaaugguguuuggauagggagaacuaaaagcauuaguucaagaaacgguuuugagaugauuugggauccgaacggauggacugggacagacaauaacuucucaauaaagcaagauaucguaggaauaaaugaguggucaggauauagcgggaguuuuguucagcauccagaacuaacagggcuggauuguauaagaccuugcuucuggguugaacuaaucagagggcgacccaaagagaacacaaucuggacuagcgggagcagcauauccuuuugcgguguaaacagugacacuguggguuggucuuggccagacggugcugaguugccauuuaccauugacaaguaa

SEQ ID NO: 53427 - RNA, 1410 nt, Artificial Sequence
  derived and/or modified CDS sequence (wt) from neuraminidase__InfluenzaA__AEW25494
augaauccaaaccaaaagauaauaaccauugguucggucuguaugacaauuggaauggcuaacuuaauauuacaaauuggaaacauaaucucaauauggauuagccacucaauucaacuugggaaucaaaaucagauugaaacaugcaaucaaagcgucauuacuuaugaaaacaacacuuggguaaaucagacauauguuaacaucagcaacaccaacuuugcugcuggacagucagugguuuccgugaaauuagcgggcaauuccucucucugcccuguuaguggaugggcuauauacaguaaagacaacaguauaagaaucgguuccaagggggauguguuugucauaagggaaccauucauaucaugcucccccuuggaaugcagaaccuucuucuugacucaaggggccuugcuaaaugacaaacauuccaauggaaccauuaaagacaggagcccauaucgaacccuaaugagcuguccuauuggugaaguucccucuccauacaacucaagauuugagucagucgcuuggucagcaagugcuugucaugauggcaucaauuggcuaacaauuggaauuucuggcccagacaauggggcaguggcuguguuaaaguacaacggcauaauaacagacucuaucaagaguuggagaaacaauauauugagaacacaagagucugaaugugcauguguaaaugguucuugcuuuacuguaaugaccgauggaccaagugauggacaggccucauacaagaucuucagaauagaaaagggaaagauagucaaaucagucgaaaugaaugccccuaauuaucacuaugaggaaugcuccuguuauccugauucuagugaaaucacaugugugugcagggauaacuggcauggcucgaaucgaccgugggugucuuucaaccagaaucuggaauaucagauaggguacauaugcagugggacuuucggagacaauccacgcccuaaugauaagacaggcaguugugguccaguaucgucuaauggagcaaauggaguaaaaggauuuucauucaaauacggcaaugguguuuggauagggagaacuaaaagcauuaguucaagaaacgguuuugagaugauuugggauccgaacggauggacugggacagacaauaacuucucaauaaagcaagauaucguaggaauaaaugaguggucaggauauagcgggaguuuuguucagcauccagaacuaacagggcuggauuguauaagaccuugcuucuggguugaacuaaucagagggcgacccaaagagaacacaaucuggacuagcgggagcagcauauccuuuugugguguaaacagugacacuguggguuggucuuggccagacggugcugaguugccauuuaccauugacaaguaa

SEQ ID NO: 53428 - RNA, 1410 nt, Artificial Sequence
  derived and/or modified CDS sequence (wt) from neuraminidase__InfluenzaA__AEW25503
augaauccaaaccaaaagauaauaaccauugguucggucuguaugacaauuggaauggcuaacuuaauauuacaaauuggaaacauaaucucaauauggauuagccacucaauucaacuugggaaucaaaaucagauugaaacaugcaaucaaagcgucauuacuuaugaaaacaacacuuggguaaaucagacauauguuaacaucagcaacaccaacuuugcugcuggacagucagugguuuccgugaaauuagcgggcaauuccucucucugcccuguuaguggaugggcuauauacaguaaagacaacaguauaagaaucgguuccaagggggauguguuugucauaagggagccauucauaucaugcucccccuuggaaugcagaaccuucuucuugacucaaggggccuugcuaaaugacaaacauuccaauggaaccauuaaagacaggagcccauaucgaacccuaaugagcuguccuauuggugaaguucccucuccauacaacucaagauuugagucagucgcuuggucagcaagugcuugucaugauggcaucaauuggcuaacaauuggaauuucuggcccagacaauggggcaguggcuguguuaaaguacaacggcauaauaacagacacuaucaagaguuggagaaacaauauauugagaacacaagagucugaaugugcauguguaaaugguucuugcuuuacuguaaugaccgauggaccaagugauggacaggccucauacaagaucuucagaauagaaaagggaaagauagucaaaucagucgaaaugaaugccccuaauuaucacuaugaggaaugcuccuguuauccugauucuagugaaaucacaugugugugcagggauaacuggcauggcucgaaucgaccgugggugucuuucaaccagaaucuggaauaucagauaggauacauaugcagugggauuuucggagacaauccacgcccuaaugauaagacaggcaguugugguccaguaucgucuaauggagcaaaugggguaaaaggauuuucauucaaauacggcaauggugcuuggauagggagaacuaaaagcauuaguucaagaaacgguuuugagaugauuugggauccgaacggauggacugggacagacaauaacuucucaauaaagcaagauaucguaggaauaaaugaguggucaggauauagcgggaguuuuguucagcauccagaacuaacagggcuggauuguauaagaccuugcuucuggguugaacuaaucagagggcgacccaaagagaacacaaucuggacuagcgggagcagcauauccuuuugugguguaaacagugacacuguggguuggucuuggccagacggugcugaguugccauuuaccauugacaaguaa

SEQ ID NO: 53429 - RNA, 1410 nt, Artificial Sequence
  derived and/or modified CDS sequence (wt) from neuraminidase__InfluenzaA__AEW25511
augaauccaaaccaaaagauaauaaccauugguucggucuguaugacaauuggaauggcuaacuuaauauuacaaauuggaaacauaaucucaauauggauuagccacucaauucaacuugggaaucaaaaucagauugaaacaugcaaucaaagcgucauuacuuaugaaaacaacacuuggguaaaucauacauauguuaacaucagcaacaccaacuuugcugcuggacagucagugguuuccgugaaauuagcgggcaauuccucucucugcccuguuaguggaugggcuauauacaguaaagacaacaguauaagaaucgguuccaaggggguuguguuugucauaagggaaccauucauaucaugcucccccuuggaaugcagaaccuucuucuugacucaaggggccuugcuaaaugacaaacauuccaauggaaccauuaaagacaggagcccauaucgaacccuaaugagcuguccuauuggugaaguucccucuccauacaacucaagauuugagucagucgcuuggucagcaagugcuugucaugauggcaucaauuggcuaacaauuggaauuucuggcccagacaauggggcaguggcuguguuaaaguacaacggcauaauaacagauacuaucaagaguuggagaaacaauauauugagaacacaagagucugaaugugcauguguaaaugguucuugcuuuacuguaaugaccgauggaccaagugauggacaggccucauacaagaucuucagaauagaaaagggaaagauagucaaaucagucgaaaugaaugccccuaauuaucacuaugaggaaugcuccuguuauccugauucuagugaaaucacaugugugugcagggauaacuggcauggcucgaaucgaccgugggugucuuucaaccagaaucuggaauaucagauaggauacauaugcagugggauuuucggagacaauccacgcccuaaugauaagacaggcaguugugguccaguaucguccaauggagcaaauggaguaaaaggauuuucauucaaauacggcaaugguguuuggauagggagaacuaaaagcauuaguucaagaaacgguuuugagaugauuugggauccgaacggauggacugggacagacaauaacuucucaauaaagcaagauaucguaggaauaaaugaguggucaggauauagcgggaguuuuguucagcauccagaacuaacagggcuggauuguauaagaccuugcuucuggguugaacuaaucagagggcgacccaaagagaacacaaucuggacuagcgggagcagcauauccuuuugugguguaaacagugacacuguggguuggucuuggccagacggugcugaguugccauuuaccauugacaaguaa

SEQ ID NO: 53430 - RNA, 1410 nt, Artificial Sequence
  derived and/or modified CDS sequence (wt) from neuraminidase__InfluenzaA__AEW25530
augaauccaaaccaaaagauaauaaccauugguucggucuguaugacaauuggaauggcuaacuuaauauuacaaauuggaaacauaaucucaauauggauuagccacucaauucaacuugggaaucaaaaucagauugaaacaugcaaucaaagcgucauuacuuaugaaaacaacacuuggguaaaucauacauauguuaacaucagcaacaccaacuuugcugcuggacagucagugguuuccgugaaauuagcgggcaauuccucucucugcccuguuaguggaugggcuauauacaguaaagacaacaguauaagaaucgguuccaagggggauguguuugucauaagggaaccauucauaucaugcucccccuuggaaugcagaaccuucuucuugacucaaggggccuugcuaaaugacaaacauuccaauggaaccauuaaagacaggagcccauaucgaacccuaaugagcuguccuauuggugaaguucccucuccauacaacucaagauuugagucagucgcuuggucagcaagugcuugucaugauggcaucaauuggcuaacaauuggaauuucuggcccagacaauggggcaguggcuguguuaaaguacaacggcauaauaacagacacuaucaagaguuggagauacaauauauugagaacacaagagucugaaugugcauguguaaaugguucuugcuuuacuguaaugaccgauggaccaagugauggacaggccucauacaagaucuucagaauagaaaagggaaagauagucaaaucagucgaaaugaaugccccuaauuaucacuaugaggaaugcuccuguuauccugauucuagugaaaucacaugugugugcagggauaacuggcauggcucgaaucgaccgugggugucuuucaaccagaaucuggaauaucagauaggauacauaugcagugggauuuucggagacaauccacgcccuaaugauaagacaggcaguugugguccaguaucgucuaauggagaaaauggaguaaaaggauuuucauucaaauacggcaaugguguuuggauagggagaacuaaaagcauuaguucaagaaacgguuuugagaugauuugggauccgaacggauggacugggacagacaauaacuucucaauaaagcaagauaucguaggaauaaaugaguggucaggauauagcgggaguuuuguucagcauccagaacuaacagggcuggauuguauaagaccuugcuucuggguugaacuaaucagagggcgacccaaagagaacacaaucuggacuagcgggagcagcauauccuuuugugguguaaacagugacacuguggguuggucuuggccagacggugcugaguugccauuuaccauugacaaguaa

SEQ ID NO: 53431 - RNA, 1410 nt, Artificial Sequence
  derived and/or modified CDS sequence (wt) from neuraminidase__InfluenzaA__AEW25537
augaauccaaaccaaaagauaauaaccauugguucggucuguaugacaauuggaauggcuaacuuaauauuacaaauuggaaacauaaucucaauauggauuagccacucaauucaacuugggaaucaaaaucagauugaaacaugcaaucaaagcgucauuacuuaugaaaacaacacuuggguaaaucagacauauguuaacaucagcaacaccaacuuugcugcuggacagucagugguuuccgugaaauuagcgggcaauuccucucucugcccuguuaguggaugggcuauauacaguaaagacaacaguauaagaaucgguuccaagggggauguguuugucauaagggaaccauucauaucaugcucccccuuggaaugcagaaccuucuucuugacucaaggggccuugcuaaaugacaaacauuccaauggaaccauuaaagacaggagcccauaucgaacccuaaugagcuguccuauuggugaaguucccucuccauacaacucaagauuugagucagucgcuuggucagcaagugcuugucaugauggcaucaauuggcuaacaauuggaauuucuggcccagacaauggggcaguggcuguguuaaaguacaacggcauaauaacagacacuaucaagaguuggagaaacaauauauugagaacacaagagucugaaugugcauguguaaaugguucuugcuuuacuguaaugaccgauggaccaagugauggacaggccucauacaagaucuucagaauagaaaagggaaagauagucaaaucagucgaaaugaaugccccuaaucaucacuaugaggaaugcuccuguuauccugauucuagugaaaucacaugugugugcagggauaacuggcauggcucgaaucgaccgugggugucuuucaaccagaaucuggaauaucagauaggguacauaugcagugggauuuucggagacaauccacgcccuaaugauaagacaggcaguugugguccaguaucgucuaauggagcaaauggaguaaaaggauuuucauucaaauacggcaaugguguuuggauagggagaacuaaaagcauuaguucaagaaacgguuuugagaugauuugggauccgaacggauggacugggacagacaauaacuucucaauaaagcaagauaucguaggaauaaaugaguggucaggauauagcgggaguuuuguucagcauccagaacuaacagggcuggauuguauaagaccuugcuucuggguugaacuaaucagagggcgacccaaagagaacacaaucuggacuagcgggagcagcauauccuuuugugguguaaacagugacacuguggguuggucuuggccagacggugcugaguugccauuuaccauugacaaguaa

SEQ ID NO: 53432 - RNA, 1410 nt, Artificial Sequence; identical to SEQ ID NO: 53279
  derived and/or modified CDS sequence (wt) from neuraminidase__InfluenzaA__AEW25547

SEQ ID NO: 53433 - RNA, 1410 nt, Artificial Sequence; identical to SEQ ID NO: 53279
  derived and/or modified CDS sequence (wt) from neuraminidase__InfluenzaA__AEW25556

SEQ ID NO: 53434 - RNA, 1410 nt, Artificial Sequence
  derived and/or modified CDS sequence (wt) from neuraminidase__InfluenzaA__AEW25566
augaauccaaaccaaaagauaauaaccauugguucggucuguaugacaauuggaauggcuaacuuaauauuacaaauuggaaacauaaucucaauauggauuagccacucaauucaacuugggaaucaaaaucagauugaaacaugcaaucaaagcgucauuacuuaugaaaacaacacuuggguaaaucagacauauguuaacaucagcaacaccaacuuugcugcuggacagucagugguuuccgugaaauuagcgggcaauuccucucucugcccuguuaguggaugggcuauauacaguaaagacaacaguauaagaaucgguuccaagggggauguguuugucauaagggaaccauucauaucaugcucccccuuggaaugcagaaccuucuucuugacucaaggggccuugcuaaaugacaaacauuccaauggaaccauuaaagacaggagcccauaucgaacccuaaugagcuguccuauuggugaaguucccucuccauacaacucaagauuugagucagucgcuuggucagcaagugcuugucaugauggcaucaauuggcuaacaauuggaauuucuggcccagacaauggggcaguggcuguguuaaaguacaacggcauaauaacagacacuaucaagaguuggagaaacaauauauugagaacacaagagucugaaugugcauguguaaaugguucuugcuuuacuguaaugaccgauggaccaagugauggacaggccucauacaagaucuucagaauagaaaagggaaagauagucaaaucagucgaaaugaaugccccuaauuaucacuaugaggaaugcuccuguuauccugauucuagugaaaucacaugugugugcagggauaacuggcauggcucgaaucgaccgugggugucuuucaaccagaaucuggaauaucagauaggauacauaugcagugggauuuucggagacaauccacgcccuaaugauaagacaggcaguugugguccaguaucgucuaauggagcaaauggaguaaaaggauuuucauucaaauacggcaaugguguuuggauagggagaacuaaaagcauuaguucaagaaacgguuuugagaugauuugggauccgaacggauggacugggacagacaauaacuucucaauaaagcaagauaucguaggaauaaaugaguggucaggauauagcgggaguuuuguucagcauccagaacuaacagggcuggauuguauaagaccuuguuucuggguugaacuaaucagagggcgacccaaagagaacacaaucuggacuagcgggagcagcauauccuuuugugguguaaacagugacacuguggguuggucuuggccagacggugcugaguugccauuuaccauugacaaguaa

SEQ ID NO: 53435 - RNA, 1410 nt, Artificial Sequence
  derived and/or modified CDS sequence (wt) from neuraminidase__InfluenzaA__AEW25584
augaauccaaaccaaaagauaauaaccauugguucggucuguaugacaauuggaauggcuaacuuaauauuacaaauuggaaacauaaucucaauauggauuagccacucaauucaacuugggaaucaaaaucagauugaaacaugcaaucaaagcgucauuacuuaugaaaacaacacuuggguaaaucagacauauguuaacaucagcaacaccaacuuugcugcuggacagucagugguuuccgugaaauuagcgggcaauuccucucucugcccuguuaguggaugggcuauauacaguaaagacaacaguauaagaaucgguuccaagggggauguguuugucauaagggaaccauucauaucaugcucccccuuggaaugcagaaccuucuucuugacucaaggggccuugcuaaaugacaaacauuccaauggaaccauuaaagacaggagcccauaucgaacccuaaugagcuguccuauuggugaaguucccucuccauacaacucaagauuugagucagucgcuuggucagcaagugcuugucaugauggcaucaauuggcuaacaauuggaauuucuggcccagacaauggggcaguggcuguguuaaaguacaacggcauaauaacagacacuaucaagaguuggagaaacaauauauugagaacacaagagucugaaugugcauguguaaaugguucuugcuuuacuguaaugaccgauggaccaagugauggacaggccucauacaagaucuucagaauagaaaagggaaagauagucaaaucagucgaaaugaaugccccuaauuaucacuaugaggaaugcuccuguuauccugauucuagugaaaucacaugugugugcagggauaacuggcauggcucgaaucgaccgugggugucuuucaaccagaaucuggaauaucagauaggguacauaugcagugggauuuucggagacaauccacgcccuaaugauaagacaggcaguugugguccaguaucgucuaauggagcaaauggaguaaaaggauuuucauucaaauacggcaaugguguuuggauagggagaacuaaaagcauuaguucaagaaacgguuuugagaugauuugggauccgaacggauggacugggacagacaauaacuucucaauaaagcaagguaucguaggaauaaaugaguggucaggauauggcgggaguuuuguucagcauccagaacuaacagggcuggauuguauaagaccuugcuucuggguugaacuaaucagagggcgacccaaagagaacacaaucuggacuagcgggagcagcauauccuuuugugguguaaacagugacacuguggguuggucuuggccagacggugcugaguugccauuuaccauugacaaguaa

SEQ ID NO: 53436 - RNA, 1410 nt, Artificial Sequence
  derived and/or modified CDS sequence (wt) from neuraminidase__InfluenzaA__AEW25592
augaauccaaaccaaaagauaauaaccauugguucggucuguaugacaauuggaauggcuaaccuaauauuacaaauuggaaacauaaucucaauauggauuagccacucaauucaacuugggaaucaaaaucagauugaaacaugcaaucaaagcgucauuacuuaugaaaacaacacuuggguaaaucagacauauguuaacaucagcaacaccaacuuugcugcuggacagucagugguuuccgugaaauuagcgggcaauuccucucucugcccuguuagcggaugggcuauauacaguaaagacaacaguauaagaaucgguuccaagggggauguguuugucauaagggaaccauucauaucaugcucccccuuggaaugcagaaccuucuucuugacucaaggggccuugcuaaaugacaaacauuccaauggaaccauuaaagacaggagcccauaucgaacccuaaugagcuguccuauuggugaaguucccucuccauacaacucaagauuugagucagucgcuuggucagcaagugcuugucaugauggcaucaauuggcuaacaauuggaauuucuggcccagacaauggggcaguggcuguguuaaaguacaacggcauaauaacagacacuaucaagaguuggagaaacaauauauugagaacacaagagucugaaugugcauguguaaaugguucuugcuuuacuguaaugaccgauggaccaagugauggacaggccucauacaagaucuucagaauagaaaagggaaagauagucaaaucagucgaaaugaaugccccuaauuaucacuaugaggaaugcuccuguuauccugauucuagugaaaucacaugugugugcagggauaacuggcauggcucgaaucgaccgugggugucuuucaaccagaaucuggaauaucagauaggauacauaugcagugggauuuucggagacaauccacgcccuaaugauaagacaggcaguugugguccaguaucgucuaauggagcaaauggaguaaaaggauuuucauucaaauacggcaaugguguuuggauagggagaacuaaaagcauuaguucaagaaacgguuuugagaugauuugggauccgaacggauggacugggacagacaauaacuucucaauaaagcaagauaucguaggaauaaaugaguggucaggauauagcgggaguuuuguucagcauccagaacuaacagggcuggauuguauaagaccuugcuucuggguugaacuaaucagagggcgacccaaagagaacacaaucuggacuagcgggagcagcauauccuuuugcgguguaaacagugacacuguggguuggucuuggccagacggugcugaguugccauuuaccauugacaaguaa

SEQ ID NO: 53437 - RNA, 1410 nt, Artificial Sequence
  derived and/or modified CDS sequence (wt) from neuraminidase__InfluenzaA__AEW25602
augaauccaaaccaaaagauaauaaccauugguucggucuguaugacaauuggaauggcuaacuuaauauuacaaauuggaaacauaaucucaauauggauuagccacucaauucaacuugggaaucaaaaucagauugaaacaugcaaucaaagcgucauuacuuaugaaaacaacacuuggguaaaucagacauauguuaacaucagcaacaccaacuuugcugcuggacagucagugguuucagugaaauuagcgggcaauuccucucucugcccuguuaguggaugggcuauauacaguaaagacaacaguauaagaaucgguuccaagggggauguguuugucauaagggaaccauucauaucaugcucccccuuggaaugcagaaccuucuucuugacucaaggggccuugcuaaaugacaaacauuccaauggaaccauuaaagacaggagcccauaucgaacccuaaugagcuguccuauuggugaaguucccucuccauacaacucaagauuugagucagucgcuuggucagcaagugcuugucaugauggcaucaauuggcuaacaauuggaauuucuggcccagacaauggggcaguggcuguguuaaaguacaacggcauaauaacagacacuaucaagaguuggagaaacaauauauugagaacacaagagucugaaugugcauguguaaaugguucuugcuuuacuguaaugaccgauggaccaagugauggacaggccucauacaagaucuucagaauagaaaagggaaagauagucaaaucagucgaaaugaaugccccuaauuaucacuaugaggaaugcuccuguuauccugauucuagugaaaucacaugugugugcagggauaacuggcauggcucgaaucgaccgugggugucuuucaaccagaaucuggaauaucagauaggauacauaugcagugggauuuucggagacaauccacgcccuaaugauaagacaggcaguugugguccaguaucgucuaauggagcaaauggaguaaaaggauuuucauucaaauacggcaaugguguuuggauagggagaacuaaaagcauuaguucaagaaacgguuuugagaugauuugggauccgaacggauggacuggaacagacaaaaacuucucaauaaagcaagauaucguaggaauaaaugaguggucaggauauagcgggaguuuuguucagcauccagaacuaacagggcuggauuguauaagaccuugcuucuggguugaacuaaucagagggcgacccaaagagaacacaaucuggacuagcgggagcagcauauccuuuuguggugugaacagugacacuguggguuggucuuggccagacggugcugaguugccauuuaccauugacaaguaa

SEQ ID NO: 53438 - RNA, 1410 nt, Artificial Sequence
  derived and/or modified CDS sequence (wt) from neuraminidase__InfluenzaA__AEW25612
augaauccaaaccaaaagauaauaaccauugguucggucuguaugacaauuggaauggcuaacuuaauauuacaaauuggaaacauaaucucaauauggauuagccacucaauucaacuugggaaucaaaaucagauugaaacaugcaaucaaagcgucauuacuuaugaaaacaacacuuggguaaaucagacauauguuaacaucagcaacaccaacuuugcugcuggacagucagugguuuccgugaaauuagcgggcaauuccucucucugcccuguuaguggaugggcuauauacaguaaagacaacaguauaagaaucgguuccaagggggauguguuugucauaagggaaccauucauaucaugcucccccuuggaaugcagaaccuucuucuugacucaaggggccuugcuaaaugacaaacauuccaauggaaccauuaaagacaggagcccauaucgaacccuaaugagcuguccuauuggugaaguucccucuccauacaacucaagauuugagucagucgcuuggucagcaagugcuugucaugauggcaucaauuggcuaacaauuggaauuucuggcccagacaauggggcaguggcuguguuaaaguacaacggcauaauaacagacacuaucaagaguuggagaaacaauauauugagaacacaagagucugaaugugcauguguaaaugguucuugcuuuacuguaaugaccgauggaccaagugauagacaggccucauacaagaucuucagaauagaaaagggaaagauagucaaaucagucgaaaugaaugccccuaauuaucacuaugaggaaugcuccuguuauccugauucuagugaaaucacaugugugugcagggauaacuggcauggcucgaaucgaccgugggugucuuucaaccagaaucuggaauaucagauaggguacauaugcagugggauuuucggagacaauccacgcccuaaugauaagacaggcaguugugguccaguaucgucuaauggagcaaauggaguaaaaggauuuucauucaaauacggcaaugguguuuggauagggagaacuaaaagcauuaguucaagaaacgguuuugagaugauuugggauccgaacggauggacugggacagacaauaacuucucaauaaagcaagauaucguaggaauaaaugaguggucaggauauagcgggaguuuuguucagcauccagaacuaacagggcuggauuguauaagaccuugcuucuggguugaacuaaucagagggcgacccaaagagaacacaaucuggacuagcgggagcagcauauccuuuugugguguaaacagugacacuguggguuggucuuggccagacggugcugaguugccauuuaccauugacaaguaa

SEQ ID NO: 53439 - RNA, 1410 nt, Artificial Sequence
  derived and/or modified CDS sequence (wt) from neuraminidase__InfluenzaA__AEW25622
augaauccaaaccaaaagauaauaaccauugguucggucuguaugacaauuggaauggcuaacuuaauauuacaaauuggaaacauaaucucaauauggauuagccacucaauucaacuugggaaucaaaaucagauugaaacaugcaaucaaagcgucauuacuuaugaaaacaacacuuggguaaaucagacauauguuaacaucagcaacaccaacuuugcugcuggacagucagugguuuccgugaaauuagcgggcaauuccucucucugcccuguuaguggaugggcuauauacaguaaagacaacaguauaagaaucgguuccaagggggauguguuugucauaagggaaccauucauaucaugcucccccuuggaaugcagaaccuucuucuugacucaaggggccuugcuaaaugacaaacauuccaauggaaccauuaaagacaggagcccauaucgaacccuaaugagcuguccuauuggugaaguucccucuccauacaacucaagauuugagucagucgcuuggucagcaagugcuugucaugauggcaucaauuggcuaacaauuggaauuucuggcccagacaauggggcaguggcuguguuaaaguacaacggcauaauaacagacacuaucaagaguuggagaaacaauauauugagaacacaagagucugaaugugcauguguaaaugguucuugcuuuacuguaaugaccgauggaccaagugauggacaggccucauacaagaucuucagaauagaaaagggaaagauagucaaaucagucgaaaugaaugccccuaauuaucacuaugaggaaugcuccuguuauccugauucuagugaaaucacaugugugugcagggauaacuggcauggcucgaaucgaccgugggugucuuucaaccagaaucuggaauaucagauaggguacauaugcagugggauuuucggagacaauccacgcccuaaugauaagacaggcaguugugguccaguaucgucuaauggagcaaauggaguaaaaggauuuucauucaaauacggcaaugguguuuggauagggagaacuaaaagcauuaguucaagaaacgguuuugagaugauuugggauccgaacggauggacugggacagacaauaacuucucaauaaagcaagauaucguaggaauaaaugaguggucaggauauagcgggaguuuuguucagcauccagaacuaacagggcuggauuguauaagaccuugcuucuggguugaacuaaucagagggcgacccaaagagaacucaaucuggacuagcgggagcagcauauccuuuugugguguaaacagugacacuguggguuggucuuggccagacggugcugaguugccauuuaccauugacaaguaa

SEQ ID NO: 53440 - RNA, 1410 nt, Artificial Sequence
  derived and/or modified CDS sequence (wt) from neuraminidase__InfluenzaA__AEW25631
augaauccaaaccaaaagauaauaaccauugguucggucuguaugacaauuggaauggcuaacuuaauauuacaaauuggaaacauaaucucaauauggauuagccacucaauucaacuugggaaucaaaaucagauugaaacaugcaaucaaagcgucauuacuuaugaaaacaacacuuggguaaaucagacauauguuaacaucagcaacaccaacuuugcugcuggacagucagugguuuccgugaaauuagcgggcaauuccucucucugcccuguuaguggaugggcuauauacaguaaagacaacaguauaagaaucgguuccaagggggauguguuugucauaagggaaccauucauaucaugcucccccuuggaaugcagaaccuucuucuugacucaaggggccuugcuaaaugacaaacauuccaauggaaccauuaaagacaggagcccauaucgaacccuaaugagcuguccuauuggugaaguucccucuccauacaacucaagauuugagucagucgcuuggucagcaagugcuugucaugauggcaucaauuggcuaacaauuggaauuucuggcccagacaauggggcaguggcuguguuaaaguacaacggcauaauaacagacacuaucaagaguuggagaaacaauauauugagaacacaagagucugaaugugcauguguaaaugguucuugcuuuacuguaaugaccgauggaccaagugauggacaggccucauacaagaucuucagaauagaaaagggaaagauagucaaaucagucgaaaugaaugccccuaauuaucacuaugaggaaugcuccuguuauccugauucuagugaaaucacaugugugugcagggauaacuggcauggcucgaaucgaccgugggugucuuucaaccagaaucuggaauaucagauaggguacauaugcagugggauuuucggagacaauccacgcccuaaugauaagacaggcaguugugguccaguaucgucuaauggagcaaguggaguaaaaggauuuucauucaaauacggcaaugguguuuggauagggagaacuaaaagcauuaguucaagaaacgguuuugagaugauuugggauccgaacggauggacugggacagacaauaacuucucaauaaagcaagauaucguaggaauaaaugaguggucaggauauagcgggaguuuuguucagcauccagaacuaacagggcuggauuguauaagaccuugcuucuggguugaacuaaucagagggcgacccaaagagaacacaaucuggacuagcgggagcagcauauccuuuugcgguguaaacagugacacuguggguuggucuuggccagacggugcugaguugccauuuaccauugacaaguaa

SEQ ID NO: 53441 - RNA, 1410 nt, Artificial Sequence
  derived and/or modified CDS sequence (wt) from neuraminidase__InfluenzaA__AEW25639
augaauccaaaccaaaagauaauaaccauugguucggucuguaugacaauuggaauggcuaacuuaauauuacaaauuggaaacauaaucucaauauggauuagccacucaauucaacuugggaaucaaaaucagauugaaacaugcaaucaaagcgucauuacuuaugaaaacaacacuuggguaaaucagacauauguuaacaucagcaacaccaacuuugcugcuggacagucagugguuuccgugaaauuagcgggcaauuccucucucugcccuguuaguggaugggcuauauacaguaaagacaacaguauaagaaucgguuccaagggggauguguuugucauaagggaaccauucauaucaugcucccccuuggaaugcagaaccuucuucuugacucaaggggccuugcuaaaugacaaacauuccaauggaaccauuaaagacaggagcccauaucgaacccuaaugagcuguccuauuggugaaguucccucuccauacaacucaagauuugagucagucgcuuggucagcaagugcuugucaugauggcaucaauuggcuaacaauuggaauuucuggcccagacaauggggcaguggcuguguuaaaguacaacggcauaauaacagacacuaucaagaguuggagaaacaauauauugagaacacaagagucugaaugugcauguguaaaugguucuugcuuuacuguaaugaccgauggaccaagugauggacaggccucauacaagaucuucagaauagaaaagggaaagauagucaaaucagucgaaaugaaugccccuaauuaucacuaugaggaaugcuccuguuauccugauucuagugaaaucacaugugugugcagggauaacuggcauggcucgaaucgaccgugggugucuuucaaccagaaucuggaguaucagauaggauacauaugcagugggauuuucggagacaauccacgcccuaaugauaagacaggcaguugugguccaguaucgucuaauggagcaaauggaguaaaaggauuuucauucaaauacggcaaugguguuuggauagggagaacuaaaagcauuaguucaagaaacgguuuugagaugauuugggauccgaacggauggacugggacagacaauaacuucucaauaaagcaagauaucguaggaauaaaugaguggucaggauauagcgggaguuuuguucagcauccagaacuaacagggcuggauuguauaagaccuugcuucuggguugaacuaaucagagggcgacccaaagagaacacaaucuggacuagcgggagcagcauauccuuuugugguguaaacagugacacuguggguuggucuuggccagacggugcugaguugccauuuaccauugacaaguaa

SEQ ID NO: 53442 - RNA, 1410 nt, Artificial Sequence
  derived and/or modified CDS sequence (wt) from neuraminidase__InfluenzaA__AEW25648
augaauccaaaccaaaagauaauaaccauugguucggucuguaugacaauuggaauggcuaacuuaauauuacaaauuggaaacauaaucucaauauggauuagccacucaauucaacuugggaaucaaaaucagauugaaacaugcaaucaaagcgucauuacuuaugaaaacaacacuuggguaaaucauacauauguuaacaucagcaacaccaacuuugcugcuggacagucagugguuuccgugaaauuggcgggcaauuccucucucugcccuguuaguggaugggcuauauacaguaaagacaacaguauaagaaucgguuccaagggggauguguuugucauaagggaaccauucauaucaugcucccccuuggaaugcagaaccuucuucuugacucaaggggccuugcuaaaugacaaacauuccaauggaaccauuaaagacaggagcccauaucgaacccuaaugagcuguccuauuggugaaguucccucuccauacaacucaagauuugagucagucgcuuggucagcaagugcuugucaugauggcaucaauuggcuaacaauuggaauuucuggcccagacaauggggcaguggcuguguuaaaguacaacggcauaauaacagauacuaucaagaguuggagaaacaauauauugagaacacaagagucugaaugugcauguguaaaugguucuugcuuuacuguaaugaccgauggaccaagugauggacaggccucauacaagaucuucagaauagaaaagggaaagauagucaaaucagucgaaaugaaugccccuaauuaucacuaugaggaaugcuccuguuauccugauucuagugaaaucacaugugugugcagggauaacuggcauggcucgaaucgaccgugggugucuuucaaccagaaucuggaauaucagauaggauacauaugcagugggauuuucggagacaauccacgcccuaaugauaagacaggcaguugugguccaguaucguccaauggagcaaauggaguaaaaggauuuucauucaaauacggcaaugguguuuggauagggagaacuaaaagcauuaguucaagaaacgguuuugagaugauuugggauccgaacggauggacugggacagacaauaacuucucaauaaagcaagauaucguaggaauaaaugaguggucaggauauagcgggaguuuuguucagcauccagaacuaacagggcuggauuguauaagaccuugcuucuggguugaacuaaucagagggcgacccaaagagaacacaaucuggacuagcgggagcagcauauccuuuugugguguaaacagugacacuguggguuggucuuggccagacggugcugaguugccauuuaccauugacaaguaa

SEQ ID NO: 53443 - RNA, 1410 nt, Artificial Sequence
  derived and/or modified CDS sequence (wt) from neuraminidase__InfluenzaA__AEW25656
augaauccaaaccaaaagauaauaaccauugguucggucuguaugacaauuggaauggcuaacuuaauauuacaaauuggaaacauaaucucaauauggauuagccacucaauucaacuugggaaucaaaaucagauugaaacaugcaaucaaagcgucauuacuuaugaaaacaacacuuggguaaaucagacauauguuaacaucagcaacaccaacuuugcugcuggacagucagugguuuccgugaaauuagcgggcaauuccucucucugcccuguuaguggaugggcuauauacaguaaagacaacaguauaagaaucgguuccaagggggauguguuugucauaagggaaccauucauaucaugcucccccuuggaaugcagaaccuucuucuugacucaaggggccuugcuaaaugacaaacauuccaauggaaccauuaaagacaggagcccauaucgaacccuaaugagcuguccuauuggugaaguucccucuccauacaacucaagauuugagucagucgcuuggucagcaagugcuugucaugauggcaucaauuggcuaacaauuggaauuucuggcccagacaauggggcaguggcuguguuaaaguacaacggcauaauaacagacacuaucaagaguuggagaaacaauauauugagaacacaagagucugaaugugcauguguaaaugguucuugcuuuacuguaaugaccgauggaccaagugauggacaggccucauacaagaucuucagaauagaaaagggaaagauagucaaaucagucgaaaugaaugccccuaauuaucacuaugaggaaugcuccuguuauccugauucuagugaaaucacaugugugugcagggauaacuggcauggcucgaaucgaccgugggugucuuucaaccagaaucuggaauaucagauaggguacauaugcagugggauuuucggagacaauccacgcccuaaugauaagacaggcaguugugguccaguaucgucuaauggagcaaauggaguaaaaggauuuucauucaaauacggcaaugguguuuggauagggagaacuaaaagcauuaguucaagaaacgguuuugagaugauuugggauccgaacggauggacugggacagacaauaacuucccaauaaagcaagauaucguaggaauaaaugaguggucaggauauagcgggaguuuuguucagcauccagaacuaacagggcuggauuguauaagaccuugcuucuggguugaacuaaucagagggcgacccaaagagaacacaaucuggacuagcgggagcagcauauccuuuugugguguaaacagugacacuguggguuggucuuggccagacggugcugaguugccauuuaccauugacaaguaa

SEQ ID NO: 53444 - RNA, 1410 nt, Artificial Sequence
  derived and/or modified CDS sequence (wt) from neuraminidase__InfluenzaA__AEW25664
augaauccaaaccaaaagauaauaaccauugguucggucuguaugacaauuggaauggcuaacuuaauauuacaaauuggaaacauaaucucaauauggauuagccacucaauucaacuugggaaucaaaaucagauugaaacaugcaaucaaagcgucauuacuuaugaaaacaacacuuggguaaaucagacauauguuaacaucagcaacaccaacuuuacugcuggacagucagugguuuccgugaaauuagcgggcaauuccucucucugcccuguuaguggaugggcuauauacaguaaagacaacaguauaagaaucgguuccaagggggauguguuugucauaagggagccauucauaucaugcucccccuuggaaugcagaaccuucuucuugacucaaggggccuugcuaaaugacaaacauuccaauggaaccauuaaagacaggagcccauaucgaacccuaaugagcuguccuauuggugaaguucccucuccauacaauucaagauuugagucagucgcuuggucagcaagugcuugucaugauggcaucaauuggcuaacaauuggaauuucuggcccagacaauggggcaguggcuguguuaaaguacaacggcauaauaacagacacuaucaagaguuggagaaacaauauauugagaacacaagagucugaaugugcauguguaaaugguucuugcuuuacuguaaugaccgauggaccaagugauggacaggccucauacaagaucuucagaauagaaaagggaaagauagucaaaucagucgaaaugaaugccccuaauuaucacuaugaggaaugcuccuguuauccugauucuagugaaaucacaugugugugcagggauaacuggcauggcucgaaucgaccgugggugucuuucaaccagaaucuggaauaucagauaggguacauaugcagugggauuuucggagacaauccacgcccuaaugauaagacaggcaguugugguccaguaucgucuaauggagcaaauggaguaaaaggauuuucauucaaauacggcaaugguguuuggauagggagaacuaaaagcauuaguucaagaaacgguuuugagaugauuugggauccgaacggauggacugggacagacaauaacuucucaauaaagcaagauaucguaggaauaaaugaguggucaggauauagcgggaguuuuguucagcauccagaacuaacagggcuggauuguauaagaccuugcuucuggguugaacuaaucagagggcgacccaaagagaacacaaucuggacuagcgggagcagcauauccuuuugcgguguaaacagugacacuggggguuggucuuggccagacggugcugaguugccauuuaccauugacaaguaa

SEQ ID NO: 53445 - RNA, 1410 nt, Artificial Sequence; identical to SEQ ID NO: 53439
  derived and/or modified CDS sequence (wt) from neuraminidase__InfluenzaA__AEW25671

SEQ ID NO: 53446 - RNA, 1410 nt, Artificial Sequence
  derived and/or modified CDS sequence (wt) from neuraminidase__InfluenzaA__AEW25680
augaauccaaaccaaaagauaauaaccauugguucggucuguaugacaauuggaauggcuaacuuaauauuacaaauuggaaacauaaucucaauauggauuagccacucaauucaacuugggaaucaaaaucagauugaaacaugcaaucaaagcgucauuacuuaugaaaacaacacuuggguaaaucagacauauguuaacaucagcaacaccaacuuugcugcuggacagucagugguuuccgugaaauuagcgggcaauuccucucucugcccuguuaguggaugggcuauauacaguaaagacaacaguauaagaaucgguuccaagggggauguguuugucauaagggaaccauucauaucaugcucccccuuggaaugcagaaccuucuucuugacucaaggggccuugcuaaaugacaaacauuccaauggaaccauuaaagacaggagcccauaucgaacccuaaugagcuguccuauuggugaaguucccucuccauacaacucaagauuugagucagucgcuuggucagcaagugcuugucaugauggcaucaauuggcuaacaauuggaauuucuggcccagacaauggggcaguggcuguguuaaaguacaacggcauaauaacagacacuaucaagaguuggagaaacaauauauugagaacacaagagucugaaugugcauguguaaaugguucuugcuuuacuguaaugacugauggaccaagugauggacaggccucauacaagaucuucagaauagaaaagggaaagauagucaaaucagucgaaaugaaugccccuaauuaucacuaugaggaaugcuccuguuauccugauucuagugaaaucacaugugugugcagggauaacuggcauggcucgaaucgaccgugggugucuuucaaccaaaaucuggaauaucagauaggauacauaugcagugggauuuucggagacaauccacgcccuaaugauaagacaggcaguugugguccaguaucgucuaauggagcaaauggaguaaaaggauuuucauucaaauacggcaaugguguuuggauagggagaacuaaaagcauuaguucaagaaacgguuuugagaugauuugggauccgaacggauggacugggacagacaauaaauucucaauaaagcaagauaucguaggaauaaaugaguggucaggauauagcgggaguuuuguucagcauccagaacuaacagggcuggauuguauaagaccuugcuucuggguugaacuaaucagagggcgacccaaagagaacacaaucuggacuagcgggagcagcauauccuuuugugguguaaacagugacacugugggcuggucuuggccagacggugcugaguugccauuuaccauugacaaguaa

SEQ ID NO: 53447 - RNA, 1410 nt, Artificial Sequence
  derived and/or modified CDS sequence (wt) from neuraminidase__InfluenzaA__AEW25689
augaauccaaaccaaaagauaauaaccauugguucggucuguaugacaauuggaauggcuaacuuaauauuacaaauuggaaacauaaucucaauauggauuagccacucaauucaacuugggaaucaaaaucagauugaaacaugcaaucaaagcgucauuacuuaugaaaacaacacuuggguaaaucagacauauguuaacaucagcaacaccaacuuugcugcuggacagucagugguuuccgugaaauuagcgggcaauuccucucucugcccuguuaguggaugggcuauauacaguaaagacaacaguauaagagucgguuccaagggggauguguuugucauaagggaaccauucauaucaugcucccccuuggaaugcagaaccuucuucuugacucaaggggccuugcuaaaugacaaacauuccaauggaaccauuaaagacaggagcccauaucgaacccuaaugagcuguccuauuggugaaguucccucuccauacaacucaagauuugagucagucgcuuggucagcaagugcuugucaugauggcaucaauuggcuaacaauuggaauuucuggcccagacaauggggcaguggcuguguuaaaguacaacggcauaauaacagacacuaucaagaguuggagaaacaauauauugagaacacaagagucugaaugugcauguguaaaugguucuugcuuuacuguaaugaccgauggaccaagugauggacaggccucauacaagaucuucagaauagaaaagggaaagauagucaaaucagucgaaaugaaugccccuaauuaucacuaugaggaaugcuccuguuauccugauucuagugaaaucacaugugugugcagggauaacuggcauggcucgaaucgaccgugggugucuuucaaccagaaucuggaauaucagauaggguacauaugcagugggauuuucggagacaauccacgcccuaaugauaagacaggcaguugugguccaguaucgucuaauggagcaaauggaguaaaaggauuuucauucaaauacggcaaugguguuuggauagggagaacuaaaagcauuaguucaagaaacgguuuugagaugauuugggauccgaacggauggacugggacagacaauaacuucucaauaaagcaagauaucguaggaauaaaugaguggucaggauauagcgggaguuuuguucagcauccagaacuaacagggcuggauuguauaagaccuugcuucuggguugaacuaaucagagggcgacccaaagagaacacaaucuggacuagcgggagcagcauauccuuuugugguguaaacagugacacuguggguuggucuuggccagacggugcugaguugccauuuaccauugacaaguaa

SEQ ID NO: 53448 - RNA, 1410 nt, Artificial Sequence
  derived and/or modified CDS sequence (wt) from neuraminidase__InfluenzaA__AEW25698
augaauccaaaccaaaagauaauaaccauugguucggucuguaugacaauuggaauggcuaacuuaauauuacaaauuggaaacauaaucucaauauggauuagccacucaauucaacuugggaaucaaaaucagauugaaacaugcaaucaaagcgucauuacuuaugaaaacaacacuuggguaaaucauacauauguuaacaucagcaacaccaacuuugcugcuggacagucagugguuuccgugaaauuagcgggcaauuccucucucugcccuguuaguggaugggcuauauacaguaaagacaacaguauaagaaucgguuccaagggggauguguuugucauaagggaaccauucauaucaugcucccccuuggaaugcagaaccuucuucuugacucaaggggccuugcuaaaugacaaacauuccaauggaaccauuaaagacaggagcccauaucgaacccuaaugagcuguccuauuggugaaguucccucuccauacaacucaagauuugagucagucgcuuggucagcaagugcuugucaugauggcaucaauuggcuaacaauuggaauuucuggcccagacaauggggcaguggcuguguuaaaguacaacggcauaauaacagauacuaucaagaguuggagaaacaauauauugagaacacaagagucugaaugugcauguguaaaugguucuugcuuuacuguaaugaccgauggaccaagugauggacaggccucauacaagaucuucagaauagaaaagggaaagauagucaaaucagucgaaaugaaugccccuaauuaucacuaugaggaaugcuccuguuauccugauucuagugaaaucacaugugugugcagggauaacuggcauggcucgaaucgaccgugggugucuuucaaccagaaucuggaauaucagauaggauacauaugcagugggauuuucggagacaauccacgcccuaaugauaagacaggcaguugugguccaguaucgucuaauggagcaaauggaguaaaaggauuuucauucaaauacggcaaugguguuuggauagggagaacuaaaagcauuaguucaagaaacgguuuugagaugauuugggauccgaacggauggacugggacagacaauaacuucucaauaaagcaagauaucguaggaauaaaugaguggucaggauauagcgggaguuuuguucagcauccagaacuaacagggcuggauuguauaagaccuugcuucuggguugaacuaaucagagggcgacccaaagagaacacaaucuggacuagcgggagcagcauauccuuuugugguguaaacagugacacuguggguuggucuuggccagacggugcugaguugccauuuaccauugacaaguaa

SEQ ID NO: 53449 - RNA, 1410 nt, Artificial Sequence; identical to SEQ ID NO: 53279
  derived and/or modified CDS sequence (wt) from neuraminidase__InfluenzaA__AEW25708

SEQ ID NO: 53450 - RNA, 1410 nt, Artificial Sequence; identical to SEQ ID NO: 48750
  derived and/or modified CDS sequence (wt) from neuraminidase__InfluenzaA__AEX09177

SEQ ID NO: 53451 - RNA, 1413 nt, Artificial Sequence
  derived and/or modified CDS sequence (wt) from neuraminidase__InfluenzaA__AEX33324
augaauccaaaucaaaaaauaauaaccauuggaucaaucaguauagcaaucggaauaauuagucuaauguugcaaauaggaaauauuauuucaauaugggcuagucacucaauccaaacuggaagucaaaaccacacuggaauaugcaaccaaagaaucaucacauaugaaaacagcaccugggugaaucacacauauguuacuauuaacaacacuaauguuguugcuggaaaagacaaaacuucagugacauuggccggcaauucaucucuuuguucuaucaguggaugggcuauauacacaaaagacaacagcauaagaauuggcuccaaaggagauguuuuugucauaagagaaccuuucauaucauguucucacuuggaaugcagaaccuuuuuucugacccaaggugcucuauuaaaugacaaacauucaaaugggaccguuaaggacagaaguccuuauagggccuuaaugagcuguccucuaggugaagcuccguccccauacaauucaaaguuugaaucaguugcauggucagcaagcgcaugccaugauggcaugggcugguuaacaaucggaauuucugguccagacaauggagcuguggcuguacuaaaauacaacggaauaauaacugaaaccauaaaaagcuggaaaaagcgaauauuaagaacacaagagucugaaugugucugugugaacgggucauguuucaccauaaugaccgauggcccgaguaauggggccgccucguacaaaaucuucaagaucgaaaaggggaagguuacuaaaucaauagaguugaaugcacccaauuuucauuaugaggaauguuccuguuacccagacacuggcacagugauguguguaugcagggacaacuggcaugguucaaaucgaccuugggugucuuuuaaucaaaacuuggauuaccaaauaggauacaucugcaguggaguguucggugacaauccgcgucccaaagauggagagggcagcuguaauccagugacuguugauggagcagacggaguaaaaggguuuucauacaaauaugguaaugguguuuggauaggaaggacuaaaaguaacagacuuagaaagggguuugagaugauuugggauccuaauggauggacagauaccgacagugauuucucagugaaacaggauguuguggcaauaacugauuggucaggguacaguggaaguuucguucaacauccugaguuaacaggauuggacuguauaagaccuugcuucuggguugaguuagucagaggacugccuagagaaaauacaacaaucuggacuagugggagcagcauuucuuuuuguggcguuaauagugauacugcaaacuggucuuggccagacggugcugaguugccguucaccauugacaaguag

SEQ ID NO: 53452 - RNA, 1413 nt, Artificial Sequence
  derived and/or modified CDS sequence (wt) from neuraminidase__InfluenzaA__AEX33368
augaauccaaaucaaaaaauaauaaccauuggaucaaucaguauagcaaucggaauaauuagucuaauguugcaaauaggaaauauuauuucaauaugggcuagucacucaauccaaacuggaagucaaaaccacacuggaauaugcaaccaaagaaucaucacauaugaaaacagcaccugggugaaucacacauauguuaauauuaacaacacuaauguuguugcuggaaaggacaaaacuucagugacauuggccggcaauucaucucuuugugcuaucaguggaugggcuauauacacaaaagacaacagcauaagaauuggcuccaaaggagauguuuuugucauaagagaaccuuucauaucauguucucacuuggaaugcagaaccuuuuuucugacccaaggugcucuauuaaaugacaaacauucaaaugggaccguuaaggacagaaguccuuauagggccuuaaugagcuguccucuaggugaagcuccguccccauacaauucaaaguuugaaucaguugcauggucagcaagcgcaugccaugauggcaugggcugguuaacaaucggaauuucugguccagacaauggagcuguggcuguacuaaaauacaacggaauaauaacugaaaccauaaaaaguuggaaaaagcgaauauuaagaacacaagagucugaaugugucugugugaacgggucauguuucaccauaaugaccgauggcccgaguaauggggccgccucguacaaaaucuucaagaucgaaaaggggaagguuacuaaaucaauagaguugaaugcacccaauuuucauuaugaggaaugcuccuguuacccagacacuggcacagugauguguguaugcagggacaacuggcaugguucaaaucgaccuugggugucuuuuaaucaaaacuuggauuaucaaauaggauacaucugcaguggaguguucggugacaauccgcgucccaaagauggagagggcagcuguaauccagugacuguugauggagcagacggaguaaagggguuuucauacaaauaugguaaugguguuuggauaggaaggacuaaaaguaacagacuuagaaagggguuugagaugauuugggauccuaauggauggacagauaccgacagugauuucucagugaaacaggauguuguggcaauaacugauuggucaggguacagcggaaguuucguucaacauccugaguuaacaggauuggacuguauaagaccuugcuucuggguugaguuagucagaggacugccuagagaaaauacaacaaucuggacuagugggagcagcauuucuuuuuguggcguuaauagugacacugcaaacuggucuuggccagacggugcugaguugccguucaccauugacaaguag

SEQ ID NO: 53453 - RNA, 1413 nt, Artificial Sequence
  derived and/or modified CDS sequence (wt) from neuraminidase__InfluenzaA__AEX33379
augaauccaaaucaaaaaauaauaaccauuggaucaaucaguauagcaaucggaauaauuagucuaauguugcaaauaggaaauauuauuucaauaugggcuagucacucaauccaaacuggaauucaaaaccacacuggaauaugcaaccaaagaaucaucacauaugaaaacagcaccugggugaaucacacauauguuacuauuaacaacacuaauguuguugcuggaaaagacaaaacuucagugacauuggccggcaauucaucucuuuguucuaucaguggaugggcuauauacacaaaagacaacagcauaagaauuggcuccaaaggagauguuuuugucauaagagaaccuuucauaucauguucucacuuggaaugcagaaccuuuuuucugacccaaggugcucuauuaaaugacaaacauucaaaugggaccguuaaggacagaaguccuuauagggccuuaaugagcuguccucuaggugaagcuccguccccauacaauucaaaguuugaaucaguugcauggucagcaagcgcaugccaugauggcaugggcugguuaacaaucggaauuucugguccagacaauggagcuguggcuguacuaaaauacaacggaauaauaacugaaaccauaaaaaguuggaaaaagcgaauauuaagaacacaagagucugaaugugucugugugaaugggucauguuucaccauaaugaccgauggcccgaguaauggggccgccucguacaaaaucuucaagaucgaaaaggggaagguuacuaaaucaauagaguugaaugcacccaauuuucauuaugaggaauguuccuguuacccagacacuggcacagugauguguguaugcagggacaacuggcaugguucaaaucgaccuugggugucuuuuaaucaaaacuuggauuaucaaauaggauacaucugcaguggaguguucggugacaauccgcgucccagagauggagagggcagcuguaauccagugacuguugauggagcagacggaguaaagggguuuucauacaaauaugguaaugguguuuggauaggaaggacuaaaaguaacagacuuagaaagggguuugagaugauuugggauccuaauggauggacagauaccgacagugauuucucagugaaacaggauguuguggcaauaacugauuggucaggguacagcggaaguuucguucagcauccugaguuaacaggauuggacuguauaagaccuugcuucuggguugaguuagucagaggacugccuagagaaaauacaacaaucuggacuagugggagcagcauuucuuuuuguggcguuaauagugauacugcaaacuggucuuggccagacggugcugaguugccguucaccauugacaaguag

SEQ ID NO: 53454 - RNA, 1413 nt, Artificial Sequence; identical to SEQ ID NO: 53453
  derived and/or modified CDS sequence (wt) from neuraminidase__InfluenzaA__AEX33390

SEQ ID NO: 53455 - RNA, 1413 nt, Artificial Sequence; identical to SEQ ID NO: 53453
  derived and/or modified CDS sequence (wt) from neuraminidase__InfluenzaA__AEX33401

SEQ ID NO: 53456 - RNA, 1413 nt, Artificial Sequence; identical to SEQ ID NO: 53453
  derived and/or modified CDS sequence (wt) from neuraminidase__InfluenzaA__AEX33412

SEQ ID NO: 53457 - RNA, 1413 nt, Artificial Sequence; identical to SEQ ID NO: 53453
  derived and/or modified CDS sequence (wt) from neuraminidase__InfluenzaA__AEX33423

SEQ ID NO: 53458 - RNA, 1413 nt, Artificial Sequence; identical to SEQ ID NO: 53453
  derived and/or modified CDS sequence (wt) from neuraminidase__InfluenzaA__AEX33434

SEQ ID NO: 53459 - RNA, 1413 nt, Artificial Sequence; identical to SEQ ID NO: 53453
  derived and/or modified CDS sequence (wt) from neuraminidase__InfluenzaA__AEX33445

SEQ ID NO: 53460 - RNA, 1410 nt, Artificial Sequence
  derived and/or modified CDS sequence (wt) from neuraminidase__InfluenzaA__AEX33544
augaauccaaaucaaaagauaauaacaauuggcucuuuuucucucaccauugccgcaauaugcuuccuuaugcaaauugccauccugguaacuacuguaacauugcauuucaagcagcaugaaugcaacucccccccaaacaaccaaguaaugcugugugaaccaacaauaauagaaagaaacauaacagagauaguguaucugaccaacaccaccauagagaaggaaauaugccccaaacuagcagaauaccgaaauuggucaaagccgcaauguaacauuacaggauuugcaccuuuuucuaaggacaauucgauucggcuuuccgcugguggggacaucugggugacaagagaaccuuaugugucaugcgauccugacaaguguuaucaauuugcccuugggcaaggaacaacacuaaacaacgggcauucaaaugacacaguacaugauaggaccccuuaccggacccuauugaugaaugaauuggguguuccauuucauuugggaaccaggcaagugugcauagcaugguccagcucaaguugucacgauggaaaagcguggcugcauguuuguguaacuggggaugauaaaaaugcaacugcuagcuucauuuacaaugggaggcuuguagauaguauugguucaugguccaaaaaaauacucagaacccaggagucggaaugcguuuguaucaauggaacuuguacagugguaaugacugauggaagcgcuucaggaaaagcugauacuaaaauacuauucauugaggaggggaaaaucguucauauuagcacauugucaggaagugcucagcaugucgaggagugcuccuguuauccucgauauccuggugucagaugugucugcagagacaacuggaaaggcuccaauaggcccauuguagauauaaauguaaaggauuauagcauuguuuccaguuaugugugcucaggacuuguuggagacacacccagaaaaaacgacagcuucagcaguagccauugccuagauccuaacaaugaggaagguggucauggagugaaaggcugggccuuugaugauggaaaugacguguggaugggaagaacgaucagcgagaaguuacgcucagguuaugaaaccuucaaagucaucgaaggcugguccaaaccuaacuccaaauuacagauaaauaggcaaguuauaguugaaagagguaacagguccgguuauucugguauuuucuccguugaaggcaaaagcugcaucaaucggugcuuuuauguggaguugauaaggggaaggaaagagaaaacugaagucugguggaccucaaacaguauuguuguguuuuguggcaccucagguacauauggaacaggcucauggccugauggggcggauaucaaucucaugccuauauaa

SEQ ID NO: 53461 - RNA, 1410 nt, Artificial Sequence
  derived and/or modified CDS sequence (wt) from neuraminidase__InfluenzaA__AEX33555
augaauccaaaucaaaagauaauaacgauuggcucuguuucucucaccauuuccacaauaugcuucuucaugcaaauugccaucuugauaacuacuguaacauugcauuucaagcaauaugaauucaacucccccccaaacaaccaagugaugcugugugaaccaacaauaauagaaagaaacauaacagagauaguguaucugaccaacaccaccauagagaaggaaauaugccccaaacuagcagaauacagaaauuggucaaagccgcaaugugacauuacaggauuugcaccuuuuucuaaggacaauucgauuaggcuuuccgcugguggggacaucugggugacaagagaaccuuaugugucaugcgauccugacaaguguuaucaauuugcccuuggacagggaacaacacuaaacaacgugcauucaaaugacacaguacaugauaggaccccuuaucggaccuuauugaugaaugaguuagguguuccauuucaucuggggaccaagcaagugugcauagcaugguccagcucaaguugucacgauggaaaagcauggcugcauguuuguguaacgggggaugauaaaaaugcaacugcuagcuucauuuacaaugggaggcuuguagauaguauuguuucaugguccaaaaaaauccucaggacccaggagucagaaugcguuuguaucaauggaacuuguacaguaguaaugacugaugggagugcuucaggaaaagcugauacuaaaauacuauucauugaggaggggaaaaucguucauacuagcacauugucaggaagugcucagcaugucgaggagugcuccugcuauccucgauauccuggugucagaugugucugcagagacaacuggaaaggcuccaauaggcccaucguagauauaaacauaaaggauuauagcauuguuuccaguuaugugugcucaggacuuguuggagacacacccagaaaaaaugacagcuccagcaguagccauugcuuggauccuaacaaugaagaagguggucauggagugaaaggcugggccuuugaugauggaaaugacguguggaugggaagaacgaucagcgagaaguuacgcucaggauaugaaaccuucaaagucauugaaggcugguccaacccuaauuccaaauugcagauaaauaggcaagucauaguugacagagguaauagguccgguuauucugguauuuucucuguugaaggcaaaagcugcaucaaucggugcuuuuauguggaguugauaaggggaagaaaagaggaaacugaagucuuguggaccucaaacaguauuguuguguuuuguggcaccucagguacauauggaacaggcucauggccugauggggcggacaucaaucucaugccuauauaa

SEQ ID NO: 53462 - RNA, 1410 nt, Artificial Sequence
  derived and/or modified CDS sequence (wt) from neuraminidase__InfluenzaA__AEX33610
augaauccaaaucaaaagauaauaacgauuggcucuguuucucucaccauuuccacaauaugcuucuucaugcaaauugccaucuugauaacuacuguaacauugcauuucaagcaauaugaauucaacccccccccaaacaaccaagugaugcugugugaaccaacaauaauagaaagaaacauaacagagauaguguaucugaccaacaccaccauagagaaggaaauaugccccaaacuagcagaauacagaaauuggucaaagccgcaaugugacauuacaggauuugcaccuuuuucuaaggacaauucgauuaggcuuuccgcugguggggacaucugggugacaagagaaccuuaugugucaugcgauccugacaaguguuaucaauuugcccuuggacagggaacaacacuaaacaacgugcauucaaaugacacaguacaugauaggaccccuuaucggaccuuauugaugaaugaguuagguguuccauuucaucuggggaccaagcaagugugcauagcaugguccagcucaaguugucacgauggaaaagcauggcugcauguuuguguaacgggggaugauaaaaaugcaacugcuagcuucauuuacaaugggaggcuuguagauaguauuguuucaugguccaaaaaaauccucaggacccaggagucagaaugcguuuguaucaauggaacuuguacaguaguaaugacugaugggagugcuucaggaaaagcugauacuaaaauacuauucauugaggaggggaaaaucguucauacuagcacauugucaggaagugcucagcaugucgaggagugcuccugcuauccucgauauccuggugucagaugugucugcagagacaacuggaaaggcuccaauaggcccaucguagauauaaacauaaaggauuauaacauuguuuccaguuaugugugcucaggacuuguuggagacacacccagaaaaaacgacagcuccagcaguagccauugcuuggauccuaacaaugaagaagguggucauggagugaaaggcugggccuuugaugauggaaaugacguguggaugggaagaacgaucagcgagaaguugcgcucaggauaugaaaccuucaaagucauuggaggcugguccaacccuaauuccaaauugcagauaaauaggcaagucauaguugacagagguaauagguccgguuauucugguauuuucucuguugaaggcaaaagcugcaucaaucggugcuuuuauguggaguugauaaggggaagaaaagaggaaacugaagucuuguggaccucaaacaguauuguuguguuuuguggcaccucagguacauauggaacaggcucauggccugauggggcggacaucaaucucaugccuauauaa

SEQ ID NO: 53463 - RNA, 1410 nt, Artificial Sequence
  derived and/or modified CDS sequence (wt) from neuraminidase__InfluenzaA__AEX33828
augaauccaaaucaaaagauaauaacgauuggcucuguuucucucacuauuuccacaauaugcuucuucaugcaaauugccaucuugauaacuacuguaacauugcauuucaagcaauaugaauucaacccccccccaaacaaccaagugaugcugugugaaccaacaauaauagaaagaaacauaacagagauaguguaucugaccaacaccaccauagagaaggaaauaugccccaaacuagcagaauacagaaauuggucaaagccgcaaugugacauuacaggauuugcaccuuuuucuaaggacaauucgauuaggcuuuccgcugguggggacaucugggugacaagagaaccuuaugugucaugcgauccugacaaguguuaucaauuugcccuuggacagggaacaacacuaaacaacgugcauucaaaugacacaguacaugauaggaccccuuaucggacccuauugaugaaugaguuagguguuccauuucaucuggggaccaagcaagugugcauagcaugguccagcucaaguugucacgauggaaaagcauggcugcauguuuguguaacgggagaugauaaaaaugcaacugcuagcuucauuuacaaugggaggcuuguagauaguauuguuucaugguccaaagaaauccucagaacccaggagucagaaugcguuuguaucaauggaacuuguacaguaguaaugacugaugggagugcuucaggaaaagcugauacuaaaauacuauucauugaggaggggaaaaucguucauacuagcacauugucaggaagugcucagcaugucgaggagugcuccugcuauccucgauauccuggugucagaugugucugcagagacaacuggaaaggcuccaauaggcccaucguagauauaaacauaaaggauuauagcauuguuuccaguuaugugugcucaggacuuguuggagacacacccagaaaaaacgacagcuccagcaguagccauugcuuggauccuaacaaugaagaagguggucauggagugaaaggcugggccuuugaugaugggaaugacguguggaugggaagaacgaucagcgagaaguuacgcucaggauaugaaaccuucaaagucauugaaggcugguccaacccuaauuccaaauugcagauaaauaggcaagucauaguugacagagguaauagguccgguuauucugguauuuucucuguugaaggcaaaagcugcaucaaucggugcuuuuauguggaguugauaaggggaagaaaagaggaaacugaagucuuguggaccucaaacaguauuguuguguuuuguggcaccucagguacauauggaacaggcucauggccugauggggcggacaucaaucucaugccuauauaa

SEQ ID NO: 53464 - RNA, 1410 nt, Artificial Sequence
  derived and/or modified CDS sequence (wt) from neuraminidase__InfluenzaA__AEX33839
augaauccaaaucaaaagauaauaacgauuggcucuguuucucucaccauuuccacaauaugcuucuucaugcaaauugccaucuugauaacuacuguaacauugcauuucaagcaauaugaauucaacucccccccaaacaaccaagugaugcugugugaaccaacaauaauagaaagaaacauaacagagauaguguaucugaccaacaccaccauagagaaggaaauaugccccaaacuagcagaauacagaaauuggucaaagccgcaauguaacauuacaggauuugcaccuuuuucuaaggacaauucgauuaggcuuuccgcugguggggacaucugggugacaagagaaccuuaugugucaugcgauccugacaaguguuaucaauuugcccuuggacagggaacaacacuaaacaacgugcauucaaaugacacaguacaugauaggaccccuuaucggacccuauugaugaaugaguuagguguuccauuucaucuggggaccaagcaagugugcauagcaugguccagcucaaguugucacgauggaaaagcauggcugcauguuuguguaacgggggaugauaaaaaugcaacugcuagcuucauuuacaaugggaggcuuguagauaguauuguuucaugguccaaagaaauccucaggacccaggagucagaaugcguuuguaucaauggaacuuguacaguaguaaugacugaugggagugcuucaggaaaagcugauacuaaaauacuauucauugaggaggggaaaaucguucauacuagcacauugucaggaagugcucagcaugucgaggagugcuccugcuauccucgauauccuggugucagaugugucugcagagacaacuggaaaggcuccaauaggcccauaguagauauaaacauaaaggauuauagcauuguuuccaguuaugugugcucaggacuuguuggagacacacccagaaaaaacgacagcuccagcaguagccauugcuuggauccuaacaaugaagaagguggucauggagugaaaggcugggccuuugaugauggaaaugacguguggaugggaagaacgaucagcgagaaguuacgcucaggauaugaaaccuucaaagucauugaaggcugguccaacccuaauuccaaauugcagauaaauaggcaagucauagucgacagagguaauagguccgguuauucugguauuuucucuguugaaggcaaaagcugcaucaaucggugcuuuuauguggaguugauaaggggaagaaaagaggaaacugaagucuuguggaccucaaacaguauuguuguguuuuguggcaccucagguacauauggaacaggcucauggccugauggggcggacaucaaucucaugccuauauaa

SEQ ID NO: 53465 - RNA, 1413 nt, Artificial Sequence
  derived and/or modified CDS sequence (wt) from neuraminidase__InfluenzaA__AEX33861
augaauccaaaucaaaaaauaauaaccauuggaucaaucaguauagcaaucggaacaauuagucuaauguugcaaguaggaaauauuauuucaauaugggcuagucacucaauccaaacuggaagucaaaaccacacuggaauaugcaaccaaagaaucaucacauaugaaaacagcaccugggugaaucacacauauguuaauauuaacaacacuaauguuguugcuggaaaggacaaaacuucaguggcauuggccggcaauucaucucuuuguucuaucaguggaugggcuauauacacaaaagacaacagcauaagaauuggcuccaaaggagauguuuuugucauaagagagccuuucauaucauguucucacuuggaaugcagaaccuuuuuucugacccaaggugcucuauuaaaugacaaacauucaaauggaaccguuaaggacagaaguccuuauagggccuuaaugagcuguccucuaggugaagcuccguccccauacaauucaaaguuugaaucaguugcauggucagcaagcgcaugccaugauggcaugggcugguuaacaaucggaauuucugguccagacaauggagcuguggcuguacuaaaauacaauggaauaauaacugaaaccauaaaaaguuggaaaaagcgaauauugagaacacaagagucugaaugugucugugugaacgggucauguuucaccauaaugaccgauggcccgagcaauggggccgccucguauaaaaucuucaagaucgaaaaggggcagguuacuaaaucaguagaguuaaaugcacccaauuuucauuaugaggaauguuccuguuacccagacacuggcacagugauguguguaugcagggacaacuggcaugguucaaaucgaccuugggugucuuuuaaucaaaacuuggauuaucaaauaggauacaucugcaguggaguguucggugacaauccgcgucccaaagauggaaagggcagcuguaauccagugacuguugauggagcagacggaguuaagggguuuucauacaaauaugguaaugguguuuggauaggaaggacuaaaaguaacagacuuagaaagggguuugagaugauuugggauccuaauggauggacagauaccgacagugauuucucagugaaacaggauguuguggcaauaacugauuggucaggguacagcggaaguuucguucaacauccugaguuaacaggauuggacuguauaagaccuugcuucuggguugaguuagucagaggacugccuagagaaaauacaacaaucuggacuagugggagcagcauuucuuuuuguggcguugauagugauacugcaaacuggucuuggccagacggugcugaguugccguucaccauugacaaguag

SEQ ID NO: 53466 - RNA, 1410 nt, Artificial Sequence
  derived and/or modified CDS sequence (wt) from neuraminidase__InfluenzaA__AEX33872
augaauccaaaucaaaagauaauaacgauuggcucuguuucucucaccauuuccacaauaugcuucuuuaugcaaauugccaucuugauaacuacuguaacauugcauuucaagcaauaugaauucaacucccccccaaacaaccaagugaugcagugugaaccaacaauaauagaaagaaacauaacagagauaguguaucugaccaacaccaccauagagaaggaaauaugccccaaacuagcagaauacagaaauuggucaaagccgcaaugugacauuacaggauuugcaccuuuuucuaaggacaauucgauuaggcuuuccgcugguggggacaucugggugacaagagaaccuuaugugucaugcgauccugacaaauguuaucaauuugcccuuggacagggaacaacacuaaacaacgugcauucaaaugacacaguacaugauaggaccccuuaucggacccuauugaugaaugaguuagguguuccauuucaucuggggacuaagcaagugugcauagcaugguccagcucaaguugucacgauggaaaagcauggcugcauguuuguguaacgggggaugauaaaaaugcaacugcuagcuucauuuacaaugggaggcuuguagauaguauuguuucaugguccaaagaaauccucagaacccaggagucagaaugcguuuguaucaauggaacuuguacaguaguaaugacugaugggagugcuucagggaaagcugauacuaaaauacuauucauugaggaggggaaaaucguucauacuagcacauugucaggaagugcccagcaugucgaggagugcuccugcuauccucgauauccuggugucagaugugucugcagagacaacuggaaaggcuccaauaggcccaucguagauauaaacauaaaggauuauagcauuguuuccaguuaugugugcucaggacuuguuggagacacacccagaaaaaacgacagcuccagcaguagccauugcuugaauccuaacaaugaagaagguggucauggagugaaaggcugggccuuugaugauggaaaugacguguggaugggaagaacgaucagcgagaaguuacgcuuaggauaugaaaccuucaaagucauugaaggcugguccaacccuaauuccaaauugcagauaaauaggcaagucauaguugacagagguaauagauccgguuauucugguauuuucucuguugaaggcaaaagcugcaucaaucggugcuuuuauguggaguugauaaggggaagaaaagaggaaacugaagucuuguggaccucaaacaguauuguuguguuuuguggcaccucagguacauauggaacaggcucauggccugauggggcggacaucaaucucaugccuauauaa

SEQ ID NO: 53467 - RNA, 1410 nt, Artificial Sequence
  derived and/or modified CDS sequence (wt) from neuraminidase__InfluenzaA__AEX33883
augaauccaaaucaaaagauaauaacgauuggcucuguuucucucaccauuuccacaauaugcuucuucaugcaaauugccaucuugauaacuacuguaacauugcauuucaagcaauaugaauucaacucccccccaaacaaccaagugaugcugugugaaccaacaauaauagaaagaaacauaacagagauaguguaucugaccaacaccaccauagagaaggaaauaugccccaaacuagcagaauacagaaauuggucaaagccgcaauguaacauuacaggauuugcaccuuuuucuaaggacaauucgauuaggcuuuccgcugguggggacaucugggugacaagagaaccuuaugugucaugcgauccugacaaguguuaucaauuugcccuuggacagggaacaacacuaaacaacgugcauucaaaugacacaguacaugauaggaccccuuaucggacccuauugaugaaugaguuagguguuccauuucaucuggggaccaagcaagugugcauagcaugguccagcucaaguugucacgauggaaaagcauggcugcauguuuguguaacgggggaugauaaaaaugcaacugcuagcuucauuuacaaugggaggcuuguagauaguauuguuucaugguccaaagaaauccucaggacccaggagucagaaugcguuuguaucaauggaacuuguacaguaguaaugacugaugggagugcuucaggaaaagcugauacuaaaauacuauucauugaggaggggaaaaucguucauacuagcacauugucaggaagugcucagcaugucgaggagugcuccugcuauccucgauauccuggugucagaugugucugcagagacaacuggaaaggcuccaauaggcccauaguagauauaaacauaaaggauuauagcauuguuuccaguuaugugugcucaggacuuguuggagacacacccagaaaaaacgacagcuccagcagcagccauugcuuggauccuaacaaugaagaagguggucauggagugaaaggcugggccuuugaugauggaaaugacguguggaugggaagaacgaucagcgagaaguuacgcucaggauaugaaaccuucaaagucauugaaggcugguccaacccuaauuccaaauugcagauaaauaggcaagucauaguugacagagguaauagguccgguuauucugguauuuucucuguugaaggcaaaagcugcaucaaucggugcuuuuauguggaguugauaaggggaagaaaagaggaaacugaagucuuguggaccucaaacaguauuguuguguuuuguggcaccucagguacauauggaacaggcucauggccugauggggcggacaucaaucucaugccuauauaa

SEQ ID NO: 53468 - RNA, 1410 nt, Artificial Sequence
  derived and/or modified CDS sequence (wt) from neuraminidase__InfluenzaA__AEX33894
augaauccaaaucaaaagauaauaacgauuggcucuguuucucucaccauuuccacaauaugcuucuucaugcaaauugccaucuugauaacuacuguaacauugcauuucaagcaauaugaauucaacucccccccaaacaaccaagugaugcugugugaaccaacaauaauagaaagaaacauaacagagauaguguaucugaccaacaccaccauagagaaggaaauaugccccaaacuagcagaauacagaaauuggucaaagccgcaauguaacauuacaggauuugcaccuuuuucuaaggacaauucgauuaggcuuuccgcugguggggacaucugggugacaagagaaccuuaugugucaugcgauccugacaaguguuaucaauuugcccuuggacagggaacaacacuaaacaacgugcauucaaaugacacaguacaugauaggaccccuuaucggacccuauugaugaaugaguuagguguuccauuucaucuggggaccaagcaagugugcauagcaugguccagcucaaguugucacgauggaaaagcauggcugcauguuuguguaacgggggaugauaaaaaugcaacugcuagcuucauuuacaaugggaggcuuguagauaguauuguuucaugguccaaagaaauccucaggacccaggagucagaaugcguuuguaucgauggaacuuguacaguaguaaugacugaugggagugcuucaggaaaagcugauacuaaaauacuauucauugaggaggggaaaaucguucauacuagcacauugucaggaagugcucagcaugucgaggagugcuccugcuauccucgauauccuggugucagaugugucugcagagacaacuggaaaggcuccaauaggcccauaguagauauaaacauaaaggauuauagcauuguuuccaguuaugugugcucaggacuuguuggagacacacccagaaaaaacgacagcuccagcaguagccauugcuuggauccuaacaaugaagaagguggucauggagugaaaggcugggccuuugaugauggaaaugacguguggaugggaagaacgaucagcgagaaguuacgcucaggauaugaaaccuucaaagucauugaaggcugguccaacccuaauuccaaauugcagauaaauaggcaagucauaguugacagagguaauagguccgguuauucugguauuuucucuguugaaggcaaaagcugcaucaaucggugcuuuuauguggaguugauaaggggaagaaaagaggaaacugaagucuuguggaccucaaacaguauuguuguguuuuguggcaccucagguacauauggaacaggcucauggccugauggggcggacaucaaucucaugccuauauaa

SEQ ID NO: 53469 - RNA, 1413 nt, Artificial Sequence
  derived and/or modified CDS sequence (wt) from neuraminidase__InfluenzaA__AEX33916
augaacccaaaucaaaaaauaauaaccauuggaucaaucaguauagcaaucggaauaauuagucuaauauugcaaauaggaaauauuauuucaauaugggcuagucacucaauccaaacuggaagucaaaaccacacuggaauaugcaaccaaagaaucaucacauaugaaaacagcaccugggugaauaacacauauguuaauauuaacaacacuaauguuguugcugaaaaggacaaaacuucagugacauuggccggcaauucaucucuuuguucuaucaguggaugggcuauauacacaaaagacaacagcauaagaauuggcuccaaaggagauguuuuugucauaagagaaccuuucauaucauguucucacuuggaaugcagaaccuuuuuucugacccaaggugcucuauuaaaugacaaacauucaaaugggaccguaaaggacagaaguccuuauagggccuuaaugagcuguccucuaggugaagcuccguccccauacaauucaagguucgaaucaguugcauggucagcaagcgcaugccaugauggcaugggcugguuaacaaucggaauuucugguccagacaauggagcuguggcuguacuaaaauacaacggaauaauaacugaaaccauaaaaaguuggaaaaagcgaauauuaagaacacaagagucugaaugugucuguaugaacgggucauguuucaccauaaugaccgauggcccgaguaauggggccgccucguacaaaauuuucaagaucgaaaaggggaagguuaccaaaacaauagaguugaaugcacccaauuuucauuaugaggaauguuccuguuacccagacacuggcacagugauguguguaugcagagacaacuggcaugguucaaaucgaccuugggugucuuuuaaucaaaacuuggauuaucaaacaggauacaucugcaguggaguguucggugacaauccgcgucccaaagauggggagggcagcugcaauccaaugacuguugauggagcagacggaguaaaaggguuuucauacaaauaugguaaugguguuuggauaggaaggaccaaaaguaacagacuuagaaagggguuugagaugauuugggauccuaauggauggacaaauaccgacagugauuucucagugaaacaggauguuguagcaauaacugauuggucaggguacagcggaaguuuuguucaacauccugaguuaacaggauuggacuguauaagaccuugcuucuggguugaguuagucagagggcugccuagggaaaauacaacaaucuggacuagugggagcagcauuuccuuuuguggcguuaauagugguacugcaaacuggucuuggccagacggugcugaguugccguucaccauugacaaguag

SEQ ID NO: 53470 - RNA, 1413 nt, Artificial Sequence
  derived and/or modified CDS sequence (wt) from neuraminidase__InfluenzaA__AEX33927
augaacccaaaucaaaaaauaauaaccauuggaucaaucaguauagcaaucggaauaauuagucuaauauugcaaauaggaaauauuauuucaauaugggcuagucacucaauccaaacugaaagucaaaaccacacuggaauaugcaaccaaagaaucaucacauaugaaaacagcaccugggugaauaacacauauguuaauauuaacaacacuaauguuguugcugaaaaggacaaaacuucagugacauuggccggcaauucaucucuuuguucuaucaguggaugggcuauauacacaaaagacaacagcauaagaauuggcuccaaaggagauguuuuugucauaagagaaccuuucauaucauguucucacuuggaaugcagaaccuuuuuucugacccaaggugcucuauuaaaugacaaacauucaaaugggaccguaaaggacagaaguccuuauagggccuuaaugagcuguccucuaggugaagcuccguccccauacaauucaagguucgaaucaguugcauggucagcaagcgcaugccaugauggcaugggcugguuaacaaucggaauuucugguccagacaauggagcuguggcuguacuaaaauacaacggaauaauaacugaaaccauaaaaaguuggaaaaagcgaauauuaagaacacaagagucugaaugugucuguaugaacgggucauguuucaccauaaugaccgauggcccgaguaauggggccgccucguacaaaauuuucaagaucgaaaaggggaagguuaccaaaacaauggaguugaaugcacccaauuuucauuaugaggaauguuccuguuacccagacacuggcacagugauguguguaugcagagacaacuggcaugguucaaaucgaccuugggugucuuuuaaucaaaacuuggauuaucaaauaggauacaucugcaguggaguguucggugacaauccgcgucccaaagauggggagggcagcugcaauccagugacuguugauggagcagacggaguaaaaggguuuucauacaaauaugguaaugguguuuggaugggaaggaccaaaaguaacagacuuagaaagggguuugagaugauuugggauccuaauggauggacaaauaccgacagugauuucucagugaaacaggauguuguagcaauaacugauuggucaggguacagcggaaguuuuguucaacauccugaguuaacaggauuggacuguauaagaccuugcuucuggguugaguuagucagagggcuaccuagggaaaauacaacaaucuggacuagugggagcagcauuucuuuuuguggcguuaauagugguacugcaaacuggucuuggccagacggugcugaguugccguucaccauugacaaguag

SEQ ID NO: 53471 - RNA, 1413 nt, Artificial Sequence
  derived and/or modified CDS sequence (wt) from neuraminidase__InfluenzaA__AEX33938
augaacccaaaucaaaaaauaauaaccauuggaucaaucaguauagcaaucggaauaauuagucuaauauugcaaauaggaaauauuauuucaauaugggcuagucacucaauccaaacuggaagucaaaaccacacuggaauaugcaaccaaagaaucaucacauaugaaaacagcaccugggugaauaauacauauguuaauauuaacaacacuaauguuguuguugaaaaggacaaaacuucagugacauuggccggcaauucaucucuuuguucuaucaguggaugggcuauauacacaaaagacaacagcauaagaauuggcuccaaaggagauguuuuugucauaagagaaccuuucauaucauguucucacuuggaaugcagaaccuuuuuucugacccaaggugcucuauuaaaugacaaacauucaaaugggaccguaaaggacagaaguccuuauagggccuuaaugagcuguccucuaggugaagcuccguccccauacaauucaagguucgaaucaguugcauggucagcaagcgcaugccaugauggcaugggcugguuaacaaucggaauuucugguccagacaauggagcuguggcuguacuaaaauacaacggaauaauaacugaaaccauaaaaaguuggaaaaagcgaauauuaagaacacaagagucugaaugugucuguaugaacgggucauguuucaccauaaugaccgauggcccgaguaauggggccgccucguacaaaauuuucaagaucgaaaaggggaagguuaccaaaacaauagaguugaaugcacccaauuuucauuaugaggaauguuccuguuacccagacacuggcacagugauguguguaugcagagacaacuggcaugguucaaaucgaccuugggugucuuuuaaucaaaacuuggauuaucaaauaggauacaucugcaguggaguguucggugacaauccucgucccaaagauggggagggcagcugcaauccagugacuguugauggagcagacggaguaaaaggguuuucauacaaauaugguaaugguguuuggauaggaaggaccaaaaguaacagacuuagaaagggguuugagaugauuugggauccuaauggauggacaaauaccgacagugauuucucagugaaacaggauguuguagcaauaacugauuggucaggguacagcggaaguuuuguucaacauccugaguuaacaggauuggacuguauaagaccuugcuucuggguugaguuagucagagggcugccuagggaaaauacaacaaucuggacuagugggagcagcauuucuuuuuguggcguuaauagugguacuacaaacuggucuuggccagacggugcugaguugccguucaccauugacaaguag

SEQ ID NO: 53472 - RNA, 1413 nt, Artificial Sequence
  derived and/or modified CDS sequence (wt) from neuraminidase__InfluenzaA__AEX33949
augaacccaaaucaaaaaauaauaaccauuggaucaaucaguauagcaaucggaauaauuagucuaauauugcaaauaggaaauauuauuucaauaugggcuagucacucaauccaaacuggaagucaaaaccacacuggaauaugcaaccaaagaaucaucacauaugaaaacagcaccugggugaauaauacauauguuaauauuaacaacacuaauguuguuguugaaaaggacaaaacuucagugacauuggccggcaauucaucucuuuguucuaucaguggaugggcuauauacacaaaagacaacagcauaagaauuggcuccaaaggagauguuuuugucauaagagaaccuuucauaucauguucucacuuggaaugcagaaccuuuuuucugacccaaggugcucuauuaaaugacaaacauucaaaugggaccguaaaggacagaaguccuuauagggccuuaaugagcuguccucuaggugaagcuccguccccauacaauucaagguucgaaucaguugcauggucagcaagcgcaugccaugauggcaugggcugguuaacaaucggaauuucugguccagacaauggagcuguggcuguacuaaaauacaacggaauaauaacugaaaccguaaaaaguuggaaaaagcgaauauuaagaacacaagagucugaaugugucuguaugaacgggucauguuucaccauaaugaccgauggcccgaguaauggggccgccucguacaaaauuuucaagaucgaaaaggggaagguuaccaaaacaauagaguugaaugcacccaauuuucauuaugaggaauguuccuguuacccagacacuggcacagugauguguguaugcagagacaacuggcaugguucaaaucgaccuugggugucuuuuaaucaaaacuuggauuaucaaauaggauacaucugcaguggaguguucggugacaauccucgucccaaagauggggagggcagcugcaauccagugacuguugauggagcagacggaguaaaaggguuuucauacaaauaugguaaugguguuuggauaggaaggaccaaaaguaacagacuuagaaagggguuugagaugauuugggauccuaauggauggacaaauaccgacagugauuucucagugaaacaggauguuguagcaauaacugauuggucaggguacagcggaaguuuuguucaacauccugaguuaacaggauuggacuguauaagaccuugcuucuggguugaguuagucagagggcugccuagggaaaauacaacaaucuggacuagugggagcagcauuucuuuuuguggcguuaauagugguacugcaaacuggucuuggccagacggugcugaguugccguucaccauugacaaguag

SEQ ID NO: 53473 - RNA, 1410 nt, Artificial Sequence
  derived and/or modified CDS sequence (wt) from neuraminidase__InfluenzaA__AEX33971
augaauccaaaucaaaagauaauaacgauuggcucuguuucccucaccauuuccacaauaugcuucuucaugcaaauugccaucuugauaacuacuguaacauugcauuucaagcaauaugaauucagcucccccccaaacaaccaagugaugcugugugaaccagcaauaauagaaagaaacauaacagagacaguguaucugaccaacaccaccacagagaaggaaauaugccccaaacuagcagaauacagaaauuggucaaagccgcaaugugacauuacaggauuugcaccuuuuucuaaggacaauucaauuaggcuuuccgcugguggggacaucugggugacaagagaaccuuaugugucaugcgauccugacaaguguuaucaauuugcccuuggacagggaacaacacuaaacaacgugcauucaaaugacacaguacaugauaggaccccuuaucggacccuauugaugaaugagcuagguguuccauuucaucuggggaccaagcaagugugcauagcaugguccagcucaaguugucacgauggaaaagcauggcugcauguuuguguaacgggggaugacaaaaaugcaacugcuagcuucauuuacaaugggaggcuuguagauaguauuguuucaugguccaaagaaauccucaggacccaggagucagaaugcguuuguaucaauggaacuuguacaguaguaaugacugaugggagugcuucaggaaaagcugauacuaaaauacuauucauugaggaggggaaaaucguucauacuagcacauugucaggaagugcucagcaugucgaggagugcuccugcuauccucgauauccuggugucagaugugucugcagagacaauuggaaaggcuccaauaggcccaucguagauauaaacauaaaggauuauagcauuguuuccagauaugugugcucaggaauuguuggagacacacccagaaaaaacgacagcuccagcaguagccauugcuuggauccuaacaaugaagaagguggucauggagugaaaggcugggccuuugaugauggaaaugacguguggaugggaagaacgaucagcgagaagucacgcucaggauaugaaaccuucaaagucauugaaggcugguccaacccuaauuccaaauugcagauaaauaggcaagucauaguugacagagguaauagguccgguuauucugguauuuucucuguugaaggcaaaagcugcaucaaucggugcuuuuauguggaguugauaaggggaagaaaagaggaaaccgaaguuuuguggaccucaaacaguauuguuguguuuuguggcaccucagguacauauggaacaggcucauggccugauggggcggacaucaaucucaugccuauauaa

SEQ ID NO: 53474 - RNA, 1410 nt, Artificial Sequence
  derived and/or modified CDS sequence (wt) from neuraminidase__InfluenzaA__AEX33993
augaauccaaaucaaaagauaauaacgauuggcucuguuucucucaccauuuccacaauaugcuucuucaugcaaauugccaucuugauaacuacuguaacauugcauuucaagcaauaugaauucaacucccccccaaacaaccaagugaugcugugugaaccaacaauaauagaaagaaacauaacagagauaguguaucugaccaacaccaccauagagaaggaaauaugccccaaacuagcagaauacagaaauuggucaaagccgcaaugugacauuacaggauuugcaccuuuuucuaaggacaauucgauuaggcuuuccgcugguggggacaucugggugacaagagaaccuuaugugucaugcgauccugacaaguguuaucaauuugcccuuggacagggaacaacacuaaacaacgugcauucaaaugacacaguacgugauaggaccccuuaucggacccuauugaugaaugaguuagguguuccuuuucaucuggggaccaagcaagugugcauagcaugguccagcucaaguugucacgauggaaaagcauggcugcauguuuguauaacgggggaugauaaaaaugcaacugcuagcuucauuuacaaugggaggcuuguagauaguauuguuucaugguccaaagaaauccucaggacccaggagucagaaugcguuuguaucaauggaacuuguacaguaguaaugacugaugggagugcuucaggagaagcugauacuaaaauacuauucauugaggaggggaaaaucguucauacuagcacauugucaggaagugcucagcaugucgaggagugcuccugcuauccucgauauccuggugucagaugugucugcagagacaacuggaaaggcuccaauaggcccaucguagauauaaacauaaaggaucauagcauuguuuccaguuauguguguucaggacuuguuggagacacacccagaaaaaacgacagcuccagcaguagccauuguuuggauccuaacaaugaagaagguggucauggagugaaaggcugggccuuugaugauggaaaugacguguggaugggaagaacgaucagcgagaagucacgcuuaggguaugaaaccuucaaagucauugaaggcugguccaacccuaaguccaaauugcagauaaauaggcaagucauaguugacagagguaauagguccgguuauucugguauuuucucuguugaaggcaaaagcugcaucaaucggugcuuuuauguggaguugauaaggggaagaaaagaggaaacugaagucuuguggaccucaaacaguauuguuguguuuuguggcaccucagguacauauggaacaggcucauggccugauggggcggacaucaaucucaugccuguauaa

SEQ ID NO: 53475 - RNA, 1410 nt, Artificial Sequence
  derived and/or modified CDS sequence (wt) from neuraminidase__InfluenzaA__AEX34026
augaauccaaaucaaaagauaauaacgauuggcucuguuucucucaccauuuccacaauaugcuucuucaugcaaauugccaucuugauaacuacuguaacauugcauuucaagcaauaugaauucaacucccccccaaacaaccaagugaugcugugugaaccaacaauaauagaaagaaacauaacagagauaguguaucugaccaacaccaccauagaaaaggaaauaugccccaaacuagcagaauacagaaauuggucaaagccgcaaugugacauuacaggauuugcaccuuuuucuaaggacaauucgauuaggcuuuccgcugguggggacaucugggugacaagagaaccuuaugugucaugcgauccugacaaguguuaucaauuugcccuuggacagggaacaacacuaaacaacgugcauucaaaugacacaguacgugauaggaccccuuaucggacccuauugaugaaugaguuagguguuccuuuucaucuggggaccaagcaagugugcauagcaugguccagcucaaguugucacgauggaaaagcauggcugcauguuuguauaacgggggaugauaaaaaugcaacugcuagcuucauuuacaaugggaggcuuguagauaguguuguuucaugguccaaagaaauccucaggacccaggagucagaaugcguuuguaucaauggaacuuguacaguaguaaugacugaugggagugcuucaggaaaagcugauacuaaaauacuauucauugaggaggggaaaaucguucauacuagcacauugucaggaagugcucagcaugucgaggagugcuccugcuauccucgauauccuggugucagaugugucugcagagacaacuggaaaggcuccaauaggcccaucguagauauaaacauaaaggaucauagcauuguuuccaguuauguguguucaggacuuguuggagacacacccagaaaaaacgacagcuccagcaguagccauuguuuggauccuaacaaugaagaagguggucauggagugaaaggcugggccuuugaugauggaaaugacguguggaugggaagaacgaucagcgagaagucacgcuuaggguaugaaaccuucaaagucauugaaggcugguccaacccuaaguccaaauugcagauaaauaggcaagucauaguugacagagguaauagguccgguuauucugguauuuucucuguugaaggcaaaagcugcaucaaucggugcuuuuauguggaguugauaaggggaagaaaagaggaaacugaagucuuguggaccucaaacaguauuguuguguuuuguggcaccucagguacauauggaacaggcucauggccugauggggcggacaucaaucucaugccuauauaa

SEQ ID NO: 53476 - RNA, 1410 nt, Artificial Sequence
  derived and/or modified CDS sequence (wt) from neuraminidase__InfluenzaA__AEX34036
augaauccaaaucaaaagauaauaacgauuggcucuguuucucucaccauuuccacaauaugcuucuucaugcaaauugccaucuugauaacuacuguaacauugcauuucaagcaauaugaauucagcucccccccaaacaaccaagugaugcugugugaaccaacaauaauagaaagaaacauaacagagauaguguaucugaccaacaccaccaucgagaaggaaauaugccccaaacuagcagaauacagaaauuggucaaagccgcaaugugacauuacaggauuugcaccuuuuucuaaggacaauucgauuaggcuuuccgcugguggggacaucuggguaacaagagaaccuuaugugucaugcgauccugacaaguguuaucaauuugcccuuggacagggaacaacacuaaacaacgugcauucaaaugacacaguacaugguaggaccccuuaucggacccuauugaugaaugagcuagguguuccauuucaucuggggaccaagcaagugugcauagcaugguccagcucaaguugucacgauggaaaagcauggcugcauguuuguguaacgggggaugacaaaaaugcaacugcuagcuucauuuacaaugggaggcuuguagauaguauuguuucaugguccaaagaaauccucaggacccaggagucagaaugcguuuguaucaauggaacuugugcaguaguaaugacugaugggagugcuucaggaaaagcugauacuaaaauauuauucauugaggaggggaaaaucguucauacuagcacauugucaggaagugcucagcaugucgaggagugcuccugcuauccucgauauccuggugucagaugugucugcagagacaauuggaaaggcuccaauaggcccaucguagauauaaacauaaaggauuauagcauuguuuccagauaugugugcucaggacuuguuggagacacacccagaaaaaacgacagcuccagcaguagccauuguuuggauccuaacaaugaagaagguggucauggagugaaaggcugggccuuugaugauggagaugacguauggaugggaagaacgaucagcgagaagucacgcucaggauaugaaaccuucaaagucauugaaggcugguccaacccuaauuccaaauugcagauaaauaggcaagucauaguugacagagguaauagguccgguuauucugguauuuucucuguugaaggcaaaagcugcaucaaucggugcuuuuauguggaguugauaaggggaagaaaagaggaaacugaaguuuuguggaccucaaacaguauuguuguguuuuguggcaccucagguacauauggaacaggcucauggccugauggggcggacaucaaucucaugccuauauaa

SEQ ID NO: 53477 - RNA, 1410 nt, Artificial Sequence
  derived and/or modified CDS sequence (wt) from neuraminidase__InfluenzaA__AEX34058
augaauccaaaucaaaagauaauaacgauuggcucuguuucucucaccauuuccacaauaugcuucuucaugcaaauugccaucuugauaacuacuguaacauugcauuucaagcaauaugaauucagcucccccccaaacaaccaagugaugcugugugaaccagcaauaauagaaagaaacauaacagagauaguguaucugaccaacaccaccauagagaaggaaauaugccccaaacuaacagaauacagaaauuggucaaagccgcaaugugacauuacaggauuugcaccuuuuucuaaggacaauucgauuaggcuuuccgcugguggggacaucugggugacaagagaaccuuaugugucaugcgauccugacaaguguuaucaauuugcccuuggacagggaacaacacuaaacaacgugcauucaaaugacacaguacaugauaggaccccuuaucggacccuauugaugaaugagcuagguguuccauuucaucuggggaccaagcaagugugcauagcaugguccagcucaaguugucacgauggaaaagcauggcugcauguuuguguaacgggggaugacaaaaaugcaacugcuagcuucauuuacaaugggaggcuuguagauaguauuguuucaugguccaaagaaauccucaggacccaggagucagaaugcguuuguaucaauggaacuuguacaguaguaaugacugaugggagugcuucaggaaaagcugauacuaaaauacuauucauugaggaggggaaaaucguucauacuagcacauugucaggaagugcucagcaugucgaggagugcuccugcuauccucgauauccuggugucagaugugucugcagagacaauuggaaaggcuccaauaggcccaucguagauauaaacauaaaggauuauagcauuguuuccagauaugugugcucaggacuuguuggagacacacccagaaaaaacgacagcuccagcaguagccauugcuuggauccuaacaaugaagaagguggucauggagugaaaggcugggccuuugaugauggaaaugacguguggaugggaagaacgaucagcgagaagucacgcucaggauaugaaaccuucaaagucauugaaggcugguccaacccuaauuccaaauugcagauaaauaggcaagucauaguugacagagguaauagguccgguuauucugguauuuucucuguugaaggcaaaagcugcaucaaucggugcuuuuauguggaguugauaaggggaagaaaagaggaaaccgaaguuuuguggaccucaaacaguauuguuguguuuuguggcaccucagguacauauggaacaggcucauggccugauggggcggacaucaaucucaugccuauauaa

SEQ ID NO: 53478 - RNA, 1410 nt, Artificial Sequence
  derived and/or modified CDS sequence (wt) from neuraminidase__InfluenzaA__AEX34103
augaauccaaaucaaaagauaauaacgauuggcucuguuucucucaccauuuccacaauaugcuucuucaugcaaauugccaucuugauaacuacuguaacauugcauuucaagcaauaugaauucagcucccccccaaacaaccaagugaugcugugugaaccaacaauaauagaaagaaacauaacagagauaguguaucugaccaacaccaccauagagaaggaaguaugccccaaacuagcagaauacagaaauuggucaaagccgcaaugugacauuacaggauuugcaccuuuuucuaaggacaauucgauuaggcuuuccgcugguggggacaucugggugacaagagaaccuuaugugucaugcgauccugacaaguguuaucaauuugcccuuggacagggaacaacacuaaacaacgugcauucaaaugacacaguacaugauaggaccccuuaucggacccuauugaugaaugagcuagguguuccauuucaucuggggaccaagcaagugugcauagcaugguccagcucaaguugucacgauggaaaagcauggcugcauguuuguguaacgggggaugacaaaaaugcaacugcuagcuucauuuacaaugggaggcuuguagauaguauuguuucaugguccaaagaaauccucaggacccaggagucagaaugcguuuguaucaauggaacuuguacaguaguaaugacugaugggagugcuucaggaaaagcugauacuaaaauacuauucauugaggaggggaaaaucguucauacuagcacauugucaggaaaugcucagcaugucgaggagugcuccugcuauccucgauauccuggugucagaugugucugcagagacaauuggaaaggcuccaauaggcccaucguagauauaaacauaaaggauuauagcauuguuuccagauaugugugcucaggacuuguuggagacacacccagaaaaaacgacagcuccagcaguagccauugcuuggauccuaacaaugaagaagguggucauggagugaaaggcugggccuuugaugauggaaaugacguguggaugggaagaacgaucagcgagaagucacgcucaggauaugaaaccuucaaagucauugaaggcugguccaacccuaauuccaaauugcagauaaauaggcaagucauaguugacagagguaauagguccgguuauucugguauuuucucuguugaaggcaaaagcugcaucaaucggugcuuuuauguggaguugauaaggggaagaaaagaggaaaccaaaguuuuguggaccucaaacaguauuguuguguuuuguggcaccucagguacauauggaacaggcucauggccugauggggcggacaucaaucucaugccuauauaa

SEQ ID NO: 53479 - RNA, 1410 nt, Artificial Sequence
  derived and/or modified CDS sequence (wt) from neuraminidase__InfluenzaA__AEX34114
augaauccaaaucaaaagauaauaacgauuggcucuguuucucucaccauuuccacaauaugcuucuucaugcaaauugccaucuugauaacuacuguaacauugcauuucaagcaauaugaauucagcucccccccaaacaaccaagugaugcugugugaaccagcaauaauagaaagaaacauaacagagauaguguauccgaccaacaccaccauagagaaggaaauaugccccaaacuagcagaauacagaaauuggucaaagccgcaaugugacauuacaggauuugcaccuuuuucuaaggacaauucgauuaggcuuuccgcugguggggacaucugggugacaagagaaccuuaugugucaugcgauccugacaaguguuaucaauuugcccuuggacagggaacaacacuaaacaacgugcauucaaaugacacaguacaugauaggaccccuuaucggacccuauugaugaaugagcuagguguuccauuucaucuggggaccaagcaagugugcauagcaugguccagcucaaguugucacgauggaaaagcauggcugcauguuuguguaacgggggaugacaaaaaugcaacugcuagcuucauuuacaaugggaggcuuguagauaguauuguuucaugguccaaagaaauccucaggacccaggagucagaaugcguuuguaucaauggaacuuguacaguaguaaugacugaugggagugcuucaggaaaagcugauacuaaaauacuauucauugaggaggggaaaaucguucauacuagcacauugucaggaagugcucagcaugucgaggagugcuccugcuauccucgauauccuggugucagaugugucugcagagacaauuggaaaggcuccaauaggcccaucguagauauaaacauaaaggauuauagcauuguuuccagauaugugugcucaggacuuguuggagacacacccagaaaaaacgacagcuccagcaguagccauugcuuggauccuaacaaugaagaagguggucauggagugaaaggcugggccuuugaugauggaaaugacguguggaugggaagaacgaucagcgagaagucacgcucaggauaugaaaccuucaaagucauugaaggcugguccaacccuaauuccaaauugcagauaaauaggcaagucauaguugacagagguaauagguccgguuauucugguauuuucucuguugaaggcaaaagcugcaucaaucggugcuuuuauguggaguugauaaggggaagaaaagaggaaaccgaaguuuuguggaccucaaacaguauuguuguguuuuguggcaccucagguacauauggaacaggcucauggccugauggggcggacaucaaucucaugccuauauaa

SEQ ID NO: 53480 - RNA, 1410 nt, Artificial Sequence
  derived and/or modified CDS sequence (wt) from neuraminidase__InfluenzaA__AEX34137
augaauccaaaucaaaagauaauaacgauuggcucuguuucucucaccauuuccacaauaugcuucuucaugcaaauugccaucuugauaacuacuguaacauugcauuucaagcaauaugaauucaacucccccccaaacaaccaagugaugcugugugaaccaacaauaauagaaagaaacauaacagagauaguguaucugaccaacaccaccauagagaaggaaauaugccccaaacuagcagaauacagaaauuggucaaagccgcaaugugacauuacaggauuugcaccuuuuucuaaggacaauucgauuaggcuuuccgcugguggggacaucugggugacaagagaaccuuaugugucaugcgauccugacaaguguuaucaauuugcccuuggacagggaacaacacuaaacaacgugcauucaaaugacacaguacgugguaggaccccuuaucggacccuauugaugaaugaguuagguguuccuuuucaucuggggaccaagcaagugugcauagcaugguccagcucaaguugucacgauggaaaagcauggcugcauguuuguauaacgggggaugauaaaaaugcaacugcuagcuucauuuacaaugggaggcuuguagauaguauuguuucaugguccaaagaaauccucaggacccaggagucagaaugcguuuguaucaauggaacuuguacaguaguaaugacugaugggagugcuucaggaaaagcugauacuaaaauacuauucauugaggaggggaaaaucguucauacuagcacauugucaggaagugcucagcaugucgaggagugcuccugcuauccucgauauccuggugucagaugugucugcagagacaacuggaaaggcuccaauaggcccaucguagauauaaacauaaaggaucauagcauuguuuccaguuauguguguucaggacuuguuggagacacacccagaaaaaacgacagcuccagcaguagccauuguuuggauccuaacaaugaagaagguggucauggagugaaaggcugggccuuugaugauggaaaugacguguggaugggaagaacgaucagcgagaagucacgcuuaggguaugaaaccuucaaagucauugaaggcugguccaacccuaaguccaaauugcagauaaauaggcaagucauaguugacagagguaauagguccgguuauucugguauuuucucuguugaaggcaaaagcugcaucaaucggugcuuuuauguggaguugauaaggggaagaaaagaggaaacugaagucuuguggaccucaaacaguauuguuguguuuuguggcaccucagguacauauggaacaggcucauggccugauggggcggacaucaaucucaugccuauauaa

SEQ ID NO: 53481 - RNA, 1410 nt, Artificial Sequence
  derived and/or modified CDS sequence (wt) from neuraminidase__InfluenzaA__AEX34191
augaauccaaaucaaaagauaauaacgauuggcucuguuucucucagcauuuccacaauaugcuucuucaugcaaauugccaucuugauaacuacuguaacauugcauuucaagcaauaugaauucaacuccuccccaaacaaccaagugaugcugugugaaccaacaauaauagaaagaaacauaacagagauaguguaucugaccaacaccaccauagagaaggaaauaugccccaaacuagcagaauacagaaauuggucaaagccgcaaugugacauuacaggauuugcaccuuuuucuaaggacaauucgauuaggcuuuccgcugguggggacaucugggugacaagagaaccuuaugugucaugcgauccugacaaguguuaucaauuugcccuuggacagggaacaacacuaaacaacgugcauucaaauaacacaguacgugauaggaccccuuaucggacccuauugaugaaugaguuagguguuccuuuucaucuggggaccaagcaagucugcauagcaugguccagcucaaguugucacgauggaaaagcauggcugcauguuuguauaacgggggaugauaaaaaugcaacugcuagcuucauuuacaaugggaggcuuguagauaguauuguuucaugguccaaagaaauccucaggacccaggagucagaaugcguuuguaucaauggaacuuguacaguaguaaugacugaugggagugcuucaggaaaagcugauacuaaaauacuauucauugaggaggggaaaaucguucauacuagcacauugucaggaagugcucagcaugucgaggagugcuccugcuauccucgauauccuggugucagaugugucugcagagacaacuggaaaggcuccaauaggcccaucguagauauaaacauaaaggaucauagcauuguuuccaguuauguguguucaggacuuguuggagacacacccagaaaaaacgacagcuccagcaguagccauuguuuggauccuaacaaugaagaagguggucauggagugaaaggcugggccuuugaugauggaaaugacguguggaugggaagaacgaucagcgagaagucacgcuuaggguaugaaaccuucaaagucauugaaggcugguccaacccuaaguccaaauugcagauaaauaggcaagucauaguugacagagguaauagguccgguuauucugguauuuucucuguugaaggcaaaagcugcaucaaucggugcuuuuauguggaguugauaaggggaagaaaagaggaaacugaagucuuguggaccucaaacaguauuguuguguuuuguggcaccucagguacauauggaacaggcucauggccugauggggcggacaucaaucucaugccuauauaa

SEQ ID NO: 53482 - RNA, 1410 nt, Artificial Sequence
  derived and/or modified CDS sequence (wt) from neuraminidase__InfluenzaA__AEX34224
augaauccaaaucaaaagauaauaacgauuggcucuguuucucucaccauuuccacaauaugcuucuucaugcaaauugccaucuugauaacuacuguaacauugcauuucaagcaauaugaauucagcucccccccaaacaaccaagugaugcugugugaaccaacaauaauagaaagaaacauaacagagauaguguaucugaccaacaccaccauagagaaggaaauaugccccaaacuagcagaauacagaaauuggucaaagccgcaaugugacauuacaggauuugcaccuuuuucuaaggacaauucgauuaggcuuuccgcugguggggacaucugggugacaagagaaccuuaugugucaugcgauccugacaaguguuaucaauuugcccuuggacagggaacaacacuaaacaacgugcauucaaaugacacaguacaugguaggaccccuuaucggacccuauugaugaaugagcuagguguuccauuucaucuggggaccaagcaagugugcauagcaugguccagcucaaguugucacgauggaaaagcauggcugcauguuuguguaacgggggaugacaaaaaugcaacugcuagcuucauuuacaaugggaggcuuguagauaguauuguuucaugguccaaagaaauccucaggacccaggagucagaaugcguuuguaucaauggaacuuguacaguaguaaugacugaugggagugcuucaggaaaagcugauacuaaaauacuauucauugaggaggggaaaaucguucauacuagcacauugucaggaagugcucagcaugucgaggagugcuccugcuauccucgauauccuggugucagaugugucugcagagacaauuggaaaggcuccaauaggcccaucguagauauaaacauaaaggauuauagcauuguuuccagauaugugugcucaggacuuguuggagacacacccagaaaaaacgacagcuccagcaguagccauugcuuggauccuaacaaugaagaagguggucauggagugaaaggcugggccuuugaugauggaaaugacguguggaugggaagaacgaucagcgagaaguuacgcucaggauaugaaaccuucaaagucauugaaggcugguccaacccuaauuccaaauugcagauaaauaggcaagucauaguugacagagguaauagguccgguuauucugguauuuucucuguugaaggcaaaagcugcaucaaucggugcuuuuauguggaguugauaaggggaagaaaagaggaaaccgaaguuuuguggaccucaaacaguauuguuguguuuuguggcaccucagguacauauggaacaggcucauggccugauggggcggacaucaaucucaugccuauauaa

SEQ ID NO: 53483 - RNA, 1410 nt, Artificial Sequence
  derived and/or modified CDS sequence (wt) from neuraminidase__InfluenzaA__AEX34235
augaauccaaaucaaaagauaauaacgauuggcucuguuucucucaccauuuccacaauaugcuucuucaugcaaauugccaucuugauaacuacuguaacauugcauuucaagcaauaugaauucagcucccccccaaacaaccaagugaugcugugugaaccagcaauaauagaaagaaacauaacagagauaguguaucugaccaacaccaccauagagaaggaaauaugccccaaacuagcagaauacagaaauuggucaaagccgcaaugugacauuacaggauuugcaccuuuuucuaaggacaauucgauuaggcuuuccgcugguggggacaucugggugacaagagaaccuuaugugucaugcgauccugacaaguguuaucaauuugcccuuggacagggaacaacacuaaacaacgugcauucaaaugacacaguacaugauaggaccccuuaucggacccuauugaugaaugagcuagguguuccauuucaucuggggaccaagcaagugugcauagcaugguccagcucaaguugucacgauggaaaagcauggcugcauguuuguguaacgggggaugacaaaaaugcaacugcuagcuucauuuacaaugggaggcuuguagauaguauuguuucaugguccaaagaaauccucaggacccaggagucagaaugcguuuguaucaauggaacuuguacaguaguaaugacugaugggagugcuucaggaaaagcugauacuaaaauacuauucauugaggaggggaaaaucguucauacuagcacauugucaggaagugcucagcaugucgaggagugcuccugcuauccucgauauccuggugucagaugugucugcagagacaauuggaaaggcuccaauaggcccaucguagauauaaacauaaaggauuauagcauuguuuccagauaugugugcucaggacuuguuggagacacacccagaaaaagcgacagcuccagcaguagccauugcuuggauccuaacaaugaagaagguggucauggagugaaaggcugggccuuugaugauggaaaugacguguggaugggaagaacgaucagcgagaagucacgcucaggauaugaaaccuucaaagucauugaaggcugguccaacccuaauuccaaauugcagauaaauaggcaagucauaguugacagagguaauagguccgguuauucugguauuuucucuguugaaggcaaaagcugcaucaaucggugcuuuuauguggaguugauaaggggaagaaaagaggaaaccgaaguuuuguggaccucaaacaguauuguuguguuuuguggcaccucagguacauauggaacaggcucauggccugauggggcggacaucaaucucaugccuauauaa

SEQ ID NO: 53484 - RNA, 1410 nt, Artificial Sequence
  derived and/or modified CDS sequence (wt) from neuraminidase__InfluenzaA__AEX34246
augaauccaaaucaaaagauaauaacgauuggcucuguuucucucaccauuuccacaauaugcuucuucaugcaaauugccaucuugauaacuacuguaacauugcauuucaagcaauaugaauucaacucccccccaaacaaccaagugaugcugugugaaccaacaauaauagaaagaaacauaacagagauaguguaucugaccaacaccaccauagagaaggaaauaugccccaaacuagcagaauacagaaauuggucaaagccgcaaugugacauuacaggauuugcaccuuuuucuaaggacaauucgauuaggcuuuccgcugguggggacaucugggugacaagagaaccuuaugugucaugcgauccugacaaguguuaucaauuugcccuuggacagggaacaacacuaaacaacgugcauucaaaugacacaguacgugguaggaccccuuaucggacccuauugaugaaugaguuagguguuccuuuucaucuggggaccaagcaagugugcauagcaugguccagcucaaguugucacgauggaaaagcauggcugcauguuuguauaacgggggaugauaaaaaugcaacugcuagcuucauuuacaaugggaggcuuguagauaguauuguuucaugguccaaagaaauccucaggacccaggaaucagaaugcguuuguaucaauggaacuuguacaguaguaaugacugaugggagugcuucaggaaaagcugauacuaaaauacuauucauugaggaggggaaaaucguucauacuagcacauugucaggaagugcucagcaugucgaggagugcuccugcuauccucgauauccuggugucagaugugucugcagagacaacuggaaaggcuccaauaggcccaucguagauauaaacauaaaggaucauagcauuguuuccaguuauguguguucaggacuuguuggagacacacccagaaaaaacgacagcuccagcaguagccauuguuuggauccuaacaaugaagaagguggucauggagugaaaggcugggccuuugaugauggaaaugacguguggaugggaagaacgaucagcgagaagucacgcuuaggguaugaaaccuucaaagucauugaaggcugguccaacccuaaguccaaauugcagguaaauaggcaagucauaguugacagagguaauagguccgguuauucugguauuuucucuguugaaggcaaaagcugcaucaaucggugcuuuuauguggaguugauaaggggaagaaaagaggaaacugaagucuuguggaccucaaacaguauuguuguguuuuguggcaccucagguacauauggaacaggcucauggccugauggagcggacaucaaucucaugccuauauaa

SEQ ID NO: 53485 - RNA, 1410 nt, Artificial Sequence
  derived and/or modified CDS sequence (wt) from neuraminidase__InfluenzaA__AEX34257
augaauccaaaucaaaagauaauaacgauuggcucuguuucucucaccauuuccacaauaugcuucuucaugcaaauugccaucuugauaacuacuguaacauugcauuucaagcaauaugaauucaacuccuccccaaacaaccaagugaugcugugugaaccaacaauaauagaaaggaacauaacagagauaguguaucugaccaacaccaccauagagaaggaaauaugccccaaacuagcagaauacagaaauuggucaaagccgcaaugugacauuacaggauuugcaccuuuuucuaaggacaacucgauuaggcuuuccgcugguggggacaucugggugacaagagaaccuuaugugucaugcgauccugacaaguguuaucaauuugcccuuggacagggaacaacacuaaacaacgugcauucaaauaacacaguacguaauaggaccccuuaucggacccuauugaugaaugaguuagguguuccuuuucaucuggggaccaagcaagucugcauagcaugguccagcucaaguugucacgauggaaaagcauggcugcauguuuguauaacgggggaugauaaaaaugcaacugcuagcuucauuuacaaugggaggcuuguagauaguauuguuucaugguccaaagaaauccucaggacccaggagucagaaugcguuuguaucaauggaacuuguacaguaguaaugacugaugggagugcuucaggaaaagcugauacuaaaauacuauucauugaggaggggaaaaucguucauacuagcacauugucaggaagugcucagcaugucgaggaaugcuccugcuauccucgauauccuggugucagaugugucugcagagacaacuggaaaggcuccaauaggcccaucguagauauaaacauaaaggaucauagcauuguuuccaguuauguguguucaggacuuguuggagacacacccagaaaaaacgacagcuccagcaguagccauuguuuggauccuaacaaugaagaagguggucauggagugaaaggcugggccuuugaugauggaaaugacguguggaugggaagaacgaucagcgagaagucacgcuuaggguaugaaaccuucaaagucauugaaggcugguccaacccuaaguccaaauugcagauaaauaggcaagucauaguugacagagguaauagguccgguuauucugguauuuucucuguugaaggcaaaagcugcaucaaucggugcuuuuauguggaguugauaaggggaagaaaagaggaaacugaagucuuguggaccucaaacaguauuguuguguuuuguggcaccucagguacauauggaacaggcucauggccugauggggcggacaucaaucucaugccuauauaa

SEQ ID NO: 53486 - RNA, 1410 nt, Artificial Sequence
  derived and/or modified CDS sequence (wt) from neuraminidase__InfluenzaA__AEX34268
augaauccaaauaaaaagauaauaacgauuggcucuguuucucucaccauuuccacaauaugcuucuucaugcaaauugccaucuugauaacuacuguaacauugcauuucaagcaauaugaauucaacucccccccaaacaaccaagugaugcugugugaaccaacaauaauagaaagaaacauaacagagauaguguaucugaccaacaccaccauagagaaggaaauaugccccaaacuagcagaauacagaaauuggucaaagccgcaaugugacauuacaggauuugcaccuuuuucuaaggacaauucgauuaggcuuuccgcugguggggacaucugggugacaagagaaccuuaugugucaugcgauccugacaaguguuaucaauuugcccuuggacagggaacaacacuaaacaacgugcauucaaaugacacaguacguaauaggaccccuuaucggacccuauugaugaaugaguuagguguuccuuuucaucuggggaccaagcaagugugcauagcaugguccagcucaaguugucacgauggaaaagcauggcugcauguuuguauaacgggggaugauaaaaaugcaacugcuagcuucauuuacaaugggaggcuuguagauaguauuguuucaugguccaaagaaauccuccggacccaggagucagaaugcguuuguaucaauggaacuuguacaguaguaaugacugaugggagugcuucaggaaaagcugauacuaaaauacuauucauugaggaggggaaaaucguucauacuagcaaauugucaggaagugcucagcaugucgaggagugcuccugcuauccucgauauccuggugucagaugugucugcagagacaacuggaaaggcuccaauaggcccaucguagauauaaacauaaaggaucauagcauuguuuccaguuauguguguucaggacuuguuggagacacacccagaaaaaacgacagcuccagcaguagccauuguuuggauccuaacaaugaagaagguggucauggagugaaaggcugggccuuugaugauggaaaugacguguggaugggaagaacgaucagcgagaagucacgcuuaggguaugaaaccuucaaagucauugaaggcugguccaacccuaaguccaaauugcagauaaauaggcaagucauaguugacagagguaauagguccgguuauucugguauuuucucuguugaaggcaaaagcugcaucaaucggugcuuuuauguggaguugauaaggggaagaaaagaggaaacugaagucuuguggaccucaaacaguauuguuguguuuuguggcaccucagguacauauggaacaggcucauggccugauggggcggacaucaaucucaugccuauauaa

SEQ ID NO: 53487 - RNA, 1410 nt, Artificial Sequence
  derived and/or modified CDS sequence (wt) from neuraminidase__InfluenzaA__AEX34278
augaauccaaaucaaaagauaauaacgauuggcucuguuucccucaccauuuccacaauaugcuucuucaugcaaauugccaucuugauaacuacuguaacauugcauuucaagcaauaugaauucagcucccccccaaacaaccaagugaugcugugugaaccagcaauaauagaaagaaacauaacagagauaguguaucugaccaacaccaccauagagaaggaaauaugccccaaacuagcagaauacagaaauuggucaaagccgcaaugugacauuacaggauuugcaccuuuuucuaaggacaauucgauuaggcuuuccgcugguggggacaucugggugacaagagaaccuuaugugucaugcgauccugacaaguguuaucaauuugcccuugggcagggaacaacacuaaacaacgugcauucaaaugacacaguacaugauaggaccccuuaucggacccuauugaugaaugagcuagguguuccauuucaucuggggaccaaacaagugugcauagcaugguccagcucaaguugucacgauggaaaagcauggcugcauguuuguguaacgggggaugacaaaaaugcaacugcuagcuucauuuacaaugggaggcuuguagauaguauuguuucaugguccaaagaaauccucaggacccaggagucagaaugcguuuguaucaauggaacuuguacaguaguaaugacugaugggagugcuucaggaaaagcugauacuaaaauacuauucauugaggaggggaaaaucguucauacuagcacauugucaggaagugcucagcaugucgaggagugcuccugcuauccucgauauccuggugucagaugugucugcagagacaauuggaaaggcuccaauaggcccaucguagauauaaacauaaaggauuauagcauuguuuccagauaugugugcucaggacuuguuggagacacacccagaaaaaacgacagcuccagcaguagccauugcuuggauccuaacaaugaaaaagguggucauggagugaaaggcugggccuuugaugauggaaaugacguguggaugggaagaacgaucagcgagaagucacgcucaggauaugaaaccuucaaagucauugaaggcugguccaacccuaauuccaaauugcagauaaauaggcaagucauaguugacagagguaauagguccgguuauucugguauuuucucuguugaaggcaaaagcugcaucaaucggugcuuuuauguggaguugauaaggggaagaaaagaggaaaccgaaguuuuguggaccucaaacaguauuguuguguuuuguggcaccucagguacauauggaacaggcucauggccugauggggcggacaucaaucucaugccuauauaa

SEQ ID NO: 53488 - RNA, 1413 nt, Artificial Sequence
  derived and/or modified CDS sequence (wt) from neuraminidase__InfluenzaA__AEX34310
augaacccaaaucaaaaaauaauaaccauuggaucaaucaguauagcaaucggaauaauuagucuaauguugcaaauaggaaauaucauuucaauaugggcuagucacucaauucaaacuggaacucaaaaccacacuggaauaugcaaccaaagaaucaucacauaugaaaacagcaccugggugaaucacacauauguuaauauuaacaacacuaauguuguugcuggaaaggacaaaacuccagugacauuggucggcaacucaucucuuuguucuaucaguggaugggcuauauacacaaaagacaacagcauaagaauugguucuaaaggagauguuuuugucauaagagaaccuuucauaucauguucucacuuggaaugcaaaaccuuuuuucugacccaaggcgcucuauuaaaugacaaacauucaaaugggaccguaaaggacagaaguccuuauagggccuuaaugagcuguccucuaggugaagcuccguccccauacaauucaaaguucgaaucaguugcauggucagcaagcgcaugccaugauggcauaggcugguuaacaaucggaauuucugguccagacaauggagcuguggcuguacuaaaauacaaaggaauaauaacuggaaccauaaaaaguuggaaaaagcaaauauuaagaacacaagagucugaaugugucuguaugaacgggucauguuucaccauaaugaccgaugguccgaguaauggggccgccucguacaaaauuuucaagaucgaaaaggggaagguuacuaaaucaauggaguugaaugcacccaauuuucauuaugaggaauguucuuguuacccagacacuggcacagugauguguguaugcagggacaacuggcaugguucaaaucgaccuugggugucuuuuaaucaaaacuuggauuaucaaauaggauacaucugcaguggaguguucggugacaauccgcgucccaaagauagagagggcagcugcaauccagugacuguugauggagcaaacggaguaaaaggguuuucauacaaauaugguaaugguguuuggauaggaaggaccaaaaguaacagaauuagaaagggguuugagaugauuugggauccuaauggauggacaaauaccgacagugauuucucagugaaacaggauauuguagcaauaacugauuggucaggguacagcggaaguuucguccaacauccugaguuaacaggauuggacuguauaagaccuugcuucuggguugaguuagucagagggcugccuggagaaaauacaacaaucuggacuagugggagcagcauuucuuuuuguggcguuaauggugauauugcaaauuggucuuggccagacggugcugaguugccguucaccauugacaaguag

SEQ ID NO: 53489 - RNA, 1413 nt, Artificial Sequence
  derived and/or modified CDS sequence (wt) from neuraminidase__InfluenzaA__AEX34321
augaacccaaaucaaaagauaauaaccauuggaucaaucaguauagcaaucggaauaauuagucuaauguugcaaauaggaaauauuauuucaauauggguuagucacucaauccaaacuggaagucaaaacaacacuggaauauguaaccaaagaaucaucacauaugaaaacagcaccugggugaaucacacauauguuaauauuaacaacacuaauguuguugcuggagaagacaaaacuucagugacauuggccggcaauucaucucuuuguucuaucaguggaugggcuauauacacaaaagacaacagcauaagaauuggcuccaaaggagauguuuuugucauaagagaaccuuucauaucauguucucacuuggaaugcagaaccuuuuuucugacccaaggcgcucuauuaaaugacaaacauucaaaugggaccguaaaggacagaaguccuuauagggccuuaaugagcuguccucuaggugaagcuccguccccauacaauucaaaguucgaaucaguugcauggucagcaagcgcaugccaugauggcaugggcugguuaacaaucggaauuucugguccagacaauggagcuguagcuguacuaaaauacaacggaauaauaacuggaaccauaaaaaguuggaaaaagcaaauauuaagaacacaagagucugaaugugucuguaugaacgggucauguuucaccauaaugaccgauggcccgaguaauaaggccgccucguacaaaauuuucaagaucgaaaaggggaagguuacuaaaucaauagaguugaaugcacccaauuuuuauuaugaggaaugcuccuguuacccagacacuggcauagugauguguguaugcagggacaacuggcaugguucaaaucgaccuugggugucuuuuaaucaaaacuuggauuaucaaauaggauacaucugcaguggaguguuuggugacaauccgcgucccgaagauggagagggcagcugcaauccagugacuguugauggagcaaacggaguaaaaggguuuucauacaaauaugguaaugguguuuggauaggaaggaccaaaaguaacagacuuagaaagggguuugagaugauuugggauccuaauggauggacaaauaccgacagugauuucucagugaaacaggauguuguagcaauaacugauuggucaggguacagcggaaguuucguccaacauccugaguuaacaggauuggacuguauaagaccuugcuucuggguugaguuagucagagggcugccuagagaaaauacaacaaucuggacuagugggagcagcauuucuuuuuguggcguuaauagugauacugcaaacuggucuuggccagacggugcugaguugccguucaccauugacaaguag

SEQ ID NO: 53490 - RNA, 1410 nt, Artificial Sequence
  derived and/or modified CDS sequence (wt) from neuraminidase__InfluenzaA__AEX34356
augaauccaaaucaaaagauaauaacgauuggcucuguuucucucaccauuuccacaauaugcuucuucaugcaaauugccaucuugauaacuacuguaacauugcauuucaagcaauaugaauucaacucccccccaaacaaccaagugaugcugugugaaccaacaauaauagaaagaaacauaacagagauaguguaucugaccaacaccaccauagagaaggaaauaugccccaaacuagcagaauacagaaauuggucaaagccgcaaugugacauuacaggauuugcaccuuuuucuaaggacaauucgauuaggcuuuccgcugguggggacaucugggugacaagagaaccuuaugugucaugcgauccugacaaguguuaucaauuugcccuuggacagggaacaacacuaaacaacgugcauucaaaugacacaguacgugauaggaccccuuaucggacccuauugaugaaugaguuagguguuccuuuucaucuggggaccaagcaagugugcauagcaugguccagcucaaguugucacgauggaaaagcauggcugcauguuuguauaacgggggaugauaaaaaugcaacugcuagcuucauuuacaaugggaggcuuguagauaguauugucucaugguccaaagaaauccucaggacccaggagucagaaugcguuuguaucaauggaacuuguacaguaguaaugacugaugggagugcuucaggaaaagcugauacuaaaauacuauucauugaggaggggaaaaucguucauacuagcacauugucaggaagugcucagcaugucgaggagugcuccugcuauccucgauauccuggugucagaugugucugcagagacaacuggaaaggcuccaauaggcccaucguagauauaaacauaaaggaucauagcauuguuuccaguuauguguguucaggacuuguuggagacacacccagaaaaaacgacagcuccagcaguagccauuguuuggauccuaacaaugaagaagguggucauggagugaaaggcugggccuuugaugauggaaaugacguguggaugggaagaacgaucagcgagaagucacgcuuaggguaugaaaccuucaaagucauugaaggcugguccaacccuaaguccaaauugcagauaaauaggcaagucauaguugacagagguaauaggaccgguuauucugguauuuucucuguugaaggcaaaagcugcaucaaucggugcuuuuauguggaguugauaaggggaagaaaagaggaaacugaagucuuguggaccucaaacaguauuguuguguuuuguggcaccucagguacauauggaacaggcucauggccugauggggcggacaucaaucucaugccuauauaa

SEQ ID NO: 53491 - RNA, 1410 nt, Artificial Sequence
  derived and/or modified CDS sequence (wt) from neuraminidase__InfluenzaA__AEX34367
augaauccaaaucaaaagauaauaacgauuggcucuguuucucucaccauuuccacaauaugcuucuucaugcaaauugccaucuugauaacuacuguaacauugcauuucaagcaauaugaauucaacucccccccaaacaaccaagugaugcugugugaaccaacaauaauagaaagaaacauaacagagauaguguaucugaccaacaccaccauagagaaggaaauaugccccaaacuagcagaauacagaaauuggucaaagccgcaaugugacauuacaggauuugcaccuuuuucuaaggacaauucgauuaggcuuuccgcugguggggacaucugggugacaagagaaccuuaugugucaugcgauccugacaaguguuaucaauuugcccuuggacagggaacaacacuaaacaacgugcauucaaaugacacaguacgugauaggaccccuuaucggacccuauugaugaaugaguuagguguuccuuuucaucuggggaccaagcaagugugcauagcaugguccagcucaaguugucacgauggaaaagcauggcugcauguuuguauaacgggggaugauaaaaaugcaacugcuagcuucauuuacaaugggaggcuuguagauaguauuguuucaugguccaaagaaauccucaggacccaggagucagaauguguuuguaucaauggaacuuguacaguaguaaugacugaugggagugcuucaggaaaagcugauacuaaaauacuauucauugaggaggggaagaucguucauacuagcacauugucaggaagugcuaagcauguugaggagugcuccugcuauccucgacauccuggugucagaugugucugcagagacaacuggaaaggcuccaauaggcccaucguagauauaaacauaaaggaucauagcauuguuuccaguuauguguguucaggacuuguuggagacacacccagaaaaaacgacagcuccagcaguagccauuguuuggauccuaacaaugaagaagguggucauggagugaaaggcugggccuuugaugauggaaaugacguguggaugggaagaacgaucagcgagaagucacgcuuaggguaugaaaccuucaaagucauugaaggcugguccaacccuaaguccaaauugcagauaaauaggcaagucauaguugacagagguaauagguccgguuauucugguauuuucucuguugaaggcaaaagcugcaucaaucggugcuuuuauguggaguugauaaggggaagaaaagaggaaacugaagucuuguggaccucaaacaguauuguuguguuuuguggcaccucagguacauauggaacaggcucauggccugauggugcggacaucaaucucaugccuauauaa

SEQ ID NO: 53492 - RNA, 1410 nt, Artificial Sequence
  derived and/or modified CDS sequence (wt) from neuraminidase__InfluenzaA__AEX34378
augaauccaaaucaaaagauaauaacgauuggcucuguuucucucaccauuuccacaauaugcuucuucaugcaaauugccaucuugauaacuacuguaacauugcauuucaagcaauaugaauucaacucccccccaaacaaccaagugaugcugugugaaccaacaauaauagaaagaaacauaacagagauaguguaucugaccaacaccaccauagagaaggaaauaugccccaaccuagcagaauacagaaauuggucaaagccgcaaugugacauuacaggauuugcaccuuuuucuaaggacaauucgauuaggcuuuccgcugguggggacaucugggugacaagagaaccuuaugugucaugcgauccugacaaguguuaucaauuugcccuuggacagggaacaacacuaaacaacgugcauucaaaugacacaguacgugauaggaccccuuaucggacccuauugaugaaugaguuagguguuccuuuucaucuggggaccaagcaagugugcauagcaugguccagcucaaguugucacgauggaaaagcauggcugcauguuuguauaacgggggaugauaaaaaugcaacugcuagcuucauuuacaaugggaggcuuguagauaguauuguuucaugguccaaagaaauccucaggacccaggagucagaauguguuuguaucaauggaacuuguacaguaguaaugacugaugggagugcuucaggaaaagcugauacuaaaauacuauucauugaggaggggaagaucguucauacuagcacauugucaggaagugcuaagcauguugaggagugcuccugcuauccucgacauccuggugucagaugugucugcagagacaacuggaaaggcuccaauaggcccaucguagauauaaacauaaaggaucauagcauuguuuccaguuauguguguucaggacuuguuggagacacacccagaaaaaacgacagcuccagcaguagccauuguuuggauccuaacaaugaagaagguggucauggagugaaaggcugggccuuugaugauggaaaugacguguggaugggaagaacgaucagcgagaagucacgcuuaggguaugaaaccuucaaagucauugaaggcugguccaacccuaaguccaaauugcagauaaauaggcaagucauaguugacagagguaauagguccgguuauucugguauuuucucuguugaaggcaaaagcugcaucaaucggugcuuuuauguggaguugauaaggggaagaaaagaggaaacugaagucuuguggaccucaaacaguauuguuguguuuuguggcaccucagguacauauggaacaggcucauggccugauggugcggacaucaaucucaugccuauauaa

SEQ ID NO: 53493 - RNA, 1410 nt, Artificial Sequence
  derived and/or modified CDS sequence (wt) from neuraminidase__InfluenzaA__AEX34400
augaauccaaaucaaaagauaauaacgauuggcucuguuucucucaccauuuccacaauaugcuucuucaugcaaauugccaucuugauaacuacuguaacauugcauuucaagcaauaugaauucaacucccccccaaacaaccaagugaugcugugugaaccaacaauaauagaaagaaacauaacagagauaguguaucugaccaacaccaccauagagaaggaaauaugucccaaacuagcagaauacagaaauuggucaaagccgcaaugcgacauuacaggauuugcaccuuuuucuaaggacaauucgauuaggcuuuccgcugguggggacaucugggugacaagagaaccuuaugugucaugcgauccugacaaguguuaucaauuugcccuuggacagggaacaacacuaaacaacguacauucaaaugacacaguacgugguaggaccccuuaucggacccuauugaugaaugaguuagguguuccuuuucaucuggggaccaagcaagugugcauagcaugguccagcucaaguugucacgauggaaaagcauggcugcauguuuguauaacgggggaugauaaaaaugcaacugcuagcuucauuuacaaugggaggcuuguagauaguguuguuucaugguccaaagaaauccucaggacccaggagucagaaugcguuuguaucaauggaacuuguacaguaguaaugacugaugggagugcuucgggaaaagcugauacuaaaauacuauucauuaaggaggggaaaaucguucauacuagcacauugucaggaagugcucagcaugucgaggagugcuccugcuauccucgauauccuggugucagaugugucugcagagacaacuggaaaggcuccaauaggcccaucguagauauaaacauaaaggaucauagcauuguuuccaguuauguguguucaggacuuguuggagacacacccagaaaaaacgacagcuccagcaguagccauuguuuggauccuaacaaugaagaagguggucauggagugaaaggcugggccuuugaugauggaaaugacguguggaugggaagaacgaucagcgagaagucacgcuuaggguaugaaaccuucaaagucauugaaggcugguccaacccuaaguccaaauugcagauaaauaggcaagucauaguugacagagguaauagguccgguuauucugguauuuucucuguugaaggcaaaagcugcaucaaucggugcuuuuauguggaguugauaaggggaagaaaagaggaaacugaagucuuguggaccucgaacaguauuguuguguuuuguggcaccucagguacauauggaacaggcucauggccugauggggcggacaucaaucucaugccuauauaa

SEQ ID NO: 53494 - RNA, 1413 nt, Artificial Sequence
  derived and/or modified CDS sequence (wt) from neuraminidase__InfluenzaA__AEX34432
augaacccaaaucaaaaaauaauaaccauuggaucaaucaguauagcaaucggaauaauuagucuaauauugcaaauaggaaauauuauuucaauaugggcuagucacucaauccaaacuggaagucaaaaccacacuggaauaugcaaccaaagaaucaucacauaugaaaacagcaccugggugaauaauacauauguuaauauuaacaacacuaauguuguuguugaaaaggacaaaacuucagugacauuggccggcaauucaucucuuuguucuaucaguggaugggcuauauacacaaaagacaacagcauaagaauuggcuccaaaggagauguuuuugucauaagagaaccuuucauaucauguucucacuuggaaugcagaaccuuuuuucugacccaaggugcucuauuaaaugacaaacauucaaaugggaccguaaaggacagaaguccuuauagggccuuaaugagcuguccucuaggugaagcuccguccccauacaauucaagguucgaaucaguugcauggucagcaagcgcaugccaugauggcaugggcugguuaacaaucggaauuucugguccagacaauggagcuguggcuguacuaaaauacaacggaauaauaacugaaaccauaaaaaguuggaaaaagcgaauauuaagaacacaagagucugaaugugucuguaugaacgggucauguuucaccauaaugaccgauggcccgaguaaugggaccgccucguacaaaauuuucaagaucgaaaaggggaagguuaccaaaacaauagaguugaaugcacccaauuuucauuaugaggaauguuccuguuacccagacacuggcacagugauguguguaugcagagacaacuggcaugguucaaaucgaccuugggugucuuuuaaucaaaacuuggauuaucaaauaggauacaucugcaguggaguguucggugacaauccucgucccaaagauggggagggcagcugcaauccagugacuguugauggagcagacggaguaaaaggguuuucauacaaauaugguaaugguguuuggauaggaaggaccaaaaguaacagacuuagaaagggguuugagaugauuugggauccuaauggauggacaaauaccgacagugauuucucagugaaacaggauguuguagcaauaacugauuggucaggguacagcggaaguuuuguucaacauccugaguuaacaggauuggacuguauaagaccuugcuucuggguugaguuagucagagggcugccuagggaaaauacaacaaucuggacuagugggagcagcauuucuuuuuguggcguuaauagugguacugcaaacuggucuuggccagacggugcugaguugccguucaccauugacaaguag

SEQ ID NO: 53495 - RNA, 1413 nt, Artificial Sequence
  derived and/or modified CDS sequence (wt) from neuraminidase__InfluenzaA__AEX34443
augaacccaaaucaaaaaauaauaaccauuggaucaaucaguauagcaaucggaauaauuagucuaauauugcaaauaggaaauauuauuucaauaugggcuagucacucaauccaaacuggaagucaaaaccacacuggaauaugcaaccaaagaaucaucacauaugaaaacagcaccugggugaauaauacauauguuaauauuaacaacacuaauguuguuguugaaaaggacaaaacuucagugacauuggccggcaauucaucucuuuguucuaucaguggaugggcuauauacacaaaagacaacagcauaagaauuggcuccaaaggagauguuuuugucauaagagaaccuuucauaucauguucucacuuggaaugcagaaccuuuuuucugacccaaggugcucuauuaaaugacaaacauucaaaugggaccguaaaggacagaaguccuuauagggccuuaaugagcuguccucuaggugaagcuccguccccauacaauucaagguucgaaucaguugcauggucagcaagcgcaugccaugauggcaugggcugguuaacaaucggaauuucugguccagacaauggagcuguggcuguacuaaaauacaacggaauaauaacugaaaccauaaaaaguuggaaaaagcgaauauuaagaacacaagagucugaaugugucuguaugaacgggucauguuucaccauaaugaccgauggcccgaguaaugggaccgccucguacaaaauuuucaagaucgaaaaggggaagguuaccaaaacaauagaguugaaugcacccaauuuucauuaugaggaauguucuuguuacccagacacuggcacagugauguguguaugcagagacaacuggcaugguucaaaucgaccuugggugucuuuuaaucaaaacuuggauuaucaaauaggauacaucugcaguggaguguucggugacaauccucgucccaaagauggggagggcagcugcaauccagugacuguugauggagcagacggaguaaaaggguuuucauacaaauaugguaaugguguuuggauaggaaggaccaaaaguaacagacuuagaaagggguuugagaugauuugggauccuaauggauggacaaauaccgacagugauuucucagugaaacaggauguuguagcaauaacugauuggucaggguacagcggaaguuuuguucaacauccugaguuaacaggauuggacuguauaagaccuugcuucuggguugaguuagucagagggcugccuagggaaaauacaacaaucuggacuagugggagcagcauuucuuuuuguggcguuaauagugguacugcaaacuggucuuggccagacggugcugaguugccguucaccauugacaaguag

SEQ ID NO: 53496 - RNA, 1410 nt, Artificial Sequence; identical to SEQ ID NO: 48615
  derived and/or modified CDS sequence (wt) from neuraminidase__InfluenzaA__AEX34454

SEQ ID NO: 53497 - RNA, 1413 nt, Artificial Sequence
  derived and/or modified CDS sequence (wt) from neuraminidase__InfluenzaA__AEX34465
augaauccaaaucaaaaaauaauaaccauuggaucaaucaguauagcaaucggaauaauuagucuaauguugcaaauaggaaauauuauuucaauaugggcuagucacucaauccaaacuggaagucaaaaccacacuggaauaugcaaccaaagaaucaucacauaugaaaacagcaccugggugaaucacacauauguuaauauuaacaacacuaauguuguugcugggaaagacaaaacuucagugacauuggccggcaauucaucucuuuguucuaucaguggaugggcuauauacacaaaagacaacagcauaagaauuggcuccaaaggagauguuuuugucauaagagaaccuuucauaucauguucucacuuggaaugcagaaccuuuuuucugacccaaggugcucuauuaaaugacaaacauucaaaugggaccguuaaggacagaaguccuuauagggccuuaaugagcuguccucuaggugaagcuccguccccauacaauucaaaguuugaaucaguugcauggucagcaagcgcaugccaugauggcaugggcugguuaacaaucggaauuucugguccagacaauggagcuguggcuguacuaaaauacaacggaauaauaacugaaaccauaaaaaguuggaaaaagcgaauauuaagaacacaagagucugaaugugucugugugaacgggucauguuucaccauaaugaccgauggcccgaguaauggggccgccucguacaaaaucuucaagaucgaaaaggggaagguuacuaaaucaauagaguugaaugcacccaauuuucauuaugaggaauguuccuguuacccagacacuggcacagugauguguguaugcagggacaacuggcaugguucaaaucgaccuugggugucuuuuaaucaaaacuuggauuaucaaauaggauacaucugcaguggaguguucggugacaauccgcgucccaaagauggagagggcagcuguaauccagugacuguugauggagcagacggaauaaagggguuuucauacaaauaugguaaugguguuuggauaggaaggacuaaaaguaacagacuuagaaagggguuugagaugauuugggauccuaauggauggacagauaccgacagugauuucucagugaaacaggauguuguggcaauaacugauuggucaggguacagcggaaguuuuguucaacauccugaguuaacaggauuggacuguaugagaccuugcuucuggguugaguuagucagaggacugccuagagaaaauacaacaaucuggacuagugggagcagcauuucuuuuuguggcguuaauagugauacugcaaacuggucuuggccagacggugcugaguugccguucaccauugacaaguag

SEQ ID NO: 53498 - RNA, 1413 nt, Artificial Sequence
  derived and/or modified CDS sequence (wt) from neuraminidase__InfluenzaA__AEX34476
augaauccaaaucaaaaaauaauaaccauuggaucaaucaguauagcaaucggaauaauuagucuaauguugcaaauaggaaauauuauuucaauaugggcuagucacucaauccaaacuggaagucaaaaucacacuggaauaugcaaccaaagaaucaucacauaugaaaacagcaccugggugaaucacacauauguuacuauuaacaacacuaauguuguugcuggaaaagacaaaacuucagugacauuggccggcaauucaucucuuuguucuaucaguggaugggcuauauacacaaaagacaacagcauaagaauuggcuccaaaggagauguuuuugucauaagagaaccuuucauaucauguucucacuuggaaugcagaaccuuuuuucugacccaaggugcucuauuaaaugacaaacauucaaaugggaccguuaaggacagaaguccuuauagggccuuaaugagcuguccucuaggugaagcuccguccccauacaauucaaaguuugaaucaguugcauggucagcaagcgcaugccaugauggcaugggcugguuaacaaucggaauuucugguccagacaauggagcuguggcuguacuaaaauacaacggaauaauaacugaaaccauaaaaaguuggaaaaagcgaauauuaagaacacaagagucugaaugugucugugugaacgggucauguuucaccauaaugaccgauggcccgaguaauggggccgccucguacaaaaucuucaagaucgaaaaggggaagguuacuaaaucaauagaguugaaugcacccaauuuucauuaugaggaauguuccuguuacccagacacuggcacagugauguguguaugcagggacaacuggcaugguucaaaucgaccuugggugucuuuuaaucaaaacuuggauuaucaaauaggauacaucugcaguggaguguucggugacaauccgcgucccaaagauggagagggcagcuguaauccagugacuguugauggagcagacggaguaaagggguuuucauacaaauaugguaaugguguuuggauaggaaggacuaaaaguaacagacuuagaaagggguuugagaugauuugggauccuaauggauggacagauaccgacagugauuucucagugaaacaggauguuguggcaauaacugauuggucaggguacagcggaaguuucguucaacauccugaguuaacaggauuggacuguauaagaccuugcuucuggguugaguuagucagaggacugccuagagaaaauacaacaaucuggacuagugggagcagcauuucuuuuuguggcguuaauagugauacugcaaacuggucuuggccagacggugcugaguugccguucaccauugacaaguag

SEQ ID NO: 53499 - RNA, 1413 nt, Artificial Sequence; identical to SEQ ID NO: 53453
  derived and/or modified CDS sequence (wt) from neuraminidase__InfluenzaA__AEX34487

SEQ ID NO: 53500 - RNA, 1413 nt, Artificial Sequence; identical to SEQ ID NO: 53453
  derived and/or modified CDS sequence (wt) from neuraminidase__InfluenzaA__AEX34498

SEQ ID NO: 53501 - RNA, 1413 nt, Artificial Sequence; identical to SEQ ID NO: 53453
  derived and/or modified CDS sequence (wt) from neuraminidase__InfluenzaA__AEX34509

SEQ ID NO: 53502 - RNA, 1413 nt, Artificial Sequence; identical to SEQ ID NO: 53453
  derived and/or modified CDS sequence (wt) from neuraminidase__InfluenzaA__AEX34520

SEQ ID NO: 53503 - RNA, 1413 nt, Artificial Sequence; identical to SEQ ID NO: 53453
  derived and/or modified CDS sequence (wt) from neuraminidase__InfluenzaA__AEX34531

SEQ ID NO: 53504 - RNA, 1413 nt, Artificial Sequence; identical to SEQ ID NO: 53453
  derived and/or modified CDS sequence (wt) from neuraminidase__InfluenzaA__AEX34542

SEQ ID NO: 53505 - RNA, 1413 nt, Artificial Sequence; identical to SEQ ID NO: 53453
  derived and/or modified CDS sequence (wt) from neuraminidase__InfluenzaA__AEX34553

SEQ ID NO: 53506 - RNA, 1413 nt, Artificial Sequence; identical to SEQ ID NO: 53453
  derived and/or modified CDS sequence (wt) from neuraminidase__InfluenzaA__AEX34564

SEQ ID NO: 53507 - RNA, 1413 nt, Artificial Sequence; identical to SEQ ID NO: 53453
  derived and/or modified CDS sequence (wt) from neuraminidase__InfluenzaA__AEX34575

SEQ ID NO: 53508 - RNA, 1413 nt, Artificial Sequence; identical to SEQ ID NO: 53453
  derived and/or modified CDS sequence (wt) from neuraminidase__InfluenzaA__AEX34586

SEQ ID NO: 53509 - RNA, 1413 nt, Artificial Sequence; identical to SEQ ID NO: 53453
  derived and/or modified CDS sequence (wt) from neuraminidase__InfluenzaA__AEX34597

SEQ ID NO: 53510 - RNA, 1413 nt, Artificial Sequence; identical to SEQ ID NO: 53453
  derived and/or modified CDS sequence (wt) from neuraminidase__InfluenzaA__AEX34608

SEQ ID NO: 53511 - RNA, 1413 nt, Artificial Sequence; identical to SEQ ID NO: 53453
  derived and/or modified CDS sequence (wt) from neuraminidase__InfluenzaA__AEX34619

SEQ ID NO: 53512 - RNA, 1413 nt, Artificial Sequence; identical to SEQ ID NO: 53453
  derived and/or modified CDS sequence (wt) from neuraminidase__InfluenzaA__AEX34630

SEQ ID NO: 53513 - RNA, 1413 nt, Artificial Sequence; identical to SEQ ID NO: 53453
  derived and/or modified CDS sequence (wt) from neuraminidase__InfluenzaA__AEX34641

SEQ ID NO: 53514 - RNA, 1413 nt, Artificial Sequence
  derived and/or modified CDS sequence (wt) from neuraminidase__InfluenzaA__AEX34653
augaauccaaaucaaaaaauaauaaccauuggaucaaucaguauagcaaucggaauaauuagucuaauguugcaaguaggaaauauuauuucaauaugggcuagucacucaauccaaacuggaagucaaaaccacacuggaauaugcaaccaaagaaucaucacauaugaaaacagcaccugggugaaucacacauauguuaauauuaacaacacuaauguuguugcuggaaaggacaaaacuucaguggcauuggccggcaauucaucucuuuguucuaucagugggugggcuauauacacaaaagacaacagcauaagaauuggcuccaaaggagauguuuuugucauaagagaaccuuucauaucauguucucacuuggaaugcagaaccuuuuuucugacccaaggugcucuauuaaaugacaaacauucaaauggaaccguuaaggacagaaguccuuauagggccuuaaugagcuguccucuaggugaagcuccguccccauacaauucaaaguuugaaucaguugcauggucagcaagcgcaugccaugauggccugggcugguuaacaaucggaauuucugguccagacaauggagcuguggcuguacuaaaauacaacggaauaauaacugaaaccauaaaaaguuggaaaaagcgaauauugagaacacaagagucugaaugugucugugugaacgggucaugcuucaccauaaugaccgauggcccgaguaauggggccgccucguauaaaaucuucaagaucgaaaaggggcagguuacuaaaucaguagaguuaaaugcacccaauuuucauuaugaggaauguuccuguuacccagacacuggcacagugauguguguaugcagggacaacuggcaugguucaaaucgaccuugggugucuuuuaaucaagacuuggauuaucaaauaggauacaucugcaguggaguguucggugacaauccgcgucccaaagauggaaagggcagcuguaauccagugacuguugauggagcagacggaguuaagggguuuucauacaaauaugguaaugguguuuggauaggaaggacuaaaaguaacagacuuagaaagggguuugagaugauuugggauccuaauggauggacagauaccgacagugauuucucagugaaacaggauguuguggcaauaacugauuggucaggguacagcggaaguuucguucaacauccugaguuaacaggauuggacuguauaagaccuugcuucuggguugaguuagucagaggacugccuagagaaaauacaacaaucuggacuagugggagcagcauuucuuuuuguggcguugauagugauacugcaaacuggucuuggccagacggugcugaguugccguucaccauugacaaguag

SEQ ID NO: 53515 - RNA, 1413 nt, Artificial Sequence
  derived and/or modified CDS sequence (wt) from neuraminidase__InfluenzaA__AEX34664
augaauccaaaucaaaaaauaauaaccauuggaucaaucaguauagcaaucggaauaauuagucuaauguugcaaauaggaaauauuauuucaauaugggcuagucacucaauccaaacuggaagucaaaaccacacuggaauaugcaaccaaagaaucaucacauaugaaaacagcaccugggugaaucacacauauguuaauauuaacaacacuaauguuguugcuggaaaggacaaaacuucagugacauuggccggcaauucaucucuuuguucuaucaguggaugggcuauauacacaaaagacaacagcauaagaauuggcuccaaaggagauguuuuugucauaagagaaccuuucauaucauguucucacuuggaaugcagaaccuuuuuucugacccaaggugcucuauuaaaugacaaacauucaaauggaaccguuaaggacagaaguccuuauagggccuuaaugagcuguccucuaggugaagcuccguccccauacaauucaaaguuugaaucaguugcauggucagcaagugcaugccaugauggcaugggcugguuaacaaucggaauuucugguccagacaauggagcuguggcuguacuaaaauacaacggaauaauaacugaaaccauaaaaaguuggaaaaagcgaauauugagaacacaagagucugaaugugucugugugaacgggucauguuucaccauaaugaccgauggcccgaguaauggggccgccucguacaaaaucuucaagaucgaaaagggaaagguuacuaaaucaagagaguuaaaugcacccaauuuucauuaugaggaauguuccuguuacccagacacuggcacagugauguguguaugcagggacaacuggcaugguucaaaucgaccuugggugucuuuuaaucaaaacuuggauuaucaaauaggauacaucugcaguggaguguucggugacaauccgcgucccaaagauggaaagggcagcuguaauccagugacugcugauggagcagacggaguuaagggguuuucauacaaauaugguaaugguguuuggauaggaaggacuaaaaguaacagacuuagaaaggguuuugagaugauuugggauccuaauggauggacagauaccgacagugauuucucagugaaacaggauguuguggcaauaacugauuggucaggguacagcggaaguuucguucaacauccugaguuaacaggauuggacuguauaagaccuugcuucuggguugaguuagucagaggacugccuagagaaaauacaacaaucuggacuagugggagcagcauuucuuuuuguggcguugauagugauacugcaaacuggucuuggccagacggugcugaguugccguucaccauugacaaguag

SEQ ID NO: 53516 - RNA, 1413 nt, Artificial Sequence; identical to SEQ ID NO: 53494
  derived and/or modified CDS sequence (wt) from neuraminidase__InfluenzaA__AEX34686

SEQ ID NO: 53517 - RNA, 1413 nt, Artificial Sequence
  derived and/or modified CDS sequence (wt) from neuraminidase__InfluenzaA__AEX34760
augaacccaaaucaaaaaauaauaaccauuggaucaaucaguauagcaaucggaauaauuagucuaauauugcaaauaggaaauauuauuucaauaugggcuagucacucaauccaaacuggaagucaaaaccacacuggaauaugcaaccaaagaaucaucacauaugaaaacagcaccugggugaauaauacauauguuaauauuaacaacacuaauguuguuguugaaaaggacaaaacuucagugacauuggccggcaauucaucucuuuguucuaucaguggaugggcuauauacacaaaagacaacagcauaagaauuggcuccaaaggagauguuuuugucauaagagaaccuuucauaucauguucucacuuggaaugcagaaccuuuuuucugacccaaggugcucuauuaaaugacaaacauucaaaugggaccguaaaggacagaaguccuuauagggccuuaaugagcuguccucuaggugaagcuccguccccauacaauucaagguucgaaucaguugcauggucagcaagcgcaugccaugauggcaugggcugguuaacaaucggaauuucugguccagacaauggagcuguggcuguacuaaaauacaacggaauaauaacugaaaccauaaaaaguuggaaaaagcgaauauuaagaacacaagagucugaaugugucuguaugaacgggucauguuucaccauaaugaccgauggcccgaguaauggggccgccucguacaaaauuuucaagaucgaaaaggggaagguuaccaaaacaauagaguugaaugcacccaauuuucauuaugaggaauguuccuguuacccagacacuggcacagugauguguguaugcagagacaacuggcaugguucaaaucgaccuugggugucuuuuaaucaaaacuuggauuaucaaauaggauacaucugcaguggaguguucggugacaauccucgucccaaagauggggagggcagcugcaauccagugacuguugauggagcagacggaguaaaaggguuuucauacaaauaugguaaugguguuuggauaggaaggaccaaaaguaacagacuuagaaagggguuugagaugauuugggauccuaauggauggacaaauaccgacagugauuucucagugaaacaggauguuguagcaauaacugauuggucaggguacagcggaaguuuuguucaacauccugaguuaacaggauuggacuguauaagaccuugcuucuggguugaguuagucagagggcugccuagggaaaauacaacaaucuggacuagugggagcagcauuucuuuuuguggcguuaauagugguacuguaaacuggucuuggccagacggugcugaguugccguucaccauugacaaguag

SEQ ID NO: 53518 - RNA, 1413 nt, Artificial Sequence
  derived and/or modified CDS sequence (wt) from neuraminidase__InfluenzaA__AEX34771
augaacccaaaucaaaaaauaauaaccauuggaucaaucaguauagcaaucggaauaauuagucuaauauugcaaauaggaaauauuauuucaauaugggcuagucacucaauccaaacuggaagucaaaaccacacuggaauaugcaaccaaagaaucaucacauaugaaaacagcaccugggugaauaauacauauguuaauauuaacaacacuaauguuguuguugaaaaggacaaaacuucagugacauuggccggcaauucaucucuuuguucuaucaguggaugggcuauauacacaaaagacaacagcauaagaauuggcuccaaaggagauguuuuugucauaagagaaccuuucauaucauguucucacuuggaaugcagaaccuuuuuucugacccaaggugcucuauuaaaugacaaacauucaaaugggaccguaaaggacagaaguccuuauagggccuuaaugagcuguccucuaggugaagcuccguccccauacaauucaagguucgaaucaguugcauggucagcaagcgcaugccaugauggcaugggcugguuaacaaucggaauuucugguccagacaauggagcuguggcuguacuaaaauacaacggaauaauaacugaaaccauaaaaaguuggaaaaagcgaauauuaagaacacaagagucugaaugugucuguaugaacgggucauguuucaccauaaugaccgauggcccgaguaauggggccgccucguacaaaauuuucaagaucgaaaaggggaagguuaccaaaacaauagaguugaaugcacccaauuuucauuaugaggaauguuccuguuacccagacacuggcacagugauguguguaugcagagacaacuggcaugguucaaaucgaccuugggugucuuuuaaucaaaacuuggauuaucaaauaggauacaucugcaguggaguguucggugacaauccucgucccaaagauggggagggcagcugcaauccagugacuguugauggagcagacggaguaaaaggguuuucauacaaauaugguaaugguguuuggauaggaaggaccaaaaguaacagacuuagaaagggguuugagaugauuugggauccuaauggauggacaaauaccgacagugauuucucagugaaacaggauguuguagcaauaacugauuggucaggguacagcggaaguuuuguucaacauccugaguuaacaggauuggacuguauaagaccuugcuucuggguugaguuagucagagggcugccuagggaaaauacaacaaucuggacuagugggagcagcauuucuuuuuguggcguuaauagugguacugcaaacuggucuuggccagacggugcugaguugccguucaccauugacaaguag

SEQ ID NO: 53519 - RNA, 1413 nt, Artificial Sequence
  derived and/or modified CDS sequence (wt) from neuraminidase__InfluenzaA__AEX34782
augaacccaaaucaaaagauaauaaccauuggaucaaucaguauagcaaucggaauaauuagucuaauguugcaaauaggaaauauuauuucaauaugggcuagucacucaauccaaacuggaagucaaaacaacacuggaauauguaaccaaagaaucaucacauaugaaaacagcaccugggugaaucacacauauguuaauauuaacaacacuaauguuguugcuggagaagacaaaacuucagugacauuggccggcaauucaucucuuuguucuaucaguggaugggcuauauacacaaaagacaacagcauaagaauuggcuccaaaggagauguuuuugucauaagagaaccuuucauaucauguucucacuuggaaugcagaaccuuuuuucugacccaaggcgcucuauuaaaugacaaacauucaaaugggaccguaaaggacagaaguccuuauagggccuuaaugagcuguccucuaggugaagcuccguccccauacaauucaaaguucgaaucaguugcauggucagcaagcgcaugccaugauggcaugggcugguuaacaaucggaauuucugguccagacaauggagcuguggcuguacuaaaauacaacggaauaauaacuggaaccauaaaaaguuggaaaaagcaaauauuaagaacacaagagucugaaugugucuguaugaacgggucauguuucaccauaaugaccgauggcccgaguaauaaggcugccucguacaaaauuuucaagaucgaaaaggggaagguuacuaaaucaauagaguugaaugcacccaauuuuuauuaugaggaaugcuccuguuacccagacacuggcauagugauguguguaugcagggauaacuggcaugguucaaaucgaccuugggugucuuuuaaucaaaacuuggauuaucaaauaggauacaucugcaguggaguguuuggugacaauccgcgucccgaagauggagagggcagcugcaauccagugacuguugauggagcaaacggaguaaaaggguuuucauacaaauaugguaaugguguuuggauaggaaggaccaaaaguaacagacuuagaaagggguuugagaugauuugggauccuaauggauggacaaauaccgacagugauuucucagugaaacaggauguuguagcaauaacugauuggucaggguacagcggaaguuucguccaacauccugaguuaacaggauuggacuguauaagaccuugcuucuggguugaguuagucagagggcugccuagagaaaauacaacaaucuggacuagugggagcagcauuucuuuuuguggcguuaauagugauacugcaaacuggucuuggccagacggugcugaguugccguucaccauugacaaguag

SEQ ID NO: 53520 - RNA, 1413 nt, Artificial Sequence
  derived and/or modified CDS sequence (wt) from neuraminidase__InfluenzaA__AEX34793
augaacccaaaucaaaaaauaauaaccauuggaucaaucaguauagcaaucggaauaauuagucuaauguugcaaauaggaaauaucauuucaauaugggcuagucacucaauucaaacuggaagucaaaaccacacuggaauaugcaaccaaagaaucaucacauaugaaaacagcaccugggugaaucacacauauguuaauauuaacaacacuaauguuguugcuggaaaggacaaaacuccagugacauuggucggcaacucaucucuuuguucuaucaguggaugggcuauauacacaaaagacaacagcauaagaauuggcucuaaaggagauguuuuugucauaagagaaccuuucauaucauguucucacuuggaaugcaaaaccuuuuuucugacccaaggcgcucuauuaaaugacaaacauucaaaugggaccguaaaggacagaaguccuuauagggccuuaaugagcuguccucuaggugaagcuccguccccauacaauucaaaguucgaaucaguugcauggucagcaagcgcaugccaugauggcauaggcugguuaacaaucggaauuucugguccagacaauggagcuguggcuguacuaaaauacaaaggaauaauaacuggaaccauaaaaaguuggaaaaagcaaauauuaagaacacaagagucugaaugugucuguaugaacgggucauguuucaccauaaugaccgaugguccgaguaauggggccgcuucguacaaaauuuucaagaucgaaaaggggaagguuacuaaaucaauggaguugaaugcacccaauuuucauuaugaggaauguucuuguuacccagacacuggcacagugauguguguaugcagggacaacuggcaugguucaaaucgaccuugggugucuuuuaaucaaaacuuggauuaucaaauaggauacaucugcaguggaguguucggugacaauccgcgucccaaagauagagagggcagcugcaauccagugacuguugauggagcaaacggaguaaaaggguuuucauacaaauaugguaaugguguuuggauaggaaggaccaaaaguaacagaauuagaaagggguuugagaugauuugggauccuaauggauggacaaauaccgacagugauuucucagugaaacaggauauuguagcaauaacugauuggucaggguacagcggaaguuucguccaacauccugaguuaacaggauuggacuguauaagaccuugcuucuggguugaguuagucagagggcugccuagagaaaauacaacaaucuggacuagugggagcagcauuucuuuuuguggcguuaauggugauauugcaaauuggucuuggccagacggugcugaguugccguucaccauugacaaguag

SEQ ID NO: 53521 - RNA, 1413 nt, Artificial Sequence
  derived and/or modified CDS sequence (wt) from neuraminidase__InfluenzaA__AEX34804
augaacccaaaucaaaaaauaauaaccauuggaucaaucaguauagcaaucggaauaauuagucuaauguugcaaauaggaaauaucauuucaauaugggcuagucacucaauucaaacuggaagucaaaaccacacuggaauaugcaaccaaagaaucaucacauaugaaaacagcaccugggugaaucacacauauguuaauauuaacaacacuaauguuguugcuggaaaggacaaaacuccagugacauuggucggcaacucaucucuuuguucuaucaguggaugggcuauauacacaaaagacaacagcauaagaauuggcucuaaaggagauguuuuugucauaagagaaccuuucauaucauguucucacuuggaaugcaaaaccuuuuuucugacccaaggcgcucuauuaaaugacaaacauucaaaugggaccguaaaggacagaaguccuuauagggccuuaaugagcuguccucuaggugaagcuccguccccauacaauucaaaguucgaaucaguugcauggucagcaagcgcaugccaugauggcauaggcugguuaacaaucggaauuucugguccagacaauggagcuguggcuguacuaaaauacaaaggaauaauaacuggaaccauaaaaaguuggaaaaagcaaauauuaagaacacaagagucugaaugugucuguaugaacgggucauguuucaccauaaugaccgaugguccgaguaauggggccgccucguacaaaauuuucaagaucgaaaaggggaagguuacuaaaucaauggaguugaaugcacccaauuuucauuaugaggaauguucuuguuacccagacacuggcacagugauguguguaugcagggacaacuggcaugguucaaaucgaccuugggugucuuuuaaucaaaacuuggauuaucaaauaggauacaucugcaguggaguguucggugacaauccgcgucccaaagauagagagggcagcugcaauccagugacuguugauggagcaaacggaguaaaaggguuuucauacaaauaugguaaugguguuuggauaggaaggaccaaaaguaacagaauuagaaagggguuugagaugauuugggauccuaauggauggacaaauaccgacagugauuucucagugaaacaggauauuguagcaauaacugauuggucaggguacagcggaaguuucguccaacauccugaguuaacaggauuggacuguauaagaccuugcuucuggguugaguuagucagagggcugccuagagaaaauacaacaaucuggacuagugggagcagcauuucuuuuuguggcguuaauggugauauugcaaauuggucuuggccagacggugcugaguugccguucaccauugacaaguag

SEQ ID NO: 53522 - RNA, 1413 nt, Artificial Sequence
  derived and/or modified CDS sequence (wt) from neuraminidase__InfluenzaA__AEX34815
augaacccaaaucaaaagauaauaaccauuggaucaaucaguauagcaaucggaauaauuagucuaauguugcaaauaggaaauauuauuucaauaugggcuagucacucaauccaaacuggaagucaaaacaacacuggaauauguaaccaaagaaucaucacauaugaaaacagcaccugggugaaucacacauauguuaauauuaacaacacuaauguuguugcuggagaagacaaaacuucagugacauugaccggcaauucaucccuuuguucuaucaguggaugggcuauauacacaaaagacaacagcauaagaauuggcuccaaaggagauguuuuugucauaagagaaccuuucauaucauguucucacuuggaaugcagaaccuuuuuucugacccaaggcgcucuauuaaaugacaaacauucaaaugggaccguaaaggacagaaguccuuauagggccuuaaugagcuguccucuaggugaagcuccauccccauacaauucaaaguucgaaucaguugcauggucagcaagcgcaugccaugacggcaugggcugguuaacaaucggaauuucugguccagacaauggagcuguggcuguacuaaaauacaacggaauaauaacuggaaccauaaaaaguuggaaaaagcaaauauuaagaacacaagagucugaaugugucuguaugaacgggucauguuucaccauaaugaccgauggcccgaguaauaaggccgccucguacaaaauuuucaagaucgaaaaggggaagguuacuaaaucaauagaguugaaugcacccaauuuuuauuaugaggaaugcuccuguuacccagacacuggcauagugauguguguaugcagggacaacuggcaugguucaaaucgaccuugggugucuuuuaaucaaaacuuggauuaucaaauaggauacaucugcaguggaguguuuggugacaauccgcgucccgaagauggagagggcagcugcaauccagugacuguugauggagcaaacggaguaaaaggguuuucauacaaauaugguaaugguguuuggauaggaaggaccaaaaguaacagacuuagaaagggguuugagaugauuugggauccuaauggauggacaaauaccgacagugauuucucagugaaacaggauguuguagcaauaacugauuggucaggguacagcggaaguuucguccaacauccugaguuaacaggauuggacuguauaagaccuugcuucuggguugaguuagucagagggcugccuagagaaaauacaacaaucuggacuagugggagcagcauuucuuuuuguggcguuaauagugauacugcaaacuggucuuggccagacggugcugaguugccguucaccauugacaaguag

SEQ ID NO: 53523 - RNA, 1413 nt, Artificial Sequence
  derived and/or modified CDS sequence (wt) from neuraminidase__InfluenzaA__AEX34826
augaacccaaaucaaaaaauaauaaccauuggaucaaucaguauagcaaucggaauaauuagucuaauguugcaaauaggaaauaucauuucaauaugggcuagucacucaauucaaacuggaagucaaaaccacacuggaauaugcaaccaaagaaucaucacauaugaaaacagcaccugggugaaucacacauauguuaauauuaacaacacuaauguuguugcuggaaaggacaaaacuccagugacauuggucggcaacucaucucuuuguucuaucaguggaugggcuauauacacaaaagacaacagcauaagaauuggcucuaaaggagauguuuuugucauaagagaaccuuucauaucauguucucacuuggagugcaaaaccuuuuuucugacccaaggcgcucuauuaaaugacaaacauucaaaugggaccguaaaggacagaaguccuuauagggccuuaaugagcuguccucuaggugaagcuccguccccauacaauucaaaguucgaaucaguugcauggucagcaagcgcaugccaugauggcauaggcugguuaacaaucggaauuucugguccagacaauggagcuguggcuguacuaaaauacaaaggaauaauaacuggaaccauaaaaaguuggaaaaagcaaauauuaagaacacaagagucugaaugugucuguaugaacgggucauguuucaccauaaugaccgaugguccgaguaauggggccgccucguacaaaauuuucaagaucgaaaaggggaaaguuacuaaaucaauggaguugaaugcacccaauuuucauuaugaggaauguucuuguuacccagacacuggcacagugauguguguaugcagggacaacuggcaugguucaaaucgaccuugggugucuuuuaaucaaaacuuggauuaucaaauaggauacaucugcaguggaguguucggugacaauccgcgucccaaagauagagagggcagcugcaauccagugacuguugauggagcaaacggaguaaaaggguuuucauacaaauaugguaaugguguuuggauaggaaggaccaaaaguaacagaauuagaaagggguuugagaugauuugggauccuaauggauggacaaauaccgacagugauuucucagugaaacaggauauuguagcaauaacugauuggucaggguacagcggaaguuucguccaacauccugaguuaacaggauuggacuguauaagaccuugcuucuggguugaguuagucagagggcugccuagagaaaauacaacaaucuggacuagugggagcagcauuucuuuuuguggcguuaauggugauauugcaaauuggucuuggccagacggugcugaguugccguucaccauugacaaguag

SEQ ID NO: 53524 - RNA, 1413 nt, Artificial Sequence; identical to SEQ ID NO: 53523
  derived and/or modified CDS sequence (wt) from neuraminidase__InfluenzaA__AEX34837

SEQ ID NO: 53525 - RNA, 1413 nt, Artificial Sequence
  derived and/or modified CDS sequence (wt) from neuraminidase__InfluenzaA__AEX34859
augaacccaaaucaaaaaauaauaaccauuggaucaaccaguauagcaaucggaauaauuagucuaauguugcaaauaggaaauaucauuucaauaugggcuagucacucaauucaaacuggaagucaaaaccacacuggaauaugcaaccaaagaaucaucacauaugaaaacagcaccugggugaaucacacauauguuaauauuaacaacacuaauguuguugcuggaaaggacaaaacuccagugacauugaucggcaacucaucucuuuguucuaucaguggaugggcuauauacacaaaagacaacagcauaagaauuggcucuaaaggagauguuuuugucauaagagaaccuuucauaucauguucucacuuggaaugcaaaaccuuuuuucugacccaaggcgcucuauuaaaugacaaacauucaaaugggaccguaaaggacagaaguccuuauagggccuuaaugagcuguccucuaggugaagcuccguccccauacaauucaaaguucgaaucaguugcauggucagcaagcgcaugccaugauggcauaggcugguuaacaaucggaauuucugguccagacaauggagcuguggcuguacuaaaauacaaaggaauaauaacuggaaccauaaaaaguuggaaaaagcaaauauuaagaacacaagagucugaaugugucuguaugaacgggucauguuucaccauaaugaccgaugguccgaguaauggggccgccucguacaaaauuuucaagaucgaaaaggggaagguuacuaaaucaauggaguugaaugcacccaauuuucauuaugaggaauguucuuguuacccagacacuggcacagugauguguguaugcagggacaacuggcaugguucaaaucgaccuugggugucuuuuaaucaaaacuuggauuaucaaauaggauacaucugcaguggaguguucggugacaacccgcgucccaaagauagagagggcagcugcaauccagugacuguugauggagcaaacggaguaaaaggguuuucauacaaauaugguaaugguguuuggauaggaaggaccaaaaguaacagaauuagaaagggguuugagaugauuugggauccuaauggauggacaaauaccgacagugauuucucagugaaacaggauauuguagcaauaacugauuggucaggguacagcggaaguuucguccaacauccugaguuaacaggauuggacuguauaagaccuugcuucuggguugaguuagucagagggcugccuagagaaaauacaacaaucuggacuagugggagcagcauuucuuuuuguggcguuaauggugauauugcaaauuggucuuggccagacggugcugaguugccguucaccauugacaaguag

SEQ ID NO: 53526 - RNA, 1413 nt, Artificial Sequence
  derived and/or modified CDS sequence (wt) from neuraminidase__InfluenzaA__AEX34870
augaacccaaaucaaaagauaauaaccauuggaucaaucaguauagcaaucggaauaaucagucuaauguugcaaauaggaaacauuauuucaauaugggcuagucacucaauccaaacuggaagucaaaacaacacuggaauauguaaccaaagaaucaucacauaugaaaacaguaccugggugaaucacacauauguuaauauuaacaacacuaauguuguugcuggagaagacaaaauuucagugacauuggccggcaauucgucucuuuguuccaucaguggaugggccauauacacaaaagacaacagcauaagaauuggcuccaaaggagauguuuuugucauaagagaaccuuucauaucauguucucacuuggaaugcagaaccuuuuuucugacccaaggcgcucuauuaaaugacaaacauucaaaugggaccguaaaggacagaaguccuuauagggccuuaaugagcuguccucuaggugaagcuccguccccauacaauucaaaguucgaaucaguugcauggucagcaagcgcaugccaugauggcauaggcuggcuaacaaucggaauuucugguccagacaauggagcuguggcuguacuaaaauacaacggaauaauaacuggaaccauaaaaaguuggaaaaagcaaauauuaagaacacaagagucugaaugugucuguaugaacgggucauguuucaccauaaugaccgauggcccgaguaauaaggccgccucguacaaaauuuucaagaucgaaaaggggaaaguuacuaaaucaauagaguugaaugcacccaauuuuuauuaugaggaaugcuccuguuacccagacacuggcauagugauguguguaugcagggacaacuggcaugguucaaaucgaccuugggugucuuuuaaucaaaacuuggauuaucaaauaggauacaucugcaguggaguguuuggugacaauccgcguccagaagauggagagggcagcugcaauccagugacuguugauggagcaaacggaguaaaaggguuuucauacaaauaugguaaugguguuuggauaggaagaaccaaaaguaacagacuuagaaagggguuugagaugauuugggauccuaauggauggacaaauaccgacagugauuucucagugaaacaggauguuguagcaauaacugauuggucaggguacagcggaaguuucguccaacauccugaguuaacaggauuggacuguauaagaccuugcuucuggguugaguuagucagagggcugccuagagaaaauacaacaaucuggacuagugggagcagcauuucuuuuuguggcguuaauagugauacugcaaacuggucuuggccagacggugcugaguugccguucaccauugacaaguag

SEQ ID NO: 53527 - RNA, 1413 nt, Artificial Sequence
  derived and/or modified CDS sequence (wt) from neuraminidase__InfluenzaA__AEX34881
augaacccaaaucaaaaaauaauaaccauuggaucaaucaguauagcaaucggaauaauuagucuaauguugcaaauaggaaauaucauuucaauaugggcuagucacucaauucaaacuggaagucaaaaccacacuggaauaugcaaccaaagaaucaucacauaugaaaacagcaccugggugaaucacacauauguuaauauuaacaacacuaauguuguugcuggaaaggacaaagcuccagugacauugaucggcaacucaucucuuuguucuaucaguggaugggcuauauacacaaaagacaacagcauaagaauuggcucuaaaggagauguuuuugucauaagagaaccuuucauaucauguucucacuuggaaugcaaaaccuuuuuucugacccaaggcgcucuauuaaaugacaaacauucaaaugggaccguaaaggacagaaguccuuauagggccuuaaugagcuguccucuaggugaagcuccguccccauacaauucaaaguucgaaucaguugcauggucagcaagcgcaugccaugauggcauaggcugguuaacaaucggaauuucugguccagacaauggagcuguggcuguacuaaaauacaaaggaauaauaacuggaaccauaaaaaguuggaaaaagcaaauauuaagaacacaagagucugaaugugucuguaugaacgggucauguuucaccauaaugaccgaugguccgaguaauggggccgccucguacaaaauuuucaagaucgaaaaggggaagguuacuaaaucaauggaguugaaugcacccaauuuucauuaugaggaauguucuuguuacccagacacuggcacagugauguguguaugcagggacaacuggcaugguucaaaucgaccuugggugucuuuuaaucaaaacuuggauuaucaaauaggauacaucugcaguggaguguucggugacaacccgcgucccaaagauagagagggcagcugcaauccagugacuguugauggagcaaacggaguaaaaggguuuucauacaaauaugguaaugguguuuggauaggaaggaccaaaaguaacagaauuagaaagggguuugagaugauuugggauccuaauggauggacaaauaccgacagugauuucucagugaaacaggauauuguagcaauaacugauuggucaggguacagcggaaguuucguccaacauccugaguuaacaggauuggacuguauaagaccuugcuucuggguugaguuagucagagggcugccuagagaaaauacaacaaucuggacuagugggagcagcauuucuuuuuguggcguuaauggugauauugcaaauuggucuuggccagacggugcugaguugccguucaccauugacaaguag

SEQ ID NO: 53528 - RNA, 1413 nt, Artificial Sequence
  derived and/or modified CDS sequence (wt) from neuraminidase__InfluenzaA__AEX34892
augaacccaaaucaaaagauaauaaccauuggaucaaucaguauagcaaucggaauaauuagucuaauguugcaaauaggaaauauuauuucaauaugggcuagucacucaauccaaacuggaagucaaaacaacacuggaauaugcaaccaaagaaucaucacauaugaaaacagcaccugggugaaucacacauauguuaauauuaacaacacuaauguuguugcuggagaagacaaaacuucagugacauuggccggcaauucaucucuuuguucuaucaguggaugggcuauauacacaaaagacaacagcauaagaauuggcuccaaaggagauguuuuugucauaagagaaccuuucauaucauguucucacuuggaaugcagaaccuuuuuucugacccaaggcgcucuauuaaaugacaaacauucaaaugggaccguaaaggacagaaguccuuauagggccuuaaugagcuguccucuaggugaagcuccguccccauacaauucaaaguucgaaucaguugcauggucagcaagcgcaugccaugauggcaugggcugguuaacaaucggaauuucugguccagacaauggagcuguggcuguacuaaaauacaacggaauaauaacuggaaccauaaaaaguuggaaaaagcaaauauuaagaacacaagagucugaaugugucuguaugaacgggucauguuucaccauaaugaccgauggcccgaguaauaaggccgccucguacaaaauuuucaagaucgaaaaggggaagguuacuaaaucaauagaguugaaugcacccaauuuuuauuaugaggaaugcuccuguuacccagacacuggcauagugauguguguaugcagggacaacuggcauggcucaaaucgaccuugggugucuuuuaaucaaaacuuggauuaucaaauaggauacaucugcaguggaguguuuggugacaauccgcgucccgaagauggagagggcagcugcaauccagugacuguugauggagcaaacggaguaaaaggguuuucauacaaauaugguaaugguguuuggauaggaaggaccaaaaguaacagacuuagaaagggguuugagaugauuugggauccuaauggauggacaaauaccgacagugauuucucagugaaacagaauguuguagcaauaacugauuggucaggguacagcggaaguuucguccaacauccugaguuaacaggauuggacuguauaagaccuugcuucuggguugaguuagucagagggcugccuagagaaaauacaacaaucuggacuagugggagcagcauuucuuuuuguggcguuaauagugauacugcaaacuggucuuggccagacggugcugaguugccguucaccauugacaaguag

SEQ ID NO: 53529 - RNA, 1413 nt, Artificial Sequence
  derived and/or modified CDS sequence (wt) from neuraminidase__InfluenzaA__AEX34903
augaacccaaaucaaaaaauaauaaccauuggaucaaucaguauagcaaucggaauaauuagucuaauguugcaaauaggaaauaucauuucaauaugggcuagucgcucaauucaaacuggaagucaaaaccacacuggaauaugcaaccaaagaaucaucacauaugaaaacagcaccugggugaaucacacauauguuaauauuaacaacacuaauguuguugcuggaaaggacaaaacuccagugacauuggucggcaacucaucucuuuguucuaucaguggaugggcuauauacacaaaagacaacagcauaagaauuggcucuaaaggagauguuuuugucauaagagaaccuuucauaucauguucucacuuggaaugcaaaaccuuuuuucugacccaaggcgcucuauuaaaugacaaacauucaaaugggaccguaaaggacagaaguccuuauagggccuuaaugagcuguccucuaggugaagcuccguccccauacaauucaaaguucgaaucaguugcauggucagcaagcgcaugccaugauggcauaggcugguuaacaaucggaauuucugguccagacaauggagcuguggcuguacuaaaauacaaaggaauaauaacuggaaccauaaaaaguuggaaaaagcaaauauuaagaacacaagagucugaaugugucuguaugaacgggucauguuucaccauaaugaccgaugguccgaguaauggggccgccucguacaaaauuuucaagaucgaaaaggggaagguuacuaaaucaauggaguugaaugcacccaauuuucauuaugaggaauguucuuguuacccagacacuggcacagugauguguguaugcagggacaacuggcaugguucaaaucgaccuugggugucuuuuaaucaaaacuuggauuaucaaauaggauacaucugcaguggaguguucggugacaauccgcgucccaaagauagagagggcagcugcaauccagugacuguugauggagcaaacggaguaaaaggguuuucauacaaauaugguaaugguguuuggauaggaaggaccaaaaguaacagaauuagaaagggguuugagaugauuugggauccuaauggauggacaaauaccgacagugauuucucagugagacaggauauuguagcaauaacugauuggucaggguacagcggaaguuucguccaacauccugaguuaacaggauuggacuguauaagaccuugcuucuggguugaguuagucagagggcugccuagagaaaauacaacaaucuggacuagugggagcagcauuucuuuuuguggcguuaauggugauauugcaaauuggucuuggccagacggugcugaguugccguucaccauugacaaguag

SEQ ID NO: 53530 - RNA, 1413 nt, Artificial Sequence
  derived and/or modified CDS sequence (wt) from neuraminidase__InfluenzaA__AEX34914
augaacccaaaucaaaagauaauaaccauuggaucaaucaguauagcaaucggaauaauuagucuaauguugcaaauaggaaauauuauuucaauaugggcuagucacucaauccaaacuggaagucaaaacaacacuggaauaugcaaccaaagaaucaucacauaugaaaacagcaccugggugaaucacacauauguuaauauuaacaacacuaauguuguugcuggagaggacaaaacuucagugacauuggccggcaauucaucucuuuguucuaucaguggaugggcuauauacacaaaagacaacagcauaagaauuggcuccaaaggagauguuuuugucauaagagaaccuuucauaucauguucucacuuggaaugcagaaccuuuuuucugacucaaggcgcucuauuaaaugacaaacauucaaaugggaccguaaaggacagaaguccuuauagggccuuaaugagcuguccucuaggugaagcuccguccccauacaauucaaaguucgaaucaguugcauggucagcaagcgcaugccaugauggcaugggcugguuaacaaucggaauuucugguccagacaauggagcuguggcuguacuaaaauacaacggaauaauaacuggaaccauaaaaaguuggaaaaagcaaauauuaagaacacaagagucugaaugugucuguaugaacgggucauguuucaccauaaugaccgauggcccgaguaauaaggccgccucguacaaaauuuucaagaucgaaaaggggaagguuacuaaaucaauagaguugaaugcacccaauuuuuauuaugaggaaugcuccuguuacccagacacuggcauagugauguguguaugcagggacaacuggcaugguucaaaucgaccuugggugucuuuuaaucaaaacuuggauuaucaaauaggauacaucugcaguggaguguuuggugacaauccgcgucccgaagauggagagggcagcugcaauccagugacuguugauggagcaaacggaguaaaaggguuuucauacaaauaugguaaugguguuuggauaggaaggaccaaaaguaacagacuuagaaagggguuugagaugauuugggauccuaauggauggacaaauaccgacagugauuucucagugaaacaggauguuguagcaauaacugauuggucaggguacagcggaaguuucguccaacauccugaguugacaggauuggacuguauaagaccuugcuucuggguugaguuagucagagggcugccuagagaaaauacaacaaucuggacuagugggagcagcauuuccuuuuguggcguuaauagugauacugcaaacuggucuuggccagacggugcugaguugccguucaccauugacaaguag

SEQ ID NO: 53531 - RNA, 1413 nt, Artificial Sequence
  derived and/or modified CDS sequence (wt) from neuraminidase__InfluenzaA__AEX34925
augaacccaaaucaaaagauaauaaccauuggaucaaucaguauagcaaucggaauaauuagucuaauguugcaaauaggaaauauuauuucaauaugggcuagucacucaauccaaacuggaagucaaaacaacacuggaauauguaaccaaagaaucaucacauaugaaaacagcaccugggugaaucacacauauguuaauauuaacaacacuaauguuguugcuggagaagacaaaacuucagugacauuggccggcaauucaucucuuuguucuaucaguggaugggcuauauacacaaaagacaacagcauaagaauuggcuccaaaggagauguuuuugucauaagagaaccuuucauaucauguucucacuuggaaugcagaaccuuuuuucugacccaaggcgcucuauuaaaugacaaacauucaaaugggaccguaaaggacagaaguccuuauagggccuuaaugagcuguccucuaggugaagcuccguccccauacaauucaaaguucgaaucaguugcauggucagcaagcgcaugccaugauggcaugggcugguuaacaaucggaauuucugguccagacaauggagcuguggcuguacuaaaauacaacggaauaauaacuggaaccauaaaaaguuggaaaaagcaaauauuaagaacacaagagucugaaugugucuguaugaacgggucauguuucaccauaaugaccgauggcccgaguaauaaggccgccucguacaaaauuuucaagaucgaaaaggggaagguuacuaaaucaauagaguugaaugcacccaauuuuuauuaugaggaaugcuccuguuacccagacacuggcauagugauguguguaugcagggacaacuggcaugguucaaaucgaccuugggugucuuuuaaucaaaacuuggauuaucaaauaggauacaucugcaguggaguguuuggugacaauccgcgucccgaagauggagagggcagcugcaauccagugacuguugauggagcaaacggaguaaaaggguuuucauacaaauaugguaaugguguuuggauaggaaggaccaaaaguaacagacuuagaaagggguuugagaugauuugggauccuaauggauggacaaauaccgacagugauuucucagugaaacaggauguuguagcaauaacugauuggucaggguacagcggaaguuucguccaacauccugaguuaacaggauuggacuguauaagaccuugcuucuggguugaguuagucagagggcugccuagagaaaauacaacaaucuggacuagugggagcagcauuucuuuuuguggcguuaauagugauacugcaaacuggucuuggccagacggugcugaguugccguucaccauugacaaguag

SEQ ID NO: 53532 - RNA, 1413 nt, Artificial Sequence
  derived and/or modified CDS sequence (wt) from neuraminidase__InfluenzaA__AEX34936
augaacccaaaucaaaagauaauaaccauuggaucaaucaguauagcaaucggaauaauuagucuaauguugcaaauaggaaauauuauuucaauaugggcuagucacucaauccaaacuggaagucaaaacaacacuggaauauguaaccaaagaaucaucacauaugaaaacagcaccugggugaaucacacauauguuaauauuaacaacacuaauguuguugcuggagaagacaaaacuucagugacauuggccggcaauucaucucuuuguucuaucaguggaugggcuauauacacaaaagacaacagcauaagaauuggcuccaaaggagauguuuuugucauaagagaaccuuucauaucauguucucacuuggaaugcagaaccuuuuuucugacccaaggcgcucuauuaaaugacaaacauucaaaugggaccguaaaggacagaaguccuuauagggccuuaaugagcuguccucuaggugaagcuccguccccauacaauucaaaguucgaaucaguugcauggucagcaagcgcaugccaugauggcaugggcugguuaacaaucggaauuucugguccagacaauggagcuguagcuguacuaaaauacaacggaauaauaacuggaaccauaaaaaguuggaaaaagcaaauauuaagaacacaagagucugaaugugucuguaugaacgggucauguuucaccauaaugaccgauggcccgaguaauaaggccgccucguacaaaauuuucaagaucgaaaaggggaagguuacuaaaucaauagaguugaaugcacccaauuuuuauuaugaggaaugcuccuguuacccagacacuggcauagugauguguguaugcagggacaacuggcaugguucaaaucgaccuugggugucuuuuaaucaaaacuuggauuaucaaauaggauacaucugcaguggaguguuuggugacaauccgcgucccgaagauggagagggcagcugcaauccagugacuguugauggagcaaacggaguaaaaggguuuucauacaaauaugguaaugguguuuggauaggaaggaccaaaaguaacagacuuagaaagggguuugagaugauuugggauccuaauggauggacaaauaccgacagugauuucucagugaaacaggauguuguagcaauaacugauuggucaggguacagcggaaguuucguccaacauccugaguuaacaggauuggacuguauaagaccuugcuucuggguugaguuagucagagggcugccuagagaaaauacaacaaucuggacuagugggagcagcauuucuuuuuguggcguuaauagugauacugcaaacuggucuuggccagacggugcugaguugccguucaccauugacaaguag

SEQ ID NO: 53533 - RNA, 1413 nt, Artificial Sequence; identical to SEQ ID NO: 53532
  derived and/or modified CDS sequence (wt) from neuraminidase__InfluenzaA__AEX34947

SEQ ID NO: 53534 - RNA, 1413 nt, Artificial Sequence; identical to SEQ ID NO: 53532
  derived and/or modified CDS sequence (wt) from neuraminidase__InfluenzaA__AEX34958

SEQ ID NO: 53535 - RNA, 1413 nt, Artificial Sequence; identical to SEQ ID NO: 53532
  derived and/or modified CDS sequence (wt) from neuraminidase__InfluenzaA__AEX34969

SEQ ID NO: 53536 - RNA, 1413 nt, Artificial Sequence; identical to SEQ ID NO: 53532
  derived and/or modified CDS sequence (wt) from neuraminidase__InfluenzaA__AEX34980

SEQ ID NO: 53537 - RNA, 1413 nt, Artificial Sequence; identical to SEQ ID NO: 53532
  derived and/or modified CDS sequence (wt) from neuraminidase__InfluenzaA__AEX34991

SEQ ID NO: 53538 - RNA, 1413 nt, Artificial Sequence
  derived and/or modified CDS sequence (wt) from neuraminidase__InfluenzaA__AEX35002
augaacccaaaucaaaaaauaauaaccauuggaucaaucaguauagcaaucggaauaauuagucuaauguugcaaauaggaaauaucauuucaauaugggcuagucacucaauucaaacuggaagucaaaaccacacuggaauaugcaaccaaagaaucaucacauaugaaaacagcaccugggugaaucacacauauguuaauauuaacaacacuaauguuguugcuggaaaggacaaaacuccagugacauugaucggcaacucaucucuuuguucuaucaguggaugggcuauauacacaaaagacaacagcauaagaauuggcucuaaaggagauguuuuugucauaagagaaccuuucauaucauguucucacuuggaaugcaaaaccuuuuuucugacccaaggcgcucuauuaaaugacaaacauucaaaugggaccguaaaggacagaaguccuuauagggccuuaaugagcuguccucuaggugaagcuccguccccauacaauucaaaguucgaaucaguugcauggucagcaagcgcaugccaugauggcauaggcugguuaacaaucggaauuucugguccagacaauggagcuguggcuguacuaaaauacaaaggaauaauaacuggaaccauaaaaaguuggaaaaagcaaauauuaagaacacaagagucugaaugugucuguaugaacgggucauguuucaccauaaugaccgaugguccgaguaauggggccgccucguacaaaauuuucaagaucgaaaaggggaagguuacuaaaucaauggaguugaaugcacccaauuuucauuaugaggaauguucuuguuacccagacacuggcacagugauguguguaugcagggacaacuggcaugguucaaaucgaccuugggugucuuuuaaucaaaacuuggauuaucaaauaggauacaucugcaguggaguguucggugacaacccgcgucccaaagauagagagggcagcugcaauccagugacuguugauggagcaaacggaguaaaaggguuuucauacaaauaugguaaugguguuuggauaggaaggaccaaaaguaacagaauuagaaagggguuugagaugauuugggauccuaauggauggacaaauaccgacagugauuucucagugaaacaggauauuguagcaauaacugauuggucaggguacagcggaaguuucguccaacauccugaguuaacaggauuggacuguauaagaccuugcuucuggguugaguuagucagagggcugccuagagaaaauacaacaaucuggacuagugggagcagcauuucuuuuuguggcguuaauggugauauugcaaauuggucuuggccagacggugcugaguugccguucaccauugacaaguag

SEQ ID NO: 53539 - RNA, 1413 nt, Artificial Sequence; identical to SEQ ID NO: 53532
  derived and/or modified CDS sequence (wt) from neuraminidase__InfluenzaA__AEX35013

SEQ ID NO: 53540 - RNA, 1413 nt, Artificial Sequence
  derived and/or modified CDS sequence (wt) from neuraminidase__InfluenzaA__AEX35024
augaacccaaaucaaaagauaauaaccauuggaucaaucaguauagcaaucggaauaauuagucuaauguugcaaauaggaaauauuauuucaauaugggcuagucacucaauccaaacuggaagucaaaacaacacuggaauauguaaccaaagaaucaucacauaugaaaacagcaccugggugaaucacacauauguuaauauuaacaacacuaauguuguugcuggagaagacaaaacuucagugacauuggccggcaauucaucucuuuguucuaucaguggaugggcuauauacacaaaagacaacagcauaagaauuggcuccaaaggagauguuuuugucauaagagaaccuuucauaucauguucucacuuggaaugcagaaccuuuuuucugacccaaggcgcucuauuaaaugacaaacauucaaaugggaccguaaaggacagaaguccuuauagggccuuaaugagcuguccucuaggugaagcuccguccccauacaauucaaaguucgaaucaguugcauggucagcaagcgcaugccaugauggcaugggcugguuaacaaucggaauuucugguccagacaauggagcuguagcuguacuaaaauacaacggaauaauaacuggaaccauaaaaaguuggaaaaagcaaauauuaagaacacaagagucugaaugugucuguaugaacgggucauguuucaccauaaugaccgauggcccgaguaauaaggccgccucguacaaaauuuucaagaucgaaaaggggaagguuacuaaaucaauagaguugaaugcacccaauuuuuauuaugaggaaugcuccuguuacccagacacuggcauagugauguguguaugcagggacaacuggcaugguucaaaucgaccuugggugucuuuuaaucaaaacuuggauuaucaaauaggauacaucugcaguggaguguuuggugacaauccgcgucccgaagauggagagggcagcugcaauccagugacuguugauggagcaaacggaguaaaaggguuuucauacaaauaugguaaugguguuuggauaggaaggaccaaaaguaacagacuuagaaagggguuugagaugauuugggauccuaauggauggacaaauaccgacagugauuucucagugaaacaggauguuguagcaauaacugauuggucaggguacagcggaaguuucguccaacauccugaguuaacaggauuggacuguauaagaccuugcuucuggguugaguuagucagagggcugccuagagaaaauacaacaaucuggacuagugggagcagcauuucuuuuuguggcguuaauagugauacugcaaacuggucuuggccagacggugcugagcugccguucaccauugacaaguag

SEQ ID NO: 53541 - RNA, 1413 nt, Artificial Sequence; identical to SEQ ID NO: 53532
  derived and/or modified CDS sequence (wt) from neuraminidase__InfluenzaA__AEX35035

SEQ ID NO: 53542 - RNA, 1413 nt, Artificial Sequence; identical to SEQ ID NO: 53532
  derived and/or modified CDS sequence (wt) from neuraminidase__InfluenzaA__AEX35046

SEQ ID NO: 53543 - RNA, 1413 nt, Artificial Sequence; identical to SEQ ID NO: 53540
  derived and/or modified CDS sequence (wt) from neuraminidase__InfluenzaA__AEX35057

SEQ ID NO: 53544 - RNA, 1413 nt, Artificial Sequence; identical to SEQ ID NO: 53532
  derived and/or modified CDS sequence (wt) from neuraminidase__InfluenzaA__AEX35068

SEQ ID NO: 53545 - RNA, 1413 nt, Artificial Sequence
  derived and/or modified CDS sequence (wt) from neuraminidase__InfluenzaA__AEX35079
augaacccaaaucaaaagauaauaaccauuggaucaaucaguauagcaaucggaauaauuagucuaauguugcaaauaggaaauauuauuucaaugugggcuagucacucaauccaaacuggaagucaaaacaacacuggaauauguaaccaaagaaucaucacauaugaaaacagcaccugggugaaucacacauauguuaauauuaacaacacuaauguuguugcuggagaagacaaaacuucagugacauuggccggcaauucaucucuuuguucuaucaguggaugggcuauauacacaaaagacaacagcauaagaauuggcuccaaaggagauguuuuugucauaagagaaccuuucauaucauguucucacuuggaaugcagaaccuuuuuucugacccaaggcgcucuauuaaaugacaaacauucaaaugggaccguaaaggacagaaguccuuauagggccuuaaugagcuguccucuaggugaagcuccguccccauacaauucaaaguucgaaucaguugcauggucagcaagcgcaugccaugauggcaugggcugguuaacaaucggaauuucugguccagacaauggagcuguggcuguacuaaaauacaacggaauaauaacuggaaccauaaaaaguuggaaaaagcaaauauuaagaacacaagagucugaaugugucuguaugaacgggucauguuucaccauaaugaccgauggcccgaguaauaaggccgccucguacaaaauuuucaagaucgaaaaggggaagguuacuaaaucaauagaguugaaugcacccaauuuuuauuaugaggaaugcuccuguuacccagacacuggcauagugauguguguaugcagggacaacuggcaugguucaaaucgaccuugggugucuuuuaaucaagacuuggauuaucaaauaggauacaucugcaguggaguguuuggugacaauccgcgucccgaagauggagagggcagcugcaauccagugacuguugauggagcaaacggaguaaaaggguuuucauacaaauaugguaaugguguuuggauaggaaggaccaaaaguaacagacuuagaaagggguuugagaugauuugggauccuaauggauggacaaauaccgacagugauuucucagugaaacaggauguuguagcaauaacugauuggucaggguacagcggaaguuucguccaacauccugaguuaacaggauuggacuguauaagaccuugcuucuggguugaguuagucagagggcugccuagagaaaauacaacaaucuggacuagugggagcagcauuucuuuuuguggcguuaauagugauacugcaaacuggucuuggccagacggugcugaguugccguucaccauugacaaguag

SEQ ID NO: 53546 - RNA, 1413 nt, Artificial Sequence; identical to SEQ ID NO: 53521
  derived and/or modified CDS sequence (wt) from neuraminidase__InfluenzaA__AEX35090

SEQ ID NO: 53547 - RNA, 1413 nt, Artificial Sequence
  derived and/or modified CDS sequence (wt) from neuraminidase__InfluenzaA__AEX35101
augaacccaaaucaaaagauaauaaccauuggaucaaucaguauagcaaucggaauaauuagucuaauguugcaaauaggaaauauuauuucaauaugggcuagucacucaauccaaacuggaagucaaaacaacacuggaauaugcaaccaaagaaucaucacauaugaaaacagcaccugggugaaucacacauauguuaauauuaacaacacuaauguuguugcuggagaggacaaaacuucagugacauuggccggcaauucaucucuuuguucuaucaguggaugggcuauauacacaaaagacaacagcauaagaauuggcuccaaaggagauguuuuugucauaagagaaccuuucauaucauguucucacuuggaaugcagaaccuuuuuucugacccaaggcgcucuauuaaaugacaaacauucaaauggaaccguaaaggacagaaguccuuauagggccuuaaugagcuguccucuaggugaagcuccguccccauacaauucaaaguucgaaucaguugcauggucagcaagcgcaugccaugauggcaugggcugguuaacaaucggaauuucugguccagacaauggagcuguggcuguacuaaaauacaacggaauaauaacuggaaccauaaaaaguuggaaaaagcaaauauuaagaacacaagagucugaaugugucuguaugaacgggucauguuucaccauaaugaccgauggcccgaguaauaaggccgccucguacaaaauuuucaagaucgaaaaggggaagguuacuaaaucaauagaguugaaugcacccaauuuucauuaugaggaauguuccuguuacccagacacuggcauagugauguguguaugcagggacaacuggcaugguucaaaucgaccuugggugucuuuuaaucaaaacuuggauuaucaaauaggauacaucugcaguggaguguuuggugacaauccgcgucccgaagauggagagggcagcugcaauccagugacuguugauggagcaaacggaguaaaaggguuuucauacaaauaugauaaugguguuuggauaggaaggaccaaaaguaacagacuuagaaagggguuugagaugauuugggauccuaauggauggacaaauaccgacaguguuuucucagugaaacaggauguuguagcaauaacugauuggucaggguacagcggaaguuucguccaacauccugaguuaacaggauuggacuguauaagaccuugcuucuggguugaguuagucagagggcugccuagagaaaauacaacaaucuggacuagugggagcagcauuucuuuuuguggcguuaauagugauacugcaaacuggucuuggccagacggugcugaguugccguucaccauugacaaguag

SEQ ID NO: 53548 - RNA, 1413 nt, Artificial Sequence
  derived and/or modified CDS sequence (wt) from neuraminidase__InfluenzaA__AEX35112
augaacccaaaucaaaagauaauaaccauuggaucaaucaguauagcaaucggaauaauuagucuaauguugcaaauaggaaauauuauuucaauaugggcuagucacucaauccaaacuggaagucaaaacaacacuggaauauguaaccaaagaaucaucacauaugaaaacagcaccugggugaaucacacauauguuaauauuaacaacacuaauguuguugcuggagaagacaaaacuucagugacauuggccggcaauucaucucuuuguucuaucaguggaugggcuauauacacaaaagacaacagcauaagaauuggcuccaaaggagauguuuuugucauaagagaaccuuucauaucauguucucacuuggaaugcagaaccuuuuuucugacccaaggcgcucuauuaaaugacaaacauucaaaugggaccguaaaggacagaaguccuuauagggccuuaaugagcuguccucuaggugaagcuccguccccauacaauucaaaguucgaaucaguugcauggucagcaagcgcaugccaugauggcaugggcugguuaacaaucggaauuucugguccagacaauggagcuguggcuguacuaaaauacaacggaauaauaacuggaaccauaaaaaguuggaaaaagcaaauauuaagaacacaagagucugaaugugucuguaugaacgggucauguuucaccauaaugaccgauggcccgaguaauaaggccgccucguacaaaauuuucaagaucgaaaaggggaagguuacuaaaucaauagaguugaaugcauccaauuuuuauuaugaggaaugcuccuguuacccagacacuggcauagugauguguguaugcagggacaacuggcaugguucaaaucgaccuugggugucuuuuaaucaaaacuuggauuaucaaauaggauacaucugcaguggaguguuuggugacaauccgcgucccgaagauggagagggcagcugcaauccagugacuguugauggagcaaacggaguaaaaggguuuucauacaaauaugguaaugguguuuggauaggaaggaccaaaaguaacagacuuagaaagggguuugagaugauuugggauccuaauggauggacaaauaccgacagugauuucucagugaaacaggauguuguagcaauaacugauuggucaggguacagcggaaguuucguccaacauccugaguuaacaggauuggacuguauaagaccuugcuucuggguugaguuagucagagggcugccuagagaaaauacaacaaucuggacuagugggagcagcauuucuuuuuguggcguuaauagugauacugcaaacuggucuuggccagacggugcugaguugccguucaccauugacaaguag

SEQ ID NO: 53549 - RNA, 1413 nt, Artificial Sequence
  derived and/or modified CDS sequence (wt) from neuraminidase__InfluenzaA__AEX35123
augaacccaaaucaaaagauaauaaccauuggaucaaucaguauagcaaucggaauaauuagucuaauguugcaaauaggaaauauuauuucaauaugggcuagucacucaauccaaacuggaagucaaaacaacacuggaauauguaaccaaagaaucaucacauaugaaaacagcaccugggugaaucacacauauguuaauauuaacaacacuaauguuguugcuggagaagacaaaacuucagugacauuggccggcaauucaucucuuuguucuaucaguggaugggcuauauacacaaaagacaacagcauaagaauuggcuccaaaggagauguuuuugucauaagagaaccuuucauaucauguucucacuuggaaugcagaaccuuuuuucugacccaaggcgcucuauuaaaugacaaacauucaaaugggaccguaaaggacagaaguccuuauagggccuuaaugagcuguccucuaggugaagcuccguccccauacaauucaaaguucgaaucaguugcauggucagcaagcgcaugccaugauggcaugggcugguuaacaaucggaauuucugguccagacaauggagcuguggcuguacuaaaauacaacggaauaauaacuggaaccauaaaaaguuggaaaaagcaaauauuaagaacacaagagucugaaugugucuguaugaacgggucauguuucaccauaaugaccgauggcccgaguaauaaggcugccucguacaaaauuuucaagaucgaaaaggggaagguuacuaaaucaauagaguugaaugcacccaauuuuuauuaugaggaaugcuccuguuacccagacacuggcauagugauguguguaugcagggacaacuggcaugguucaaaucgaccuugggugucuuuuaaucaaaacuuggauuaucaaauaggauacaucugcaguggaguguuuggugacaauccgcgucccgaagauggagagggcagcugcaauccagugacuguugauggagcaaacggaguaaaaggguuuucauacaaauaugguaaugguguuuggauaggaaggaccaaaaguaacagacuuagaaagggguuugagaugauuugggauccuaauggauggacaaauaccgacagugauuucucagugaaacaggauguuguagcaauaacugauuggucaggguacagcggaaguuucguccaacauccugaguuaacaggauuggacuguauaagaccuugcuucuggguugaguuagucagagggcugccuagagaaaauacaacaaucuggacuagugggagcagcauuucuuuuuguggcguuaauagugauacugcaaacuggucuuggccagacggugcugaguugccguucaccauugacaaguag

SEQ ID NO: 53550 - RNA, 1413 nt, Artificial Sequence
  derived and/or modified CDS sequence (wt) from neuraminidase__InfluenzaA__AEX35145
augaacccaaaucaaaagauaauaaccauuggaucaaucaguauagcaaucggaauaauuagucuaauguugcaaauaggaaauauuauuucaauaugggcuagucacucaauccaaacuggaagucaaaacaacacuggaauauguaaccaaagaaucaucacauaugaaaacagcaccugggugaaucacacauauguuaauauuaacaacacuaauguuguugcuggagaagacaaaacuucagugacauuggccggcaauucaucucuuuguucuaucaguggaugggcuauauacacaaaagacaacagcauaagaauuggcuccaaaggagauguuuuugucauaagagaaccuuucauaucauguucucacuuggaaugcagaaccuuuuuucugacccaaggcgcucuauuaaaugacaaacauucaaaugggaccguaaaggacagaaguccuuauagggccuuaaugagcuguccucuaggugaagcuccguccccauacaauucaaaguucgaaucaguugcauggucagcaagcgcaugccaugauggcaugggcugguuaacaaucggaauuucugguccagacaauggagcuguggcuguacuaaaauacaacggaauaauaacuggaaccauaaaaaguuggaaaaagcaaauauuaagaacacaagagucugaaugugucuguaugaacgggucauguuucaccauaaugaccgauggcccgaguaauaaggcugccucguacaaaauuuucaagaucgaaaaggggaagguuacuaaaucaauagaguugaaugcacccaauuuuuauuaugaggaaugcuccuguuacccagacacuggcauagugauguguguaugcagggacaacuggcaugguucaaaucgaccuugggugucuuuuaaucaaaacuuggauuaucaaauaggauacaucugcaguggaguguucggugacaauccgcgucccgaagauggagagggcagcugcaauccagugacuguugauggagcaaacggaguaaaaggguuuucauacaaauaugguaaugguguuuggauaggaaggaccaaaaguaacagacuuagaaagggguuugagaugauuugggauccuaauggauggacaaauaccgacagugauuucucagugaaacaggauauuguagcaauaacugauuggucaggguacagcggaaguuucguccaacauccugaguuaacaggauuggacuguauaagaccuugcuucuggguugaguuagucagagggcugccuagagaaaauacaacaaucuggacuagugggagcagcauuucuuuuuguggcguuaauagugauacugcaaacuggucuuggccagacggugcugaguugccguucaccauugacaaguag

SEQ ID NO: 53551 - RNA, 1413 nt, Artificial Sequence; identical to SEQ ID NO: 53521
  derived and/or modified CDS sequence (wt) from neuraminidase__InfluenzaA__AEX35156

SEQ ID NO: 53552 - RNA, 1413 nt, Artificial Sequence
  derived and/or modified CDS sequence (wt) from neuraminidase__InfluenzaA__AEX35167
augaacccaaaucaaaagauaauaaccauuggaucaaucaguauagcaaucggaauaauuagucuaauguugcaaauaggaaauauuauuucaauaugggcuagucacucaauccaaacuggaagucaaaacaacacuggaauauguaaccaaagaaucaucacauaugaaaacagcaccugggugaaucacacauauguuaauauuaacaacacuaauguuguugcuggagaagacaaaacuucagugacauuggccggcaauucaucucuuuguucuaucaguggaugggcuauauacacaaaagacaacagcauaagaauuggcuccaaaggagauguuuuugucauaagagaaccuuucauaucauguucucacuuggaaugcagaaccuuuuuucugacccaaggcgcucuauuaaaugacaaacauucaaaugggaccguaaaggacagaaguccuuauagggccuuaaugagcuguccucuaggugaagcuccauccccauacaauucaaaguucgaaucaguugcauggucagcaagcgcaugccaugauggcaugggcugguuaacaaucggaauuucugguccagacaauggagcuguggcuguacuaaaauacaacggaauaauaacuggaaccauaaaaaguuggaaaaagcaaauauuaagaacacaagagucugaaugugucuguaugaacgggucauguuucaccauaaugaccgauggcccgaguaauaaggccgccucguacaaaauuuucaagaucgaaaaggggaagguuacuaaaucaauagaguugaaugcacccaauuuuuauuaugaggaaugcuccuguuacccagacacuggcauagugauguguguaugcagggacaacuggcaugguucaaaucgaccuugggugucuuuuaaucaaaacuuggauuaucaaauaggauacaucugcaguggaguguuuggugacaauccgcgucccgaagauggagagggcagcugcaauccagugacuguugauggagcaaacggaguaaaaggguuuucauacaaauaugguaaugguguuuggauaggaaggaccaaaaguaacagacuuagaaagggguuugagaugauuugggauccuaauggauggacaaauaccgacagugauuucucagugaaacaggauguuguagcaauaacugauuggucaggguacagcggaaguuucguccaacauccugaguuaacaggauuggacuguauaagaccuugcuucuggguugaguuagucagagggcugccuagagaaaauacaacaaucuggacuagugggagcagcauuucuuuuuguggcguuaauagugauacugcaaacuggucuuggccagacggugcugaguugccguucaccauugacaaguag

SEQ ID NO: 53553 - RNA, 1413 nt, Artificial Sequence
  derived and/or modified CDS sequence (wt) from neuraminidase__InfluenzaA__AEX35178
augaauccaaaucaaaaaauaauaaccauuggaucaaucaguauagcaaucggaauaauuagucuaauguugcaaauaggaaauauuauuucaauaugggcuagucacucaauccaaacuggaagucaaaaccacacuggaauaugcaaccaaagaaucaucacauaugaaaacagcaccugggugaaucacacauauguuaauauuaacaacacuaauguuguugcuggaaaggacaaaacuucagugacauuggccggcaauucaucucuuuguucuaucaguggaugggcuauauacacaaaagacaacagcauaagaauuggcuccaaaggagauguuuuugucauaagagaaccuuucauaucauguucucacuuggaaugcagaaccuuuuuucugacccaaggugcucuauuaaaugacaaacauucaaauggaaccguuaaggacagaaguccuuauagggccuuaaugagcuguccucuaggugaagcuccguccccauacaauucaaaguuugaaucaguugcauggucagcaagugcaugccaugauggcaugggcugguuaacaaucggaauuucugguccagacaauggagcuguggcuguacuaaaauacaacggaauaauaacugaaaccauaaaaaguuggaaagagcgaauauugagaacacaagagucugaaugugucugugugaacgggucauguuucaccauaaugaccgauggcccgaguaauggggccgccucguacaaaaucuucaagaucgaaaagggaaagguuacuaaaucaagagaguuaaaugcacccaauuuucauuaugaggaauguuccuguuacccagacacuggcacagugauguguguaugcagggacaacuggcaugguucaaaucgaccuugggugucuuuuaaucaaaacuuggauuaucaaauaggguacaucugcaguggaguguucggugacaauccgcgucccaaagauggaaagggcagcuguaauccagugacugcugauggagcagacggaguuaagggguuuucauacaaauaugguaaugguguuuggauaggaaggacuaaaaguaacagacuuagaaaggguuuugagaugauuugggauccuaauggauggacagauaccgacagugauuucucagugaaacaggauguuguggcaauaacugauuggucaggguacagcggaaguuucguucaacauccugaguuaacaggauuggacuguauaagaccuugcuucuggguugaguuagucagaggacugccuagagaaaauacaacaaucuggacuagugggagcagcauuucuuuuuguggcguugauagugauacugcaaacuggucuuggccagacggugcugaguugccguucaccauugacaaguag

SEQ ID NO: 53554 - RNA, 1413 nt, Artificial Sequence; identical to SEQ ID NO: 53494
  derived and/or modified CDS sequence (wt) from neuraminidase__InfluenzaA__AEX35189

SEQ ID NO: 53555 - RNA, 1413 nt, Artificial Sequence; identical to SEQ ID NO: 53494
  derived and/or modified CDS sequence (wt) from neuraminidase__InfluenzaA__AEX35200

SEQ ID NO: 53556 - RNA, 1413 nt, Artificial Sequence
  derived and/or modified CDS sequence (wt) from neuraminidase__InfluenzaA__AEX35211
augaacccaaaucaaaagauaauaaccauuggaucaaucaguauagcaaucggaauaauuagucuaauguugcaaauaggaaauauuauuucaauaugggcuagucacucaauccaaacuggaagucaaaacaacacuggaauauguaaccaaagaaucaucacauaugaaaacagcaccugggugaaucacacauauguuaauauuaacaacacuaauguuguugcuggagaagacaaaacuucagugacauuggccggcaauucaucucuuuguucuaucaguggaugggcuauauacacaaaagacaacagcauaagaauuggcuccaaaggagauguuuuugucauaagagaaccuuucauaucauguucucacuuggaaugcagaaccuuuuuucugacccaaggcgcucuauuaaaugacaaacauucaaaugggaccguaaaggacagaaguccuuauagggccuuaaugagcuguccucuaggugaagcuccguccccauacaauucaaaguucgaaucaguugcauggucagcaagcgcaugccaugauggcaugggcugguuaacaaucggaauuucugguccagacaauggagcuguggcuguacuaaaauacaacggaauaauaacuggaaccauaaaaaguuggaaaaagcaaauauuaagaacacaagaaucugaaugugucuguaugaacgggucauguuucaccauaaugaccgauggcccgaguaauaaggccgccucguacaaaauuuucaagaucgaaaaggggaagguuacuaaaucaauagaguugaaugcacccaauuuuuauuaugaggaaugcuccuguuacccagacacuggcauagugauguguguaugcagggacaacuggcaugguucaaaucgaccuugggugucuuuuaaucaaaacuuggauuaucaaauaggauacaucugcaguggaguguuuggugacaauccgcgucccgaagauggagagggcagcugcaauccagugacuguugauggagcaaacggaguaaaaggguuuucauacaaauaugguaaugguguuuggauaggaaggaccaaaaguaacagacuuagaaagggguuugagaugauuugggauccuaauggauggacaaauaccgacagugauuucucagugaaacaggauguuguagcaauaacugauuggucaggguacagcggaaguuucguccaacauccugaguuaacaggauuggacuguauaagaccuugcuucuggguugaguuagucagagggcugccuagagaaaauacaacaaucuggacuagugggagcagcauuucuuuuuguggcguuaauagugauacugcaaacuggucuuggccagacggugcugaguugccguucaccauugacaaguag

SEQ ID NO: 53557 - RNA, 1410 nt, Artificial Sequence
  derived and/or modified CDS sequence (wt) from neuraminidase__InfluenzaA__AEX35222
augaauccaaaucaaaagauaauaacgauuggcucuguuucucucaccauuuccacaauaugcuucuuuaugcaaauugccauccugguaacuacuguaacauugcauuucaagcaauaugaaugcaacucccccccaaacaaccaagugaugcugugugaaccaacaauaauagaaagaaacauaacagagauaguguaucugaccaacaccaccauagagaaggaaauaugucccaaacuagcagaauacagaaauuggucaaagccgcaauguaacauuacaggauuugcaccuuuuucuaaggacaauucgauucggcuuuccgcugguggggacaucugggugacaagagaaccuuaugugucaugcgauccugacaaauguuaucaauuugcccuuggacagggaacaacacuaaacaacgggcauucaaaugacacaguacaugauaggaccccuuaucggacccuauugaugaaugaguuggguguuccauuucaucuggggaccaagcaagugugcauagcaugguccagcucaaguugucaugauggaaaagcauggcugcauguuuguguaacgggggaugaugaaaaugcaacugcuagcuucauuuacaaugggaggcuuguagauaguauugguucaugguccaaaaaaauccucaggacccaggagucagaaugcguuuguaucaauggaacuuguacaguaguaaugacugaugggagugcuucaggaaaagccgauacuaaaauacuauucauugaggaggggaaaaucguucauaccagcacauugucaggaagugcucagcaugucgaggagugcuccuguuauccucgauauccuggugucagaugugucugcagagacaacuggaaaggcuccaauaggcccaucguagauauaaauauaaaggauuauagcauuguuuccaguuaugugugcucaggacuuguuggagacacacccagaaaaaacgacagcuccagcaguagccauugcuuggauccuaacaaugaggaagguggucauggagugaaaggcugggccuuugaugauggaaaugacguguggaugggaagaacaaucagcgagaaguuacgcucaggauaugaaaccuucaaagucauugaaggcugguccaaaccuaacuccaaauugcagauaaauaggcaagucauaguugacagagguaauagguccgguuauucugguauuuucucuguugaaggcaaaagcugcaucaaucggugcuuuuauguggaauugauaaggggaaggaaacaggaaacugaagucuuguggaccucaaacaguauuguuguguuuuguggcacuucagguacauauggaacaggcucauggccugauggggcggacaucaaucucaugccuauauaa

SEQ ID NO: 53558 - RNA, 1413 nt, Artificial Sequence; identical to SEQ ID NO: 53453
  derived and/or modified CDS sequence (wt) from neuraminidase__InfluenzaA__AEX35233

SEQ ID NO: 53559 - RNA, 1410 nt, Artificial Sequence
  derived and/or modified CDS sequence (wt) from neuraminidase__InfluenzaA__AEX35244
augaauccaaaucaaaagauaauaacgauuggcucuguuucucucaccauuuccacaauaugcuucuucaugcaaauugccauccugauaaauacuguaacauugcauuucaagcaauaugaauucaacucccccccaaacaaccaagugaugcugugugaaccaacaauaauagaaagaaacauaacagagauaguguaucugaccaacaccaccauagagaaggaaauaugccccaaacuagcagaauacagaaauuggucaaagccgcaauguaacauuacaggauuugcaccuuuuucuaaggacaauucgauucggcuuuccgcugguggggacaucugggugacaagagaaccuuaugugucaugcgauccugacaaguguuaucaauuugcucuuggacagggaacaacacuaaacaacgugcauucaaaugacacaguacaugauaggaccccuuaucggacccuauugaugaaugaguuggguguuccauuucaucuggggaccaagcaagugugcauagcaugguccagcucaaguugucacgauggaaaagcauggcugcauguuuguguaacgggggaugauaaaaaugcaacugcuagcuucauuuacaaugggaggcuuguagauaguauuguuucaugguccaaaaaaauccucaggacccaggagucagaaugcguuuguaucaauggaacuuguacaguaguaaugacugaugggagugcuucaggaaaagcugauacuaaaauacuauucauugaggaggggaaaaucguucauacuagcacauugucaggaagugcucagcaugucgaggagugcuccuguuauccucgauauccuggugucagaugugucugcagggacaauuggaaaggcuccaauaggcccaucguagauauaaacauaaaggauuauagcauuguuuccaguuaugugugcucaggacuuguuggagacacacccagaaaaaacgacagcuccagcaguagccauugcuuggauccaaacaaugaggaaggugguaauggagugaaaggcugggccuuugaugauggaaaugacguauggaugggaagaacgaucagcgagaaguuacgcucaggguaugaaaccuucaaagucauugaaggcugguccaacccuaacuccaaauugcagauaaauagacaagucauaguugacagagguaauagguccgguuauucugguauuuucucuguugaaggcaaaagcugcaucaaucggugcuuuuauguggaguugauaagaggaagaaaacaggaaaaugaagucuuguggaccucaaacaguauuguuguguuuuguggcaccucagguacauauggaacaggcucauggccugauggggcggacaucaaucucaugccuguauaa

SEQ ID NO: 53560 - RNA, 1410 nt, Artificial Sequence
  derived and/or modified CDS sequence (wt) from neuraminidase__InfluenzaA__AEX35255
augaauccaaaucaaaagauaauaacgauuggcucuguuucucucaccauuuccacaauaugcuucuucaugcaaauugccauccugauaacuacuguaacauugcauuucaagcaauaugaauucaacucccccccaaacaaccaagugaugcugugugaaccaacaauaauagaaagaaacauaacagagauaguguaucugaccaacaccaccauagagaaggaaauaugccccaaacuagcagaauacagaaauuggucaaagccgcaauguaacauuacaggauuugcaccuuuuucuaaggacaauucgauucggcuuuccgcuggcggggacaucugggugacaagagaaccuuaugugucaugcgauccugacaaguguuaucaauuugcccuuggacagggaacaacacuaaacaacgugcauucaaaugacacaguacaugauaggaccccuuaucggacccuauugaugaaugaguuggguguuccauuccaucuggggaccaagcaagugugcauagcaugguccagcucaaguugucacgauggaaaagcauggcugcauguuuguguaacgggggaugaugaaaaugcaacugcuagcuucauuuacaaugggaggcuuguagauaguauuguuucaugguccaaaaaaauccucaggacccaggagucagaaugcguuuguaucaauggaacuuguacaguaguaaugacugaugggagugcuucaggaaaagcugauacuaaaauacuauucauugaggaagggaaaaucguucauacuagcacauugucaggaagugcucagcaugucgaggagugcuccuguuauccucgauauccuggugucagaugugucugcagagacaauuggaaaggcuccaauaggcccaucguagauauaaacauaaaggauuauagcauuguuuccaguuaugugugcucaggacuuguuggagacacacccagaaaaaacgacagcuccagcaguagccauugcuuggauccaaacaaugaggaagguggucauggagugaaaggcugggccuuugaugauggaaaugacguguggaugggaagaacgaucagcgagaaguuacgcucaggauaugaaaccuucaaagucauugaaggcugguccaacccuaacuccaaauugcagauaaauaggcaagucauaguugacagggguaauagguccgguuauucugguauuuucucuguugaaggcaaaagcugcaucaaucggugcuuuuauguggaguugauaagaggaagaaaacaggaaacugaagucuuguggaccucaaacaguauuguuguguuuuguggcaccucagguacauauggaacaggcucauggccugauggggcggacaucaaucucaugccuauauaa

SEQ ID NO: 53561 - RNA, 1413 nt, Artificial Sequence; identical to SEQ ID NO: 53453
  derived and/or modified CDS sequence (wt) from neuraminidase__InfluenzaA__AEX35266

SEQ ID NO: 53562 - RNA, 1413 nt, Artificial Sequence; identical to SEQ ID NO: 53453
  derived and/or modified CDS sequence (wt) from neuraminidase__InfluenzaA__AEX35277

SEQ ID NO: 53563 - RNA, 1410 nt, Artificial Sequence
  derived and/or modified CDS sequence (wt) from neuraminidase__InfluenzaA__AEX35288
augaauccaaaucaaaagauaauaacgauuggcucuguuucucucaccauuuccacaauaugcuucuucaugcaaauugccaucuugauaacuacuguaacauugcauuucaagcaauaugaauucaacucccccccaaacaaccaagugaugcugugugaaccaacaauaauagaaagaaacauaacagagauaguguaucugaccaacaccaccauagagaaggaaauaugccccaaacuagcagaauacagaaauuggucaaagccgcaaugugacauuacaggauuugcaccuuuuucuaaggacaauucgauuaggcuuuccgcugguggggacaucugggugacaagagaaccuuaugugucaugcgauccugacaaguguuaucaauuugcccuuggacagggaacaacacuaaacaacgugcauucaaaugacacaguacauaauaggaccccuuaucggaccuuauugaugaaugaguuagguguuccauuucaucuggggaccaagcaagugugcauagcaugguccagcucaaguugucacgauggaaaagcauggcugcauguuuguguaacgggggaugauaaaaaugcaacugcuagcuucauuuacaaugggaggcuuguagauaguauuguuucaugguccaaaaaaauccucaggacccaggagucagaaugcguuuguaucaauggaacuuguacaguaguaaugacugaugggagugcuucaggaaaagcugauacuaaaauacuauucauugaggaggggaaaaucguucauacuagcacauugucaggaagugcucagcaugucgaggagugcuccugcuauccucgauauccuggugucagaugugucugcagagacaacuggaaaggcuccaauaggcccaucguagauauaaacauaaaggauuauagcauuguuuccaguuaugugugcucaggacuuguuggagacacacccaggaaaaacgacagcuccagcaguagccauugcuuggauccuaacaaugaagaagguggucauggagugaaaggcugggccuuugaugauggaaaugacguguggaugggaagaacgaucagcgagaaguugcgcucaggauaugaaaccuucaaagucauugaaggcugguccaacccuaauuccaaauugcagauaaauaggcaagucauaguugacagagguaauagguccgguuauucugguauuuucucuguugaaggcaaaagcugcaucaaucggugcuuuuauguggaguugauaaggggaagaaaagaggaaacugaagucuuguggaccucaaacaguauuguuguguuuuguggcaccucagguacauauggaacaggcucauggccugauggggcggacaucaaucucaugccuauauaa

SEQ ID NO: 53564 - RNA, 1410 nt, Artificial Sequence; identical to SEQ ID NO: 53461
  derived and/or modified CDS sequence (wt) from neuraminidase__InfluenzaA__AEX35299

SEQ ID NO: 53565 - RNA, 1410 nt, Artificial Sequence
  derived and/or modified CDS sequence (wt) from neuraminidase__InfluenzaA__AEX35310
augaauccaaaucaaaagauaauaacaauuggcucuguuucucucaccauuuccacaauaugcuucuucaugcaaauugccauccugauaacuacuguaacauugcauuucaagcaauaugaauucaacucccccccaaacaaccaagugaugcugugugaaccaacaauaauagaaagaaacauaacagagauaguguaucugaccaacaccaccauagagaaggaaauaugccccaaacuagcagaauacagaaauuggucaaagccgcaauguaacauuacaggauuugcaccuuuuucuaaggacaauucgauucggcuuuccgcugguggagacaucugggugacaagagaaccuuaugugucaugcgauccugacaaguguuaucaauuugcccuuggacagggaacaacacuaaacaacgugcauucaaaugacacagugcaugauaggaccccuuaucggacccuauugaugaaugaguuggguguuccauuucaucugggaaccaagcaagugugcauagcaugguccagcucaaguugucacgauggaaaagcauggcugcauguuuguguaacgggggaugaugaaaaugcaacugcuagcuucauuuacaaugggaggcuuguagauaguauuguuucaugguccaaaaaaauccucaggacccaggagucagaaugcguuuguaucaauggaacuuguacaguaguaaugacugaugggagugcuucaggaaaagcugauacuaaaauacuauucauugaggaggggaaaaucguucauacuagcacauugucaggaagugcucagcaugucgaggagugcuccuguuauccucgauauccuggugucagaugugucugcagagacaacuggaaaggcuccaauaggcccaucguagauauaaacauaaaagauuauagcauuguuuccaguuaugugugcucaggacuuguuggagacacacccagaaaaaacgacagcuccagcaguagccauugcuuggauccaaacaaugaggaagguggucauggagugaaaggcugggccuuugaugauggagaugacguguggaugggaagaacgaucagcgagaaguuacgcucaggauaugaaaccuucaaagucauugaaggcugguccaacccuaacuccaaauugcagauaaauaggcaagucauaguugacagagguaauagguccgguuauucugguauuuucucuguugaaggcaaaagcugcaucaaucggugcuuuuauguggaguugauaaggggaagaaaccaggaaacugaagucuuguggaccucaaacaguauuguuguguuuuguggcaccucagguacauauggaacaggcucauggccugauggggcggacaucaaucucaugccuauauaa

SEQ ID NO: 53566 - RNA, 1410 nt, Artificial Sequence; identical to SEQ ID NO: 53461
  derived and/or modified CDS sequence (wt) from neuraminidase__InfluenzaA__AEX35321

SEQ ID NO: 53567 - RNA, 1410 nt, Artificial Sequence
  derived and/or modified CDS sequence (wt) from neuraminidase__InfluenzaA__AEX35332
augaauccaaaucaaaagauaauaacgauuggcucuguuucucucaccauuuccacaauaugcuucuucaugcaaauugccauccugauaacuacuguaacauugcauuucaagcaauaugaauucaacucccccccaaacaaccaagugaugcugugugaaccaacaauaauagaaagaaacauaacagagauaguguaucugaccaacaccaccauagagaaggaaauaugccccaaacuagcagaauacagaaauuggucaaagccgcaauguaacauuacaggauuugcaccuuuuucuaaggacaauucgauucggcuuuccgcugguggggacaucugggugacaagagaaccuuaugugucaugcgauccugacaaguguuaucaauuugcccuuggacagggaacaacacuaaacaacgugcauucaaaugacacaguacaugauaggaccccuuaucggacccuauugaugaaugaguuggguguuccauuccaucuggggaccaagcaagugugcauagcaugguccagcucaaguugucacgauggaaaagcauggcugcauguuuguguaacgggggaugaugaaaaugcaacugcuagcuucauuuacaaugggaggcuuguagauaguauuguuucaugguccaaaaaaauccucaggacccaggagucagaaugcguuuguaucaauggaacuuguacaguaguaaugacugaugggagugcuucaggaaaagcugauacuaaaauacuauucauugaggaagggaaaaucguucauacuagcacauugucaggaagugcucagcaugucgaggagugcuccuguuauccucgauauccuggugucagaugugucugcagagacaauuggaaaggcuccaauaggcccaucguagauauaaacauaaaggauuauagcauuguuuccaguuaugugugcucaggacuuguuggagacacacccagaaaaaacgacaguuccagcaguagccauugcuuggauccaaacaaugaggaagguggucauggagugaaaggcugggcauuugaugauggaaaugacguguggaugggaagaacgaucagcgagaaguuacgcucaggauaugaaaccuucaaagucauugaaggcugguccaacccuaacuccaaauugcagauaaauaggcaagucauaguugacagggguaauagguccgguuauucugguauuuucucuguugaaggcaaaagcugcaucaaucggugcuuuuauguggaguugauaagaggaagaaaacaggaaacugaagucuuguggaccucaaacaguauuguuguguuuuguggcaccucagguacauauggaacaggcucauggccugauggggcggacaucaaucucaugccuauauaa

SEQ ID NO: 53568 - RNA, 1410 nt, Artificial Sequence
  derived and/or modified CDS sequence (wt) from neuraminidase__InfluenzaA__AEX35343
augaauccaaaucaaaagauaauaacgauuggcucuguuucucucaccauuuccacaauaugcuucuucaugcaaauugccauccugauaacuacuguaacauugcauuucaagcaauaugaauucaacucccccccaaacaaccaagugaugcugugugaaccaacaauaauagaaagaaacauaacagagauaguguaucugaccaacaccaccauagagaaggaaauaugccccaaacuagcagaauacagaaauuggucaaagccgcaauguaacauuacaggauuugcaccuuuuucuaaggacaauucgauucggcuuuccgcugguggggacaucugggugacaagagaaccuuaugugucaugcgauccugacaaguguuaucaauuugcccuuggacagggaacaacacuaaacaacgugcauucaaaugacacaguacaugauaggaccccuuaucggacccuauugaugaaugaguuggguguuccauuccaucuggggaccaagcaagugugcauagcaugguccagcucaaguugucacgauggaaaagcauggcugcauguuuguguaacgggggaugaugaaaaugcaacugcuagcuucauuuacaaugggaggcuuguagauaguauuguuucaugguccaaaaaaauccucaggacccaggagucagaaugcguuuguaucaauggaacuuguacaguaguaaugacugaugggagugcuucaggaaaagcugauacuaaaauacuauucauugaggaagggaaaaucguucauacuagcacauugucaggaagugcucagcaugucgaggagugcuccuguuauccucgauauccuggugucagaugugucugcagagacaauuggaaaggcuccaauaggcccaucguagauauaaacauaaaggauuauagcauuguuuccaguuaugugugcucaggacuuguuggagacacacccagaaaaaacgacagcuccagcaguagccauugcuuggauccaaacaaugaggaagguggucauggagugaaaggcugggccuuugaugauggaaaugacguguggaugggaagaacgaucagcgagaaguuacgcucaggauaugaaaccuucaaagucauugaaggcugguccaacccuaacuccaaauugcagauaaauaggcaagucauaguugacagggguaauagguccgguuauucugguauuuucucuguugaaggcaaaagcugcaucaaucggugcuuuuauguggaguugauaagaggaagaaaacaggaaacugaagucuuguggaccucaaacaguauuguuguguuuuguggcaccucagguacauauggaacaggcucauggccugauggggcggacaucaaucucaugccuauauaa

SEQ ID NO: 53569 - RNA, 1410 nt, Artificial Sequence
  derived and/or modified CDS sequence (wt) from neuraminidase__InfluenzaA__AEX35354
augaauccaaaucaaaagauaauaacgauuggcucuguuucucucaccauuuccacaauaugcuucuucaugcaaauugccaucuugauaacuacuguaacauugcauuucaagcaauaugaauucaacucccccccaaacaaccaagugaugcugugugaaccaacaauaauagaaagaaacauaacagagauaguguaucugaccaacaccaccauagagaaggaaauaugccccaaacuagcagaauacagaaauuggucaaagccgcaaugugacauuacaggauuugcaccuuuuucuaaggacaauucgauuaggcuuuccgcugguggggacaucugggugacaagagaaccuuaugugucaugcgauccugacaaguguuaucaauuugcccuuggacagggaacaacacuaaacaacgugcauucaaaugacacaguacaugauaggaccccuuaucggaccuuauugaugaaugaguuagguguuccauuucaucuggggaccaagcaagugugcauagcaugguccagcucaaguugucacgauggaaaagcauggcugcauguuuguguaacgggggaugauaaaaaugcaacugcuagcuucauuuacaaugggaggcuuguagauaguauuguuucaugguccaaaaaaauccucaggacccaggagucagaaugcguuuguaucaauggaacuuguacaguaguaaugacugaugggaguacuucaggaaaagcugauacuaaaauacuauucauugaggaggggaaaaucguucauacuagcacauugucaggaagugcucagcaugucgaggagugcuccugcuauccucgauauccuggugucagaugugucugcagagacaacuggaaaggcuccaauaggcccaucguagauauaaacauaaaggauuauagcauuguuuccaguuaugugugcucaggacuuguuggagacacacccagaaaaaacgacagcuccagcaguagccauugcuuggauccuaacaaugaagaagguggucauggagugaaaggcugggccuuugaugauggaaaugacguguggaugggaagaacgaucagcgagaaguuacgcucaggauaugaaaccuucaaagucauugaaggcugguccaacccuaauuccaaauugcagauaaauaggcaagucauaguugacagagguaauagguccgguuauucugguauuuucucuguugaaggcaaaagcugcaucaaucggugcuuuuauguggaguugauaaggggaagaaaagaggaaacugaagucuuguggaccucaaacaguauuguuguguuuuguggcaccucagguacauauggaacaggcucauggccugauggggcggacaucaaucucaugccuauauaa

SEQ ID NO: 53570 - RNA, 1410 nt, Artificial Sequence
  derived and/or modified CDS sequence (wt) from neuraminidase__InfluenzaA__AEX35365
augaauccaaaucaaaagauaauaacgauuggcucuguuucucucaccauuuccacaauaugcuucuucaugcaaauugccaucuugauaacuacuguaacauugcauuucaagcaauaugaauucaacucccccccaaacaaccaagugaugcugugugaaccaacaauaauagaaagaaacauaacagagauaguguaucugaccaacaccaccauagagaaggaaauaugccccaaacuagcagaauacagaaauuggucaaagccgcaaugugacauuacaggauuugcaccuuuuucuaaggacaauucgauuaggcuuuccgcugguggggacaucugggugacaagagaaccuuaugugucaugcgauccugacaaguguuaucaauuugcccuuggacagggaacaacacuaaacaacgugcauucaaaugacacaguacaugauaggaccccuuaucggaccuuauugaugaaugaguuagguguuccauuucaucuggggaccaagcaagugugcauagcaugguccagcucaaguugucacgauggaaaagcauggcugcauguuuguguaacgggggaugauaaaaaugcaacugcuagcuucauuuacaaugggaggcuuguagauaguauuguuucaugguccaaaaaaauccucaggacccaggagucagaaugcguuuguaucaauggaacuuguacaguaguaaugacugaugggagugcuucaggaaaagcugauacuaaaauacuauucauugaggaggggaaaaucguucauacuagcacauugucaggaagugcucagcaugucgaggagugcuccugcuauccucgauauccuggugucagaugugucugcagagacaacuggaaaggcuccaauaggcccaucguagauauaaacauaaaggauuauagcauuguuuccaguuaugugugcucaggacuuguuggagacacacccagaaaaaacgacagcuccagcaguagccauugcuuggauccuaacaaugaagaagguggucauggagugaaaggcugggccuuugaugauggaaaugacguguggaugggaagaacgaucagcgagaaguuacgcucaggauaugaaaccuucaaagucauugaaggcugguccaacccuaauuccaaauugcagauaaauaggcaagucauaguugacagagguaauagguccgguuauucugguauuuucucuguugaaggcaaaagcugcaucaaucggugcuuuuauguggaguugauaaggggaagaaaagaggaaacugaagucuuguggaccucaaacaguauuguuguguuuuguggcaccucagguacauauggaacaggcucauggccugauggggcggacaucaaucucaugccuauauaa

SEQ ID NO: 53571 - RNA, 1410 nt, Artificial Sequence
  derived and/or modified CDS sequence (wt) from neuraminidase__InfluenzaA__AEX35376
augaauccaaaucaaaagauaauaacgauuggcucuguuucucucaccauuuccacaauaugcuucuucaugcaaauugccaucuugauaacuacuguaacauugcauuucaagcaauaugaauucaacucccccccaaacaaccaagugaugcugugugaaccaacaauaauagaaagaaacauaacagagauaguguaucugaccaacaccaccauagagaaggaaauaugccccaaacuagcagaauacagaaauuggucaaagccgcaaugugacauuacaggauuugcaccuuuuucuaaggacaauucgauuaggcuuuccgcugguggggacaucugggugacaagagaaccuuaugugucaugcgauccugacaaguguuaucaauuugcccuuggacagggaacaacacuaaacaacgugcauucaaaugacacaguacaugaaaggaccccuuaucggaccuuauugaugaaugaguuagguguuccauuucaucuggggaccaagcaagugugcauagcaugguccagcucaaguugucacgauggaaaagcauggcugcauguuuguguaacgggggaugauaaaaaugcaacugcuagcuucauuuacaaugggaggcuuguagauaguauuguuucaugguccaaaaaaauccucaggacccaggagucagaaugcguuuguaucaauggaacuuguacaguaguaaugacugaugggagugcuucaggaaaagcugauacuaaaauacuauucauugaggaggggaaaaucguucauacuagcacauugucaggaagugcucagcaugucgaggagugcuccugcuauccucgauauccuggugucagaugugucugcagagacaacuggaaaggcuccaauaggcccaucguagauauaaacauaaaggauuauagcauuguuuccaguuaugugugcucaggacuuguuggagacacacccagaaaaaacgacagcuccagcaguagccauugcuuggauccuaacaaugaagaagguggucauggagugaaaggcugggccuuugaugauggaaaugacguguggaugggaagaacgaucagcgagaaguuacgcucaggauaugaaaccuucaaagucauugaaggcugguccaacccuaauuccaaauugcagauaaauaggcaagucauaguugacagagguaauagguccgguuauucugguauuuucucuguugaaggcaaaagcugcaucaaucggugcuuuuauguggaguugauaaggggaagaaaagaggaaacugaagucuuguggaccucaaacaguauuguuguguuuuguggcaccucagguacauauggaacaggcucauggccugauggggcggacaucaaucucaugccuauauaa

SEQ ID NO: 53572 - RNA, 1410 nt, Artificial Sequence; identical to SEQ ID NO: 53570
  derived and/or modified CDS sequence (wt) from neuraminidase__InfluenzaA__AEX35387

SEQ ID NO: 53573 - RNA, 1410 nt, Artificial Sequence
  derived and/or modified CDS sequence (wt) from neuraminidase__InfluenzaA__AEX35398
augaauccaaaucaaaagauaauaacgauuggcucuguuucucucaccauuuccacaauaugcuucuucaugcaaauugccaucuugauaacuacuguaacauugcauuucaagcaauaugaauucaacucccccccaaacaaccaagugaugcugugugaaccaacaauaauagaaagaaacauaacagagauaguguaucugaccaacaccaccauagagaaggaaauaugccccaaacuagcagaauacagaaauuggucaaagccgcaaugugacauuacaggauuugcaccuuuuucuaaggacaauucgauuaggcuuuccgcugguggggacaucugggugacaagagaaccuuaugugucaugcgauccugacaaguguuaucaauuugcccuuggacagggaacaacacuaaacaacgugcauucaaaugacacaguacaugauaggaccccuuaucggacccuauugaugaaugaauuagguguuccauuucaucuggggaccaagcaagugugcauagcaugguccagcucaaguugucacgauggaaaagcauggcugcauguuuguguaacgggggaugauaaaaaugcaacugcuagcuucauuuacaaugggaggcuuguagauaguauuguuucaugguccaaaaaaauccucaggacccaggagucagaaugcguuuguaucaauggaacuugugcaguaguaaugacugaugggagugcuucaggaaaagcugauacuaaaauacuauucauugaggaggggaaaaucguucauacuagcacauugucaggaagugcucagcaugucgaggagugcuccugcuacccucgauauccuggugucagaugugucugcagagacaacuggaaaggcuccaauaggcccaucguagauauaaacauaaaggauuauagcauuguuuccaguuaugugugcucaggacuuguuggagacacacccagaaaaaacgacagcuccagcaguagccauugcuuggauccuaacaaugaagaagguggucauggagugaaaggcugggccuuugaugauggaaaugacguguggaugggaagaacgaucagcgagaaguuacgcucaggauaugaaaccuucaaagucauugaaggcugguccaacccuaauuccaaacugcagauaaauaggcaagucauaguugacagagguaauagguccgguuauucugguauuuucucuguugaaggcaaaagcugcaucaaucggugcuuuuauguggaguugauaaggggaagaaaagaggaaacugaagucuuguggaccucaaacaguauuguuguguuuuguggcaccucagguacauauggaacaggcucauggccugauggggcggacaucaaucucaugccuauauaa

SEQ ID NO: 53574 - RNA, 1410 nt, Artificial Sequence; identical to SEQ ID NO: 53461
  derived and/or modified CDS sequence (wt) from neuraminidase__InfluenzaA__AEX35409

SEQ ID NO: 53575 - RNA, 1410 nt, Artificial Sequence; identical to SEQ ID NO: 53563
  derived and/or modified CDS sequence (wt) from neuraminidase__InfluenzaA__AEX35420

SEQ ID NO: 53576 - RNA, 1410 nt, Artificial Sequence
  derived and/or modified CDS sequence (wt) from neuraminidase__InfluenzaA__AEX35431
augaauccaaaucaaaagauaauaacgauuggcucuguuucucucaccauuuccacaauaugcuucuucaugcaaauugccauccugauaacuacuguaacauugcauuucaagcaauaugaauucaacucccccccaaacaaccaagugaugcugugugaaccaacaauaauagaaagaaacauaacagagauaguguaucugaccaacaccaccauagagaaggaaauaugccccaaacuagcagaauacagaaauuggucaaagccgcaauguaacauuacaggauuugcaccuuuuucuaaggacaauucgauucggcuuuccgcugguggggacaucugggugacaagagaaccuuaugugucaugcgauccugacaaguguuaucaauuugcccuuggacagggaacaacacuaaacaacgugcauucaaaugacacaguacaugauaggaccccuuaucggacccuauugaugaaugaguuggguguuccauuucaucuggggaccaagcaagugugcauagcaugguccagcucaaguugucacgauggaaaagcauggcugcauguuuguguaacgggggaugaugaaaaugcaacugcuagcuucauuuacaaugggaggcuuguagauaguauuguuucaugguccaaaaaaauccucaggacccaggagucagaauguguuuguaucaauggaacuuguacaguaguaaugacugaugggagugcuucaggaaaagcugauacuaaaauacuauucauugaggaggggaaaaucguucauacuagcacauugucaggaagugcucagcaugucgaggaaugcuccuguuauccucgauauccuggugucagaugugucugcagagacaacuggaaaggcuccaauaggcccaucguagauauaaacauaaaggauuauagcauuguuuccaguuaugugugcucaggacuuguuggagacacacccagaaaaaacgacagcuccagcaguagccauugcuuggauccuaacaaugaggaagguggucauggagugaaaggcugggccuuugaugauggaaaugacguguggaugggaagaacgaucagcgagaaauuacgcucaggauaugaaaccuucaaagucauugaaggcugguccaacccuaacuccaaauugcagauaaauaggcaagucauaguugacagagguaauagguccgguuauucugguauuuucucuguugaaggcaaaagcugcaucaaucggugcuuuuauguggaguugauaaggggaagaaaaaaggaaacugaagucuuguggaccucaaacaguauuguuguguuuuguggcaccucagguacauauggaacaggcucauggccugauggggcggacaucaaucucaugccuauauaa

SEQ ID NO: 53577 - RNA, 1410 nt, Artificial Sequence; identical to SEQ ID NO: 46740
  derived and/or modified CDS sequence (wt) from neuraminidase__InfluenzaA__AEX35453

SEQ ID NO: 53578 - RNA, 1410 nt, Artificial Sequence
  derived and/or modified CDS sequence (wt) from neuraminidase__InfluenzaA__AEX35464
augaauccaaaucaaaagauaauaacgauuggcucuguuucucucaccauuuccacaauaugcuucuucaugcaaauugccaucuugauaacuacuguaacauugcauuucaagcaauaugaauucaacucccccccaaacaaccaagugaugcugugugaaccaacaauaauagaaagaaacauaacagagauaguguaucugaccaacaccaccauagagaaggaaauaugccccaaacuagcagaauacagaaauuggucaaagccgcaauguaacauuacaggauuugcaccuuuuucuaaggacaauucgauuaggcuuuccgcugguggggacaucugggugacaagagaaccuuaugugucaugcgauccugacaaguguuaucaauuugcccuuggacagggaacaacacuaaacaacgugcauucaaaugacacaguacaugauaggaccccuuaucggacccuauugaugaaugaguuagguguuccauuucaucuggggaccaagcaagugugcauagcaugguccagcucaaguugucacgauggaaaagcauggcugcauguuuguguaacgggggaugauaaaaaugcaacugcuagcuucauuuacaaugggaggcuuguagauaguauuguuucaugguccaaagaaauccucaggacccaggagucagaaugcguuuguaucaauggaacuuguacaguaguaaugacugaugggagugcuucaggaaaagcugauacuaaaauacuauucauugaggaggggaaaaucguucauacuagcacauugucaggaagugcucagcaugucgaggagugcuccugcuauccucgauauccuggugucagaugugucugcagagacaacuggaaaggcuccaauaggcccauaguagauauaaacauaaaggauuauagcauuguuuccaguuaugugugcucaggacuuguuggagacacacccagaaaaaacgacagcuccagcaguagccauugcuuggauccuaacaaugaagaagguggucauggagugaaaggcugggccuuugaugauggaaaugacguguggaugggaagaacgaucagcgagaaguuacgcucaggauaugaaaccuucaaagucauugaaggcugguccaacccuaauuccaaauugcagauaaauaggcaagucauaguugacagagguaauagguccgguuauucugguauuuucucuguugaaggcaaaagcugcaucaaucggugcuuuuauguggaguugauaaggggaagaaaagaggaaacugaagucuuguggaccucgaacaguauuguuguguuuuguggcaccucagguacauauggaacaggcucauggccugauggggcggacaucaaucucaugccuauauaa

SEQ ID NO: 53579 - RNA, 1410 nt, Artificial Sequence
  derived and/or modified CDS sequence (wt) from neuraminidase__InfluenzaA__AEX35475
augaauccaaaucaaaagauaauaacgauuggcucuguuucucucaccauuuccacaauaugcuucuucaugcaaauugccaucuugauaacuacuguaacauugcauuucaagcaauaugaauucaacucccccccaaacaaccaagugaugcugugugaaccaacaauaauagaaagaaacauaacagagauaguguaucugaccaacaccaccauagagaaggaaauaugccccaaacuagcagaauacagaaauuggucaaagccgcaauguaacauuacaggauuugcaccuuuuucuaaggacaauucgauuaggcuuuccgcugguggggacaucugggugacaagagaaccuuaugugucaugcgauccugacaaguguuaucaauuugcccuuggacagggaacaacacuaaacaacgugcauucaaaugacacaguacaugauaggaccccuuaucggacccuauugaugaaugaguuagguguuccauuucaucuggggaccaagcaagugugcauagcaugguccagcucaaguugucaugauggaaaagcauggcugcauguuuguguaacgggggaugauaaaaaugcaacugcuagcuucauuuacaaugggaggcuuguagauaguauuguuucaugguccaaagaaauccucaggacccaggagucagaaugcguuuguaucaauggaacuuguacaguaguaaugacugaugggagugcuucaggaaaagcugauacuaaaauacuauucauugaggaggggaaaaucguucauacuagcacauugucaggaagugcucagcaugucgaggagugcuccugcuauccucgauauccuggugucagaugugucugcagagacaacuggaaaggcuccaauaggcccauaguagauauaaacauaaaggauuauagcauuguuucuaguuaugugugcucaggacuuguuggagacacacccagaaaaaacgacagcuccagcaguagccauugcuuggauccuaacaaugaagaagguggucauggagugaaaggcugggccuuugaugauggaaaugacguguggaugggaagaacgaucagcgagaaguuacgcucaggauaugaaaccuucaaagucauugaaggcugguccaacccuaauuccaaauugcagauaaauaggcaagucauaguugacagagguaauagguccgguuauucugguauuuucucuguugaaggcaaaagcugcaucaaucggugcuuuuauguggaguugauaaggggaagaaaagaggaaacugaagucuuguggaccucaaacaguauuguuguguuuuguggcaccucagguacauauggaacaggcucauggccugauggggcggacaucaaucucaugccuauauaa

SEQ ID NO: 53580 - RNA, 1410 nt, Artificial Sequence; identical to SEQ ID NO: 46740
  derived and/or modified CDS sequence (wt) from neuraminidase__InfluenzaA__AEX35486

SEQ ID NO: 53581 - RNA, 1410 nt, Artificial Sequence
  derived and/or modified CDS sequence (wt) from neuraminidase__InfluenzaA__AEX35497
augaauccaaaucaaaagauaauaacgauuggcucuguuucucucaccauuuccacaauaugcuucuucaugcaaauugccaucuugauaacuacuguaacauugcauuucaagcaauaugaauucaacucccccccaaacaaccaagugaugcugugugaaccaacaauaauagaaagaaacauaacagagauaguguaucugaccaacaccaccauagagaaggaaaaaugccccaaacuagcagaauacagaaauuggucaaagccgcaauguaacauuacaggauuugcaccuuuuucuaaggacaauucgauuaggcuuuccgcugguggggacaucugggugacaagagaaccuuaugugucaugcgauccugacaaguguuaucaauuugcccuuggacagggaacaacacuaaacaacgugcauucaaaugacacaguacaugauaggaccccuuaucggacccuauugaugaaugaguuagguguuccauuucaucuggggaccaagcaagugugcauagcaugguccagcucaaguugucacgauggaaaagcauggcugcauguuuguguaacgggggaugauaaaaaugcaacugcuagcuucauuuacaaugggaggcuuguagauaguauuguuucaugguccaaagaaauccucaggacccaggagucagaaugcguuuguaucaauggaacuuguacaguaguaaugacugaugggagugcuucaggaaaagcugauacuaaaauacuauucauugaggaggggaaaaucguucauacuagcacauugucaggaagugcucagcaugucgaggagugcuccugcuauccucgauauccuggugucagaugugucugcagagacaacuggaaaggcuccaauaggcccauaguagauauaaacauaaaggauuauagcauuguuuccaguuaugugugcucaggacuuguuggagacacacccagaaaaaacgacagcuccagcaguagccauugcuuggauccuaacaaugaagaagguggucauggagugaaaggcugggccuuugaugauggaaaugacguguggaugggaagaacgaucagcgagaaguuacgcucaggauaugaaaccuucaaagucauugaaggcugguccaacccuaauuccaaauugcagauaaauaggcaagucauaguugacagagguaauagguccgguuauucugguauuuucucuguugaaggcaaaagcugcaucaaucggugcuuuuauguggaguugauaaggggaagaaaagaggaaacugaagucuuguggaccucaaacaguauuguuguguuuuguggcaccucagguacauauggaacaggcucauggccugauggggcggacaucaaucucaugccuauauaa

SEQ ID NO: 53582 - RNA, 1410 nt, Artificial Sequence
  derived and/or modified CDS sequence (wt) from neuraminidase__InfluenzaA__AEX35508
augaauccaaaucaaaagauaauaacgauuggcucuguuucucucaccauuuccacaauaugcuucuucaugcaaauugccaucuugauaacuacuguaacauugcauuucaagcaauaugaauucaacucccccccaaacaaccaagugaugcugugugaaccaacaauaauagaaagaaacauaacagagauaguguaucugaccaacaccaccauagagaaggaaauaugccccaaacuagcagaauacagaaauuggucaaagccgcaauguaacauuacaggauuugcaccuuuuucuaaggacaauucgauuaggcuuuccgcugguggggacaucugggugacaagagaaccuuaugugucaugcgauccugacaaguguuaucaauuugcccuuggacagggaacaacacuaaacaacgugcauucaaaugacacaguacaugauaggaccccuuaucggacccuauugaugaaugaguuagguguuccauuucaucuggggaccaagcaagugugcauagcaugguccagcucaaguugucacgauggaaaagcauggcugcauguuuguguaacgggggaugauaaaaaugcaacugcuagcuucauuuacaaugggaggcuuguagauaguauuguuucaugguccaaagaaauccucaggacccaggagucagaaugcguuuguaucaauggaacuuguacaguaguaaugacugaugggagugcuucaggaaaagcugauacuaaaauacuauucauugaggaggggaaaaucguucauacuagcacauugucaggaagugcucagcaugucgaggagugcuccugcuauccucgauauccuggugucagaugugucugcagagacaacuggaaaggcuccaauaggcccauaguagauauaaacauaaaggauuauagcauuguuucuaguuaugugugcucaggacuuguuggagacacacccagaaaaaacgacagcuccagcaguagccauugcuuggauccuaacaaugaagaagguggucauggagugaaaggcugggccuuugaugauggaaaugacguguggaugggaagaacgaucagcgagaaguuacgcucaggauaugaaaccuucaaagucauugaaggcugguccaacccuaauuccaaauugcagauaaauaggcaagucauaguugacagagguaauagguccgguuauucugguauuuucucuguugaaggcaaaagcugcaucaaucggugcuuuuauguggaguugauaaggggaagaaaagaggaaacugaagucuuguggaccucaaacaguauuguuguguuuuguggcaccucagguacauauggaacaggcucauggccugauggggcggacaucaaucucaugccuauauaa

SEQ ID NO: 53583 - RNA, 1410 nt, Artificial Sequence
  derived and/or modified CDS sequence (wt) from neuraminidase__InfluenzaA__AEX35519
augaauccaaaucaaaagauaauaacgauuggcucuguuucucucaccauuuccacaauaugcuucuucaugcaaauugccaucuugauaacuacuguaacauugcauuucaagcaauaugaauucaacucccccccaaacaaccaagugaugcugugugaaccaacaauaauagaaagaaacauaacagagauaguguaucugaccaacaccaccauagagaaggaaaaaugccccaaacuagcagaauacagaaauuggucaaagccgcaauguaacauuacaggauuugcaccuuuuucuaaggacaauucgauuaggcuuuccgcugguggggacaucugggugacaagagaaccuuaugugucaugcgauccugacaaguguuaucaauuugcccuuggacagggaacaacacuaaacaacgugcauucaaaugacacaguacaugauaggaccccuuaucggacccuauugaugaaugaguuagguguuccauuucaucuggggaccaagcaagugugcauagcaugguccagcucaaguugucacgauggaaaagcauggcugcauguuuguguaacgggggaugauaaaaaugcaacugcuagcuucauuuacaaugggaggcuuguagauaguauuguuucaugguccaaagaaauccucaggacccaggagucagaaugcguuuguaucaauggaacuuguacaguaguaaugacugaugggagugcuucaggaaaagcugauacuaaaauacuauucauugaggaggggaaaaucguucauacuagcacauugucaggaagugcucagcaugucgaggagugcuccugcuauccucgauauccuggugucagaugugucugcagagacaacuggaaaggcuccaauaggcccauaguagauauaaacauaaaggauuauagcauuguuuccaguuaugugugcucaggacuuguuggagacacacccagaaaaaacgacagcuccagcaguagccauugcuuggauccuaacaaugaagaagguggucauggagugaaaggcugggccuuugaugauggaaaugacguguggaugggaagaacgaucagcgagaaguuacgcucaggauaugaaaccuucaaagucauugaaggcugguccaacccuaauuccaaauugcagauaaauaggcaagucauaguugacagaggcaauagguccgguuauucugguauuuucucuguugaaggcaaaagcugcaucaaucggugcuuuuauguggaguugauaaggggaagaaaagaggaaacugaagucuuguggaccucaaacagcauuguuguguuuuguggcaccucagguacauauggaacaggcucauggccugauggggcggacaucaaucucaugccuauauaa

SEQ ID NO: 53584 - RNA, 1410 nt, Artificial Sequence
  derived and/or modified CDS sequence (wt) from neuraminidase__InfluenzaA__AEX35530
augaauccaaaucaaaagauaauaacgauuggcucuguuucucucaccauuuccacaauaugcuucuuuaugcaaauugccaucuugauaacuacuguaacauugcauuucaagcaauaugaauucaacucccccccaaacaaccaagugaugcagugugaaccaacaauaauagaaagaaacauaacagagauaguguaucugaccaacaccaccauagagaaggaaauaugccccaaacuagcagaauacagaaauuggucaaagccgcaaugugacauuacaggauuugcaccuuuuucuaaggacaauucgauuaggcuuuccgcugguggggacaucugggugacaagagaaccuuaugugucaugcgauccugacaaauguuaucaauuugcccuuggacagggaacaacacuaaacaacgugcauucaaaugacacaguacaugauaggaccccuuaucggacccuauugaugaaugaguuagguguuccauuucaucuggggacuaagcaagugugcauagcaugguccagcucaaguugucacgauggaaaagcauggcugcauguuuguguaacgggggaugauaaaaaugcaacugcuagcuucauuuacaaugggaggcuuguagauaguauuguuucaugguccaaagaaauccucagaacccaggagucagaaugcguuuguaucaauggaacuuguacaguaguaaugacugaugggagugcuucagggaaagcugauacuaaaauacuauucauugaggaggggaaaaucguucauacuagcacauugucaggaagugcccagcaugucgaggagugcuccugcuauccucgauauccuggugucagaugugucugcagagacaacuggaaaggcuccaauaggcccaucguagauauaaacacaaaggauuauagcauuguuuccaguuaugugugcucaggacuuguuggagacacacccagaaaaaacgacagcuccagcaguagccauugcuugaauccuaacaaugaagaagguggucauggagugaaaggcugggccuuugaugauggaaaugacguguggaugggaagaacgaucagcgagaaguuacgcuuaggauaugaaaccuucaaagucauugaaggcugguccaacccuaauuccaaauugcagauaaauaggcaagucauaguugacagagguaauagauccgguuauucugguauuuucucuguugaaggcaaaagcugcaucaaucggugcuuuuauguggaguugauaaggggaagaaaagaggaaacugaagucuuguggaccucaaacaguauuguuguguuuuguggcaccucagguacauauggaacaggcucauggccugauggggcggacaucaaucucaugccuauauaa

SEQ ID NO: 53585 - RNA, 1410 nt, Artificial Sequence; identical to SEQ ID NO: 46740
  derived and/or modified CDS sequence (wt) from neuraminidase__InfluenzaA__AEX35541

SEQ ID NO: 53586 - RNA, 1410 nt, Artificial Sequence
  derived and/or modified CDS sequence (wt) from neuraminidase__InfluenzaA__AEX35552
augaauccaaaucaaaagauaauaacgauuggcucugcuucucucaccauuuccacaauaugcuucuucaugcaaauugccaucuugauaacuacuguaacauugcauuuuaagcaauaugaauucaacccccccccaaacaaccaagcgaugcugugugaaccaacaauaauagaaagaaacauaacagagauaguguaucugaccaacaccaccauagagaaggaaauaugccccaaacuagcagaauacagaaauuggucaaagccgcaaugugacauuacaggauuugcaccuuuuucuaaggacaauucgauuaggcuuuccgcugguggggacaucugggugacaagagaaccuuaugugucaugcgauccugacaaguguuaucaauuugcccuuggacagggaacaacacuaaacaacgugcauucaaaugacacaguacaugauaggaccccuuaucggacccuauugaugaaugaauuagguguuccauuucaucuggggaccaagcaagugugcauagcaugguccagcucaaguugucacgauggaaaagcauggcugcauguuuguguaacgggggacgauaaaaaugcaacugcuagcuucauuuacaaugggaggcuuguagauagcauuguuucaugguccaaagaaauccucaggacccaggagucagaaugcguuuguaucaauggaacuuguacaguaguaaugaccgaugggagugcuucaggaaaagcugauacuaaaauacuauucauugaggaggggaaaaucguucauacuagcacauugucaggaagugcccagcaugucgaggagugcuccugcuauccucgauauccuggugucagaugugucugcagagacaacuggaaaggcuccaauaggcccaucguagauauaaacauaaaggauuauagcauugcuuccaguuaugugugcucaggacuuguuggagacacacccagaaaaaacgacagcuccagcaguagccauugcuuggauccuaacaaugaagaagguggucauggagugaaaggcugggccuuugaugauggaaaugacguguggaugggaagaacgaucagcgagaaguuacgcucaggauaugaaaccuucaaagucauugaaggcugguccaacccuaauuccaaauugcagauaaauaggcaagucauaguugacagagguaauagguccgguuauucugguauuuucucuguugaaggcaaaagcugcaucaaucggugcuuuuauguggaguugauaaggggaagaaaagaggaaacugaagucuuguggaccucaaacaguauuguuguguuuuguggcaccucagguacauauggaacaggcucauggccugauggggcggacaucaaucucaugccuauauaa

SEQ ID NO: 53587 - RNA, 1410 nt, Artificial Sequence
  derived and/or modified CDS sequence (wt) from neuraminidase__InfluenzaA__AEX35563
augaauccaaaucaaaagauaauaacgauuggcucuguuucucucaccauuuccacaauaugcuucuuuaugcaaauugccaucuugauaacuacuguaacauugcauuucaagcaauaugaauucaacucccccccaaacaaccaagugaugcugugugaaccaacaauaauagaaagaaacauaacagagauaguguaucugaccaacaccaccauagagaaggaaauaugccccaaacuagcagaauacagaaauuggucaaagccgcaaugugacauuacaggauuugcaccuuuuucuaaggacaauucgauuaggcuuuccgcugguggggacaucugggugacaagagaaccuuaugugucaugcgauccugacaaaugcuaucaauuugcccuuggacagggaacaacacuaaacaacgugcauucaaaugacacaguacaugauaggaccccuuaucggacccuauugaugaaugaguuagguguuccauuucaucuggggacuaagcaagugugcauagcaugguccagcucaaguugucacgauggaaaagcauggcugcauguuuguguaacaggggaugauaaaaaugcaacugcuagcuucauuuacaaugggaggcuuguagauaguauuguuucaugguccaaagaaauccucagaacccaggagucagaaugcguuuguaucaauggaacuuguacaguaguaaugacugaugggagugcuucagggaaagcugauacuaaaauacuauucauugaggaggggaaaaucguucauacuagcacauugucaggaagugcccagcaugucgaggagugcuccugcuauccucgauauccuggugucagaugugucugcagagacaacuggaaaggcuccaauaggcccaucguagauauaaacauaaaggauuauagcauuguuuccaguuaugugugcucaggacuuguuggagacacacccagaaaaaacgacagcuccagcaguagccauugcuugaauccuaacaaugaagaagguggucauggagugaaaggcugggccuuugaugauggaaaugacguguggaugggaagaacgaucagcgagaaguuacgcuuaggauaugaaaccuucaaagucauugaaggcugguccaacccuaauuccaaauugcagauaaauaggcaagucauaguugacagagguaauagauccgguuauucugguauuuucucuguugaaggcaaaagcugcaucaaucggugcuuuuauguggaguugauaaggggaagaaaagaggaaacugaagucuuguggaccucaaacaguauuguuguguuuuguggcaccucagguacauauggaacaggcucauggccugauggggcggacaucaaucucaugccuauauaa

SEQ ID NO: 53588 - RNA, 1410 nt, Artificial Sequence
  derived and/or modified CDS sequence (wt) from neuraminidase__InfluenzaA__AEX35585
augaauccaaaucaaaagauaauaacgauuggcucuguuucucucaccauuuccacaauaugcuucuucaugcaaauugccaucuugauaacuacuguaacauugcauuucaagcaauaugaauucaacucccccccaaacaaccaagugaugcugugugaaccaacaauaauagaaagaaacauaacagagauaguguaucugaccaacaccaccauagagaaggaaauaugccccaaacuagcagaauacagaaauuggucaaagccgcaauguaacauuacaggauuugcaccuuuuucuaaggacaauucgauuaggcuuuccgcugguggggacaucugggugacaagagaaccuuaugugucaugcgauccugacaaguguuaucaauuugcccuuggacagggaacaacacuaaacaacgugcauucaaaugacacaguacaugauaggaccccuuaucggacccuauugaugaaugaguuagguguuccauuucaucuggggaccaagcaagugugcauagcaugguccagcucaaguugucacgauggaaaagcauggcugcauguuugugugacgggggaugauaaaaaugcaacugcuagcuucauuuacaaugggaggcuuguagauaguauuguuucaugguccaaagaaauccucaggacccaggagucagaaugcguuuguaucgauggaacuuguacaguaguaaugacugaugggagugcuucaggaaaagcugauacuaaaauacuauucauugaggaggggaaaaucguucauacuagcacauugucaggaagugcucagcaugucgaggagugcuccugcuauccucgauauccuggugucagaugugucugcagagacaacuggaaaggcuccaauaggcccauaguagauauaaacauaaaggauuauagcauuguuuccaguuaugugugcucaggacuuguuggagacacacccagaaaaaacgacagcuccagcaguagccauugcuuggauccuaacaaugaagaagguggucauggagugaaaggcugggccuuugaugauggaaaugacguguggaugggaagaacgaucagcgagaaguuacgcucaggauaugaaaccuucaaagucauugaaggcugguccaacccuaauuccaaauugcagauaaauaggcaagucauaguugacagagguaauagguccgguuauucugguauuuucucuguugaaggcaaaagcugcaucaaucggugcuuuuauguggaguugauaaggggaagaaaagaggaaacugaagucuuguggaccucaaacaguauuguuguguuuuguggcaccucagguacauauggaacaggcucauggccugauggggcggacaucaaucucaugccuauauaa

SEQ ID NO: 53589 - RNA, 1410 nt, Artificial Sequence
  derived and/or modified CDS sequence (wt) from neuraminidase__InfluenzaA__AEX35596
augaauccaaaucaaaagauaauaacgauuggcucuguuucucucaccauuuccacaauaugcuucuucaugcaaauugccaucuugauaacuacuguaacauugcauuucaagcaauaugaauucaacucccccccaaacaaccaagugaugcugugugaaccaacaauaauagaaaggaacauaacagagauaguguaucugaccaacaccaccauagagaaggaaauaugccccaaacuagcagaauacagaaauuggucaaagccgcaauguaacauuacaggauuugcaccuuuuucuaaggacaauucgauuaggcuuuccgcugguggggacaucugggugacaagagaaccuuaugugucaugcgauccugacaaguguuaucaauuugcccuuggacagggaacaacacuaaacaacgugcauucaaaugacacaguacaugauaggaccccuuaucggacccuauugaugaaugaguuagguguuccauuucaucuggggaccaagcaagugugcauagcaugguccagcucaaguugucacgauggaaaagcauggcugcauguuuguguaacgggggaugauaaaaaugcaacugcuagcuucauuuacaaugggaggcuuguagauaguauuguuucaugguccaaagaaauccucaggacccaggagucagaaugcguuuguaucaauggaacuuguacaguaguaaugacugaugggagugcuucaggaaaagcugauacuaaaauacuauucauugaggaggggaaaaucguucauacuagcacauugucaggaagugcucagcaugucgaggagugcuccugcuauccucgauauccuggugucagaugugucugcagagacaacuggaaaggcuccaauaggcccauaguagauauaaacauaaaggauuauagcauuguuuccaguuaugugugcucaggacuuguuggagacacacccagaaaaaacgacagcuccagcaguagccauugcuuggauccuaacaaugaagaagguggucauggagugaaaggcugggccuuugaugauggaaaugacguguggaugggaagaacgaucagcgagaaguuacgcucaggauaugaaaccuucaaagucauugaaggcugguccaacccugauuccaaauugcagauaaauaggcaagucauaguugacagagguaauagguccgguuauucugguauuuucuccguugaaggcaaaagcugcaucaaucggugcuuuuauguggaguugauaaggggaagaaaagaggaaacugaagucuuguggaccucgaacaguauuguuguguuuuguggcaccucagguacauauggaacaggcucauggccugauggggcggacaucaaucucaugccuauauaa

SEQ ID NO: 53590 - RNA, 1410 nt, Artificial Sequence; identical to SEQ ID NO: 53579
  derived and/or modified CDS sequence (wt) from neuraminidase__InfluenzaA__AEX35607

SEQ ID NO: 53591 - RNA, 1410 nt, Artificial Sequence
  derived and/or modified CDS sequence (wt) from neuraminidase__InfluenzaA__AEX35618
augaauccaaaucaaaagauaauaacgauuggcucuguuucucucaccauuuccacaauaugcuucuucaugcaaauugccaucuugauaacuacuguaacauugcauuucaagcaauaugaacucaacucccccccaaacaaccaagugaugcugugugaaccaacaauaauagaaagaaacauaacagagauaguguaucugaccaacaccaccauagagaaggaaacaugccccaaacuagcagaauacagaaauuggucaaagccgcaauguuacauuacaggauuugcaccuuuuucuaaggacaauucgauuaggcuuuccgcugguggggacaucugggugacaagagaaccuuaugugucaugcgauccugacaaguguuaucaauuugcccuuggacagggaacaacacuaaacaacgugcauucaaaugacacaguacgugauaggaccccuuaucggacccuauugaugaaugaguuagguguuccuuuucaucuggggaccaagcaagugugcauagcaugguccagcucaaguugucacgauggaaaagcauggcugcauguuuguauaacgggggaugauaaaaaugcaacugcuagcuucauuuacaaugggaggcuuguagauaguauuguuucaugguccaaagaaauccucaggacccaggagucagaaugcguuuguaucaauggaacuuguacaguaguaaugacugaugggagugcuucaggaaaagcugauacuaaaauacuauucauugaggaggggaaaaucguucauacuagcacauugucaggaagugcucagcaugucgaggagugcuccugcuauccucgauauccuggugucagaugugucugcagagacaacuggaaaggcuccaauaggcccaucguagauauaaacauaaaggaucauagcauuguuuccaguuauguguguucaggacuuguuggagacacacccagaaaaaacgacagcuccagcaguagccauuguuuggauccuaacaaugaagaagguggucauggagugaaaggcugggccuuugaugauggaaaugacguguggaugggaagaacgaucagcgagaagucacgcuuaggguaugaaaccuucaaagucauugaaggcugguccaacccuaaguccaaauugcagauaaauaggcaagucauaguugacagagauaauagguccgguuauucugguauuuucucuguugaaggcaaaagcugcaucaaucggugcuuuuauguggaguugauaaggggaagaaaagaggaaacugaagucuuguggaccucaaacaguauuguuguguuuuguggcaccucagguacauauggaacaggcucauggccugauggggcggacaucaaucucaugccuauauaa

SEQ ID NO: 53592 - RNA, 1410 nt, Artificial Sequence
  derived and/or modified CDS sequence (wt) from neuraminidase__InfluenzaA__AEX35640
augaauccaaaucaaaagauaauaacgauuggcucuguuucucucaccauuuccacaauaugcuucuucaugcaaauugccaucuuaauaacuacuguaacauugcauuucaagcaauaugaauucaacucccccccaaacaaccaagugaugcugugugaaccaacaauaauagaaagaaacauaacagagauaguguaucugaccaacaccaccauagagaaggaaauaugccccaaacuagcagaauacagaaaguggucaaagccgcaauguaauauuacaggauuugcaccuuuuucuaaggacaauucgauuaggcuuuccgcugguggggacauuugggugacaagagaaccuuaugugucaugcgauccugacaaguguuaucaauuugcccuuggacagggaacaacacuaaacaacgugcauucaaaugacacaguacgugauaggaccccuuaucggacccuauugaugaaugaguuagguguuccauuucaucuggggaccaagcaagugugcauagcaugguccagcucaaguugucacgauggaaaagcauggcugcauguuuguguaacgggggauaauaaaaaugcaacugcuagcuucauuuacaaugggaggcuuguagauaguauuguuucaugguccaaagaaauccucaggacccaggagucagaaugcguuuguaucaauggaacuuguacaguaguaaugacugaugggagugcuucaggaaaagcugauacuaaaauacuauucauugaggaggggaaaaucguucauacuagcacauugucaggaagugcucagcaugucgaggagugcuccugcuauccucgauauccuggugucagaugugucugcagagacaacuggagaggcuccaauaggcccauaguagauauaaacaugaaggauuauagcauuguuuccaguuaugugugcucaggacuuguuggagacacacccagaaaaaacgacagcuccagcaguggccauugcuuggauccuaacgaugaagaagguggucauggagugaaaggcugggccuuugaugauggaaaugacguguggaugggaagaacgaucagcgagaagucacgcucaggauaugaaaccuucaaagucauugaaggcugguccaacccuaauuccaaauugcagauaaauaggcaagucauaguugacagagguaauagguccgguuauucugguauuuucucuguugaaggcaaaagcugcaucaaucggugcuuuuauguggaguugauaaggggaagaaaagaggaaacugaagucuuguggaccucaaacaguauuguuguguuuuguggcaccucagguacauauggaacaggcucauggccugauggggcggacaucaaucucaugccuauauaa

SEQ ID NO: 53593 - RNA, 1410 nt, Artificial Sequence
  derived and/or modified CDS sequence (wt) from neuraminidase__InfluenzaA__AEX35651
augaauccaaaucaaaagauaauaacgauuggcucuguuucucucaccauuuccacaauaugcuucuucaugcaaauugccaucuugauaacuacuguaacauugcauuucaagcaauaugaauucaacucccccccaaacaaccaagugaugcugugugaaccaacaauaauagaaagaaacauaacagagauaguguaucugaccaacaccaccauagagaaggaaauaugccccaaacuagcagaauacagaaauuggucaaagccgcaaugugacauuacaggauuugcaccuuuuucuaaggacaauucgauuaggcuuuccgcugguggggacaucugggugacaagagaaccuuaugugucaugcgauccugacaaguguuaucaauuugcccuuggacagggaacaacacuaaacaacgugcauucaaaugacacaguacgugauaggaccccuuaucggacccuauugaugaaugaguuagguguuccuuuucaucuggggaccaagcaagugugcauagcaugguccagcucaaguugucacgauggaaaagcauggcugcauguuuguauaacgggggaugauaaaaaugcaacugcuagcuucauuuacaaugggaggcuuguagauaguguuguuucaugguccaaagaaauccucaggacccaggagucagaaugcguuuguaucaauggaacuuguacaguaguaaugacugaugggagugcuucaggaaaagcugauacuaaaauacuauucauugaggaggggaaaaucguucauacuagcacauugucaggaagugcucagcaugucgaggagugcuccugcuauccucgauauccuggugucagaugugucugcagagacaacuggaaaggcuccaauaggcccaucguagauauaaacauaaaggaucauagcauuguuuccaguuauguguguucaggacuuguuggagacacacccagaaaaaacgacagcuccagcaguagccauuguuuggauccuaacaaugaagaagguggucauggagugaaaggcugggccuuugaugauggaaaugacguguggaugggaagaacgaucagcgagaagucacgcuuaggguaugaaaccuucaaagucauugaaggcugguccaacccuaaguccaaauugcagauaaauaggcaagucauaguugacagagguaauagguccgguuauucugguauuuucucuguugaagacaaaagcugcaucaaucggugcuuuuauguggaguugauaaggggaagaaaagaggaaacugaagucuuguggaccucaaacaguauuguuguguuuuguggcaccucagguacauauggaacaggcucauggccugauggggcggacaucaaucucaugccuauauaa

SEQ ID NO: 53594 - RNA, 1410 nt, Artificial Sequence
  derived and/or modified CDS sequence (wt) from neuraminidase__InfluenzaA__AEX36105
augaauccaaaucaaaagauaauaacgauuggcucuguuucucucaccauuuccacaauaugcuucuucaugcaaauugccaucuugauaacuacuguaacauugcauuucaagcaauaugaauucaacucccccccaaacaaccaagugaugcugugugaaccaacaauaauagaaagaaacauaacagagauaguguaucugaccaacaccaccauagagaaggaaauaugccccaaacuagcagaauacagaaauuggucaaagccgcaaugugacauuacaggauuugcaccuuuuucuaaggacaauucgauuaggcuuuccgcugguggggacaucugggugacaagagaaccuuaugugucaugcgauccugacaaguguuaucaauuugcccuuggacagggaacaacacuaaacaacgugcauucaaaugacacaguacgugauaggaccccuuaucggacccuauugaugaaugaguuagguguuccuuuucaucuggggaccaagcaagugugcauagcaugguccagcucaaguugucacgauggaaaagcauggcugcauguuuguauaacgggggaugauaaaaaugcaacugcuagcuucauuuacaaugggaggcuuguagauaguauuguuucaugguccaaagaaauccucaggacccaggagucagaaugcguuuguaucaauggaacuuguacaguaguaaugacugaugggagugcuucaggaaaagcugauacuaaaauacuauucauugaggaggggaaaaucguucauacuagcacauugucaggaagugcucagcaugucgaggagugcuccugcuauccucgauauccuggugucagaugugucugcagagacaacuggaaaggcuccaauaggcccaucguagauauaaacauaaaggaucauagcauuguuuccaguuauguguguucaggacuuguuggggacacacccagaaaaaacgacagcuccagcaguagccauuguuuggauccuaacaaugaagaagguggucauggagugaaaggcugggccuuugaugauggaaaugacguguggaugggaagaacgaucagcgagaagucacgcuuaggguaugaaaccuucaaagucauugaaggcugguccaacccuaaguccaaauugcagauaaauaggcaagucauaguugacagagguaauagguccgguuauucugguauuuucucuguugaaggcaaaagcugcaucaaucggugcuuuuauguggaguugauaaggggaagaaaagaggaaacugaagucuuauggaccucaaacaguauuguuguguuuuguggcaccucagguacauauggaacaggcucauggccugauggggcggacaucaaucucaugccuauauaa

SEQ ID NO: 53595 - RNA, 1410 nt, Artificial Sequence
  derived and/or modified CDS sequence (wt) from neuraminidase__InfluenzaA__AEX36116
augaauccaaaucaaaagauaauaacgauuggcucuguuucucucaccauuuccacaauaugcuucuucaugcaaauugccaucuugauaacuacuguaacauugcauuucaagcaauaugaauucaacucccccccaaacaaccaagugaugcugugugaaccaacaauaauagaaagaaacauaacagagauaguguauuugaccaacaccaccauagagaaggaaauaugccccaaacuagcagaauacagaaauuggucaaagccgcaaugugacauuacaggauuugcaccuuuuucuaaggacaauucgauuaggcuuuccgcugguggggacaucugggugacaagagaaccuuaugugucaugcgauccugacaaguguuaucaauuugcccuuggacagggaacaacacuaaacaacgugcauucaaaugacacaguacguaauaggaccccuuaucggacccuauugaugaaugaguuagguguuccuuuucaucuggggaccaagcaagugugcauagcaugguccagcucaaguugucacgauggaaaagcauggcugcauguuuguauaacgggggaugauaaaaaugcaacugcuagcuucauuuacaaugggaggcuuguagauaguauuguuucaugguccaaagaaauccucaggacccaggagucagaaugcguuuguaucaauggaacuuguacaguaguaaugacugaugggagugcuucaggagaagcugauacuaaaauacuauucauugaggaggggaaaaucguucauacuagcacauugucaggaagugcucagcaugucgaggagugcuccugcuauccucgauauccuggugucagaugugucugcagagacaacuggaaaggcuccaauaggcccaucguagauauaaacauaaaggaucauagcauuguuuccaguuauguguguucaggacuuguuggagacacacccagaaaaaacgacagcuccagcaguagccauuguuuggauccuaacaaugaagaagguggucauggagugaaaggcugggccuuugaugauggaaaugacguguggaugggaagaacgaucagcgagaagucacgcuuaggguaugaaaccuucaaagucauugaaggcugguccaacccuaaguccaaauugcagauaaauaggcaagucauaguugacagagguaauagguccgguuauucugguauuuucucuguugaaggcaaaagcugcaucaaucggugcuuuuauguggaguugauaaggggaagaaaagaggaaacugaagucuuguggaccucaaacaguauuguuguguuuuguggcaccucugguacauauggaacaggcucauggccugauggggcggacaucaaucucaugccuauauaa

SEQ ID NO: 53596 - RNA, 1410 nt, Artificial Sequence
  derived and/or modified CDS sequence (wt) from neuraminidase__InfluenzaA__AEX36127
augaauccaaaucaaaagauaauaacgauuggcucuguuucucucaccauuuccacaauaugcuucuucaugcaaauugccaucuugauaacuacuguaacauugcauuucaagcaauaugaauucaacucccccccaaacaaccaagugaugcugugugaaccaacaauaauagaaagaaacauaacagagauaguguaucugaccaacaccaccauagagaaggaaauaugccccaaacuagcagaauacagaaauugguuaaagccgcaaugugacauuacaggauuugcaccuuuuucuaaggacaauucgauuaggcuuuccgcugguggggacaucugggugacaagagaaccuuaugugucaugcgauccugacaaguguuaucaauuugcccuuggacagggaacaacacuaaacaacgugcauucaaaugacacaguacgugauaggaccccuuaucggacccuauugaugaaugaguuagguguuccuuuucaucuggggaccaagcaagugugcauagcaugguccagcucaaguugucacgauggaaaagcauggcugcauguuuguauaacgggggaugauaaaaaugcaacugcuagcuucauuuacaaugggaggcuuguagauaguguuguuucaugguccaaagaaauccucaggacccaggagucagaaugcguuuguaucaauggaacuuguacaguaguaaugacugaugggagugcuucaggaaaagcugauacuaaaauacuauucauugaggaggggaaaaucguucauacuagcacauugucaggaagugcucagcaugucgaggagugcuccugcuauccucgauauccuggugucagaugugucugcagagacaacuggaaaggcuccaauaggcccaucguagauauaaacauaaaggaucauagcauuguuuccaguuauguguguucaggacuuguuggagacacacccagaaaaaacgacagcuccagcaguagccauuguuuggauccuaacaaugaagaagguggucauggagugaaaggcugggccuuugaugauggagaugacguguggaugggaagaacgaucagcgagaagucacgcuuaggguaugaaaccuucaaagucauugaaggcugguccaacccuaaguccaaauugcagauaaauaggcaagucauaguugacagagguaauagguccgguuauucugguauuuucucuguugaaggcaaaagcugcaucaaucggugcuuuuauguggaauugauaaggggaagaaaagaggaaacugaagucuuguggaccucaaacaguauuguuguguuuuguggcaccucagguacauauggaacaggcucauggccugauggggcggacaucaaucucaugccuauauaa

SEQ ID NO: 53597 - RNA, 1410 nt, Artificial Sequence
  derived and/or modified CDS sequence (wt) from neuraminidase__InfluenzaA__AEX36149
augaauccaaaucaaaagauaauaacgauuggcucuguuucucucaccauuuccacaauaugcuucuucaugcaaauugccaucuugauaacuacuguaacauugcauuucaagcaauaugaauucaacucccccccaaacaaccaagugaugcugugugaaccaacaauaauagaaagaaacauaacagagauaguguaucugaccaacaccaccauagagaaggaaauaugccccaaacuagcagaauacagaaauuggucaaagccgcaaugugacauuacaggauuugcaccuuuuucuaaggacaauucgauuaggcuuuccgcugguggggacaucugggugacaagagaaccuuaugugucaugcgauccugacaaguguuaucaauuugcccuuggacagggaacaacacuaaacaacgugcauucaaaugacacaguacgugauaggaccccuuaucggacccuauugaugaaugaguuagguguuccuuuucaucuggggaccaagcaagugugcauagcaugguccagcucaaguugucacgauggaaaagcauggcugcauguuuguauaacgggggaugauaaaaaugcaacugcuagcuucauuuacaaugggaggcuuguagauaguguuguuucaugguccaaagaaauccucaggacccaggagucagaaugcguuuguauuaauggaacuuguacaguaguaaugacugaugggagugcuucaggaaaagcugauacuaaaauacuauucauugaggaggggaaaaucguucauacuagcacauugucaggaagugcucagcaugucgaggagugcuccugcuauccucgauauccuggugucagaugugucugcagagacaacuggaaaggcuccaauaggcccaucguagauauaaacauaaaggaucauagcauuguuuccaguuauguguguucaggacuuguuggagacacacccagaaaaaacgacagcuccagcaguagccauuguuuggauccuaacaaugaagaagguggucauggagugaaaggcugggccuuugaugauggaaaugacguguggaugggaagaacgaucagcgagaagucacgcuuaggguaugaaaccuucaaagucauugaaggcugguccaacccuaaguccaaauugcagauaaauaggcaagucauaguugacagagguaauagguccgguuauucugguauuuucucuguugaagacaaaagcugcaucaaucggugcuuuuauguggaguugauaaggggaagaaaagaggaaacugaagucuuguggaccacaaacaguauuguuguguuuuguggcaccucagguacauauggaacaggcucauggccugauggggcggacaucaaucucaugccuauauaa

SEQ ID NO: 53598 - RNA, 1410 nt, Artificial Sequence
  derived and/or modified CDS sequence (wt) from neuraminidase__InfluenzaA__AEX36160
augaauccaaaucaaaagauaauaacgauuggcucuguuucucucaccauuuccacaauaugcuucuucaugcaaauugccaucuugauaacuacuguaacauugcauuucaagcaauaugaauucaacucccccccaaacaaccaagugaugcugugugaaccaacaauaauagaaagaaacauaacagagauaguguaucugaccaacaccaccauagagaaggaaauaugccccaaacuagcagaauacagaaauuggucaaagccgcaaugugacauuacaggauuugcaccuuuuucuaaggacaauucgauuaggcuuuccgcugguggggacaucugggugacaagagaaccuuaugugucaugcgauccugacaaguguuaucaauuugcccuuggacagggaacaacacuaaacaaugugcauucaaaugacacaguacgugauaggaccccuuaucggacccuauugaugaaugaguuagguguuccuuuucaucuggggaccaagcaagugugcauagcaugguccagcucaaguugucacgauggaaaagcauggcugcauguuuguauaacgggggaugauaaaaaugcaacugcuaguuucauuuacaaugggaggcuuguagauaguguuguuucaugguccaaagaaauccucaggacccaggagucagaaugcguuuguaucaauggaacuuguacaguaguaaugacugaugggagugcuucaggaaaagcugauacuaaaauacuauucauugaggaggggaaaaucguucauacuagcacauugucaggaagugcucagcaugucgaggagugcuccugcuauccucgauauccuggugucagaugugucugcagagacaacuggaaaggcuccaauaggcccaucguagauauaaacauaaaggaucauagcauuguuuccaguuauguguguucaggacuuguuggagacacacccagaaaaaacgacagcuccagcaguagccauuguuuggauccuaacaaugaagaagguggucauggagugaaaggcugggccuuugaugauggaaaugacguguggaugggaagaacgaucagcgagaagucacgcuuaggguaugaaaccuucaaagucauugaaggcugguccaacccuaaguccaaauugcagauaaauaggcaagucauaguugacagagguaauagguccgguuauucugguauuuucucuguugaaggcaaaagcugcaucaaucggugcuuuuauguggaguugauaaggggaagaaaagaggaaacugaagucuuguggaccucaaacaguauuguuguguuuuguggcaccucagguacauauggaacaggcucauggccugauggggcggacaucaaucucaugccuauauaa

SEQ ID NO: 53599 - RNA, 1410 nt, Artificial Sequence
  derived and/or modified CDS sequence (wt) from neuraminidase__InfluenzaA__AEX36171
augaauccaaaucaaaagauaauaacgauuggcucuguuucucucaccauuuccacaauaugcuucuucaugcaaauugccaucuugauaacuacuguaacauugcauuucaagcaauaugaauucagcucccccccaaacaaccaagugaugcugugugaaccaacaauaauagaaagaaacauaacagagauaguguaucugaccaacaccaccauagagaaggaaauaugccccaaacuagcagaauacagaaauuggucaaagccgcaaugugacauuacaggauuugcaccuuuuucuaaggacaauucgauuaggcuuuccgcugguggggacaucuggguaacaagagaaccuuaugugucaugcgauccugacaaguguuaucaauuugcccuuggacagggaacaacacuaaacaacgugcauucaaaugacacaguacauaauaggaccccuuaucggacccuauugaugaaugagcuagguguuccauuucaucuggggaccaagcaagugugcauagcaugguccagcucaaguugucacgauggaaaagcauggcugcauguuuguguaacgggggaugacaaaaaugcaacugcuagcuucauuuacaaugggaggcuuguagauaguauuguuucaugguccaaagaaauccucaggacccaggagucagaaugcguuuguaucaauggaacuugugcaguaguaaugacugaugggagugcuucaggaaaagcugauacuaaaauauuauucauugaggaggggaaaaucguucauacuagcacauugucaggaagugcucagcaugucgaggagugcuccugcuauccucgauauccuggugucagaugugucugcagagacaauuggaaaggcuccaauaggcccaucguagauauaaacauaaaggauuauagcauuguuuccagauaugugugcucaggacuuguuggagacacacccagaaaaaacgacagcuccagcaguagccauuguuuggauccuaacaaugaagaagguggucauggagugaaaggcugggccuuugaugauggagaugacguauggaugggaagaacgaucagcgagaagucacgcucaggauaugaaaccuucaaagucauugaaggcugguccaacccuaauuccaaauugcagauaaauaggcaagucauaguugacagagguaauagguccgguuauucugguauuuucucuguugaaggcaaaagcugcaucaaucggugcuuuuauguggaguugauaaggggaagaaaagaggaaacugaaguuuuguggaccucaaacaguauuguuguguuuuguggcaccucagguacauauggaacaggcucauggccugauggggcggacaucaaucucaugccuauauaa

SEQ ID NO: 53600 - RNA, 1410 nt, Artificial Sequence
  derived and/or modified CDS sequence (wt) from neuraminidase__InfluenzaA__AEX36193
augaauccaaaucaaaagauaauaacgauuggcucuguuucucucaccauuuccacaauaugcuucuucaugcaaauugccaucuugauaacuacuguaacauugcauuucaagcaauaugaauucaacuccuccccaaacaaccaagugaugcugugugaaccaacaauaauagaaagaaacauaacagagauaguguaucugaccaacaccaccauagagaaggaaauaugccccaaacuagcagaauacagaaauuggucaaagccgcaaugugacauuacaggauuugcaccuuuuucuaaggacaauucgauuaggcuuuccgcugguggggacaucugggugacaagagaaccuuaugugucaugcgauccugacaaguguuaucaauuugcccuuggacagggaacaacacuaaacaacgugcauucaaauaacacaguacgugauaggaccccuuaucggacccuauugaugaaugaguuagguguuccuuuucaucuggggaccaagcaagucugcauagcaugguccagcucaaguugucacgauggaaaagcauggcugcauguuuguauaacgggggaugauaaaaaugcaacugcuagcuucauuuacaaugggaugcuuguagauaguauuguuucaugguccaaagaaauccucaggacccaggagucagaaugcguuuguaucaauggaacuuguacaguaguaaugacugaugggagugcuucaggaaaagcugauacuaaaauacuauucauugaggaggggaaaaucguucauacuagcacauugucaggaagugcucagcaugucgaggagugcuccugcuauccucgauauccuggugucagaugugucugcagagacaacuggaaaggcuccaauaggcccaucguagauauaaacauaaaggaucauagcauuguuuccaguuauguguguucaggacuuguuggagacacacccagaaaaaacgacagcuccagcaguagccauuguuuggauccuaacaaugaagaagguggucauggagugaaaggcugggccuuugaugauggaaaugacguguggaugggaagaacgaucagcgagaagucacgcuuaggguaugaaaccuucaaagucauugaaggcugguccaacccuaaguccaaauugcagauaaauaggcaagucauaguugacagagguaauagguccgguuauucugguauuuucucuguugaaggcaaaagcugcaucaaucggugcuuuuauguggaguugauaaggggaagaaaagaggaaacugaagucuuguggaccucaaacaguauuguuguguuuuguggcaccucagguacauauggaacaggcucauggccugauggggcggacaucaaucucaugccuauauaa

SEQ ID NO: 53601 - RNA, 1410 nt, Artificial Sequence
  derived and/or modified CDS sequence (wt) from neuraminidase__InfluenzaA__AEX36204
augaauccaaaucaaaagauaauaacgauuggcucuguuucucucaccauuuccacaauaugcuucuucaugcaaauugccaucuugauaacuacuguaacauugcauuucaagcaauaugaauucaacucccccccaaacaaccaagugaugcugugugaaccagcaauaauagaaagaaacauaacagagauaguguaucugaccaacaccaccauagagaaggaaauaugccccaaacuagcagaauacagaaauuggucaaagccgcaaugugacauuacaggauuugcaccuuuuucuaaggacaauucgauuaggcuuuccgcugguggggacaucugggugacaagagaaccuuaugugucaugcgauccugacaaguguuaucaauuugcccuuggacagggaacaacacuaaacaacgugcauucaaaugacacaguacaugagaggaccccuuaucggacccuauugaugaaugagcuagguguuccauuucaucuggggaccaagcaagugugcauagcaugguccagcucaaguugucacgauggaaaagcauggcugcauguuuguguaacgggggaugacaaaaaugcaacugcuagcuucauuuacaaugggaggcuuguagauaguauuguuucaugguccaaagaaauccucaggacccaggagucagaaugcguuuguaucaauggaacuuguacaguaguaaugacugaugggagugcuucaggaaaagcugauacuaaaauacuauucauugaggaggggaaaaucguucauacuagcacauugucaggaagugcucagcaugucgaggagugcuccugcuauccucgauauccuggugucagaugugucugcagagacaauuggaaaggcuccaauaggcccaucguagauauaaacauaaaggauuauagcauuguuuccagauaugugugcucaggacuuguuggagacacacccagaaaaaacgacagcuccagcaguagccauugcuuggauccuaacaaugaagaagguggucauggagugaaaggcugggccuuugaugauggaaaugacguguggaugggaagaacgaucagcgagaagucacgcucaggauaugaaaccuucaaagucauugaaggcugguccaacccuaauuccaaauugcagauaaauaggcaagucauaguugacagagguaauagguccgguuauucugguauuuucucuguugaaggcaaaagcugcaucaaucggugcuuuuauguggaguugauaaggggaagaaaagaggaaaccgaaguuuuguggaccucaaacaguauuguuguguuuuguggcaccucagguacauauggaacaggcucauggccugauggggcggacaucaaucucaugccuauauaa

SEQ ID NO: 53602 - RNA, 1410 nt, Artificial Sequence
  derived and/or modified CDS sequence (wt) from neuraminidase__InfluenzaA__AEX36215
augaauccaaaucaaaagauaauaacgauuggcucuguuucucucaccauuuccacaauaugcuucuucaugcaaauugccaucuugauaacuacuguaacauugcauuucaagcaauaugaauucagcucccccccaaacaaccaagugaugcugugugaaccagcaauaauagaaaaaaacauaacagagauaguguaucugaccaacaccaccauagagaaggaaauaugccccaaacuagcagaauacagaaauuggucaaagccgcaaugugacauuacaggauuugcaccuuuuucuaaggacaauucgauuaggcuuuccgcugguggggacaucugggugacaagagaaccuuaugugucaugcgauccugacaaguguuaucaauuugcccuuggacagggaacaacacuaaacaacgugcauucaaaugacacaguacaugagaggaccccuuaucggacccuauugaugaaugagcuagguguuccauuucaucuggggaccaagcaagugugcauagcaugguccagcucaaguugucacgauggaaaagcauggcugcauguuuguguaacgggggaugacaaaaaugcaacugcuagcuucauuuacaaugggaggcuuguagauaguauuguuucaugguccaaagaaauccucaggacccaggagucagaaugcguuuguaucaauggaacuuguacaguaguaaugacugaugggagugcuucaggaaaagcugauacuaaaauacuauucauugaggaggggaaaaucguucauacuagcacauugucaggaagugcucagcaugucgaggagugcuccugcuauccucgauauccuggugucagaugugucugcagagacaauuggaaaggcuccaauaggcccaucguagauauaaacauaaaggauuauagcauuguuuccagauaugugugcucaggacuuguuggagacacacccagaaaaaacgacagcuccagcaguagccauugcuuggauccuaacaaugaagaagguggucauggagugaaaggcugggccuuugaugauggaaaugacguguggaugggaagaacgaucagcgagaagucacgcucaggauaugaaaccuucaaagucauugaaggcugguccaacccuaauuccaaauugcagauaaauaggcaagucauaguugacagagguaauagguccgguuauucugguauuuucucuguugaaggcaaaagcugcaucaaucggugcuuuuauguggaguugauaaggggaagaaaagaggaaaccgaaguuuuguggaccucaaacaguauuguuguguuuuguggcaccucagguacauauggaacaggcucauggccugauggggcggacaucaaucucaugccuauauaa

SEQ ID NO: 53603 - RNA, 1410 nt, Artificial Sequence
  derived and/or modified CDS sequence (wt) from neuraminidase__InfluenzaA__AEX36226
augaauccaaaucaaaagauaauaacgauuggcucuguuucccucaccauuuccacaauaugcuucuucaugcaaauugccaucuugauaacuacuguaacauugcauuucaagcaauaugaauucagcucccccccaaacaaccaagugaugcugugugaaccagcaauaauagaaagaaacauaacagagauaguguaucugaccaacaccaccauagagaaggaaauaugccccaaacuagcagaauacagaaauuggucaaagccgcaaugugacauuacaggauuugcaccuuuuucuaaggacaauucgauuaggcuuuccgcugguggggacaucugggugacaagagaaccuuaugugucaugcgauccugacaaguguuaucaauuugcccuuggacagggaacaacacuaaacaacgugcauucaaaugacacaguacauaauaggaccccuuaucggacccuauugaugaaugagcuagguguuccauuucaucuggggaccaagcaagugugcauagcaugguccagcucaaguugucacgauggaaaagcauggcugcauguuuguguaacgggggaugacaaaaaugcaacugcuagcuucauuuacaaugggaggcuuguagauaguauuguuucaugguccaaagaaauccucaggacccaggagucagaaugcguuuguaucaauggaacuuguacaguaguaaugacugaugggagugcuucaggaaaagcugauacuaaaauacuauucauugaggaggggaaaaucguucauacuagcacauugucaggaagugcucagcaugucgaggagugcuccugcuauccucgauauccuggugucagaugugucugcagagacaauuggaaaggcuccaauaggcccaucguggauauaaacauaaaggauuauagcauuguuuccagauaugugugcucaggaauuguuggagacacacccagaaaaaacgacagcuccagcaguagccauugcuuggauccuaacaaugaagaagguggucauggagugaaaggcugggccuuugaugauggaaaugacguguggaugggaagaacgaucagcgagaagucacgcucaggauaugaaaccuucaaagucauugaaggcugguccaacccuaauuccaaauugcagauaaauaggcaagucauaguugacagagguaauagguccgguuauucugguauuuucucuguugaaggcaaaagcugcaucaaucggugcuuuuauguggaguugauaaggggaagaaaagaggaaaccgaaguuuuguggaccucaaacaguauuguuguguuuuguggcaccucagguacauauggaacaggcucauggccugauggggcggacaucaaucucaugccuauauaa

SEQ ID NO: 53604 - RNA, 1410 nt, Artificial Sequence
  derived and/or modified CDS sequence (wt) from neuraminidase__InfluenzaA__AEX36237
augaauccaaaucaaaagauaauaacgauuggcucuguuucucucaccauuuccacaauaugcuucuucaugcaaauugccaucuuaauaacuacuguaacauugcauuucaagcaauaugaauucaacucccccccaaacaaccaagugaugcugugugaaccaacaauaauagaaagaaacauaacagagauaguguaucugaccaacaccaccauagagaaggaaauaugccccaaacuagcagaauacagaaaguggucaaagccgcaauguaauauuacaggauuugcaccuuuuucuaaggacaauucgauuaggcuuuccgcugguggggacauuugggugacaagagaaccuuaugugucaugcgauccugacaaguguuaucaauuugcccuuggacagggaacaacacuaaacaacgugcauucaaaugacacaguacgugaaaggaccccuuaucggacccuauugaugaaugaguuagguguuccauuucaucuggggaccaagcaagugugcauagcaugguccagcucaaguugucacgauggaaaagcauggcugcauguuuguguaacgggggaugauaaaaaugcaacugcuagcuucauuuacaaugggaggcuuguagauaguauuguuucaugguccaaagaaauccucaggacccaggagucagaaugcguuuguaucaauggaacuuguacaguaguaaugacugaugggagugcuucaggaaaagcugauacuaaaauacuauucauugaggaggggaaaaucguucauacuagcacauugucaggaagugcucagcaugucgaggagugcuccugcuauccucgauauccuggugucagaugugucugcagagacaacuggagaggcuccaauaggcccauaguagauauaaacaugaaggauuauagcauuguuuccaguuaugugugcucaggacuuguuggagacacacccagaaaaaacgacagcuccagcaguggccauugcuuggauccuaacgaugaagaagguggucauggagugaaaggcugggccuuugaugauggaaaugacguguggaugggaagaacgaucagcgagaagucacgcucaggauaugaaaccuucaaagucauugaaggcugguccaacccuaauuccaaauugcagauaaauaggcaagucauaguugacagagguaauagguccgguuauucugguauuuucucuguugaaggcaaaagcugcaucaaucggugcuuuuauguggaguugauaaggggaagaaaagaggaaacugaagucuuguggaccucaaacaguauuguuguguuuuguggcaccucagguacauauggaacaggcucauggccugauggggcggacaucaaucucaugccuauauaa

SEQ ID NO: 53605 - RNA, 1410 nt, Artificial Sequence
  derived and/or modified CDS sequence (wt) from neuraminidase__InfluenzaA__AEX36248
augaauccaaaucaaaagauaauaacgauuggcucuguuucccucaccauuuccacaauaugcuucuucaugcaaauugccaucuugauaacuacuguaacauugcauuucaagcaauaugaauucagcucccccccaaacaaccaagugaugcugugugaaccagcaauaauagaaagaaacauaacagagauaguguaucugaccaacaccaccauagagaaggaaauaugccccaaacuagcagaauacagaaauuggucaaagccgcaaugugacauuacaggauuugcaccuuuuucuaaggacaauucgauuaggcuuuccgcugguggggacaucugggugacaagagaaccuuaugugucaugcgauccugacaaguguuaucaauuugcccuuggacagggaacaacacuaaacaacgugcauucaaaugacacaguacauaauagaaccccuuaucggacccuauugaugaaugagcuagguguuccauuucaucuggggaccaagcaagugugcauagcaugguccagcucaaguugucacgauggaaaagcauggcugcauguuuguguaacgggggaugacaaaaaugcaacugcuagcuucauuuacaaugggaggcuuguagauaguauuguuucaugguccaaagaaauccucaggacccaggagucagaaugcguuuguaucaauggaacuuguacaguaguaaugacugaugggagugcuucaggaagagcugauacuaaaauacuauucauugaggaggggaaaaucguucauacuagcacauugucaggaagugcucagcaugucgaggagugcuccugcuauccucgauauccuggugucagaugugucugcagagacaauuggaaaggcuccaauaggcccaucguagauauaaacauaaaggauuauagcauuguuuccagauaugugugcucaggacuuguuggagacacacccagaaaaaacgacagcuccagcaguagccauugcuuggauccuaacaaugaagaagguggucauggagugaaaggcugggccuuugaugauggaaaugacguguggaugggaagaacgaucagcgagaagucacgcucaggauaugaaaccuucaaagucauugaaggcugguccaacccuaauuccaaauugcagauaaauaggcaagucauaguugacagagguaauagguccgguuauucugguauuuucucuguugaaggcaaaagcugcaucaaucggugcuuuuauguggaguugauaaggggaagaaaagaggaaaccgaaguuuuguggaccucaaacaguauugucguguuuuguggcaccucagguacauauggaacaggcucauggccugauggggcggacaucaaucucaugccuauauaa

SEQ ID NO: 53606 - RNA, 1410 nt, Artificial Sequence; identical to SEQ ID NO: 48526
  derived and/or modified CDS sequence (wt) from neuraminidase__InfluenzaA__AEX36259

SEQ ID NO: 53607 - RNA, 1410 nt, Artificial Sequence
  derived and/or modified CDS sequence (wt) from neuraminidase__InfluenzaA__AEX36270
augaauccaaaucaaaagauaauaacgauuggcucuguuucucucaccauuuccacaauaugcuucuucaugcaaauugccaucuugauaacuacuguaacauugcauuucaagcaauaugaauucagcucccccccaaacaaccaagugaugcugugugaaccagcaauaauagaaagaaacauaacagagauaguguaucugaccaacaccaccauagagaaggaaauaugccccaaacuagcagaauacagaaauuggucaaagccgcaaugugacauuacaggauuugcaccuuuuucuaaggacaauucgauuaggcuuuccgcugguggggacaucugggugacaagagaaccuuaugugucaugcgauccugacaaguguuaucaauuugcccuuggacagggaacaacacuaaacaacgugcauucaaaugacacaguacaugguaggaccccuuaucggacccuauugaugaaugagcuagguguuccauuucaucuggggaccaagcaagugugcauagcaugguccagcucaaguugucacgauggaaaagcauggcugcauguuuguguaacgggagaugacaaaaaugcaacugcuagcuucauuuacaaugggaggcuuguagauaguauuguuucaugguccaaagaaauccucaggacccaggagucagaaugcguuuguaucaauggaacuuguacaguaguaaugacugaugggagugcuucagggaaagcugauacuaaaauacuauucauugaggaggggaaaaucguucauacuagcacauugucaggaagugcucagcaugucgaggagugcuccugcuauccucgauauccuggugucagaugugucugcagagacaauuggaaaggcuccaauaggcccaucguagauauaaacauaaaggauuauagcauuguuuccagauaugugugcucaggacuuguuggagacacacccagaaaaaacgacagcuccagcaguagccauugcuuggauccuaacaaugaagaagguggucauggagugaaaggcugggccuuugaugauggaaaugacguguggaugggaagaacgaucagcgagaagucacgcucaggauaugaaaccuucaaagucauugaaggcugguccaacccuaauuccaaauugcagauaaauaggcaagucauaguugacagagguaauagguccgguuauucugguauuuucucuguugaaggcaaaagcugcaucaaucggugcuuuuauguggaguuaauaaggggaagagaagaggaaaccaaaguuuuguggaccucaaacaguauuguuguguuuuguggcaccucagguacauauggaacaggcucauggccugauggggcggacaucaaucucaugccuauauaa

SEQ ID NO: 53608 - RNA, 1410 nt, Artificial Sequence
  derived and/or modified CDS sequence (wt) from neuraminidase__InfluenzaA__AEX36281
augaauccaaaucaaaagauaauaacgauuggcucuguuucucucaccauuuccacaauaugcuucuucaugcaaauugcuaucuugauaacuacuguaacauugcauuucaagcaauaugaauucagcucccccccaaacaaccaagugaugcugugugaaccagcaauaauagaaagaaacauaacagagauaguguaucugaccaacaccaccauagagaaggaaauaugccccaaacuagcagaauacagaaauuggucaaagccgcaaugugacauuacaggauuugcaccuuuuucuaaggacaauucgauuaggcuuuccgcugguggggacaucugggugacaagagaaccuuaugugucaugcgauccugacaaguguuaucaauuugcccuuggacagggaacaacacuaaacaacgugcauucaaaugacacaguacaugguaggaccccuuaucggacccuauugaugaaugagcuagguguuccauuucaucuggggaccaagcaagugugcauagcaugguccagcucaaguugucacgauggaaaagcauggcugcauguuuguguaacgggggaugacaaaaaugcaacugcuagcuucauuuacaaugggaggcuuguagauaguauuguuucaugguccaaagaaauccucaggacccaggagucagaaugcguuuguaucaauggaacuuguacaguaguaaugacugaugggagugcuucaggaaaagcugauacuaaaauacuauucauugaggaggggaaaaucguucauacuagcacauugucaggaagugcucagcaugucgaggagugcuccugcuauccucgauauccuggugucagaugugucugcagagacaauuggaaaggcuccaauaggcccaucguagauauaaacauaaaggauuauagcauuguuuccagauaugugugcucaggacuuguuggagacacacccagaaaaaacgacagcuccagcaguagccauugcuuggauccuaacaaugaagaagguggucauggagugaaaggcugggccuuugaugauggaaaugacguguggaugggaagaacgaucagcgagaagucacgcucaggauaugaaaccuucaaagucauugaaggcugguccaacccuaauuccaaauugcagauaaauaggcaagucauaguugacagagguaauagguccgguuauucugguauuuucucuguugaaggcaaaagcugcaucaaucggugcuuuuauguggaguugauaaggggaagaaaagaggaaaccgaaguuuuguggaccucaaacaguauuguuguguuuuguggcaccucagguacauauggaacaggcucauggccugauggggcggacaucaaucucaugccuauauaa

SEQ ID NO: 53609 - RNA, 1410 nt, Artificial Sequence; identical to SEQ ID NO: 53608
  derived and/or modified CDS sequence (wt) from neuraminidase__InfluenzaA__AEX36292

SEQ ID NO: 53610 - RNA, 1410 nt, Artificial Sequence
  derived and/or modified CDS sequence (wt) from neuraminidase__InfluenzaA__AEX36303
augaauccaaaucaaaagauaauaacgauuggcucuguuucucucaccauuuccacaauaugcuucuucaugcaaauugccaucuugauaacuacuguaacauugcauuucaagcaauaugaauucagcucccccccaaacaaccaagugaugcugugugaaccagcaauaauagaaagaaacauaacagagauaguguaucugaccaacaccaccauagagaaggaaauaugccccaaacuagcagaauacagaaauuggucaaagccgcaaugugacauuacaggauuugcaccuuuuucuaaggacaauucgauuaggcuuuccgcugguggggacaucugggugacaagagaaccuuaugugucaugcgauccugacaaguguuaucaauuugcccuuggacagggaacaacacuaaacaacgugcauucaaaugacacaguacaugagaggaccccuuaucggacccuauugaugaaugagcuagguguuccauuucaucuggggaccaagcaagugugcauagcaugguccagcucaaguugucacgauggaaaagcauggcugcauguuuguguaacgggggaugacaaaaaugcaacugcuagcuucauuuacaaugggaggcuuguagauaguauuguuucaugguccaaagaaauccucaggacccaggagucagaaugcguuuguaucaauggaacuuguacaguaguaaugacugaugggagugcuucaggaaaagcugauacuaaaauacuauucauugaggaggggaaaauaguucauacuagcacauugucaggaagugcucagcaugucgaggagugcuccugcuauccucgauauccuggugucagaugugucugcagagacaauuggaaaggcuccaauaggcccaucguagauauaaacauaaaggauuauagcauuguuuccagauaugugugcucaggacuuguuggagacacacccagaaaaaacgacagcuccagcaguagccauugcuuggauccuaacaaugaagaagguggucauggagugaaaggcugggccuuugaugauggaaaugacguguggaugggaagaacgaucagcgagaagucacgcucaggauaugaaaccuucaaagucauugaaggcugguccaacccuaauuccaaauugcagauaaauaggcaagucauaguugacagagguaauagguccgguuauucugguauuuucucuguugaaggcaaaagcugcaucaaucggugcuuuuauguggaguugauaaggggaagaaaagaggaaaccgaaguuuuguggaccucaaacaguauuguuguguuuuguggcaccucagguacauauggaacaggcucauggccugauggggcggacaucaaucucaugccuauauaa

SEQ ID NO: 53611 - RNA, 1410 nt, Artificial Sequence
  derived and/or modified CDS sequence (wt) from neuraminidase__InfluenzaA__AEX36314
augaauccaaaucaaaagauaauaacgauuggcucuguuucucucaccauuuccacaauaugcuucuucaugcaaauugccaucuugauaacuacuguaacauugcauuucaagcaauaugaauucagcucccccccaaacaaccaagugaugcugugugaaccaacaauaauagaaagaaacauaacagagauaguguaucugaccaacaccaccauagagaaggaaauaugccccaaacuagcagaauacagaaauuggucaaagccgcaaugugacauuacaggauuugcaccuuuuucuaaggacaauucgauuaggcuuuccgcugguggggacaucugggugacaagagaaccuuaugugucaugcgauccugacaaguguuaucaauuugcccuuggacagggaacaacacuaaacaacgugcauucaaaugacacaguacauaauaggaccccuuaucggacccuauugaugaaugagcuagguguuccauuucaucuggggaccaagcaagugugcauagcaugguccagcucaaguugucacgauggaaaagcauggcugcauguuuguguaacgggggaugacaaaaaugcaacugcuagcuucauuuacaaugggaggcuuguagauaguauuguuucaugguccaaagaaauccucaggacccaggagucagaaugcguuuguaucaauggaacuugugcaguaguaaugacugaugggagugcuucaggaaaagcugauacuaaaauacuauucauugaggaggggaaaaucguucauacuagcacauugucaggaagugcucagcaugucgaggagugcuccugcuauccucgauauccuggugucagaugugucugcagagacaauuggaaaggcuccaauaggcccauaguagauauaaacauaaaggauuauagcauuguuuccagauaugugugcucaggacuuguuggagacacacccagaaaaaacgacagcuccagcaguagccauugcuuggauccuaacaaugaagaaggugaucauggagugaaaggcugggccuuugaugauggaaaugacguguggaugggaagaacgaucagcgagaagucacgcucaggauaugaaaccuucaaagucauugaaggcugguccaacccuaauuccaaauugcagauaaauaggcaagucauaguugacagagguaauagguccgguuauucugguauuuucucuguugaaggcaaaagcugcaucaaucggugcuuuuauguggaguugauaaggggaagaaaagaggaaacugaaguuuuguggaccucaaacaguauuguuguguuuuguggcaccucagguacauauggaacaggcucauggccugauggggcggaaaucaaucucaugccuauauaa

SEQ ID NO: 53612 - RNA, 1410 nt, Artificial Sequence
  derived and/or modified CDS sequence (wt) from neuraminidase__InfluenzaA__AEX36336
augaauccaaaucaaaagauaauaacgauuggcucuguuucucucaccauuuccacaauaugcuucuucaugcaaauugccaucuugauaacuacuguaacauugcauuucaagcaauaugaauucagcucccccccaaacaaccaagugaugcugugugaaccagcaauaauagaaagaaacauaacagagauaguguaucugaccaacaccaccauagagaaggaaauaugccccaaacuagcagaauacagaaauuggucaaagccgcaaugugacauuacaggauuugcaccuuuuucuaaggacaauucgauuaggcuuuccgcugguggggacaucugggugacaagagaaccuuaugugucaugcgauccugacaaguguuaucaauuugcccuuggacagggaacaacacuaaacaacgugcauucaaaugacacaguacaugguaggaccccuuaucggacccuauugaugaaugaacuagguguuccauuucaucuggggaccaagcaagugugcauagcaugguccagcucaaguugucacgauggaaaagcauggcugcauguuuguguaacgggggaugacaaaaaugcaacugcuagcuucauuuacaaugggaggcuuguagauaguauuguuucaugguccaaagaaauccucaggacccaggagucagaaugcguuuguaucaauggaacuuguacaguaguaaugacugaugggagugcuucaggaaaagcugauacuaaaauacuauucauugaggaggggaaaaucguucauacuagcacauugucaggaagugcucagcaugucgaggagugcuccugcuauccucgauauccuggugucagaugugucugcagagacaauuggaaaggcuccaauaggcccaucguagauauaaacauaaaggauuauagcauuguuuccagauaugugugcucaggacuuguuggagacacacccagaaaaaacgacagcuccagcaguagccauugcuuggauccuaacaaugaagaagguggucauggagugaaaggcugggccuuugaugauggaaaugacguguggaugggaagaacgaucagcgagaagucacgcucaggauaugaaaccuucaaagucauugaaggcugguccaacccuaauuccaaauugcagauaaauaggcaagucauaguugacagagguaauagguccgguuauucugguauuuucucuguugaaggcaaaagcugcaucaaucggugcuuuuauguggaguugauaaggggaagaaaagaggaaaccgaaguuuuguggaccucaaacaguauuguuguguuuuguggcaccucagguacauauggaacaggcucauggccugauggggcggacaucaaucucaugccuauauaa

SEQ ID NO: 53613 - RNA, 1410 nt, Artificial Sequence
  derived and/or modified CDS sequence (wt) from neuraminidase__InfluenzaA__AEX36347
augaauccaaaucaaaagauaauaacgauuggcucuguuucucucaccauuuccacaauaugcuucuucaugcaaauugccaucuugauaacuacuguaacauugcauuucaagcaauaugaauucagcucccccccaaacaaccaagugaugcugugugaaccaauaauaauagaaagaaacauaacagagauaguguaucugaccaacaccaccauagagaaggaaauaugccccaaacuagcagaauacagaaauuggucaaagccgcaaugugacauuacaggauuugcaccuuuuucuaaggacaauucaauuaggcuuuccgcugguggggacaucugggugacaagagaaccuuaugugucaugcgauccugacaaguguuaucaauuugcccuuggacagggaacaacacuaaacaacgugcauucaaaugacacaguacauaauaggaccccuuaucggacccuauugaugaaugagcuagguguuccauuucaucuggggaccaagcaagugugcauagcaugguccagcucaaguugucacgauggaaaagcauggcugcauguuuguguaacgggggaugacaaaaaugcaacugcuagcuucauuuacaaugggaggcuuguagauaguauuguuucaugguccaaagaaauccucaggacccaggagucagaaugcguuuguaucaauggaacuugugcaguaguaaugacugaugggagugcuucaggaaaagcugauacuaaaauacuauucauugaggaggggaaaaucguucaugcuagcacauugucaggaagugcucagcaugucgaggagugcuccugcuauccucgauauccuggugucagaugugucugcagagacaauuggaaaggcuccaauaggcccauuguagauauaaacauaaaggauuauagcauuguuucuagauaugugugcucaggacuuguuggagacacacccagaaaaaacgacagcuccagcaguagccauugcuuggauccuaacaaugaggaagguggucauggagugaaaggcugggccuuugaugauggaaaugacguguggaugggaagaacgaucagcgaaaagucacgcucaggauaugaaaccuucaaagucauugaaggcugguccaacccuaauuccaaauugcagauaaauaggcaagucauaguugacagagguaauagguccgguuauucugguauuuucucuguugaaggcaaaagcugcaucaaucggugcuuuuauguggaguugauaaggggaagaaaagaggaaacugaaguuuuguggaccucaaacaguauuguuguguuuuguggcaccucagguacauauggaacaggcucauggccugauggggcggacaucaaucucaugccuauauaa

SEQ ID NO: 53614 - RNA, 1410 nt, Artificial Sequence
  derived and/or modified CDS sequence (wt) from neuraminidase__InfluenzaA__AEX36358
augaauccaaaucaaaagauaauaacgauuggcucuguuucucucaccauuuccacaauaugcuucuucaugcaaauugccaucuugauaacuacuguaacauugcauuucaagcaauaugaauucaacucccccccaaacaaccaagugaugcugugugaaccaacaauaauagaaagaaacauaacagagauaguguaucugaccaacaccaccauagagaaggaaauaugccccaaacuagcagaauacagaaauuggucaaagccgcaaugugacauuacaggauuugcaccuuuuucuaaggacaauucgauuaggcuuuccgcugguggggacaucugggugacaagagaaccuuaugugucaugcgauccugacaaguguuaucaauuugcccuuggacagggaacaacacuaaacaacgugcauucaaaugacacaguacgugauaggaccccuuaucggacccuauugaugaaugaguuagguguuccuuuucaucuggggaccaagcaagugugcauagcaugguccagcucaaguugucacgauggaaaagcauggcugcauguuuguauaacgggggaugauaaaaaugcaacugcuagcuucauuuacaaugggaggcuuguagauaguauuguuucaugguccaaagaaauccucaggacccaggagucagaaugcguuuguaucaauggaacuuguacaguaguaaugacugaugggagugcuucaggaaaagcugauacuaagauacuauucauugaggaggggaaaaucguucauacuagcacauugucaggaagugcucagcaugucgaggagugcuccugcuauccucgauauccuggugucagaugugucugcagagacaacuggaaaggcuccaauaggcccaucguagauauaaacauaaaggaucauagcauuguuuccaguuauguguguucaggacuuguuggagacacacccagaaaaaacgacagcuccagcaguagccauuguuuggauccuaacaaugaagaagguggucauggagugaaaggcugggccuuugaugauggaaaugacguguggaugggaagaacgaucagcgagaagucacgcuuaggguaugaaaccuucaaagucauugaaggcugguccaacccuaaguccaaauugcagauaaauaggcaagucauaguugacagagguaauagguccgguuauucugguauuuucucuguugaaggcaaaagcugcaucaaucggugcuuuuauguggaguugauaaggggaagaaaagaggaaacugaagucuuauggaccucaaacaguauuguuguguuuuguggcaccucagguacauauggaacaggcucauggccugauggggcggacaucaaucucaugccuauauaa

SEQ ID NO: 53615 - RNA, 1410 nt, Artificial Sequence
  derived and/or modified CDS sequence (wt) from neuraminidase__InfluenzaA__AEX36369
augaauccaaaucaaaagauaauaacgauuggcucuguuucucucaccauuuccacaauaugcuucuucaugcaaauugccaucuugauaacuacuguaacauugcauuucaagcaauaugaauucaacucccccccaaacaaccaagugaugcugugugaaccaacaauaauagaaagaaacauaacagagauaguguaucugaccaacaccaccauagagaaggaaauaugccccaaacuagcagaauacagaaauuggucaaagccgcaaugugacauuacaggauuugcaccuuuuucuaaggacaauucgauuaggcuuuccgcugguggggacaucugggugacaagagaaccuuaugugucaugcgauccugacaaguguuaucaauuugcccuuggacagggaacaacacuaaacaacgugcauucaaaugacacaguacguaauaggaccccuuaucggacccuauugaugaaugaguuagguguuccuuuucaucuggggaccaagcaagugugcauagcaugguccagcucaaguugucacgauggaaaagcauggcugcauguuuguauaacgggggaugauaaaaaugcaacugcuagcuucauuuacaaugggaggcuuguagauaguauuguuucaugguccaaagaaauccucaggacccaggagucagaaugcguuuguaucaauggaacuuguacaguaguaaugacugaugggagugcuucaggaaaagcugauacuaaaauacuauucauugaggaggggaaaaucguucauacuagcacauugucaggaagugcucagcaugucgaggagugcuccugcuauccucgauauccuggugucagaugugucugcagagacaacuggaaaggcuccaauaggcccaucguagauauaaacauaaaggaucauagcauuguuuccaguuauguguguucaggacuuguuggagacacacccagaaaaaacgacagcuccagcaguagccauuguuuggauccuaacaaugaagaagguggucauggagugaaaggcugggccuuugaugauggaaaugacguguggaugggaagaacgaucagcgagaagucacgcuuaggguaugaaaccuucaaagucauugaaggcugguccaacccuaaguccaaauugcagauaaauaggcaagucauaguugacagagguaauaggaccgguuauucugguauuuucucuguugaaggcaaaagcugcaucaaucggugcuuuuauguggaguugauaaggggaagaaaagaggaaacugaagucuuguggaccucaaacaguauuguuguguuuuguggcaccucagguacauauggaacaggcucauggccugauggggcggacaucaaucucaugccuauauaa

SEQ ID NO: 53616 - RNA, 1410 nt, Artificial Sequence
  derived and/or modified CDS sequence (wt) from neuraminidase__InfluenzaA__AEX36391
augaauccaaaucaaaagauaauaacgauuggcucuguuucucucaccauuuccacaauaugcuucuucaugcaaauugccaucuugauaaccacuguaacauugcauuucaagcaauaugaauucaacucccccccaaacaaccaagugaugcugugugaaccaacaauaauagaaagaaacauaacagagauaguguaucugaccaacaccaccauagagaaggagauaugccccaaacuagcagaauacagaaauuggucaaagccgcaaugugacauugcaggauuugcaccuuuuucuaaggacaauucgauuaggcuuuccgcugguggggacaucugggugacaagagaaccuuaugugucaugcgauccugacaaguguuaucaauuugcccuuggacagggaacaacacuaaacaacgugcauucaaaugacacaguacguaauaggaccccuuaucggacccuauugaugaaugaguuagguguuccuuuucaucuggggaccaagcaagugugcauagcaugguccagcucaaguugucacgauggaaaagcauggcugcauguuuguauaacgggggaugauaaaaaugcaacugcuagcuucauuuacaaugggaggcuuguagauaguauuguuucaugguccaaagaaauccucaggacccaggagucagaaugcguuuguaucaauggaacuuguacaguaguaaugacugaugggagugcuucaggaaaagcugauacuaaaauacuauucauugaggaggggaaaaucguucauacuagcacauugucaggaagugcucagcaugucgaggagugcuccugcuauccucgauauccuggugucagaugugucugcagagacaacuggaaaggcuccaauaggcccaucguagauauaaacauaaaggaucauagcauuguuuccaguuauguguguucaggacuuguuggagacacacccagaaaaaacgacagcuccagcaguagccauuguuuggauccuaacaaugaagaagguggucauggagugaaaggcugggccuuugaugauggaaaugacguguggaugggaagaacgaucagcgagaagucacgcuuaggguaugaaaccuucaaagucauugaaggcugguccaacccuaaguccaaauugcagauaaauaggcaagucauaguugacagaggugauagguccgguuauucugguauuuucucuguugaaggcaaaagcugcaucaaucggugcuuuuauguggaguugauaaggggaagaaaagaggaaacugaagucuuguggaccucaaacaguauuguuguguuuuguggcaccucagguacauauggaacaggcucauggccugauggggcggacaucaaucucaugccuauauaa

SEQ ID NO: 53617 - RNA, 1410 nt, Artificial Sequence
  derived and/or modified CDS sequence (wt) from neuraminidase__InfluenzaA__AEX36402
augaauccaaaucaaaagauaauaacgauuggcucuguuucucucaccauuuccacaauaugcuucuucaugcaaauugccaucuugauaacuacuguaacauugcauuucaagcaauaugaauucaacucccccccaaacaaccaagugaugcugugugaaccaacaauaauagaaagaaacauaacagagauaguguaucugaccaacaccaccauagagaaggaaauaugccccaaacuagcagaauacagaaauuggucaaagccgcaaugugacauuacaggauuugcaccuuuuucuaaggacaauucgauuaggcuuuccgcugguggggacaucugggugacaagagaaccuuaugugucaugcgauccugacaaguguuaucaauuugcccuuggacagggaacaacacuaaacaacgugcauucaaaugacacaguacgugguaggaccccuuaucggacccuauugaugaaugaguuagguguuccuuuucaucuggggaccaagcaagugugcauagcaugguccagcucaaguugucacgauggaaaagcauggcugcauguuuguauaacgggggaugauaaaaaugcaacugcuagcuucauuuacaaugggaggcuuguagauaguauuguuucaugguccaaagaaauccucaggacccaggagucagaaugcguuuguaucaauggaacuuguacaguaguaaugacugaugggagugcuucaggaaaagcugauacuaaaauacuauucauugaggaggggaaaaucguucauacuagcacauugucaggaagugcucagcaugucgaggagugcuccugcuauccucgauucccuggugucagaugugucugcagagacaacuggaaaggcuccaauaggcccaucguagauauaaacauaaaggaucauagcauuguuuccaguuauguguguucaggacuuguuggagacacacccagaaaaaacgacagcuccagcaguagccauuguuuggauccuaacaaugaagaagguggucauggagugaaaggcugggccuuugaugauggaaaugacguguggaugggaagaacgaucagcgagaagucacgcuuaggguaugaaaccuucaaagucauugaaggcugguccaacccuaaguccaaauugcagauaaauaggcaagucauaguugacagagguaauaggaccgguuauucugguauuuucucuguugaaggcaaaagcugcaucaaucggugcuuuuauguggaguugauaaggggaagaaaagaggaaacugaagucuuguggaccucaaacaguauuguuguguuuuguggcaccucagguacauauggaacaggcucauggccugauggggcggacaucaaucucaugccuauauaa

SEQ ID NO: 53618 - RNA, 1410 nt, Artificial Sequence
  derived and/or modified CDS sequence (wt) from neuraminidase__InfluenzaA__AEX36413
augaauccaaaucaaaagauaauaacgauuggcucuguuucucucaccauuuccacaauaugcuucuucaugcaaauugccaucuugauaacuacuguaacauugcauuucaagcaauaugaauucaacucccccccaaacaaccaagugaugcugugugaaccaacaauaauagaaagaaacauaacagagauaguguaucugaccaacaccaccauagagaaggaaauaugccccaaacuagcagaauacagaaauuggucaaagccgcaaugugacauuacaggguuugcaccuuuuucuaaggacaauucgauuaggcuuuccgcugguggggacaucugggugacaagagaaccuuaugugucaugcgauccugacaaguguuaucaauuugcccuuggacagggaacaacacuaaacaacgugcauucaaaugacacaguacgugauaggaccccuuaucggacccuauugaugaaugaguuagguguuccuuuucaucuggggaccaagcaagugugcauagcaugguccagcucaaguugucacgauggaaaagcauggcugcauguuuguauaacgggggaugauaaaaaugcaacugcuagcuucauuuacaaugggaggcuuguagauaguauuguuucaugguccaaagaaauccucaggacccaggagucagaaugcguuuguaucaauggaacuuguacaguaguaaugacugaugggagugcuucaggaaaagcugauacuaaaauacuauucauugaggaggggaaaaucguucauacuagcacauugucaggaagugcucagcaugucgaggagugcuccugcuauccucgauauccuggugucagaugugucugcagagacaacuggaaaggcuccaauaggcccaucguagauauaaacauaaaggaucauagcauuguuuccaguuauguguguucaggacuuguuggagacacacccagaaaaaacgacagcuccagcaguagccauuguuuggauccuaacaaugaagaagguggucauggagugaaaggcugggccuuugaugauggaaaugacguguggaugggaagaacgaucagcgagaagucacgcuuaggguaugaaaccuucaaagucauugaaggcugguccaacccuaaguccaaauugcagauaaauaggcaagucauaguugacagagguaauagguccgguuauucugguauuuucucuguugaaggcaaaagcugcaucaaucggugcuuuuauguggaguugauaaggggaagaaaagaggaaacugaagucuuauggaccucaaacaguauuguuguguuuuguggcaccucagguacauauggaacaggcucauggccugauggggcggacaucaaucucaugccuauauaa

SEQ ID NO: 53619 - RNA, 1410 nt, Artificial Sequence
  derived and/or modified CDS sequence (wt) from neuraminidase__InfluenzaA__AEX36424
augaauccaaaucaaaagauaauaacgauuggcucuguuucucucaccauuuccacaauaugcuucuucaugcaaauugccaucuugauaacuacuguaacauugcauuucaagcaauaugaauucaacucccccccaaacaaccaagugaugcugugugaaccaacaauaauagaaagaaacauaacagagauaguguaucugaccaacaccaccauagagaaggaaauaugcuccaaacuagcagaauacagaaauuggucaaagccgcaaugugacauuacaggauuugcaccuuuuucuaaggacaauucgauuaggcuuuccgcugguggggacaucugggugacaagagaaccuuaugugucaugcgauccugacaaguguuaucaauuugcccuuggacagggaacaacacuaaacaacgugcauucaaaugacacaauacgugauaggaccccuuaucggacccuauugaugaaugaguuagguguuccuuuucaucuggggaccaagcaagugugcauagcaugguccagcucaaguugucacgauggaaaagcauggcugcauguuuguauaacgggggaugauaaaaaugcaacugcuagcuucauuuacaaugggaggcuuguagauaguguuguuucaugguccaaagaaauccucaggacccaggagucagaaugcguuuguaucaauggaacuuguacaguaguaaugacugaugggagugcuucaggaaaagcugauacuaaaauacuauucauugaggaggggaaaaucguucauacuagcacauugucaggaagugcucagcaugucgaggagugcuccugcuauccucgauauccuggugucagaugugucugcagagacaacuggaaaggcuccaauaggcccaucguagauauaaacauaaaggaucauagcauuguuuccaguuauguguguucaggacuuguuggagacacacccagaaaaaacgacagcuccagcaguagccauuguuuggauccuaacaaugaagaagguggucauggagugaaaggcugggccuuugaugauggaaaugacguguggaugggaagaacgaucagcgagaagucacgcuuaggguaugaaaccuucaaagucauugaaggcugguccaacccuaaguccaaauugcagauaaauaggcaagucauaguugacagagguaauagguccgguuauucugguauuuucucuguugaaggcaaaagcugcaucaaucggugcuuuuauguggaguugauaaggggaagaaaagaggaaacugaagucuuguggaccucaaacaguauuguuguguuuuguggcaccucagguacauauggaacaggcucauggccugauggggcggacaucaaucucaugccuauauaa

SEQ ID NO: 53620 - RNA, 1410 nt, Artificial Sequence
  derived and/or modified CDS sequence (wt) from neuraminidase__InfluenzaA__AEX36435
augaauccaaaucaaaagauaauaacgauuggcucuguuucucucaccauuuccacaauaugcuucuucaugcaaauugccaucuugauaacuacuguaacauugcauuucaagcaauaugaauucaacucccccccaaacaaccaagugaugcugugugaaccaacaauaauagaaagaaacauaacagagauaguguaucugaccaacaccaccauagagaaggaaauaugccccaaacuagcagaauacagaaauuggucaaagccgcaaugugacauuacaggauuugcaccuuuuucuaaggacaauucgauuaggcuuuccgcugguggggacaucugggugacaagagaaccuuaugugucaugcgauccugacaaguguuaucaauuugcccuuggacagggaacaacacuaaacaacgugcauucaaaugacacaguacgugauaggaccccuuaucggacccuauugaugaaugaguuagguguuccuuuucaucuggggaccaagcaagugugcauagcaugguccagcucaaguugucacgauggaaaagcauggcugcauguuuguauaacgggggaugauaaaaaugcaacugcuagcuucauuuacaaugggaggcuuguagauaguguuguuucaugguccaaagaaauccucaggacccaggagucagaaugcguuuguaucaauggaacuuguacaguaguaaugacugaugggagugcuucaggaaaagcugacaccaaaauacuauucauuaaggaggggaaaaucguucauacuagcacauugucaggaagugcucagcaugucgaggagugcuccugcuauccucgauauccuggugucagaugugucugcagagacaacuggaaaggcuccaauaggcccaucguagauauaaacauaaaggaucauagcauuguuuccaguuauguguguucaggacuuguuggagacacacccagaaaaaacgacagcuccagcaguagccauuguuuggauccuaacaaugaagaagguggucauggagugaaaggcugggccuuugaugauggaaaugacguguggaugggaagaacgaucagcgagaagucacgcuuaggguaugaaaccuucaaagucauugaaggcugguccaacuccaaguccaaauugcagauaaauaggcaagucauaguugacagagguaauagguccgguuauucugguauuuucucuguugaaggcaaaagcugcaucaaucggugcuuuuauguggaguugauaaggggaagaaaagaggaaacugaagucuuguggaccucaaacaguauuguuguguuuuguggcaccucagguacauauggaacaggcucauggccugauggggcggacaucaaucucaugccuauauaa

SEQ ID NO: 53621 - RNA, 1410 nt, Artificial Sequence; identical to SEQ ID NO: 48090
  derived and/or modified CDS sequence (wt) from neuraminidase__InfluenzaA__AEX36446

SEQ ID NO: 53622 - RNA, 1410 nt, Artificial Sequence; identical to SEQ ID NO: 48090
  derived and/or modified CDS sequence (wt) from neuraminidase__InfluenzaA__AEX36457

SEQ ID NO: 53623 - RNA, 1410 nt, Artificial Sequence
  derived and/or modified CDS sequence (wt) from neuraminidase__InfluenzaA__AEX36468
augaauccaaaucaaaagauaauaacgauuggcucuguuucucucaccauuuccacaauaugcuucuucaugcaaauugccaucuugauaacuacuguaacauugcauuucaagcaauaugaauucagcucccccccaaacaaccaagugaugcugugugaaccaacaauaauagaaagaaacauaacagagauaguguaucugaccaacaccaccauagagaaggaaauaugccccaaacuagcagaauacagaaauuggucaaagccgcaaugugacauuacaggauuugcaccuuuuucuaaggacaauucgauuaggcuuuccgcugguggggacaucugggugacaagagaaccuuaugugucaugcgauccugacaaguguuaucaauuugcccuuggacagggaacaacacuaaacaacgugcauucaaaugacacaguacauaauaggaccccuuaucggacccuauugaugaaugagcuagguguuccauuucaucuggggaccaagcaagugugcauagcaugguccagcucaaguugucacgauggaaaagcauggcugcauguuuguguaacgggggaugacaaaaaugcaacugcuagcuucauuuacaaugggaggcuuguagauaguauuguuucaugguccaaagaaauccucaggacccaggagucagaaugcguuuguaucaauggaacuuguacaguaguaaugacugaugggagugcuucaggaaaagcugauacuaaaauacuauucauugaggaggggaaaaucguucauacuagcacauugucaggaaaugcucagcaugucgaggagugcuccugcuauccucgauauccuggugucagaugugucugcagagacaauuggaaaggcuccaauaggcccaucguagauauaaacauaaaggauuauagcauuguuuccagauaugugugcucaggacuuguuggagacacacccagaaaaaacgacagcuccagcaguagccauugcuuggauccuaacaaugaagaagguggucauggagugaaaggcugggccuuugaugauggaaaugacguguggaugggaagaacgaucagcgagaagucacgcucaggauaugaaaccuucaaagucauugaaggcugguccaacccuaauuccaaauugcagauaaauaggcaagucauaguugacagagguaauagguccgguuauucugguauuuucucuguugaaggcaaaagcugcaucaaucggugcuuuuauguggaguugauaaggggaagaaaagaggaaaccaaaguuuuguggaccucaaacaguauuguuguguuuuguggcaccucagguacauauggaacaggcucauggccugauggggcggacaucaaucucaugccuauauaa

SEQ ID NO: 53624 - RNA, 1410 nt, Artificial Sequence
  derived and/or modified CDS sequence (wt) from neuraminidase__InfluenzaA__AEX36479
augaauccaaaucaaaagauaauaacgauuggcucuguuucucucaccauuuccacaauaugcuucuucaugcaaauugccaucuugauaacuacuguaacauugcauuucaagcaauaugaauucagcucccccccaaacaaccaagugaugcugugugaaccaacaauaauagaaagaaacauaacagagauaguguauccgaccaacaccaccacagagaaggaaauaugccccaaacuagcagaauacagaaauuggucaaagccgcaaugugacauuacaggauuugcaccuuuuucuaaggacaauucgauuaggcuuuccgcugguggggacaucugggugacaagagaaccuuaugugucaugcgauccugacaaguguuaucaauuugcccuuggacagggaacaacacuaaacaacgugcauucaaaugacacaguacaugauaggaccccuuaucggacccuauugaugaaugagcuagguguuccauuucaucuggggaccaagcaagugugcauagcaugguccagcucaaguugucacgauggaaaagcauggcugcauguuuguguaacgggggaugacaaaaaugcaacugcuagcuucauuuacaaugggaggcuuguagauaguauuguuucaugguccaaagaaauccucaggacccaggagucagaaugcguuuguaucaauggaacuuguacaguaguaaugacugaugggagugcuucaggaaaagcugauacuaaaauacuauucauugaggaggggaaaaucguucauacuagcacauugucaggaagugcucagcaugucgaggagugcuccugcuauccucgauauccuggugucagaugugucugcagagacaauuggaaaggcuccaauaggcccaucguagauauaaacauaaaggauuauagcauuguuuccagauaugugugcucaggacuuguuggagacacacccagaaaaaacgacagcuccagcaguagccauugcuuggauccuaacaaugaagaagguggucauggagugaaaggcugggccuuugaugauggaaaugacguguggaugggaagaacgaucagcgagaaguuacgcucaggauaugaaaccuucaaagucauugaaggcugguccaacccuaauuccaaauugcagauaaauaggcaagucauaguugacagagguaauagguccgguuauucugguauuuucucuguugaaggcaaaagcugcaucaaucggugcuuuuauguggaguugauaaggggaagaaaagaggaaaccgaaguuuuguggaccucaaacaguauuguuguguuuuguggcaccucagguacauauggaacaggcucauggccugauggggcggacaucaaucucaugccuauauaa

SEQ ID NO: 53625 - RNA, 1410 nt, Artificial Sequence
  derived and/or modified CDS sequence (wt) from neuraminidase__InfluenzaA__AEX36490
augaauccaaaucaaaagauaauaacgauuggcucuguuucucucaccauuuccacaauaugcuucuucaugcaaauugccaucuugauaacuacuguaacauugcauuucaagcaauaugaauucagcuaccccccaaacaaccaagugaugcugugugaaccaacaauaauagaaagaaacauaacagagauaguguaucugaccaacaccaccauagagaaggaaauaugccccaaacuagcagaauacagaaauuggucaaagccgcaaugugacauuacaggauuugcaccuuuuucuaaggacaauucgauuaggcuuuccgcugguggggacaucugggugacaagagaaccuuaugugucaugcgauccugacaaguguuaucaauuugcccuuggacagggaacaacacuaaacaacgugcauucaaaugacacaguacaugauaggaccccuuaucggacccuauugaugaaugagcuagguguuccauuucaucuggggaccaagcaagugugcauagcaugguccagcucaaguugucacgauggaaaagcauggcugcauguuuguguaacgggggaugacaaaaaugcaacugcuagcuucauuuacaaugggaggcuuguagauaguauuguuucaugguccaaagaaauccucaggacccaggagucagaaugcguuuguaucaauggaacuuguacaguaguaaugacugaugggagugcuucaggaaaagcugauacuaaaauacuauucauugaggaggggaaaaucguucauacuagcacauugucaggaaaugcucagcaugucgaggagugcuccugcuauccucgauauccuggugucagaugugucugcagagacaauuggaaaggcuccaauaggcccaucguagauauaaacauaaaggauuauagcauuguuuccagauaugugugcucaggacuuguuggagacacacccagaaaaaacgacagcuccagcaguagccauugcuuggauccuaacaaugaagaagguggucauggagugaaaggcugggccuuugaugauggaaaugacguguggaugggaagaacgaucagcgagaagucacgcucaggauaugaaaccuucaaagucauugaaggcugguccaacccuaauuccaaauugcagauaaauaggcaagucauaguugacagagguaauagguccgguuauucugguauuuucucuguugaaggcaaaagcugcaucaaucggugcuuuuauguggaguugauaaggggaagaaaagaggaaaccaaaguuuuguggaccucaaacaguauuguuguguuuuguggcaccucagguacauauggaacaggcucauggccugauggggcggacaucaaucucaugccuauauaa

SEQ ID NO: 53626 - RNA, 1410 nt, Artificial Sequence
  derived and/or modified CDS sequence (wt) from neuraminidase__InfluenzaA__AEX36501
augaauccaaaucaaaagauaauaacgauuggcucuguuucucucaccauuuccacaauaugcuucuucaugcaaauugccaucuugauaacuacuguaacauugcauuucaagcaauaugaauucagcucccccccaaacaaccaagugaugcugugugaaccagcaauaauagaaagaaacauaacagagauaguguaucugaccaacaccaccauagagaaggaaaaaugccccaaacuagcagaauacagaaauuggucaaagccgcaaugugacauuacaggauuugcaccuuuuucuaaggacaauucgauuaggcuuuccgcugguggggacaucugggugacaagagaaccuuaugugucaugcgauccugacaaguguuaucaauuugcccuuggacagggaacaacacuaaacaacgugcauucaaaugacacaguacaugguaggaccccuuaucggacccuauugaugaaugagcuagguguuccauuucaucuggggaccaagcaagugugcauagcaugguccagcucaaguugucacgauggaaaagcauggcugcauguuuguguaacgggggaugacaaaaaugcaacugcuagcuucauuuacaaugggaggcuuguagauaguauuguuucaugguccaaagaaauccucaggacccaggagucagaaugcguuuguaucaauggaacuuguacaguaguaaugacugaugggagugcuucaggaaaagcugauacuaaaauacuauucauugaggaggggaaaaucguucauacuagcacauugucaggaagugcucagcaugucgaggagugcuccugcuauccucgauauccuggugucagaugugucugcagagacaauuggaaaggcuccaauaggcccaucguagauauaaacauaaaggauuauagcauuguuuccagauaugugugcucaggacuuguuggagacacacccagaaaaagcgacagcuccagcaguagccauugcuuggauccuaacaaugaagaagguggucauggagugaaaggcugggccuuugaugauggaaaugacguguggaugggaagaacgaucagcgagaagucacgcucaggauaugaaaccuucaaagucauugaaggcugguccaacccuaauuccaaauugcagauaaauaggcaagucauaguugacagagguaauagguccgguuauucugguauuuucucuguugaaggcaaaagcugcaucaaucggugcuuuuauguggaguugauaaggggaagaaaagaggaaaccgaaguuuuguggaccucaaacaguauuguuguguuuuguggcaccucagguacauauggaacaggcucauggccugauggggcggacaucaaucucaugccuauauaa

SEQ ID NO: 53627 - RNA, 1410 nt, Artificial Sequence
  derived and/or modified CDS sequence (wt) from neuraminidase__InfluenzaA__AEX36512
augaauccaaaucaaaagauaauaacgauuggcucuguuucccucaccauuuccacaauaugcuucuucaugcaaauugccaucuugauaacuacuguaacauugcauuucaagcaauaugaauucagcucccccccaaacaaccaagugaugcugugugaaccagcaauaauagaaagaaacauaacagagauaguguaucugaccaacaccaccauagagaaggaaauaugccccaaacuagcagaauacagaaauuggucaaagccgcaaugugacauuacaggauuugcaccuuuuucuaaggacaauucgauuaggcuuuccgcugguggggacaucugggugacaagagaaccuuaugugucaugcgauccugacaaguguuaucaauuugcccuuggacagggaacaacacuaaacaacgugcauucaaaugacacaguacaugauaggaccccuuaucggacccuauugaugaaugagcuagguguuccauuucaucuggggaccaagcaagugugcauagcaugguccagcucaaguugucacgauggaaaagcauggcugcauguuuguguaacgggggaugacaaaaaugcaacugcuagcuucauuuacaaugggaggcuuguagauaguauuguuucaugguccaaagaaauccucaggacccaggagucagaaugcguuuguaucaauggaacuuguacaguaguaaugacugaugggagugcuucaggaaaagcugauacuaaaauacuauucauugaggaggggaaaaucguucauacuagcacauugucaggaagugcucagcaugucgaggagugcuccugcuauccucgauauccuggugucagaugugucugcagagacaauuggaaaggcuccaauaggcccaucguagauauaaacauaaaggauuauagcauugucuccagauaugugugcucaggacuuguuggagacacacccagaaaaaacgacagcuccagcaguagccauugcuuggauccuaacaaugaagaagguggucauggagugaaaggcugggccuuugaugauggaaaugacguguggaugggaagaacgaucagcgagaagucacgcucaggauaugaaaccuucaaagucauugaaggcugguccaacccuaauuccaaauugcagauaaauaggcaagucauaguugacagagguaauagguccgguuauucugguauuuucucuguugaaggcaaaagcugcauuaaucggugcuuuuauguggaguugauaaggggaagaaaagaggaaaccgaaguuuuguggaccucaaacaguauuguuguguuuuguggcaccucagguacauauggaacaggcucauggccugauggggcggacaucaaucucaugccuauauaa

SEQ ID NO: 53628 - RNA, 1410 nt, Artificial Sequence
  derived and/or modified CDS sequence (wt) from neuraminidase__InfluenzaA__AEX36523
augaauccaaaucaaaagauaauaacgauuggcucuguuucucucaccauuuccacaauaugcuucuucaugcaaauugccaucuugauaacuacuguaacauugcauuucaagcaauaugaauucaacucccccccaaacaaccaagugaugcugugugaaccaacaauaauagaaagaaacauaacagagauaguguaucugaccaacaccaccauagagaaggaaauaugccccaaacuagcagaauacagaaauuggucaaagccgcaaugugacauuacaggauuugcaccuuuuucuaaggacaauucgauuaggcuuuccgcugguggggacaucugggugacaagagaaccuuaugugucaugcgauccugacaaguguuaucaauuugcccuuggacagggaacaacacuaaacaacgugcauucaaaugacacaguacgugauaggaccccuuaucggacccuauugaugaaugaguuagguguuccuuuucaucuggggaccaagcaagugugcauagcaugguccagcucaaguugucacgauggaaaagcauggcugcauguuuguauaacgggggaugauaaaaaugcaacugcuagcuucauuuacaaugggaggcuuguagauaguguuguuucaugguccaaagaaauccucaggacccaggagucagaaugcguuuguaucaauggaacuuguacaguaguaaugacugaugggagugcuucaggagaagcugauacuaaaauacuauucauugaggaggggaaaaucguccauacuagcacauugucaggaagugcucagcaugucgaggagugcuccugcuauccucgauauccuggugucagaugugucugcagagacaacuggaaaggcuccaauaggcccaucguagauauaaacauaaaggaucauagcauuguuuccaguuauguguguucaggacuuguuggagacacacccagaaaaaacgacagcuccagcaguagccauuguuuggauccuaacaaugaagaagguggucauggagugaaaggcugggccuuugaugauggaaaugacguguggaugggaagaacgaucagcgagaagucacgcuuaggguaugaaaccuucaaagucauugaaggcugguccaacccuaaguccaaauugcagauaaauaggcaagucauaguugacagagguaauagguccgguuauucugguauuuucucuguugaaggcaaaagcugcaucaaucggugcuuuuauguggaguugauaaggggaagaaaagaggaaacugaagucuuguggaccucaaacaguauuguuguguuuuguggcaccucagggacauauggaacaggcucauggccugauggggcggacaucaaucucaugccuauauaa

SEQ ID NO: 53629 - RNA, 1410 nt, Artificial Sequence
  derived and/or modified CDS sequence (wt) from neuraminidase__InfluenzaA__AEX36534
augaauccaaaucaaaagauaauaacgauuggcucuguuucucucaccauuuccacaauaugcuucuucaugcaaauugccaucuugauaacuacuguaacauugcauuucaagcaauaugaauucaacucccccccaaacaaccaagugaugcugugugaaccaacaauaauagaaagaaacauaacagagauaguguaucugaccaacaccaccauagagaaggaaauaugccccaaacuagcagaauacagaaauuggucaaagccgcaaugugacauuacaggauuugcaccuuuuucuaaggacaauucgauuaggcuuuccgcugguggggacaucugggugacaagagaaccuuaugugucaugcgauccugacaaguguuaucaauuugcccuuggacagggaacaacacuaaacaacgugcauucaaauaacacaguacgugauaggaccccuuaucggacccuauugaugaaugaguuagguguuccuuuucaucuggggaccaagcaagugugcauagcaugguccagcucaaguugucacgauggaaaagcauggcugcauguuuguauaacgggggaugauaaaaaugcaacugcuagcuucauuuacaaugggaggcuuguagauaguguuguuucaugguccaaagaaauccucaggacccaggagucagaaugcguuuguaucaauggaacuuguacaguaguaaugacugaugggagugcuucaggaaaagcugauacuaaaauacuauucauugaggaggggaaaaucguucauaccagcacauugucaggaagugcucagcaugucgaggagugcuccugcuauccucgauauccuggugucagaugugucugcagagacaacuggaaaggcuccaauaggcccaucguagauauaaacauaaaggaucauagcauuguuuccaguuauguguguucaggacuuguuggagacacacccagaaaaaacgacagcuccagcaguagccauuguuuggauccuaacaaugaagaagguggucauggagugaaaggcugggccuuugaugauggaaaugacguguggaugggaagaacaaucagcgagaagucacgcuuaggguaugaaaccuucaaagucauugaaggcugguccaacccuaaguccaaauugcagauaaauaggcaagucauaguugacagagguaauagguccgguuauucugguauuuucucuguugaaggcaaaagcugcaucaaucggugcuuuuauguggaguugauaaggggaagaaaagaggaaacugaagucuuguggaccucaaacaguauuguuguguuuuguggcaccucagguacauauggaacaggcucauggccugauggggcggacaucaaucucaugccuauauaa

SEQ ID NO: 53630 - RNA, 1410 nt, Artificial Sequence
  derived and/or modified CDS sequence (wt) from neuraminidase__InfluenzaA__AEX36545
augaauccaaaucaaaagauaauaacgauuggcucuguuucucucaccauuuccacaauaugcuucuucaugcaaauugccaucuugauaacuacuguaacauugcauuucaagcaauaugaauucaacucccccccaaacaaccaagugaugcugugugaaccaacaauaauagaaagaaacauaacagagauaguguaucugaccaacaccaccauagagaaggaaauaugccccaaacuagcagaauacagaaauuggucaaagccgcaaugugacauuacaggauuugcaccuuuuucuaaggacaauucgauuaggcuuuccgcugguggggacaucugggugacaagagaaccuuaugugucaugcgauccugacaaguguuaucaauuugcccuuggacagggaacaacacuaaacaaugugcauucaaaugacacaguacgugauaggaccccuuaucggacccuauugaugaaugaguuagguguuccuuuucaucuggggaccaagcaagugugcauagcaugguccagcucaaguugucacgauggaaaagcauggcugcauguuuguauaacgggggaugauaaaaaugcaacugcuaguuucauuuacaaugggaggcuuguagauaguguuguuucaugguccaaagaaauccucaggacccaggagucagaaugcguuuguaucaauggaacuuguacaguaguaaugacugaugggagugcuuuaggaaaagcugauacuaaaauacuauucauugaggaggggaaaaucguucauacuagcacauugucaggaagugcucagcaugucgaggagugcuccugcuauccucgauauccuggugucagaugugucugcagagacaacuggaaaggcuccaauaggcccaucguagauauaaacauaaaggaucauagcauuguuuccaguuauguguguucaggacuuguuggagacacacccagaaaaaacgacagcuccagcaguagccauuguuuggauccuaacaaugaagaagguggucauggagugaaaggcugggccuuugaugauggaaaugacguguggaugggaagaacgaucagcgagaagucacgcuuaggguaugaaaccuucaaagucauugaaggcugguccaacccuaaguccaaauugcagauaaauaggcaagucauaguugacagagguaauagguccgguuauucugguauuuucucuguugaaggcaaaagcugcaucaaucggugcuuuuauguggaguugauaaggggaagaaaagaggaaacugaagucuuguggaccucaaacaguauuguuguguuuuguggcaccucagguacauauggaacaggcucauggccugauggggcggacaucaaucucaugccuauauaa

SEQ ID NO: 53631 - RNA, 1410 nt, Artificial Sequence
  derived and/or modified CDS sequence (wt) from neuraminidase__InfluenzaA__AEX36556
augaauccaaaucaaaagauaauaacgauuggcucuguuucucucaccauuuccacaauaugcuucuucaugcaaauugccaucuugauaacuacuguaacauugcauuucaagcaauaugaauucaacucccccccaaacaaccaagugaugcugugugaaccaacaauaauagaaagaaacauaacagagauaguguaucugaccaacaccaccauagagaaggaaauaugccccaaacuagcagaauacagaaauuggucaaagccgcaaugugacauuacaggauuugcaccuuuuucuaaggacaauucgauuaggcuuuccgcugguggggacaucugggugacaagagaaccuuaugugucaugcgauccugacaaguguuaucaauuugcccuuggacagggaacaacacuaaacaaugugcauucaaaugacacaguacgugauaggaccccuuaucggacccuauugaugaaugaguuagguguuccuuuucaucuggggaccaagcaagugugcauagcaugguccagcucaaguugucacgauggaaaagcauggcugcauguuuguauaacgggggaugauaaaaaugcaacugcuaguuucauuuacaaugggaggcuuguagauaguguuguuucaugguccaaagaaauccucaggacccaggagucagaaugcguuuguaucaauggaacuuguacaguaguaaugacugaugggagugcuucaggaaaagcugauacuaaaauacuauucauugaggaggggaaaaucguucauacuagcacauugucaggaagugcucagcaugucgaggagugcuccugcuauccucgauauccuggugucagaugugucugcagagacaacuggaaaggcuccaauaggcccaucguagauauaaacauaaaggaucauagcauuguuuccaguuauguguguucaggacuuguuggagacacacccagaaaaaacgacagcuccagcaguagccauuguuuggauccuaacaaugaagaagguggucauggagugaaaggcugggccuuugaugauggaaaugacguguggaugggaagaacgaucagcgagaagucacgcuuaggguaugaaaccuucaaagucauugaaggcugguccaacccuaaguccaaauugcagauaaauaggcaagucauaguugacagagguaauagguccgguuauucugguauuuucucuguugaaggcaaaagcugcaucaaucggugcuuuuauguggaguugauaaggggaagaaaagaggaaacugaagucuuguggaccucaaacaguauuguuguguuuuguggcaccucagguacauauggaacaggcucauggccugauggggcggacaucaaucuuaugccuauauaa

SEQ ID NO: 53632 - RNA, 1410 nt, Artificial Sequence; identical to SEQ ID NO: 53631
  derived and/or modified CDS sequence (wt) from neuraminidase__InfluenzaA__AEX36567

SEQ ID NO: 53633 - RNA, 1410 nt, Artificial Sequence
  derived and/or modified CDS sequence (wt) from neuraminidase__InfluenzaA__AEX36578
augaauccaaaucaaaagauaauaacgauuggcucuguuucucucaccauuuccacaauaugcuucuucaugcaaauugccaucuugauaacuacuguaacauugcauuucaagcaauaugaauucaacucccccccaaacaaccaagugaugcugugugaaccaacaauaauagaaagaaacauaacagagauaguguaucugaccaacaccaccauagagaaggaaauaugccccaaacuagcagaauacagaaauuggucaaagccgcaaugcgacauuacaggauuugcaccuuuuucuaaggacaauucgauuaggcuuuccgcugguggggacaucugggugacaagagaaccuuaugugucaugcgauccugacaaguguuaucaauuugcccuuggacagggaacaacacuaaacaacgugcauucaaaugacacaguacgugauaggaccccuuaucggacccuauugaugaaugaguuagguguuccuuuucaucuggggaccaagcaagugugcauagcaugguccagcucaaguugucacgauggaaaagcauggcugcauguuuguauaacgggggaugauaaaaaugcaacugcuagcuucauuuacaaugggaggcuuguagauaguguuguuucaugguccaaagaaauccucaggacccaggagucagaaugcguuuguaucaauggaacuuguacaguaguaaugacugaugggagugcuucgggaaaagcugauacuaaaauacuauucauuaaggaggggaaaaucguucauacuagcacauugucaggaagugcucagcaugucgaggagugcuccugcuauccucgauauccuggugucagaugugucugcagagacaacuggaaaggcuccaauaggcccaucguagauauaaacauaaaggaucauagcauuguuuccaguuauguguguucaggacuuguuggagacacacccagaaaaaacgacagcuccagcaguagccauuguuuggauccuaacaaugaagaagguggucauggagugaaaggcugggccuuugaugauggaaaugacguguggaugggaagaacgaucagcgagaagucacgcuuaggguaugaaaccuucaaagucauugaaggcugguccaacccuaaguccaaauugcagauaaauaggcaagucauaguugacagagguaauagguccgguuauucugguauuuucucuguugaaggcaaaagcugcaucaaucggugcuuuuauguggaguugauaaggggaagaaaagaggaaacugaagucuuguggaccucgaacaguauuguuguguuuuguggcaccucagguacauauggaacaggcucauggccugauggggcggacaucaaucucaugccuauauaa

SEQ ID NO: 53634 - RNA, 1410 nt, Artificial Sequence
  derived and/or modified CDS sequence (wt) from neuraminidase__InfluenzaA__AEX36589
augaauccaaaucaaaagauaauaacgauuggcucuguuucucucaccauuuccacaauaugcuucuucaugcaaauugccaucuugauaacuacuguaacauugcauuucaagcaauaugaauucaacucccccccaaacaaccaagugaugcugugugaaccaacaauaauagaaagaaacauaacagagauaguguaucugaccaacaccaccauagagaaggaaauaugucccaaacuagcagaauacagaaauuggucaaagccgcaaugcgacauuacaggauuugcaccuuuuucuaaggacaauucgauuaggcuuuccgcugguggggacaucugggugacaagagaaccuuaugugucaugcgauccugacaaguguuaucaauuugcccuuggacagggaacaacacuaaacaacguacauucaaaugacacaguacgugauaggaccccuuaucggacccuauugaugaaugaguuagguguuccuuuucaucuggggaccaagcaagugugcauagcaugguccagcucaaguugucacgauggaaaagcauggcugcauguuuguauaacgggggaugauaaaaaugcaacugcuagcuucauuuacaaugggaggcuuguagauaguguuguuucaugguccaaagaaauccucaggacccaggagucagaaugcguuuguaucaauggaacuuguacaguaguaaugacugaugggagugcuucgggaaaagcugauacuaaaauacuauucauuaaggaggggaaaaucguucauacuagcacauugucaggaagugcucagcaugucgaggagugcuccugcuauccucgauauccuggugucagaugugucugcagagacaacuggaaaggcuccaauaggcccaucguagauauaaacauaaaggaucauagcauuguuuccaguuauguguguucaggacuuguuggagacacacccagaaaaaacgacagcuccagcaguagccauuguuuggauccuaacaaugaagaagguggucauggagugaaaggcugggccuuugaugauggaaaugacguguggaugggaagaacgaucagcgagaagucacgcuuaggguaugaaaccuucaaagucauugaaggcugguccaacccuaaguccaaauugcagauaaauaggcaagucauaguugacagagguaauagguccgguuauucugguauuuucucuguugaaggcaaaagcugcaucaaucggugcuuuuauguggaguugauaaggggaagaaaagaggaaacugaagucuuguggaccucgaauaguauuguuguguuuuguggcaccucagguacauauggaacaggcucauggccugauggggcggacaucaaucucaugccuauauaa

SEQ ID NO: 53635 - RNA, 1410 nt, Artificial Sequence
  derived and/or modified CDS sequence (wt) from neuraminidase__InfluenzaA__AEX36600
augaauccaaaucaaaagauaauaacgauuggcucuguuucucucaccauuuccacaauaugcuucuucaugcaaauugccaucuugauaacuacuguaacauugcauuucaagcaauaugaauucaacucccccccaaacaaccaagugaugcugugugaaccaacaauaauagaaagaaacauaacagagauaguguaucugaccaacaccaccauagagaaggaaauaugccccaaauuagcagaauacagaaauuggucaaagccgcaaugcgacauuacaggauuugcaccuuuuucuaaggacaauucgauuaggcuuuccgcugguggggacaucugggugacaagagaaccuuaugugucaugcgauccugacaaguguuaucaauuugcccuuggacagggaacaacacuaaacaacgugcauucaaaugacacaguacgugauaggaccccuuaucggacccuauugaugaaugaguuagguguuccuuuucaucuggggaccaagcaagugugcauagcaugguccagcucaaguugucacgauggaaaagcauggcugcauguuuguauaacgggggaugauaaaaaugcaacugcuagcuucauuuacaaugggaggcuuguagauaguguuguuucaugguccaaagaaauccucaggacccaggagucagaaugcguuuguaucaauggaacuuguacaguaguaaugacugaugggagugcuucgggaaaagcugauacuaaaauacuauucauuaaggaggggaaaaucguucauacuagcacauugucaggaagugcucagcaugucgaggagugcuccugcuauccucgauauccuggugucagaugugucugcagagacaacuggaaaggcuccaauaggcccaucguagauauaaacauaaaggaucauagcauuguuuccaguuauguguguucaggacuuguuggagacacacccagaaaaaacgacagcuccagcaguagccauuguuuggauccuaacaaugaagaagguggucauggagugaaaggcugggccuuugaugauggaaauaacguguggaugggaagaacgaucagcgagaagucacgcuuaggguaugaaaccuucaaagucauugaaggcugguccaacccuaaguccaaauugcagauaaauaggcaagucauaguugacagagguaauagguccgguuauucugguauuuucucuguugaaggcaaaagcugcaucaaucggugcuuuuauguggaguugauaaggggaagaaaagaggaaacugaagucuuguggacaucgaacaguauuguuguguuuuguggcaccucagguacauauggaacaggcucauggccugauggggcggacaucaaucucaugccuauauaa

SEQ ID NO: 53636 - RNA, 1410 nt, Artificial Sequence; identical to SEQ ID NO: 53570
  derived and/or modified CDS sequence (wt) from neuraminidase__InfluenzaA__AEX36622

SEQ ID NO: 53637 - RNA, 1410 nt, Artificial Sequence
  derived and/or modified CDS sequence (wt) from neuraminidase__InfluenzaA__AEX63619
augaauccaaaucagaagauaauaaccauugguucgaucuguaugacaauuggaauagccagcuugauauuacaaauugggaacauaauaucaauauggauuagccacucaauucaaacugagaaucaaaaucagccugaaauaugcaaucaaaacgucauuacuuacgaaaacaacacuugggucaaccagacguauguuaacgucagcaacacuaauuuuguugcugaacaggcaguagcuucagugaaauuagcgggcaauuccucucucuguccuguuaguggaugggcuauauacaguaaagauaauaguguaagaaucgguuccaagggggauguguuugucauaagggagccauucauuucaugcucccacucggaaugcagaacuuucuucuuaacucaaggggcccuucugaaugacaaacauucuaacggaacaauuaaggacagaagcccauaucgaacauugaugagcuguccuauuggugagguuccuucuccauacaacucaagguuugagucagucgcuuggucagcaagugccugccaugauggcacaaguuggcuaacaauuggaauuucuggcccagauaauggggcaguggcugugcugaaauacaauggcauaauaacagacacuaucaagaguuggagaaagaacauauuaagaacacaagagucugaaugugcaugcguuaaugguucuugcuuuacaguaaugacugauggaccaaguaaugggcaggccucguacaaggucuuuaagauagaaagggggaaaguagucaaaucaguugaguugaaugccccuaauuaucacuaugaggaaugcuccuguuauccugaaucuagugaaaucacauguguguguagagauaauuggcauggcucaaaucggccgugggugucauuuaaucagaaucuggaauaucaaaugggauacauaugcagugggauuuucggagauaauccacgcccuaaugacaaaacaggcaguugugguccaguauuuucuaauggggcaaaugggguaaaaggauuuucauuuaaauacggcaaugguguuuggauagggagaacuaaaagcacuaguucaaggauggguuuugagaugauuugggauccggauggauggaccaaaacagaugauaaauucucaguaaagcaagauaucauaggaauaacugauuggucaggauacagugggaguuuuguucaacacccggaauugaccggacuggacuguaugaggccuugcuuuuggguugaacuaaucagagggcgacccaaagagaacacaaucuggacuagcgggaguagcauauccuuuugugguguaaauagugacacaguggguuggucuuggccagacggugcugaauugccauucaccauugacaaguaa

SEQ ID NO: 53638 - RNA, 1365 nt, Artificial Sequence; identical to SEQ ID NO: 47731
  derived and/or modified CDS sequence (wt) from neuraminidase__InfluenzaA__AEX92876

SEQ ID NO: 53639 - RNA, 1365 nt, Artificial Sequence; identical to SEQ ID NO: 48706
  derived and/or modified CDS sequence (wt) from neuraminidase__InfluenzaA__AEX92887

SEQ ID NO: 53640 - RNA, 1365 nt, Artificial Sequence; identical to SEQ ID NO: 48706
  derived and/or modified CDS sequence (wt) from neuraminidase__InfluenzaA__AEX92904

SEQ ID NO: 53641 - RNA, 1365 nt, Artificial Sequence; identical to SEQ ID NO: 48706
  derived and/or modified CDS sequence (wt) from neuraminidase__InfluenzaA__AEX96924

SEQ ID NO: 53642 - RNA, 1410 nt, Artificial Sequence
  derived and/or modified CDS sequence (wt) from neuraminidase__InfluenzaA__AEY69091
augaauccaaaccaaaagauaauaaccauugguucggucuguaugacaauuggaauggcuaacuuaauauuacaaauuggaaacauaaucucaauauggauuagccacucaauucaacuugggaaucaaaaucagauugaaacaugcaaucaaagcgucauuacuuaugaaaacaacacuuggguaaaucagacauauguuaacaucagcaacaccaacuuugcugcuggacagucagugguuuccgugaaauuagcgggcaauuccucucucugcccuguuaguggaugggcuauauacaguaaagacaacaguauaagaaucgguuccaagggggauguguuugucauaagggaaccauucauaucaugcucccccuuggaaugcagaaccuucuucuugacucaaggggccuugcuaaaugacaaacauuccaauggaaccauuaaagacaggagcccauaucgaacccuaaugagcuguccuauuggugaaguucccucuccauacaacucaagauuugagucagucgcuuggucagcaagugcuugucaugauggcaucaauuggcuaacaauuggaauuucuggcccagacaauggggcaguggcuguguuaaaguacaacggcauaauaacagacacuaucaagaguuggagaaacaauauauugagaacacaagagucugaaugugcauguauaaaugguucuugcuuuacuguaaugaccgauggaccaagugauggacaggccucauacaagaucuucagaauagaaaagggaaagauagucaaaucagucgaaaugaaugccccuaauuaucacuaugaggaaugcuccuguuauccugauucuagugaaaucacaugugugugcagggauaacuggcauggcucgaaucgaccgugggugucuuucaaccagaaucuggaauaucagauaggauacauaugcagugggauuuucggagacaauccacgcccuaaugauaagacaggcaguugugguccaguaucgucuaauggagcaaauggaguaaaaggauuuucauucaaauacggcaaugguguuuggauagggagaacuaaaagcauuaguucaagaaacgguuuugagaugauuugggauccgaacggauggacugggacagacaauaacuucucaauaaagcaagauaucguaggaauaaaugaguggucaggauauagcgggaguuuuguucagcauccagaacuaacagggcuggauuguauaagaccuugcuucuggguugaacuaaucagagggcgacccaaagagaacacaaucuggacuagcgggagcagcauauccuuuugugguguaaacagugacacuguggguuggucuuggccagacggugcugaguugccauuuaccauugacaaguaa

SEQ ID NO: 53643 - RNA, 1410 nt, Artificial Sequence
  derived and/or modified CDS sequence (wt) from neuraminidase__InfluenzaA__AEY69101
augaauccaaaucaaaagauaauaacgauuggcucuguuucucucaccauuuccacaauaugcuucuucaugcaaauugccaucuugauaacuacuguaacauugcauuucaagcaauaugaauucaacucccccccaaacaaccaagugaugcugugugaaccaacaauaauagaaagaaacauaacagagauaguguaucugaccaacaccaccauagagaaggaaauaugccccaaacuagcagaauacagaaauuggucaaagccgcaaugugacauuacaggguuugcaccuuuuucuaaggacaauucgauuaggcuuuccgcugguggggacaucugggugacaagagaaccuuaugugucaugcgauccugacaaguguuaucaauuugcccuuggacagggaacaacacuaaacaacguacauucaaauaacacaguacgugauaggaccccuuaucggacccuauugaugaaugaguuagguguuccuuuucaucuggggaccaagcaagugugcauagcaugguccagcucaaguugucacgauggaaaagcauggcugcauguuuguauaacgggggaugauaaaaaugcaacugcuagcuucauuuacaaugggaggcuuguagauaguguuguuucaugguccaaagaaauccucaggacccaggagucagaaugcguuuguaucaauggaacuuguacaguaguaaugacugaugggagugcuucaggaaaagcugauacuaaaauacuauucauugaggaggggaaaaucguucauacuagcacauugucaggaagugcucagcaugucgaggagugcuccugcuauccucgauauccuggugucagaugugucugcagagacaacuggaaaggauccaauaggcccaucguagauauaaacauaaaggaucauagcauugucuccaguuauguguguucaggacuuguuggagacacacccagaaaaaacgacagcuccagcaguagccauuguuuggauccuaacaaugaggaagguggucauggggugaaaggcugggccuuugaugauggaaaugacguguggaugggaagaacgaucagcgagaagucacgcuuaggguaugaaacuuucaaagucauugaaggcugguccaacccuaaguccaaauugcagauaaauaggcaagucauaguugacagagguaauagguccgguuauucugguauuuucucuguugaaggcaaaagcugcaucaaucggugcuuuuauguggaguugauaaggggaagaaaagaggaaacugaagucuuguggaccucaaacaguauuguuguguuuuguggcaccucagguacauauggaacaggcucauggccugauggggcggacaucaaucucaugccuauauaa

SEQ ID NO: 53644 - RNA, 1410 nt, Artificial Sequence
  derived and/or modified CDS sequence (wt) from neuraminidase__InfluenzaA__AEY69112
augaauccaaaucaaaagauaauaacgauuggcucuguuucucucaccauuuccacaauaugcuucuucaugcaaauugccaucuugauaacuacugugacauugcauuucaagcaauaugaauucaacucccccccaaacaaccaagugaugcugugugaaccaacaauaauagaaagaaacauaacagagauaguguaucugaccaacaccaccauagagaaggaaauaugccccaaacuagcagaauacagaaauuggucaaagccgcaaugugacauuacaggguuugcaccuuuuucuaaggacaauucgauuaggcuuuccgcugguggggacaucugggugacaagagaaccuuaugugucaugcgauccugacaaguguuaucaauuugcccuuggacagggaacaacacuaaacaacguacauucaaauaacacaguacgugauaggaccccuuaucggacccuauugaugaaugaguuagguguuccuuuucaucuggggaccaagcaagugugcauagcaugguccagcucaaguugucacgauggaaaagcauggcugcauguuuguauaacgggggaugauaaaaaugcaacugcuagcuucauuuacaaugggaggcuuguagauaguguuguuucaugguccaaagaaauccucaggacccaggagucagaaugcguuuguaucaauggaacuuguacaguaguaaugacugaugggagugcuucaggaaaagcugauacuaaaauacuauucauugaggaggggaaaaucguucauacuagcacauugucaggaagugcucagcaugucgaggagugcuccugcuauccucgauacccuggugucagaugugucugcagagacaacuggaaaggauccaauaggcccaucguagauauaaacauaaaggaucauagcauugucuccaguuauguuuguucaggacuuguuggagacacacccagaaaaaacgacagcuccagcaguagccauuguuuggauccuaacaaugaggaagguggucauggggugaaaggcugggccuuugaugauggaaaugacguguggaugggaagaacgaucagcgagaagucacgcuuaggguaugaaaccuucaaagucauugaaggcugguccaacccuaaguccaaauugcagauaaauaggcaagucauaguugacagagguaauagguccgguuauucuggcauuuucucuguugaaggcaaaagcugcaucaaucggugcuuuuauguggaguugauaaggggaagaaaagaggaaacugaagucuuguggaccucaaacaguauuguuguguuuuguggcaccucagguacauauggaacaggcucauggccugauggggcggacaucaaucucaugccuauauaa

SEQ ID NO: 53645 - RNA, 1410 nt, Artificial Sequence
  derived and/or modified CDS sequence (wt) from neuraminidase__InfluenzaA__AEY69145
augaauacaaaccaaaagauaauaacgauuggcucuguuucucucaccauuuccacaauaugcuucuucaugcaaauugccaucuugauaacuacuguaacauugcauuucaagcaauaugaauucaacucccccccaaacaaccaagugaugcugugugaaccaacaauaauagaaagaaacauaacagagauaguguaucugaccaacaccaccauagagaaggaaauaugccccaaacuagcagaauacagaaauuggucaaagccgcaaugugacauuacaggauuugcaccuuuuucuaaggacaauucgauuaggcuuuccgcugguggggacaucugggugacaagagaaccuuaugugucaugcgauccugacaaguguuaucaauuugcucuuggacaaggaacaacaauaaacaacgugcauucaaauaacacaguacgugauaggaccccuuaucggacccuauugaugaaugaguuagguguuccuuuucaucuggggaccaagcaagugugcauagcaugguccagcucaaguugucacgauggaaaagcauggcugcauguuuguauaacgggggaugauaaaaaugcaacugcuagcuucauuuacaaugggaggcuuguagauaguguuguuucaugguccaaagaaauccucaggacccaggagucagaaugcguuuguaucaauggaacuuguacaguaguaaugacugaugggagugcuucaggaaaagcugauacuaaaauacuauucauugaggaggggaaaaucguucauacuagcacuuugucaggaagugcucagcaugucgaggagugcuccugcuauccucgauauccuggugucagaugcgucugcagagacaacuggaaaggcuccaauaggcccaucguagauauaaacaugaaggaucauagcauuguuuccaguuauguguguucaggacuuguuggagacacacccagaaaaaacgacagcuccagcaguagccauuguuuggauccuaacaaugaagaagguggucauggagugaaaggcugggccuuugaugauggaaaugacguguggaugggaagaacgaucagcgagaagucacgcuuaggguaugaaaccuucaaagucauugaaggcugguccaacccuaaguccaaauugcagauaaauaggcaagucauaguugacagagguaauagguccgguuauucuggcauuuucucuguugaaggcaaaagcugcaucaaucggugcuuuuauguggaguugauaaggggaagaaaagaggaaacugaaguuuuguggaccucaaacaguguuguuguguuuuguggcaccucagguacauauggaacaggcucauggccugauggggcggacaucaaucucaugccuauauaa

SEQ ID NO: 53646 - RNA, 1410 nt, Artificial Sequence; identical to SEQ ID NO: 52921
  derived and/or modified CDS sequence (wt) from neuraminidase__InfluenzaA__AEY69156

SEQ ID NO: 53647 - RNA, 1410 nt, Artificial Sequence
  derived and/or modified CDS sequence (wt) from neuraminidase__InfluenzaA__AEY69167
augaauccaaaucaaaagauaauaacgauuggcucuguuucucucaccauuuccacaauaugcuucuucaugcaaauugccaucuugauaacuacuguaacauugcauuucaagcaauaugaauucaacucccccccaaacaaccaagugaugcugugugaaccaacaauaauagaaagaaacauaacagagauaguguaucugaccaacaccaccauagagaaggaaauaugccccaaacuagcagaauacagaaauuggucaaagccgcaaugugacauuacaggguuugcaccuuuuucuaaggacaauucgauuaggcuuuccgcugguggggacaucugggugacaagagaaccuuaugugucaugcgauccugacaaguguuaucaauuugcccuuggacagggaacaacacuaaacaacguacauucaaauaacacaguacgugauaggaccccuuaucggacccuauugaugaaugaguuagguguuccuuuucaucuggggaccaagcaagugugcauagcaugguccagcucaaguugucacgauggaaaagcauggcugcauguuuguauaacgggggaugauaaaaaugcaacugcuagcuucauuuacaaugggaggcuuguagauaguguuguuucaugguccaaagaaauccucaggacccaggagucagaaugcguuuguaucaauggaacuuguacaguaguaaugacugaugggagugcuucaggaaaagcugauacuaaaauauuauucauugaggagggaaaaaucguucauacuagcacauugucaggaagugcucagcaugucgaggagugcuccugcuauccucgauauccuggugucagaugugucugcagagacaacuggaaaggauccaauaggcccaucguagauauaaacauaaaggaucauagcauugucuccaguuauguguguucaggacuuguuggagacacacccagaaaaaacgacagcuccagcaguagccauuguuuggauccuaacaaugaggaagguggucauggggugaaaggcugggccuuugaugauggaaaugacguguggaugggaagaacgaucagcgagaagucacgcuuaggguaugaaaccuucaaagucauugaaggcugguccaacccuaaguccaaauugcagauaaauaggcaagucauaguugacagagguaauagguccgguuauucugguauuuucucuguugaaggcaaaagcugcaucaaucggugcuuuuauguggaguugauaaggggaagaaaagaggaaacugaagucuuguggaccucaaacaguauuguuguguuuuguggcaccucagguacauauggaacaggcucauggccugauggggcggacaucaaucucaugccuguauaa

SEQ ID NO: 53648 - RNA, 1410 nt, Artificial Sequence; identical to SEQ ID NO: 53647
  derived and/or modified CDS sequence (wt) from neuraminidase__InfluenzaA__AEY69178

SEQ ID NO: 53649 - RNA, 1410 nt, Artificial Sequence; identical to SEQ ID NO: 53647
  derived and/or modified CDS sequence (wt) from neuraminidase__InfluenzaA__AEY69189

SEQ ID NO: 53650 - RNA, 1410 nt, Artificial Sequence
  derived and/or modified CDS sequence (wt) from neuraminidase__InfluenzaA__AEY69211
augaauccaaaucaaaagauaauaacgauuggcucuguuucucucaccauuuccacaauaugcuucuucaugcaaauugccaucuugauaacuacuguaacauugcauuucaagcaauauaaauucaacucccccccaaacaaccaagugaugcugugugaaccaacaauaauagaaagaaacauaacagagauaguguaucugaccaacaccaccauagagaaggaaauaugccccaaacuagcagaauacagaaauuggucaaagccgcaaugugacauuacaggguuugcaccuuuuucuaaggacaauucgauuaggcuuuccgcugguggggacaucugggugacaagagaaccuuaugugucaugcgauccugacaaguguuaucaauuugcccuuggacagggaacaacacuaaacaacguacauucaaauaacacaguacgugauaggaccccuuaucggacccuauugaugaaugaguuagguguuccuuuucaucuggggaccaagcaagugugcauagcaugguccagcucaaguugucacgauggaaaagcauggcugcauguuuguauaacgggggaugauaaaaaugcaacugcuagcuucauuuacaaugggaggcuuguagauaguguuguuucaugguccaaagaaauccucaggacccaggagucagaaugcguuuguaucaauggaacuuguacaguaguaaugacugaugggagugcuucaggaaaagcugauacuaaaauauuauucauugaggagggaaaaaucguucauacuagcacauugucaggaagugcucagcaugucgaggagugcuccugcuauccucgauauccuggugucagaugugucugcagagacaacuggaaaggauccaauaggcccaucguagauauaaacauaaaggaucauagcauugucuccaguuauguguguucaggacuuguuggagacacacccagaaaaaacgacagcuccagcaguagccauuguuuggauccuaacaaugaggaagguggucauggggugaaaggcugggccuuugaugauggaaaugacguguggaugggaagaacgaucagcgagaagucacgcuuaggguaugaaaccuucaaagucauugaaggcugguccaacccuaaguccaaauugcagauaaauaggcaagucauaguugacagagguaauagguccgguuauucugguauuuucucuguugaaggcaaaagcugcaucaaucggugcuuuuauguggaguugauaaggggaagaaaagaggaaacugaagucuuguggaccucaaacaguauuguuguguuuuguggcaccucagguacauauggaacaggcucauggccugauggggcggacaucaaucucaugccuguauaa

SEQ ID NO: 53651 - RNA, 1410 nt, Artificial Sequence
  derived and/or modified CDS sequence (wt) from neuraminidase__InfluenzaA__AEY69233
augaauccaaaucaaaagauaauaacgauuggcucuguuucucucaccauuuccacaauaugcuucuucaugcaaauugccaucuugauaacuacuguaacauugcauuucaagcaauaugaauucaacucccccccaaacaaccaagugaugcugugugaaccaacaauaauagaaagaaacauaacagagauaguguaucugaccaacaccaccauagagaaggaaauaugccccaaacuagcagaauacagaaauuggucaaagccgcaaugugacauuacaggguuugcaccuuuuucuaaggacaauucgauuaggcuuuccgcugguggggacaucugggugacaagagaaccuuaugugucaugcgauccugacaaguguuaucaauuugcccuuggacagggaacaacacuaaacaacguacauucaaauaacacaguacgugauaggaccccuuaucggacccuauugaugaaugaguuagguguuccuuuucaucuggggaccaagcaagugugcauagcaugguccagcucaaguugucacgauggaaaagcauggcugcauguuuguauaacgggggaugauaaaaaugcaacugcuagcuucauuuacaaugggaggcuuguagauaguguuguuucaugguccaaagaaauccucaggacccaggagucagaaugcguuuguaucaauggaacuuguacaguaguaaugacugaugggagugcuucaggaaaagcugauacuaaaauauuauucauugaggaggggaaaaucguucauacuagcacauugucaggaagugcucagcaugucgaggagugcuccugcuauccucgauauccuggugucagaugugucugcagagacaacuggaaaggauccaauaggcccaucguagauauaaacauaaaggaucauagcauugucuccaguuauguguguucaggacuuguuggagacacacccagaaaaaacgacagcuccagcaguagccauuguuuggauccuaacaaugaggaagguggucauggggugaaaggcugggccuuugaugauggaaaugacguguggaugggaagaacgaucagcgagaagucacgcuuaggguaugaaaccuucaaagucauugaaggcugguccaauccuaaguccaaauugcagauaaauaggcaagucauaguugacagagguaauagguccgguuauucugguauuuucucuguugaaggcaaaagcugcaucaaucggugcuuuuauguggaguugauaaggggaagaaaagaggaaacugaagucuuguggaccucaaacaguauuguuguguuuuguggcaccucagguacauauggaacaggcucauggccugauggggcggacaucaaucucaugccuguauaa

SEQ ID NO: 53652 - RNA, 1410 nt, Artificial Sequence
  derived and/or modified CDS sequence (wt) from neuraminidase__InfluenzaA__AEY69272
augaauccaaaucaaaagauaauaacgauuggcucuguuucucucaccauuuccacaauaugcuucuucaugcaaauugccaucuugauaacuacuguaacauugcauuucaagcaauaugaauucaacucccccccaaacaaccaagugaugcugugugaaccaacaauaauagaaagaaacauaacagagauaguguaucugaccaacaccaccauagagaaggaaauaugccccaaacuagcagaauacagaaauuggucaaagccgcaaugugacauuacaggguuugcaccuuuuucuaaggacaauucgauuaggcuuuccgcugguggggacaucugggugacaagagaaccuuaugugucaugcgauccugacaaguguuaucaauuugcccuuggacagggaacaacacuaaacaacguacauucaaauaacacaguacgugauaggaccccuuaucggacccuauugaugaaugaguuagguguuccuuuucaucuggggaccaagcaagugugcauagcaugguccagcucaaguugucacgauggaaaagcauggcugcauguuuguauaacgggggaugauaaaaaugcaacugcuagcuucauuuacaaugggaggcuuguagauaguguuguuucaugguccaaagaaauccucaggacccaggagucagaaugcguuuguaucaauggaacuuguacaguaguaaugacugaugggagugcuucaggaaaagcugauacuaaaauauuauucauugaggagggaaaaaucguucauacuagcacauugucaggaagugcucagcaugucgaggagugcuccugcuauccucgauauccuggugucagaugugucugcagagacaacuggaaaggauccaauaggcccaucguagauauaaacauaaaggaucauagcauugucuccaguuauguguguucaggacuuguuggagacacacccagaaaaaacgacagcuccagcaguagccauuguuuggauccuaacaaugaggaagguggucauggggugaaaggcugggccuuugaugauggaaaugacguguggaugggaagaacgaucagcgagaagucacgcuuaggguaugaaaccuucaaagucauugaaggcugguccaacccuaaguccaaacugcagauaaauaggcaagucauaguugacagagguaauagguccgguuauucugguauuuucucuguugaaggcaaaagcugcaucaaucggugcuuuuauguggaguugauaaggggaagaaaagaggaaacugaagucuuguggaccucaaacaguauuguuguguuuuguggcaccucagguacauauggaacaggcucauggccugauggggcggacaucaaucucaugccuguauaa

SEQ ID NO: 53653 - RNA, 1410 nt, Artificial Sequence; identical to SEQ ID NO: 53647
  derived and/or modified CDS sequence (wt) from neuraminidase__InfluenzaA__AEY69283

SEQ ID NO: 53654 - RNA, 1410 nt, Artificial Sequence
  derived and/or modified CDS sequence (wt) from neuraminidase__InfluenzaA__AEY69294
augaauccaaaucaaaagauaauaacgauuggcucuguuucucucaccauuuccacaauaugcuucuucaugcaaaccgccauccugauaacuacuguaacauugcauuucaagcaaugugaauucaacucccccccaaacaaccaagugaugcugugugaaccaacaauaauagaaagaaacauaacagagauaguguaucugaccaacaccaccauagagaaggaaauaugccccaaacuagcagaauacagaaauuggucaaagccgcaaugugacauuacaggauuugcaccuuuuucuaaggacaauucgauuaggcuuuccgcugguggggacaucugggugacaagagaaccuuaugugucaugcgauccugacaaguguuaucaauuugcccuuggacagggaacaacacuaaacaacgugcauucaaauaacacaguacgugauaggaccccuuaucggacucuauugaugaaugaguuagguguuccuuuucaucuggggaccaagcaagugugcauagcaugguccagcucaaguugucacgauggaaaagcauggcugcauguuuguauaacgggggaugauaaaaaugcaacugcuagcuucauuuacaaugggaggcuuguagauaguguuguuucaugguccaaagaaauccucaggacccaggagucagaaugcguuuguaucaauggaacuuguacaguaguaaugacugaugggagugcuucagggaaagcugauacuaaaauacuauucauugaggaggggaaaaucguucauacuagcacauugucaggaagugcucagcaugucgaggagugcuccugcuauccucgauauccuggugucagaugugucugcagagacaacuggaaaggcuccaauaggcccaucguagauauaaacauaaaggaucauagcauuguuuccaguuauguguguucaggacuuguuggagacacacccagaaaaaacgacagcuccagcaguagccauuguuuggauccuaacaaugaagaaggugguaauggagugaaaggcugggccuuugaugauggaaaugacguguggaugggaagaacgaucagcgagaaaucacgcuuaggguaugaaaccuucaaagucauugaaggcugguccaacccuaaguccaaauugcagauaaauaggcaagucauaguugacagagguaauagguccgguuauucugguauuuucucuguugaaggcaaaagcugcaucaaucggugcuuuuauguggaauugauaaggggaaggaaagaggaaacugaagucuuguggaccucaaacaguauuguuguguuuuguggcaccucagguacauauggaacaggcucauggccugauggggcggacaucaaucucaugccuauauaa

SEQ ID NO: 53655 - RNA, 1410 nt, Artificial Sequence; identical to SEQ ID NO: 53654
  derived and/or modified CDS sequence (wt) from neuraminidase__InfluenzaA__AEY69305

SEQ ID NO: 53656 - RNA, 1410 nt, Artificial Sequence; identical to SEQ ID NO: 53654
  derived and/or modified CDS sequence (wt) from neuraminidase__InfluenzaA__AEY69316

SEQ ID NO: 53657 - RNA, 1410 nt, Artificial Sequence; identical to SEQ ID NO: 53654
  derived and/or modified CDS sequence (wt) from neuraminidase__InfluenzaA__AEY69788

SEQ ID NO: 53658 - RNA, 1410 nt, Artificial Sequence; identical to SEQ ID NO: 52921
  derived and/or modified CDS sequence (wt) from neuraminidase__InfluenzaA__AEY69799

SEQ ID NO: 53659 - RNA, 1410 nt, Artificial Sequence; identical to SEQ ID NO: 52921
  derived and/or modified CDS sequence (wt) from neuraminidase__InfluenzaA__AEY69810

SEQ ID NO: 53660 - RNA, 1410 nt, Artificial Sequence; identical to SEQ ID NO: 53647
  derived and/or modified CDS sequence (wt) from neuraminidase__InfluenzaA__AEY69832

SEQ ID NO: 53661 - RNA, 1410 nt, Artificial Sequence
  derived and/or modified CDS sequence (wt) from neuraminidase__InfluenzaA__AEY69843
augaauccaaaucaaaagauaauaacgauuggcucuguuucucucaccauuuccacaauaugcuucuucaugcaaauugccaucuugauaacuacuguaacauugcauuucaagcaauaugaauucaacucccccccaaacaaccaagugaugcugugugaaccaacaauaauagaaagaaacauaacagagauaguguaucugaccaacaccaccauagagaaggaaauaugccccaaacuagcagaauacagaaauuggucaaagccgcaaugugacauuacaggguuugcaccuuuuucuaaggacaauucgauuaggcuuuccgcugguggggacaucugggugacaagagaaccuuaugugucaugcgauccugacaaguguuaucaauuugcccuuggacagggaacaacacuaaacaacguacauucaaauaacacaguacgugauaggaccccuuaucggacccuauugaugaaugaguuagguguuccuuuucaucuggggaccaagcaagugugcauagcaugguccagcucaaguugucacgauggaaaagcauggcugcauguuuguauagcgggggaugauaaaaaugcaacugcuagcuucauuuacaaugggaggcuuguagauaguguuguuucaugguccaaagaaauccucaggacccaggagucagaaugcguuuguaucaauggaacuuguacaguaguaaugacugaugggagugcuucaggaaaagcugauacuaaaauauuauucauugaggagggaaaaaucguucauacuagcacauugucaggaagugcucagcaugucgaggagugcuccugcuauccucgauauccuggugucagaugugucugcagagacaacuggaaaggauccaauaggcccaucguagauauaaacauaaaggaucauagcauugucuccaguuauguguguucaggacuuguuggagacacacccagaaaaaacgacagcuccagcaguagccauuguuuggauccuaacaaugaggaagguggucauggggugaaaggcugggccuuugaugauggaaaugacguguggaugggaagaacgaucagcgagaagucacgcuuaggguaugaaaccuucaaagucauugaaggcugguccaacccuaaguccaaauugcagauaaauaggcaagucauaguugacagagguaauagguccgguuauucugguauuuucucuguugaaggcaaaagcugcaucaaucggugcuuuuauguggaguugauaaggggaagaaaagaggaaacugaagucuuguggaccucaaacaguauuguuguguuuuguggcaccucagguacauauggaacaggcucauggccugauggggcggacaucaaucucaugccuguauaa

SEQ ID NO: 53662 - RNA, 1410 nt, Artificial Sequence
  derived and/or modified CDS sequence (wt) from neuraminidase__InfluenzaA__AEY69854
augaauccaaaucaaaagauaauaacgauuggcucuguuucucucaccauuuccacaauaugcuucuucaugcaaauugccaucuugauaacuacuguaacauugcauuucaagcaauaugaauucaacucccccccaaacaaccaagugaugcugugugaaccaacaauaauagaaagaaacauaacagagauaguguaucugaccaacaccaccauagagaaggaaauaugccccaaacuagcagaauacagaaauuggucaaagccgcaaugugacauuacaggguuugcaccuuuuucuaaggacaauucgauuaggcuuuccgcugguggggacaucugggugacaagagaaccuuaugugucaugcgauccugacaaguguuaucaauuugcccuuggacagggaacaacacuaaacaacguacauucaaauaacacaguacgugauaggaccccuuaucggacccuauugaugaaugaguuagguguuccuuuucaucuggggaccaagcaagugugcauagcaugguccagcucaaguugucacgauggaaaagcauggcugcauguuuguauaacgggggaugauaaaaaugcaacugcuagcuucauuuacaaugggaggcuuguagauaguguuguuucaugguccaaagaaauccucaggacccaggagucagaaugcguuuguaucaauggaacuuguacaguaguaaugacugaugggagugcuucaggaaaagcugauacuaaaauauuauucauugaggagggaaaaaucguucauacuagcacauugucaggaagugcucagcaugucgaggagugcuccugcuauccucgauauccuggugucagaugugucugcagagacaacuggaaaggauccaauaggcccaucguagauauaaacauaaaggaucauagcauugucuccaguuauguguguucaggacuuguuggagacacacccagaaaaaacgacagcucuagcaguagccauuguuuggauccuaacaaugaggaagguggucauggggugaaaggcugggccuuugaugauggaaaugacguguggaugggaagaacgaucagcgagaagucacgcuuaggguaugaaaccuucaaagucauugaaggcugguccaacccuaaguccaaauugcagauaaauaggcaagucauaguugacagagguaauagguccgguuauucugguauuuucucuguugaaggcaaaagcugcaucaaucggugcuuuuauguggaguugauaaggggaagaaaagaggaaacugaagucuuguggaccucaaacaguauuguuguguuuuguggcaccucagguacauauggaacaggcucauggccugauggggcggacaucaaucucaugccuguauaa

SEQ ID NO: 53663 - RNA, 1410 nt, Artificial Sequence
  derived and/or modified CDS sequence (wt) from neuraminidase__InfluenzaA__AEY69876
augaauccaaaucaaaagauaauaacgauuggcucuguuucucucaccauuuccacaauaugcuucuucaugcaaauugccaucuugauaacuacuguaacauugcauuucaagcaauaugaauucaacucccccccaaacaaccaagugaugcugugugaaccaacaauaauagaaagaaacauaacagagauaguguaucugaccaacaccaccauagagaaggaaauaugccccaaacuagcagaauacagaaauuggucaaagccgcaaugugacauuacaggguuugcaccuuuuucuaaggacaauucgauuaggcuuuccgcugguggggacaucugggugacaagagaaccuuaugugucaugcgauccugacaaguguuaucaauuugcccuuggacagggaacaacacuaaacaacguacauucaaauaacacaguacgugauaggaccccuuaucggacccuauugaugaaugaguuaggugucccuuuucaucuggggaccaagcaagugugcauagcaugguccagcucaaguugucacgauggaaaagcauggcugcauguuuguauaacgggggaugauaaaaaugcaacugcuagcuucauuuacaaugggaggcuuguagauaguguuguuucaugguccaaagaaauccucaggacccaggagucagaaugcguuuguaucaauggaacuuguacaguaguaaugacugaugggagugcuucaggaaaagcugauacuaaaauauuauucauugaggagggaaaaaucguucauacuagcacauugucaggaagugcucagcaugucgaggagugcuccugcuauccucgauauccuggugucagaugugucugcagagacaacuggaaaggauccaauaggcccaucguagauauaaacauaaaggaucauagcauugucuccaguuauguguguucaggacuuguuggagacacacccagaaaaaacgacagcuccagcaguagccauuguuuggauccuaacaaugaggaagguggucauggggugaaaggcugggccuuugaugauggaaaugacguguggaugggaagaacgaucagcgagaagucacgcuuaggguaugaaaccuucaaagucauugaaggcugguccaacccuaaguccaaauugcagauaaauaggcaagucauaguugacagagguaauagguccgguuauucugguauuuucucuguugaaggcaaaagcugcaucaaucggugcuuuuauguggaguugauaaggggaagaaaagaggaaacugaagucuuguggaccucaaacaguauuguuguguuuuguggcaccucagguacauauggaacaggcucauggccugauggggcggacaucaaucucaugccuguauaa

SEQ ID NO: 53664 - RNA, 1410 nt, Artificial Sequence; identical to SEQ ID NO: 53663
  derived and/or modified CDS sequence (wt) from neuraminidase__InfluenzaA__AEY69887

SEQ ID NO: 53665 - RNA, 1410 nt, Artificial Sequence
  derived and/or modified CDS sequence (wt) from neuraminidase__InfluenzaA__AEY69898
augaacccaaaucaaaagauaauaacgauuggcucuguuucucucaccauuuccacaauaugcuucuucaugcaaauugccaucuugauaacuacuguaacauugcauuucaagcaauaugaauucaacucccccccaaacaaccaagugaugcugugugaaccaacaauaauagaaagaaacauaacagagauaguguaucugaccaacaccaccauagagaaggaaauaugccccaaacuagcagaauacagaaauuggucaaagccgcaaugugacauuacaggguuugcaccuuuuucuaaggacaauucgauuaggcuuuccgcugguggggacaucugggugacaagagaaccuuaugugucaugcgauccugacaaguguuaucaauuugcccuuggacagggaacaacacuaaacaacguacauucaaauaacacaguacgugauaggaccccuuaucggacccuauugaugaaugaguuaggugucccuuuucaucuggggaccaagcaagugugcauagcaugguccagcucaaguugucacgauggaaaagcauggcugcauguuuguauaacgggggaugauaaaaaugcaacugcuagcuucauuuacaaugggaggcuuguagauaguguuguuucaugguccaaagaaauccucaggacccaggagucagaaugcguuuguaucaauggaacuuguacaguaguaaugacugaugggagugcuucaggaaaagcugauacuaaaauauuauucauugaggagggaaaaaucguucauacuagcacauugucaggaagugcucagcaugucgaggagugcuccugcuauccucgauauccuggugucagaugugucugcagagacaacuggaaaggauccaauaggcccaucguagauauaaacauaaaggaucauagcauugucuccaguuauguguguucaggacuuguuggagacacacccagaaaaaacgacagcuccagcaguagccauuguuuggauccuaacaaugaggaagguggucauggggugaaaggcugggccuuugaugauggaaaugacguguggaugggaagaacgaucagcgagaagucacgcuuaggguaugaaaccuucaaagucauugaaggcugguccaacccuaaguccaaauugcagauaaauaggcaagucauaguugacagagguaauagguccgguuauucugguauuuucucuguugaaggcaaaagcugcaucaaucggugcuuuuauguggaguugauaaggggaagaaaagaggaaacugaagucuuguggaccucaaacaguauuguuguguuuuguggcaccucagguacauauggaacaggcucauggccugauggggcggacaucaaucucaugccuguauaa

SEQ ID NO: 53666 - RNA, 1410 nt, Artificial Sequence; identical to SEQ ID NO: 52921
  derived and/or modified CDS sequence (wt) from neuraminidase__InfluenzaA__AEY69909

SEQ ID NO: 53667 - RNA, 1410 nt, Artificial Sequence
  derived and/or modified CDS sequence (wt) from neuraminidase__InfluenzaA__AEY69942
augaauccaaaucaaaagauaauaacgauuggcucuguuucucucaccauuuccacaauaugcuucuucaugcaaauugccaucuugauaacuacuguaacauugcauuucaagcaauaugaauucaacucccccccaaacaaccaagugaugcugugugaaccaacaauaauagaaagaaacauaacagagauaguguaucugaccaacaccaccauagagaaggaaauaugccccaaacuagcagaauacagaaauuggucaaagccgcaaugugacauuacaggguuugcaccuuuuucuaaggacaauucgauuaggcuuuccgaugguggggacaucugggugacaagagaaccuuaugugucaugcgauccugacaaguguuaucaauuugcccuuggacagggaacaacacuaaacaacauacauucaaauaacacaguacgugauaggaccccuuaucggacccuauugaugaaugaguuagguguuccuuuucaucuggggaccaagcaagugugcauagcaugguccagcucaaguugucacgauggaaaagcauggcugcauguuuguauaacgggggaugauaaaaaugcaacugcuagcuucauuuacaaugggaggcuuguagauaguguuguuucaugguccaaagaaauccucaggacccaggagucagaaugcguuuguaucaauggaacuuguacaguaguaaugacugaugggagugcuucaggaaaagcugauacuaaaauauuauucauugaggagggaaaaaucguucauacuagcacauugucaggaagugcucagcaugucgaggagugcuccugcuauccucgauauccuggugucagaugugucugcagagacaacuggaaaggauccaauaggcccaucguagauauaaacauaaaggaucauagcauugucuccaguuauguguguucaggacuuguuggagacacacccagaaaaaacgacagcuccagcaguagccauuguuuggauccuaacaaugaggaagguggucauggggugaaaggcugggccuuugaugauggaaaugacguguggaugggaagaacgaucagcgagaagucacgcuuaggguaugaaaccuucaaagucauugaaggcugguccaacccuaaguccaaauugcagauaaauaggcaagucauaguugacagagguaauagguccgguuauucugguauuuucucuguugaaggcaaaagcugcaucaaucggugcuuuuauguggaguugauaaggggaagaaaagaggaaacugaagucuuguggaccucaaacaguauuguuguguuuuguggcaccucagguacauauggaacaggcucauggccugauggggcggacaucaaucucaugccuguauaa

SEQ ID NO: 53668 - RNA, 1410 nt, Artificial Sequence; identical to SEQ ID NO: 53667
  derived and/or modified CDS sequence (wt) from neuraminidase__InfluenzaA__AEY69953

SEQ ID NO: 53669 - RNA, 1410 nt, Artificial Sequence; identical to SEQ ID NO: 53667
  derived and/or modified CDS sequence (wt) from neuraminidase__InfluenzaA__AEY69964

SEQ ID NO: 53670 - RNA, 1410 nt, Artificial Sequence; identical to SEQ ID NO: 53647
  derived and/or modified CDS sequence (wt) from neuraminidase__InfluenzaA__AEY69975

SEQ ID NO: 53671 - RNA, 1410 nt, Artificial Sequence; identical to SEQ ID NO: 53647
  derived and/or modified CDS sequence (wt) from neuraminidase__InfluenzaA__AEY69986

SEQ ID NO: 53672 - RNA, 1410 nt, Artificial Sequence; identical to SEQ ID NO: 53647
  derived and/or modified CDS sequence (wt) from neuraminidase__InfluenzaA__AEY69997

SEQ ID NO: 53673 - RNA, 1410 nt, Artificial Sequence; identical to SEQ ID NO: 53647
  derived and/or modified CDS sequence (wt) from neuraminidase__InfluenzaA__AEY70008

SEQ ID NO: 53674 - RNA, 1410 nt, Artificial Sequence; identical to SEQ ID NO: 53647
  derived and/or modified CDS sequence (wt) from neuraminidase__InfluenzaA__AEY70019

SEQ ID NO: 53675 - RNA, 1410 nt, Artificial Sequence
  derived and/or modified CDS sequence (wt) from neuraminidase__InfluenzaA__AEY70259
augaauccaaaucaaaagauaauaacgauuggcucuguuucucucaccauuuccacaauaugcuucuucaugcaaauugccaucuugauaacuacuguaacauugcauuucaagcaauaugaauucaacucccccccaaacaaccaagugaugcugugugaaccaacaauaauagaaagaaacauaacagagauaguguaucugaccaacaccaccauagagaaggaaauaugccccaaacuagcagaauacagaaauuggucaaagccgcaaugugacauuacaggguuugcaccuuuuucuaaggacaauucgauuaggcuuuccgcugguggggacaucugggugacaagagaaccuuaugugucaugcgauccugacaaguguuaucaauuugcccuuggacagggaacaacacuaaacaacguacauucaaauaacacaguacgugauaggaccccuuaucggacccuauugaugaaugaguuagguguuccuuuucaucuggggaccaagcaagugugcauagcaugguccagcucaaguugucacgauggaaaagcauggcugcauguuuguauaacgggggaugauaaaaaugcaacugcuagcuucauuuacaaugggaggcuuguagauaguguuguuucaugguccaaagaaauccucaggacccaggagucagaaugcguuuguaucaauggaacuuguacaguaguaaugacugaugggagugcuucaggaaaagcugauacuaaaauauuauucauugaggagggaaaaaucguucauacuagcacauugucaggaagugcucagcaugucgaggagugcuccugcuauccucgauauccuggugucagaugugucugcagagacaacuggaaaggauccaauaggcccaucguagauauaaacauaaaggaucauagcauugucuccaguuauguguguucaggacucguuggagacacacccagaaaaaacgacagcuccagcaguagccauuguuuggauccuaacaaugaggaagguggucauggggugaaaggcugggccuuugaugauggaaaugacguguggaugggaagaacgaucagcgagaagucacgcuuaggguaugaaaccuucaaagucauugaaggcugguccaacccuaaguccaaauugcagauaaauaggcaagucauaguugacagagguaauagguccgguuauucugguauuuucucuguugaaggcaaaagcugcaucaaucggugcuuuuauguggaguugauaaggggaagaaaagaggaaacugaagucuuguggaccucaaacaguauuguuguguuuuguggcaccucagguacauauggaacaggcucauggccugauggggcggacaucaaucucaugccuguauaa

SEQ ID NO: 53676 - RNA, 1410 nt, Artificial Sequence; identical to SEQ ID NO: 53647
  derived and/or modified CDS sequence (wt) from neuraminidase__InfluenzaA__AEY70270

SEQ ID NO: 53677 - RNA, 1410 nt, Artificial Sequence; identical to SEQ ID NO: 53647
  derived and/or modified CDS sequence (wt) from neuraminidase__InfluenzaA__AEY70281

SEQ ID NO: 53678 - RNA, 1410 nt, Artificial Sequence; identical to SEQ ID NO: 51263
  derived and/or modified CDS sequence (wt) from neuraminidase__InfluenzaA__AEY70303

SEQ ID NO: 53679 - RNA, 1410 nt, Artificial Sequence; identical to SEQ ID NO: 51263
  derived and/or modified CDS sequence (wt) from neuraminidase__InfluenzaA__AEY70314

SEQ ID NO: 53680 - RNA, 1410 nt, Artificial Sequence
  derived and/or modified CDS sequence (wt) from neuraminidase__InfluenzaA__AEY70325
augaauccaaaucaaaagauaauaacgauuggcucuguuucucucaccauuuccacaauaugcuucuucaugcaaauugccaucuugaugacuacuguaacauugcauuucaagcaauaugaauucaacccccccccaaacaaccaagugaugcugugugaaccaacaauaauagaaagaaacauaacagagauaguguaucugaccaacaccaccauagagaaggaaauaugccccaaacuagcagaauacagaaauuggucaaagccgcaaugugacauuacaggguuugcaccuuuuucuaaggacaauucgauuaggcuuuccgcugguggggacaucugggugacaagagaaccuuaugugucaugcgauccugacaaguguuaucaauuugcccuuggacagggaacaacacuaaacaacguacauucaaauaacacaguacgugauaggaccccuuaucggacccuauugaugaaugaguuagguguuccuuuucaucuggggaccaagcaagugugcauagcaugguccagcucaaguugucacgauggaaaagcauggcugcauguuuguauaacgggggaugauaaaaaugcaacugcuagcuucauuuacaaugggaggcuuguagauaguguuguuucaugguccaaagaaauccucaggacccaggagucagaaugcguuuguaucaauggaacuuguacaguaguaaugacugaugggagugcuucaggaaaagcugauacuaaaauauuauucauugaggagggaaaaaucguucauacuagcacauugucaggaagugcucagcaugucgaggagugcuccugcuauccucgauauccuggugucagaugugucugcagagacaacuggaaaggauccaauaggcccaucguagauauaaacauaaaggaucauagcauugucuccaguuauguguguucaggacuuguuggagacacacccagaaaaaacgacagcuccagcaguagccauuguuuggauccuaacaaugaggaagguggucauggggugaaaggcugggccuuugaugauggaaaugacguguggaugggaagaacgaucagcgagaagucacgcuuaggguaugaaaccuucaaagucauugaaggcugguccaacccuaaguccaaauugcagauaaauaggcaagucauaguugacagagguaauagguccgguuauucugguauuuucucuguugaaggcaaaagcugcaucaaucggugcuuuuauguggaguugauaaggggaagaaaagaggaaacugaagucuuguggaccucaaacaguauuguuguguuuuguggcaccucagguacauauggaacaggcucauggccugauggggcggacaucaaucucaugccuguauaa

SEQ ID NO: 53681 - RNA, 1410 nt, Artificial Sequence
  derived and/or modified CDS sequence (wt) from neuraminidase__InfluenzaA__AEY70336
augaauccaaaucaaaagauaauaacgauuggcucuguuucucucaccauuuccacaauaugcuucuucaugcaaauugccaucuugauaacuacuguaacauugcauuucaagcaauaugaauucaacucccccccaaacaaccaagugaugcugugugaaccaacaauaauagaaagaaacauaacagagauaguguaucugaccaacaccaccauagagaaggaaauaugccccaaacuagcagaauacagaaauuggucaaagccgcaaugugacauuacaggguuugcaccuuuuucuaaggacaauucgauuaggcuuuccgcugguggggacaucugggugacaagagaaccuuaugugucaugcgauccugacaaguguuaucaauuugcccuuggacagggaacaacacuaaacaacguacauucaaauaacacaguacgugauaggaccccuuaucggacccuauugaugaaugaguuagguguuccuuuucaucuggggaccaagcaagugugcauagcaugguccagcucaaguugucacgauggaaaagcauggcugcauguuuguauaacgggggaugauaaaaaugcaacugcuagcuucauuuacaaugggaggcuuguagauaguguuguuucaugguccaaagaaauccucaggacccaggagucagaaugcguuuguaucaauggaacuuguacaguaguaaugacugaugggagugcuucaggaaaagcugauacuaaaauauuauucauugaggagggaaaaaucguucauacuagcacauugucaggaagugcucagcaugucgaggagugcuccugcuauccucgauauccuggugucagauguaucugcagagacaacuggaaaggauccaauaggcccaucguagauauaaacauaaaggaucauagcauugucuccaguuauguguguucaggacuuguuggagacacacccagaaaaaacgacagcuccagcaguagccauuguuuggauccuaacaaugaggaagguggucauggggugaaaggcugggccuuugaugauggaaaugacguguggaugggaagaacgaucagcgagaagucacgcuuaggguaugaaaccuucaaagucauugaaggcugguccaauccuaaguccaaauugcagauaaauaggcaagucauaguugacagagguaauagguccgguuauucugguauuuucucuguugaagacaaaagcugcaucaaucggugcuuuuauguggaguugauaaggggaagaaaagaggaaacugaagucuuguggaccucaaacaguauuguuguguuuuguggcaccucagguacauauggaacaggcucauggccugauggggcggacaucaaucucaugccuguauaa

SEQ ID NO: 53682 - RNA, 1410 nt, Artificial Sequence; identical to SEQ ID NO: 48750
  derived and/or modified CDS sequence (wt) from neuraminidase__InfluenzaA__AEY70358

SEQ ID NO: 53683 - RNA, 1410 nt, Artificial Sequence
  derived and/or modified CDS sequence (wt) from neuraminidase__InfluenzaA__AEY70379
augaauccaaaucaaaagauaauaacgauuggcucuguuucucucaccauuuccacaauaugcuucuucaugcaaauugccaucuugauaacuacuguaacauugcauuucaagcaauaugaauucaacucccccccaaacaaccaagugaugcugugugaaccaacaauaauagaaagaaacauaacagagauaguguaucugaccaacaccaccauagagaaggaaauaugccccaaacuagcagaauacagaaauuggucaaagccgcaaugugacauuacaggguuugcaccuuuuucuaaggacaauucgauuaggcuuuccgcugguggggacaucugggugacaagagaaccuuaugugucaugcgauccugacaaguguuaucaauuugcccuuggacagggaacaacacuaaacaacguacauucaaauaacaccguacgugauaggaccccuuaucggacccuauugaugaaugaguuagguguuccuuuucaucuggggaccaagcaagugugcauagcaugguccagcucaaguugucacgauggaaaagcauggcugcauguuuguauaacgggggaugauaaaaaugcaacugcuagcuucauuuacaaugggaggcuuguagauaguguuguuucaugguccaaagaaauccucaggacccaggagucagaaugcguuuguaucaauggaacuuguacaguaguaaugacugaugggagugcuucaggaaaagcugauacuaaaauauuauucauugaggagggaaaaaucguucauacuagcacauugucaggaagugcucagcaugucgaggagugcuccugcuauccucgauauccuggugucagaugugucugcagagacaacuggaaaggauccaauaggcccaucguagauauaaacauaaaggaucauagcauugucuccaguuauguguguucaggacuuguuggagacacacccagaaaaaacgacagcuccagcaguagccauuguuuggauccuaacaaugaggaagguggucauggggugaaaggcugggccuuugaugauggaaaugacguguggaugggaagaacgaucagcgagaagucacgcuuaggguaugaaaccuucaaagucauugaaggcugguccaacccuaaguccaaauugcagauaaauaggcaagucauaguugacagagguaauagguccgguuauucugguauuuucucuguugaaggcaaaagcugcaucaaucggugcuuuuauguggaguugauaaggggaagaaaagaggaaacugaagucuuguggaccucaaacaguauuguuguguuuuguggcaccucagguacauauggaacaggcucauggccugauggggcggacaucaaucucaugccuauauaa

SEQ ID NO: 53684 - RNA, 1410 nt, Artificial Sequence
  derived and/or modified CDS sequence (wt) from neuraminidase__InfluenzaA__AFB70139
augaauccaaaccaaaagauaauaaccauugguucggucuguaugacaauuggaauggcuaacuuaauauuacaaauuggaaacauaaucucaauauggauuagccacucaauucaacuugggaaucaaaaucagauugaaacaugcaaucaaagcgucauuacuuaugaaaacaacacuuggguaaaucagacauauguuaacaucagcaacaccaacuuugcugcuggacagucagugguuuccgugaaauuagcgggcaauuccucucucugcccuguuaguggaugggcuauauacaguaaagacaacaguauaagaaucgguuccaagggggauguguuugucauaagggaaccauucauaucaugcucccccuuggaaugcagaaccuucuucuugacucaaggggccuugcuaaaugacaaacauuccaauggaaccauuaaagacaggagcccauaucgaacccuaaugagcuguccuauuggugaaguucccucuccauacaacucaagauuugagucagucgcuuggucagcaagugcuugucaugauggcaucaauuggcuaacaauuggaauuucuggcccagacaauggggcaguggcuguguuaaaguacaacggcauaauaacagacacuaucaagaguuggagaaacaauauauugagaacacaagagucugaaugugcauguguaaaugguucuugcuuuacuguaaugaccgauggaccaagugauggacaggccucauacaagaucuucagaauagaaaagggaaagauagucaaaucagucgaaaugaaugccccuaauuaucacuaugaggaaugcuccuguuauccugauucaagugaaaucacaugugugugcagggauaacuggcauggcucgaaucgaccgugggugucuuucaaccagaaucuggaauaucagauaggauacauaugcagugggauuuucggagacaauccacgcccuaaugauaagacaggcaguugugguccaguaucgucuaauggagcaaauggaguaaaaggauuuucauucaaauacggcaaugguguuuggauagggagaacuaaaagcauuaguucaagaaacgguuuugagaugauuugggauccgaacggauggacugggacagacaauaacuucucaacaaagcaagauaucguaggaauaaaugaguggucaggauauagcgggaguuuuguucagcauccagaacuaacagggcuggauuguauaagaccuugcuucuggguugaacuaaucagagggcgacccaaagagaacacaaucuggacuagcgggagcagcauauccuuuugugguguaaacagugacacuguggguuggucuuggccagacggugcugaguugccauuuaccauugacaaguaa

SEQ ID NO: 53685 - RNA, 1410 nt, Artificial Sequence; identical to SEQ ID NO: 48750
  derived and/or modified CDS sequence (wt) from neuraminidase__InfluenzaA__AFB70141

SEQ ID NO: 53686 - RNA, 1410 nt, Artificial Sequence
  derived and/or modified CDS sequence (wt) from neuraminidase__InfluenzaA__AFB70147
augaauccaaaccaaaagauaauaaccauugguucggucuguaugacaauuggaauggcuaacuuaauauuacaaauuggaaacauaaucucaauauggauuagccacucaauucaacuugggaaucaaaaucagauugaaacaugcaaucaaagcgucauuacuuaugaaaacaacacuuggguaaaucagacauauguuaacaucagcaacaccaacuuugcugcuggacagucagugguuuccgugaaauuagcgggcaauuccucucucugcccuguuaguggaugggcuauauacaguaaagacaacaguauaagaaucgguuccaagggggauguguuugucauaagggaaccauucauaucaugcucccccuuggaaugcagaaccuucuucuugacucaaggggccuugcuaaaugacaaacauuccaauggaaccauuaaagacaggagcccauaucgaacccuaaugagcuguccuauuggugaaguucccucuccauacaacucaagauuugagucagucgcuuggucagcaagugcuugucaugauggcaucaauuggcuaacaauuggaauuucuggcccagacaauggggcaguggcuguguuaaaguacaacggcauaauaacagacacuaucaagaguuggagaaacaauauauugagaacacaagagucugaaugugcauguguaaaugguucuugcuuuacuguaaugaccgauggaccaagugauggacaggccucauacaagaucuucagaauagaaaagggaaagauagucaaaucagucgaaaugaaugccccuaauuaucacuaugaggaaugcuccuguuauccugauucaagugaaaucacaugugugugcagggauaacuggcauggcucgaaucgaccgugggugucuuucaaccagaaucuggaauaucagauaggauacauaugcagugggauuuucggagacaauccacgcccuaaugauaagacaggcaguugugguccgguaucgucuaauggagcaaauggaguaaaaggauuuucauucaaauacggcaaugguguuuggauagggagaacuaaaagcauuaguucaagaaacgguuuugagaugauuugggauccgaacggauggacugggacagacaauaacuucucaacaaagcaagauaucguaggaauaaaugaguggucaggauauagcgggaguuuuguucagcauccagaacuaacagggcuggauuguauaagaccuugcuucuggguugaacuaaucagagggcgacccaaagagaacacaaucuggacuagcgggagcagcauauccuuuugugguguaaacagugacacuguggguuggucuuggccagacggugcugaguugccauuuaccauugacaaguaa

SEQ ID NO: 53687 - RNA, 1410 nt, Artificial Sequence; identical to SEQ ID NO: 48750
  derived and/or modified CDS sequence (wt) from neuraminidase__InfluenzaA__AFB70153

SEQ ID NO: 53688 - RNA, 1410 nt, Artificial Sequence; identical to SEQ ID NO: 48750
  derived and/or modified CDS sequence (wt) from neuraminidase__InfluenzaA__AFB70155

SEQ ID NO: 53689 - RNA, 1410 nt, Artificial Sequence
  derived and/or modified CDS sequence (wt) from neuraminidase__InfluenzaA__AFB70157
augaauccaaaccaaaagauaauaaccauugguucggucuguaugacaauuggaauggcuaacuuaauauuacaaauuggaaacauaaucucaauauggauuagccacucaauucaacuuggggaucaaaaucagauugaaacaugcaaucaaagcgucauuacuuaugaaaacaacacuuggguaaaucagacauauguuaacaucagcaacaccaacuuugcugcuggacagucagugguuuccgugaaauuagcgggcaauuccucucucugcccuguuaguggaugggcuauauacaguaaagacaacaguauaagaaucgguuccaagggggauguguuugucauaagggaaccauucauaucaugcucccccuuggaaugcagaaccuucuucuugacucaaggggccuugcuaaaugacaaacauuccaauggaaccauuaaagacaggagcccauaucgaacccuaaugagcugucccauuggugaaguucccucuccauacaacucaagauuugagucagucgcuuggucagcaagugcuugucaugauggcaucaauuggcuaacaauuggaauuucuggcccagacaauggggcaguggcuguguuaaaguacaacggcauaauaacagacacuaucaagaguuggagaaacaauauauugagaacacaagagucugaaugugcauguguaaaugguucuugcuuuacuguaaugaccgauggaccaagugauggacaggccucauacaagaucuucagaauagaaaagggaaagauagucaaaucagucgaaaugaaugccccuaauuaucacuaugaggaaugcuccuguuauccugauucuagugaaaucacaugugugugcagggauaacuggcauggcucgaaucgaccgugggugucuuucaaccagaaucuggaauaucagauaggauacauaugcagugggauuuucggagacaauccacgcccuaaugauaagacaggcaguugugguccaguaucgucuaauggagcaaauggaguaaaaggauuuucauucaaauacggcaaugguguuuggauagggagaacuaaaagcauuaguucaagaaacgguuuugagaugauuugggauccgaacggauggacugggacagacaauaacuucucaauaaagcaagauaucguaggaauaaaugaguggucaggauauagcgggaguuuuguucagcauccagaacuaacagggcuggauuguauaagaccuugcuucuggguugaacuaaucagagggcgacccaaagagaacacaaucuggacuagcgggagcagcauauccuuuugugguguaaacagugacacuguggguuggucuuggccagacggugcugaguugccauuuaccauugacaaguaa

SEQ ID NO: 53690 - RNA, 1410 nt, Artificial Sequence; identical to SEQ ID NO: 48750
  derived and/or modified CDS sequence (wt) from neuraminidase__InfluenzaA__AFB70159

SEQ ID NO: 53691 - RNA, 1410 nt, Artificial Sequence
  derived and/or modified CDS sequence (wt) from neuraminidase__InfluenzaA__AFB70161
augaauccaaaccaaaagauaauaaccauugguucggucuguaugacaauuggaauggcuaacuuaauauuacaaauuggaaacauaaucucaauauggauuagccacucaauucaacuugggaaucaaaaucagauugaaacaugcaaucaaagcgucauuacuuaugaaaacaacacuuggguaaaucagacauauguuaacaucagcaacaccaacuuugcugcuggacagucagugguuuccgugaaauuagcgggcaauuccucucucugcccuguuaguggaugggcuauauacaguaaagacaacaguauaagaaucgguuccaagggggauguguuugucauaagggaaccauucauaucaugcucccccuuggaaugcagaaccuucuucuugacucaaggggccuugcuaaaugacaaacauuccaauggaaccauuaaagacaggagcccauaucgaacccuaaugagcuguccuauuggugaaguucccucuccauacaacucaagauuugagucagucgcuuggucagcaagugcuugucaugauggcaucaauuggcuaacaauuggaauuucuggcccagacaauggggcaguggcuguguuaaaguacaacggcauaauaacagacacuaucaagaguuggagaaacaauauauugagaacacaagagucugaaugugcauguguaaaugguucuugcuuuacuguaaugaccgauggaccaagugauggacaggccucauacaagaucuucagaauagaaaagggaaagauagucaaaucagucgaaaugaaugccccuaauuaucacuaugaggaaugcuccuguuauccugauucaagugaaaucacaugugugugcagggauaacuggcauggcucgaaucgaccgugggugucuuucaaccagaaucuggaauaucagauaggauacauaugcagugggauuuucggagacaauccacgcccuaaugauaagacaggcaguugugguccaguaucgucuaauggagcaaauggaguaaaaggauuuucauucaaauacggcaaugguguuuggauagggagaacuaaaagcauuaguucaagaaacgguuuugagaugauuugggauccgaacggauggacugggacagacaauaacuucucaacaaagcaagauaucguaggaauaaaugaguggucaggauauagcgggaguuuuguucagcauccagaacuaacagggcuggauuguauaagaccuugcuucuggguugaacuaaucagagggcgacccaaagagaacacaaucuggacuagcgggagcagcauauccuuuugugguguaaacagugacacuguggguugguauuggccagacggugcugaguugccauuuaccauugacaaguaa

SEQ ID NO: 53692 - RNA, 1410 nt, Artificial Sequence
  derived and/or modified CDS sequence (wt) from neuraminidase__InfluenzaA__AFB70163
augaauccaaaccaaaagauaauaaccauugguucggucuguaugacaauuggaauggcuaacuuaauauuacaaauuggaaacauaaucucaauauggauuagccacucaauucaacuugggaaucaaaaucagauugaaacaugcaaucaaagcgucauuacuuaugaaaacaacacuuggguaaaucagacauauguuaacaucagcaacaccaacuuugcugcuggacagucagugguuuccgugaaauuagcgggcaauuccucucucugcccuguuaguggaugggcuauauacaguaaagacaacaguauaagaaucgguuccaagggggauguguuugucauaagggaaccauucauaucaugcucccccuuggaaugcagaaccuucuucuugacucaaggggccuugcuaaaugacaaacauuccaauggaaccauuaaagacaggagcccauaucgaacccuaaugagcuguccuauuggugaaguucccucuccauacaacucaagauuugagucagucgcuuggucagcaagugcuugucaugauggcaucaauuggcuaacaauuggaauuucuggcccagacaauggggcaguggcuguguuaaaguacaacggcauaauaacagacacuaucaagaguuggagaaacaauauauugagaacacaagagucugaaugugcauguguaaaugguucuugcuuuacuguaaugaccgauggaccaagugauggacaggccucauacaagaucuucagaauagaaaagggaaagauagucaaaucagucgaaaugaaugccccuaauuaucacuaugaggaaugcuccuguuauccugauucuagugaaaucacaugugugugcagggauaacuggcauggcucgaaucgaccgugggugucuuucaaccagaaucuggaauaucagauaggauacauaugcagugggauuuucggagacaauccacgcccuaaugauaagacaggcaguugugguccaguaucgucuaauggagcaaauggaguaaaaggauuuucauucaaauacggcaaugguguuuggauagggagaacuaaaagcauuaguucaagaaacgguuuugagaugauuugggauccgaacggauggacugggacagacaauaacuucucaauaaagcaagauaucguaggaauaaaugaguggucaggauauagcgggaguuuuguucagcauccagaacuaacagggcuggauuguauaagaccuugcuucuggguugaacuaaucagagggcgacccaaagagaacgcaaucuggacuagcgggagcagcauauccuuuugugguguaaacagugacacuguggguuggucuuggccagacggugcugaguugccauuuaccauugacaaguaa

SEQ ID NO: 53693 - RNA, 1410 nt, Artificial Sequence
  derived and/or modified CDS sequence (wt) from neuraminidase__InfluenzaA__AFB70169
augaauccaaaccaaaagauaauaaccauugguucggucuguaugacaauuggaauggcuaacuuaauauuacaaauuggaaacauaaucucaauauggauuaaccacucaauucaacuugggaaucaaaaucagauugaaacaugcaaucaaagcgucauuacuuaugaaaacaacacuuggguaaaucagacauauguuaacaucagcaacaccaacuuugcugcuggacagucagugguuuccgugaaauuagcgggcaauuccucucucugcccuguuaguggaugggcuauauacaguaaagacaacaguauaagaaucgguuccaagggggauguguuugucauaagggaaccauucauaucaugcucccccuuggaaugcagaaccuucuucuugacucaaggggccuugcuaaaugacaaacauuccaauggaaccauuaaagacaggagcccauaucgaacccuaaugagcuguccuauuggugaaguucccucuccauacaacucaagauuugagucagucgcuuggucagcaagugcuugucaugauggcaucaauuggcuaacaauuggaauuucuggcccagacaauggggcaguggcuguguuaaaguacaacggcauaauaacagacacuaucaagaguuggagaaacaauauauugagaacacaagagucugaaugugcauguguaaaugguucuugcuuuacuguaaugaccgauggaccaagugauggacaggccucauacaagaucuucagaauagaaaagggaaagauagucaaaucagucgaaaugaaugccccuaauuaucacuaugaggaaugcuccuguuauccugauucuagugaaaucacaugugugugcagggauaacuggcauggcucgaaucgaccgugggugucuuucaaccagaaucuggaauaucagauaggauacauaugcagugggauuuucggagacaauccacgcccuaaugauaagacaggcaguugugguccaguaucgucuaauggagcaaauggaguaaaaggauuuucauucaaauacggcaaugguguuuggauagggagaacuaaaagcauuaguucaagaaacgguuuugagaugauuugggauccgaacggauggacugggacagacaauaacuucucaauaaagcaagauaucguaggaauaaaugaguggucaggauauagcgggaguuuuguucagcauccagaacuaacagggcuggauuguauaagaccuugcuucuggguugaacuaaucagagggcgacccaaagagaacacaaucuggacuagcgggagcagcauauccuuuugugguguaaacagugacacuguggguuggucuuggccagacggugcugaguugccauuuaccauugacaaguaa

SEQ ID NO: 53694 - RNA, 1410 nt, Artificial Sequence; identical to SEQ ID NO: 48750
  derived and/or modified CDS sequence (wt) from neuraminidase__InfluenzaA__AFB70199

SEQ ID NO: 53695 - RNA, 1410 nt, Artificial Sequence; identical to SEQ ID NO: 49912
  derived and/or modified CDS sequence (wt) from neuraminidase__InfluenzaA__AFB70209

SEQ ID NO: 53696 - RNA, 1410 nt, Artificial Sequence; identical to SEQ ID NO: 48750
  derived and/or modified CDS sequence (wt) from neuraminidase__InfluenzaA__AFB70219

SEQ ID NO: 53697 - RNA, 1410 nt, Artificial Sequence; identical to SEQ ID NO: 48750
  derived and/or modified CDS sequence (wt) from neuraminidase__InfluenzaA__AFB70229

SEQ ID NO: 53698 - RNA, 1410 nt, Artificial Sequence; identical to SEQ ID NO: 48750
  derived and/or modified CDS sequence (wt) from neuraminidase__InfluenzaA__AFB70239

SEQ ID NO: 53699 - RNA, 1410 nt, Artificial Sequence; identical to SEQ ID NO: 48750
  derived and/or modified CDS sequence (wt) from neuraminidase__InfluenzaA__AFB70249

SEQ ID NO: 53700 - RNA, 1410 nt, Artificial Sequence
  derived and/or modified CDS sequence (wt) from neuraminidase__InfluenzaA__AFB70259
augaauccaaaccaaaagauaauaaccauugguucggucuguaugacaauuggaauggcuaacuuaauauuacaaauuggaaacauaaucucaauauggauuagccacucaauucaacuugggaaucaaaaucagauugaaacaugcaaucaaagcgucauuacuuaugaaaacaacacuuggguaaaucagacauauguuaacaucagcaacaccaacuuugcugcuggacagucagugguuuccgugaaauuagcgggcaauuccucucucugcccuguuaguggaugggcuauauacaguaaagacaacaguauaagaaucgguuccaagggggauguguuugucauaagggaaccauucauaucaugcucccccuuggaaugcagaaccuucuucuugacucaaggggccuugcuaaaugacaaacauuccaauggaaccauuaaagacaggagcccauaucgaacccuaaugagcuguccuauuggugaaguucccucuccauacaacucaagauuugagucagucgcuuggucagcaagugcuugucaugauggcaucaauuggcuaacaauuggaauuucuggcccagacaauggggcaguggcuguguuaaaguacaacggcauaauaacagacacuaucaagaguuggagaaacaauauauugagaacacaagagucugaaugugcauguguaaaugguucuugcuuuacuguaaugaccgauggaccaagugauggacaggccucauacaagaucuucagaauagaaaagggaaagauagucaaaucagucgaaaugaaugccccuaauuaucacuaugaggaaugcuccuguuaucccgauucuagugaaaucacaugugugugcagggauaacuggcauggcucgaaucgaccgugggugucuuucaaccagaaucuggaauaucagauaggauacauaugcagugggauuuucggagacaauccacgcccuaaugauaagacaggcaguugugguccaguaucgucuaauggagcaaauggaguaaaaggauuuucauucaaauacggcaaugguguuuggauagggagaacuaaaagcauuaguucaagaaacgguuuugagaugauuugggauccgaacggauggacugggacagacaauaacuucucaauaaagcaagauaucguaggaauaaaugaguggucaggauauagcgggaguuuuguucagcauccagaacuaacagggcuggauuguauaagaccuugcuucuggguugaacuaaucagagggcgacccaaagagaacacaaucuggacuagcgggagcagcauauccuuuugugguguaaacagugacacuguggguuggucuuggccagacggugcugaguugccauuuaccauugacaaguaa

SEQ ID NO: 53701 - RNA, 1410 nt, Artificial Sequence; identical to SEQ ID NO: 53689
  derived and/or modified CDS sequence (wt) from neuraminidase__InfluenzaA__AFB70269

SEQ ID NO: 53702 - RNA, 1410 nt, Artificial Sequence; identical to SEQ ID NO: 48750
  derived and/or modified CDS sequence (wt) from neuraminidase__InfluenzaA__AFB70279

SEQ ID NO: 53703 - RNA, 1410 nt, Artificial Sequence; identical to SEQ ID NO: 53700
  derived and/or modified CDS sequence (wt) from neuraminidase__InfluenzaA__AFB70289

SEQ ID NO: 53704 - RNA, 1410 nt, Artificial Sequence
  derived and/or modified CDS sequence (wt) from neuraminidase__InfluenzaA__AFB70299
augaauccaaaccaaaagauaauaaccauugguucggucuguaugacaauuggaauggcuaacuuaauauuacaaauuggaaacauaaucucaauauggauuagccacucaauucaacuugggaaucaaaaucagauugaaacaugcaaucaaagcgucauuacuuaugaaaacaacacuuggguaaaucagacauauguuaacaucagcaacaccaacuuugcugcuggacagucagugguuuccgugaaauuagcgggcaauuccucucucugcccuguuaguggaugggcuauauacaguaaagacaacaguauaagaaucgguuccaagggggauguguuugucauaagggaaccauucauaucaugcucccccuuggaaugcagaaccuucuucuugacucaaggggccuugcuaaaugacaaacauuccaauggaaccauuaaagacaggagcccauaucgaacccuaaugagcuguccuauuggugaaguucccucuccauacaacucaagauuugagucagucgcuuggucagcaagugcuugucaugauggcaucaauuggcuaacaauuggaauuucuggcccagacaauggggcaguggcuguguuaaaguacaacggcauaauaacagacacuaucaagaguuggagaaacaauauauugagaacacaagagucugaaugugcauguguaaaugguucuugcuuuacuguaaugaccgauggaccaagugauggacaggccucauacaagaucuucagaauagaaaagggaaaaauagucaaaucagucgaaaugaaugccccuaauuaucacuaugaggaaugcuccuguuauccugauucuagugaaaucacaugugugugcagggauaacuggcaugguucgaaucgaccgugggugucuuucaaccagaaucuggaauaucagauaggauacauaugcagugggauuuucggagacaauccacgcccuaaugauaagacaggcaguugugguccaguaucgucuaauggagcaaauggaguaaaaggauuuucauucaaauacggcaaugguguuuggauagggagaacuaaaagcauuaguucaagaaacgguuuugagaugauuugggauccgaacggauggacugggacagacaauaacuucucaauaaagcaagauaucguaggaauaaaugaguggucaggauauagcgggaguuuuguucagcauccagaacuaacagggcuggauuguauaagaccuugcuucuggguugaacuaaucagagggcgacccaaagagaacacaaucuggacuagcgggagcagcauauccuuuugugguguaaacagugacacuguggguuggucuuggccagacggugcugaguugccauuuaccauugacaaguaa

SEQ ID NO: 53705 - RNA, 1410 nt, Artificial Sequence; identical to SEQ ID NO: 48750
  derived and/or modified CDS sequence (wt) from neuraminidase__InfluenzaA__AFB70309

SEQ ID NO: 53706 - RNA, 1410 nt, Artificial Sequence; identical to SEQ ID NO: 53684
  derived and/or modified CDS sequence (wt) from neuraminidase__InfluenzaA__AFB70319

SEQ ID NO: 53707 - RNA, 1410 nt, Artificial Sequence; identical to SEQ ID NO: 48750
  derived and/or modified CDS sequence (wt) from neuraminidase__InfluenzaA__AFB70329

SEQ ID NO: 53708 - RNA, 1410 nt, Artificial Sequence; identical to SEQ ID NO: 49943
  derived and/or modified CDS sequence (wt) from neuraminidase__InfluenzaA__AFB70349

SEQ ID NO: 53709 - RNA, 1410 nt, Artificial Sequence; identical to SEQ ID NO: 49771
  derived and/or modified CDS sequence (wt) from neuraminidase__InfluenzaA__AFB70359

SEQ ID NO: 53710 - RNA, 1410 nt, Artificial Sequence; identical to SEQ ID NO: 49943
  derived and/or modified CDS sequence (wt) from neuraminidase__InfluenzaA__AFB70369

SEQ ID NO: 53711 - RNA, 1410 nt, Artificial Sequence; identical to SEQ ID NO: 49938
  derived and/or modified CDS sequence (wt) from neuraminidase__InfluenzaA__AFB70379

SEQ ID NO: 53712 - RNA, 1410 nt, Artificial Sequence; identical to SEQ ID NO: 48750
  derived and/or modified CDS sequence (wt) from neuraminidase__InfluenzaA__AFB70389

SEQ ID NO: 53713 - RNA, 1410 nt, Artificial Sequence; identical to SEQ ID NO: 49943
  derived and/or modified CDS sequence (wt) from neuraminidase__InfluenzaA__AFB70399

SEQ ID NO: 53714 - RNA, 1410 nt, Artificial Sequence; identical to SEQ ID NO: 48750
  derived and/or modified CDS sequence (wt) from neuraminidase__InfluenzaA__AFB70409

SEQ ID NO: 53715 - RNA, 1410 nt, Artificial Sequence
  derived and/or modified CDS sequence (wt) from neuraminidase__InfluenzaA__AFB77614
augcauccaaaccaagaggucauaagcauuguuucggucuguaugacaauuggaauggcuaacuuaauauuacaaauuggaaacauaaucucaauauggauuagccacucaauucaacuugggaaucaaaaucagauugaaacaugcaaucaaagcgucauuacuuaugaaaacaacacuuggguaaaucagacauauguuaacaucagcaacaccaacuuugcugcuggacagucagugguuuccgugaaauuagcgggcaauuccucucucugcccuguuaguggaugggcuauauacaguaaagacaacaguauaaggaucgguuccaagggggauguguuugucauaagggagccauucauaucaugcucccccuuggaaugcagaaccuuuuucuugacucaaggggccuugcuaaaugacaaacauuccaauggaaccauuaaagacaggagcccauaucgaacccuaaugagcuguccuauuggugaaguucccucuccauacaacucaagauuugagucagucgcuuggucagcaagugcuugucaugauggcaucaauuggcuaacaauuggaauuucuggcccagacaauggggcaguggcuguguuaaaguacaacggcauaauaacagacacuaucaagaguuggagaaacaauauauugagaacacaagagucugaaugugcauguguaaaugguucuugcuuuaccauaaugaccgauggaccaagugauggacaggccucauacaagaucuucagaauagaaaagggaaagauagucaaaucagucgaaaugaaugccccuaauuaucacuaugaggaaugcuccuguuauccugauucuagugaaaucacaugugugugcagggauaacuggcauggcucgaaucgaccgugggugucuuucaaccagaaucuggaauaucagauaggauacauaugcagugggauuuucggagacaauccacgcccuaaugauaagacaggcaguugugguccaguaucgucuaauggagcaaauggaguaaaaggauuuucauucaaauacggcaaugguguuuggauagggagaacuaaaagcauuaguucaagaaaagguuuugagaugauuugggauccaaacggauggacugggacagacaauaacuucucaauaaagcaagauaucguaggaauaaaugaguggucaggauauagcgggaguuuuguucagcauccagaacuaacagggcuggacuguauaagaccuugcuucuggguugaacuaaucagagggcgacccaaagagaacacaaucuggacuagugggagcagcauauccuuuugugguguaaacagugacacuguggguugguuuuggccagacggugcugaguugccauuuaccauugacaaguaa

SEQ ID NO: 53716 - RNA, 1410 nt, Artificial Sequence
  derived and/or modified CDS sequence (wt) from neuraminidase__InfluenzaA__AFB77615
augcauccaaaccaagagauuauaaccuuuguuucggucuguaugacaauuggaauggcuaacuuaauauuacaaauuggaaacauaaucucaauauggauuagccacucaauucaacuugggaaucaaaaucagauugaaacaugcaaucaaagcgucauuacuuaugaaaacaacacuuggguaaaucagacauauguuaacaucagcaacaccaacuuugcugcuggacagucagugguuuccgugaaauuagcgggcaauuccucucucugcccuguuaguggaugggcuauauacaguaaagacaacaguauaagaaucgguuccaagggggauguguuugucauaagggagccauucauaucaugcucccccuuggaaugcagaaccuucuucuugacucaaggggccuugcuaaaugacaaacauuccaauggaaccauuaaagacaggagcccauaucgaacccuaaugagcuguccuauuggugaaguucccucuccauacaacucaagauuugagucagucgcuuggucagcaagugcuugucaugauggcaucaauuggcuaacaauuggaauuucuggcccagacaauggggcaguggcuguguuaaaguacaacggcauaauaacagacacuaucaagaguuggagaaacaauauauugagaacacaagagucugaaugugcauguguaaaugguucuugcuuuaccauaaugaccgauggaccaagugaugggcaggccucauacaagaucuucagaauagaaaagggaaagauagucaaaucagucgaaaugaaugccccuaauuaucacuaugaggaaugcuccuguuauccugauucuagugaaaucacaugugugugcagggauaacuggcauggcucgaaucgaccgugggugucuuucaaccagaaucuggaauaucagauaggauacauaugcagugggauuuucggagacaauccacgcccuaaugauaagacaggcaguugugguccaguaucgucuaauggagcaaauggaguaaaaggauuuucauucaaauacggcaaugguguuuggauagggagaacuaaaagcauuaguucaagaaaagguuuugagaugauuugggauccaaacggauggacugggacagacaauaacuucucaauaaagcaagauaucguaggaauaaaugaguggucaggauauagcgggaguuuuguucagcauccagaacuaacagggcuggacuguauaagaccuugcuucuggguugaacuaaucagagggcgacccaaagagaacacaaucuggacuagugggagcagcauauccuuuugugguguaaacagugacacuguggguuggucuuggccagacggugcugaguugccauuuaccauugacaaguaa

SEQ ID NO: 53717 - RNA, 1410 nt, Artificial Sequence
  derived and/or modified CDS sequence (wt) from neuraminidase__InfluenzaA__AFB78128
augaauccaaaucaaaagauaauaacgauuggcucuguuucucucacuauugccacaauaugcuuccuuaugcaaauagucauccugguaacuacuguaacauugcauuucaagcaacaugaaugcaacucccccccaaacaaccaaguaaugcugugugaaccaacaauaauagaaagaaacauaacagagauaguguaucugaccaacaccaccauagagaaggaaauaugccccaaacuagcagaauacagaaauuggucaaagccgcaauguaaaauuacaggauuugcaccuuuuucuaaggauaauucaauucggcuuuccgcugguggggacauuugggugacaagagaaccuuaugugucaugcgauccugacaaguguuaucaauuugcccuuggacagggaacaacacuaaacaacaggcauucaaaugacacaguacaugauaggaccccuuaucgaacccuauugaugaaugaguuggguguuccauuucauuugggaaccaagcaaguguguauagcaugguccagcucaaguugucacgauggaaaagcauggcugcauguuuguguaacugggcaugaugaaaaugcaacugcuagcuucauuuacgaugggagacuuguagauaguauugguucaugguccaaaaaaauccucaggacccaggagucggaaugcguuuguaucaauggaacuuguacaguaguaaugacugaugggagugcuucaggaagagcugauacuaaaauacuuuucauugaggaggggaaaaucguucauacuagcaaauugucaggaagugcucagcaugucgaggagugcuccuguuauccucgauauccuggugucagaugugucugcagagacaacuggaaaggcuccaauaggcccaucguagauauaaauguaaaggauuauagcauuguuuccaguuaugugugcucaggacuuguuggagacacacccagaaaaaacgacagcuccagcaguagccauugccuggauccuaacaaugaagaagggggucauggagugaaaggcugggccuuugaugauggaaaugacguguggaugggaagaacgaucagcgagaagucacgcucagguuaugaaaccuucaaggucauugaaggcugguccaaaccuaacuccaaauugcagauaaauaggcaagucauaguugaaagagguaauauguccgguuauucugguauuuucucuguugaaggcaaaagcugcaucaaucggugcuuuuauguggaguugauaaggggaaggaaacaggaaacugaagucugguggaccucaaacaguauuguuguguuuuguggcaccucagguacauauggaacaggcucauggccugauggggcggacaucaaucucaugccuauauaa

SEQ ID NO: 53718 - RNA, 1410 nt, Artificial Sequence
  derived and/or modified CDS sequence (wt) from neuraminidase__InfluenzaA__AFC62078
augaauccaaaccaaaagauaauaaccauugguucggucuguaugacaauuggaauggcuaacuuaauauuacaaauuggaaacauaaucucaauauggauuagccacucaauucaacuugggaaucaaagucagauugaaacaugcaaucaaagcgucauuacuuaugaaaacaacacuuggguaaaucagacauauguuaacaucagcaacaccaacuuugcugcuggacagucagugguuuccgugaaauuagcgggcaauuccucucucugcccuguuaguggaugggcuauauacaguaaagacaacaguauaagaaucgguuccaagggggauguguuugucauaagggaacuauucauaucaugcucccccuuggaaugcagaaccuucuucuugacucaaggggccuugcuaaaugacaaacauuccaauggaaccauuaaagacaggagcccauaucgaacccuaaugagcuguccuauuggugaaguucccucuccauacaacucaagauuugagucagucgcuuggucagcaagugcuugucaugauggcaucaauuggcuaacaauuggaauuucuggcccagacaauggggcaguggcuguguuaaaguacaacggcauaauaacagacacuaucaagaguuggagaaacgauauauugagaacacaagagucugaaugugcauguguaaaugguucuugcuuuaccauaaugaccgauggaccaagugauggacaggccucauacaagaucuucagaauagaaaagggaaagauagucaaaucagucgaaaugaaugccccuaauuaucacuaugaggaaugcuccuguuauccugauucuagugaaaucacaugugugugcagggauaacuggcauggcucgaaucgaccgugggugucuuucaaccagaaucuggaauaucagauaggauacauaugcagugggauuuucggagacaauccacgcccuaaugauaagacaggcaguugugguccaguaucgucuaauggagcaaauggaguaaaaggauuuucauucaaauacggcaaugguguuuggauagggagaacuaaaagcauuaguucaagaaaagguuuugagaugauuugggauccaaacggauggacugggacagacaauaacuucucaauaaagcaagauaucguaggaauaaaugaguggucaggauauagcgggaguuuuguucagcauccagaacuaacagggauggauuguauaagaccuugcuucuggguugaacuaaucagagggcgacccaaagagaacacaaucuggacuagcgggagcagcauauccuuuugugguguaaacagugacacuguggguuggucuuggccagacggugcugaguugccauuuaccauugacaaguaa

SEQ ID NO: 53719 - RNA, 1410 nt, Artificial Sequence
  derived and/or modified CDS sequence (wt) from neuraminidase__InfluenzaA__AFC62079
augaauccaaaccaaaagauaauaaccauugguucggucuguaugacaauuggaauggcuaacuuaauauuacaaauuggaaacauaaucucaauauggauuagccacucaauucaacuugggaaucaaaaucagauugaaacaugcaaucaaagcgucauuacuuaugaaaacaacacuuggguaaaucagacauauguuaacaucagcaacaccaacuuugcugcuggacagucagugguuuccgugaaauuagcgggcaauuccucucucugcccuguuaguggaugggcuauauacaguaaagacaacaguauaagaaucgguuccaagggggauguguuugucauaagggaaccauucauaucaugcucccccuuggaaugcagaaccuucuucuugacucaaggggccuugcuaaaugacaaacauuccaauggaaccauuaaagacaggagcccauaucgaacccuaaugagcuguccuauuggugaaguucccucuccauacaacucaagauuugagucagucgcuuggucagcaagugcuugucaugauggcaucaauuggcuaacaauuggaauuucuggcccagacaauggggcaguggcuguguuaaaguacaacggcauaauaacagacacuaucaagaguuggagaaacaauauauugagaacacaagagucugaaugugcauguguaaaugguucuugcuuuacuguaaugaccgauggaccaagugauggacaggccucauacaagaucuucagaauagaaaagggaaagauaaucaaaucagucgaaaugaaugccccuaauuaucacuaugaggaaugcuccuguuauccugauucuagugaaaucacaugugugugcagggauaacuggcauggcucgaaucgaccgugggugucuuucaaccagaaucuggaauaucagauaggauacauaugcagugggauucucggagacaauccacgcccuaaugauaagacaggcaguugugguccaguaucaucuaauggagcaaauggaguaaaaggauuuucauucaaauacggcaaugguguuuggguagggagaacuaaaagcauuaguucaagaaacgguuuugagaugauuugggauccgaacggauggacugggacagacaauaacuucucaauaaagcaagauaucguaggaauaaaggaguggucaggauauagcgggaguuuuguucagcauccagaacuaacagggcuggauuguauaagaccuugcuucuggguugaacuaaucagagggcgacccaaagagaacacaaucuggacuagcgggagcaucauauccuuuugugguguaaacagugacacuguggguuggucuuggccagacggugcugaguugccauuuaccauugacaaguaa

SEQ ID NO: 53720 - RNA, 1410 nt, Artificial Sequence
  derived and/or modified CDS sequence (wt) from neuraminidase__InfluenzaA__AFC62080
augaauccaaaccaaaagauaauaaccauugguucggucuguaugacaauuggaauggccaacuuaauauuacaaauuggaaacauaaucucaauauggauuagccacucaauucaacuugggaaucaaagucagauugaaacaugcaaucaaagcgucauuacuuaugaaaacaacacuuggguaaaucagacauauguuaacaucagcaacaccaacuuugcugcuggacagucagugguuuccgugaaauuagcgggcaauuccucucucugcccuguuaguggaugggcuauauacaguaaagacaacaguauaagaaucgguuccaagggggauguguuugucauaagggaaccauucauaucaugcucccccuuggaaugcagaaccuucuucuugacucaaggggccuugcuaaaugauaaacauuccaauggaaccauuaaagacaggagcccauaucgaacccuaaugagcuguccuauuggugaaguucccucuccauacaacucaagauuugagucagucgcuuggucagcaagugcuugucaugauggcaucaauuggcuaacaauuggaauuucuggcccagacaauggggcaguggcuguguuaaaguacaacggcauaauaacagacacuaucaagaguuggagaaacaauauauugagaacacaagagucugaaugugcauguguaaaugguucuugcuuuaccauaaugaccgauggaccaagugauggacaggccucauacaagaucuucagaauagaaaagggaaagauagucaaaucagucgaaaugaaugccccuaauuauuacuaugaggaaugcuccuguuauccugauucuagugaaaucacaugugugugcagggauaacuggcauggcucgaaucgaccgugggugucuuucaaccagaaucuggaauaucagauaggauacauaugcagugggauuuucggagacaauccacgcccuaaugauaagacaggcaguugugguccaguaucgucuaauggagcaaauggaguaaaaggauuuucauucaaauacggcaaugguguuuggauagggagaacuaaaagcauuaguucaagaaaagguuuugagaugauuugggauccaaacggauggacugggacagacaauaacuucucaauaaagcaagauaucgugggaauaaaugaguggucaggauauagcgggaguuuuguucagcauccagaacuaacagggauggguuguauaagaccuugcuucuggguugaacuaaucagagggcgacccaaagagaacacaaucuggacuagcgggagcagcauauccuuuugugguguaaacagugacacuguggguuggucuuggccagacggugcugaguugccauuuaccauugacaaguaa

SEQ ID NO: 53721 - RNA, 1410 nt, Artificial Sequence
  derived and/or modified CDS sequence (wt) from neuraminidase__InfluenzaA__AFC62082
augaauccaaaccaaaagauaauaacgauuggcucuguuucccucaccauuuccacaauaugcuucuucaugcaaauugccaucuugauaacuacuguaacauugcauuucaagcaauaugaauucaacucccccccaaacaaccaagugaugcugugugaaccaacaauaauagaaagaaacauaacagagauaguguaucugaccaacaccaccauagagaaggaaauaugccccaaacuagcggaauacagaaauuggucaaagccgcaaugugacauuacaggauuugcaccuuuuucuaaggacaauucgauuaggcuuuccgcugguggggacaucugggugacaagagaaccuuaugugucaugcgauccuaacaaguguuaucaauuugcccuuggacaaggaacaacacuaaacaacgugcauucaaauaacacaguacgugguaggaccccuuaucggacccuauugaugaaugaguuagguguuccuuuucaucuggggaccaagcaagugugcauagcaugguccagcucaaguugucacgauggaaaagcauggcugcauguuuguauaacgggggacgauaaaaaugcaacugcuagcuucauuuacaaugggaggcuuguagauaguguuguuucaugguccaaagaaauccucaggacccaggagucagaaugcguuuguaucaauggaacuuguacaguaguaaugacugaugggagugcuucaggaaaagcugauacuaaaauacuauucaucgaggaggggaaaaucguucauacuagcacauugucaggaagugcucaacaugucgaggagugcuccugcuauccucgauauccuggugucagaugugucugcagagacaacuggaaaggcuccaauaggcccaucguagauauaaacaugaaggaucauagcauuguuuccaguuauguguguucaggacuuguuggagacacacccagaaaaaacgacagcuccagcaguagccauuguuuugauccuaacgaugaagaagguggucauggagugaaaggcugggccuuugaugauggaaaugacguguggaugggaagaacgaucagcgagaagucacgcuuaggguaugaaaccuucaaagucauugaaggcugguccaacccuaaguccaaauugcagauaaauaggcaagucauaguugacagaggugauagguccgguuauucugguauuuucucuguugaaggcaaaagcugcaucaaucggugcuuuuauguggaguugauaaggggaaguaaagaggaaacugaaguauuguggaccucaaacaguauuguuguguuuuguggcaccucagggacauauggaacaggcucauggccugauggggcggacaucaaucucaugccuauauaa

SEQ ID NO: 53722 - RNA, 1410 nt, Artificial Sequence; identical to SEQ ID NO: 46784
  derived and/or modified CDS sequence (wt) from neuraminidase__InfluenzaA__AFD63529

SEQ ID NO: 53723 - RNA, 1410 nt, Artificial Sequence; identical to SEQ ID NO: 46784
  derived and/or modified CDS sequence (wt) from neuraminidase__InfluenzaA__AFD63540

SEQ ID NO: 53724 - RNA, 1410 nt, Artificial Sequence
  derived and/or modified CDS sequence (wt) from neuraminidase__InfluenzaA__AFD63551
augaauccaaaucaaaagauaauaacaauuggcucuguuucucucaccauugccgcaauaugcuuccuuaugcaaauugccauccugguaacuacuguaacauugcauuucaagcagcaugaaugcaacccccccccaaacaaccaaguaaugcugugugaaccaacaauaauagaaagaaacauaacagagauaguguaucugaccaacaccaccauagagaaggaaauaugccccaaacuagcagaauacagaaauuggucaaagccgcaauguaacauuacaggauuugcaccuuuuucuaaggacaauucgauucggcuuuccgcugguggggacaucugggugacaagagaaccuuaugugucaugcgauccugacaaguguuaucaauuugcccuuggacagggaacaacacuaaacaacgggcauucaaaugacacaguacaugguaggaccccuuaccggacccuauugaugaaugaauuggguguuccauuucauuugggaaccaggcaagugugcauagcaugguccagcucaaguugucacgauggaaaagcguggcugcauguuuguguaacuggggaugauaaaaaugcaacugcuagcuucauuuacaaugggaggcuuguagauaguauugguucaugguccaaaaaaauacucagaacccaggagucggaaugcguuuguaucaauggaacuuguacagugguaaugacugauggaagcgcuucaggaaaagcugauacuaaaauacuauucauugaggaggggaaaaucguucauauuagcacauugucaggaagugcucagcaugucgaggagugcuccuguuauccucgauauccuggugucagaugugucugcagagacaacuggaaaggcuccaauaggcccauuguagauauaaauguaaaggauuauagcauuguuuccaguuaugugugcucaggacuuguuggagacacacccagaaaaaacgacagcuucagcaguagccauugccuagauccuaacaaugaggaagguggucauggagugaaaggcugggccuuugaugauggaaaugacguguggaugggaagaacgaucagcgagaaguuacgcucagguuaugaaaccuucaaagucaucgaaggcugguccaaaccuaacuccaaauuacagauaaauaggcaaguuauaguugaaagagguaacagguccgguuauucugguauuuucuccguugaaggcaaaagcugcaucaaucggugcuuuuauguggaguugauaaggggaaggaaagaggaaacugaagucugguggaccucaaacaguauuguuguguuuuguggcaccucagguacauauggaacaggcucauggccugauggggcggauaucaaucucaugccgauauaa

SEQ ID NO: 53725 - RNA, 1410 nt, Artificial Sequence; identical to SEQ ID NO: 46784
  derived and/or modified CDS sequence (wt) from neuraminidase__InfluenzaA__AFD63562

SEQ ID NO: 53726 - RNA, 1410 nt, Artificial Sequence
  derived and/or modified CDS sequence (wt) from neuraminidase__InfluenzaA__AFD63573
augaauccaaaucaaaagauaauaacaauuggcucuguuucucucacuauugccacaauaugcuuccuuaugcaaauugccauccugguaacuacuguaacauugcauuucaagcagcaugaaugcaacucccccccaaacaaccaaguaaugcugugugaaccaacaauaauaggaagaaacauaacagagauaguguaucugaccaacaccaccauagagaaggaaauaugccccaaacuagcagaauacagaaauuggucaaagccgcaauguaacauuacaggauuugcaccuuuuucuaaggacaauucgauucggcuuuccgcugguggggacaucugggugacaagagaaccuuaugugucaugcgacccugacaaguguuaucaauuugcccuugggcagggaacaacacuaaacaacgggcauucaaaugacacaguacaugauaggaccccuuaccggacccuauugaugaaugaauuggguguuccauuucauuugggaaccaggcaagugugcauagcaugguccagcucaaguugucacgauggaaaagcguggcugcauguuuguguaacuggggaugauaaaaaugcaacugcuagcuucauuuacaaugggaggcuuguagauaguauugguucaugguccaaaaaaauacucagaacccaggagucggaaugcguuuguaucaauggaacuuguacaguaguaaugacugaugggagcgcuucaggaaaagcugauacuaaaauacuauucauugaggaggggaaaaucguucauauuagcacauugucaggaagugcucagcaugucgaggagugcuccuguuauccucgauauccuggugucagaugugucugcagagacaacuggaaaggcuccaauaggcccauuguagauauaaauguaaaggauuauagcauuguuuccaguuaugugugcucaggacuuguuggagacacacccagaaaaaacgacagcuucagcaguagccauugccuagauccuaacaaugaggaagguggucauggagugaaaggcugggccuuugaugauggaaaugacguguggaugggaagaacgaucagcgagaaguuacgcucagguuaugaaaccuucaaagucaucgaaggcugguccaaaccuaacuccaaauuacagauaaauaggcaaguuauaguugaaagagguaacagguccgguuauucugguauuuucuccguugaaggcaaaagcugcaucaaucggugcuuuuauguggaguugauaaggggaaggaaagaggaaacugaagucugguggaccucaaacaguauuguuguguuuuguggcaccucagguacauauggaacaggcucauggccugauggggcggauaucaaucucaugccuauauaa

SEQ ID NO: 53727 - RNA, 1410 nt, Artificial Sequence
  derived and/or modified CDS sequence (wt) from neuraminidase__InfluenzaA__AFD63584
augaauccaaaucaaaagauaauaacaauuggcucuguuucucucaccauugccacaauaugcuuccuuaugcaaauugccauccugguaacuacuguaacauugcauuucaagcaguaugaaugcaacucccccccaaacaaccaaguaaugcugugugaaccaacaauaauagaaagaaacauaacagagauaguguaucugaccaauaccacuauagagaaggaaauaugccccaaauuagcagaauacagaaauuggucaaagccgcaauguaacauuacaggauuugcaccuuuuucuaaggacaauucgauucggcuuuccgcugguggggacaucugggugacaagagagccuuaugugucaugcgauccugacaaguguuaucaauuugcccuugggcagggaacaacacuaaacaacggacauucaaaugacacaguacaugaaaggaccccuuaccggacccuacugaugaaugaauuggguguuccauuucauuugggaaccaggcaaguguguauagcaugguccagcucaaguugucacgauggaaaagcauggcugcauguuuguguaacuggggaugauaaaaaugcaacugcuaguuucauuuacaaugggaggcuuguagauaguauugguucaugguccaaaaaaauacucagaacccaggagucggaaugcguuuguaucaauggaacuuguacaguaguaaugacugaugggagcgcuucaggaaaagcugauacuaaaauacuauucauugaggaggggaaaaucauucauauuagcacauugucaggaagugcucagcaugucgaggagugcuccuguuauccucgauauccuggugucagauguguaugccgagacaacuggaaaggcuccaauaggcccaucguagauauaaauguaaaggauuauagcauuguuuccaguuaugugugcucaggacuuguuggagacacacccagaaaaaacgacagcuccagcaguagccauugccuagauccuaacaaugaggaagguggucauggagugaaaggcugggccuuugaugauggaaaugacguguggaugggaagaacgaucagcgagaaguuacgcucagguuaugaaaccuucaaagucaucgaaggcugguccaaaccuaacuccaaauuacagauaaauaggcaagucauaguugaaagagguaacagguccgguuauucugguauuuucuccguugaaggcaaaagcugcaucaaucggugcuuuuauguggaguugauaaggggaaggaaagaggaaacugaagucugguggaccucaaacaguauuguuguguuuuguggcaccucagguacauauggaacaggcucauggccugauggggcggauaucaaucucaugccuauauaa

SEQ ID NO: 53728 - RNA, 1410 nt, Artificial Sequence
  derived and/or modified CDS sequence (wt) from neuraminidase__InfluenzaA__AFD63595
augaauccaaaucaaaagauaauaacaauuggcucuguuucucucaccauugccgcaauaugcuuccuuaugcaaauugccauccugguaacuacuguaacauugcauuucaagcagcaugaaugcaacucccccccaaacaaccaaguaaugcugugugaaccaacaauaauagaaagaaacauaacagagauaguguaucugaccaacaccaccauagagaaggaaauaugccccaaacuagcagaauacagaaauuggucaaagccgcaauguaacauuacaggauuugcaccuuuuucuaaggacaauucgauucggcuuuccgcugguggggacaucugggugacaagagaaccuuaugugucaugcgauccugacaaguguuaucaauuugcccuugggcagggaacaacacuaaacaacgggcauucaaaugacacaguacaugauaggaccccuuaccggacccuauugaugaaugaauuggguguuccauuucauuugggaaccaggcaagugugcauagcaugguccagcucaaguugucacgauggaaaagcguggcugcauguuuguguaacuggggaugauaaaaaugcaacugcuagcuucauuuacaaugggaggcuuguagauaguauugguucaugguccaaaaaaauacucagaacccaggagucggaaugcguuuguaucaauggaacuuguacagugguaaugacugauggaagcgcuucaggaaaagcugauacuaaaauacuauucauugaggaggggaaaaucguucauauuagcacauugucaggaagugcucagcaugucgaggagugcuccuguuauccucgauauccuggugucagaugugucugcaaagacaacuggaaaggcuccaauaggcccauuguagauauaaauguaaaggauuauagcauuguuuccaguuaugugugcucaggacuuguuggagacacacccagaaaaaacgacagcuucagcaguagccauugccuagauccuaacaaugaggaagguggucauggagugaaaggcugggccuuugaugauggaaaugacguguggaugggaagaacgaucagcgagaaguuacgcucagguuaugaaaccuucaaagucaucgaaggcugguccaaaccuaacuccaaauuacagauaaauaggcaaguuauaguugaaagagguaacagguccgguuauucugguauuuucuccguugaaggcaaaagcugcaucaaucggugcuuuuauguggaguugauaaggggaaggaaagaggaaacugaagucugguggaccucaaacaguauuguuguguuuuguggcaccucagguacauauggaacaggcucauggccugauggggcggauaucaaucucaugccuauauaa

SEQ ID NO: 53729 - RNA, 1410 nt, Artificial Sequence; identical to SEQ ID NO: 46784
  derived and/or modified CDS sequence (wt) from neuraminidase__InfluenzaA__AFD63606

SEQ ID NO: 53730 - RNA, 1410 nt, Artificial Sequence
  derived and/or modified CDS sequence (wt) from neuraminidase__InfluenzaA__AFD63628
augaauccaaaucaaaagauaauaacaauuggcucuguuucucucaccauugccacaauaugcuuccuuaugcaaauugccauccugguaacuacuguaacauugcauuucaagcagcaugaaugcaacucccccccaaacaaccaaguaaugcugugugaaccaacaauaauagaaagaaacauaacagagauaguguaucugaccaacaccaccauagagaaggaaauaugccccaaacuagcagaauacagaaauuggucaaagccgcaauguaacauuacaggauuugcaccuuuuucuaaggacaauucgauucggcuuuccgcugguggggacaucugggugacaagagaaccuuaugugucaugcgacccugacaaguguuaucaguuugcccuugggcagggaacaacacuaaacaacgggcauucaaaugacacaguacaugauaggaccccuuaccggacccuauugaugaaugaauuggguguuccauuucauuugggaaccaggcaagugugcauagcaugguccagcucaaguugucacgauggaaaagcguggcugcauguuuguguaacuggggaugauaaaaaugcaacugcuagcuucauuuacaaugggaggcuuguagauaguauugguucaugguccaaaaaaauacucagaacccaggagucggaaugcguuuguaucaauggaacuuguacaguaguaaugacugaugggagcgcuucaggaaaagcugauacuaaaauacuauucauugaggaggggaaaaucguucauauuagcacauugucaggaagugcucagcaugucgaggagugcuccuguuauccucgauauccuggugucagaugugucugcagagacaacuggaaaggcuccaauaggcccauuguagauauaaauguaaaggauuauagcauuguuuccaguuaugugugcucaggacuuguuggagacacacccagaaaaaacgacagcuucagcaguagccauugccuagauccuaacaaugaggaagguggucauggagugaaaggcugggccuuugaugauggaaaugacguguggaugggaagaacgaucagcgagaaguuacgcucagguuaugaaaccuucaaagucaucgaaggcugguccaaaccuaacuccaaauuacagauaaauaggcaaguuauaguugaaagagguaacagguccgguuauucugguauuuucuccguugaaggcaaaagcugcaucaaucggugcuuuuauguggaguugauaaggggaaggaaagaggaaacugaagucugguggaccucaaacaguauuguuguguuuuguggcaccucagguacauauggaacaggcucauggccugauggggcggauaucaaucucaugccuauauaa

SEQ ID NO: 53731 - RNA, 1410 nt, Artificial Sequence
  derived and/or modified CDS sequence (wt) from neuraminidase__InfluenzaA__AFD63639
augaauccaaaucaaaagauaauaacaauuggcucuguuucucucaccauugccgcaauaugcuuccucaugcaaauugccauccugguaacuacuguaacauugcauuucaagcagcaugaaugcaacucccccccaaacaaccaaguaauguugugugaaccaacaauaauagaaagaaacauaacagagauaguguaucugaccaacaccaccauagagaaggaaauaugccccaaacuagcagaauaccgaaauuggucaaagccgcaauguaacauuacaggauuugcaccuuuuucuaaggacaauucgauucggcuuuccgcugguggggacaucugggugacaagagaaccuuaugugucaugcgauccugacaaguguuaucaauuugcccuugggcagggaacaacacuaaacaacgggcauucaaaugacacaguacaugauaggaccccuuaccggacccuauugaugaaugaauuggguguuccauuucauuugggaaccaggcaagugugcauagcaugguccagcucaaguugucacgauggaaaagcguggcugcauguuuguguaacuggggaugauaaaaaugcaacugcuagcuucauuuacaaugggaggcuuguagauaguauugguucaugguccaaaaaaauacucagaacccaggagucggaaugcguuuguaucaauggaacuuguacagugguaaugacugauggaagcgcuucaggaaaagcugauacuaaaauacuauucauugaggaggggaaaaucguucauauuagcacauugucaggaagugcucagcaugucgaggagugcuccuguuauccucgauauccuggugucagaugugucugcagagacaacuggaaaggcuccaauaggcccauuguagauauaaauguaaaggauuauagcauuguuuccaguuaugugugcucaggacuuguuggagacacacccagaaaaaacgacagcuucagcaguagccauugccuagauccuaacaaugaggaagguggucauggagugaaaggcugggccuuugaugauggaaaugacguguggaugggaagaacgaucagcgagaaguuacgcucagguuaugaaaccuucaaagucaucgaaggcugguccaaaccuaacuccaaauuacagauaaauaggcaaguuauaguugaaagagguaacagguccgguuauucugguauuuucuccguugaaggcaaaagcugcaucaaucggugcuuuuauguggaguugauaaggggaaggaaagaggaaacugaagucugguggaccucaaacaguauuguuguguuuuguggcaccucagguacauauggaacaggcucauggccugauggggcggauaucaaucucaugccuauauaa

SEQ ID NO: 53732 - RNA, 1410 nt, Artificial Sequence
  derived and/or modified CDS sequence (wt) from neuraminidase__InfluenzaA__AFD63650
augaauccaaaucaaaagauaauaacaauuggcucuguuucucucaccauugccgcaauaugcuuccuuaugcaaauugccauccugguaacuacuguaacauugcauuucaagcagcaugaaugcaacucccccccaaacaaccaaguaaugcugugugaaccaacaauaauagaaagaaacauaacagagauaguguaucugaccaacaccaccauagagaaggaaauaugccccaaacuagcagaauacagaaauuggucaaagccgcaauguaacauuacaggauuugcaccuuuuucuaaggacaauucgauucggcuuuccgcugguggggacaucugggugacaagagaaccuuaugugucaugcgauccugacaaguguuaucaauuugcccuugggcagggaacaacacuaaacaacgggcauucaaaugacacaguacaugauaggaccccuuaccggacccuauugaugaaugaauuggguguuccauuucauuugggaaccaggcaagugugcauagcaugguccagcucaaguugucacgauggaaaagcguggcugcauguuuguguaacuggggaugauaaaaaugcaacugcuagcuucauuuacaaugggaggcuuguagauaguauugguucaugguccaaaaaaauacucagaacccaggagucggaaugcguuuguaucaauggaacuuguacagugguaaugacugauggaagcgcuucaggaaaagcugauacuaaaauacuauucauugaggaggggaaaaucguucauauuagcacauugucaggaagugcucagcaugucgaggagugcuccuguuauccucgauauccuggugucagaugugucugcagagacaacuggaaaggcuccaauaggcccauuguagauauaaauguaaaggauuauagcauuguuuccaguuaugugugcucaggacuuguuggagacacacccagaaaaaacgacagcuucagcaguagccauugccuagauccuaacaaugaggaagguggucauggagugaaaggcugggccuuugaugauggaaaugacguguggaugggaagaacgaucagcgagaaguuacgcucagguuaugaaaccuucaaagucaucgaaggcugguccaaaccuaacuccaaauuacagauaaauaggcaaguuauaguugaaagagguaacagguccgguuauucugguauuuucuccguugaaggcaaaagcugcaucaaucggugcuuuuauguagaguugauaaggggaaggaaagaggaaacugaagucugguggaccucaaacaguauuguuguguuuuguggcaccucagguacauauggaacaggcucauggccugauggggcggauaucaaucucaugccuauauaa

SEQ ID NO: 53733 - RNA, 1410 nt, Artificial Sequence
  derived and/or modified CDS sequence (wt) from neuraminidase__InfluenzaA__AFD63661
augaauccaaaucaaaagauaauaacaauuggcucuguuucucucaccauugccgcaauaugcuuccuuaugcaaauugccauccugguaacuacuguaacauugcauuucaagcagcaugaaugcaacucccccccaaacaaccaaguaaugcugugugaaccaacaauaauagaaagaaacauaacagagauaguguaucugaccaacuccaccauagagaaggaaauaugccccaaacuagcagaauacagaaauuggucaaagccgcaauguaacauuacaggauuugcaccuuuuucuaaggacaauucgauucggcuuuccgcugguggggacaucugggugacaagagaaccuuaugugucaugcgauccugacaaguguuaucaauuugcccuugggcagggaacaacacuaaacaacgggcauucaaaugacacaguacaugauaggaccccuuaccggacccuauugaugaaugaauuggguguuccauuucauuugggaaccaggcaagugugcauagcaugguccagcucaaguugucacgauggaaaagcguggcugcauguuuguguaacuggggaugauaaaaaugcaacugcuagcuucauuuacaaugggaggcuuguagauaguauugguucaugguccaaaaaaauacucagaacccaggagucggaaugcguuuguaucaauggaacuuguacagugguaaugacugauggaagcgcuucaggaaaagcugauacuaaaauacuauucauugaggaggggaaaaucguucauauuagcacauugucaggaagugcucagcaugucgaggagugcuccuguuauccucgauauccuggugucagaugugucugcagagacaacuggaaaggcuccaauaggcccauuguagauauaaauguaaaggauuauagcauuguuuccaguuaugugugcucaggacuuguuggagacacacccagaaaaaacgacagcuucagcaguagccauugccuagauccuaacaaugaggaagguggucauggagugaaaggcugggccuuugaugauggaaaugacguguggaugggaagaacgaucagcgagaaguuacgcucagguuaugaaaccuucaaagucaucgaaggcugguccaaaccuaacuccaaauuacagauaaauaggcaaguuauaguugaaagagguaacagguccgguuauucugguauuuucuccguugaaggcaaaagcugcaucaaucggugcuuuuauguggaguugauaaggggaaggaaagaggaaacugaagucugguggaccucaaacaguauuguuguguuuuguggcaccucagguacauauggaacaggcucauggccugauggggcggauaucaaucucaugccuauauaa

SEQ ID NO: 53734 - RNA, 1410 nt, Artificial Sequence
  derived and/or modified CDS sequence (wt) from neuraminidase__InfluenzaA__AFD63672
augaauccaaaucaaaagauaauaacaauuggcucuguuucucucaccauugccacaauaugcuuccuuaugcaaauuaccauccugguaacuacuguaacauugcauuucaagcaguaugaaugcaacucccccccaaacaaccaaguaaugcugugugaaccaacaauaauagaaagaaacauaacagagauaguguaucugaccaauaccacuauagagaaggaaauaugccccaaauuagcagaauacagaaauuggucaaagccgcaauguaacauuacaggauuugcaccuuuuucuaaggacaauucgauucggcuuuccgcugguggggacaucugggugacaagagagccuuaugugucaugcgauccugacaaguguuaucaauuugcccuugggcagggaacaacacuaaacaacgggcauucaaaugacacaguacaugauaggaccccuuaccggacccuauugaugaaugaauuggguguuccauuucauuugggaaccaggcaagugugcauagcaugguccagcucaaguugucacgauggaaaagcauggcugcauguuuguguaacuggggaugauaaaaaugcaacugcuaguuucauuuacaaugggaggcuuguagauaguauugguucaugguccaaaaaaauacucagaacccaggagucggaaugcguuuguaucaauggaacuuguacaguaguaaugacugaugggagcgcuucaggaaaagcugauacuaaaauacuauucauugaggaggggaaaaucauucauauuagcacauugucaggaagugcucagcaugucgaggagugcuccuguuauccucgauauccuggugucagauguguaugccgagacaacuggaaaggcuccaauaggcccaucguagauauaaauguaaaggauuauagcauuguuuccaguuaugugugcucaggacuuguuggagacacacccagaaaaaacgacagcuccagcaguagccauugccuagauccuaacaaugaggaagguggucauggagugaaaggcugggccuuugaugauggaaaugacguguggaugggaagaacgaucagcgagaaguuacgcucagguuaugaaaccuucaaagucaucgaaggcugguccaaaccuaacuccaaauuacagauaaauaggcaagucauaguugaaagagguaacagguccgguuauucugguauuuucuccguugaaggcaaaagcugcaucaaucggugcuuuuauguggaguugauaaggggaaggaaagaggaaacugaagucugguggaccucaaacaguauuguuguguuuuguggcaccucagguacauauggaacaggcucauggccugauggggcggauaucaaucucaugccuauauaa

SEQ ID NO: 53735 - RNA, 1410 nt, Artificial Sequence
  derived and/or modified CDS sequence (wt) from neuraminidase__InfluenzaA__AFD63683
augaauccaaaucaaaagauaauaacaaugggcucuguuucucucaccauugccacaauaugcuuccuuaugcaaauugccauccugguaacuacuguaacauugcauuucaagcaguaugaaugcaacucccccccaaacaaccaaguaaugcugugugaaccaacaauaauagaaagaaacauaacagagauaguguaucugaccaauaccacuauagagaaggaaauaugccccaaauuagcagaauacagaaauuggucaaagccgcaauguaacauuacaggauuugcaccuuuuucuaaggacaauucgauucggcuuuccgcugguggggacaucugggugacaagagagccuuaugugucaugcgauccugacaaguguuaucaauuugcccuugggcagggaacaacacuaaacaacgggcauucaaaugacacaguacaugguaggaccccuuaccggacccuauugaugaaugaauuggguguuccauuucauuugggaaccaggcaagugugcauagcaugguccagcucaaguugucacgauggaaaagcauggcugcauguuuguguaacuggggaugauaaaaaugcaacugcuaguuucauuuacaaugggaggcuuguagauaguauugguucaugguccaaaaaaauacucagaacccaggagucggaaugcguuuguaucaauggaacuuguacaguaguaaugacugaugggagcgcuucaggaaaagcugauacuaaaauacuauucauugaggaggggaaaaucauucauauuagcacauugucaggaagugcucagcaugucgaggagugcuccuguuauccucgauauccuggugucagauguguaugccgagacaacuggaaaggcuccaauaggcccaucguagauauaaauguaaaggauuauagcauuguuuccaguuaugugugcucaggacuuguuggagacacacccagaaaaaacgacagcuccagcaguagccauugccuagauccuaacaaugaggaagguggucauggagugaaaggcugggccuuugaugauggaaaugacguguggaugggaagaacgaucagcgagaaguuacgcucagguuaugaaaccuucaaagucaucgaaggcugguccaaaccuaacuccaaauuacagauaaauaggcaagucauaguugaaagagguaacagguccgguuauucugguauuuucuccguugaaggcaaaagcugcaucaaucggugcuuuuauguggaguugauaaggggaaggaaagaggaaacugaagucugguggaccucaaacaguauuguuguguuuuguggcaccucagguacauauggaacaggcucauggccugauggggcggauaucaaucucaugccuauauaa

SEQ ID NO: 53736 - RNA, 1410 nt, Artificial Sequence
  derived and/or modified CDS sequence (wt) from neuraminidase__InfluenzaA__AFD63694
augaauccaaaucaaaagauaauaacaauuggcucuguuucucucaccauugccacaauaugcuuccuuaugcaaauugccauccugguaacuacuauaacauugcauuucaagcagcaugaaugcaacucccccccaaacaaccaaguaaugcugugugaaccaacaauaauagaaagaaacauaacagagauaguguaucugaccaacaccaccauagagaaggaaauaugccccaaacuagcagaauacagaaauuggucaaagccgcaauguaacauuacaggauuugcaccuuuuucuaaggacaauucgauucggcuuuccgcugguggggacaucugggugacaagagaaccuuaugugucaugcgacccugacaaguguuaucaauuugcccuugggcagggaacaacacuaaacaacgggcauucaaaugacacaguacaugauaggaccccuuaccggacccuauugaugaaugaauuggguguuccauuucauuugggaaccaggcaagugugcauagcaugguccagcucaaguugucacgauggaaaagcguggcugcauguuuguguaacuggggaugauaaaaaugcaacugcuagcuucauuuacaaugggaggcuuguagauaguauugguucaugguccaaaaaaauacucagaacccaggagucggaaugcguuuguaucaauggaacuuguacaguaguaaugacugaugggagcgcuucaggaaaagcugauacuaaaauacuauucauugaggaggggaaaaucguucauauuagcacauugucaggaagugcucagcaugucgaggagugcuccuguuauccucgauauccuggugucagaugugucugcagagacaacuggaaaggcuccaauaggcccauuguagauauaaauguaaaggauuauagcauuguuuccaguuaugugugcucaggacuuguuggagacacacccagaaaaaacgacagcuucagcaguagccauugccuagauccuaacaaugaggaagguggucauggagugaaaggcugggccuuugaugauggaaaugacguguggaugggaagaacgaucagcgagaaguuacgcucagguuaugaaaccuucaaagucaucgaaggcugguccaaaccuaacuccaaauuacagauaaauaggcaaguuauaguugaaagagguaacagguccgguuauucugguauuuucuccguugaaggcaaaagcugcaucaaucggugcuuuuauguggaguugauaaggggaaggaaagaggaaacugaagucugguggaccucaaacaguauuguuguguuuuguggcaccucagguacauauggaacaggcucauggccugauggggcggauaucaaucucaugccuauauaa

SEQ ID NO: 53737 - RNA, 1410 nt, Artificial Sequence
  derived and/or modified CDS sequence (wt) from neuraminidase__InfluenzaA__AFD63705
augaauccaaaucaaaagauaauaacaauuggcucuguuucucucaccauugccgcaauaugcuuccuuaugcaaauugccauccugguaacuacuguaacauugcauuucaagcagcaugaaugcaacucccccccaaacaaccaaguaaugcugugugaaccaacaauaauagaaagaaacauaacagagauaguguaucugaccaacaccaccauagagaaggaaauaugccccaaacuagcagaauacagaaauuggucaaagccgcaauguaacauuacaggauuugcaccuuuuucuaaggacaauucgauucggcuuuccgcugguggggacaucugggugacaagagaaccuuaugugucaugcgauccugacaaguguuaucaauuugcccuugggaagggaacaacacuaaacaacgggcauucaaaugacacaguacaugauaggaccccuuaccggacccuauugaugaaugaauuggguguuccauuucauuugggaaccaggcaagugugcauagcaugguccagcucaaguugucacgauggaaaagcguggcugcauguuuguguaacuggggaugauaaaaaugcaacugcuagcuucauuuacaaugggaggcuuguagauaguauugguucaugguccaaaaaaauacucagaacccaggagucggaaugcguuuguaucaauggaacuuguacagugguaaugacugauggaagcgcuucaggaaaagcugauacuaaaauacuauucauugaggaggggaaaaucguucauauuagcacauugucaggaagugcucagcauguagaggagugcuccuguuauccucgauauccuggugucagaugugucugcagagacaacuggaaaggcuccaauaggcccauuguagauauaaauguaaaggauuauagcauuguuuccaguuaugugugcucaggacuuguuggagacacacccagaaaaaacgacagcuucagcaguagccauugccuagauccuaacaaugaggaagguggucauggagugaaaggcugggccuuugaugauggaaaugacguguggaugggaagaacgaucagcgagaaguuacgcucagguuaugaaaccuucaaagucaucgaaggcugguccaaaccuaacuccaaauuacagauaaauaggcaaguuauaguugaaagagguaacagguccgguuauucugguauuuucuccguugaaggcaaaagcugcaucaaucggugcuuuuauguggaguugauaaggggaaggaaagaggaaacugaagucugguggaccucaaacaguauuguuguguuuuguggcaccucagguacauauggaacaggcucauggccugauggggcggauaucaaucucaugccuauauaa

SEQ ID NO: 53738 - RNA, 1410 nt, Artificial Sequence
  derived and/or modified CDS sequence (wt) from neuraminidase__InfluenzaA__AFD63716
augaauccaaaucaaaagauaauaacaauuggcucuguuucucucaccauugccgcaauaugcuuccuuaugcaaauugccauccugguaacuacuguaacauugcauuucaagcagcaugaaugcaacucccccccaaacaaccaaguaaugcugugugaaccaacaauaauagaaagaaacauaacagagauaguguaucugaccaacaccaccauagagaaggaaauaugccccaaacuagcagaauacagaaauuggucaaagccgcaauguaacauuacaggauuugcaccuuuuucuaaggacaauucgauucggcuuuccgcugguggggacaucugggugacaagagaaccuuaugugucaugcgauccugacaagugucaucaauuugcccuugggcagggaacaacacuaaacaacgggcauucaaaugacacaguacaugauaggaccccuuaccggacccuauugaugaaugaauuggguguuccauuucauuugggaaccaggcaagugugcauagcaugguccagcucaaguugucacgauggaaaagcguggcugcauguuuguguaacuggggaugauaaaaaugcaacugcuagcuucauuuacaaugggaggcuuguagauaguauugguucaugguccaaaaaaauacucagaacccaggagucggaaugcguuuguaucaauggaacuuguacagugguaaugacugauggaagcgcuucaggaaaagcugauacuaaaauacuauucauugaggaggggaaaaucguucauauuagcacauugucaggaagugcucagcaugucgaggagugcuccuguuauccucgauauccuggugucagaugugucugcagagacaacuggaaaggcuccaauaggcccauuguagauauaaauguaaaggauuauagcauuguuuccaguuaugugugcucaggacuuguuggagacacacccagaaaaaacgacagcuucagcaguagccauugccuagauccuaacaaugaggaagguggucauggagugaaaggcugggccuuugaugauggaaaugacguguggaugggaagaacgaucagcgagaaguuacgcucagguuaugaaaccuucaaagucaucgaaggcugguccaaaccuaacuccaaauuacagauaaauaggcaaguuauaguugaaagagguaacagguccgguuauucugguauuuucuccguugaaggcaaaagcugcaucaaucggugcuuuuauguggaguugauaaggggaaggaaagaggaaacugaagucugguggaccucaaacaguauuguuguguuuuguggcaccucagguacauauggaacaggcucauggccugauggggcggauaucaaucucaugccuauauaa

SEQ ID NO: 53739 - RNA, 1410 nt, Artificial Sequence
  derived and/or modified CDS sequence (wt) from neuraminidase__InfluenzaA__AFD63727
augaauccaaaucaaaagauaauaacaauuggcucuguuucucucaccauugccgcaauaugcuuccuuaugcaaauugccauccugguaaccacuguaacauugcauuucaagcagcaugaaugcaacucccccccaaacaaccaaguaaugcugugugaaccaacaauaauagaaagaaacauaacagagauaguguaucugaccaacaccaccauagagaaggaaauaugccccaaacuagcagaauacagaaauuggucaaagccgcaauguaacauuacaggauuugcaccuuuuucuaaggacaauucgauucggcuuuccgcugguggggacaucugggugacaagagaaccuuaugugucaugcgauccugacaaguguuaucaauuugcccuugggcagggaacaacacuaaacaacgggcauucaaaugacacaguacaugauaggaccccuuaccggacccuauugaugaaugaauuggguguuccauuucauuugggaaccaggcaagugugcauagcaugguccagcucaaguugucacgauggaaaagcguggcugcauguuuguguaacuggggaugauaaaaaugcaacugcuagcuucauuuacaaugggaggcuuguagauaguauugguucaugguccaaaaaaauacucagaacccaggagucggaaugcguuuguaucaauggaacuuguacagugguaaugacugauggaagcgcuucaggaaaagcugauacuaaaauacuauucauugaggaggggaaaaucguucauauuagcacauugucaggaagugcucagcaugucgaggagugcuccuguuauccucgauauccuggugucagaugugucugcagagacaacuggaaaggcuccaauaggcccauuguagauauaaauguaaaggauuauagcauuguuuccaguuaugugugcucaggacuuguuggagacacacccagaaaaaacgacagcuucagcaguagccauugccuagauccuaacaaugaggaagguggucauggagugaaaggcugggccuuugaugauggaaaugacguguggaugggaagaacgaucagcgagaaguuacgcucagguuaugaaaccuucaaagucaucgaaggcugguccaaaccuaacuccaaauuacagauaaauaggcaaguuauaguugaaagagguaacagguccgguuauucugguauuuucuccguugaaggcaaaagcugcaucaaucggugcuuuuauguggaguugauaaggggaaggaaagaggaaacugaagucugguggaccucaaacaguauuguuguguuuuguggcaccucagguacauauggaacaggcucauggccugauggggcggauaucaaucucaugccuauauaa

SEQ ID NO: 53740 - RNA, 1410 nt, Artificial Sequence; identical to SEQ ID NO: 53739
  derived and/or modified CDS sequence (wt) from neuraminidase__InfluenzaA__AFD63738

SEQ ID NO: 53741 - RNA, 1410 nt, Artificial Sequence
  derived and/or modified CDS sequence (wt) from neuraminidase__InfluenzaA__AFD63749
augaauccaaaucaaaagauaauaacaauuagcucuguuucucucaccauugccacaauaugcuuccuuaugcaaauugccauccugguaacuacuguaacauugcauuucaagcagcaugaaugcaacucccccccaaacaaccaaguaaugcugugugaaccaacaauaauagaaagaaacauaacagagauaguguaucugaccaacaccaccauagagaaggaaauaugccccaaacuagcagaauacagaaauuggucaaagccgcaauguaacauuacaggauuugcaccuuuuucuaaggacaauucgauucggcuuuccgcugguggggacaucugggugacaagagaaccuuaugugucaugcgacccugacaaguguuaucaauuugcccuugggcagggaacaacacuaaacaacgggcauucaaaugacacaguacaugauaggaccccuuaccggacccuauugaugaaugaauuggguguuccauuucauuugggaaccaggcaagugugcauagcaugguccagcucaaguugucacgauggaaaagcguggcugcauguuuguguaacuggggaugauaaaaaugcaacugcuagcuucauuuacaaugggaggcuuguagauaguauugguucaugguccaaaaaaauacucagaacccaggagucggaaugcguuuguaucaauggaacuuguacaguaguaaugacugaugggagcgcuucaggaaaagcugauacuaaaauacuauucauugaggaggggaaaaucguucauauuagcacauugucaggaagugcucagcaugucgaggagugcuccuguuauccucgauauccuggugucagaugugucugcagagacaacuggaaaggcuccaauaggcccauuguagauauaaauguaaaggauuauagcauuguuuccaguuaugugugcucaggacuuguuggagacacacccagaaaaaacgacagcuucagcaguagccauugccuagauccuaacaaugaggaagguggucauggagugaaaggcugggccuuugaugauggaaaugacguguggaugggaagaacgaucagcgagaaguuacgcucagguuaugaaaccuucaaagucaucgaaggcugguccaaaccuaacuccaaauuacagauaaauaggcaaguuauaguugaaagagguaacagguccgguuauucugguauuuucuccguugaaggcaaaagcugcaucaaucggugcuuuuauguggaguugauaaggggaaggaaagaggaaacugaagucugguggaccucaaacaguauuguuguguuuuguggcaccucagguacauauggaacaggcucauggccugauggggcggauaucaaucucaugccuauauaa

SEQ ID NO: 53742 - RNA, 1410 nt, Artificial Sequence
  derived and/or modified CDS sequence (wt) from neuraminidase__InfluenzaA__AFD63760
augaauccaaaucaaaagauaauaacaauuggcucuguuucucucaccauugccacaauaugcuuccuuaugcaaauugccauccugguaacuacuguaacauugcauuucaagcaguaugaaugcaacucccccccaaacaaccaaguaaugcugugugaaccaacaauaauagaaagaaacauaacagagauaguguaucugaccaauaccacuauagagaaggaaauaugccccaaauuagcagaauacagaaauuggucaaagccgcaauguaacauuacaggauuugcaccuuuuucuaaggacaauucgauucggcuuuccgcugguggggacaucugggugacaagagagccuuaugugucaugcgauccugacaaguguuaucaauuugcccuugggcagggaacaacacuaaacaacgggcauucaaaugacacaguacaugauaggaccccuuaccggacccuauugaugaaugaauuggguguuccauuucauuugggaaccaggcaagugugcauagcaugguccagcucaaguugucacgauggaaaagcauggcugcauguuuguguaacuggggaugauaaaaaugcaacugcuaguuucauuuacaaugggaggcuuguagauaguauugguucaugguccaaaaaaauacucagaacccaggagucggaaugcguuuguaucaauggaacuuguacaguaguaaugacugaugggagcgcuucaggaaaagcugauacuaaaauacuauucauugaggaggggaaaaucauucauauuagcacauugucaggaagugcucagcaugucgaggagugcuccuguuauccucgauauccuggugucagauguguaugccgagacaacuggaaaggcuccaauaggcccaucguagauauaaauguaaaggauuauagcauuguuuccaguuaugugugcucaggacuuguuggagacacacccagaaaaaacgacagcuccagcaguagccauugccuagauccuaacaaugaggaagguggucauggagugaaaggcugggccuuugaugauggaaaugacguguggaugggaagaacgaucagcgagaaguuacgcucagguuaugaaaccuucaaagucaucgaaggcugguccaaaccuaacuccaaauuacagauaaauaggcaagucauaguugaaagagguaacagguccgguuauucugguauuuucuccguugaaggcaaaagcugcaucaaucggugcuuuuauguggaguugauaaggggaaggaaagaggaaacugaagucugguggaccucaaacaguauuguuguguuuuguggcaccucagguacauauggaacaggcucauggccugauggggcggauaucaaucucaugccuauauaa

SEQ ID NO: 53743 - RNA, 1410 nt, Artificial Sequence; identical to SEQ ID NO: 53739
  derived and/or modified CDS sequence (wt) from neuraminidase__InfluenzaA__AFD63771

SEQ ID NO: 53744 - RNA, 1410 nt, Artificial Sequence
  derived and/or modified CDS sequence (wt) from neuraminidase__InfluenzaA__AFD63782
augaauccaaaucaaaagauaauaacaauuggcucuguuucucucaccauugccgcaauaugcuuccuuaugcaaauugccauccugguaacuacuguaacauugcauuucaagcagcaugaaugcaacucccccccaaacaaccaaguaaugcugugugaaccaacaauaauagaaagaaacauaacagagauaguguaucugaccaacaccaccauagagaaggaaauaugccccaaacuagcagaauacagaaauuggucaaagccgcaauguaacauuacaggauuugcaccuuuuucuaaggacaauucgauucggcuuuccgcugguggggacaucugggugacaagagaaccuuaugugucaugcgauccugacaaguguuaucaauuugcccuugggcagggaacaacacuaaacaacgggcauucaaaugacacaguacaugauaggaccccuuaccggacccuauugaugaaugaauuggguguuccauuucauuugggaaccaggcaagugugcauagcaugguccagcucaaguugucacgauggaaaagcguggcugcauguuuguguaacuggggaugauaaaaaugcaacugcuagcuucauuuacaaugggaggcuuguagauaguauugguucaugguccaaaaaaauacucagaacccaggagucagaaugcguuuguaucaauggaacuuguacagugguaaugacugauggaagcgcuucaggaaaagcugauacuaaaauacuauucauugaggaggggaaaaucguucauauuagcacauugucaggaagugcucagcaugucgaggagugcuccuguuauccucgauauccuggggucagaugugucugcagagacaacuggaaaggcuccaauaggcccauuguagauauaaauguaaaggauuauagcauuguuuccaguuaugugugcucaggacuuguuggagacacacccagaaaaaacgacagcuucagcaguagccauugccuagauccuaacaaugaggaagguggucauggagugaaaggcugggccuuugaugauggaaaugacguguggaugggaagaacgaucagcgagaaguuacgcucagguuaugaaaccuucaaagucaucgaaggcugguccaaaccuaacuccaaauuacagauaaauaggcaaguuauaguugaaagagguaacagguccgguuauucugguauuuucuccguugaaggcaaaagcugcaucaaucggugcuuuuauguggaguugauaaggggaaggaaagaggaaacugaagucugguggaccucaaacaguauuguuguguuuuguggcaccucagguacauauggaacaggcucauggccugauggggcggauaucaaucucaugccuauauaa

SEQ ID NO: 53745 - RNA, 1410 nt, Artificial Sequence; identical to SEQ ID NO: 53742
  derived and/or modified CDS sequence (wt) from neuraminidase__InfluenzaA__AFD63793

SEQ ID NO: 53746 - RNA, 1410 nt, Artificial Sequence
  derived and/or modified CDS sequence (wt) from neuraminidase__InfluenzaA__AFD63804
augaauccaaaucaaaagauaauaacaauuggcucuguuucucucaccauugccgcaauaugcuuccuuaugcaaauugccauccugguaacuacuguaacauugcauuucaagcagcaugaaugcaacucccccccaaacaaccaaguaaugcugugugaaccaacaauaauagaaagaaacauaacagagauaguguaucugaccaacaccaccauagagaaggaaauaugccccaaacuagcagaauacagaaauuggucaaagccucaauguaacaucacaggauuugcaccuuuuucuaaagacaauucgauucggcuuuccgcugguggggacaucugggugacaagagaaccuuaugugucaugcgauccugacaaguguuaucaauuugcccuugggcagggaacaacacuaaacaacgggcauucaaaugacacaguacaugauaggaccccuuaccggacccuauugaugaaugaauuggguguuccauuucauuugggaaccaggcaagugugcauagcaugguccagcucaaguugucacgauggaaaagcguggcugcauguuuguguaacuggggaugauaaaaaugcaacugcuagcuucauuuacaaugggaggcuuguagauaguauugguucaugguccaaaaaaauacucagaacccaggagucggaaugcguuuguaucaauggaacuuguacagugguaaugacugauggaagcgcuucaggaaaagcugauacuaaaauacuauucauugaggaggggaaaaucguucauauuagcacauugucaggaagugcucagcaugucgaggagugcuccuguuauccucgauauccuggugucagaugugucugcagagacaacuggaaaggcuccaauaggcccauuguagauauaaauguaaaggauuauagcauuguuuccaguuaugugugcucaggacuuguuggagacacacccagaaaaaacgacagcuucagcaguagccauugccuagauccuaacaaugaggaagguggucauggagugaaaggcugggccuuugaugauggaaaugacguguggaugggaagaacgaucagcgagaaguuacgcucagguuaugaaaccuucaaagucaucgaaggcugguccaaaccuaauuccaaauuacagauaaauaggcaaguuauaguugaaagagguaacagguccgguuauucugguauuuucuccguugaaggcaaaagcugcaucaaucggugcuuuuauguggaguugauaaggggaaggaaagaggaaacugaagucugguggaccucaaacaguauuguuguguuuuguggcaccucagguacauauggaacaggcucauggccugauggggcggauaucaaucucaugccuauauaa

SEQ ID NO: 53747 - RNA, 1410 nt, Artificial Sequence; identical to SEQ ID NO: 46784
  derived and/or modified CDS sequence (wt) from neuraminidase__InfluenzaA__AFD63815

SEQ ID NO: 53748 - RNA, 1410 nt, Artificial Sequence; identical to SEQ ID NO: 46784
  derived and/or modified CDS sequence (wt) from neuraminidase__InfluenzaA__AFD63826

SEQ ID NO: 53749 - RNA, 1410 nt, Artificial Sequence
  derived and/or modified CDS sequence (wt) from neuraminidase__InfluenzaA__AFD63837
augaauccaaaucaaaagauaauaacaauuggcucuguuucucucaccauugccacaauaugcuuccuuaugcaaauugccauccugguaacuacuguaacauugcauuucaagcaguaugaaugcaacucccccccaaacaaccaaguaaugcugugugaaccaacaauaauagaaagaaacauaacagagauaguguaucugaccaauaccacuauagagaaggaaauaugccccaaauuagcagaauacagaaauuggucaaagccgcaauguaacauuacaggauuugcaccuuuuucuaaggacaauucgauucggcuuuccgcugguggggacaucugggugacaagagagccuuaugugucaugcgauccugacaaguguuaucaauuugcccuugggcagggaacaacacuaaacaacggacauucaaaugacacaguacaugauaggaccccuuaccggacccuauugaugaaugaauuggguguuccauuucauuugggaaccaggcaaguguguauagcaugguccagcucaaguugucacgauggaaaagcauggcugcauguuuguguaacuggggaugauaaaaaugcaacugcuaguuucauuuacaaugggaggcuuguagauaguauugguucaugguccaaaaaaauacucagaacccaggagucggaaugcguuuguaucaauggaacuuguacaguaguaaugacugaugggagcgcuucaggaaaagcugauacuaaaauacuauucauugaggaggggaaaaucauucauauuagcacauugucaggaagugcucagcaugucgaggagugcuccuguuauccucgauauccuggugucagauguguaugccgagacaacuggaaaggcuccaauaggcccaucguagauauaaauguaaaggauuauagcauuguuuccaguuaugugugcucaggacuuguuggagacacacccagaaaaaacgacagcuccagcaguagccauugccuagauccuaacaaugaggaagguggucauggagugaaaggcugggccuuugaugauggaaaugacguguggaugggaagaacgaucagcgagaaguuacgcucagguuaugaaaccuucaaagucaucgaaggcugguccaaaccuaacuccaaauuacagauaaauaggcaagucauaguugaaagagguaacagguccgguuauucugguauuuucuccguugaaggcaaaagcugcaucaaucggugcuuuuauguggaguugauaaggggaaggaaagaggaaacugaagucugguggaccucaaacaguauuguuguguuuuguggcaccucagguacauauggaacaggcucauggccugauggggcggauaucaaucucaugccuauauaa

SEQ ID NO: 53750 - RNA, 1410 nt, Artificial Sequence
  derived and/or modified CDS sequence (wt) from neuraminidase__InfluenzaA__AFD63848
augaauccaaaucaaaagauaauaacaauuggcucuguuucucucaccauugccgcaauaugcuuccuuaugcaaauugccauccugguaacuacuguaacauugcauuucaagcagcgugaaugcaacucccccccaaacaaccaaguaaugcugugugaaccaacaauaauagaaagaaacauaacagagauaguguaucugaccaacaccaccauagagaaggaaauaugccccaaacuagcagaauacagaaauuggucaaagccgcaauguaacauuacaggauuugcaccuuuuucuaaggacaauucgauucggcuuuccgcugguggggacaucugggugacaagagaaccuuaugugucaugcgauccugacaaguguuaucaauuugcccuugggcagggaacaacacuaaacaacgggcauucaaaugacacaguacaugauaggaccccuuaccggacccuauugaugaaugaauuggguguuccauuucauuugggaaccaggcaagugugcauagcaugguccagcucaaguugucacgauggaaaagcguggcugcauguuuguguaacuggggaugauaaaaaugcaacugcuagcuucauuuacaaugggaggcuuguagauaguauugguucaugguccaaaaaaauacucagaacccaggagucggaaugcguuuguaucaauggaacuuguacagugguaaugacugauggaagcgcuucaggaaaagcugauacuaaaauacuauucauugaggaggggaaaaucguucauauuagcacauugucaggaagugcucagcaugucgaggagugcuccuguuauccucgauauccuggugucagaugugucugcagagacaacuggaaaggcuccaauaggcccauuguagauauaaauguaaaggauuauagcauuguuuccaguuaugugugcucaggacuuguuggagacacacccagaaaaaacgacagcuucagcaguagccauugccuagauccuaacaaugaggaagguggucauggagugaaaggcugggccuuugaugauggaaaugacguguggaugggaagaacgaucagcgagaaguuacgcucagguuaugaaaccuucaaagucaucgaaggcugguccaaaccuaacuccaaauuacagauaaauaggcaaguuauaguugaaagagguaacagguccgguuauucugguauuuucuccguugaaggcaaaagcugcaucaaucggugcuuuuauguggaguugauaaggggaaggaaagagaaaacugaagucugguggaccucaaacaguauuguuguguuuuguggcaccucagguacauauggaacaggcucauggccugauggggcggauaucaaucucaugccuauauaa

SEQ ID NO: 53751 - RNA, 1410 nt, Artificial Sequence; identical to SEQ ID NO: 47464
  derived and/or modified CDS sequence (wt) from neuraminidase__InfluenzaA__AFD63859

SEQ ID NO: 53752 - RNA, 1410 nt, Artificial Sequence
  derived and/or modified CDS sequence (wt) from neuraminidase__InfluenzaA__AFD63870
augaauccaaaucaaaagauaauaacaauuggcucuguuucucucaccauugccacaauaugcuuccuuaugcaaauugccauccugguaacuacuguaacauugcauuucaagcagcaugaaugcaacucccccccaaacaaccaaguaaugcugugugaaccaacaauaauagaaagaaacauaacagagauaguguaucugaccaacaccaccauagagaaggaaauaugccccaaacuagcagaauacagaaauuggucaaagccgcaauguaacauuacaggauuugcaccuuuuucuaaggacaauucgauucggcuuuccgcugguggggacaucugggugacaagagaaccuuaugugucaugcgacccugacaaguguuaucaauuugcccuugggcagggaacaacacuaaacaacgggcauucaaaugacacaguacaugauaggaccccuuaccggacccuauugaugaaugaauuggguguuccauuucauuugggaaccaggcaagugugcauagcaugguccagcucaaguugucacgauggaaaagcguggcugcauguuuguguaacuggggaugauaaaaaugcaacugcuagcuucauuuacaaugggaggcuuguagauaguauugguucaugguccaaaaaaauacucagaacccaggagucggaaugcguuuguaucaauggaacuuguacaguaguaaugacugaugggagcgcuucaggaaaagcugauacuaaaauacuauucauugaggaggggaaaaucguucauauuagcacauugucaggaagugcucagcaugucgaggaaugcuccuguuauccucgauauccuggugucagaugugucugcagagacaacuggaaaggcuccaauaggcccauuguagauauaaauguaaaggauuauagcauuguuuccaguuaugugugcucaggacuuguuggagacacacccagaaaaaacgacagcuucagcaguagccauugccuagauccuaacaaugaggaagguggucauggagugaaaggcugggccuuugaugauggaaaugacguguggaugggaagaacgaucagcgagaaguuacgcucagguuaugaaaccuucaaagucaucgaaggcugguccaaaccuaacuccaaauuacagauaaauaggcaaguuauaguugaaagagguaacagguccgguuauucugguauuuucuccguugaaggcaaaagcugcaucaaucggugcuuuuauguggaguugauaaggggaaggaaagaggaaacugaagucugguggaccucaaacaguauuguuguguuuuguggcaccucagguacauauggaacaggcucauggccugauggggcggauaucaaucucaugccuauauaa

SEQ ID NO: 53753 - RNA, 1410 nt, Artificial Sequence
  derived and/or modified CDS sequence (wt) from neuraminidase__InfluenzaA__AFD63881
augaauccaaaucaaaagauaauaacaauuggcucuguuucucucaccauugccgcaauaugcuuccuuaugcaaauugccauccugguaacuacuguaacauugcauuucaagcagcaugaaugcaacucccccccaaacaaccaaguaaugcugugugaaccaacaauaauagaaagaaacauaacagagauaguguaucuuaccaacaccaccauagagaaggaaauaugccccaaacuagcagaauacagaaauuggucaaagccgcaauguaacauuacaggauuugcaccuuuuucuaaggacaauucgauucggcuuuccgcugguggggacaucugggugacaagagaaccuuaugugucaugcgauccugacaaguguuaucaauuugcccuugggcagggaacaacacuaaacaacgggcauucaaaugacacaguacaugauaggaccccuuaccggacccuauugaugaaugaauuggguguuccauuucauuugggaaccaggcaagugugcauagcaugguccagcucaaguugucacgauggaaaagcguggcugcauguuuguguaacuggggaugauaaaaaugcaacugcuagcuucauuuacaaugggaggcuuguagauaguauugguucaugguccaaaaaaauacucagaacccaggagucggaaugcguuuguaucaauggaacuuguacagugguaaugacugauggaagcgcuucaggaaaagcugauacuaaaauacuauucauugaggaggggaaaaucguucauauuagcacauugucaggaagugcucagcaugucgaggagugcuccuguuauccucgauauccuggugucagaugugucugcagagacaacuggaaaggcuccaauaggcccauuguagauauaaauguaaaggauuauagcauuguuuccaguuaugugugcucaggacuuguuggagacacacccagaaaaaacgacagcuucagcaguagccauugccuagauccuaacaaugaggaagguggucauggagugaaaggcugggccuuugaugauggaaaugacguguggaugggaagaacgaucagcgagaaguuacgcucagguuaugaaaccuucaaagucaucgaaggcugguccaaaccuaacuccaaauuacagauaaauaggcaaguuauaguugaaagagguaacagguccgguuauucugguauuuucuccguugaaggcaaaagcugcaucaaucggugcuuuuauguggaguugauaaggggaaggaaagaggaaacugaagucugguggaccucaaacaguauuguuguguuuuguggcaccucagguacauauggaacaggcucauggccugauggggcggauaucaaucucaugccuauauaa

SEQ ID NO: 53754 - RNA, 1410 nt, Artificial Sequence; identical to SEQ ID NO: 46237
  derived and/or modified CDS sequence (wt) from neuraminidase__InfluenzaA__AFD63892

SEQ ID NO: 53755 - RNA, 1410 nt, Artificial Sequence
  derived and/or modified CDS sequence (wt) from neuraminidase__InfluenzaA__AFD63903
augaauccaaaucaaaagauaauaacaauuggcucuguuucucucaccauugccgcaauaugcuuccuuaugcaaauugccauccugguaacuacuguaacauugcauuucaagcagcaugaaugcaacucccccccaaacaaccaaguaaugcugugugaaccaacaauaauagaaagaaacauaacagggauaguguaucugaccaacaccaccauagagaaggaaauaugccccaaacuagcagaauacagaaauuggucaaagccgcaauguaacauuacaggauuugcaccuuuuucuaaggacaauucgauucggcuuuccgcugguggggacaucugggugacaagagaaccuuaugugucaugcgauccugacaaguguuaucaauuugcccuugggcagggaacaacacuaaacaacgggcauucaaaugacacaguacaugauaggaccccuuaccggacccuauugaugaaugaauuggguguuccauuucauuugggaaccaggcaagugugcauagcaugguccagcucaaguugucacgauggaaaagcguggcugcauguuuguguaacuggggaugauaaaaaugcaacugcuagcuucauuuacaaugggaggcuuguagauaguauugguucaugguccaaaaaaauacucagaacccaggagucggaaugcguuuguaucaauggaacuuguacagugguaaugacugauggaagcgcuucaggaaaagcugauacuaaaauacuauucauugaggaggggaaaaucguucauauuagcacauugucaggaagugcucagcaugucgaggagugcuccuguuauccucgauauccuggugucagaugugucugcagagacaacuggaaaggcuccaauaggcccauuguagauauaaauguaaaggauuauagcauuguuuccaguuaugugugcucaggacuuguuggagacacacccagaaaaaacgacagcuucagcaguagccauugccuagauccuaacaaugaggaagguggucauggagugaaaggcugggccuuugaugauggaaaugacguguggaugggaagaacgaucagcgagaaguuacgcucagguuaugaaaccuucaaagucaucgaaggcugguccaaaccuaacuccaaauuacagauaaauaggcaaguuauaguugaaagagguaacagguccgguuauucugguauuuucuccguugaaggcaaaagcugcaucaaucggugcuuuuauguggaguugauaaggggaaggaaagaggaaacugaagucugguggaccucaaacaguauuguuguguuuuguggcaccucagguacauauggaacaggcucauggccugauggggcggauaucaaucucaugccuauauaa

SEQ ID NO: 53756 - RNA, 1410 nt, Artificial Sequence
  derived and/or modified CDS sequence (wt) from neuraminidase__InfluenzaA__AFD63914
augaauccaaaucaaaagauaauaacaauuggcucuguuucucucaccauugccgcaauaugcuuccuuaugcaaauugccauccugguaacuacuguaacauugcauuucaagcagcaugaaugcaacucccccccaaacaaccaaguaaugcugugugaaccaacaauaauagaaagaaacauaacagagauaguguaucugaccaacaccaccauagagaaggaaauaugccccaaacuagcagaauacagaaauuggucaaagccgcaauguaacauuacaggauuugcaccuuuuucuaaggacaauucgauucggcuuuccgcugguggggacaucugggugacaagagaaccuuaugugucaugcgauccugacaaguguuaucaauuugcccuugggcagggaacaacacuaaacaacgggcauucaaaugacacaguacaugauaggaccccuuaccggacccuauugaugaaugaauuggguguuccauuucauuugggaaccaggcaagugugcauagcaugguccagcucaaguugucacgauggaaaagcguggcugcauguuuguguaacuggggaugauaaaaaugcaacugcuagcuucauuuacaaugggaggcuuguagauaguauugguucaugguccaaaaaaauacucagaacccaggagucggaaugcguuuguaucaauggaacuuguacagugguaaugacugauggaagcgcuucaggaaaagcugauacuaaaauacuauucauugaggaggggaaaaucguucauauuagcacauugucaggaagugcucagcaugucgaggagugcuccuguuauccucgauauccuggugucagaugugucugcagagacaacuggaaaggcuccaauaggcccauuguagauauaaauguaaaggauuauagcauuguuuccaguuaugugugcucaggacuuguuggagacacacccagaaaaaacgacagcuucagcaguagccauugccuagauccuaacaaugaggaagguggucauggagugaaaggcugggccuuugaugauggaaaugacguguggaugggaagaacgaucagcgagaaguuacgcucagguuaugaaaccuucaaagucaucgaaggcugguccaaaccuaacuccaaauuacagauaaauaggcaaguuauaguugaaagagguaacagguccgguuauucugguauuuucuccguugaaggcaaaagcugcaucaaucggugcuuuuauguggaguugauaaggggaaggaaagagaaaacugaagucugguggaccucaaacaguauuguuguguuuuguggcaccucagguacauauggaacaggcucauggccugauggggcggauaucaaucucaugccuauauaa

SEQ ID NO: 53757 - RNA, 1410 nt, Artificial Sequence
  derived and/or modified CDS sequence (wt) from neuraminidase__InfluenzaA__AFD63925
augaauccaaaucaaaagauaauaacaauuggcucuguuucucucaccauugccacaauaugcuuccuuaugcaaauugccauccugguaacuacuguaacauugcauuucaagcaguaugaaugcaacucccccccaaacaaccaaguaaugcugugugaaccaacaauaauagaaagaaacauaacagagauaguguaucugaccaauaccacuauagagaaggaaauaugccccaaauuagcagaauacagaaauuggucaaagccgcaauguaacauuacaggauuugcaccuuuuucuaaggacaauucgauucggcuuuccgcugguggggacaucugggugacaagagagccuuaugugucaugcgauccugacaaguguuaccaauuugcccuugggcagggaacaacacuaaacaacggacauucaaaugacacaguacaugauaggaccccuuaccggacccuauugaugaaugaauuggguguuccauuucauuugggaaccaggcaaguguguauagcaugguccagcucaaguugucacgauggaaaagcauggcugcauguuuguguaacuggggaugauaaaaaugcaacugcuaguuucauuuacaaugggaggcuuguagauaguauugguucaugguccaaaaaaauacucagaacccaggagucggaaugcguuuguaucaauggaacuuguacaguaguaaugacugaugggagcgcuucaggaaaagcugauacuaaaauacuauucauugaggaggggaaaaucauucauauuagcacauugucaggaagugcucagcaugucgaggagugcuccuguuauccucgauauccuggugucagauguguaugccgagacaacuggaaaggcuccaauaggcccaucguagauauaaauguaaaggauuauagcauuguuuccaguuaugugugcucaggacuuguuggagacacacccagaaaaaacgacagcuccagcaguagccauugccuagauccuaacaaugaggaagguggucauggagugaaaggcugggccuuugaugauggaaaugacguguggaugggaagaacgaucagcgagaaguuacgcucagguuaugaaaccuucaaagucaucgaaggcugguccaaaccuaacuccaaauuacagauaaauaggcaagucauaguugaaagagguaacagguccgguuauucugguauuuucuccguugaaggcaaaagcugcaucaaucggugcuuuuauguggaguugauaaggggaaggaaagaggaaacugaagucugguggaccucaaacaguauuguuguguuuuguggcaccucagguacauauggaacaggcucauggccugauggggcggauaucaaucuaaugccuauauaa

SEQ ID NO: 53758 - RNA, 1410 nt, Artificial Sequence
  derived and/or modified CDS sequence (wt) from neuraminidase__InfluenzaA__AFD63936
augaauccaaaucaaaagauaauaacaauuggcucuguuucucucaccauugccacaauaugcuuccuuaugcaaauugccauccugguaacuacuguaacauugcauuucaagcagcaugaaugcaacccccccccaaacaaccaaguaaugcugugugaaccaacaauaauagaaagaaacauaacagagauaguguaucugaccaacaccaccauagagaaggaaauaugccccaaacuagcagaauacagaaauuggucaaagccgcaauguaacauuacaggauuugcaccuuuuucuaaggacaauucgauucggcuuuccgcugguggggacaucugggugacaagagaaccuuaugugucaugcgauccugauaaguguuaucaauuugcccuugggcagggaacaacacuaaacaacgggcauucaaaugacacaguacaugauaggaccccuuaccggacccuauugaugaaugaauuggguguuccauuucauuugggaaccaggcaagugugcauagcaugguccagcucaaguugucacgauggaaaagcauggcugcauguuugcguaacuggggaugauaaaaaugcaacugcuagcuucauuuacaaugggaggcuuguagauaguauugguucaugguccaaaaaaauacucagaacccaggagucggaaugcguuuguaucaauggaacuuguacaguaguaaugacugaugggagcgcuucaggaaaagcugauacuaaaauacuauucauugaggaggggaaaaucguucauauuagcacauugucaggaagugcucagcaugucgaggagugcuccuguuauccucgauauccuggugucagaugugucugcagagacaacuggaaaggcuccaauaggcccauuguagauauaaauguaaaggauuauagcauuguuuccaguuaugugugcucaggacuuguuggagacacacccagaaaaaacgacagcuucagcaguagccauugccuagauccuaacaaugaggaagguggucauggagugaaaggcugggccuuugaugauggaaaugacguguggaugggaagaacgaucagcgagaaguuacgcucagguuaugaaaccuucaaagucaucgaaggcugguccaaaccuaacuccaaauuacagauaaauaggcaaguuauaguugaaagagguaacagguccgguuauucugguauuuucuccguugaaggcaaaagcugcaucaaucggugcuuuuauguggaguugauaaggggaaggaaagaggaaacugaagucugguggaccucaaacaguauuguuguguuuuguggcaccucagguacauauggaacaggcucauggccugauggggcggauaucaaucucaugccuauauaa

SEQ ID NO: 53759 - RNA, 1410 nt, Artificial Sequence; identical to SEQ ID NO: 46784
  derived and/or modified CDS sequence (wt) from neuraminidase__InfluenzaA__AFD63947

SEQ ID NO: 53760 - RNA, 1410 nt, Artificial Sequence
  derived and/or modified CDS sequence (wt) from neuraminidase__InfluenzaA__AFD63958
augaauccaaaucaaaagauaauaacaauuggcucuguuucucucaccauugccgcaauaugcuuccuuaugcaaauugccauccugguaacuacuguaacauugcauuucaagcagcaugaaugcaacucccccccaaacaaccaaguaaugcugugugaaccaacaauaauagaaagaaacauaacagagauaguguaucugaccaacaccaccauagagaaggaaauaugccccaaacuagcagaauacagaaauuggucaaagccgcaauguaacauuacaggauuugcaccuuuuucuaaggacaauucgauucggcuuuccgcugguggggacaucugggugacaagagaaccuuaugugucaugcgauccugacaaguguuaucaauuugcccuugggcagggaacaacacuaaacaacgggcauucaaaugacacaguacaugauaggaccccuuaccggacccuauugaugaaugaauuggguguuccauuucauuugggaaccaggcaagugugcauagcaugguccagcucaaguugucacgauggaaaagcguggcugcauguuuguguaacuggggaugauaaaaaugcaacugcuagcuucauuuacaaugggaggcuuguagauaguauugguucaugguccaaaaaaauacucagaacccaggagucggaaugcguuuguaucaauggaacuugcacagugguaaugacugauggaagcgcuucaggaaaagcugauacuaaaauacuauucauugaggaggggaaaaucguucauauuagcacauugucaggaagugcucagcaugucgaggagugcuccuguuauccucgauauccuggugucagaugugucugcagagacaacuggaaaggcuccaauaggcccauuguagauauaaauguaaaggauuauagcauuguuuccaguuaugugugcucaggacuuguuggagacacacccagaaaaaacgacagcuucagcaguagccauugccuagauccuaacaaugaggaagguggucauggagugaaaggcugggccuuugaugauggaaaugacguguggaugggaagaacgaucagcgagaaguuacgcucagguuaugaaaccuucaaagucaucgaaggcugguccaaaccuaacuccaaauuacagauaaauaggcaaguuauaguugaaagagguaacagguccgguuauucugguauuuucuccguugaaggcaaaagcugcaucaaucggugcuuuuauguggaguugauaaggggaaggaaagaggaaacugaagucugguggaccucaaacaguauuguuguguuuuguggcaccucagguacauauggaacaggcucauggccugauggggcggauaucaaucucaugccuauauaa

SEQ ID NO: 53761 - RNA, 1410 nt, Artificial Sequence; identical to SEQ ID NO: 46784
  derived and/or modified CDS sequence (wt) from neuraminidase__InfluenzaA__AFD63969

SEQ ID NO: 53762 - RNA, 1410 nt, Artificial Sequence; identical to SEQ ID NO: 46784
  derived and/or modified CDS sequence (wt) from neuraminidase__InfluenzaA__AFD63980

SEQ ID NO: 53763 - RNA, 1410 nt, Artificial Sequence
  derived and/or modified CDS sequence (wt) from neuraminidase__InfluenzaA__AFD64002
augaauccaaaucaaaagauaauaacaauuggcucuguuucucucaccauugccgcaauaugcuuccuuaugcaaauugccauccugguaacuacuguaacauugcauuucaagcagcaugaaugcaacucccccccaaacaaccaaguaaugcugugugaaccaacaauaauagaaagaaacauaacagagauaguguaucugaccaacaccaccauagagaaggaaauaugccccaaacuagcagaauacagaaauuggucaaagccgcaauguaacauuacaggauuugcaccuuuuucuaaggacaauucgauucggcuuuccgcugguggggacaucugggugacaagagaaccuuaugugucaugcgauccugacaaguguuaucaauuugcccuugggcagggaacaacacuaaacaacgggcauucaaaugacacaguacaugauaggaccccuuaccggacccuauugaugaaugaauuggguguuccauuucauuugggaaccaggcaagugugcauagcaugguccagcucaaguugucacgauggaaaagcguggcugcauguuuguguaacuggggaugauaaaaaugcaacugcuagcuucauuuacaaugggaggcuuguagauaguauugguucaugguccaaaaaaauacucagaacccaggagucggaaugcguuuguaucaauggaacuuguacagugguaaugacugauggaagcgcuucaggaaaagcugauacuaaaauacuauucauugaggaggggaaaaucguucauauuagcacauugucaggaagugcucagcaugucgaggagugcuccuguuauccucgauauccuggugucagaugugucugcagagacaacuggaaaggcuccaauaggcccauuguagauauaaauguaaaggauuauagcauuguuuccaguuaugugugcucaggacuuguuggagacacacccagaaaaaccgacagcuucagcaguagccauugccuagauccuaacaaugaggaagguggucauggagugaaaggcugggccuuugaugauggaaaugacguguggaugggaagaacgaucagcgagaaguuacgcucagguuaugaaaccuucaaagucaucgaaggcugguccaaaccuaacuccaaauuacagauaaauaggcaaguuauaguugaaagagguaacagguccgguuauucugguauuuucuccguugaaggcaaaagcugcaucaaucggugcuuuuauguggaauugauaaggggaaggaaagaggaaacugaagucugguggaccucaaacaguauuguuguguuuuguggcaccucagguacauauggaacaggcucauggccugauggggcggauaucaaucucaugccuauauaa

SEQ ID NO: 53764 - RNA, 1410 nt, Artificial Sequence
  derived and/or modified CDS sequence (wt) from neuraminidase__InfluenzaA__AFD64013
augaauccaaaucaaaagauaauaacaauuggcucuguuucucucaccauugccacaauaugcuuccuuaugcaaauugccauccugguaacuacuguaacauugcauuucaagcagcaugaaugcaacucccccccaaacaaccaaguaaugcugugugaaccaacaauaauagaaagaaacauaacagagauaguguaucugaccaacaccaccauagagaaggaaauaugccccaaauuagcagaauacagaaauuggucaaagccgcaauguaacauuacaggauuugcaccuuuuucuaaggacaauucgauucggcuuuccgcugguggggacaucugggugacaagagaaccuuaugugucaugcgauccugacaaguguuaucaauuugcccuugggcagggaacaacacuaaacaacgggcauucaaauaacacaguacaugauaggaccccuuaccggacccuauugaugaaugaauuggguguuccauuucauuugggaaccaggcaagugugcauagcaugguccagcucaaguugucacgauggaaaagcauggcugcauguuuguguaacuggggaugauaaaaaugcaacugcuagcuucauuuacaaugggaggcuuguagauaguauugguucaugguccaaaaaaauacucagaacccaggagucggaaugcguuuguauuaauggaacuuguacaguaguaaugacugaugggagcgcuucaggaaaagcugauacuaaaauacuauucauugaggaggggaaaaucguucauauuagcacauugucaggaagugcucagcaugucgaggagugcuccuguuauccucgauauccuggugucagaugugucugcagagacaacuggaaaggcuccaauaggcccauuguagauauaaauguaaaggauuauagcauuguuuccaguuaugugugcucaggacuuguuggagacacacccagaaaaaacgacagcuucagcaguagccauugccuagauccuaacaaugaggaagguggucauggagugaaaggcugggccuuugaugauggaaaugacguguggaugggaagaacgaucagcgagaaguuacgcucagguuaugaaaccuucaaagucaucgaaggcugguccaaaccuaacuccaaauuacagauaaauaggcaaguuauaguugaaagagguaacagguccgguuauucugguauuuucuccguugaaggcaaaagcugcaucaaucggugcuuuuauguggaguugauaaggggaaggaaagaggaaacugaagucugguggaccucaaacaguauuguuguguuuuguggcaccucagguacauauggaacaggcucauggccugauggggcggauaucaaucucaugccuauauaa

SEQ ID NO: 53765 - RNA, 1410 nt, Artificial Sequence
  derived and/or modified CDS sequence (wt) from neuraminidase__InfluenzaA__AFD64024
augaauccaaaucaaaagauaauaacaauuggcucuguuucucucaccauugccgcaauaugcuuccuuaugcaaauugccauccugguaacuacuguaacauugcauuucaagcagcaugaaugcaacucccccccaaacaaccaaguaaugcugugugaaccaacaauaauagaaaaaaacauaacagagauaguguaucugaccaacaccaccauagagaaggaaauaugccccaaacuagcagaauacagaaauuggucaaagccgcaauguaacauuacaggauuugcaccuuuuucuaaggacaauucgauucggcuuuccgcugguggggacaucugggugacaagagaaccuuaugugucaugcgauccugacaaguguuaucaauuugcccuugggcagggaacaacacuaaacaacgggcauucaaaugacacaguacaugauaggaccccuuaccggacccuauugaugaaugaauuggguguuccauuucauuugggaaccaggcaagugugcauagcaugguccagcucaaguugucacgauggaaaagcguggcugcauguuuguguaacuggggaugauaaaaaugcaacugcuagcuucauuuacaaugggaggcuuguagauaguauugguucaugguccaaaaaaauacucagaacccaggagucggaaugcguuuguaucaauggaacuuguacagugguaaugacugauggaagcgcuucaggaaaagcugauacuaaaauacuauucauugaggaggggaaaaucguucauauuagcacauugucaggaagugcucagcaugucgaggagugcuccuguuauccucgauauccuggugucagaugugucugcagagacaacuggaaaggcuccaauaggcccauuguagauauaaauguaaaggauuauagcauuguuuccaguuaugugugcucaggacuuguuggagacacacccagaaaaaacgacagcuucagcaguagccauugccuagauccuaacaaugaggaagguggucauggagugaaaggcugggccuuugaugauggaaaugacguguggaugggaagaacgaucagcgagaaguuacgcucagguuaugaaaccuucaaagucaucgaaggcugguccaaaccuaacuccaaauuacagauaaauaggcaaguuauaguugaaagagguaacagguccgguuauucugguauuuucuccguugaaggcaaaagcugcaucaaucggugcuuuuauguggaguugauaaggggaaggaaagaggaaacugaagucugguggaccucaaacaguauuguuguguuuuguggcaccucagguacauauggaacaggcucauggccugauggggcggauaucaaucucaugccuauauaa

SEQ ID NO: 53766 - RNA, 1410 nt, Artificial Sequence
  derived and/or modified CDS sequence (wt) from neuraminidase__InfluenzaA__AFD64035
augaauccaaaucaaaagauaauaacaauuggcucuguuucucucaccauugccgcaauaugcuuccuuaugcaaauugccauccugguaacuacuguaacauugcauuucaagcagcaugaaugcaacucccccccaaacaaccaaguaaugcugugugaaccaacaauaauagaaagaaacauaacagagauaguguaucugaccaacaccaccauagagaaggaaauaugccccaaacuagcagaauacagaaauuggucaaagccgcaauguaacauuacaggauuugcaccuuuuucuaaggacaauucgauucggcuuuccgcugguggggacaucugggugacaagagaaccuuaugugucaugcgauccugacaaguguuaucaauuugcccuugggcagggaacaacacuaaacaacgggcauucaaaugacacaguacaugauaggaccccuuaccggacccuauugaugaaugaauuggguguuccauuucauuugggaaccaggcaagugugcauagcaugguccagcucaaguugucacgauggaaaagcguggcugcauguuuguguaacuggagaugauaaaaaugcaacugcuagcuucauuuacaaugggaggcuuguagauaguauugguucaugguccaaaaaaauacucagaacccaggagucggaaugcguuuguaucaauggaacuuguacagugguaaugacugauggaagcgcuucaggaaaagcugauacuaaaauacuauucauugaggaggggaaaaucguucauauuagcacauugucaggaagugcucagcaugucgaggagugcuccuguuauccucgauauccuggugucagaugugucugcagagacaacuggaaaggcuccaauaggcccauuguagauauaaauguaaaggauuauagcauuguuuccaguuaugugugcucaggacuuguuggagacacacccagaaaaaacgacagcuucagcaguagccauugccuagauccuaacaaugaggaagguggucauggagugaaaggcugggccuuugaugauggaaaugacguguggaugggaagaacgaucagcgagaaguuacgcucagguuaugaaaccuucaaagucaucgaaggcugguccaaaccuaacuccaaauuacagauaaauaggcaaguuauaguugaaagagguaacagguccgguuauucugguauuuucuccguugaaggcaaaagcugcaucaaucggugcuuuuauguggaguugauaaggggaaggaaagaggaaacugaagucugguggaccucaaacaguguuguuguguuuuguggcaccucagguacauauggaacaggcucauggccugauggggcggauaucaaucucaugccuauauaa

SEQ ID NO: 53767 - RNA, 1410 nt, Artificial Sequence
  derived and/or modified CDS sequence (wt) from neuraminidase__InfluenzaA__AFD64046
augaauccaaaucaaaagauaauaacaauuggcucuguuucucucaccauugccacaauaugcuuccuuaugcaaauugccauccugguaacuacuguaacauugcauuucaagcagcaugaaugcaacucccccccaaacaaccaaguaaugcugugugaaccaacaauaauagaaagaaacauaacagagauaguguaucugaccaacaccaccauagagaaggaaauaugccccaaacuagcagaauacagaaauuggucaaagccgcaauguaacauuacaggauuugcaccuuuuucuaaggacaauucgauucggcuuuccgcugguggggacaucugggugacaagagaaccuuaugugucaugcgacccugacaaguguuaucaauuugcccucgggcagggaacaacacuaaacaacgggcauucaaaugacacaguacaugagaggaccccuuaccggacccuauugaugaaugaauuggguguuccauuucauuugggaaccaggcaagugugcauagcaugguccagcucaaguugucacgauggaaaagcguggcugcauguuuguguaacuggggaugauaaaaaugcaacugcuagcuucauuuacaaugggaggcuuguagauaguauugguucaugguccaaaaaaauacucagaacccaggagucggaaugcguuuguaucaauggaacuuguacaguaguaaugacugaugggagcgcuucaggaaaagcugauacuaagauacuauucauugaggaggggaaaaucguucauauuagcacauugucaggaagugcucagcaugucgaggagugcuccuguuauccucgauauccuggugucagaugugucugcagagacaacuggaaaggcuccaauaggcccauuguagauauaaauguaaaggauuauagcauuguuuccaguuaugugugcucaggacuuguuggagacacacccagaaaaaacgacagcuucagcaguagccauugccuagauccuaacaaugaggaagggggucauggagugaaaggcugggccuuugaugauggaaaugacguguggaugggaagaacgaucagcgagaaguuacgcucagguuaugaaaccuucaaagucaucgaaggcugguccaaaccuaacuccaaauuacagauaaauaggcaaguuauaguugaaagagguaacagguccgguuauucugguauuuucuccguugaaggcaaaagcugcaucaaucggugcuuuuauguggaguugauaaggggaaggaaagaggaaacugaagucugguggaccucaaacaguauuguuguguuuuguggcaccucagguacauauggaacaggcucauggccugauggggcggauaucaaucucaugccuauauaa

SEQ ID NO: 53768 - RNA, 1410 nt, Artificial Sequence; identical to SEQ ID NO: 53749
  derived and/or modified CDS sequence (wt) from neuraminidase__InfluenzaA__AFD64057

SEQ ID NO: 53769 - RNA, 1410 nt, Artificial Sequence
  derived and/or modified CDS sequence (wt) from neuraminidase__InfluenzaA__AFD64068
augaauccaaaucaaaagauaauaacgauuggcucuguuucucucaccauuuccacaauaugcuucuucaugcaaauugccaucuugauaacuacuguaacauugcauuucaagcaauaugaauucaacucccccccaaacaaccaagugaugcugugugaaccaacaauaauagaaagaaacauaacagagauaguguaucugaccaacaccaccauagagaaggaaauaugccccaaacuagcagaauacagaaauuggucaaagccgcaaugugacauuacaggauuugcaccuuuuucuaaggacaauucgauuaggcuuuccgcugguggggacaucugggugacaagagaaccuuaugugucaugcgauccugacaaguguuaucaauuugcccuuggacagggaacaacacuaaacaacgugcauucaaaugacacaguacauaauaggaccccuuaucggacccuauugaugaaugaguuagguguuccauuucaucuggggaccaagcaagugugcauagcaugguccagcucaaguugucacgauggaaaagcauggcugcauguuuguguaacgggggaugauaaaaaugcaacugcuagcuucauuuacaaugggaggcuuguagauaguauuguuucaugguccaaaaaaauccucaggacccaggagucagaaugcguuuguaucaauggaacuuguacaguaguaaugacugaugggagugcuucaggaaaagcugauacuaaaauacuauucauugaggaggggaaaaucguucauacuagcacauugucaggaagugcucagcaugucgaggagugcuccugcuauccucgauauccuggugucagaugugucugcagagacaacuggaaaggcuccaauaggcccaucguagauauaaacauaaaggauuauagcauuguuuccaguuaugugugcucaggacuuguuggagacacacccagaaaaaacgacagcuccagcaguagccauugcuuggauccuaacaaugaagaagguggucauggagugaaaggcugggccuuugaugauggaaaugacguguggaugggaagaacgaucagcgagaagucacgcucaggauaugaaaccuucaaagucauugaaggcugguccaacccuaauuccaaauugcagauaaauaggcaagucauaguugacagagguaauagguccgguuauucugguauuuucucuguugaaggcaaaagcugcaucaaucggugcuuuuauguggaguugauaaggggaagaaaagaggaaacugaagucuuguggaccucaaacaguauuguuguguuuuguggcaccucagguacauauggaacaggcucauggccugauggggcggacaucaaucucaugccuauauaa

SEQ ID NO: 53770 - RNA, 1410 nt, Artificial Sequence
  derived and/or modified CDS sequence (wt) from neuraminidase__InfluenzaA__AFD64079
augaauccaaaucaaaagauaauaacaauuggcucuguuucucucaccauugccgcaauaugcuuccuuaugcaaauugccauccugguaacuacuguaacauugcauuucaagcagcaugaaugcaacucccccccaaacaaccaaguaaugcugugugaaccaacaauaauagaaagaaacauaacagagauaguguaucugaccaacaccaccauagagaaggaaauaugccccaaacuagcagaauacagaaauuggucaaagccgcaauguaacauuacaggauuugcaccuuuuucuaaggacaauucgauucggauuuccgcugguggggacaucugggugacaagagaaccuuaugugucaugcgauccugacaaguguuaucaauuugcccuugggcagggaacaacacuaaacaacgggcauucaaaugacacaguacaugauaggaccccuuaccggacccuauugaugaaugaauuggguguuccauuucauuugggaaccaggcaagugugcauagcaugguccagcucaaguugucacgauggaaaagcguggcugcauguuuguguaacuggggaugauaaaaaugcaacugcuagcuucauuuacaaugggaggcuuguagauaguauugguucaugguccaaaaaaauacucagaacccaggagucggaaugcguuuguaucaauggaacuuguacagugguaaugacugauggaagcgcuucaggaaaagcugauacuaaaauacuauucaucgaggaggggaaaaucguucauauuagcacauugucaggaagugcucagcaugucgaggagugcuccuguuauccucgauauccuggugucagaugugucugcagagacaacuggaaaggcuccaauaggcccauuguagauauaaauguaaaggauuauagcauuguuuccaguuaugugugcucaggacuuguuggagacacacccagaaaaaacgacagcuucagcaguagccauugccuagauccuaacaaugaggaagguggucauggagugaaaggcugggccuuugaugauggaaaugacguguggaugggaagaacgaucagcgagaaguuacgcucagguuaugaaaccuucaaagucaucgaaggcugguccaaaccuaacuccaaauuacagauaaauaggcaaguuauaguugaaagagguaacagguccgguuauucugguauuuucuccguugaaggcaaaagcugcaucaaucggugcuuuuauguggaguugauaaggggaaggaaagaggaaacugaagucugguggaccucaaacaguauuguuguguuuuguggcaccucagguacauauggaacaggcucauggccugauggggcggauaucaaucucaugccuauauaa

SEQ ID NO: 53771 - RNA, 1410 nt, Artificial Sequence; identical to SEQ ID NO: 46784
  derived and/or modified CDS sequence (wt) from neuraminidase__InfluenzaA__AFD64090

SEQ ID NO: 53772 - RNA, 1410 nt, Artificial Sequence
  derived and/or modified CDS sequence (wt) from neuraminidase__InfluenzaA__AFD64101
augaauccaaaucaaaagauaauaacaauuggcucuguuucucucaccauugccgcaauaugcuuccuuaugcaaauugccauccugguaacuacuguaacauugcauuucaagcagcaugaaugcaacucccccccaaacaaccaaguaaugcugugugaaccaacaauaauagaaagaaacauaacagagauaguguaucugaccaacaccaccauagagaaggaaauaugccccaaacuagcagaauacagaaauuggucaaagccgcaauguaacauuacaggauuugcaccuuuuucuaaggacaauucgauucggcuuuccgcugguggggacaucugggugacaagagaaccuuaugugucaugcgauccugacaaguguuaucaauuugcccuugggcagggaacaacacuaaacaacgggcauucaaaugacacaguacaugguaggaccccuuaccggacccuauugaugaaugaauuggguguuccauuucauuugggaaccaggcaagugugcauagcaugguccagcucaaguugucacgauggaaaagcguggcugcauguuuguguaacuggggaugauaaaaaugcaacugcuagcuucauuuacaaugggaggcuuguagauaguauugguucaugguccaaaaaaauacucagaacccaggagucagaaugcguuuguaucaauggaacuuguacagugguaaugacugauggaagcgcuucaggaaaagcugauacuaaaauacuauucauugaggaggggaaaaucguucauauuagcacauugucaggaagugcucagcaugucgaggagugcuccuguuauccucgauauccuggugucagaugugucugcagagacaacuggaaaggcuccaauaggcccauuguagauauaaauguaaaggauuauagcauuguuuccaguuaugugugcucaggacuuguuggagacacacccagaaaaaacgacagcuucagcaguagccauugccuagauccuaacaaugaggaagguggucauggagugaaaggcugggccuuugaugauggaaaugacguguggaugggaagaacgaucagcgagaaguuacgcucagguuaugaaaccuucaaagucaucgaaggcugguccaaaccuaacuccaaauuacagauaaauaggcaaguuauaguugaaagagguaacagguccgguuauucugguauuuucuccguugaaggcaaaagcugcaucaaucggugcuuuuauguggaguugauaaggggaaggaaagaggaaacugaagucugguggaccucaaacaguauuguuguguuuuguggcaccucagguacauauggaacaggcucauggccugauggggcggauaucaaucucaugccuauauaa

SEQ ID NO: 53773 - RNA, 1410 nt, Artificial Sequence
  derived and/or modified CDS sequence (wt) from neuraminidase__InfluenzaA__AFD64112
augaauccaaaucaaaagauaauaacaauuggcucuguuucucucaccauugccacaauaugcuuccuuaugcaaauugccauccugguaacuacuguaacauugcauuucaagcaguaugaaugcaacucccccccaaacaaccaaguaaugcugugugaaccaacaauaauagaaagaaacauaacagagauaguguaucugaccaauaccacuauagagaaggaaauaugccccaaauuagcagaauacagaaauuggucaaagccgcaauguaacauuacaggauuugcaccuuuuucuaaggacaauucgauucggcuuuccgcugguggggacaucugggugacaagagagccuuaugugucaugcgauccugacaaguguuaucaauuugcccuugggcagggaacaacacuaaacaacggacauucaaaugacacaguacaugauaggaccccuuaccggacccuauugaugaaugaauuggguguuccauuucauuugggaaccaggcaaguguguauagcaugguccagcucaaguugucacgauggaaaagcauggcugcauguuuguguaacuggggaugauaaaaaugcaacugcuaguuucauuuacaaugggaggcuuguagauaguauugguucaugguccaaaaaaauacucagaacccaggagucggaaugcguuuguaucaauggaacuuguacaguaguaaugacugaugggagcgcuucaggaaaagcugauacuaaaauacuauucauugaggaggggaaaaucauucauauuagcacauugucaggaagugcucagcaugucgaggagugcuccuguuauccucgauauccuggugucagauguguaugccgagacaacuggaaaggcuccaauaggcccaucguagauauaaauguaaaggauuauagcauuguuuccaguuaugugugcucaggacuuguuggagacacacccagaaaaaacgacagcuccagcaguagccauugccuagauccuaacaaugaggaagguggucauggagugaaaggcugggccuuugaugauggaaaugacguguggaugggaagaacgaucagcgagaaguuacgcucagguuaugaaaccuucaaagucaucgaaggcugguccaaaccuaacuccaaauuacagauaaauaggcaagucauaguugaaagagauaacagguccgguuauucugguauuuucuccguugaaggcaaaagcugcaucaaucggugcuuuuauguggaguugauaaggggaaggaaagaggaaacugaagucugguggaccucaaacaguauuguuguguuuuguggcaccucagguacauauggaacaggcucauggccugauggggcggauaucaaucucaugccuauauaa

SEQ ID NO: 53774 - RNA, 1410 nt, Artificial Sequence; identical to SEQ ID NO: 53734
  derived and/or modified CDS sequence (wt) from neuraminidase__InfluenzaA__AFD64123

SEQ ID NO: 53775 - RNA, 1410 nt, Artificial Sequence
  derived and/or modified CDS sequence (wt) from neuraminidase__InfluenzaA__AFD64134
augaauccaaaucaaaagauaauaacaauuggcucuguuucucucaccauugccgcaauaugcuuccuuaugcaaauugccauccugguaacuacuguaacauugcauuucaagcagcaugaaugcaacucccccccaaacaaccaaguaaugcugugugaaccaacaauaauagaaagaaacauaacagagauaguguaucugaccaacaccaccauagagaaggaaauaugccccaaacuagcagaauacagaaauuggucaaagccgcaauguaacauuacaggauuugcaccuuuuucuaaggacaauucgauucggcuuuccgcugguggggacaucugggugacaagagaaccuuaugugucaugcgauccugacaaguguuaucaauuugcccuugggcagggaacaacacuaaacaacgggcauucaaacgacacaguacaugauaggaccccuuaccggacccuauugaugaaugaauuggguguuccauuucauuugggaaccaggcaagugugcauagcaugguccagcucaaguugucacgauggaaaagcguggcugcauguuuguguaacuggggaugauaaaaaugcaacugcuagcuucauuuacaaugggaggcuuguagauaguauugguucaugguccaaaaaaauacucagaacccaggagucggaaugcguuuguaucaauggaacuuguacagugguaaugacugauggaagcgcuucaggaaaagcugauacuaaaauacuauucauugaggaggggaaaaucguucauauuagcacauugucaggaagugcucagcaugucgaggagugcuccuguuauccucgauauccuggugucagaugugucugcagagacaacuggaaaggcuccaauaggcccauuguagauauaaauguaaaggauuauagcauuguuuccaguuaugugugcucaggacuuguuggagacacacccagaaaaaacgacagcuucagcaguagccauugccuagauccuaacaaugaggaagguggucauggagugaaaggcugggccuuugaugauggaaaugacguguggaugggaagaacgaucagcgagaaguuacgcucagguuaugaaaccuucaaagucaucgaaggcugguccaaaccuaacuccaaauuacagauaaauaggcaaguuauaguugaaagagguaacagguccgguuauucugguauuuucuccguugaaggcaaaagcugcaucaaucggugcuuuuauguggaguugauaaggggaaggaaagaggaaacugaagucugguggaccucaaacaguauuguuguguuuuguggcaccucagguacauauggaacaggcucauggccugauggggcggauaucaaucucaugccuauauaa

SEQ ID NO: 53776 - RNA, 1410 nt, Artificial Sequence; identical to SEQ ID NO: 46784
  derived and/or modified CDS sequence (wt) from neuraminidase__InfluenzaA__AFD64145

SEQ ID NO: 53777 - RNA, 1410 nt, Artificial Sequence; identical to SEQ ID NO: 46784
  derived and/or modified CDS sequence (wt) from neuraminidase__InfluenzaA__AFD64156

SEQ ID NO: 53778 - RNA, 1410 nt, Artificial Sequence
  derived and/or modified CDS sequence (wt) from neuraminidase__InfluenzaA__AFD64167
augaauccaaaucaaaagauaauaacaauuggcucuguuucucucaccauugccacaauaugcuuccuuaugcaaauugccauccugguaacuacuguaacauugcauuucaagcagcaugaaugcaacucccccccaaacaaccaaguaaugcugugugaaccaacaauaauagaaagaaacauaacagagauaguguaucuuaccaacaccaccauagagaaggaaauaugccccaaacuagcagaauacagaaauuggucaaagccgcaauguaacauuacaggauuugcaccuuuuucuaaggacaauucgauucggcuuucugcugguggggacaucugggugacaagagaaccuuaugugucaugcgauccugacaaguguuaucaauuugcccuugggcagggaacaacacuaaacaacgggcauucaaaugacacaguacaugauaggaccccuuaccggacccuauugaugaaugaauuggguguuccauuucauuugggaaccaggcaagugugcauagcaugguccagcucaaguugucacgauggaaaagcauggcugcauguuuguguaacuggggaugauaaaaaugcaacugcuagcuucauuuacaaugggaggcuuguagauaguauugguucaugguccaaaaaaauacucagaacccaggagucggaaugcguuuguaucaauggaacuuguacaguaguaaugacugaugggagcgcuucaggaaaagcugauacuaaaauacuauucauugaggaggggaaaaucguucauauuagcacauugucaggaagugcucagcaugucgaggagugcuccuguuauccucgauauccuggugucagaugugucugcagagacaacuggaaaggcuccaauaggcccauuguagauauaaauguaaaggauuauagcauuguuuccaguuaugugugcucaggacuuguuggagacacacccagaaaaaacgacagcuucagcaguagccauugccuagauccuaacaaugaggaagguggucauggagugaaaggcugggccuuugaugauggaaaugacguguggaugggaagaacgaucagcgagaaguuacgcucagguuaugaaaccuucaaagucaucgaaggcugguccaaaccuaacuccaaauuacagauaaauaggcaaguuauaguugaaagagguaacagguccgguuauucugguauuuucuccguugaaggcaaaagcugcaucaaucggugcuuuuauguggaguugauaaggggaaggaaagaggaaacugaagucugguggaccucaaacaguauuguuguguuuuguggcaccucagguacauauggaacaggcucauggccugauggggcggauaucaaucucaugccuauauaa

SEQ ID NO: 53779 - RNA, 1410 nt, Artificial Sequence
  derived and/or modified CDS sequence (wt) from neuraminidase__InfluenzaA__AFD64181
augaauccaaaucaaaagauaauaacaauuggcucuguuucucucaccauugccgcaauaugcuuccuuaugcaaauugccauccugguaacuacuguaacauugcauuucaagcagcaugaaugcaacucccccccaaacaaccaaguaaugcugugugaaccaacaauaauagaaagaaacauaacagagauaguguaucugaccaacaccaccauagagaaggaaauaugccccaaacuagcagaauacagaaauuggucaaagccucaauguaacauuacaggauuugcaccuuuuucuaaggacaauucgauucggcuuuccgcugguggggacaucugggugacaagagaaccuuaugugucaugcgauccugacaaguguuaucaauuugcccuugggcagggaacaacacuaaacaacgggcauucaaaugacacaguacaugauaggaccccuuaccggacccuauugaugaaugaauuggguguuccauuucauuugggaaccaggcaagugugcauagcaugguccagcucaaguugucacgauggaaaagcguggcugcauguuuguguaacuggggaugauaaaaaugcaacugcuagcuucauuuacaaugggaggcuuguagauaguauugguucaugguccaaaaaaauacucagaacccaggagucggaaugcguuuguaucaauggaacuuguacagugguaaugacugauggaagcgcuucaggaaaagcugauacuaaaauacuauucauugaggaggggaaaaucguucauauuagcacauugucaggaagugcucagcaugucgaggagugcuccuguuauccucgauauccuggugucagaugugucugcagagacaacuggaaaggcuccaauaggcccauuguagauauaaauguaaaggauuauagcauuguuuccaguuaugugugcucaggacuuguuggagacacacccagaaaaaacgacagcuucagcaguagccauugccuagauccuaacaaugaggaagguggucauggagugaaaggcugggccuuugaugauggaaaugacguguggaugggaagaacgaucagcgagaaguuacgcucagguuaugaaaccuucaaagucaucgaaggcugguccaaaccuaauuccaaauuacagauaaauaggcaaguuauaguugaaagagguaacagguccgguuauucugguauuuucuccguugaaggcaaaagcugcaucaaucggugcuuuuauguggaguugauaaggggaaggaaagaggaaacugaagucugguggaccucaaacaguauuguuguguuuuguggcaccucagguacauauggaacaggcucauggccugauggggcggauaucaaucucaugccuauauaa

SEQ ID NO: 53780 - RNA, 1410 nt, Artificial Sequence
  derived and/or modified CDS sequence (wt) from neuraminidase__InfluenzaA__AFD64192
augaauccaaaucaaaagauaauaacaauuggcucuguuucucucaccauugccgcaauaugcuuccuuaugcaaauugccauccugguaacuacuguaacauugcauuucaagcagcaugaaugcaacucccccccaaacaaccaaguaaugcugugugaaccaacaauaauagaaagaaacauaacagagauaguguaucugaccaacaccaccauagagaaggaaauaugccccaaacuagcagaauacagaaauuggucaaagccgcaauguaacauuacaggauuugcaccuuuuucuaaggacaauucgauucggcuuuccgcugguggggacaucugggugacaagagaaccuuaugugucaugcgauccugacaaguguuaucaauuugcccuugggcagggaacaacacuaaacaacgggcauucaaaugacacaguacaugauaggaccccuuaccggacccuauugaugaaugaauuggguguuccauuucauuugggaaccaggcaagugugcauagcaugguccagcucaaguugucacgauggaaaagcguggcugcauguuuguguaacuggggaugauaaaaaugcaacugcuagcuucauuuacaaugggaggcuuguagauaguauugguucaugguccaaaaaaauacucagaacccaggagucggaaugcguuuguaucaauggaacuuguacagugguaaugacugauggaagcgcuucaggaaaagcugauacuaaaauacuauucauugaggaggggaaaaucguucauguuagcacauugucaggaagugcucagcaugucgaggagugcuccuguuauccucgauauccuggugucagaugugucugcagagacaacuggaaaggcuccaauaggcccauuguagauauaaauguaaaggauuauagcauuguuuccaguuaugugugcucaggacuuguuggagacacacccagaaaaaacgacagcuucagcaguagccauugccuagauccuaacaaugaggaagguggucauggagugaaaggcugggccuuugaugauggaaaugacguguggaugggaagaacgaucagcgagaaguuacgcucagguuaugaaaccuucaaagucaucgaaggcugguccaaaccuaacuccaaauuacagauaaauaggcaaguuauaguugaaagagguaacagguccgguuauucugguauuuucuccguugaaggcaaaagcugcaucaaucggugcuuuuauguggaguugauaaggggaaggaaagaggaaacugaagucugguggaccucaaacaguauuguuguguuuuguggcaccucagguacauauggaacaggcucauggccugauggggcggauaucaaucucaugccuauauaa

SEQ ID NO: 53781 - RNA, 1410 nt, Artificial Sequence
  derived and/or modified CDS sequence (wt) from neuraminidase__InfluenzaA__AFD64203
augaauccaaaucaaaagauaauaacaauuggcucuguuucucucaccauugccgcaauaugcuuccuuaugcaaauugccauccugguaacuacuguaacauugcauuucaagcagcaugaaugcaacucccccccaaacaaccaaguaaugcugugugaaccaacaauaauagaaagaaacauaacagagauaguguaucugaccaacaccaccauagagaaggaaauaugccccaaacuagcagaauacagaaauuggucaaagccgcaauguaacauuacaggauuugcaccuuuuucuaaggacaauucgauucggcuuuccgcugguggggacaucugggugacaagagaaccuuaugugucaugcgauccugacaaguguuaucaauuugcccuugggcagggaacaacacuaaacaacaggcauucaaaugacacaguacaugauaggaccccuuaccggacccuauugaugaaugaauuggguguuccauuucauuugggaaccaggcaagugugcauagcaugguccagcucaaguugucacgauggaaaagcguggcugcauguuuguguaacuggggaugauaaaaaugcaacugcuagcuucauuuacaaugggaggcuuguagauaguauugguucaugguccaaaaaaauacucagaacccaggagucggaaugcguuuguaucaauggaacuuguacagugguaaugacugauggaagcgcuucaggaaaagcugauacuaaaauacuauucauugaggaggggaaaaucguucauauuagcacauugucaggaagugcucagcaugucgaggagugcuccuguuauccucgauauccuggugucagaugugucugcagagacaacuggaaaggcuccaauaggcccauuguagauauaaauguaaaggauuauagcauuguuuccaguuaugugugcucaggacuuguuggagacacacccagaaaaaacgacagcuucagcaguagccauugccuagauccuaacaaugaggaagguggucauggagugaaaggcugggccuuugaugauggaaaugacguguggaugggaagaacgcucagcgagaaguuacgcucagguuaugaaaccuucaaagucaucgaaggcugguccaaaccuaacuccaaauuacagauaaauaggcaaguuauaguugaaagagguaacagguccgguuauucugguauuuucuccguugaaggcaaaagcugcaucaaucggugcuuuuauguggaguugauaaggggaaggaaagaggaaacugaagucugguggaccucaaacaguauuguuguguuuuguggcaccucagguacauauggaacaggcucauggccugauggggcggauaucaaucucaugccuauauaa

SEQ ID NO: 53782 - RNA, 1410 nt, Artificial Sequence
  derived and/or modified CDS sequence (wt) from neuraminidase__InfluenzaA__AFD64214
augaauccaaaucaaaagauaauaacaauuggcucuguuucucucaccauugccacaauaugcuuccuuaugcaaauugccauccugguaacuacuguaacauugcauuucaagcaguaugaaugcaacucccccccaaacaaccaaguaaugcugugugaaccaacaauaauagaaagaaacauaacagagauaguguaucugaccaauaccacuauagagaaggaaauaugccccaaauuagcagaauacagaaauuggucaaagccgcaauguaacauuacaggauuugcaccuuuuucuaaggacaauucgauucggcuuuccgcugguggggacaucugggugacaagagagccuuaugugucaugcgauccugacaaguguuaucaauuugcccuugggcagggaacaacacuaaacaacgggcauucaaaugacacaguacaugauaggaccccuuaccggacccuauugaugaaugaauuggguguuccauuucauuugggaaccaggcaagugugcauagcaugguccagcucaaguugucacgauggaaaagcauggcugcauguuuguguaacuggggaugauaaaaaugcaacugcuaguuucauuuacaaugggaggcuuguagauaguauugguucaugguccaaaaaaauacucagaacccaggagucggaaugcguuuguaucaauggaacuuguacaguaguaaugacugaugggagcgcuucaggaaaagcugauacuaaaauacuauucauugaggaggggaaaaucauucauauuagcacauugucaggaagugcucagcaugucgaggagugcuccuguuauccucgauauccuggugucagauguguaugccgagacaacuggaaaggcuccaauaggcccaucguagauauaaauguaaaggauuauagcauuguuuccaguuaugugugcucaggacuuguuggagacacacccagaaaaaacgacagcuccagcaguagccauugccuagauccuaacaaugaggaagguggucauggagugaagggcugggccuuugaugauggaaaugacguguggaugggaagaacgaucagcgagaaguuacgcucagguuaugaaaccuucaaagucaucgaaggcugguccaaaccuaacuccaaauuacagauaaauaggcaagucauaguugaaagagguaacagguccgguuauucugguauuuucuccguugaaggcaaaagcugcaucaaucggugcuuuuauguggaguugauaaggggaaggaaagaggaaacugaagucugguggaccucaaacaguauuguuguguuuuguggcaccucagguacauauggaacaggcucauggccugauggggcggauaucaaucucaugccuauauaa

SEQ ID NO: 53783 - RNA, 1410 nt, Artificial Sequence
  derived and/or modified CDS sequence (wt) from neuraminidase__InfluenzaA__AFD64225
augaauccaaaucaaaagauaauaacgauuggcucuguuucucucaccauuuccacaauaugcuucuucaugcaaauugccauccugauaacuacuguaacauugcauuucaagcaauaugaauucaacucccccccaaacaaccaagugaugcugugugaaccaacaauaauagaaagaaacauaacagagauaguguaucugaccaacaccaccauagagaaggaaauaugccccaaacuagcagaauacagaaauuggucaaagccgcaauguaacauuacaggauuugcaccuuuuucuaaggacaauucgauucggcuuuccgcugguggggacaucugggugacaagagaaccuuaugugucaugcgauccugacaaguguuaucaauuugcccuuggacagggaacaacacuaaacaacgugcauucaaaugacacaguacaugauaggaccccuuaucggacccuauugaugaaugaguuggguguuccauuucaucuggggaccaagcaagugugcauagcaugguccagcucaaguugucacgauggaaaggcauggcugcauguuuguguaacgggggaugaugaaaaugcaacugcuagcuucauuuacaaugggaggcuuguagauaguauuguuucaugguccaaaaaaauccucaggacccaggagucagaaugcguuuguaucaauggaacuuguacaguaguaaugacugaugggagugcuucaggaaaagcugauacuaaaauacuauucauugaggaggggaaaaucguucauacuagcacauugucaggaagugcucagcaugucgaggagugcuccuguuauccucgauauccuggugucagaugugucugcagagacaacuggaaaggcuccaauaggcccaucguagauauaaacauaaaggauuauagcauuguuuccaguuaugugugcucaggacuuguuggagacacacccagaaaaaacgacagcuccagcaguagccauugcuuggauccaaacaaugaggaagguggucauggagugaaaggcugggccuuugaugauggaaaugacguguggaugggaagaacgaucagcgagaaguuacgcucaggauaugaaaccuucaaagucauugaaggcugguccaacccuaacuccaaauugcagauaaauaggcaagucauaguugacagagguaauagguccgguuauucugguauuuucucuguugaaggcaaaagcugcaucaaucggugcuuuuauguggaguugauaaggggaagaaaacaagaaacugaagucuuguggaccucaaacaguauuguuguguuuuguggcaccucagguacauauggaacaggcucauggccugauggggcggacaucaaucucaugccuauauaa

SEQ ID NO: 53784 - RNA, 1410 nt, Artificial Sequence; identical to SEQ ID NO: 46784
  derived and/or modified CDS sequence (wt) from neuraminidase__InfluenzaA__AFD64317

SEQ ID NO: 53785 - RNA, 1410 nt, Artificial Sequence; identical to SEQ ID NO: 53734
  derived and/or modified CDS sequence (wt) from neuraminidase__InfluenzaA__AFD64328
